United States Patent Application Publication US 2014/0057251 A1 - sequence listing, part 58

SEQ ID NO: 80611 - DNA, 2023 bp, Cannabis sativa
ttttgttgttaattttttttatttgtacattatttttcatgttgttgttttcttgttacattcttattactttgttgtatttttatagaatatcgtaaaaatatattaaaaaaaaattgaacgtaaaaaatataatattttttttacaaaaattaatgttttatgtaattatcccttaattatacatatatatatattatataaatatagcatttcaaacatactttgactcatgcttgaatttccaatccaaactcatgtttgaaatatttttttttttcttaatttggtggatgaaccatgaaaggtgcttgctcatctagaactataaaagttttaattaataataataaaaaaattgactcggttgctccttagaacaaaagaaataatgatgcgtacacttaaaatttgtaccaaaattagtttataaataagacaatactaaaagaaattcttatgaatgtcaaatcaatttcatcgaattgaaaataactagtgtaattcaaattatttagtaataaataaagataaatattattttaaattttatattttttaaaagtattaaattctctatttttattaaataatcattcagattttatatcttttaaaataataaaaaaaaatttaataataacttgatttaaaaattacatattttgtttctactaaaaattatttttatgttagttatattaaaattaaaaaaaatatataacaaaaattgaatttaggatttattttgtactattaaaaaataagaaatttaattttttttattgaagtatttatacatacatttcattgtaaagcataagattcgattttaaaactccccacacacataccttctcatattctcttatagtcacttgagttagcctcaaatgattaggtctaaattattctttaacaaaatcgataatctaatcgtaatttttacaaaatagagaagtcaaaataataatattatttacatttattatttattactaaatacttttgaatcacactaattatttccaatttgatcaaattgatttcacattcataagaattcctttagaaaagaaaagaaaagttcaataatgaaaggttatctaacaaattattatgttatgtgagataaggacattgatgttgattctcttctctctagtatgacattgttgaatattttttttgttggtaaagagaaagagatattagatgatataagaaagaagaagaagaaaaggataggatagggaaggggtattttggtaatttggaggaaggcaaaaagtagagttttgtctgtattatggacttggtcgtagggaatcaatttggcagacgccgactttatctttgtggtccccacaaaccacgtaactcgacacgtcacacgtttagaactcgttaagtccacacatacgacacgtgtcctattcttactgctaagtcggataagccggtgcagaggtgaagagcactttcaatttctcttttctcgtgagtatttctttttctcgcgatattattattcaattaataatgctactattgcatgtgatttttataagtgtgaagtacaacaaaattgtgatagttataaagatatttacatcatttcaaaatatatatgatatatttttttttttatttaccttatgtaaaaattataacttttaaatatttttatatgatagtgtatattataattgtaataataaatagtggctaactaataatgtgaaattctaaattagtataataggtttattaatgatttgattcgtgatattgtttattagatgtattttttctttgatctttatgtcatgtttctcggtattctaatgttgtggctcatgaccttgttagctttactcttcgggtggatattgattatgtttggagggccactatatcttatcttataatgttgttaatgacaaactcatttattaatctacaataatttttctcttaaaaaatgatatatagtttaactctttcttataaaattatcaat

SEQ ID NO: 80612 - DNA, 767 bp, Cannabis sativa
tactttagattaaaatatataaaacccgatactaaattacaccttaccaacattcaaacataaaaaagatcaaacatttggtttagtactatccacaatcattaagcttctactcaaatcacaaaactttattcatgactttccattagcaaatgacaagaacccaaatacaaaatcgaaaagaagaaaaggaaagattcatacttgtcaacaaaagcttcaaccacagctcgacgttcagctatacacttccttttagaatgaagacgagtagtgggttttgagctaacaatctcatcacctttctcggacttgttcacactcacagaagaagcagcagccacagcataagatttcccagttctttttccattagaatacactgttcaatcaatcaaattcaaaaaattgaaaattgaaaataaaaatgcatgctttgaaatcagaaattgaaaagagatagagatgaaagaaattgagaccgatttttgggattgttcgtgagatcatggtgatgggattctctgattcactggttttctacgcatcggagaatctgtgattcgaacaagaattgaatgtatagagagagagagagagagagagagagagagagccaaaaacccaaccagggttttaggaagaaaccttctttgtttcttttttattattatatttattttgaaagaaaatatttatatattggagaaatttaagagcaaaattatgtagattatttggaagaaatcactttttttttttttttt

SEQ ID NO: 80613 - DNA, 844 bp, Cannabis sativa
gcctatattctgaattaattgttaattaccagaattaattaggataagtaacaactccagtctgagtagggagttgacatattcataagccaaatatttagtcaacacagtacagcagctacctctcactgacttctttgttatttaatattttctatttaaaatcaattttaattctggtttgttgtttaattttgattgacataaaacgttccagcaaaatcttattatatataagaagttttaatatattctagtgtattctacaaatcatgagaaaacccaagttacaagcagctaaatattttacataaaataaataaaagtcacaagattggatttgcagtacttgtgagtcaacataaagattggcatctcattgattaaagaaagagtataactgtggcaattatttacttaaaacatggtttgaaatgtccaatgaaaaagccactctttttggttgccatttgaatcaaaaaattgcttacttgagcagttatatattgacttagtcctttcttatgaattttattgcttgaaaatttgattatatttatttttatatatatatactttgtttttttatgtggaatttgtgaatagagtaatggaatatgaacgttttctgatatagagaaaaaccaattaaactttttatttttctgaaatggtatgagaaagaagaccatcttgttgtcgttcttttaataattgttgtcgtttctattttggtatttgatcaaaaaatcacaaggtcggcccttgactgaagaggagcccaataaaatattgtcaatttgtcataacaaatatttcatgaaaataatagaggaaattatat

SEQ ID NO: 80614 - DNA, 911 bp, Cannabis sativa
ttaaaaattatttaccattagacttattaggatattacatttgaaaacaaaggaggtttaaagactacaaaatggtgaaaaaaatgaagacaagtggctttgtgtttatttataaccaaggttaatccacgtgatttgaaattaacagctcagattatctcctcaaaaagcataaactgatcagatggctagggagttgaaaagatggcatttaatgtccctcgactaaaatcaaaaaatttaattttcattattaaatacctcgagcctaatgagcataaaagagttctcacatcataactctgtcatcagtttgatttccccacaaaaaagcaattattgtaggcacatgttgtccatgagatcattaaacacacaacacgcatgcattgccatttgttcccagcaaaaaatttttgaccttacatatatcgacagccaaacgagaattattcttttgcatcctcaaaattctcctacgcatcataggtatactctaactatcctaatgaagaatgcaagattctgctactcaagagtcttaaaagcttgcgggtaaatgttatccgtgttttagaagaagggacacatggcaaaggatgagaagcattagtttaaatatttgctaaataattccccttcattagctaggatcacttgaaaagctatactggttcgggaccaagagatgaccaagttctttatacttctaggagatgcttagaagccatttgtgaagtctaacacggacattaattcaatagaggtaacagtatgtctattacaaagcaagaggcaaatagtccaagcaacagttataccttttcagacataggatcagatcttatcccctgtgtcagaccatggtagtgtatacacctcaattgtgaatacatctttttctcctaacg

SEQ ID NO: 80615 - DNA, 877 bp, Cannabis sativa
ggagaaggaagatgaagatctagaaaatgaaagaatgtttcaatttgtctacttccgttgcaactaattaaggtatgtgattttacatctttgtaaatctttgtatagttgattatactgcgtgtcttttgaaacacttaattttgtaaatgaatgattcagtacttgacaataatattttcggaatgtgttgcagataatcaatgagataaggagtagaatcttcatgttctctgcctttgtaaaagagaatgaaaacaaatggtatataaaactcaaacaaaagtagtttacaattaaaacatccaatggagctcaaacaattctaactatgacatatttcgtttcatataatacagggaatcttgaatcaccttctaagagcaacacagatgaattttgtatggcgagctagttgggtttgatcattgtcccttgtgcaatttggcagctgaaactattctgcattgttggggaaggtctgggcttggtgtttttgacagcgaatgtgagtgactttgggtggtgttcgtggtgtttttgacatcaccgatcgtatttttgcatcttactttgaaatttgtgtattgtgctaataagtatttgagtggccttccttgtcttgtgctactcttattgtaagctttggctgtacttgaagggctgcactgtgttgtgttatgccttttggctctgtttgttaattaacagccttagttaaggccaaggctggttcttgtttttctcattctttatagttggtgtttggttggaacagaaatctctttcaaaaaaaggaaaccaattaatattgtatttgtattggaaagactactcttactctatatttatttagcttctataatataaaacaaag

SEQ ID NO: 80616 - DNA, 3708 bp, Cannabis sativa
gtagctaagtgttttaaagacaaactacactgagaggtaaaacggtaattttgtccctacttgatgtaaatcatctatagagagagaggatcgttgattgtttagattgaaataatagataattcatagcgtatctattcttggtgaattaagtattctatataatcaagagtgcaattttgaatctatagtggagttaggaggaattaattaataagatagagaatttactcagtaaattctagagctacttattgaaatgttgattatataggcccatggtcctccacaccacctgagctaatattgtcctgtagactcaactaattgattttaaataatcttttagaattccaagtaagactatgtcttatatatatgagttttactaagcaagggcaaatttaagaagaaaaagaaaatttagggtttatttattaattgagagactttaaaaaatctaattaataaataagttaattgaatagtaattttattaataattgataataattattaaatagataaaattatcatttaaacagatagaatagaaaaatggtatttttaagaaaaagatgagtttcaataaaatgacaaaattaatacccatgggcctcatatagatctttgccatgaaagtttttattaagttgtttcatcttttattttagtcaattttaattctaaacctagctctagtgttacactataaatataatatgatagctcttaaccttaataacactttgactctcttttgttagacaaaaacaaaaaataataaaaaaaatattatattatatatagaattttggaattcttttcttcttcttctcaaaatttcaagtggcttagtattgagtgattacccacatatattgtaatggccgcgtagttaaatcatgagaattagcaaaaaaaattaagagatttaataattattatgtgattttgtgtttcctagtagtaattaaggcttattgtcagaaataagtcttaggaaaatattttcttaattacgaagatatatctgaatactaagtgcattaattatgatatatgtgaatttttataaatttcatgttttatgctcggtaacagtagaatgcgatgtttggcctacagagtcacttagaaatattttagtattttagtaatagcgggacaacttagatagatatttggaatgtcgggagtgctctggttatggttttggaccgtaatacccttaggtttcaagttacctttagtgtaaaaagggtattgaagtcatttcatggtagcttttaatggtgttatcggttgattgtttaataggaatacttagttttgtctttagtgattaagttatatgctgaaaatagatttttacggatttagaaaatataagaaaatcaagaaattagaattcctttctctctctcttctcttgagtcgcttgcataggacaccaaagaaactagccaactttttcctcaattctgacctaatctttgatattttgagctgctaaaactcaagtatgagttgaggtaagtttccttctcctttgttcctttggttttagttttaaagttaggtttccatgtatgattttgagctagatgttgttgtgcgaacattctaggtttaattgaggttttatatgttggattatgtaattgttaagcttatttggttgctagtttttgtgtgaaacaaagtttgagcttaagagctcaaactttgctcttccatgacaaatcttgattctaagtataatttttgtgtttaagctatgtaataggttccttatgtggtattttggtattctggaaagtttggtagcatttggatttgattggaccaagttatgggggttgggagattggaaatttttcgtgtttttctgcccaaacaaatttggtttagggctgtatcaaatttcggttggacaatatcgagaaagactgatttttcgtattttggccataactttttactcgggtgtctgttttagacgttctatatatagttttaaagcttatgacgagctctacgatatggtatataaagtagagccaaattatgtattttattttatggtatctccaccacatagttgggtagaaaaaccctaggttcttttcagacattagagaagtattctagagtaaacacttattagttgtacgtatgttgtgacttaggggcctgtaaattatcgagcagaagtttccacttagatttaccaatatacttacattcggaatcaaggtaagattagtagaatgattcgcatatatgtatacatgtttagtgtgcatgttagttatcgtcagaataacatatcagggtatcagtgagctgcacatagagttgcaccgaggtaccaaaaaatatatgttaggcaaattagtggccattagattagcatatcagggtatcgtgaagtgtacatagagttgcacagagatgccaacatatatatgctaggcctctagatagtatgaattaactgctaccacatcaatacgactagagtactgagtataggctggatttgcagttagtcatactttgtcgagaatgttcctgacccagttataaaatcgtgattaggtgtatgggcacctggttacgatttggatatatatttatgcttaagattatacttttcttactgagtctatgactcacagttattgcatgtatatgctggtaaaagctagaaccgaaccattgagagtctaaagctaaggatgaagattgtacatatcaatacaattagacctggagcgttaacgatcttcagaacaatgttggctcacttttattggtcgctatacgacgacttttgaaatataatcagtttataaatttttgtaacttttaaacgggatctcgaattatgtaatttattatgtttaaatattaaagtgaagttatttaattaagttttaatcgatcacatttttattaaaccctttgattagcaaaggcatgcacagtatttagaaagcattgtaatacgcataatctagtagggtgttacacatattaagacaatactcaggctagtgaggaagactgtgtagtcttttgtcaactgaaagagaatccaagttcagttcttgatcatacattgtaatagaaaggattaaggattagaaaattgaactgaaagagtcaattaattctactgcaaccaatgtaaggatatctatatatatatatacttattttagtaattttgtatttaattaggatgttagattagtaatagtctacatacttgaaaagattaagatcctgattaaataatttccaacaactagtcttagagccatggtaatgatttattatttatgaaatagtgaattaaaataattttttatgttttaatgtatgatatggatgtttcatggtttctttatatgctttgatgaatgtatgtaataattaaaaaaattctacaaaaaataattttattttggttatgaaattattttacaatgatagttggttgtaaattatgcaatttaaaattttacggaactcaatttggatcaaaattgagtgaaatatgcttatttgaaaaattgcaccctagctaccactatcacctaagcaagattgatatttttcgattagcacctgagtgacgcatgcacaaaggggtgtagatgcctagttttctcgatagtaacctagtgacgcccctag

SEQ ID NO: 80617 - DNA, 1093 bp, Cannabis sativa
ttattattaggtttatttaatttgttttattaggttagaagataatttagaaattaggaataaaatcataaagttaagaaaattacaactctttttctttctctcctctctcggctcaaagaacccagctaacctaggggaaaacttagttcaattcagcaattttttgtctattttcttcagccctagtgtttatctatcttgacataagctttctccatttattcttgatgatttctagggtttaggttgagtttggttgggtgttttttatgaattcgggtctgtggagttaattgagtttagagcatgttttcaggtttaatttgagattatttgtgtgtgatttggatgattctttcgcttctaggtctttaattgagggaaatgagttcaagagctcaaatttcactcaactatggttattttgtcattttaatgtattattaagttttgaaggctttaatatattttctttttattgttggtatgttctggaaagttttgttaggattggaagagatttggttgggttttgatgtgaaaaaccagggttttccacttcagcagcaagaaccggtcaacctgtgtacagagcactgtcgaactggtcaacctagaaaccctaatattttgtaattgatttcaagtttggagtgtttctctagaacctatattagggtgttttatcaatgtttaggttgtttacaaagttttgttgattagggtttgttcggttttgattttaggtcctatttcgagaatggttaagttgtttatcaagctttgttgtcatgacataggacttgggattgtcgagcattattccacgtaggtcagcccgcatacataattttagattgagggaagaaaagccaattgtactgcttagcatgtcaaataagattcgattaatatcgtttctgactcgattataatcaaggtaaagatatagtaattaccattgctaagaatgagttattactcacttttagaaattgcagataaatttcttacttatcggttacttgattaactatgtaacaatagtgttacaaattacattaacaatacgcaagtgcacgtaatcaag

SEQ ID NO: 80618 - DNA, 2760 bp, Cannabis sativa
  modified_base (603)..(608): a, c, t, g, unknown or other
  modified_base (637)..(642): a, c, t, g, unknown or other
  modified_base (670)..(675): a, c, t, g, unknown or other
  modified_base (702)..(707): a, c, t, g, unknown or other
aatcctgaatatatagttattcacaattatagtgatgtcatcatagtacaaggtaattttgattatatgcctaaaactatttagtcccatgatttattagtatactggatttacactgacgtgataatcaatgataaagtttacctacacaatgatatgtggaatgtcctttctagggcattagtaaagtatactagtatcagatgtattggctataaattagacaggaagggtattgacagtggaaaaaatatcatcaacttaccgtaatatcttttctaagtcaatttcacatagttgatcttagatcaaagatcttaatcctgagatagttaggttctggcttaactgtactacatgtgttctttgatttgtttgttaaaagcttactagaggatcaactcaatacttacatattggaataatattattttgtagttttaattaattgatttatttaatcaattaggattctaaataatgactattatgtcttatttgtgaattttactaaggaaaggtataattgagaagaaaagagaattcaaggtttatttattaattaagagaccttggaaaatctaattaataaatatatttaannnnnnattaataaatatatttaaatgataatttnnnnnntaaatatatttaaatgataattttattnnnnnnatttaaatgataattttatttgataannnnnnataattattaaatagatagaattattatttaaataactagaatgaaaaaatgacatcaaagataagtttgcttcaaaaaggaagcaaaataatggcaaaaatctaactcatgggccttatagagatttcagccatgaggtaatattttaagtcattggatcttttaaatcaacccatttagttttgatcctatacctaatgaatccatataaatagaacataatgacatttgattcttggaacactttttagactctctcttgtttaacaaactgaatcagaaagaaagcctattattttctatttataaattcaaaattctcttggtttttcttcacgaaaattcttgctccttggtgttgagtaatttcccacacatttcaaagcaatactcagcatagtgaggaagactgtgtagttcaaattgtcaattgaaggagaattcaggttcagatcttgatcatactctgcaacaaaaaggatcaagggtgagagatctggatgaaaggagtcatactattccgatgacatcaatgtaaaattttctataacttttatgtgtttatttcattgttttaagaaattcatatataggatgttaaattataaaccaacatacatgttagtaaatctagatcctagtaaaagatttccaacacaaatcatgtttgattttagggttcaaccctgcgaaatatttatccttcttactaaaatcagttggcacaatttttgagcctaactgggccaatctatcaatttaaatcgtgtactctgtaattaaaatattctcttcttgagtcaattgagtgaactctttcctctttagtactacaaaaggcttcattatagtacttagggttgaacaagtcttggaattcttcctaggtaattttggtgatgtctcgggtaagggacaccatatcccaccatattaaggcatcctcctagaattgaaaggtggcacaggacaccctatcatttccattaacacccatgaaattcaatattctattgataaaagttagccattgctcgactttctttcataacatatggtcctccaaggaaaactagaggtgcttgcttgcaaaaccttttatatagcagttccatacgattatgaatagcaacctgctacattgtcacaacaggagcaagagctactagtacttcaggagcaggcattgcaggagcaccctgttgccttaagtgtcagatttcttcatcttattcatttatcctggcttgcattttctacaaatctatgtttccaatcctgggcagtttgtggtgggttaacattaccctgaccacgagctacacctcttcggcctctaccttggccatgaacattagggggatactgtcatccttgaccgccactggattcaactaacattctttagcttctcgtatttcgcctgatgtccattctattggactagcctgcaaaatcataagttagcctagtcagactgcgatcaaggttaaaatctaattaccgcttaattgagaatttaaaatatgtgcctatttagctatcgggctactaacatgcttcttaaaggcttagtgaaccatgagtcgagcttatctcgaatgatgatgattgtacatatcgttataatcttgctctgataccaaaatgtaatgtcctattagattaggcatgttatcgtgtttttaaattattgtgcactcctttgctaatcaaagggtttattgaaaaacgtaagtaattaaaatttttataaataaatttaaacttaagtacataaatacaaaacattttttgagatcttgtttacgaagctacatcagttttcaaaacacaacagttacaaagttttcacctagtgactatcaaaataaagcctaactgtcctaaagatctaaacactccaggcttaaccgtctcgatatgtacaaccttctctagcccgagctcactattgttcagtttttgctttgcctttacttatacatgtaaaaaataattgtaagtcaacagactcagtaaaaaaaatataaacataacataagcataaac

SEQ ID NO: 80619 - DNA, 1076 bp, Cannabis sativa
ggtcggttttcggattagaaccataaaaaccgaaaaccgaattttggatttttttgtgtaaaaaaccgaccaaaccgaccgttgctcaaccctaacctcagcagtacaatttcccatggattgcatcttaagtgtcctgaagagtgtgaaattactgctttttgtgatgcagattgggccagtgaccctaatgacaggaggtctacttttcttggctctaatctgatggcatggcaatacaagaagcatcacacggtgtcaagatcgagtacctaagcagaatacagaagtctgacttaggttgtgtttgaaataacttggttgcattctctgtttactagctcaagatttgaatttctcaaaagtaaacttgatattggtagcactaccaatttcaagtttgagggagagtttaaagacagttagaatagctttagttatgacagttagtagttggtttggttgttagatttctactacaattgtacatttttttttccctttttacaatttctagtttgttagctctcttgagcttgtataaaaagaatgtactactcatcttgattcaatgagacattatctttatgtcttagtcttttcctatctttctcttcttcttcatctttcatctctcttctgttactaatgttctttgttcttcaactatggtaagacatagtaacaactctaataacagtcattacataaaatatttttcaaaatacttgatagctccaacacaccataaaggttgtgacttgtgagcatgcatccactattacactattacaaaagttatcaattttcatctagaaatgagcaattttcgaatacttgatagctccaacacaccataacggttgtgacttgtgacttgtgagtaatgagcaattttattattgcaacgagtacaaaagttatcaattttcatctagaaattaaatcgttaagggcttggatagtaattttcgagtcactttccactattacaaaagtatttccttaatgaacttccatttcaagaacaaaaaagacaagatgttgcttctcctttaaatggatcagaaaattgg

SEQ ID NO: 80620 - DNA, 3470 bp, Cannabis sativa
  modified_base (59)..(66): a, c, t, g, unknown or other
tttaaaaacaaaattttaaaaataaaaaatctactttcatttttctatttttaaaattnnnnnnnnaaagtgttaccaaacgccacctttgtttataccatactctatgggaaggaaaccttgacaatgtcagaggtttaagcagttctgaatttgaaagaaattcagaagaaatcaaaagaaagacttgacagcaatggtgtaggaatgtttgcaagaagcaaaacaggttccagagataccaggaatggtaatcacaagtcaagcaacaggagtaatcactcgaagagcaatagcaatggtcaaagaccaagatcgaattccagcacaaactcaaaggctggaaaacagtgctactactattagaaggagggtcatttcaaggatgagtgcagggctctcaaagcaaaactcagcaaggagaagaagaaagattctggagatgcaggctgtgttcttgatggatatgagtctgttgatgcacttgtggcatcaagctagtcaagccactggtgatgagtggattctagactcaaggtgttcttttcatatgacccctaacaaacatttcttttgcagctttcaggaacaggatagtggttccgtcttgttaggtgacaacaaagcctgtaagattgcaggaattggttcagtgttgatcaaaatgaacaatggatcagaaagaaccatcaaagatgtgaggtatgtccttgacctcaaaagaaatttgctatctattggtgcactaactcttaaaggctacaacatcaaaatagatagtagacttggagttttgaaagactctacagtggtgatgataggaaatcttagaaatgggatttactatcttgctggcaaaacaattattggtaacgctgctacagcagccaaaaatgaggaaatggatcaaacaaagttgtggcacatgagatttggacatgtcagtgagagagggttacatgagcttgaaaaacaaggcatactcaaaggtaaacttggtaaaaaactagaattttgtgaaaactgtgtttatggtaaaagttgcaggttgaaattcacaaaagctaggcatacaacaaaaggaaaactcgattacctacactttgatctctggggtgcatccagaacaaaaacaattggtggagcaagctatttcttgagtatagttaaagactatacaaggaaggtttgggttttcttacacagtaacaaaaatgattcttttaacacttttgttaattaaaaaactttgatagaaaatcaaactaagaagaaaattaaaatgttaagaactaacaatggtttggagttttgttctgatgagtttaacagatattgccaagagacaagaattagaaggcacaaaaaagttgtcaagacacctcaaaaaaatgggcatagcagagagaatgaacagaatattgattgaaagagtaaggtgtatgctgacagctgctggtttgggtaaacaattctggggagaagctttgaagactgcctgttatctcatcaacaggtgccattctgctgcactaaacttcgaaactcctcaagaaaaatggacaggacatgctccaagtattgaccatttaagggtctttgggtgtaatgcctatgcccatataagacaagacaagttagagccaagggctctgaagtgctgttttatcggataccctgatggattcaaaggatataagctgtggtgtcttgaagatggattcagaaaatgcatcataagcagagatgtgatcttcaatgagaatgaaatgccaatgaaagagtcaaactcaggaaccaagacacagacaaatgccacagatagtatgcaaattcagtttgaagaaactcaaaatgatgccagacaagatgaaactaatcaggaacaagctgaagacaatgacacaaatcaaggtggatctcaggggtatcagtttgttagagatagggaaaggagggttgtcaaacctcttgacatatttcgttttgcagattgcactgcatttgcactttcttctgcagaagaaattgaatgctttgttcctagtgcctattatgaagctgttaattgtaagaatagggataaatgacttgctgccattgatgaagaaatgacatcactcaagaaaaataagacatggaagactgttactagaccaacaggacagaagctaattggttgcaaatggattttcaaagaaaaagaaggactgcaaggtgaataaattaggtacaaggcaagattggtggcaaagggatttaaccaaagggaaggcatagatgtgaggagctaaaatataaaaatgtgaggagctaaaattctctctagcaattatatgtgtccgctagtatttatcttttttttttttcttttttttaatgtatatgaatataataaattaaagtattaaaatattaatattaatataataaataaaaaatattaatataattatttttctcaaaatagtaaaattaaaattaaaattatttgaatttaacacaaaaacataaattaaagtaagtaaaataaataataaaaatgtcaatatttaatagtgagaacttaatgttgctaaaaaaataaaagttcggaaatcaattcaccaaaatataaaatttggggactaacttgccaaaacttatatagtttggagactaatttgctaaaaaatgaagtttgatgaccaacttaccaaaacatgtatagtttagggacatggggtacaaataaaacatatatataattgtgatcttttgtgtgcctaattttctgcttcttgtgattcaataagcgttaaaaatataaataaataaataaataataaataattaaattgaaaaaaggggtgtttttaatattatacttaaaatagatttcatttataaaaatacttttaagaaaattatttgcacaaataccgttgtgtcacatcagcatatataccgaaattcaaaataattactgaaaatagaaaaaattagaaaaatcttgttttcaaaaatttttgctttttgggagtttttaaaaaaagtaacaatctaattgttttttatgtgaataagatatcaattggttactctttcactaaaaaatttatttcaaaattttacacatatataaataataaaataaccattttaaaagaaactatttttgtttctttttttattattatatttttagactatattatcttattttattatttaagataccttaagattactttttttttcctaatgtaactcatatgatgtttagatatcaatcaatttatttacaaattattttataaacctattaaaatagctttataaaaataaatttatttttatttaatcttgtaatgtattaaataaattaaaaaaaaaatagtaactaagttgcttgttacattaaatttgaatattatttatttattaattaaaaatacatataaaaaactaaaatatttaataaaaaaaaa

SEQ ID NO: 80621 - DNA, 707 bp, Cannabis sativa
cttgctttgggtcaggttgaggagtttaaaagctcaggatcgtttttcacctggacaaacaagcatgaagtggggggaagaatttactctaagctagatagagtgttcataaataatatctggctgaatgaatttcctaactcagatgcctgctttaaatgggaggtcacttcagatcactgttattgcttaattagatgcgaagttcagaataatgtaggtgttaaaccttttcggtttgggaatcactggccctcctaccctggttataatcaactggtgatggactgctggaatgtaaaggacacaggaaccggtcttgacagcttaatgaagaggttgtttcgagtcaagcatgcgctaaaagtctttcgtaggaatgaggtgggagatgtggcaacgaagtacagggaggctaaggaagcttactgtggtagtcttgaggatgcagccttgaaccctacaaatcatgccctgcaacttctggttaaagacaagcagagattatttttgacagctaaggagagaatggatcaaaatcttctccaacaaagcaagatcaactggataaagtttaatgatgaaaattccacctattttcataccaatatgaggaaaagaagactggaaaataggatcactacattcatgaagggggatgctataatagatgagtttgaggaagtggtgaaacactttgtcaagca

SEQ ID NO: 80622 - DNA, 2354 bp, Cannabis sativa
aatatttttaaaattaatgtttatagttaaatttgtttagtatccattaatgggtaatactcattaaaaaatgatcctcttatatatataaatagcgggttcccatattatttattaaataaaatttgtgagatttgatattgaaatacaccaataacagcacctcttttgatgtttgacacctcctttagcatttttgttattaagttcaatttaattagaattttaactcttttgattaattacacataatgttgtaagtttatatttttttgagttcttttgtatttttgtcttatttatattgtctataattaattatatttattagtattttttttataaatttattagttttttttttttgttttacaaaatacatgtataggatatattattttttattattaaaagttgaattaaatatattatttttattgtaattaattaagaaatttaattagttagacaattacatattaaaatttcttcaaaattacaaattttatatagtaaaatttatgtgggattatgaatgataatgtaacgtcctattttcttaggcacgctacagtaatttttaaattactgtgcacacattttctaatcaaaggatttttcaaaaaatgtgacaaattaaaattttgaaattaaactttaactttaataattatatactttccataatttttggatacctatttaaaagtttataactatatacaaaatacatttttcgcaaaagtgtcgacccgtgactacaaaataaaagtccatgccattccgagaccgaacactccagacctaaccatccttatatgtacaatcatccttaagctaccaacaaggcttcagatgaattaagaacgttcttaatggaagtacttcatctataccatatgcactaaggatctttctaatactagtgttggtagggtttactcgtactctgggcacaaccgattgctataccacatacactccatactcgtctcgtactaatattttaacgctatgtcatatcccttaacaatatatattgtaccaatgcactccgccccgcaactataatagtgttagtaatatacaatcacataattcagcatgcatattatatgcatacacatatacatatacatattttatactaatcttacctctttctatattcaagtatgtcggtgaatctaaaaggaaattcactcgctgaacggaggtcctatgtcacaattacaaaaaataggtaaataacttgctaaaaccttttcagggacctaaactccaaattaaaagtttcctatcaataaatagtgtggccaaaacctaaatatcgagaaaacatgaaaactgaggctcccaaaactccccaaactggtaaactggattcctaaaatggtaaaccgctttctgggatcctgtctaagaaaatagtttactgattctgagaaaacagtgaactgtttttctgtaaaaatcccaaagaactttgaatctcactcaattctaccccaaacttcaaaccgagatccagaacacttgattacaccttaataagcatatatcaatcgataacagcagccaaaactcacataatcataaatcaccattgttgagccaagtttgacttcttgaactcaaacttactaaacaccacaactcactactacaaaaaggagtatttttgtcggtttctaagtgacatataaagattttgcgtcagtctaaaaaattaacgtataacttgttgacgcaaatagtttttttatttgtgacttttcaaaagagacgtaaaaaataattttcatccttttgaaacggatgcaaaatataaaatattctttataacattatgcgtcaatttaaaagtgacgtgaacaaggttgtaccatttcaaaactaacaaaaaaaacgtatactttcaattcttaaatgatgcacaacttgctgcaaatacttttatttgcttgttgcgatggttataaaatgataatttaacactaggtgtcaaatttgactattttttttacatttttaatgcttctcaattttttaaacaattttacaaaaccagatttacctctttaagtttcaaaaagtattataattacaaaaatactacattgatgatgtcagcacaccatttggtttctctcattttttctcacgcatcttctctatctccaagtcttcataaccattttatctttctctcttctcacaatttttctgttgaagccaaactcccaaaccctgacctttacctttccaccattgtcgttcaaatgatgtttgtaagatcatcttcatcatcatcatcttcttcttcttcgtttgctaaaattacaagaataaaa

SEQ ID NO: 80623 - DNA, 1980 bp, Cannabis sativa
  modified_base (26)..(28): a, c, t, g, unknown or other
ctaaaaaagttcagggggcacgattnnntacatgtcaaagttcaggaagaaaaattactaattagtcttaaaaaaattataatttaatttttggaagcattgctattaggcattaatgtgatgttttataaatggttaagatgtcatatgttatttattaaatcaaaatgtgtgagagtcaatattaaattgcaccaataaaaatatgttaccttgttgtaatgcttgccatcttaaattatcttttagcatttctcaattatttttatatgacatgatgtaaattagtataaatatatgtctaaattacaaaaaaaacaattatcatcatcaattcttgattatatttttcttattttatttatttaatttttcattcttttagtcattttttgagaaaaaaacctcacaaataaccaaccacttaagcaaaaagcttaagggaggccgaggacatcaattcattgatttttggcattagccaaagcaaaatttgaatagaataaagataactcggccaccaaattatactagctatgtcagacaaaacatacttaactaaagtgtgggcaaccacattaactgaacgagaacaataagaaacaaaaatattctaaaataaagtacaatcaaaagaaatatcatgtaagacaaggcgcaaagatgagtcaagaatagaattgttgtttagcttgagaataatgctttggtaatccatctcgaactgaatattttccagtccaaacaagtggcactgagtcaaagcattgtgaagagccatcgcctcaaccacctcatgtaatgactgcatagtttttattataagaattagtggataattaagaatttgattattattttatgattatatgctttctagttgaaaataagatctattatgataaataggccttagagaaacaatttctcaattagagagatttaatttattgaattctaggtgtgttatatatgaattattatgattttcatatttttatgtctggtaacaatggaatgcaacgatttggccattagagtcacttagatatcgttgagtatcttagaactagcagggcaagagagttagacatttagagtgtcaaaatttttcggagttatagttttgccttaagttattagaaattacttttaaggattttctagttaattcttaaaagttttaagctcaatacttaagggaataaagaaaaaattaaaatagagttattcatttagaaagaaaaatcaaaacctataccttgtttctctttctccttagtttgaccacaaggaaacaccaagagaaaccaaattttctctactagttcaaaccaaaatcaagacaaaatcaagagtgtttgcagcaagaatttaagtagtaatgaagagataatctatggtaagccttagcatgctcttccttttgaattcaagttttagttggttttgaaatatgctattgtaattttcattttgttgagttatggtgttgttagaactaagttttagaggtttaattatgtttgttttagttggtttgtttgatttttggtggctatgctttgtgttgagcaagcttgagttttggaatttaaaagcttgttcaataatggtgaaatgcactatagagcttgggtgttgtgtttttcagttggaatatgttcattatgttgttttagatgttcataatgttttagtttgttttggggtagaattaagcttggagtggagtttttatgttttttgaggaaaaatggtgaaccgtttttctaggaagaaccttacaaaacggtccaccattttaggaattcagtttaccagttggggcagttttgggagcctcaatttttgtattttatcaatatttagggcattaacacactacttattgataggaaaatttttagttttgaatttaagcctccaaaagtgagttagcgagtcacttaccgatttatataaattgtgacttagggc

SEQ ID NO: 80624 - DNA, 2146 bp, Cannabis sativa
tattatatattttttaaataaaggatcgaataattttttttttctaagacccactaaatttcagggtcgactttgaacacgattgatacaaaatattaaagcaaacactacaaaaaatcttatcattcttatgttgtgactaaaatgtctgtggctaaacgtattagtcacaaaaattacaatttgttgtgactaaatgtagttttagttacaacaaaataaattagtgacaacttgcgagtaaatactatgttttagtcacaagtagttttttgttgtgactaaaagtcacatttaattacaaaaaaattttgttgtaactaaaaatttatcaatttaagtaattattttgtagtaaaatcaaataaaatataaaaacacaatatataatatgataaaaccttttgacacccctttaaatctatcaagaaaatatacatattttgttttgagatatttactcccatgatatgtattttaaccatttatagttaaaagtctaccaaacaacagttatagtattactatgagaccaacaaaacagtccgtaccattctttattaaatttctacacatacatatacagctgtctttgacttttgactctttgtttctttcttttttttttcttttaaatttatttttagtagcattttatttacacattaaataataaaataaatagtgacaaaatctgagctcccatctttagacagttcaaatatattattacaaaaaaataaatgaataaaaatattttttttaaatccatataaatactttattatatacatgaataacctgcatgacctttttaatgccttgtaacgttacatttaacaaaaaaacaaaatgaattaaaatactttaaacatgaatagacattcatttaaattaattcacaattaataaatgaattaattttatataattgtcaattagtttctaatttatatcgtactataattaattgatgaaccttcttcatattcttcacattcaaaaccccaatctatctgaaaaactcccctaattaatcttaattttttgatgcatgaataaaaattataataaaaaaatgaagcacgattggaatttgtatatatttttcataattttttaatttgagatcttaattataatatatattttaatgtttattcatttatttaaaaaggggacaaatctaaaccatgcatgtcaagatttatataaatatataattataatattataattataaacatatgaacgtgccaagacactcttaacttaaacaattaagattaggttaattaagccttttatattagtcaaaaagattcttagtattggcattatatattatgtagaaatattaaaaaaaaaccaattaataatttctcaatttcttaataagatttatttatgtaattagagtacaagtccacatctatgtttatgtatgatataagtataaaatctaataataataataataattaatttatgacaatgagaatattataataagatttagtataattattttattaatttatactgaccaaactgacaaagatagccgaccaatgaacaaaaagtcagaccataataagactaattaattagtctttaatgagtttaggccaaatattaaagggtcattgactcattccaattgggttaggtgagtcactgtctaaaacccaaaagctcaccatttcattttagacatatagccaaagattctctgagggaacatgcattcaattgtctctttctttctcacaaattcagttttatggtaatggaatacaatatataattattaaggtgaaatttataaaaatattataaaatagaaaaaagtttacaaacaatactctaacacgatattttttatatttttactgtattaattttataaaattattgtgtttaaaattataaaaatactatgtttcagtaaaactaaaaaataaccttaaaagaatacttaacgaaaaatataaaacaataataaaaatataactacaaagcaatagaaaaataacaaaacattaatctaactgtaataagtaaaataatatcaattcctagttgacgctttaatgtgagggtttcttctaattgcaatagaaaaaataacaaaacattaatctaa

SEQ ID NO: 80625 - DNA, 1444 bp, Cannabis sativa
ccataaactcttctagtcttctttggtgtaattcatgggcttcagtccattaatgatagctcaataatttcaagcccaaacactggtgtgctactgtttctcccatatttcatccatttaatcattgacccaaattgtactattattaaccatttgacaaaaaccctgaatttgaaatattggttggtggatgatatttgaaacttttgaagatatattataaaacccttttctaaactatagacagacagaggattaagccccattaaatcaatgctatatcacaccaaaactatactttgttccaccataacacaacccatttgtcaagctttcttgtttactattttaatatatataataagatgagctaaccttggactggcttggtacatcagtagtgagagacatgcacacacgttgcctaacattcttattagtaacaaaaactctaccaagagattgctgaagctgagtctgcctcaacttgttacccattacttctccattgcaaaactttacaagcctccaattcttcccagccaatcccgtcatgccacgtagctggccggccgccgagagggaaatccggcaatcagctgagactgccatatttttattttatatttaattttcttgggaaaaaaactcccaaggagaaaatgggaataacaaaaaagataatattgaagaaactttgttataatgtatatagtttgtataggagagggaagagcatagttgctatgaaaaattgtaagtcattggaggatttttgccacgttatccaaaaccaattgtatccaccaatttccgttttgggtttttgtcttgttgttacatatacatatatacatagatacacatataatttatacatttttttttacaagatagtccccatgtttgattgaatttaccaatggaggaatattctactacttgtgcttagctgctttgagatttttggtgatgaaagaaacactaaccaggagacaatatattgaccttttgttctcctatatgcattattgcatttcattattaagtaatatatttggtacaaaatcagaaactgaaaatgaactatctgtcttttaatgttcaatgggtcaaattagaagtaatatgaatgcgtattggatttattttcggtttttcatgttcggatttggaataatatttttggaaaaattcaagaaaataaataatattaatctttgggatatactttcactatgaaaattaaattttgagttgttacaaaatgataatttcatatgttaatagcagagccggcccatagctgtaaatgcatgcaggaccaatccggcccatattttgaaaagtatgggttgtgttgtacagacttataaaaaaatggaaacttacaaaaatattgaaatttgagttaatttttacaaaaatactgtcacacgatttt

SEQ ID NO: 80626 - DNA, 837 bp, Cannabis sativa
tgtatacatgtgggatgagctagaaaagagtaaaacccacttctgcacagaagtaagcaaagtagcttcagagggaaaggtgtgctacacctttgacgttagcccagctccaagcttcgaagcatctacaacaataacaaggagactcgtccttcaattctagcctattccagaacaaaccatggatatgcttgagtcccctcttctcttcataggaccgcaatatcagataattacgaaacttgtttgtatattgatcaatcatccattgagatggattggctactatttctggcttcatgcctacaacttcttgagccaattttccttcatgatccatagtcatctcttcatcaaatttgtctgcttcagccataggagaaactaggaaaaagaaaaaactaagtagttaatacccctaacccaatagacttaagtaaggccaagggagagtcctcccccacaactgcttaaagatgtccccgtcagaactagcatttagaaacaggttttctagggagcaagtctctagaatagcaggatcacaaacacaataatatagaataaagcctacataataaaccatctagtaccgaaagggactcagacaaaagaaagtgcaaagcccacagagccaatagatcatcaatgtaaactaaaactactatgataaatctgctttaactaacctaaatcttttaatgaatgtcataagaacctccttacacagcaaagtatggaaaaaaaattctcacagatcgtaaattacatacttaacaacctacaatttttgctgggaacaaaaatgactctgacagaaatcaaaagtataagttt

SEQ ID NO: 80627 - DNA, 3020 bp, Cannabis sativa
  modified_base (62)..(65): a, c, t, g, unknown or other
tttaaattttattccattcctattactattcccattcctattcttattcctatattttcatnnnncccaaccaaacgcctccttagtggtttgattggtttgttgggttgtgttagcttaattcggtttgtatttcactttttctcttttgattaatatcaaaacattcatttcttacattttacaactttaagcaaccttttaatcattactaaactattcttgaacctaaattttgatcaaaacaaaccgtaataatttaaattaagcttggcccaacataaattaagaaataaagtttaagtataaaaatcaataatatatttttctttttttgttaaaatttcagcaacaacaacaacatcagcaacaacttctacaaaccataacagacagcaacgaatttgggctccaaacggatccacgagacaaggcccaatggggttggaactggctagagcgttggatgtcatcgcaaccctacaccggcaacggacgccgctccgacccattaagagaaacctcatacgccaatctggccaccactgccaccactctcagcgacggcgacgccgcgtcggagaagacagtcgaaatggacgtggcaggagcttcaaggtcggaccacatcaacaatatgggcctggactttctcgattctagctcttattcgactcgacaagtccgtcaaggaagcccaaataatgttccgagttacatggccccgacccagtccgctaaagctaaggcccgataccaaggcccaggaggtgtgaagcagagaagcccagctacgcctcagtggaatccttcgacaaggagaggattgggttcgggtgttgattcgtcgagctcgggtggtggaacgacgacgtttttggctagaacaccaagcccaaagaataatgggcttttatattcgaatggaagacgggccgtaggctgtggcccagattcaccaagtggtggtggtggtggtggtgaagattgggggatacctttgaatgttcataacaatcatcatcatcgtcaccatggttggagacaagattttgattgattataattaattgcgtttccaagcttctatgttgttgttgtgagattgagaatgatatgaactttgtttgatatttatcttttttctttttaacttatttgttttaataatctttaatccaaacaaaccactttatcatcaccatttggttatatatgtgtgtatatatatcttttattttatatacgaagtgtgtatatttaattaattttgttttttttttttttttttgaaagctagaacattttattaagataaatcaatgttagagaataacttgaacaagtatgggtctatatgtcctctcttaatttaaatctaataataaaagtagccaatgtgtatatttaattaattttgtttagttttgtacacattaacttatataaggtatttaaaatcttttattggaagaagaaagtttagttttaatatttgtatttgattaacaattagaacaatttttttttttgttttaatgtaaataattccatctatatgtatctttatgatttaatacgaataaattcacaattagaaatttaaaaaataatgaaaatatacgaagataaacattttactatagtattgatgtaattttttttagattatatttgagttagattgtttgggaacttcagctcaactttttgagatctacatttcatggatctgaaaattaaagtcaggatattagttttatgtaaattaaatttgattttcagttaaattttagttttataatagtttttttacattttttttatgattttgaaaaagcccaattgcttttggtcgttttcttaggtaaaattgctgaaattaatggcgattcctttcttaactctagcatatagtttacataatttaacgggtcacttataaaagtaggaaaataaaagtaaaaattaaaataagtaaaataaaatgggtatacaatataatattcttttttgagagttggtacacatatcttcatctttataaaaatctctaataattaattgcgttgccagtttccattctatttttatgtatgagcttgagattgagattgggagtgagaatgatatgtatgaattgtgtttgtcattacatttgttttttattttttgaaattttcattatatttgatatttatctttttctttcttttaacttatttgttttgacaatattgttttgggaccctattttttttttcttccctacgaatcaaaaataataataaaaattgaaaattttcaaaaatatatatactttctttatattttatttgcaatttcacaatctaacttttttatttacggtttaacaaatttaattttttaaaaataaaattttaaagtaactaaattctaaaaatatgattttttctttctcaacaaaaaatgaaaaaactgtaaaaaaaaaaaaacaattaaaaaataacgaaaaattaatctcataaccgttataatttaattataaaataacaagaaaattaaccttatgctattttttttttttttaaatttacagtttgagtttctaaagtgattgcagcgctagttacaatagcggtttctatacgattttttgttacaatttaaattggagctctagttgcaatagggatttctatgtagaatttcgtaaaaattaaaaaaaaaaaaactgttttgttttgaagtgtaaaaataaaaaagcaatttttttttaatcgtataattactttgttacttttcttaattaatttatcaatattttatattgaaataataatttacttattttgctaacggtaccaaaaattgaaaaaagaaaaaagaaaaaaagtagggccagaaaataacaaaacccctcacggtgccacgtgatgagagtgggacccacacaacacctttggtttctttctagtactttcacttcacgcgcctccattcctcacatgaattatccacatgtcactctatcaaat

SEQ ID NO: 80628 - DNA, 1062 bp, Cannabis sativa
ttattttatcaaataattaattaaataaatatatggtattttggttttatctgaccgaaaatcttcttgagtattattaaatttgctttctacaaagtaaaaggtcatgtttggatagttgtttgaaataaagagtccaaagtaatgtagaaataaatcaaaaggatccaaaattattaaataaactatgcttattttcaaaaaaaaagaaaaaaaaaaactatgcatttatttatgagtaaacaaaactaaatacaaataattacgcacactcatatatctacttttttttttttattttcatttatttctctccatacttggtactaccaattgtggatatatagtaatatttgattaattattaattaatataagatgggtgcaaattacttcaccaacctaatcattaataagatttttaacctgaatttatcatttggtcaacccaaagttgagcaaaaatattttttaatattaatatctgaccacggctaattattcatacatgctaatatgctaatacacttaactacttatataaataaacagcttgtattcttaattatataatatgctaccaaatattatataccaatattataacaacaactcatcgagtgaaatatgatcgatttgtaaagttttatttgaaaaaactatcacttctaaaagggttgtcatggtacaagtagttttaatttgtttcgggttttttagaataatttttttttttatatatataattatgtatattgtatttatttagagctattagtaaaaattttaaaaaattcaaaattatttagagtatcaaaaataaagttaaaatattttattgcgaattactttttccttaaaaggtgatatattttttttttttgaaatagaaaaaatgtgatacaatttgaatcttatttttttccatacaaattatttaagtttttttaagaaaatattttaattgtgctaattaaaaaatattgaattaatttatttttggttacaattattatatctgttgagaatcatgggttctatctcaaaaccaattggtgatga

SEQ ID NO: 80629 - DNA, 1235 bp, Cannabis sativa
  modified_base (625)..(640): a, c, t, g, unknown or other
gaagaagaattcggatatgagcatcccatgggcggactcacaattccatgcagagaagacatcttcattgatatcacttcccagttgaattgataattgtaatatgtagcactgacataggtattcacataacaaattttgtaatcttatacttttaccctttttcttggaaaagaaagggatattttttggctagttgagatactagtaaatagaaactactcaattaattatcacttgttctctattatgtctttatcaacttcatagctcacagtccttatttgctagtaaatataaacttataatcaataattgctgtaaaaaatgaaggcactgatagtactcagttttcatttcactgatcattagctggtaaactaattaaagtatatgatgtgtgtataatgaatacaaactaatttgaaaattctgtagaagggttcatcacaaggcaaaggactacataatgtgttttatgctaagccaataacttctaaagttctaaatgggatatcaaaatacatatacaaaaagtcatcttttttcttcatgtagctgtggatctccactttttgatacaattttgtttagggtactaaaactagagagagagagagagagnnnnnnnnnnnnnnnnagagagagagagagagagtaaacataaggaatctggacttgaaagtgggaaagttggaaaaccaaagctatatatatacatatattatatgtatgtatatataaatgtctctatacttttgatctcaggggaaatattttgactagcagagaaactagtaaacttgttctgttttcatatatgtcttattgacagtatgtaattcttacttctaatccttagcctttatttgacattactcagtcacaaacattgctttaacattacttgtatatatcactgatgatgagagatgtagaaagtaactagagacttcaaaaccattaacaggcattgaactttttacaataaatttgcagatcagtaaggataattaaggacaagtattctagatctcaacataaataaaataattcattgatgaaaaagtttagtagtaattcatttgtatcaatctcagagaacatttttatttgagtccccaagaaaaaaatatttgcatggtgttggcatctttgccatacaaaattgtaacaattaatcatttttgtcagtagttagcatcaatctatactcatcatcagacatttaagct

SEQ ID NO: 80630 - DNA, 2203 bp, Cannabis sativa
ttttttttttcatgcctatggtattcttggcacaacaagttgtgccaaaaaagtgtaaattggcaggacaactaatatggagtgcctaatgggtccttctggcacgacaacatggcatgcctatcgtcgaagtatcgtgccaaatttcaattcttttataccccttctgccatccttttgtgcactacaaaaaattctataggtaccaaaaaattgtataggtaacactttgtcgtgctcaatatttcttttatttttctaaaaataaagtattttaatttaaaatatgaatattactataattaaaaattaaaaatcctattgaaaaatagaaaccaaaatatttataacaagtgccttttattatgtaaattaacaatccaaattactactaaattaaaattgttcaaataaacaacacttatacaatcaaattcatataattataaagaataacactacaatcctaaatgggaagactaatgttttgggatctccaacatttgtggatagtaaggttattctgatatctgatatctttgacatttatagttgttggatctgcggcatctgctgcattggtgcgcatccaaaaaattgggggcatctgttgtatcaaatctctcaaaaaaaatagtgtcaaaacagtaggacaaattaaattgcaaacataaagtattgaattaaccaaataatatataaacactcaaatgttatttactttttttgttctaagccaaatattataaaattctaagaataaaattaaaaaattgttgtacaaactgaaatttactctaaatatattgcactttttaattaattttaaatacaatatttatatttttcataaattaccaacttttaaattaaaaatttaatatcctaactattgatctcgcttttggccaatcaattaaagcgattagaataaatgatattgaataagaattatataaaattaagcaataagaacacatatatttatagagattcgaccccgtgatagtagtaatatcttactctcctttttcttgtatttacttatgagagaagaagcaattgagtttcttgatctctctcgaaagcttaaaattttacagcgtaagagctctcttaaagaattgattttggatccctcaatagtgaaatggttcttctgtttatagggaagaattgcattaattaggtttcctaaaaccattaagaaataaaatgggaaacttgtttactttccttcaatcgataaaattaaaaggaaaactaggatggtttcctcttatttcttgtcggtgcaaatgtatcccacaaaattacggatgtgattgagatttgaatgcttgaacatttatggaaagtatctctaaagatcttcttaagctgaagtaccttagttgaaagactcggtattcgtgaatgacatggatttgtaaaggtgatcacgcacaggttatacctggatgatccttactgaagatgtaaccttgacaactttaattagaaagttctctagctaggctcttaagtaaaaatgacccatccatgcttctcaatattcttcacatgtcaccatgttagatgccacatcatcttatgcagaatttaggataacatatgccccccaagttcgtgtagaatggtctacttgcacgcgagcgtattcaaccatcaggttggtcagatgggtgacatgtgttcggttcttgtgctatgtcttgattcgatgtgatgtgatgaaattagtgaagatatgtttgtctcttcagtgctgggcctttaatgccttcttgaattatagacctcgattgacacattgacagttattaagtaccgcgtgcctgacgtgtgtactcctaatatgtgattattacactttttcgaggagaaatccaaaatttgaattccagattactaaattacccttctaactgcctataaaaggggttaaaaaattcctttatactcttttagctatttttattcttaaagaaaatcacagcataaaaaatcctttttctctttataatctttgaagaattattgcttggaacatgatttacagaagcttcccaagagtatttaagagtatccaaactgagagtaagtcctctttctctttttttttttttattttttttaaatacacacattgttgtttttgaattgcttttttcaaatttgggtttttgaggttgaactttga

SEQ ID NO: 80631 - DNA, 727 bp, Cannabis sativa
gcctgctaaaatagaagggtcttatcgtcatctttttgtttatttaatttaaaaaattaacatctttcttctttggctataaattcgtcacatatctctattttttacatactacttctatatgtaatactaatagttattgaaacacaaagtatagtgaataaaatgatttaaagagctagtaaatactacatggttttttttgatacagctgttaatgatcataactcaactaactgagataccaaagtgttgatgccaaaaaatttctcactattgagttgctaaaaattgaagggctgcaactctctctccacgaaagccattgtatctttcttacttcgatcgttttccaaggtaaaatcttgcaagaattctgaggatttcttgcaaaaaaattctcagatacttaagttagtcagagcattagggatttagtgagaatttagatacatagacccttttcctaactttttattttattaataccatatgaatttagagggaaataatcgtaatcaattagctttattgacttgatgcttaacggctttgagcccgaatttctcgcttgaacccatttgatttaattgttcggatcgatggcgtcaatagggccttttccttatttatgtggatcgatgattttagtagaactaggctgtaggaatttttaagataggattttactatcttgccccctacaccaacaaacaaaacaaatcaa

SEQ ID NO: 80632 - DNA, 2179 bp, Cannabis sativa
attaataataatatgctaggttgaattctactttcaacttaagaaaaaaataacaatttacaaaaacagtgatattaggcgtgtttattcaatctaattcgtactattttgctcatagtgtattcgatccgcactaagtacatatttcactttttagatccaatacaatccgcacaatagctcaaatctgattcaatctaatccgcaaaagtgcaaattggatctgttattttggattggttactttttaatattaaattatttaatatatgaaaaaaaaatatttctttcagcaatgaaataaaacaaattataattattttatgtctccaacaacacattaaaataaatgaaataacaaataacaaattcaaaggaagaaaaaaaaactgtatgtataaataaatatttacttttattttaagttgtatgtagaaaaaaaaaattatatataagaatagaatatacttttgatctattaagttttgaaatataattttattagacttttaaattattattttctttacattaaaatattacttatatatataaatttttatttttttttataaagatgcgtggattgaattgaatcggttacttttacatgtcaatcaaaatctaatcctcatgtgtagattttgaattttccaatccgcccaagtgcgaatgtatgctctttgtggattagattggattggattggatcgactattttatgaacacgcctaaataatataacgatctattgtattaaaataaatccattccaatccatttcaagttttcaattaactatataattctttctaatgcaagaattatagtataaaattggttcaactgtcaaacttaactcatctaattaagtttgtgcttttttttaattattccaagcattttcttacattatcaaatatcataaataataaacttctcacctaaaattatttgaatacatttataattttatatgatactttttttaaatatgagtcctagctagctactaacattcatcatcatatacattcattaacaaattagattcaattatacaaccccatcatagtcacaaattaatacctaaactttgaaatctatactagctacatttttttaatgagtaataatatatacagacataaattatatataaatttggcatagacttatctaataagaaattaaattaattaaaactaaacttatctttatttaaaataaatttcacctgtttgctgctacaaaaagctaagattatattttttaaaactgatatttaatctaattacatcgattcttgaaactgacgtatatactctaaatgcaaatgctacttttttgtaataccaatatatatatggaacacttcttaatgagttcttacttattaccctggttcaatactgacgaaaaaaataattaaaatagattcaccaccacaaactataaattagcactaaaaaaatatatacaataaatcacttatctattagaaaatagattcaaaataattgatcaaaaaataaataaataaacaatataagggagagacggagtccataagaactcagattgatctggacgtggagagaaccacctgaaaaataaaaatgatacactttaacataatgaaaaaaaaatgagagggagagatccaggcatagaggcaatttatggaatttccatgggcagaaaggctatttctttagggtttgagttgataatgttggttttgtagctctaaattagtacagcgaaagcataattaatgattatcatcataccccactcaagacctccatatgtatatatatatatattaaattataatcaaaagatgaagataaatatttatctcttgaagtgtaattgttgaggttttatgctctaaataaaatctatttcaatataatcttatttgctattaatagaagattataagtcatttagtatacatgtagtttttatgagattttatggttttaatatacaatttttgtcaaatccagaacatatagttattcacaattacactaatgttatcatagtagaaagtaattgtgattatatgcttcaaagtacttagtcctatgatttatcagtgcactggatttatactgacgtgataatcaacaataaaatttgtttatacttgtataagtggtatgtc

SEQ ID NO: 80633 - DNA, 2031 bp, Cannabis sativa
aatctgattataatgaaatgagttttatttagggcataaaacccaacattatcattatatctgttggttcatattccacaaaattgacacgtgtcactttctaaagtgcagccgaattttgggtataacagcctgctaaagagataaaggcaaatgatgacgatcattaatactgcccacgcgccccacactactagaaaaatggatttcagtgacccatgttgagtgtctctaaaaatatttagtgacacttcactgcgcgtcactaatgtgggtgactggaaaaacagtatttagtgacacttcagtgtgggtcactaaatccttttagaatctctcatcatgtgtcactataggcttttagagtcaggcaccgacaaactgtaaaagtagcagcaacacttcaggcatgtcactatatatttttcttttcttttgttaattattttttaagatacaatgacgcacaaaaaaagccactatatcatattttttttaaaaaaaaataataaaatcacaaacaattaattttgattcatcaaaacaaatgctaatttgtatattaatttctcttgtcatatagcttttcttttcaagagagagtagcaattttttaatacagatactaaatggaaaacattatattatcaatcatgaaaagaagaaatcaaaataataaatctacaagtcctaagggcctctacatcattggtgttttatgaaccatgaccccagccacaacttcaatgaatccgaaccatcccaccgtttcagtcaacctacagataaaaaatagatatacatttactcataaatccaaacatctatacatatttcttgccaaaaattaaaacaaatttcatataaaacatgaaatttcagaacagtcaccaaataaaatttggttttttttattagccaaaaaaaattattgaaacaaaataaacctaaaaaaatcaatccattttccctccgacatacacgaaccaaaaacctctgtgaaacaccaagctccatcgaacacggatgatcgaggtcaacgacaagctcgaacgttgtcacctgcacaagagaaatagcgagcgagagagaagaaaagtagagaaataaagaagagaaaatgagaacaagtgttgatctttgggtttcgaggttatggatctgggataagcatttgctggaggttaaatagttgtctcagccgaggaggagagacaacgagtcggagagaggccaaaaaggggagatggcgaggtggattaggggctttggaagtcgacaaagttaaatatgatgggaatttttggtccccagtcgccggaggagggctgcgcagccatgacgagagagaaaacgagagaggtgagagggagcgaaagaataaaaactaaataaaaaaattagggtttgtgaaaggaccaaataacatatgtccttttatttatccttcttataacttgttttcttttgccccaattaaaaagtaagtaagaaaaaaaaggctaaaaagagggattggtaggctcattttagatttttttaaaattaatattttataagttctttttcttttgtttgtttttataattttttcattaagtatttagtgacccgcattgtgtgattctgaatacttttagagttgcacaatgccaatcactatatatatatatattttaaaataaataatttttagtgacacccatcatggaacataaatattaaattttacggtccagcaatgcgtgtcactaaaaactaataaaaacatttagtgacccacactttttgtgcttgtcactatagagtgtcactaaatgtgtaaattatagtagtgcaaggcacgtgtcattgcatttattgaggctggagacggtgcacaagtctcatttacccacgactaaataagacttgggggtgaatgttgccccaagtttctcccaatatatgtggcaactgtaatgcgggacacgtggcaggtagaagcctatcatccggagatgaacaaaagacttaattaaatctcctttg

SEQ ID NO: 80634 - DNA, 1842 bp, Cannabis sativa
gagcttattcctctctttagttgttgcatctacctgcaaaggattccccaattgaccaacaatcttgaacaaagatttgtcaccccagtatttcaattccaggtctttaacttggatccagataggtattgttacgatatcctccttcctaaaattggtatcagggtcccaagccttcatgatcattggtcttttattaaaaaagacatagcctccattcaaaatcctgtccttagtttgtatagagtcaaaccgaaccagaaaaactccataagtgagcattcccaccctatctacttctccattccagacccttctaatgaaaccatatatcactaataaaggaggattggctcctaacacataacatactaaagaaggtctccgaaattccacttcatcttctatatcctctaaattgatcttaacttttgctttagcaacctgctcattcttaaatgagttttccagattcctaacaacattgtcagatcgtaaaatagggggtattagaattactttgagcaatcgaggcagcacacctccgatttgctcaaaggaagaagtcaaaatcattacttttttttttcaaaaagagtaacagtattatttatttttaataattaattttttgaaatcatctcaaatctaatttaagctcaattaaaaaaaattgtttaaaacaatattgacaaattgtatggaaggaactaatttttactattttaataacacaagggatcctttttatatatatttttaaagtggatggtccaaattagaacttacctagaggggacatccaaaaaaaaaatctaaatattaaagatgatatatagtttcttccaaaaaaaaatataaattatataaatttttatttaattaattataggtcttttattttttggactttttccctgaattctctctctcctcgcgatctggttttcagattggggccatggctaagactagggcaaaaatacaggggaagcaaaattcaatggcaaagaacacacggaagatgaagaagaagggacctacatccacggctgatgtgaggaagaccaagcagattgaggaagttcttgaggttgaacctatggtgtttttggaggatgaagatgatatacaagaagacctttttcgacctccactttcgcctaggtcttctctgcaccagatcaaacttcgggaggaaatacaagcagatttcgactacttcctttcaacaaatcgaaggtgtgctgcctcgattgctcaaggtaattctaatacccctccccctgttttacgatctagcaatgttgttaggaatctagaaaactcatttaagaatgagcaggttgctaaagctaatattcttttaaacaatttttttttaattgagcttaaattagatttgagatgatttcaaaaaattaattattaaaaataaataatactgctactcttttttaaaaaaaaattactaaaaatatgataaagggggcaatttttactattttaattatcacatggtcctttttataatttttcaaaatgaaaggcccaaaataaaatttaacataacagaggatgttagactttttatttgggcttacattatattttattgattttattaaaacttgggttgattggatagttatttgctgtgttagcccatattgttggtgatcacttgttaatgggcttagcatctatgtgtaaagtctatgtgaactagaagtgtgggcttttctagttaactgaagcctttgatgagcagtccaattagggttatctagctaagtcccctccctaactctataaatacatattgtctcatcacaattgtat

SEQ ID NO: 80635 - DNA, 2386 bp, Cannabis sativa
acccaccgactgtgacacatttcattttatttttatttaatgcaactttttttagacaaacacttacataataatgtgctatagtactactaagttttcttctcatttactctctcttttctctctaatattattcctttcttcttgaacttaccttccattctttttataagcagagtaccgaagctagcttcatcttcaaaacatatacgagagttgttacagtagtcctttgattacaataaacacacaaaatcgatcacagggaaagaaaaaatggctgattggggtcctgttgtgatagcagtggtgttgtttgtgctgttaagcccaggactattgttccagttaccagggagaaataaagtggttgagtttgggaacatgcagacaagtgggcttgcaattctagttcatactgtcctcttctttggtctcatcaccattttcctcatcgctattggtgttcatatctacactggataatcttaaactcactactattaatttttacacttgttatgttttttttttctaaagtttacacttgttatgttgtttttaataaagggttgagtttcttttgttctttaattattattattgttgttgttgttcataataaaaattcttgttttctttttcttctttagaagaggttaaaaaaatatttgcttcttgttaacttatatgggtttgttttttgttgtatagtagtaataatcaagatgtgtgttatttgttgttcaaatttgagagagtaaaaggatatattaaatggggttttttttagaaattataacccattaccctaaatcataccgctatttaaataattttattttaaaatttgtaacaaaataatatttaatattatttattatttattttttaaaaaaaatattatttattatttatattgtattatacatcaaaaatttactttttttttagaattaaaaacatattacttaaatatcataatatatttatatcgatttttttatttattatgagttgttggtgtatatatttaatggtacaaaatttatttcgttgcatgatatatacatctattttttattttattatatttttttattttttatatataatagtagtatataattttattagtataatatttcttttaatgtatacatataattttattagtatcttatatatatttaattattattattttatatattttaattattattgtttagaggtaattaatttttaaagatttatagtgtcggttttgataaataaaatttgttaccgatgttgtttcagacgatattgtagggattaaaattactaacaccggcggcatagagggacttcatggtattggttattatgaaataatcgacgccataaaatttttatgtcgtcggttattatacaataactgataccatgagactttatgaagtcgattataagaaaaaaccgacatgatattagatgtgattttcataaaaaaaaaaataatctatttttttatagtttaaaacgtaatataatttcacaaatttaatttatttaaattaattttatacaactaaaaaaaacaaattaactaaatacttaaatgaatttattctaactaaatatattacaaaaatattttaaaattagtgtaagtattaataagttaatatacctaaataaacatagaaaataataaatattaaaattacaaattaacataaaaaataagggataaaaattcttatacaatttagcgtcaattcaagccttcgtgaatcactgccagcaattattctatccattgttgttgtaatggtaaaaatttagtttttgcatcgtgtatcttctttttctcatattgtaaaaagaagtaaatatttatattactatatatattagattatttgttaatataataaataagataattcataatttaaacttacaatttttttattggttaaataacgattagaatttgcattacgacgatgtcacttatgtaaatcaatatataaaaaccacatttttaattttttttgttttgttagacaatttgctgatattcctactcaataaacacacgcgatgtcccttataatagtatttcaattaattaacatatatatataacttagttaattaataaaagatttgttatataatgagtaattaaattattacattttcaacatctcaagaattcgttgggggacttcgtgtgtcttctttttcgcatattgtaactcttcttgcatgagcacacatctatagaaagcatcagaccaatactttaacgacatgtgtgctcgtgcaagaagagttagatccattttagctatgtgtctatattttcttccagctctaccatttatagtcgagg

SEQ ID NO: 80636 - DNA, 2793 bp, Cannabis sativa
aaaaaaaaaaaaaaaaacaataactacatttttttttgaaaagagcattcattgataataaaattagacctctcggtcattacaaaataagtcttgaggaatagaagaaactcccaagttaccaaattgtttgtgggtaaaagcccacttggccacattgtgggtagcaaaattacaagatctgggaatacaagtaaaaatgcaaccatcaaaacatctggaaagtttccaacaaaacggagaatagttagcgatctcccaaaccaaggacacctgattaagagtatcgatcaccactcttgagtcactctccacgataatgaacttgtgcccctaagatctttgccgtttcaagagctaaacaacacggagctgcctcgccacaacaagcatcagagaaatcagatcttgccgtattatcccatatcacctcaccagaatggtgtttagccaccaccgcaatgcaagagttttccgatcctattctgacatcacagttaagtttgagccgatccagaggaggaggccaccaaatctcactctagacaattgatgcaataggaagaagagctctttgcaaatctacataagaatagtggataacatcaatacattggttcacattataatggaaattattgttcactttttcattcctaactcgccagatagtatccaccacgaccaaagcatataaaaagacttcattcgcattgatgcccttactttttaagccctagatgaacttgacccaatcgtaaccacggatagcagagtcggaaaccagataaataccccacggagaagagcgccaaaggaggaaagccaagttgcaattaaggaataaatgtttagttgattcctcctccaatccgcacattaggcagttaacatcatccacacggaatctctttggtccatatccaattgtccttttcttgtccagttgggtctcctcctttcaaaacagcagggatggtatatctttgtcaaaaatacgcttcaaattctgtagatcccatttcccagtgcctaataacaggtcagccaccttgtgtaaaccctcagcaggtcgcccattagaaactgggtaaaaagatttgccatgagccacccacggatcatcccaaattcttatatccctaccatctgacacctttttacaagctctttttcaaaagatcttattcgcttttatcacatttttccagaagtaggaatctgagtctttatatttgcaattaagcagctcctttcctctgagatacttgtctttcaagatcttctagcaaagtgattgattatcatttagcaagttccaaccccacttggccaggaaggcttgatttatttcattcgttatccaaaacgcaaggcccccttgacttggggagacacaatttatcccaagacttcaggtggattccatggtttcctttcttaaagccccacaagaagtcctggacgaagccgtcaacctggaaatatgatggttagagagcttatttgtttgcatggcgtacagaggcatcgaaagccccaccgattttatcaaagtagctctccctgctttcgaaagcaccttcgctttccacccttacaactttgaagtgaggtcatctaatataaaatggaaatctccatctttttgtctagatcggaacaaggggagccccagatatttcacatttccttcaggtcccccaatccccaactcatctcgaattcccttcttcaggcttttctgatgtattgttgctgaagaagattgatgtttttagcttgttgacctgctgcccagaccagtcacaaaatttcttaagccaaagccagaaacctttagcctcttccagagaagctcgagaaagatgaattcctcagatacttccattgtattgggcctcatggataagacgggacaagatcttagctgctcaaataaagaggtacggagagagtggatccccttggcgcagaccccgtgatggatgaattatgccaacctgacccccatttaggcacacatttagagaagtagtggatatacattgagaaacccactttctgaacgcgacatgcacaccaaagcaagagaaaacatgatcaatgaacaaccatctaatcttatcataagcttttaccagatcaattttgatagcaaaaaatccttctttccccttcttcctattgaaagagtgaatgatctcttgaacaatgatgtttttatcttggatgtttcttcctggaacaaaagcagcttgggtatggcagataattcttggaaaaacggacttgattctgttggcaataattttcgatatcaccttataagacacattgcacagagaaatcggcctatattgatgtacccgctgtgggttccaaatctttgggataagcacaatatttgtggcattcacccccttctgcatattacaagtggagaaaaaatttgagatggcctcacagaaattgttcccccaaagactctaagtaatgtttgaagaacaaaactgacattccattcggcccaggagccttatggtttcccatggcgaatacggttttttgaatctcgtcaaaattagggattctgatcagctctcctgctcttccaaggacagtccctcctgaataggattcgagcagttaagatccatcctagaacttgaatctataaataaatccctcaagaaatcggtaaaagcctttccaatgtcatttattctggagatccaaatgtcattcttatccaggagaatctcaattgcattttgcctacctctaatagtg

SEQ ID NO: 80637 - DNA, 855 bp, Cannabis sativa
gaagaagtatcccaagaattttatggtctccataaaaaatgaggaatcaagtgctttcgagaaagaaactgatcgaccttgtggccaaaattgggacccaacgcccaagttgacgttttatcaacttagggccatttccaatagcagtttagaaaaggtcttttgggcatattctctttcatcaataatcaagattcgagtatactttcaaaaacaaacagagtcatttgggagctagaattgggacccaacgctgaggttgacattggcactgggcccaacgcctgagttgacattttgtcaacctagactatttctaatcagttttttcaagaatttttccaggcatattatctattttcttaaataactgagatactagtgtttatgagaatcatatggaaccatttggtagcaaaaagctggactaagcacccaagttgacactggtgttgggtctagcacataagttgacattttgtgaagaacaaattgatagggctaaatatccttccaacaaatataacaaatacatacttgattaagaaaggatatgctagtatttgtcatgagtttcctactgtgaacttggcaagataaattttgaaatagattgtccgtaccaaatatatagattcatcttgcagcttgtggtattagatagattaagattattcaaatcaaaattgttcaaatacaatatacacatagatagaagtgcccaatttgcagaatgagtaagaaaccagagattatttatttttcaaattgtcacttgagtttttaagttttggttaaaataaaaagatggttgaattgggcagccgctgtggtatagattttagggctgctgca

SEQ ID NO: 80638 - DNA, 1357 bp, Cannabis sativa
tctctctctctctctctctagggtctcacacgcctacaccaattaaggtgcgtgtgagattcaacaaccatatcgcattgcagtatcttatgagttgaatacacactgtaatatttaaattaattcatccaaataaaatctaataacccactttattcttgagtgttgaggttggcttagaagatcaaagtgtgaatttttcaacgaatttttttggattagatgattgttagttgtactaaaagatagcaagtataccctgatataggtttcaagaggtattgtctttcttccattagtctaaatttaatctatatacattatgttgagatccttgaacttatggttcatattagataaaaattatttttatcaaatttcgctttcactttctcttttataactctgataaccgtttattgtgtattagtgacttaaagattgaagtgatgacaatgtattaggattttgtattaatattaggtagggcttggactcattatgtgacttaatcattatgtgacttttcttaatatcatgttagtgtcagtctaatatctaacatgtgttataaaccgatactaatgagtatcttacaatgtcgaacattttaatcgacgataattttttttttctagtaatatttataagtatttatatatattaggtggtgatcgaggtatgctatagttgagttttatcgaccagactcaaaattggataatataattaagagcattactattgggtattagtagtgcacaacactttttataagtggcgtcttacgattggttagtaatatctctaaaaattattttcttaagttatatggaacccgatacttaattacactaataacagagggtgtcaaacgctaattccaatgatgcttttttaacatttctctatcaatgaagtgctatttattatagttgatttatctcataataagtatcacaaaccaaacaaatggaatggtttaagagataaaaaaaaaaaaaaaatcaaaatacaaaataagaatgaaatcaactactgatctgatctgattttgataaagatgaattttaaccttccattttactctagaaaaataaaatctaagcttacatacatttgatataaaatccttgataagtattctgccattaatcacaattagaattgaattaagattgaaaaggagtaggttattgatcaaacttggaatatgaatcatatcctataaaaactaaatatatatatggaaatctaatctttttttactttacatataagtgtgtaaatccaatctagatattattatcatatatttgttatcatctgttgcattatttatacataaagtgttctt

SEQ ID NO: 80639 - DNA, 1742 bp, Cannabis sativa
  modified_base (1323)..(1327): a, c, t, g, unknown or other
tttttttttttttttttgcatcgatctattttaaatctacaaaataaaatgaaggagaattggaattaagtttaaatataagacaatttacgagatggtctaacatttagatgattcaagcattcaagctaacaccaatattgatgaataaattaaatatgaattttaagatcatgcaaaagaagaatgtcctcgattaaagagagatattgtcgttgtttagattctgtttgtttggctttacacagaagaagatgttgaaaaaaagaagttgcataacaagataacgtgaaagaaaatgaagaattaatgtgttccattcttataggttcatttaaattcgatgatctagcggtggcacagacgttgaggtaattaacttgtttttatagaatttttctccaacaaaaatttggatttcaacatgagaaagaaagaattggaatgactggaaaaaggaaggaacaaagaaaataaaatagttttttttttgtcttttttaattctttcatagtgaacgactgaacgccgtaaaaagagtcacaccggtgtaggtcccactatttagtagtgattgacccttaaataattttaaaaaattttataatgtacctccttaaaaaggatgtactgatatatatctatatccgaaataatttttttgtcaatttttttctcatacccatataaattatagttatttaaaatatcttacaaaattttaaaaaatttggaaaaatttaacacgccgaaaattacgttcaaacagtgtaaaatagattgtttgaatattgttttctataatgtaaattatttcgagtttttcaaaattttgtaggatatcttaaatagctataacatacatgaatatgaaaaaagtaagacttaaaaagttttttgatgttaaaacaaataaagagtgcatcagtacatcccttttaatgggtgcattgtagaataagctacgagtgtgttttaatgaataagcttataataacaaaactcaatttagactataaaaaaaaaagtatttaattaaaattttgataattaatataaataaatgggtgattctacaatgcacctccttaaaagagatgtactgttgcaccttctactggtttcagcatccagaaaaaaaaattagtcgaatttttttatattcatgtacgttgtggctatttaagatatcctacaaaattttaagaaaatttggaataatttacaaaatttaatgaaattggaaaaagtccttaaatctaaccatttcaataattcatggggattttttaaagacctaaaaagttcagggggcatgatttnnnnnatgtcaaagttcagggggcaaaagacttaattagccttttactaatatgacgattgtccatatactaaatcccgccccttgaacttcgatatctactaaatcacgctcttcggtctttcaaaagtacaaaattgtatcccctaaattttcatccacatcagactttgtttagtaaaattagacaaaagtctttaaatccaacaatctcaatagttcagggggaatttttaacgacctgaaaagtttagagggtatgatttggtgcacgtcaaagtttaggggacaaaaatctaaattatccatatatattgttaacgcagatttttattatctaaatatataaccttttacgtaataaatatactacaaaatttaataataataataataataataataataagatcggaagagc

SEQ ID NO: 80640 - DNA, 3001 bp, Cannabis sativa
tgaatgggtatttcggctgctagggttttttgcatataaaaggagtttttatactgccataaaggtagggttttgagggggaaaggtcaagtgtgaccttgggtttttcgtactttgtggtgttaatgtaggggcattttcagaatgctttatttcctacacaagagttagttaggaaaagttagttatttttcactgttttttgttgcctatatatatgtttattccattatgtaaaaacacaatgttcaattcaataaaactcttctctctaaaagtgccctattcctaatatggtatcaactgaaataatttgaagcttcaagcagtccccttcaagcttcaccattcaaaatcctccctccacaatcatggtgcgcacacgagccacaagttcagctaccactactgatgatccttccaaagtcgaagctcccatggctcatccaccatcaaatcattccgctgacaaccctcctcgaacaactcttccttttttctctgttgttcatcgtcccaatccagtcgacagaccagcctataaagatgttcgatctccatactacatcagcatgactgatcatccgggtttatcccttgttactcctgttctttctgtcaagaatttcatcccatggaaaagagacttcaagctctccatcagagctagaaatgagacaccctttcttgaaggtacacttcctcaaccccctgataatgatccccttcttaattcttggaagccacgggttatcggcttgtaatgtcttggatactacactcggtttctcctgaaatcaagagtagtatcatgtatttttatactgctcatgaaatgtggagagtgttaaacaatcagtttaaccaaggaaatggtccacgaatttttgaattgaatgaaacactaacctatctcaatcaaggagatgattctgttagtgcatacttcacaaaactcacagccatatgggatgagatcaaccaattaaggcctcgaatcccatgcacatgtgctgctgctgcacaacacttggatcatcaaaatcatgatcaagtgcttcaatttctcaagggtctaaatgactcatatcaggtcgtgcgtgataaaatcttgcttcttgatccatgccctcctctgaataaagtcttttctatggcaatcaaccaagaaagacaaagatcattaggccatcgcatgattccatcaatggctacctcaagttcttctattccccaagaacctactcctgcagcaaatgcagtatccaaaaacaagagaccaagaccacactgtaccaattgccaaaaatctggccattacaataaagataagtgttatttcccaatcgggtttccccttggctatggcaatcgaaaatcagaggactccaccaataccagaaaatctgatgctggtaccacatccgacaccaatccacatgcttcaaaagtcacctccactacacctgatctctcaaactcaactcacaccagctcagtgccaacaactcatttcaatgttagcacaacaattgcagcccacagatgcctccacatctactgacaaggttgttgtgaacaatttttcaagtatatctaaccctttctcgtggattatagatagtggtgccacacaccatgtgtgttgtcaccttgaattcttttctcccattcaatctaaccctactggtttttttgttcaactacctactagttccaaggccaaaattcacaaaattgacactgttattattaattcacacattacactcaataatgttttgtttgtacctgactttaagtataatctcatttctgtcagtgcactcacacacaacaccaacactacatttttgtttaatactataatagttgcgatatccaggaccctttactgacatcgaggattgggatagctaaaatacttggcaatcgctactacttaaatcagacataaaagcaattcgcacatacaatgctgaagaactcactctcaccactttctatgctacaaaaggagtgatacactacacctcatgtgtaggaagaccacaacaaaatgtcgtggttgaaagaaaacatcagcacatactcaatgttgctcaagctcgcattccaatccaatttactactgcaatattggtgctttatggtttctattgttgtttatcttttaaataggactccatttgtcctattagaaaatcaagcatcctatcaactactccataacaaaccacctcaatattcacacctttgaaactttggttgccttgcatatgcctcacgtgttactacaacaaccaaattgtcccctcaacccagagcatgtgccttcattggttaccctcccaacatgaaggcctgcactttactagaccttcaaaccaagaaaatatttcattcaagagatgttctcttctatgaaaatatttatccttttggccacgtctctcaaacctatcacatagacaattttttctccaacataactgagactcatccatctcagaaaaaatcaaaatccatccatcattactgagaccaatccatctcagatatacaatcgagacaatcaagtctctcaaccaaatgtctctgaggcaagttactgaactccatcacccttagactacagattcatctcacacaaataaaaaatcatgcactaccaaatcaaatcgtgcacaacaaaccccagcttatctaaacgactatcagtgtgacttagtgacaaaaaccactagtacaaaccatcccctcatcaattacttatcttaccataaattttcaccagaattttgagcgtccattctgtcattaagcctcaaacttgaacccacatcctacaaacaagcttccaaatacaaagtttggaacattaatgctatggatgtcaaaatagatgccctcgaaaaaaatcatacttggattgtcgttccattacccccaaaccaacatgtgattggcaatagacgggtgtacaaaaagaaactcaacc

SEQ ID NO: 80641 - DNA, 1510 bp, Cannabis sativa
  modified_base (684)..(694): a, c, t, g, unknown or other
ttgtcaaagttttttcctccagcttaagctgccaagctgggagcagaaactaataatttttgtcaactggacaacaaatctctctatgaagcttaggagaggttcaaggatctcattagaaaatgtccacatcatggaatcaaaaagtgaatgttggtgcacaatttctacaacgggctgattggtaatactaaaacaattatagatgtcgtagttggtggggcatttatgagaaaagtgcaaacgaggcgtatgatctgcttgaaaaaatagctatgaataaccgacaatggccaactgaaagaagccagtctaagaaagttgcaggcatgcatgaggtagacaccatcaccaagttgacagcccaagtggaggccctaacgaagttaatggctgtgcaggaaaaacaagctcaagtcacttgtgagctatgcggggaccctcatacctatgacacatgccccgtggatgtggacagtttgccaatggatcaagaaaaagccattaggaattattcttaagataataatatgggtacaatcaaggagggggtagtcgaccaaattttcgagggcagtcctctaatcagcagtagtaggggttttaccagtagagaaatcagccccagtaaaaccaacaacagccgcaacaacaaggttctagtggaggggctagtctacaaannnnnnnnnnntacagttcatgacagagactagatcatccataaaagccttagagaatcagatggggcaattggctactcaaatggctacccgccctcaaggtaactttccaagtacaacggaggtgaaccgaaaggaaaattgtgaggcaataactttgagaagtgggaagaagtatgaggggtctaatgagaaacaacaagtggaagaagaggtttaagaccagcaagcattgacatcagaagagaagaagaaaactgaaagtctcacatcaaaagaagcaacgcctccgatcaacattgagcaccatgtaaagatctcttatcctgcagaggctccaaaagaccaatttggacaagcagttttcaaagtttttagaagtattcaagaagttttacatcaacatccctttcacggaagccttggaacaaacgccaagctatgtcaagttcatgaaggaaatcctgccaagaagagaaaatggagaattatgagacaatggcattaaccgaagagtgcaatgcaatactacagaagaaactccctcctaaaattagagatcttgggagttttaccataccttgtaccatcagaagaatagaggggatgaatgctcattgtgatttgggagcaagcatcaatttgatgtcgctgtcagtttttagaagatttcaattgggagaggaagccaacaaccgtaaccttccagcttgtcgatcatttgttggctcatccaaggggggtcattgaagatgtgctagtcaaagtagataagtttattttcttagcagattttattgttctggacatgcaagaagatagcaaca

SEQ ID NO: 80642 - DNA, 879 bp, Cannabis sativa
  modified_base (809)..(815): a, c, t, g, unknown or other
aaagacatattcgacttcttcttcattagacgacgaccaccttaagccacgtggggagcgaaatcagagtcatcatcatatttggcaatggagatggagaagcaaagtcataaataatagtcattatatacacaaaatgaaagatatatatatatataaatatatataaaaaattaataaattaggtagttggaagaagaagaagatagcgaagtttatgcctaggaggtagttttcatgggttttgaaggtgagttttgaaaaggtaaggtggttttgaaataaaaaactgagaaaaaaaagaaaaagaaacttaatgctaaatctaaaaatgaaaaataaaagaaaaaacaagaaaaaataaatgatcgacttgatatttatgaatggatgtatgtaatgatattttggtgaataaaaatttattaaagataaaattgtttctcatatggtatttttataaacaaagggtcatattttttatgtaaaaatttctataattttttttctcaaataaattacataacttaatttgatataataataaatcgtttactatttatatgacaatttttagttggtgctaacaagctcattcttaaactgtattgcttgtttaatttttggtggatttattggaataaatgtctcatcgtcacatggtctcagatttggtgtttccattgtgcgcacaaaatcatgatttttacatatatattttttttaacatatgcatgatcttattttgaatacaaaatatgttacaaataattaggggtgttcacaaagtatccgatccaatccaatcnnnnnnntccaatccaatccaatccgtaaaatgcggatatccgcacttgtgcggattggattggattgaaa

SEQ ID NO: 80643 - DNA, 1805 bp, Cannabis sativa
aaaccagaacccatactatggcaaactcctgccaacaagaactgttaagcttccataatacttcgccaaacaaaattagaattcgcacccactccaacagtaaaaaagatccattagaataatagcgaggcttgaaaataccacccactagagagtttggttgagtaaacaacctccacccttacttgcctaaaagagcaagttaaaaacacgaatgcttaccttaagtgatattaagtctcttgtttgtgaactttaaattatgtgttccttaaaatataaattcttacttgttgtataaagtaattaaatggtacgcaaagattatttgctttagttaattataattttattgtctaaattttttttaaaaaaattctcatatggcttgatctttgatattttcatggtgaattcttagtggtatgtatctaagtcaattaaacccacactcttggattgattttgaagtattgtctgaaacaaattgaatttcacacacaaatagagtttgataaaattgataacgaacaaaattatggtcatgttcttaccttcctatgtactaatttccaattagttatataccaaacttatataatgcaaaagcattacttcctactccaaataataaaagcaaagtcacaacaaatcttgaaagttttgtttgccacttattcttattattaatgattttttctaataatccagaaatgtattgaatccaactcagttggaagctgatatttgcctttaacaaaaatgcactgcaaaaatagaataaatttacagaactttaaatgataataagatttttctctgttaaatattcactaatttgagtgtatcaaacaaaaatacatatttacttgcacgttcatttacccataaggatgtaagagcaccttctcgctcgagtaaggcaaattttctcgtctctgtacatcaaagggtggatgaagttctggacttctgaatcttctcgtctttggaagtggtaggcaactgcaatggcgaggaagaaaatgcagcgtgatatgaagacgaagcaagttgtgcaactgcaggaactgcaccacctgtggatttttcaataaaatattagcaatcgttctgtcaatctcatcctgaaatgatggaatggaacattgaactagttggtccaaggcagtcggaaacccttagattaagataattatgcagaggattaaagagagaaagtagtgctatttaaaaacaagactacaaaagctaactctccaagttaatgttgacatgcagaataagaattagaataagaatagtataatcccctttaagcaaaaagacaacaagagaagggtttaagtaagctatcgtgaccacccaacccagtgaatagacaaccatggaaatgaattgttaatttacatatttaagacatttgcaacataccagaaagaccgggcttaaaagcctcgttcggctaaatatttttaagttgttctttatgttcttttgaaattgaaaaagaacttttgggtgaaaaatagaaagttcttttctagtttaaaagatcttagaaacatggagaaagtgttgctgtaacaaagctctcacagaagcattacttaaaatcctagagagcctagtgtttagggattaaaaaagaaaaaattctgaagttgaaatgtaacaattccaatacacagattacatatagccaatctagttgctctcggaatgaatgtatagacctatttagaattgttagaaccaacaaacgttgtaattgctacatacagacctgttaaggaatacttaaa

SEQ ID NO: 80644 - DNA, 1049 bp, Cannabis sativa
caatgcctcattaactcttgccaacaatacctcctctatcgctttggcaccagaggggacgagaaaggctctcctgcaaaagctggagagacgaccaagacctctagggttgaaaccataaagaagacgaagatgagacctaaagccacttgaaggtgcacccaagacggggatgacatcaaccctcattttggggaaattgacttgggagttggtccaactgtagaactcaaagaacttcccatagaaatgatgcacccgaccaaggttgtcaatattggaacaaacctaacagaggcttagagtgagatgctcatggcttgcctcaagagaaatcaagataattttgcttggtcgcatgaggacatgattaagatcgattcgcaggtcatctgtcacgctctcaacatagacaaagaaaactttaaacccgtgcaacagaaactgctctccttgacaaagagcggtctaaatctctcaaggaagaattttaaaggttacgagagaacaacttcattagggaagctttctacccagtttgggtatccagccctgttctggtcccaaagacaaatggtatgtggaggacttgtgtctacttcactgacacaaacaaagcatgctgtgaagattgttttcctctacctcgaatagatcaattggtggatgctgaaaccaaccatgaactcctcacattcatggatgcctattttgggtacaatcaaatcaacatggatgcaccagacgaagagcatactagctttcgaatagacatcgatctttattgctacaaagtaatgcccttttgactcaacaatgcaggtgctacgtatcagagactagtcaaccgtatgtttcatgacttgattggaaataatatggaagtctatgtcgacgacatactggttaactcaaagagatctgaagaccacatcgaagacttagaggcacactttaacatcttacgagaatatcaaatgaagcttaatcctctaaagtgtgccttctccaatcaggaaagattcttggatgttgggttttatgcccta

SEQ ID NO: 80645 - DNA, 1086 bp, Cannabis sativa
gagagcagggaataacggagacgccacccagacactcaacctctggatcgttggggacttcaacattctcagtctccataggaggagtatcagagactaatagcgacttgacaaatccaggagcaatactcgaggaaagagaatcagaaatcgaaggagagacaccttgacaatctgcatttgactttataccacagctgaaacgagaatcggaacccgaagcctacccacgagaaaaaagactaaccctaagaaggaaactgcccttactatctaatcataacagggaaaaggcaagaccaccgccctgaaagggccgtagaaggagaaatgctaaaactaaataggcgaatgagagaaagcggaccagaaaactgggatggtatcccagatgccaggaagccctaaatatctcaatggtaagggaagtaagtgaataagggggaagaaaggggaagatctcagaagaaaaacaggagggaagatagtggaaaagcgaaaatacaaaaatatacacagtaattaaaacaacacatataaaaggggtaaaaatgaatgaaaaagagacgaggacgaaaggaagataaaaaaaaagaggagagggaaaaatagaagatgaaaagaaataaacttaagttaaatagagaagcagagtatatatatacctgaagacagcaagatctagcacagagaagttgaaacgagcagcagagagaaaaacacaaaatgaatttttgaaattgagggtcttatactcgagagtgcgccgccaaaacacaaagggaggttagggaattaatagggcatttataagaaaaatggttctcgaggtaccaccatcacatcaagggtaaccgccacttcctaagaaattgaaaaattcaaaaattaagaaactatacacatatataataataaaaaaaatgaatgagaaaccaataatgagaaatgaaaaatgacattaaaactgctaaagcaattatcaggggcagttccagattataaaactataactggaaatggggggagtagtgtttgggggggaaaatcgaaactggaaataacggcccaataaaataaacaaaa

SEQ ID NO: 80646 - DNA, 506 bp, Cannabis sativa
tggtaaaataatttctaacagttatatatgcgtgaaatatgtaaatatatagttgtgtaattaatattgttattcgtgtttctactaagtatgtcacacgtgggatttagtggggaagattagtttaatacttgtctaatcccaatccttttaacacaatcttgccccggagaagcctcatggaattaagaacgactcgggatgacagaatgcacgaacgcctacttaatcctccctcagcttccccacgtggaaggaaaattgcttctcttggacgtggagagaggtctaagcatggaagctcgcccagatgatacctggatgggtatttgaagggcccaatgcgaatatcgacaaccttggaatgtcgcggatatcgaccttctatgcacgccagacaccaagtgacgattgtgctttctctaacaaagatcagatcttctctcctacatctgagcatggtagtatgcatacctccaccacctttgtgccaggtggatattaca

SEQ ID NO: 80647 - DNA, 1401 bp, Cannabis sativa
agccatattataatacagcgcgagacaaatgcatcattaattgtagcatatctcgaggtgagaaaactatcacattcctcacgtttataggttcccataatttctaaggcttatgtccacgtgtcatgtccatatttaatgcttgaatatgagcataacaatttctccctacaaagtatttttctttttgaatttttgaaaaatactttttaatcgtcattattttttggtgattgcattatttatttctagtgtaccaagtaagcttcttggattttcgacagtttttgtcttcctaatagaaagataatcacgagcttttacaataaatacttgtcttttcaactgatctataagttaatcacccttgatttaatttctctttaatcgaacggtgcttacaaaattgttataagactagcatttttaatttttatcaccagttctactattttcgtctaaaaaaagaagaggtgtagaaattgaaattttcatttttaattctctgtgtatgccctttttgtctctttgctatttctttgaatctctacaaccatttctttaaaatccaagaaatgcttcattcctgactcctagattcgtagagctctagggaaaacttcatccaatccatcatcaatctttcatcatggtatgctttcttattccctttatgtctatcttatgatatgttttgtttcttgaacctatgattttaataaggtttttaaatctagtttgagttaacttaggcttttagtgatttttaggacctttgtaactacgagtttttgtatttcaaattatgtgaagtttttttttgatacatttctccttttttcaaaagaggaaaaatgaatctgtctgactttgaacttgaaaacttaaagtttttagatcatgaaattcatttttcttttgctttatcctttaaaccaaatcttgaaatcctcaaaataaaacttgaggaaaaaatgatgtaagaatccatgaacactttgagggtaaacattcttgtctacgaaaagcctcatggcccaagccttttcatcttactaaataccctttggacacacttttgtttttacccttcgttaacgttgctttattgtcaagtactttagatttctaacttatggtcccttccaaagcttgcaaacctaaactaccccaaaagcctacaatgcaatttgaggccaatttttttgaattgaaagtaacttctatagcctcgtacgtcgggccttttttacaatgatgtggcattaaacaaggtgacaagataatgaatgggaacacaatttttgaacatctcaaaaattttgcaaatgtatggggttaatccaagtcaaagaaaagaaaaaggagtagtgatgctcaagaagggtgaaaaaaacaatc

SEQ ID NO: 80648 - DNA, 2601 bp, Cannabis sativa
tatttcttcccattggactatctagtatgttctattactgtgttactagacctacctataagacatgtcaacttcatgttctactttctctgtgtctgcatttgaagtaggtttcaccttcagttctgatacaaggattactttgctaattttgaattaccgttttgactactgtttaatagttgtgtctgagcaatgcgacttaactatggaagatgagatactacatacgccattgtttaattgagtggttattaacagagttctatcatatttaaaactttagagttagtttttatcagaacttcttgctctagtagagctaggattacttaggtcatattcaaaataaatcctattcccaatgctttaatttactcaaatatagtataaatttaaatttgagatcaattttagattttgttctaattcacaattttaaatgctcattttagattatataataatgaattgtaaccaaagattcaaccaatttttgttgcacttttcattcgtacgtgacttagtttatattgagaatgtaatggttgtatcttaaagcatctctaatagagtggtgtattactatatttcagcacacttcaaaaaaataccactccaattatccaatagtattctaaaagttgcgtgctaagtttggtacatactaaaacttgtgttaaatttggcccataataaattcaacgataatgctaataattattatgattcattgactttaactattataaaactttacattttttatggtaattttgataataaaaaataaaatataataatttttgtatattttcatttttaaatgaccatctacgaaatagtaggctaaatataacatggtaattaatcctttgtgaagctcctagactcatattttggtatatcttggaataatcaatttagtgcgtaattttatatttttcgtgtttttgggttgccttggtgaatcactttgtccgaaatgttgatttatttttcgatttgtgattgtgctttgttatgattagtaagtgttctttttgtacagttgcaaattttaccctccattttgtagatctatcgctttaatgtttttaaaggaacactaatttccataatatagtggtgatacgggaagttattgtttcagtgacagaaagaaacctaccgatacacacagtaaagctcctgctcgaccttcaagaaatgttggaaaggaaagtggtaagttttttatcagattgtttctatgtcctggtaatacttggaatctgatatgtcaagctgccacttaagtttaattataccgtttgcatttgtagcgtgtgtgagcgtgtacatatatctatctttgtattttgtactcactgacatgccatcgcggcctaggtgaagctaaccatactgctgtagctatgttgtgtctttggatgaatgtggttatattttcattcatcagtttatggagcgagttgggattgctttctgtacaaggcatcatcaacattttatgatgtttttcattggaattgggatcacttgggtagtagatgtgtcaagaacattatgttttatttttcacactttatatgctagttttagggttccgctgtgataatctgatatgatcctctctttctgcatgattgtggattaaagtagctcactcacagtgctttaagattctttgttccagtggatgttttttggcctaacttttagtttatcgatacagagaagacgacgaagagtcagaaagcttcgggggaagttattgatacaaatgagaacatggtaatttttaagttctagttgcaccattaaaaagttgtagattcttttaatttttctagaaattccatttaatcttttagattctttgaatatttatcgaccccttcactaacaaacagaaaacttttataagaacacaccaaatcaaatttttgttcttgtttctgttattctttagaaggaatgaattaagctaaaattgttagttccttttagatatgttttcattgttgtgatttctgacagaagagtaacttttccttttttctttttaggggttaagaagatctcagaggcgaaaaggataaaatattttcttaattattattgccctagtggaatttgaatgttggggccttcaaaattggtagaatttgtatagctagatactatataatgaaatgatgaagaaatttctaagaaatcaagtgttgcccacattgcgtttatgtaattaccatctgatttatgtgggtttgtaatttgtaaatattatttgggatgtaatacggttaagaatagggaaacaaatatagtactagtaggttatgcatttatttttcaccttctatttttcttgctttatttttctcctcactctcgtttatcaatggttttctagcaaaataacttgccgatttctaataaaaagaaaatagataacttgttttaaaatatgtttttttatttttgtaacctaaaatggttgatacgaaaatgaatatctattaaaataagaatttgtttttctatcagaagctagttcctagtagagctcgtgtgtgagccaataaaaaacttggt

SEQ ID NO: 80649 - DNA, 572 bp, Cannabis sativa
gtggaagattagcatttggtaagagaattgtctcaccttttctatttcttgtttttcttttcctcatttatttatgtttaccagcttttgaactatggtttacatatgtttattgatattaatattgtagattaattatataatatatttaggtgaaaagcatgtcttgctctagtagctactgcagatgatattattagtgaacaagtaaaaccaaatatgaataaatttaataggtaacatatgacatacaaagtacaaacggttgcgccatctaggaattcatttaaaaaaaaaatcacccttttttttgactaataatgccccttctatgatgaaattagcgaaaaaagttttacttagaacagtgtatgactaatatatgcttttacagggacttttatgtgcaatacttttgggatgtagttgagaatgagtttactagactgaaaagtgagaactcacacatccatcttccctcttccacatttattctccaacttttgcattttggttgatgttttagaacttgctttctaatataggatatgagacatttttgttgtttattc

SEQ ID NO: 80650 - DNA, 971 bp, Cannabis sativa
agatatgtattacttttcttttatttagtagttatttattatattaaatctgtattcgttcattgttcaaaactatttcaaacagtcctattttattatagtatattccatctactatttctggttttaaattttccatccatatgatttatatatatatatatattgaagtaaaacccgtgtaatttttcccaatcatgagttgggtgtaatcaatctactggctaatcatgtatacactattccacattcattaattgttcttagataatgaataaatcaagtgtctataacatgaatcataattaatttgtattatgatattttaattaataaaaacatttaaaattgggccttggtcggttcactaactaaaaattattaaaacaatagattctaagcttttccataagtgagatacatcacaatgacagttattaataaactcaattgatatacgtccttatcagatttagtatataaccctgagaatataacatttattaaataatttaattataatcacatgtttcagttgtattttacattgaataactgccttcagcagttacacaaaagaaactgcttgttcaattataaacctcaactttaaatgattggctaaatagtttaaatttaaatttaaatatatttaactccattttcaaaattctataattaatattttgttagacagtttaaatttaacttttaacacaattatatttatcatatgttgaaaccttaagttttatgcttactataatgctactttccttttattggttctaaaattattttctatctattcttctcatttttcttctaatttcaaacatgattatacaagcttggaatgtacgcggtttaaatagtaaggataggaaaagattttcatccaaatgttttatttcttcaagaaacacgtttaaaagcaggatttactcttgcgctttgtaagaatttttttt

SEQ ID NO: 80651 - DNA, 1798 bp, Cannabis sativa
ttttttaaaactcaaaaacattagataacactttaaccaatcacttttttaaaaaaataatttttcactcacaaaatttaaatttttgtttccaaatcacttaaaacacaaatttttaatcactaactgccttttatttgaggggatgtaatttttcccgttggtaggaactataattttggtaattttgttgcgctagccaaatgagttttggctagtaatttgactggttttattgaggttatctcaacatggtctttttcgaataattttgacaaaaggctttgaatatatatgatttgtttgctcagatgaacaatatttgtttgatctagaaaacaatgtcgattcgaaaagtcattccaaatcttaaaacggtcaaaatgcttcacccgccaaaaccatttctagaaatcttaaatgtcgtttgttccaatactcccatctcctcctcatctttctcttccatatccaatctcgatctcaaaactctgcacctcattctgtcagacccttatgtcaatgactcaaattgcttgaaactcttcaacttcgttatcaaaaaccagtctttgatctcatttaaacctgaccttcaagcccatttgaccctctttcgcagacttgtcgaggcgagaaatttctcacaagcagagaatctcttcaggtcagtactaatcgatgagaattcaaggtacccatttcctgctatcacttctacgctagagattttgtgcgaaacatccctaattaaggccaaatcgtttaatgtgatgcttaaagtgtactctgatagtggaaagttcgatcaagttttggaggtttttgattacatgaagaataatgggattgagattgatggaaggacttgtactgtgcatcttttaactcttaaaaaagctgatcaggtggaacttagtttagatttcttgtaccgaatgcttaaatcgaatgtgaatgtttctgagtattctttgagtgttgtggttgctgggttgtgttggaatggtgagattaagagaagtagggagttggtgcaggcgatggttagtagaggaataacactcagtacaattacattaaatacgatgttggatgcttgttctaagagatccaactttgtggagttggatttgatattgcggttgatggaaaaagaagggttgagattcaatgtcaacacatatagaattttggtcaatggatttactagcattggaaaagtcaaagaagctgaaagtttggttaaggggatgcatgataaaggaatgaaagtagaaactcatttgtacaatttgataatatatgggtattgtagagcatgttgtacggaaagtgcgtgttgggtgtttgatgaaatgggtgagaaaaatgtagtccgtaattatgatacataccttgctgtaatatctggcctttgcaacagcggggagatgggaaaagcattggaatacttaaaagatatgcagaaaaagaaaattgaagtggacgatcttatgttcaatacattgattgacggttttggcaacaaaggattgattaaagaagcctatgagttgctacttgttatggaaatggtaggttttgaagctgaattatctgtctgtaataagatattgacggggctgtgtaacatgaatcaaactagggaagctacgaggcttttcactgtaatggtcaagaggggtgcggctcctaaattggcgagttttacttccatgcttgatatatgaagcgaagagaggaatttgattatttgatgagaatggttttggagctattttcatctcctaaaaga

SEQ ID NO: 80652 - DNA, 1509 bp, Cannabis sativa
cctagctttatttggaggagtatccatgagacacaaagtcttatctcagcaggcgctcgtattaaaattggcaatggtttaactgttcccattttaaattttccttggctacccgacacagttaatctgtgtgtcaccagctcccatcatactctagttggggcgaatcttaatcaattaatgttatgtgataacaatcaataggatgcggaagttgtgaaggatttatttgaggatagagatagagatcttatcctaagtattcctcttaattctaacaatttggaggacaagtggtattggttccatgaaaattcaggttgcagttaccagtggctgcaatatgctaaaggccactggtgtgctgctgtggaatcggatttatggcgtgttttgtggaaaactaaagtgcccttgaaggtcttgcattttgtgtggaaagccataagtggttgcctttctaccaatcttcagcttcattctaagcatgttcctgttcagctgcagtgcatgttttgctccagggaggaggagtcaattatgcatgttctgattcaatgctagtttgcttaatctttctggcaccggtctggtgtatcacttggactagtttctgcagaaaattatggagattggcttttaaatgtgttgatccgtgggcaacctttgatgttagaggaagctttaatggtctcttagtcaatttggaagtctcaaaatgacttgctttggaataagaagattcatgttgcaactgatgttgttttgtttacacactgtccttaaccaatggaattttgctcgctcaaattgctttcagccgctgccagcgattttaaaaaatcactccaccatcgagcattggattgcacctaaggtagattgggttaaggtaaatgtagatggagcaatatttgctacttcacagtcttatggagtgggaggtattgcccgaggaaatgatggatgggttattgaagccttttgcttacacaaggtcgactttgtacaaccaagtttgttggaagcaattggtgtcaaagagacgttgaattggatcaaaaagaaaggttggcagcgcacaattattgaaacagattcgctagtggtgcttcacttgaaagtaatgctgtaatgcaatctgtttttggttttgttattgttgactgtctgaatttgtttaattcgttggtcaatattattgttagttaagcgatctgctaacaatactacccattatctggcgcgcaatgtttgttattggtcaggttgtactttcgttagtggcaatgttcctaatgctattaacaatagtgtaactgcataacttttctttttttggaacagtataacttgactctggcaagggccttaggccttcccttatttggaatagtatctgttggggcaaagaacttctccagtcaggtctacgcaaatcaattggtgatggtaccacggtctccattttcaatgatgcctggattccagggtatggtaaacttcatt

SEQ ID NO: 80653 - DNA, 1554 bp, Cannabis sativa
  modified_base (660)..(685): a, c, t, g, unknown or other
aaactcaaagaaagacaatatatatatagctagcctacaaagaaagacttgaatactcaactcaagcaactaaaactgtaatataaaagaatccaaaggtgacaacaaagaaatcagaattatatatttggttaatgtcacatacatattatatattgaatgtttatttttgttctcttataggtgtgaccatatttaattacggtcatatacatattatatataagcaaaaaaaatttaactttggtgcatgcttcaacgacaactatagatgttaataactttactgggtattataatatatctctcaaaatccgtaattttattttcatgtattgtgttattttatttttaacaaaaaattgattttattatgattatgaaatatatttacaagaactattgttctctgatttttaaaagctaaagcgaggttacatgtttgctaagatataatcactaagacatactaacttgtaccttgaacaaaaagaactttacagtcaaagtcaccaacttaatacaaagacgcatgacccactacaaaaaatcttgcttttagtcacaacaaaaaatttgtgactaaaagtaaaaaaattgtgaataattataaattatttttcctatgttgtgagtaaaaggtccgtggctaaaggtatnnnnnnnnnnnnnnnnnnnnnnnnnngactaaatatatttttagttacaatacttattgtgacgaaaactaaattagtgacaacttgtaactaaatagtatgttttagtcataagtaacattttattgtgattaaaaagttgtcactaaaagtagcagttttttgtagtgaccctctgtttgtggactgtatatacacaaagagacttgctacaacaattagttgctggtatggcttcattcagtggctgaggaacactaaggagcttcaaagagggaccctgaaagctttcaacttgcaaaatcagctccagaatgctgtcattgcagcaacattgtattatgtgtggcggaatagaaatctttgtgtttttgaatctaaatgtttgattgttggtaatgttagcttgatgataaaaaaggagatcaaatatagagttttgggtcttattagtagaagagtaaaaaaaagaacaatatgttatggccactaatgaaaaatggtgacttgctggtgttgttgagcaaccgtttggctggctgtgtgcttgtacttgtttgtggtgattaatatattcagttagttcaaaaaaaagcttaatacagaataataaaagaaaaaatatccaaaaggttcactcaaaaactctctagtgaataatatggcatgatattatttatcaacaaaagatgagaagatcaatgtgattttgttgattttggtttggattttgactagttgaagtagaacgctccaaaacaactttggagcaaaagagtcttaaatttaattatgtagttaattgattgtgtcttagttcttgaatttaattttgtttggttgggatcttagaggtaaaagacaaaggtcaaagatttgagttgaatctccaatt

SEQ ID NO: 80654 - DNA, 2253 bp, Cannabis sativa
  modified_base (1028)..(1058): a, c, t, g, unknown or other
  modified_base (2112)..(2115): a, c, t, g, unknown or other
cggtaaacccgcccgatgttcagccctactatatgggatatgagcccttatttataagagtatataaagtgcaacttcggcacttgagataggacctcaaggggtatccagttctgtgcgaatgggtaaggacacatgcacttgacccaccacacacgtgcgtcgtccatccaattcgaactcagctagttagtgtggcatgacactttatattctacagaaattttatttaataaaataatgctttttatttttattattaaatttattcgagaaacatgtttacttgatattgattcagaagacgttttactttctattgtaatttttcattccattggcaacaaactcagctttattatataaaaatttcatctgaaatatctattttgagggtatattccactgtacgctacattgtagtggcattctgatatagtgtaccacaattgtgctgttttatcctagggatgatcggtaatttctaacagcttgcacaatcctgggcagtgctccaagaagtacccaattttgtacgaatgggtaaggacacacgcactagacccaccacacacgcgcatcatccgtccaatccaagctgagttggtattggaagcaaatttgcaaggtaaaagatagctttacatctgtaattaatctcaaaagttttgcctcttctttttataaaatagcatatggatatgccatgttgtgtaatctgttatccaaggtagattggaggaaggaggtttgggaaagacttagcctttcaaagcataaattcatcatttggttggctgtgcttgatagattacaaacaaaagacaggttattcaaaattaatattgctttggatagcttatgtgtgatttgtgacagccatgaagagaccattaagcatctctttttttggttgtacaaactgtttaccaagatttttagaaacagaattgttaacgcaaatttttgtttactaaatttaagcctatttcgtgataaatttgcacataaataataataataataannnnnnnnnnnnnnnnnnnnnnnnnnnnnnnaataataataataagagaaaaagaatcaacacaaaagtttttttacgtggatttacagttaaaattctgcatagtccacgagtctatcttattagatttttttgtacacaactaatgtcttttttctaaaggatttttttccctttttcagtgtatcctacccctatttatagttacatagaagggcaattaattacaatcaaattgatatcccacaatgataatcccctgaaattgttggatttgattacgtcccacgtaaaattaatgcgattattagttgaaaatcacacagttgtgatttatccacttttaccgggtcaatgctgacgtggattaaatacgatgcagtgtatcatgttggggcatatcgtcgaaatagaataaccctggcagcaagctagagcttttcgcatgtctttccgaggttaataatataaatctcgtagtatctgcgagtgaagacataacgctctgtttgacaatcgcaggacaatcgcagttcttggaatcgcagttcttggtgacagttcttggtgacaaagtgaacttcaacagtcaacatcatttgaatgtcagcttctatttgagatagctggctcgacgaagcagcgggtatcattgaaagatgtttgaagctgattagtaaatttgtaccatgagtatgcctttctatagcgagacagatgcctcactatttgttgttcatattcttccaacttttatactttatttgtatattatacgctaagtgttctaacagccaacatgtttcatctacacctcttcatacgtagtgaagttggtgcttcactttgtacttctaacatagaatggtttctcgtcaacgcgcgagacaatagtttgtatatccttatctcacttaagactttacagtcagcaagttgtaaatatactctatcagctccgcatttaatgagttattccatttcaatatcatttaatataattgtcatcatatttgttaattcgtattctcccagcttggaacgtgtccgcctctgaagtgccagccgaattttgggtataacannnnccccttaaaaagttttttttttttaataagaagtgctttttaaatgattgcatagggtatatttgtcataattctttttgaaaaaatgcatgtcctctgattttagccattttatggtttcgaggtacataagcattt

SEQ ID NO: 80655 - DNA, 605 bp, Cannabis sativa
cgtaagtgagaataatcttgggctaagggaacaaagtgaaagtttaaaggagacttacgggcactagaggtacgggcttcaggggtctcagtgttgggaacaagaaaagggaatttgggcctagctgtgttacgtcatttcctaccttttcctgattagaccacctagaagcgctttggaggcgagcataatggagttcctattcttttttaaatttgtacttgttgtatttatcttcgacggttgcgataatataggcccagagcatcctctcattcccagggattttgggtgttggggcaggtcaccttggacaaattaaagtcctcaactgactggcactctaggatcaatttttccttgcagtagttggcaatcatcaccaactccccaacattcagttcctccctcttatagccgacaaacactttggcatgatttaggaagagttgggtgggggctgttcgatgcattagtggagtcttggcccagtccgttaataggtctggacgctcaaaagccttaaaccctgaagaaaagaaaaacttgcaacgatattccttaatattcttttgagaattaaaaggtacccgggtctcattggt

SEQ ID NO: 80656 - DNA, 1971 bp, Cannabis sativa
tgtccaactgttcaaaaccccctttgatggcagagagtaggcttttactgtcggaagatggcatcgtttctatccctttggtctgcttgtcttgggccttcgggtgacctcctttgcgtgacgggaaagtcttttgaagctaacttatgttatgtttttatttggtttaatttttgtattttgtttagctttgtggggattgaatttcctatgtcttttgtggtgttagctttaggcccttttgggggttgtccccttcgatgttcctacgtgagctatgaacttaatgctcctttcgatatcggcgtggttggctgatatttgaatcatctcctagtgagatttgtggagtttctctgctaaacttatagagcttcgatctttgcttaaccttaaataaagttctcgtgtcaaaaaaaaaaaaaaaaaacttattcctctctctgtctttctagtctgcttaactagcttttgattattgttttcttgctctgtccacaaaacagaagcaagattctccatgggggtctttccaactctttacatccaatgaatatttaaaatatttttaatctaccgtatttcttgcctatgatttcttaaaatactattaccaaaacaaaaacaaatacaaaataaatactttcaagggaaacaggctgttttagtgtaaccgtcaaaatcgacacatatctagtttttatttaactctcttccccctttctatttataacaaaatattatatcattaactaacttcacaaaatcgatttcaaaaaaaaaaaaaaaaaaactcaccaaatcttttgctcaattttaattccacatacccacatcacgggcctccccgttctttcattcagttgtacacaccacataatgcttgaagtatgtgaataatattaatatttgtgcttaacttgtgaagttaataagattacatttttacattgatttatggaaagttgaaaactagaactacaacatagtgctctcccaaaacaatatttaatagtactgtcggtgacttagtggtgtatattattataaataaagatggagaaaaaaaaaaatgcatctggagaataatatagggttttatgtgactttgtgatacagtgtgtttttggaacaccagtctgcccagttattacgagatttattacatgcagatactgaatctggctggctatatttagctctctggattcaatatttcaaatataataattaataatgtcagacaattttcttgataacccatatacactgatcctgacgaataatgcagtcaaacacaaaaaccataataaatatagtagtaaatttccatgtgcttttacttattagacctccaattaatatatttatgggcaagtgggtttggagatgcctattgttactgcattccaacctacccaagttgagggaagttatttgggattttttctataataaattgaaaatggaaaaaatttacatttatgatctacacagagaaaataaacaaaaatagaaattaaaagttgttatttacaaaaatacctgaaaaaaaaaaaaaacagagggaatctcaagttattttgctctctatcatattttagctttaaggaaaaaaaaaaaaacagagtagtcttaaaaaagaaaaataatatattgtggtataaatagtcaatgtttttaatttatattacaattttatacctaaatatttattttgttggcataaatatctatagttgggaaaagagtgcttccgttagtacaagtctgttggtggtgttaagtgatacacgtgtgctctctaatttgccaaattcaataattattttaaaaacaattttaaaataaataaattaataaattaacttaaataaattttaaaatagaataagaataattttttttgctactgaaactgaatagcaaaaaaaaaaaaaaaaaaaaaaaatttttttttttctatttttt

SEQ ID NO: 80657 - DNA, 632 bp, Cannabis sativa
  modified_base (78)..(91): a, c, t, g, unknown or other
  modified_base (127)..(140): a, c, t, g, unknown or other
atagaaagtcaaattttccttatgtaatactcatcaattaaattaaagaattgagaataaaagtattaccaaattatnnnnnnnnnnnnnnagaataaaagtattaccaaattattattattattannnnnnnnnnnnnnattattattattattattgggatattataattagattttggggtaatagagtggtttcttgatactcaatatgaattagttagtaattatcatttcttgtcatctgttatgcaaatgagttaaaataaaatttgtatgccaatatcggccagaaattcacatcacaaggttagtgacaactttttgtatttttatttttaggttacaatttggtttttggagttatagagtagtacttccttgataataatgttgataagagcaactccaacttgacttcaaatttggggttacaattgaaaaacttccccaacatagcatcatttcatcaccacatatgcagttgtagctacagtgcacttcaacaacaaagaaagaaggcttaataaaatctctaaacagagaacccacttcaacaaaaacatgttcaaactaataacaaacgctaaagttagaattagaagatccgactaagagaaactgaatataagt

SEQ ID NO: 80658 - DNA, 1319 bp, Cannabis sativa
tggcagtgtcttagtgaatggattaactagattgtcttcagtgtcaaccttctccactatcatgtttgctctagctacatagtcccttatgatatggtatttcctttctatatgtttatttctcttgtgcttcgaagttatttactattggcggtttcccagtgttgtcatacagcaacactagtggcttatccatgattggaataacgccaagatctgtatagaatttcttcagtcagactaattctttagcatccttagtgacacatatgtattcagcctccatggtggaatcagagtggaaactacttaatgcttttccaaattactgctccacccccacgagtacacattatctcagatgtagactttttgtcatcaacacaagcctaaaaatctgagtctctgtagcctaaagagtttaaaactctacccttgtagctaacatatagtttttggtactttgcaagtatttgagaatatgcttgactactttccaatgtttatggattagactgatacttgctgactattcccactgcataacaaatatttggtctagtgcacaacactccatacattagacttcctactgctgaagcataagagattcttctcatttcttctatctcttttggagtagtaggacactgctccttagatagatgtactccatgtctagaaggcaaatgtgccccttttgagtttgtcataaagaagtgctctagcaccttatcgacgtaagttgcttgcgagaaagcaagtgatttgttcttttggtctctaataatttgaatatcgagaacgtagctagcttcatctaaatccttcacttcgaattgagtgcttatccatttatttacatttgatagctttttgacattctttccaatgatcaagatgtcatacacataaaagtccgagaatactaccagtacttgattctcattgagttggtaaaaacaaggttcatcaatgttttggtcaaagcatagattttgataatctcatcaaacctactgttctaagaatgagaagcctacttaagtccataaatggacctattgagcttgcaaacttttccttcttgtcccagaaccttgaacccttctggttgatcatatagatggttttgtcaagctttccattaagaacagttgtcttgcgcgttcatctgccaaatttcataatcaagagcggcgactatagataagagtattctgatggatttgagcatgactactggactaaaagtgttatcattgtccacacattttctttgggtataactttttgctacaagtctagctttacaagtt

SEQ ID NO: 80659 - DNA, 1061 bp, Cannabis sativa
  modified_base (26)..(41): a, c, t, g, unknown or other
aacacagggtccaattggtaactttnnnnnnnnnnnnnnnncaaaatggtatttacccttctaattccttcaatattggaatggaacgttagtgtataaacatgtttgcttgaacagtacatacattgatacatgaatggagtctgatatgagtataaagtaatttgttggaacctcaattttacttgtttatcttgttacatacatgggttaggattcaagtcagggtgtgtacgtatcatagctacatgtttgtgcgaatgggaggcatcacattgaaacctttgtttctatcaaaaaaaaaaaaattgagattgtgttaaaggtcttatatagaaagttaattttgattgtaattggaatcttttgctgcaggttattgcaggtgctattttgggatgtgtggtagctttgctcatgcaataggatagggctaccttctcatcttaccaacaatggataatactaccaatgaagaattgaaaaaagaaaatttgttgtgaacaaaccaaactctgaaaaaagaagaaaacaaaaatgtgtagaagtttgtgttaatttctttgatgtactaaattaatgtataaatgtttccccgcaattgacatctttggattcaaggtcccaatagattttctaaacaaatactctgccaagactcaagtaaagagaaaaaatgtatttatgttttttcatcgcgaaccaacaactcttgtgggaacagtcgggaagaaaaagaaatctaaaatagatgtaagttgtgaaagtcgttgacttgcaaataaactattaaaagatttacttgtagaatttaccaatcacttggcctgttacactgaattattaataagtccattccaactaaaagatgagacaactcaaaatatagtatgcctatcttttcacagcaggctccaaattcatctcctgaaggttcagcaagagatcatccgtgttaagataagccttagtggaagattttgatattgtgcgagcgatttctctcccagcttcaatcttccttagggtgataattgtcggattgttagcaatagttttgc

SEQ ID NO: 80660 - DNA, 1117 bp, Cannabis sativa
gtggttccacgtggatgcagcctacgccggaagcgcatgcatttgtcccgagtttcgacactttttcaacgggatcgagcgagttgactcagtaagtatgaacccgcacaagtggcttctgaccggcctaggctgttgttgtttgtgggttaagagatctgatttgcttgtgaaagcgatgcgagtcgaacctgagtacttaaaaaatgaatggagtagtactgagtctaactcggtggtgaacttcaaagactggcaactgggtgcaactcggagattcaactcgatacgattatggcttgtcctacgtagccacggggttgagaatcttcaaaaccacattcgatccgatgttcgaatggcaaaagattttgaattgtttgtaaaatctgacccaagatttgagattgtggtaccaagattgtttgctcttgtgtgctttaggctcatcaaccctaataacaataattctgaagatgataatgagttgttaaaccaaaagcttcttgatttggttaactcgtccggaaagatttatgtgtctcacactatagttggtgggatatatttgttgagatttgctgtgggagccacgcttacagaagagtgtcatgttatcgccgcatggaaagtaattcaggagggagccactcaactacttaaaaattaaatattatattttttatatttataatgcttgcttgttttgttatgtaccgaataaatgtgtgttttgtatttgagtgattattaatttattagtgttgttgttgttgtctttaatgaattgggctatgattgaaaacgttgaaggaaatataattaagaaactcttatttatttatgcgtagtaaataataaaagtccatttgttattagtagttatttttttcctatagagtgattaagattataataaaaaaaataaccttcgatgtagagaggaacatctagtcaacaagttaattatttagctagaaagtatacaaactgagcatattaatcgctacaaaataaagcgacttatataacaccaagttaattcaaaaatttagataaaactatttgagaccatctcaaaagagactcgcagtctaaatgaataatttaagctaac

SEQ ID NO: 80661 - DNA, 1366 bp, Cannabis sativa
tttttttttttatactaaatattttttattattatttttacaaacatttacataaaaacctaataattaatatagtaacttaaattggaaataaaattcacataaaaattatcagagcaactcaaattacaaattaaaaaaatattatataaaaaatttcttgataataaaaaaataataataaatttagagaattaattgtttacttaacaagtaaaaaagcatccacttaaataaatagaaaattaacaaaaaataataaagaaaaatagttataaataatggagaacatcgtacgtgcacgtgatacattttgtatggtacttattacagaaaggaatcccactaaatcgttcgatttatttttatttttaaaaaattattatttcataagaataaaaattatgtacaaccttctctctcctttgtttaaatttgcatttttattataaaatggtcaaatttgttattttttttttttgaaccatgaataaaatttcattaacaaagaaattagcgttgagtacatcataaagaagagattaaagattctttattaaaattagctcaccgtctattctaagtgtttgcacaactaattcatgcatagctataatagtcgaaaaatttgcatgaataaaagacgtcgtaagaaaattagactgtaaaatagaagaacatgaataatggtcaaatttacataattaaggaacgtcttaggaaagatttgcatgaataatggtcaaatttgttattagtacaaatacaagaacatgtttggtttaatgtaatgaatattgtgatagaattaatattaccaatttacattgtaataaccattaaatcatatatcataatcctaattattatactataaaactaatataataatgattatattgttaaaaatgactttgtttacctttttattttacttctatttaaatttaaaatactaaaaataataaaattaaatatatttttatcaatatacaacttactttacataattgccctgtggatatttttaaatgcattgacactattcggttttcttttgcagatcatcaagctttcttgctcccttgtcccatcccgcgtccgtcagtttcttggtgtcctcccccgcaagattggttgaagcttaactggacatcagagtggggttggatagcttgtgcgctgcagtggttgcaagggatcacgttggcaaggtggtctgggtttctacttcgaagctggaattttctaattctctctgtggggaagcgatagcttgctgtttggccctagaggaggctaaagctcgtggtgttgagtttcttattttggagagtgattcgagggtggtgatcaacgctcttaa

SEQ ID NO: 80662 - DNA, 2017 bp, Cannabis sativa
gggacaaagttagaagagcacctagacccatcctaaaatatagctacaaaatctggaatgaatatagtgcttatgctttactgagtactatagaaggacaaaagttagaacctaaaaattatgaggaggctatcaaaggtaacgattctaagaattgaaacaatgttatgggagaggaaacgcattctcgaacgaagaacaaaacttggatacttttttctagacctaaagggaaaattattgtgtcctacaaatagatttttaggaaaaatgaagaaaggacaagagatgaacaagtgagacataaaaccaaattagtggctatgggtttcactcaaaaagaagaagttgattacactgagattttctcccatgtagtcaagattataaggatgatgttagctctagctaatcaatttaatatggaaattgatcagaagcatgtgaccacaatttttctacgtggagaattagaggaagacatctatatggaacatcctaacatttgtggaaaaggaaaaaagaacagttagtgtgaaaactgacttaagcactcccctagataatggaaacaagaggtttgatggctttatgacaaaataggggtacactaaaagctactatggtacttgtctatcctctcatagaagtgatataaaagatgtcatctacttactacactatgtagatgatatgttgatagtcaacaataagagatctaagataaacttggtcaaagatatgcttaaatctaagtttcagatgaaagacttagacattacaactagaatcatatgtatcactattgttagagatagaggtaaaagaattctaaaattatgccaagaagattacataccaaagattatagaaaagttccaaatgacaagctctaaaaatactagtcagcctattataagttaatacaaagatatctcaggaagagtgtcgtaaaacggaaaaagagaaagagaaaatgataaaggtaccttactctaataaaataagatctataatgtacttaatggtaagtactagacgtgaaatagcttatgcaataagtgttcttaaaaagtatatgtctaatcatggaaagttacattggtttgctatacaatggatctttaggtaccttctaggaacttcaaatattggcctagtgtgtaaacagtttcaaaacccaactttggtataaggattctgtgattcagactatgcaagggacgctagaaagtctacatctgcctattattttctaatagggggaaattgtgctagatgaagggttcagttgcaactaatgattactcaatctactacagaagcaaaatatatcctctacagaggctattaaggaagctatttggattaaacgaatcatgaaagaactaagtctatttaaaggaatttctagtatctactcaaacagtcaaattgtattcatctctacaagaatctcgatattcatgatagaaccaagcatattgaaatcaaatactactttactaggcacaaagcgacatggaaagtcacagtgaaggtttccactgacataggaactaaagtggtaaccgtagctaagttcaaacattgtatgaactttcttgggatagacaaaggaagttgtccctagtggtcatcaagctaaaaccctcaaagtaacttcactatcatcgctcataagagaatttaggtggaatttgcaagaataaatccccttataagctaaagttcattaccgtagttacaatagaaagaaattacaaggtagcatgaaggcttgtcctaactaactctcaacaaaaaatagaaacgaataatttttgctagctcagtgatccaagactctatcgattcttatcaagcactagaatctataagaacccagttcaagctgaagtttttacctaaagcattttatcttctctgtcagttgagtttagagagagaaaacggagagaaggctcctttgagctccattgtaatagtgagataaacaagagagagagagagagag

SEQ ID NO: 80663 - DNA, 2097 bp, Cannabis sativa
gaccttggacaaattgaaatcgtcaacagattgactctctaaaatcaacttggccctccagcaattgacgttcgttaccaagtcacccacattcaaatcttccttcttatagctagcaaacacttacacgtgattcaggaagagttgggtgggggcagtacgatgcatcggagggatcttgatctagtccgttagtagatccagacgcttaaaggctttgaacccggaggagaagaaaaacctatggcggtattcatttacattcttttgaaaattaaagggtattgaggtctcgttggctggatgggcctctaatttataaaagtcgtctttaaacttgtccccttttttggggacgaaaagcagtttgtaaaaatacaagattttagtgggcctgggtgcggcccaacccctggcaacataaaaaataaataggcctgataacaggcggtaggcttgaggaatcagttggtatggtgaaagtccaacaaagatgaggaaatcgatgaagtaatcttggagaggtagcatggccccggacatgaggtggtttaacactaggccccaaagttattgtaattacggtttggtgtctcctcatccttcgggagacggtggtatactctggaactggatggcttaatcccagctacgatcactatcttctccagctggtgggcataagttagcgttgggtagagtttgtcggcctcccaaccattggaacgacacacaaactttttattggcaaccgggcccttcataacctcctccaaggtagccaatttctttggccccttcttagaagactttgctccagtggctgcaggggttgacgtaggactgacctggtaaagatcgagaatttctcggtcgaatccaaagaaaccgtggttgtgaagatctcgaagaacttcactcatctaaaagaataagaaatccaacagttagcccccgcatcaaaccctaagtcaaaaagaggaatgggggtccctaaccgctgaaaagaggccccatccagatgactgtcgaaaggaatcaaacgattcacaaagacagacatcgggtgcaaaatatccaagcaacacatggaaatcagagaaaaggaatagaaagcatgcaagggcaacctcaaactgccagaaaggggcacacaaagaactctttgatttttcccccttttttaaaaaataataataaaaataataagcataaaatattgtgatagaaaaagaaatgcgtcatcggacgttcaccgaaggaggcgttacacagacggaaaccatggccgccatttcgagaaaaatagacaaagcagataaacatggacattactatcactacttgccctagcaaacaaaaagaggtatatatgcaaaaaggacttacacaatgagggcaaggcaagggtagaggacgccgtgtaacggtagtacttcacctggcaacgacggaggaaaagcaaaaggaaatcggggatgtctgaaattttgttgagtgggtttggaaatctgaaaatcgaagggcagtaaaaataacccagttgagagaagtgctagtttttataggctatatggggtgtgaagcagtgtcgagtgagcaccatcgtgcggtgggggttcacaacgattcaaatcccctgatgtaacggataggataaaaaagcatgatgaggagaaagggcagttgaaacgtttcagtacctttcttacatcgggattgatggaagggtctgtcaataggcgggaaataaatcgttgcctgctaaagagacagacgaatgatgacgatcataaatatcgcccacgcacccgaagcacgtgtcattgcattaattgaggccagagatggtgtacaagtttcagttacttgcgactaaataaaacttgggggtaaatgttcgcccaagtttctcccaatatacgtggcagtcacaatatacggcatgtggcagaagtaacccatcatccggagatgaacaaaacacttaaccaaatctcctttagaaggatcactaactatgatccaagggtaagctcccggacatgaggatatagctccacttcttctccaagaggtgaagggcgaatgaactcc

SEQ ID NO: 80664 - DNA, 1876 bp, Cannabis sativa
attattattattatcaaattatcgagcgttttaatatgcatgctttcaagatagtctattgtgctgcgtattaatccatatttttttttgttctgagtcgtgctcgtacctcttgtctttgaaaaatgctaaaatgcataagtagtgcctagaaccacctaagtgtaatatcttaatatatgtaataaagtatgtgtcctaaataatttaatttaataaacatttaagaatattattaactatttataaaacattatttgtctttaggaagtgttaggcactacttgtgccttatataacaactaattaacatagtcgctttcgtgggactattttaatttttttagtattataataaaataataactatttattaatgcaataatataataaatagaacttaaaacataatactaatatgtaataatagtaatattatattatctaattagatattattattaataaatttatttattaaaatataaagctccaagaaaaaatatttacatctattcatcatattattaattactattattaaaaaaattaaaaagttaattagtgtgttttattatttatttattaataaatttaaaatctatactatataatagagttttaaattgtattttttttaaaaaaataaataaatagaatgatatgagaaaaagttaaagtattatcattatttaaagaaacactctttctcataatgtatttgtttttttatatatattttgattatttaaagttgttgttattattgtatgttagttgttatcacctcatctacgcccgaccctcgtcccaccttgccatggagctaaaattttttgtcatcttttgaaattacacatttctttactaattttgaaaaatacaacattttactctatagaagggcctaaaatattttttttcctatgaaccactaaatttcaagaccgaccttgatctcatctcacccgttgccatcaccatatctcgccggttgtcatcaccgtatctcttatagtcaccactattgtctttcacaaatctcaatactaatctcagaatctattccgaatttcaaatatttttattaacacatttttaagatttgaaaacgactataataatccttaaatcatacatcattaaaaatataaattcaaacttatcattgaaaaatacttacataaaaaaaaaataaacaaatacatattaacaaatttaataaattaaatacatttatatttaaatttaataaatcaaatttaatatgctttaatatatatttagttttaatattatttttaatatgttatcctgcatttataaatttaataaatcaaatacatatatgtgtttaaaaaatacatatatgctattatttttaagtgcaactcttatcaggtaaaatacatatatattgtaattaaatacaatcatgaaaaaaaaaattatacactgatattaagattaagagattgtcttttccaaattactccctgttgatcgaggttttcggcaaccgatttaataatatataagaaagttgtaggaagtttaatgcatgagatttttacgtggttggggtatgaatgagccttagtccacgagtcttttgtatttatgagagtatttattacagagaatgttcttggtagtttttttctctttggtttttttgaaaaccagaattctcgacccccgtcttaatgtgtttggggggtatttatagtatttttttggggtgatccccagaaccgtacttctagactttatgtgtcttttcagtaggggcacacattcccagcagatataaaatgggaaatacatggcctataccctaggtaccttaggggttaggtggatataatcatttatc

SEQ ID NO: 80665 - DNA, 1315 bp, Cannabis sativa
  modified_base (191)..(198): a, c, t, g, unknown or other
agtgtataaaatctgaaacattacgtatttatgccgcaatttacccaaaaacaaatgagtaatttgtggcataaatactgtagtttaactcagtgcaaataaatacttaagtttaatactaaagttatatttttggaactctgtaggtacctaaccattaaatattatgtcattattcacgtgtcattttnnnnnnnntatatttaaattaatttttttaaaaaaaataaaaaattaacgacttagaccaattaggaattaccacgtgacaatgtttcaaaattatgactttctttatgattttctaatttctttgaatggaaaagataaatcataatatcaatctaacatatatcttagttacattcagatttaactaacctattaataagtcactaataaaggacaaaagaaatatggggcaaaaagatcattttgctcttgcctaaaccaaaaagcatccttactacctaggggtactttggtcaaacctaatacctcaaatatttttgacatttccaatgtctatctaagttgccctactactactaaaatactaactcaaaggaaaatgtgattctatcagccaaacgttgcattccaatgttgctggactaaaatataaaaaatatgaaattttatatataacataaataacacacctagaattcaaataaattttaataaattcataaattataattaaaaatttaatttctgaattaaatcttaattatctgaaattctcatattaaaattaagtagtttttacaagtttcctttaaaaaaaatgattctcatcaaataaaaaacaaaaatagcaaacatatttttattattttaaaaaataaaagctattataaaaaaaaaaaaaatgtattccaaattttatgtttaaacaattcgaaataaaaattttgtagaatgcacccaaagtatttaacacgcagaaactcacctgatgttctctaactatataatacatttaattattatataattctgttggtgaggaatcaatttttaatattaaggggtacttttaaacacagcaaaataaaattaaaaaaaatatgattaatgatttgcaagctggcaccaaatgtagtccttttgcttaaaaacaagtttgtaataattttgtttttaaacccattataacactattagatccaccaaaatatatgatcaccacttcaaatgtaatttattatatataaaatattgatttttttaattgataaaatccacgtataatacattaatttgcaattcaaatctatatatatccttgtttaatgtcttttgattctac

SEQ ID NO: 80666 - DNA, 2094 bp, Cannabis sativa
  modified_base (1445)..(1446): a, c, t, g, unknown or other
gagagagagagagggagagaaagagtgtgttttgatttccatttattttttttaacttagtatagaattagtaaataaaactaatttaattactaactaaataagcctatcatttaacaaaatcccacttaaagaaaagggtaaatgactaaattaccctttcttaactttgaagtaactaacatacacttaggggggaaatggtcataatccataacccaaacaccctaacattctaaatgtctatctatattgttcttctatttctaaagtactaagccacaataaagtctctataggctatacgtcgcattctattgttaccgaacataaaaatataaaaaaaatataaaatttatatataacataaatagcacacctagaattcaaatatattttcttaattgcataaataataattaaaagtctaatttttaattaaaccataattatctactaattctcaaattaaaactaagcgctcattacaatagatacatattttctactaataatatctctcaagtgtttcctaaactcactaaagtgttttctaagtttgtctatatagatgctctctctctccctcaaatttcccaaataatccaattatacgaagttgtacctgaattgttttttttccttgagatgctaatgctcttctaagagctctatatttatataaggaaaacctcaactaccaatcaaatataataaatgaggtagctcatctttcaacgatgtgtaataaataatggagcatgcttcataaagaaatgaggcaaatatctcaaaactcttgaaagttgaaccatatctttgtaactctaagacaagttgactcttgaaaattgaaccatatctttaaaattccaagacaagttgacgtttgagccaaactcaatactgaaagggaacaagtttactaagaaacaatcctaagaacgacttagaaagagaagcaatgaagaacatcctatatgcaagtatagtcgggagtttaatatatgctcagatttgcactgtacctgacattgcttttgtagtcaatgttttaggagaaatttatctaatcttagctataatcattgagttgcagccaagaaagtcatcgaatatttttaaagaacgaagagttttatgcttgtgtataagtatgtcgataatcttcgagttttctattattaaaaagtcaacttctggatatattttcatgactttggctattgtaactatttctttaaaaagtgttaaattgactttgatcacatcatctactatgtatgttgagtttgtcacatattatgtggcatctttgcaacctttatggttaaagaatttgattttaaagatacggctagttgattctatttattctcctatactaatctattgtgataataatactgatattttttttaaagaataatgagattagtagtgcnnctaaacacatagaaataaagtatcatattgttagaaactttgtcaagaaatgagatattgtgatagaatattgcaagaccaagccgatgttagcaaatcctctaaccaaaggattaagtgtcatgttgttgaataaacacatattgttgatatggatattttataattttttattcctttggattagtgggtgtttatagctctattaatagaataacatttatatgtaattttcttggttatgttatgaactacttggtgggccaaaaaattttataattggatgtttatgctttcaattatgttttgttatattctcgaaatgactgaattaaaagcatgcagtttatatcgtgttgtgatcattgtctttcaagtttaattgcttaatagcaatgatattttgttggcttgattttttaagttggcttaattttttaagcatgtttagtgatactaacttatttattatttattaaacatcacggtatcagcaaaattgagaattgataaggatattatgttattttaaattaatcacatgttaaacttaattcctcaccacactactacacttatggaccatgtcgatttaatactttggtatttgtgattatgaatgtattttgttgatttaaaaaataatat

SEQ ID NO: 80667 - DNA, 1104 bp, Cannabis sativa
tggtgtattatataattttatattcttagaaatttgtgtagtacactctaaaagttcttttggtgaccttgtgtctatttcgacctaaataataattatatatgttttagttatttaagactatttgtaaatttttaaaaaaatttgaatagtttacagtgttaaaaataagatttaaatagttacttactacgtgtataagaaaaataattgtgtgtaataaaatatataaatcttatttttggtattataaactactaattttctaaaatttacaggtagtctttatacaatcataaaaaaaaaaaaaaaaattaaactaaaaagctctcttatatatataccaaaatagataaaaatctactcatatactcaatgtactcatctatattatagaattagtttattttgtatgggataaataatataataataaaaaatattacttttttgtgtagttttgttgggtttggaatggatctaattgaatgcactctaattttattataacaaattagatatccaattacaattagattagtttaaatattaaatattagattacattagttattgaatgtgaatatcaaaatccaattaaaaagcaagccaattacaacaagactagttttattatactttatttgttaatgtatatattgagattttttttttctaatgtgcatcggatgtggagctagtgaacgaaagtggataggtagagttgttgaagagtgatggacgtagggtttgacagatgaaaaaaaaatgaaatttttatttttctaaaatttatttatctgaagattaaatatgaattttgaaaattaaatttatatatacatgacatagaaaataccaaaaatagtttaaaaataaaaaataattctataaaaatagctaaatttaaatctggcgtatttaagtgaaaaaaaaaaaaatttaaaactcatattaagtgtgaattttacttttttttagcaagaaagaatatacatagatatttttaggggtaagttaaaaaatgcctcttttattaatcaattaactaaatttgtctctaattttatatttatttgaaacatatctctttttatatgtatt

SEQ ID NO: 80668 - DNA, 993 bp, Cannabis sativa
acatttgaataattatatcatttttgatcccataagtttctttattattttattttgccataaaaaaataaacttcaactttttctcctatatttatgaaaattccccatagcaatacacacaaatacatataaacttcccttagagattttttatttattattatttttttttttttgaaaacccttagagattttaatccatcaaacccttcatatcatctgagttaaattcgttaatattttctcattaataaaaaataatatgtttattataataattatacttggcttttaggaattcacagaaatgaaatattccaatattaaaataagagacgtaagtacttattaagatctagcaaacattttttagcacaatgatacatataaagaaactcataatataagttagaagaggatcaaataaatcatggttgctatgatgttatgaggaagagaagatggaataagatgagtcaaagttggagcagatgatgatgggcccaacactggtctgatccctggatttaattttgttgggccttctgatccagtcactggagaagctgctgggctcatatcttctgattcaggatcggtcgatgttaccttggaaactgctaggcccatttaaaaattaacattgtttgaattggtatctcaagtcttatgatattttttgaaaaaaaaaaaaataattaaagatggttgtgttaattacctaatgatgtaggagaatcagcttccggagcaggactggggtttagtaagatggcaggccctgcagatacagagtcacgatatttttggaataattacaccacgtaccacatactgaaatttcttatttttttacttttatattgtagggcggatttttttttaaatactgtgtttttttgtcaaaaatacagtataagttttatactgcatactgtgttaagttttcactgttgttctactagtattttgtagttattctactgttgtt

SEQ ID NO: 80669 - DNA, 2746 bp, Cannabis sativa
tagttcaatcctttttaactaataataaatgattgaattgagattgtttttttattgtcagttttgcttcttgaaataagagtaatcactcgaattgatcccaatttatttttggtataagttcatttggatagtaatgttgtttgtgtgctgattatatttgtagtttcaagctaagccgagtaaggaagatagtaaagcgagcggacctcgaataaacgagaaaattacagctcaagttatcaggcttgtaatggacaatggtgtagtaatctctatttgactgaaatagttatgaattgctagcatattttgattaatatacgtattatatacttattttcttttttgggggtgattaattgcagaacatacagttgtttcaagggatgaagctctggaacgtgcaaggaaactcaaccttgatttagttgaggtaaatatatgcatatgtagtcattctctttgaatatactctgagttgtagttagtcacatctacaattgtttcttacaatcactaatcagtatgaactagaaaaaatgatgaagtaatgtgtctcttttacaggtccaagggactgctagtccacctgtgtgtaaaataatggacttccataaggagaaatatgtgaagcaagtaagagtaaaggaccgcattaaaagcaaggtaaggttgtatgtggactaagatgatgtgtttgcctaagtgttaatatctttttgtaaagattgaaaaaagttgttcttatgtgtttaagatacgaattgcatgtgtttaagattgaaaaaagttattcaagcttggcaaagttgatagatgtttattcttttgtagtcagtattacccctaaattatttttttctgcaaacccatatgatagctgatacttgactagtagatttacagtatccagctaatcattgataataatgtcagatttcccttatttgttttgtttttgttttcttttggtaagagaccatttactttctgtgatgtgacaatattttaatagctttagcttgtatgcagggtgaggtggctttaaaaacagcaagtgctaaagaagttaggttttctgggaaaattgtgagttctttcttttcaccctcttttcgtaatgttctcctcctcttaccttgcatcattttgttgaattgctgatttatcttgaagcttatgtgattcaggaacaaaaggaccttcagatgaaagcagatactgtgaagagattaatggagtctggttatcgagtgaaggtatttttcttttaatttgtatatttattttttatgaaatgatgttatttgtattgtagaggtagcttacattatctgtttttttcacactttatttattgtcaaaagtttgtgtttgtcttggatgaggaaaatttagatggcataattggaaagctcgttctgtgttttttaaacagtgtcatgcaaagggtactggagatcaggatgtattgggaatattgtctcgtctctctgccttggtattattataacctctgaattaattttgcttctatccttttgtatttttttgccccatttttcaaattgtttatcagaattttgatttctagattgaagatgtcactgttgttgagagtggaccactaatggggaaagacggtgcatatgttatagtaaggcatgttaaattcggtctaccaaagaagggcactgcaaaaaaaatgacatctctagtagaggcaagctctggggttcaaaaggagagcttggcttcaacacctgattcacctggggttatggatgatgtaaatgatgtaaattccgacttagatagcaatgaagagagcttttcagatgataaccaagatagatcctctaattcagattttcatggttcagacaaacgacattcttttcatgattctaaaaaatcaccagagacatctcgtatcactgaaaataggtacaaaaaggacggcgcaaacaatcaattttcaaatcaaggcaggcaatcaccaagagacacaaggttctcacagcaaacgagggaaagcgaggaagcatcaaccaatggtcctggatttagaagccataggcctccgctgaatgatgcaaccaaacgagaaccatttagtcctagacctggctatggcaattttagtggttcgaaacctactgctccaggaaaccatggcatggaagcaaaagttggtgagaatatggaggggaatcgttactctgtgaggagtccagcaccaagaggcagccttggctcgaatcagaacttacccaattccagacctgaaggaaggcagccccacattgacacaagcagacaggggggatggggaaggttcagttcagagggtgctaaaaccaaataggatgcccaagtaaagttggattttacattgtattctataacccccattttttatgctgatatgctatcaatggtatttgcccaatccccatcaatcttgagatgtctcagagatagttttgttatccataagagaattttgtcatctcaccagtgattttatttattcattaacatattaagtgggttctggcaattaaggaccgacattatggtgaataatacaagttttagttcatttacagttaataaaaaaaattatgtttcatgttattgtttggataattttttgattatgtttcatgtttagttttggatgatatttcttaataaagcattgatttaattaaaaataaataaaaaattatggttcact

SEQ ID NO: 80670 - DNA, 1181 bp, Cannabis sativa
ttcacaaaattttatcaccataatgtatattttagagtatacaatttgatagtgttataaattttgtagataaaatattaattattttttaaaataattatgtctaaatgagctacacgcatgtgcgaagcacgtgagactccactagtactataaaaagtgtttaatggcttaacttttaggttagattgtgtctttataaacactattggatatcttacaagtagggcacaaattagtgcaccttagtaccaatagaatttctcctatatgtcaagctttcattattatcttttaaaaaataaatcatcgtactactcactttttcaaagaaaaaagtagacattagtaattttaatatccaatccaatttaacaaaactaaaccattgaattcaattaaactacaaaaaaattaaatatttaataataattagattaaattagatatccaaagttggacttttattaaattggataagttattgaatgtaaatatcaaaatttaatttaaaaccgatcaaattcaattctatttatgtatatcaaaaaattatttatatctatttatataataaaaaatattaaaaaataaaaaatatatttattttatttttattagttttttttttggtgttaatatataacacttggttatcttgtttatttatttttatgatattttattctattttattactcagcaatattattgttttagttattttaaaattttagttgtcttataacgttagtattttaatgaagtattaaacttaaataaagtatgatatgtaattttttacgtatatttctttatatttttaacttaatattaaaaattatgtgtgtaattggatatccaattaaaaaactgatccaatttaattagtaatttgattgaatttaattgaattttaaagtctaattaaattggatcgaatgatgattatttaatctaattactgattggattggattagatgtccaaccctaattacaactggtatttacaaagtgtcacctcataatagtatcgagtactaatagctaataatagagttataaatatgtgtgtgttgtatcggtttgcatgtattttaaaaaagctcacaaaaatatgagttatgcagtgtcagattataatatggatcgtgttgtcatgcaaataattttatagga

SEQ ID NO: 80671 - DNA, 908 bp, Cannabis sativa
ccattattgtagctatgcatgcacaaatgagcagggcttttactttgtcaaataattaagagaggcaccgttgagattgattcaaacataataattgatgattgtgcagtagtacatgaaaaataatatacataagtagtatataattgcatttccccgtgatatatgggcctaaataatcgtcataattattataaattaaaataaatcctatcattcattaccaattattatttttttattccattggctcaatgattattaaatgaaatgagcctctttctaaacattttcataagtcctttcaaaaaaaatattttcataagtatatgataatgtaaataataaaaagtttatttgtactcttattttttattcaaagaacatggagaaggaacaacaacctattttgtattaatattaaatatggtaattggctgccagagtgttattacttatcagcaaaagaataatatttttgtcccaactcatttgttttgattttgtcaactcttaacatttgtggctatataaatagaagccttcaaaacaaccaatattcgtataaagtatatttgctcaagtaaaactagatatctatcccacagacactcttaacataatacttttatatatttatttaaatgatcaaaatggcaagtcctagaagcttcattcttgctcttccggccattgttcttgttctggcgttgtttatgacaacagttacagctcaatcaaagcttagcacgaacttctacaaaaactcatgtccaaatgtggaatctttagtccgatcggccgtcaacaacaaattccgacagacatttgtcactgctccagccacccttcgactctttttccacgactgctttgttcgggttcgtaatatcaatgagcttaaacta

SEQ ID NO: 80672 - DNA, 1904 bp, Cannabis sativa
ataaactaaatttataaacatgcatataatttttatttagaaacaaaaatcaaaaggggtcaactatctctacttatctcaatctaaatttggtcttaattaccaatactttcattgattcaaagaaaaagcaaaaaatagaaagaaagaataataataataataagggatagaaaatagatccaattcaaataatttttaattatatgtaataaaataaaaatatacattagtagaaaaaaatgattttaattcccgttcttatacataataaacttttaattacttcaattttgaatttctctcctcaataaattattcaatattttattattttcaatcatcttttctttctaaccaaacaaacatatatttttctttattttctatacttttctttcgctcttttctttaattattcataataattttttttaaaagtaaattttttaaatagtaaaattttaatttcagttcttgcacataaaaattaaacaactttttagtacttcaatatttgaattttatgagatttgttgaactaacaatataaaatatttattttcaaaaaaaaacaatataaaatattaaaatttataaaataatctcacttaatttattttacgtgaccataatatagtcacaaattgtaaaatctgtaattgtttttcaatcataaatcataatagtcatttatataattacacaatgtaatttataatcgtttctgcgactatacaaaattattttactaataaatttttttataatattattttagtaataaaaaatttcataaaaactatttttacaaaacactcttaaatttcatgatccatttcattcatttttctctttcattttcttttctttccaaccaaacaaacaaacaaacaaacattctccattattttccatactatttctttatttaccaaacatagtgcaagttaaggagttgtatagcaatagttgatccataatataaacaagagcactctttcccatgtaagaggggggccataagtttttttttttccttcttcttctttttttctttttggaaaataaattttaataaataatataaatacaagagcactcttttccatgtggtagagaagggtcatggattttccttttgcttttttatgaagtggaagatcaaaagcaaaagatttattatatatatgtaaatatatatatatctctgcttttacttttcagccctctctttaagactattctcttcttctaataaagctctctcaaagaacacaacatgacccaatatttatatttttacattttttttttttttttttttaaagattaatacaatttttacaaacatagagagttggtccccattacactgtagcccaaggaaggagaagaaggaataaagctgatgaatgataccattttacaaagaaaaaagctttctttaatttttgatccatgcacctatttttatatatattcatatatataaaaaaaaaaattaatcattttttcaacaacattgtaatgatatattaattatgatcatcatcaatctttttattactactgtacatcttgcagaccacttgtttccaactcagataataattttttttttatattttttacacaacaataatattaataatatatatcttaaaataaaataacatatgaagaataatagttgtactaagtttgtaccacatcaataaattattttaaaaaataattagaatgcaaataaaagaaaaaaaattataattatcttcatagtttaagaataatgttttacaaataataataataatttaaagaacaaaatcttacaagtgtcataattttacgaacaaaaatcttattttttatacaattaaatccaccaaatacaatattta

SEQ ID NO: 80673 - DNA, 758 bp, Cannabis sativa
tctattttattttattatatatatgtatcatgtaacttcttgttaatttgatcataaatgtaaaagccgtaaggcatgcattgcagaatgaatttttgatgaataacaaattttatcctctcatcattttatatatatatatatatttatatcttgtttgttactatataatcacactcatcatattttttctgttatgtataatatataattgcaagcaaatgactactcaaaataataataaaaagcaagtgtagtgactcatcacaataaataatatacaaaaaaatacatgaataaaaaaataaaagaaagaaataaaaagcataatgtttacggcactccatttataagtctaaaaattaaaatttaaaaagataaaacaaaagtagtgcatctcttctcattcataactatttgactttaattaatttggcatcactctatttttatatattatattatattatttatttatatatgttacacaacattgagacaagctgttaaactctgtgttgtgtatcctcattggtcatcattttcacatatatctaaaaatcatccatattattcttatttttattattattattattatagtaaataacgttataagcatttaaaattaaatacttagcaaattttatcttaaatttttcacaatattaattttgtctcataaaatatacggcttgttaagaatcttctgaacttttacatttgcaaaaatttaagttaggtttcgtcccattttt

SEQ ID NO: 80674 - DNA, 847 bp, Cannabis sativa
cataatagttgatcacatcttaaaaaactcaagcctccactctatgaatcaatctcatcaatgagtaccttttttaatattcatcatctttctctatccttcatattcatacaaaacaaaattattttttcatacactctctcaattttagagatgctaaactactagagtagaggaaatcggcaagaagaaaccagccaaaaaatagattccaacaattttttttataatattttacaaaaaaaaaaaaaaaaaatcagtttcggcagtttgaatcgaccaaaccacggtttacattggttaattctaagggattttctatattggtcggtcggttttcagatcataccaatccatgaccgaaaatcgaaatctgaattttcaaataaaaaaaatcgaccaatgctcaaccctaatatatatcaataataaattaccattaacattaaattgattaagtgttggcccataactaattaacttatttatttatgataaataattataatataccgacaattttaacttatataaaccacactaaataattcatttaaaaaaaaaacaaaaaatcacctcatatatattattttttaatttttatttttatttttatagtttgagttgttttatatttgttgtgtgaattataatttagattattttgttagttgctccatatattttcttataaaataataaaaaaaaactatttttaaatgtaaaaattaaaaaaaaaaaaaaaacaaaacctaaattgacaataataataataaaaagaaaaaaaaaatagtcgaccattccatattgagacaatcaaaagtaatatcaaatccaacaaacatct

SEQ ID NO: 80675 - DNA, 3686 bp, Cannabis sativa
aaagtctcgtgctagatggatgccctaatcacataatgaaaccgggtaaatcacatgatcaaaaccctaatcccgggaaactcgaacttacaattctaggttctgctattttctctagggattacactaactcaggaaatagagaaacacccaactacgacacgaaaatggacgagaattgagaaaatggagcattcggggaccctgcctagccagttttggaggtactggtaaaaccgtctagccggtttgcaccagttcaccccaaactttccatttcttgctcaatcctccaccaaatgcaaccaaaccttccagaacacctatacaatgcatatacaacataatccaactagtatttcacaaaaaaaaacatacaaaatcaatttatgccattaaagacctaaacttgagtttcaaaactcaagcttgctcaattccctcaccagagctcaaaactaataaccaaagcttaaaatcaattcaaaataagcttagaaatcagactacacaatctttaaaccctaacagtcaccaacttcaaaaatcacaactcaaaccaagtaagaacttaaggaattcaataacaaagcttctagggtttaccttggttaagaaatcctttaatcccagctgaaacacccaaaaaccagcagcaattcccccttgttttgagctggttcgaagagagagagggaagggaagagagctctttctatttttggtcttttctttgttttttctttaatttctcaaagtgaaatgtgtaattttggctgaagtaatctaatgctaggtgtcaccttacaaggcagccaccaaatctcttctcttgacaattactaaaatgccctttctcttaaaactaaggtatttctaaagctagggtaaaatggtcaaattccaatacctacttaatcccgatattttattttctctaaaatatttaccactaagaaataaggttctaaacttacccatgtgaccaatctagccatccatcgcattttccgttgtcaccgagcaaaattacaaaaataacatatttcatatataattcataaaacacccctagagtttaataaaatctccgaaattgagaaattataactctaatgctcatttctaatattggggtccacaaataattcaattcataaataattataaaaataacagaaattagtgctaattgcctttactaatcccaattactaaaagcggtcattacaggacatgaggattccgtaccagcattccaaacccataagtaggactctcataaatggtaaagtgggccaagccatccaaacgtgtccttctaaaagttacctttgttctgtactcaggataccttatgccttctacagattgagttcagaagacagttctggagtcgtgagcccggagggggaagtgcatcatttctggaagactcttctagtttccctatttgtttcctcctataaataaggaaacaacagctgttagaatggaaaataatatcatattgagattaaagaggaaactttccatcatatgcacaaggcagttgtttcagaatattctcccattataatcgaatatggttttgacctgatcaactcaagcccaattcgcttagtcagcagattgtatccttcatgggctggacttcatgagtgagctcatggacattgttcagttgtaaattccccagtagagggaaaagggaaaaccctaatataattctccaactactataaatacccaattaatctcatggattaggggttgaatgatcatacgtaattttgctcaggcgaatatacgaatatacactctggtacttgggagattattataagtaatacattactgaataaaagtgactcgtggactaaggcttgttaacgccccaaccacataaaaacatgtgtgttccttattatactttctctgtcagttattatttcttcagttcttattgtttttattctgtttccaaaaatctcgagaaataggaataaattaaaaatatacatcataaaatataaacataaataaaaaaaacaactaaaaaataactgttcaacaaaaaaaattatggaacccacttaaaaacaactaaaagccaacataaaaatagcaaaacaaaatgcatatacatacaacaatagatacataaaatgaaataaactgaaaatatacacgataaaaaatacacataaccaaacaataactgtactaaaaaaatacataaaaataacagaataacaactatagaatacataaacaacaacataaaaataactatgaaataacaaaaagacagctataaatcaacagaaaaatagcaaaacatcaatcttagtaaaaaaacacataaaaataacagaaaaatacacctaaactaaaaaacaaccgtacaaaaaaaaaatacataaaaaaatcaaaaaacaactatataacacttaaacaaccaacacaaaagcaactataaagtaacgaaaaataacaagatatcaatctcgcttaaatatgcaaattattcataaatttactccgaataaactataaaacatctaaaataaatacataaaaataactataaaataattatagaatgcctaaataataacttgaaaataattataaaacaacaacaaaaaaacagctacaaagcaatagaaaaataacatgacatcgacctcgtagtaatatacaaactattcatagattaactcctaataaactacacaatatcaaaaaaaaaaaatactacttttattaatcatgtaagagagaaaaaaatataagaggagtgctctaaatctttttgtgagaaagagagagatagaaagtattaaactaaatatatatatagggacacgattttgtcccatgatgtactttcacggaatgtattatgtgatgtacgacaatcattagataggggagttatttgctctgagggctggggttgatttaggggtaattagagttaaaaaatagtaacgtaccctgagacccatctaatgtaccacagaatacattccgtgaaagtacatcacgggacaaaatcgtgtccctatatatatatgacaatattaattttttttttttgaaagcatatgacaattttaatttattatgggaagctatgacaactgcacttataattaattaaataataattgaaggggaaatttgaaattctatacataataaaccctaatattatttttctaaacctaaatgttataccataggtaatatatgaatacttttcctttatccccataatacccctcacatttgaaccaacccaaatctgaagcttgtctctttctctctcgcccaaacgcacggctcactccacaactcacctccacggcttaccttcaccacctccgacgaccactgaggaccacccagccccactctctcggacccagcccccctctctcggacccaaccccctctctcttcctctctctcaacccgtgagcctcaacccaccgaaaactcgaagcctcaacccacggtgatggcgcacggcacaacgaccttcgacccacccaatcgatgacaagcccacggtgaccggccgaaccatgtttaaatcgaaggtatggtttgattattttgtttttttttttttgttttttttaagaaagtgtttaagatttattgggtttgtgatt

SEQ ID NO: 80676 - DNA, 997 bp, Cannabis sativa
taaaaatattaaatgtgatccaataaacacctactaattaagttaacaattaaacaacatgctatgcaaataaaattcaagtacaatatatatagttgagaacagttataatgtatatttgcccttataaattaataaagggaaattggtgaaaatacaccctaattatagtgtattctaaatttaaaagttatttacaaaaatatcatttttatttgccgaatacccttttttatttgcaaagataaaaaatagtattttgctaatatgttttgaatttagggtatagtgcaaattgcactataaaaatgagtgttttacaaagaaccccattaataaataatgaactaaatcattattattctcattttccttttcctattccttttataaaatttctttattatttttgaattaatgatcgtacacattaagcaaatgggaagagacatatatcattaatactaaatcaagttgacaatatattataccatagaatactgggattttttacacctcatattgaaattttaacttttttacttttttactgtggggcgaattttttttaaaaatattgtgtaagttttatactgtgtattgtgttaagttttaacggttgttccacggttattttttagttgttctactaatgttttaattattttgttctattgttttacagttgttttataaaaagacagtatttttataaaaaaaattcgtgcaatagtaaaattataaacttttatctaaaatttaatatttttgtgaaaactcctagaatatttacattatgactatataacaattcaataaaactagttagggaggctaaggctagcatagcagtgaaaattggtatttttataaattacggtacaaactgaaccgcatttatgatatttcttattaagaagcacagttttaagataattcgaaatcgcaatacaaatggtgttaatcatgattttgtgtataataataataataataa

SEQ ID NO: 80677 - DNA, 1518 bp, Cannabis sativa
tgatgatagtgaattaccatgtgtggatatatttgtatgcacagcagatccaacaatagagccaccattaatggtgataaatacagttttatcagtgatgagttatgattatccaagtgagaaattgagtgtttatttatctgatgatggagcttctgatcttactttctatgccctaatagaggcttcaaattttgccaaacattggattccatattgtaagaaatatcaaatagagccaagatcaccagctgcctatttcaaatccaatatttcgtcttcgtcttcttttataaaagattctcatgatcaagctcgtgcatttgttattatcaaggtgagtactatggttgatacgaatttcgatttttgttttgttttgtttggatgttgtgtgttttgtattattagttgtttgaactttgtgttttaaagaattaatttttgaactcggtgttttgttaaaaaatttaaattatttagatctgattttggtcaaaatattttttaggcctattttttatagtataacttgatttgaaaattatgttgacaaaaatcgaatatcttaatgtataatcacaaaaccctatattaactttgcatataaaaacatgtcgtaatattttttatatataatttttttataacggtttttgttatagttataacaacatttcaataatttttttaaaaaaaaaaatctaaataatttacagtgtcgaaagtaagtttcaattttttaaatagtaaattaaaatattaagaactttgttgtcatactccaaattatttagaatttttttaaaaaaaaatcttgtttgaatataatatttctttttacactatagagtccaaacaagttgttgtgattgaaaacaaagtgagtcaacaaaaaaaaaaacaaaagaaaaaagtgtaaacactaataaattacaaataatttgattaaaattggattaggtatttgttcattcttgactaattattttatgatgtaacatgtataatactttttgtaaaatggtctcccaagtacattggacaagacctatttttcaccacctactacaactctttacttatttaagaattgtttataaataatacaagttgttatatattataatcacatgttgtccaattttgattttaggaaatttatgaagagatggcaactaggattgagaaagtgacaaaatggggccaattatcagaagaagacaagtcaaaacacaatgccttcactttctcacattgggactcatcttggtctaggagtaaccaccacaccattcttcaagtacacacatttatatatatataaatagtaatttctatatttcaataatgaaaaagatatcttttttctttctctttcaacttctttctaattttatgatagttacacacacaaacataacatttctaaaacaaaatttttcaatagaataatcttaggtgccgtttggtaacacttttgttttttaattctttaatcacaaaataaaagtaaaa

SEQ ID NO: 80678 - DNA, 794 bp, Cannabis sativa
ttccaatttattcttgttggcttgtataaaaaataattatttttctcttgtccatagagactttttttttttttttttgatttattataagggcgccttacatgttttgagcaagttatgggtatactaaacatgtatccaaagttgatatcaattcctactcaaaagtgtaaacaagttaggtcatttaataaaaatggaaaagaaaaatattgttttaagagttaagatttgcttaatttgacaaatctctaaaaaaattgagtcttctaaagtagaaataagataagtgtcggcaaccatatcatatatataaaaatacacaaaaggaataatatgtttacttggctcaagaaatgaatatgaatacaaccttagttcaaggcaataattttaagaattagtagttaccataatttatgccacaaattatactcacatcacatatacatctatttttgacaatattgagaaaatcccactttttctttttggattaattttaggcatgaaatagggtagtcgtggtatctactttacattacgtagaaatccaatcacaaatatttatacataaataagtctatagtcactctcttttgataatttttgtatgtgtttcagcattttagagaattttttagtttaattttttaaaaatattacattatatactcattactttattttcataatttttaaaatatacctacttttatagatgatatctctattataccctttaagttaatataaattatgtgctatatttaagtggaaagtgagggtatatt

SEQ ID NO: 80679 - DNA, 2284 bp, Cannabis sativa
ttttttagaaaatatttagaatgaagttaaaatatatattcccattatacccctcttttttcaccatcttccattttggcacttttgcttagattctatgattctatttaagggaatatactcattgatgggaaagaaataaaggaatacaatctttgatggttgaggacacatataaattggattggtgtaacaagaacctcttctctttagtcaccaattcgatctaacatatgttatgggacaaatgaggttatacaaacgagattgtgatgaatttgtaagtgttgagaatcatgagattctatttcaaaatcaattggtgataagtgaagtagttcatgtttttatatatggctgtacatttgatccatgtgggccaatattgtccaatagtaaacactttacccgatgaatgtgatacggttgttggggaaaagggatgccaactttcgggtgggcaaaagcaaagagtcgccattgctagaactctgatgaggagacccacaattatgttgctcgatgaagaattgttaattcttcagaatcaattaatctaaatggcaatcgagtgttttagtattacacaaatcacaattgctcataggattcacatacaagcttattagaatctaagggattgtactcaagactctcccgattagagagtttttcatgacactaggatcctgtttggttaagttgagcttttagaattaaaaaaaaaaagcacttttaagagtgttaaaagacctttttgagaagctatgagtagaagtaaaaactatactaaacaaggcctagatgttctgcagttaaaatacttatagaaacaacattacttacactttttaggtggtttaatgagtaataggaaattctagtaacttttatcaagaaataatgttgacaagttattaatatattatatatatacttggagaaggcattacctttaccactttaaatgtaaaaatgtgtggatacataaggttttgctctcaaaactctgtcatggtctcctccatatctactaatattatatagtatatgcaatgaattttcggagtggaattcctaagcacaggcttggctcacttataatcaggctcgacttagcgtacatgagagtggcgacgatcattcatgctaagcttcaacaaacttcgtctcaactttactaaaatgacatcatatatcacatgcatggatattttagttatttgaaaatctaacaaatacatataatttaaattttgattcctattgggtaagaagaatagggtgaataagtaatgatagtacatgatcttttgtttggcgatcttgaattccatgtccatctccatattgataaatgcaatgtgacattctaccaaggtttaaacacatttcaatgaaagccttattaatattattattagatttagagaacattggagagtaatcatcatccaaatttatgcaatctttattaagaaacttccatgttttatttattaataacttaatatgttgacgagctttctcttcacatacaccatcttcatgcattttgcattgaattgatttgggaacatcacctcttttcaactcatcctgcaaaaaagtacatataatattatgtaaaaaaaaattcttaggtagattattattttttatgttaccaatagaataaataagcctttgcccgtgaaatttatcctaaaaaaatcatgtcccctaacttattagcagatcgaaagaaagaatgactactactagggcttgtgccaaccaacaagaagggggcacagagcaaagacatctcttggctgatgttaaatattcccttttaattttgagtgttagtgaaatatgggacgatccgtttagtagttagcaatttttattcccaaactatggtcagtatcatattttgctccctgaatttttatcactaccaaatcatgttctttttctttaatagaaattcaggggccatgatgtgactgtgctaaaaattcccttcgaaaaatatgatagtgatcatactttaagaggtaagattgctaattatttaatggaagtccaacaaagtctaacaaaagtaccataaattactagcattcaaagttgagaggaaatatttaacatggctaataatttagggggcaccatcttattagttacaaaatttagggagcttaatacctatttatttgtagtatgtagtaaagttacaaagaattttacacacaagtttaaagggaagttttgaatagtttaaaatgtcaaaataata

SEQ ID NO: 80680 - DNA, 989 bp, Cannabis sativa
tataataaatataaaagtcatggttgcacatgaacaagttctccaaacttgagagatcacatgatttattgatcatatcatcgatcccaagtcgtcaactggggactcttttatatagtactactaccaaatgtctctaaccgcccaactaattataattcacacatccatgctatatatattatatatatttatatttaaatgtacaatcaaattatttttaggctcactcatatttttatacactattgttattataattattagataaattattaattaccgtactaactagctaattgaagtatattaataataataataattaaaaaaaattagtaattataataaaattgaataagttaaaaatacattcacgaatttttaggcataagatatatattatatatatattgttagttaattgctaatctgattactttgtctaagttagtttgttagttaccttagggacggttagttttggctgaccgatttttctgttaattttttaacactgaacacaagcttaattgttaaatcatattatttttccttaatgtaatacaactcacttcaataaagatactatttattcattatttatccaagagaggtttgcgtttgagttatatgatcttgtgtagctatttcagtgataagatcaaagcttaaaaagagaggtttgcgtttgagttatatgatcttgtgtagctatttcagtgataagatcaaagcttaaaaaaaagatgattcaggaaaggcgatcttaattcttggatcaagattgtgatgaaaatctatcaccatatggattatgcaaagtttgatcctgagagcacaaaggtgtcgaacaaagctcataatgccattattctaagtctcgggattaaggtacgtagatagattttaaatgaaaagactgtagcattctaaacgaaattagaaagcttgtactttaaaaagtctctgcccaatcaattgttctt

SEQ ID NO: 80681 - DNA, 1430 bp, Cannabis sativa
  modified_base (1371)..(1382): a, c, t, g, unknown or other
agggactgggacgcgaacccaagacccgacctcgatctcggtcccgcaccaagacccggacacgaacacagatcaggacccaagatcaaaatcggaacgataccgagacccaagactgggatccagattttgacccacgacccggggcttggtccgaacccgtagtcagtgtccagatcttggaatcgtacaaagacctgaacttggaacaatttccaaactaggacccaaacccaaacttgaacctgagacccgaaatcgaaaaaagtacaggaatcaggaccctggaaaaagaattttaccgggacccaaaacagggtctagacgcagaaccgaacaagacccagacctagactgggatctatacccagacccagacccgaacccagacccacacttgttccaggacctgcgaacgaaaacccaaaacccaatacccgtgccctgagacctagacaagaacctagactcgtaccagaaccaagaccaagacccagacccaaaccaagacccagacccagacatagactttaactcaaacccaaatccagataaagacccaaatccagacctggacccaaacccatatccggactcataccagaacttggactcgaactcaggactcataccagaactcagactcgaactcaggactcagaccaggaccgagatcaagacttggacctagacccaaacttggacaaagacctaaaccttgactaggactagaacacagactaggattaaaactaggaccgggaccgagagtgggaccgggtgccgagacccgatactcggatcaaggactcagaactgaactgtgacccaaacccaaactaggcgaaggcccgtgacaaggaccaacactgaacacataccgggacctgcactcgaactgggaccctaacccagaccaggacctaggaccctaacctgaatcgggcacccagacccatgacttaggaccaatgaccaaaacctagacccaaatctagacctaagacccgaaccaagaaccaagacatgagctagaacttgactaggatctcgatttggacttgggacctaggacccaagacccgaggcttggacccgacccatagtcggtgtctaaatctgggaattagacctgaaacaagacccaaccacagaatagaagctgaacccgaacctgtacaagaacaccaactactctcgacatgtggttggtgtttggatttgggacaaagactcggacctgaacccaaatatggacctagacccagaccaggactcggacccagacccacacccaaaccttaaatcgtaccctgtgacccgaaaatggaactagaactgaaagcggacccttaaaccctaaaccctaannnnnnnnnnnnaaatcctaaactctttacacttacccctatgttgggttttgtgcccta

SEQ ID NO: 80682 - DNA, 1318 bp, Cannabis sativa
cagtagagtgcaaagaagtaacagtagtagcaatggcgcggtgatcagatgagaaaaaatccaagtgcgagactgttggcacctcaaaaattgaactccacaagtgattcgtgaaaacccagtccaacctctctttaattgtagtgacagcttttctatttttaacccaagtgaaacgatcaccttcataaggcaaatcttgaagatgacaatggtctaaggtgttgcggaaggcctctatttgtgattcattgcgcaatgagccacccaatttgtcgctttgagataagatttcattgaaatcaccaatgagaaactatggcatagaaggagctatatcattcaatcgtcgaagaagggtccatgaagtggatcgattggatgcttcaggagctccatagaaggcagtaaagtggatagtggaagcagtggataagaaacaatcaaaataagtaggaccaaaaatattaagggaaatattaatattatctttccaaagcaggattagcccaccactcaaaccaacccgtggggactcaagaccatttttgaactgcaaggattgacgaaaccgagaaattgcattgctaccgagacgagtttccatgagaaaaagaacttggggagactgctgacgaacaagcagcttcaggtgtctgaacgctttgggattccccaaccccctagcgttccaacttaagatattcatgatgggttgcaaccccgctgaatcgtcagaagaatcatctgaatccaacataaaggaggaaacattttgattgaaaccaactccttgtgacgaggaaggagcagctggggtgtcaatttgattgcgacaacgcttcaataattgtctcatagacaactgatcagtctgcctctttagcaccttgttggggtataagttttctttgttagcagtcacagcaagggtaaagggtggagtagcagacgtgtaaaggccatggtgaaggggggctaagttattaccagcatatggaggtggtatagggcgtgttaatggagggtaagtagcaacaggtatacggtttggaggggaagggacaatgtcaggggtgtatttgtgtgataaaagtacagtattggatgacattggtagttttaattttgaattggtatgtgtaggggcagagggcacagtcgtggcattacttagaggggcatggttacaaggaatgactgatgatgggagtattgaaggagagggagaggtatggacagggtgatctggtgtagaatgcatagtgatatgggactggctaacagaaggagcaactgcagtggttggcaaagtcag

SEQ ID NO: 80683 - DNA, 1703 bp, Cannabis sativa
  modified_base (1479)..(1479): a, c, t, g, unknown or other
gaatttcatgcttaagtcaaatattagtgataacaactttctcttagaaaatgcagaaattttgaagcattaacaagcattagaggagtattaaatgtagctactgttaatagtcttgaacatattttattcggcctgttattgttttgacttagttgctatttccaatcactgcttttgttaagtaataaagaccatagggtcaacttcgccatatctttggaggctgcatcttttaattatgtaatgttattatttaacatgtattccttgtttttttactttttgatttcttttaattgaaatttaatttgacctgatgcaaaacgcatgtgacaagggaatttaaaggaagctaacatgctaaagggaatttaattatttgtttattcctacttattcagccaggagttactttaaaacatgctaaagaaggaactaaaagctcagctttcttgtttatattgagtttttttctatgattgttaaactagagtcaaatacagtatgatattaaatgtaactctttatacctcagtggctctagctggtttttccatacttatataaatacttactatgtattcttgattcataataaaactttttttaattcttttttttctttaagttttctttatagtatggtggtttttgctttaatgtaatataatgtaatgggaatggtaattataatataaatggtaatataatggaataagaattataataaaaatggtattttgatgattggtttaactaataaacattgtaatcaaataaaataaattgtatattgacaaaaatacttttagttttattatttttaatatttaaaatttaaattaaagtaacaaaaaagacaaaaaaatatgttctaacaatgtaatcatcattacattggttttataatgtaatggggattacaatacatactgtaatgaccattacaatataaagacattacaaagctttaaaaataaaagcaaacattgtaatagtaataatgattctattacaatccacattatactaaactaaacatgttcgtttggaatggtagtgtgaatttttattggaatggtagtgtgaatttttattgcttaaaaatgttagtttagaaacatggctattatgtccttggatggggatatattatttatttttaacttgtcatttcttttataaataatttaaaatgaaactaagtatacgtgccttgcatatttttttttttaatttttgttacataatatttgctttaaattttgtaaaacctatatcttgctcctctaaattttctataagtaaataataaatattattttgttatgacttatatatacacaattatattttactaaccaaatataatagcacaaatatcaatttaacacaacaaatcatttccataatcatacctgtagttatagaaatctaaataaaaataaagaattaaactttaaataaaactaatanttacgtgcctcggcacgtaacttctaactagtatattaaaagtggctatctaacggcaattcttggtttaacgatagtatttttatttttctgttacatttaacggagagtttaacatccgttacttaattttatactaataaataattgttattcttcttcctcgttattgcgattgacctttattcgatcttctctctcaaacccaaacctacatcgattga

SEQ ID NO: 80684 - DNA, 2612 bp, Cannabis sativa
tatccgcaggtattacgtcaagtatatttacttctcaagttgaggccagtcaggccaagacatctgcatggaagttatgaggacgaggtattctactaataataacttttttaaatttagataacaattcacaagtataagcgaggtaattgcctagtctccctcctcgagccaagtattctccattaacttgacaaaccacgatctgagagtcactgaaggctttaaggtattcgactttcatttcaagtgcaagttttaatcctacaatcaaggattcatactcggtttcattattggagaggttaaacttgaatcttaaagccgcatgaatcttgaacttattaggattgatcaacatgattcctccatttgacctttgttgtttgatgctttgtcgatatataagctccaacctgcaccctttagtacatctggattaacttgttcttcggttatgacaaccacctgctcatgagggaaatcaaggataaaatcagcaagggcttggcttttaatagctgatcctggtttataccttatatcgaattagcataattcaattggccatttaagcaggcacccagatgtatcaggcttggccaatagttgacgaagggaatagttggttaatacctcaatagtgtgagcttagaaataaggttgcaactttcacgaagctacaactaaagcaaataccaagtgttccatctgtggatagcgtgctttggcatcaagtaagcatttgctcacgtaatagatgggatgttatctaacttggtcttcacatgttagcacagagctaattgcatattcgaacaacgctacattcattgagagtacttctccaggcagtggcttgaagagtatcgggggttgccctgggtgcattttcagagcctaaaaagcctctttgtgtttgtcagaccattgaaattttttattactttttagaattttaaagaattctttacaattattagaggagcgtgaaccaaagtggtttaaagcagtaaccttacctgtgagactctgtacttccttgagtttagtaggagatcgcatctccactaaggttttgattttggtggggtttgcttcaatttctcgctggtttaccatgaaaccaagaaatttttcaaatcatacaccaaagatgcactttaatggattgagtcgcatcttgtagtgacatagaattttgaacattaaatctagatgggagacatgttctgtcgcatgttaagattttacgaggatatcatcaacatactcttccattatttttcttagtaaatctgcaaacatcatgttaactaatctttggtatgtcgcacctacatttattagcccaaatggcatcactttataacaatacaaatcttggtctgtgataaaggaggtgtgctcctagtctggttcatacaacgagatctaattgtatcccgagtatgcgtctattaagctgatgagctcatgacctgtggttgcatcgataagttggtcaatgctaggtaaagggaagctgtccttaggacacgctttatttaaatctgtaaagtcgatgcatgtctgccatgagccattcgacttttgtactaagataggattagctaaccagtttagaaaatgactcctttatgaagtcgcgtcctagtaggcagtctacttcttctttaagcgcttggcactttgtggggtccattttatggtgcttttgtcgtgctcctcacacgtcagggtctatgttcaagccgtgacacatgacctcaggcaaaatttcaaccatgtctgaattcttccaagcaaaaacatccaaattttatttgagaaaggttactaacctttctcactgttataaagctagtttaaaaccaatttttaaaactttagaactatcaaatgaatcgattggtacttcaattgtttcttcacagattgtgcagtgtttgtatagtcaaggactctaggtccagattagtctttttaacgtgtggtacttcttcaattctaaacgactcgtgttgaggtggaggtgcttcgagcaaataaatcacattcactgatttcttcttctctacaaatttcaacgcagtattgtaacattctctcaagttagtctaaacacctcttactgatcctacacatgcgagtgtagggaatttcttagaaagatcataaattgaagttaatatcttcatctccttcaaaattgggcgacttatcactttgttatatgcaaaatgttgatcaattattgtaaagtcttccatagactttgcagtaacaggtgttgtctctaatgttattggcatcttaatcattcatttggattcgatcgtatatccaatgaaactgtagatactcaaagttactggccttaaatattttttatgtaaccccgtctgcctaaggcttatgaattcaagaggttaattgagcttccattgtcaacaagtactcgatggatattgtctcccctaatgttggcgaccattactaatgcgtcaacatgagggtggtgtacccatctcgcctcacttttatatgtaagtgatattgtcacattctttcctataaaagtttctctggtctttcacttaaattattta

SEQ ID NO: 80685 - DNA, 801 bp, Cannabis sativa
aatattaaaaaaaatatcttttcccttgttttctagggttgaaaattacatttttgccccgtatccatgaaaagggtctcatatataaatagccttaattccatagtaaaaagataaagaaagaaatagataagactgattatcaaggtttgaaaatcaatggagaaccactacaagatcgctacagttaacgatttcaatcgatttgacgatgaacatgaagaagaagaagaagaagctgcgcagattccgattcacagccaagtagtgaaaatcaagaaagaaatcgagaagatcagacagccatcgcttcaagaaccggaaatgaaacgagttcgtcttcttcgcaacgcgtgcacgaagtttcagagacacacgagatctcctctcggattagctgaacgaccgatctctctgctcggaaattgaatcgtgtaattacaactttacaagataaggcttcgattttaatggaagctctgtttttctcttttttttttttcaattatataatcagttttagaactatgaagttttttgtatatagaaaaatatcagtagaaactttcttctattaaatttacagttaggattgatgatatgatcgaaaatctttattactgttttatatatataaatctttaacgttttgaatctgatttgaatgggtctgtttgagaatttggttgtattttgtagcgggaatattcggatattcatatttcaatccttttttttttttgtctttttaattccaatcatttcattctcatttggatcaaaatcaaaaagattttttta

SEQ ID NO: 80686 - DNA, 2338 bp, Cannabis sativa
ggttccagttggaagtgagtttaccaagctttggctttatcttttaaagaaaaaggaaacaacctaagtttgaccattcatccgaaaaattttaaaaataaaaagttgagcaatatttttaggtgtgagaggattaagggttgtaaatatagaatgttcctcctagaggagccttctatcagtgtgagattgattgttataagagcaagactcctttgtttgtgctcaattaattatcactgaaacaattgaagcttatcaataaagatttccaacctagtttatggttgtgcatgtccttagggtaggtagctgagttcattgctcagttaccgaaccaagtaaaatcttggtgttctattttatgttttctgcattaattttgttgttttaagttcaatcatatgttggtattttcataacagacataaatgtctagggtactattttggtaagagcaaaatagttttagtagtatttataaaactccattacatatgtagtattttgcttaaataaggtcatctctgacaggaaaagtaaaaattgtgctatatttgacacaaaaaataatttgtaatatacttcaatatatttttggcattgtactccaacacacaactataaaacttgatgcaaatgttaatatttaagtaatacttttatgaataatatatataaaacttttattttatcactacttcattatgtaagaacataaagaaatatataaatagttcataatttaatgatattgttatatactaataaaataataaaaatagtataaaaataaataaaaaataacatatgatgtaaatttcacatcatagtaaatattgtttcaaattttgcacaatatttattatgtgtcaaattaatatattacaccattgaagtacaataaaaaaaattactaaaatacagtcgtacgaaattttaaacaatttttaagacttttaagattttatttacagaaaatacggtatttttaatgtatttttatgttataattttgttaattttttattatatatatgtatatattattttttttatgttgttctgttgttattttgatgtgattttcttgtaattagaataacgtaaacatattaaaaaaaaaaaattgaacataaatgtgtaaatattttaccataaataacgtaattttctgtattttttttctaagtaaactatattttgatttggcattacttatttgtatctctgtagaaatgatctaagaggatcaaaattaatggtatattcccctgatctatcttatgtttattctttcttaatcacatttcttcatcttcactattgtttgttactgcaattgcgcatccacgatcatctatagatatatatgttttaattgtgagctatatttaaaatatttatttcacaatataattttgtttaaatattaattaaaagaaaaagaaaaactatatttcttttaattgttattatattaacaataccaatttcttttctgaactaacggtaagttatatcatttaaaaataataataataaaaaagttgaaagtagtatatatattgcgataaaatttcagcaaaaatttacaactttaaaagtatataaaccatttaaaaatacaaaatagaaaaattaaattgatgctgtatcacaaggcaaatatgccaaaaaccctagaatcatgcatggattacgattgtttatacatatatagagattcataataaaacaaaatcagtgttaggtatagtagtctagtgtaagattatattatttattcaacatatacataaaatagtaaacgtaataaaaaaatgaggcattaaaataacttttggaaaaacaaaaaataaaaaagaaaaagaaaaaagaaaaaacaatttgttataaaataaaatataaaaaataaaaaattagcatgtgttatgctgacaaattcatgaatctctcaatattaatataattattacaataagaatctattatttcatcaagatattaattaagctggcagttggcataagatggtgacattaacaataaccaaaacctcacatgcatataatgcatgtgttaattattaattaattattgaatggtcgaataagtacaactttcttcctaaaaaaaatgcagtgcatatatgatgcatatatatgattattattattattattactattaaaaaactaccgtcttatagttatgtataattagtataatgactcaaaactaatttaaaaaaaaaataatgactcaaaacaattgttcaaaaaaaaaataaaaaagatgacttgatcattaagatcatactttcatattaaaaaaa

SEQ ID NO: 80687 - DNA, 2237 bp, Cannabis sativa
atgtcttgagttacgaagcccttgaactacagtcagacttatcttaggaagaacaaccagttcagattcttgatagaaaagaaaaagttctttgaagcaagaccatcatcttggtcaaagtattctggagaaataaacaaggtggaggaagccacctgggagttagagtctgacatgaggactcaatatcaagagatgtttaagttagatttcgaggacgaaatccttttaacggggggataattataatgaccgcatttataatatggattagtaaaggtaattagttttaattattgatatttttatagtacttgtggattttaattatttgtgggtcccattgttagaaatgggcattagagttataatttctcaattccaaagattttattaaactctaagagtattatttgtattatatttgaattatgcaatttttataatttttgctcgtgcgacgactgaaaatgcgatggatggctagtttaaccacatgggtaagtttagaactttatttcttagtgggatgtgtattggagaaaataaaataccgagtttgagcggggttatggtttttgaccattttacccctagactttattttgcttaagttataagagaaaaggcattttagtaattggccaaaggagtgatttggtggctgcctaggaacttgacacctaacaactcatatttcagcaagattaattcaattaatctttagtttttagggaaaaatcaaagaaaagccaaaattcaagaacagcctctctttcccttctctctctcttcgaacccagcttgaaccaagggatctgctgctggtttttggtgtttccagcaagcatttgaggaggttctaaccaaggtaaaccctaaaagcttttgtgtattgatttctttaggttctacttggtttggttatgcaattttggaagttaggggttgttggggtttaaaggttgtgtgatttgatttctaagcttattttgagttgattctaggttctggatactggttatgttgtgttgtgatggaattgcacaagtttaagctttgaaactcaaacttaggtctttaatggcatattgtgattcagtgtatttttctgagttttattggttagaatatgttgtgtatgccctatttaggtactgtggaatttttggtagcatttggatgagttttgagcaagttgggggttctttggggaaaactggtgcaaatcggttaagcgatttgccaatacctataaaaccggttaaccggtttggtagattccccgaataacccgttttctcaattcttgcccatttcagtgtcgtaattgggtgtttccctgtttcctaggtttgtgtagtccctagtgttaataacagaaccttgagttgtggttcgggtttcccgaattaggttttgacgtgtgatttacctggttttattatgtgattaggacatccattcagcacgagactttctgttgaggtcggccaactcacgagacttttcgttgaggtcggccaacccccaacttgtgcgtgcatctcatgccatgccccgcgactggccgtcgtctagtttgattctcttcagtcataaagagtcaaaattgctcatttttatggccaattaaatggcgacacgtggtagcagtttaccacatccaccaatccgagactgccacgtcccactgcagttttaattattggtatttacatttttacccacatgcaatttgtaataagtttaattgcacattagtccttttactcttctataaatagaagcttaggattttagaattcagtacagtctcggattgaaaaatccagagaaaacgctcaaagcggtcagtgttagtttaccatttttcttagttaattttcttatgggtttctaagtttctttattattaaggcggacgatgaaacctagtgtatttaattaagtatttatttttatttttattctcagtacaatatatgcctatgatttttgcttcttaaaataatttttttcatctttaatatcacgtattttttatagttagaaattattaatgcttggttctatattttataagaaaataatattctttgattttttgtatttacattaaattgtttcacatttaatgcttagaagttatgattttaaaagtgaaggaaaatctatttttgttagaaaataattggtttgattactgattaaattatgagaatcaatataaacat

SEQ ID NO: 80688 - DNA, 2550 bp, Cannabis sativa
tatgtctaatctttactacaattttgttttgttttctttggccttctccatacattaatccagattcttttttttttttaaataatagtcagatttggatatattactttttttagcccattttgtttttgactaccgaataaaaaatctaaaaatgttaataaaatgttaaattatgtaccaaccttgtagaaaaatcaaaggatgcatccaagcatgtatagtgatcaaggagcagcctacaatctcagagagagactaagatgccgcaagaagcttcttaatgggaattcggcaccactaggacaagcctcttcagattcatcccatgccatgagtgacttggacagaagtccaggacatggcatgccgagatccgaagatcatactggagcaggtgattcatctatggaacattcattcattgataggtatagtcctagccgcattcccacaggaccagcttttcaagctgaagtacctgcttggattggtgagacttgtgaaagcgactccaagtggttggggtccaaggtgtggccactgaatcaaactgaaaaaaggtttcttgttgaaagggatcctattggaaagggaaggctggagaattgtggatgtcaagtgccgggttccacagaatgtgtcagatttcatattgctgagaaaaaattgagagtgaaacgtgaattgggctcagcttatcacctgtggagattccataacatgggagaggatgtaactgtgttttggacagaggctgaagagaagaagtttaagaatatagtgagctcaaatcctccctctcttcagaagtgtttctggattgaaatttgtaagaactttccaagtaggaaaagggcagacttagtgagctactactataatgtttttcttttgcgtcgtagagcagttcagaacaggtttacgccgagtaacattgacagtgatgatgatgatgaagaatcagaacctgctttagagaccaaaggttttgggcaggaaacaccccaaatcaaacagcataaaaagtaacaaatagcttctagccgatactaccaaccattcacacccttttgagacctgtaaagcctctgtttttcctttttcctctttctttttcttttgtgcttttcaatggcaattttggatatcaacacatcatttttcaccttgcacaagaaaaaagtaatcgtcactctctcactctcactcctgctttcaatgtggaaagcaacacttgcaattgtgaagctgaaagcctatttggtttatgccttcaaattttgagatctattcttgttcttgatcagtaattcaagcacaggtacttttcaatttgctcctttttttttgattcttgagagtagagagccaaaaagactgaaaggaaagaaaagcttaggaatgcctgggaatgcagttggaggtggatgagtcacaatacataacctattctgaattgcatattgtagatttgtggcaagggaattagaattgatttttgaatatggtatagaattgttttttgcatcatttttacgttggtctctatttcttaaaaacttcttttttatttggtgtttatcaacatatatttaacttttctatgtctttttggtcagtatgtgaaaatatttattctttataaaacgcttaaattttcatacatttttttaaaaattaattatctcgtcgcaaatatcataccagatgtatttaacatcaaaatttgaccaaaaaaaaaaaaaaaatccgaacttgctaaatatcacacttacaaatgattatgatgtctcatgttctacttctatggtgtttaaatccattttggtgtcctaaagggccatatagtaaagagatcccttcattattctcctattttcacatactttgtttttcatgaaaaaagtattttaaacacaatgtggttttttgtcttcaaagtttgagtaaagccattgtaatattagtgaagattaaactgttaccctcaccctgagaatagtcattgggcattaggagcattgtgccatataccaagtgtatagggtaacttgaatgggggtgcacttatgtggcgaggttagaagggagtatttcaaacacagtgcatcaaagttgtttgagcgtctgggcaagcttaccttaagcatgtggcaccaagaccccttgaggggtgcaccaccaagcacctggtaattatgcttgagcacatccttcgtgccctgcttaacatgcatgtctgagcgcatgaggcatttgcataggcctaacacttgtgtatagttcgaggggtgctgcaagataagggatgtcatacagtaagtacaaaaaactacttacaagctgtatgttgcgtatcaagtgttgtgtgatgtagcaatagggattgcctttacggattttttttttttttgtttggattaagggtttgaaacccaccccattccttctcaaaagggattaaaggtgccattctgaaggctcgcttagctgtgagtggtgctatctgtgtgatgggaactcttaaggtgttatcgatgattcaat

SEQ ID NO: 80689 - DNA, 1408 bp, Cannabis sativa
tccaaaatttcatctccatcgtaataaacaatatttcatttttatttattcggtaagatttgatgttaaataaattcaaaaatgacatttaaataataaaaaaaaaatgcaacaatccgttcatgttttttttttttgaacaaacaattcccgtttgcttagctaactaccatatttggctttttatgtttttatttttaaatgaaaatacacccaattttctacataattataccataaacatgaattataagttgggaagtttactaaattttattatataatgactaatttaggaaataaagtacataaatttatttttattaggaataaattacataaaatttgatccttttgtaattatttaattggttaatttattatatcagatatcttaatctttataataaaaaatgaatagagaactttttaaatgtaaagagcttctgatttttttttctaaactttttaattgtattttaattaaaatcactaatatttcttcattattttataaaattaatttatatttaataaattaaaattataaaatattatttaaataaccagattctagagagtatggtaacaaaagaaaaaaaacgattctttattttagctttttaactaaaaataaaaaatattataagagatgctctaaaaaagtaatttaataataccaaaaactattttgagctagtttgatgaaggactccccttaattttgttgaggtcgaaatatagattgtaaaacaccatatcttatcatatcatggaccaaatcaaaccatcaatttctaaggaaaacaatggataagatcaaacttatattcatctatgcctatacacttgtatactaattaaaattaaatatagtctaaaaggaaggttatgattttgtgtctccaaatacaaacacataaaattataactacgaaataattatgttgaattgtgctatggctttcaatgggataattaatatagagtaattggaatgcatgataaaaaaaaaaatgcattaaatgcatgatactattaatggtttcaatagtagttggcctagaaaattatatgttgcagattgtaaaattttagcttctcaataattgggatgttcttttgtttggacctctagagattataatcatgtagcccattgtattgctaattaaatgggctctcaaatctaatgctacgggtattctgaagatagactctataccttccactagttttaataatcaatatacactttatttttgactaggcaattaagccactaaaactagtttagtggtgagggagagatgtgaaaaagagagggatcatagttagaattcaaaatttttaagctattatttaactgtaaatactattacgctgaactcaaaaaaaaaaaaaaaaa

SEQ ID NO: 80690 - DNA, 1127 bp, Cannabis sativa
ccccaccaaaaatttaccatcatactttcaagttgatggcaaaattttttactaagcttgaagcaactcatagcataagttggagttgataggaccactgctttcaaaagtacttctttccctctaatggattttattttattccaagcatgaagtaatttctaaactcgttctttgatattgttgaaaagttcttgtttatcttgaccggaataagaaggtaatcctaacaatcgttcatgacactcactgataggcattcctaaagtttgagagaaaaaaatttgaccagccactgtagtgtgaggagaaaaagacatcaccgattttttgttattgagaaattagctagcccgatgcgttgtggtatatgtcaagtgtccttttaatggccaaagctgaactatctgtagcccgataaaaaaataaaatgtcatcagcaaaaagaatatgtgaaactgatggagagtgtcgggttagacggagtcccttcagacccactaaattagttaggcatgtgaatgagctcgtttcaattgttcttggacctgaagaagtacatgtgtcgtttatctaaaaacacggataacgtccatggagaggaaaaaattggagggagaaagagagattgaaaattatatacaaaaatgagaatggtgagtggtgatatagatcttttgataaaatttgtggtgatggtcatctatgagagatggtaatggatagaaagaaaagggagtgatttgtgagatgggtaattttagaaaaaatggaaagaatagcatatttttaatagcatatttttaaaatagtgatattattaatgaaatattttttatatgaagtgtcacatgaaacataaaaaatcagtaattaatattaaaaaaggattagtacaagtttaaaaatggtgatattggactaaatgatgtcatatttttaggtcattttttgtaatttttcttaagggataattacatgaaatattaatttttataataaatttatatttatacgttgaaagttttctttttttatatttttacggtattttataaaaatacaagaaaattaaatgaaagtgacaagaaaactacatcaaaataacaacaaagcaacataaaaaa

SEQ ID NO: 80691 - DNA, 770 bp, Cannabis sativa
agtaaaaaagtaaaaaataccgcttgacagtatttttgtaaaaaattagcaaaagttagtataccatgtaaatttccctttatctatttcaaatgctcctaggtatgtgtcaactagctagatctgaagtttaatcatttatcatcatcttaaattataaatatcacacaaacataaatatttataattattagtagtattcttattttgttttggtgaagactacatttacagtttgatctataaaaaatacttatattagtgttgagtgaagtgcatatatatgtcatcctctatatatatatatatgtcatcctctatatttttctttatatgttttctaatttttgagggtctaacatttttttctataaaaaataaaataaaaacatgcttgcattaattttgtaacaattaaaaattaaaaataatatatatatataaatatttatatctacattaattttgtaaatttctttcttaagaaaacctattgctattcgtttaattagaaaatgagttgtattttacatcatctcatagtttctttttttttttaaaaaaaaaaaaaaatcgtttatttttgttcttttaattattttatttttttcaaaagaaaaaagtttgcttaattattttcattcagttttattatcttcttatttatttaatttttattcaatatttattatgagatttttacacttggtgtccttttttgtcctttttttacttttttgtcaatactgggttatttaaacttttataca

SEQ ID NO: 80692 - DNA, 1376 bp, Cannabis sativa
atgtgtgcactagtgcaagcaccagcgcaaatgtcgtgaatgctgatttttccaatcacattcacggaagaagatgcaaaacatgtttcactttccccataacgacccattggtgattaaggcccaagtcgccaataaaagagtatccagaatcctggtggataatggaattttggtcaatatcttgtttaaggccgcatttcaagccattggattaactggagctaaactagcaccctgttcaatccaactccagggctttaatgaagactccctacttcccatggggaagatccaagtcccagtcacgttgaacaggggtatagccggaaacaatacttctattgctttcaaatactgtacatttgtcgtggtggattgtccaactgcctacaatgccattttgggacgtcctgtcatagtggaattcagagtaataacttccatcaggcacctgtgcataaagtttccctgtgatagcgaaaatattgaaatagtgaagggtgatcaaaaaagcgcgcaaaagtgctacaatgtcccgaccagataagtttttaaggtcaaagaagatattgaagagccaattcctgaggcacccgcttggctagcacaagaggtggcctgagatcatgatgaactagacccccgcataggggtagaaagaagggatatttacactatatactaacttttctttaaagtttatatttatactttgacaagagaaattttatatttatacttttcctacctatttttttttttactattttctatttattaaagcttctataaagttttttttttctttcttatatttctttttcactgactttttttccttagctgatttcttttttttttcttatgtaagattggctaacctttttttttttctttctcttctctctatttatcttttttcttttcgaattctctttctctatcttttttttccacactaatttttttatatttatatatataaaaatataataagtgaatatttttatatctttttttaagactttgactcactcacaaaattttattttattataaagaaaaatgcacacttattatatttcttttgctctcttttacattttcttactatttatacttaaattatttcatactatttttctttaattaatcacattttatgaaaaaatcttaattaatttcttttaacctttactaaaatatgttttattactttcacacttttttttcattttttttaccactctttctctatcttagaaaaaaattaagagcaccccttctatatctttttctcttttacatgattaataaaagtagtattttttttatgttttgcagattattcgaagttgatttatgaatgattt

SEQ ID NO: 80693 - DNA, 1874 bp, Cannabis sativa
cccactaactacactttatattttatttttaaatttatttatgcccccctcactttaaattctgggtccgccactgcatatatatatattgttatagatatatggtttcataattatatacacctatagacacaaatatgaagagattaaatcccaaacgattttttttttttgcaaaaaaaaaaaaaacgattttatataataagttaatatcttctatgcatggaatatatatttacaaacttgattatttgtgactatgtatatattaaggaatgatatataattaataatctaataatgaaatattaatattgttaattatttgcgttaatatcggcagtattactagctatagtactataagtactactgatcttacgtactattaagtagtactcataaatgtcccatgcatatattaaaaatttcccaatattttataatgctataaattaatttaatatcgtaccataaatattaacttatatatatatatataagattgccacgacaattaatagcttaatttaatagatcataatattttgattaattaatataaataggtgagatcatacatgattatgataaatataagataaagcgtattgataaacaaaaggacagaaggatattacaataataaatttatctcatatgatacattatacataatatacatacatatatatatatatagcatgcacatacaattctaccaagttagcttttgtataatttagtcaatattatatattccataaatattatagcaacgacatgataagaaagaaaagaagaaaaattattactcatttcaccaaatatattattgtcacacgttaatatattacgtactataggtacttataatacgtatatatacttctcacacatacatatatatttcatatataaaatacatatatatatatttacagtttttgttttctcttttattaggtcatcatctctcttgttatttattactagaccaccctagagtataactttagttttggcttcattattattgttaattaatttctccttagacaaactttcacacctaaaggctttgccatttcacacgaaagtttcaacacttcagaaagatccaccgggttaagaaccgacccgatccacttgaattcatggagcagtgtacccacccaaaaagtcactgttgtcagacccaatgcctttcccgggcatgtcctccgacccgacccgaatggagccagtgctagatttgaacccattattgagaaatccacgtcattttcctgatgacgtgtcacaaacctaactgggtcaaactttaatgggtcggaccaaacatctggatctctagttatggcccacatgttgaccatggctgtggtcccaccaggcacgtgaaatccatcaactatagtgtctgtgattgctaaacgggcccacgataaaagtgggcccggtgggtgtagccttaatacttccttaatcaccgcagataagtaaatcaatgatgtaatatctgattctaccaacggtcttgatcttcccacgacttgatcaagctcttcttgtacctttgattgaatatcagggtggagtaccattctcgcaagtatccactctattaaaactgccactgtatcggttcctctaaatatcatttcctgttcaataaataattaaaattagtcaataaaaataaaaatatataattaatttcataaattagtctctatcaaaatatattttattcgctcataaatataagtgctaattataatattctattacgattttttagtaatttttatgtctgaaattatatgttggaatatttttttaaaatattttttataacggtatccgttata

SEQ ID NO: 80694 - DNA, 1411 bp, Cannabis sativa
aaatttgtttgtgtgacaaaatttttataattttatgtacatgttgaactaagggtaattttatgtcattttatcaaatatttttaacttttattttaacttattttgataattctcataaaaatatttaaataattaaacttataatatatttatttgttttaataatacttaaatattaaataatttaaataatttacttcttaaatattaaatttaaaacctaattacttaatcatttattaataaataataatattgactctttttaattaaattacttagtttttaaattaattacatcaaagttttatatgtttataaataaatagatattaaattatttaaattattttcatttaactaaatattaaattatttatctaattattattaattctttttattgtaagaatttattcattattaaattaattacttatttaattattaattatttgttttcaactaattagatttatgtattaattatctaattatttattattatttttcaaaaaatatataaaaatattttcttagttcaattacttaattttaaaattaatttcattaaaatttttaaatagttactaatttaaataataatccattataaatatagcttgtcaatatatatatttttttaaaaaaaaattactaacttattatagtttatcaaattaacataatttttgttattatctcaaaattttaacaaaatttcgactgcataacatttatattttaacctatccaaaatttttaaaacctattctaaacactccaaaaatttctaaatacatcacagttttatcaaaattacatattttcagaatatatcaaacaatttattaacattgaaaaaagaaaaaaaaaatcacgtattatctacttttttatttcaaaactatagtaaatttgtttttaaaaaattgcacaattttttttatggaaaatattaatatatatatattataaacattatatattttacaaattaatttttcttacatacaagcataagaaaaaaaactaacagtgggtccaatatgtatatggcacactgtagctacaacaatttaaacaaaaaagaatatacaaatataaatgcatatataaataaacaacaatatatattatataaaataatattacctaaagatgacagtgggtaatggtttggagaactctcaggcggtggagaggaagcggcaacagtggtggtcggacgatagagagggtcgaacgatgaataatgtgtgacaataaataggttcgacaatgaatatggatagggtttcatattttggatatgggctttcagataattttccataagtttgaagagcgtttacttcttcaaagaatgcctcttggtataaaggcaatgatggataggattggacac

SEQ ID NO: 80695 - DNA, 790 bp, Cannabis sativa
aactattgaggatagttttatggaaacaaaacatgacacttgatttacaacagtgagtaatattgaactattgaggatagttttatggagacaaaacatcatacttgattcacaggggtagaaagaatttgaaaataagtttaagaattctaatgatgcttactttaacaccagccattgacagtagtttgtgagaagcaatatatgcaacatttacatcgtttaactttttctcaacaaaatatatcacttcggagacacctgactgcaagaaacatcaaaatagaaatgcatataaacataacagtttttatggtacagatctatatcaagtttgagagagaaacatattaaaagacttcagatgtttggtttaaaccttccatttcctattaccagaaagaaattatagaaatgtagtgcttgaattcaaagtaaagaggattcaacactagaaggagagaagttagaagataaacctgaataataatcttggcgcactcattgcaagggaacatggttacataaagcttctgcagaggttagagataaaatggatgttcagtcacaaaatggacaagcatcaataaatctttggaattctgttgttcaacaaaggtattgtatctaagcaaatggacttttctttctttgtttcttttttcttcttcttttccatttttagtagtggggaatatggctatcatatgaaacaaaatatagtttaccaaaattaacatgttctgtaatagaagttaagcgtgacaacacccaacctgtccagcagctg

SEQ ID NO: 80696 - DNA, 2071 bp, Cannabis sativa
aagaaaggtgccaggtagttatggttaaggaagttttcaataatgacaacaattacatataattggttagacagcagagcttaagatgctacaatgctcatattctccagcaaatacaattaaaacttttaactttttatagaatgacaaaagtaattataattcatgatacaatctacttgatttggaataatttagtgctcgaataatttagaactataaactgattaagttagagcactggtaaagtggaccgttgtacaattaatttagaagggcttatacatcttttactggcatatcagattacacaccaaataaaaaagctggaatcaaaggaggttgcttgacataatttagtagtaatttacaattaataacaaattaatctaatactattcattattaaattaaagatatataatcaagtaacacttaaacttgctaatttcataaaattagtgccagacattcaaaaatcatgaaaaaatataatataataattaataagaaaagggtaactccccaaacaccagataacattttcttaaaaatttaaaaaaaaaaaaaaaaacaaaaaagaacaccgagtactaataaagtgtcacaacaaaattgatatatggtctaatcatcaccaacaaatgttttaagactgttggaatcgtataaactgtataggtagttaaagttagtttaggcctaactgttttactgttataacagtttgttagttagttttgcttctttcctttcttgctttgtaacaaactgatatgtaattcctattacagtataaacaacagctatgccaatctgttctgattgagcatccatttcattcattcaacttcatctttttctcttcttctccctttctctctctgctccattgctctgtttttcagagttcttacatggtatcagagccatgtctaacaatggtgaacgccgagttgatgcaccagaacaagaacgtgcacagcagcaaaatcagaggattgcaccatttgccctaccaaacaacaatctacttcccctaaatctgagactcgatcgaaacaattacacaatttggagatcccttgccttagctgttgttcgtgcttatgatcttgatggacatgtccttggagctcgtccaacacctccagaaactcttgcaggtaacactcctagcccagaatatcaacaatggatgcgatttgaccaatttcttatgcactggttgatgaattctgtttctgacaacatgttgggtcatgtaatccattgtcgaacttcagctgagatttggaatactttctctcaactttttgccacaagatccagagcaagattgctccaactcaggggactccttcagtcgacaaagaaaggaagtcaatcgatcgaggattacattctgaaaatgaaacaatatgcagatagtcttgctgcagctggccaaccactgtcgaatgatgatcttgtattatacattcttggaggtttaggatctaaaataaaaagcattcaaattgatcttggaaaagaatatgaacctttgtataaattgtttgccaagatgggtattgtcaaaagaaattcttgccctcatacccatcaacaacaaggtcgggttgaatgcaaacatagacatgttgtagacataggactcactttgttagcacaagctgaaatgcctttacatttttggtgggaggctttcacctctgctgcctatttaataaatcacctccaaacttgggcgagctcgaataatcgttgtttaggggcatagtttaaaaggggaagaagaaggttgaggaagtgtactaggggagttgagttcatcgtggaattcttatgcgcagtggaattacaattagaatattaggggttttacttcccagagagaataatggagctttgttagttacagatattttatgcgcaaaaaaaataaaattatttagtttaaattaagaataaatcgttaactttggagagaagagaaaaaaaaaaaactttaaaaaaaaagtcatcctataatttctcataaaccaagaatctatatatctatataaag

SEQ ID NO: 80697 - DNA, 605 bp, Cannabis sativa
acagccaaaaaagttcaggggcacgatttagtacatatcaaaattcaaagaaaaaattactaattagcctatttattatttaatataatacaatacttatacagcctaccaaacaggctcatggtggtaaatttaagcatatatttgtaatgtttcccactttaagttttcattgggctcttacagttacagaatgatgactcttatacacgaatacatcagtctgactgtttcatggaataacgactaatcctataaactaacacaagattttccaaagtattttgtactcagcacatttttttgggaaaactaatggggactctcaagaagttcgctaaagaagaatatattggagtatgagttctacatattctcttctctcaagaaattttaattgtaatattcttcaaaaagggtgtaataaatataatttagttcatcaccccccataaatctttcatatcggatcatgcattagcttcttagatttccacttcaatttatttataatatatataaaatatggggactcatttctattaaaagaaaagaagtaataataattcactcacatttggtgcacatgattgattgtgtgggaa

SEQ ID NO: 80698 - DNA, 2143 bp, Cannabis sativa
tcgtgtaatagtaatttctcctcttctgttcttccatttacacccatgtttctccctcaatgttctgcatctatacatatatatttatgggaaattaaaggaaatggagggtgttgaaaaactcataactgtgatgattgaaggagttgagaaagtaatgattaataaataaatatgtggactattttggctattttggcttattgtgtataataaataattatgtccatcattgttgtctttatatttaataaacaaaagaatttacccgacacaacacgagcaaagtatgtatgacgaaattgtattgtatacttattttattttattttaatttttatctttatttttataatctttaaaatatattcttttttataaatgatgtctctactataccctttaagttaatgtaaattatgtgctgaatttaagtggagagtgagactatattggacaactcactcacaaaaatatgtaaattattttaaagaaaaatattataatatataataaaggtatttttaattaatgaataaaaaaatgtattcttcaatttattgttatatatatgacaaaaagtatttaagcaaaatctccactccaccactaaagttcaattaggattatttttgttaaagaactaacctttattattaactaataataaaaataaaaaaatatggggtggcaaaactactcaaggtatataatttgtgacacttaactttataaatttattatgtaatgataaaattctctaaattaatactttggtgtggtctttataatttatatgtattatgttttgagttgtgtacataattttaattatttttattattataaaaattaattaacttttataaaaataattaaattaaatactaaattctcatacctccttaattataatttgatatatttgcaataaatattaaactattcttaaaaaaaatgtatattaaattattatttttaaaaagcattaaattattgatggtaatttatgggcaaattagaacttttctctcccaaattttaatatgtagcaaattatgcttgtctaattttctagactaatataaattctcttcgaactattaaaagtgttggacttaaaaaatttcgtttaattctgctcaattttattaaaagacatttgacatagataaaaatttgaaagatacaatttggtacatagacaattattaagcttctattattaaaattaaacaaaattctttaaatccattaaaaaaatatatatgtcttttttattagaattaacaagctgacaaaaaccaagtaaagtttaccataaattcaaacctctcatcacttcacactaatggaaaaaaaaagtatctttctttgtcacttaattatttaattgatttatctcatataggaaggaagttgtaaatattaattattattattttatttattttcaattttattctataatattactataattttttttttgttattattttttataaaaacggttgaatatgataaattaaaacgacctcctaattaaattttgttaaaatgacttcctaattaaaaaattaaaaatattcttcttttcaagataaattttaatatattttctccttactattacactcgttattattttattaaaatctcaccttacacatctcgaaaaaatgtaaaatttcacaaggacaaaatcaagactgttgtgattatttttctattggacatgttgagagaataatttgaaacgtaaaaatctatttcttagcaaaagaataaatttgcgacataaatatttaaatttaacttccggttgcaaataaatacttaagtataattttcaacggtaataatacttaagttataattctagaacttctattggtgtctgactattaaatgttaagtaaattgctacgtggcaatccctaattgatccatatcattaaatttttattttaaaaaatattttaaatataccaataaaaaaattgtgactttatatttaacagataggtaactacagagttctagaaatataactcatgtattattactgctaaaattaaacataagtatttatttatttattttttatgaatcaagtgaatttcattgctcaaaacacatt

SEQ ID NO: 80699 - DNA, 1446 bp, Cannabis sativa
tagacactccatatggtattactccatcaagcaaaataatgaattgactgtctctctcttcctccattttcatctatttttctccttttctctctctctatataaataatatataaaaatggaaaagagtgaatttgtaggaaaaataagagatggtgtgagggtttattcagtattatattttgtgttgtttttggggataagtgtgtgtggatcatatggagatgatgattataagcacccattgtcagtaatagccatacacaaaacccagtttgctcttcatatatctgcctctatagaagctaaaccagctcttcttggcttgaaggtaccccacgtgaccactcacgtgctactatatatctcttttattcattaatttttaccatatttaccaaccataagtaaatatgctactttaattatgacctttattatttaattttattatcctataaatacactgaaaagaaaaaaaaaactattcatattaatcgttatatctcatatggaataatcattttgacacactctaactatgcacgctttttatatataatgacacaataataatttataatgtggtcctcacttaatatttaatacatattatttttcagagatagtgaaatatatatgtatattaatttttttttgtgaaggagagtgagatatttaatttcaatgatgcattttttttattatatgcattattggtataattgtttattttataacttattattatttgttagtaggttgctttctttcttatatggcgttttacttgtagcattattgactgataattattaatttattattcataaaatatgatatattagagatcgaagaaaagattaaacaatattatctttttaaaatatattaaaatattaatcttgtcgttttatagattctacaactgtaattcttttagaatgtatgtttattatcaaaaatgggttttattcccaaaatattctctttctaaatttttaatttacaccataaatcacattagattttcattatgttacaaagatggtgaactttagcacgaatatttttttaatatataaaagtctaatttaatctaaaaaatatttcatgttactagttattagattttttttttcttttttttttcttttctggaaaaggagtaataattagaaaatagaaggtaataacaaagctaaaaaaaccgaaaataacaaaggcttataaataaattttaaaatagaaattgaaaaaaatagttttgttttttgatatttgaaaaagaataaaaatgtggtaattttttaaggtgaggagagagaaaataaggtgaaaaaaagtgataaaacaaaggttaattagcaattttttctttcgaactttgacatatacgaaatcatacccactcaacttttttggctgttaaaaattcctcctgaa

SEQ ID NO: 80700 - DNA, 1383 bp, Cannabis sativa
ggggggttgggttcagtatgtcgtacccactactagccaccctaactctcacataagacccaaaagagaggaatttaataattttttttataaatcagaaaattttattgctcaaatcaatctttacaccgtactagcaccccataatcagggcctataggctatctatacatttctatttgcctcttcttttttttcttttaagtatgtatacgcttataaagcatgaaaccactctttatatacatgtttgattttctttggcaaaaacatagaaattctaagctttagactccacttgatttcatcaagaagcttggcggaggataattgtccttcattccaaatgatagcattcctagctccccaaatgctataaactagggaagccactgctccagcaggcacttacttcctgaatttgctaatctttgccttaccgatccatctcacaagttgagaaagcttgttggatcttgcattccaagatggccaactcttaatcccatggagacaatgatcaacaaagctacactcaaagaatagatgctggccattttcattctgaacattacaaagattgcaactctcactcatttgcataccaaatttaaccaatctatctttggtttttagtctgttgagcattgccatccatagtataacactatgcttaggaatattcaaccttgcccatacttcctgactccaatataacctggttcaaggaggattaagcagattatatcatgctgcaatagaatatttctacacctgaaaactagcagcatcagttaggaatttaatctgatcttttaatgctaccagcttgagtggacagaagcagtgtagctccaccagtcttccctcttaatgtacacactatggacccatctcatccgcaagctctcttgtctatttgaaatggcccatacatacttgcaaattgcagccttgtttcactcttccagctttctaataccaatccacctgttgtttttggttgacaaacagcctcccaagctactgctccagcaccatggaacattgtttgtcctttccacaagaaagctctacagattgcttctatgcctttgagaactttccttggcatgatcatcattcgactccagtatgcttggatagcaattaaaatttaattaattaatgtgattctccctcaaatgataggtttctagagctccaacttttgatccttgctgtcattttttcagtcaacagttcacattctttcccaaaaattttccttgcacatattggaatccccaagtaagtgaagggcagctcttgtctacagaaaccagattaatgtagaacttgatttatgacatactgttgcatattactgcaataaattgcagt

SEQ ID NO: 80701 - DNA, 3466 bp, Cannabis sativa
  modified_base (3009)..(3014): a, c, t, g, unknown or other
ccaaccaaacaataatcacaattgattaatgcctccacctgtggacagacacttataagtgattattggaggccctcacatcgttggagactcgaacaaagctagagagaggtatgcttggaccctacatcatgaataaaaagataaattgttagttgtggaagaaagaaagcctaaacaatcgcgcatagcagagccagtcatatccttcagtgaggaagaatctgaccatgttatctatccacacaacgatcctttggttgttgatgttcaaattgcataaggtgagattcaatggcctagacgggcaattcctcttatgatgtgccgtccaaggtgatttatcactagtaagtaatcaatctacagaaggagctaagaattcctgagcagagtatgctacaccatccgactagcatccattgtgcagtcaactcgcatacatttgaccagagaatacgagttaaatatcttcacagatacgtttcatgaatcctcaaacttgcaagtcacgattatatccctaatattggggaatagatttgcattgacaagaaataagagtaaacattgtatggtttcccatttaactttatttatttaagaaaagtacacaagtttcctattttaattcttattagttttgggaaaccaattcgatgtaattcttccctataaatagtggaaccatttcactatttagaaacacgaaattagaaagagagaaatactcagaattcattgtaaaagcttttgagagagatcaagaacttcttaaatctcttctcacaagtcaatacaagtaaaaaaaaagtagactattaccattatcacggggtcaaacctccataacaatcttggtgttctctttgctttatctttattattattatcattattgtgatttaattatttctaattgctttaattaattcattgtcgttggctaaaaatgaagttaataattactatcacttttgttagaaaaaaaaattactatttgcttatataatattaattttaataattatgaagataattgagtaatttagatagatacttttgttcacctttatattttctccacttttagatattaattttggtgggtgggtatcattcctatttctcttctacccatttttctttcacaccaatcaccctcattttttattttctccttctctcctcaattttctcttttaagttttctcttctttcattttttttaccctaccaaacataggttgtgttattgttgctcaatatttcttcagctcatacttggcaaaataggcatatgttctgcatgcctaatataaggtgtagcctacattaatatttcattatgaaaggtgacttttgtggttaccataattcaattgattttttttttttcttttgaaattaaaaaaaaaaaaagaaaaagaaaaagataaacatagtaataaataggcaacttatccacaacaacatcaatcaatagactaattactaactagtgttccagtcacctctcaccaaccgcttccaaaattgaaaacgagccctcattaaatttgagctattataagtaaaaaaactcttctattaaataagctaaagttgagttataatgtattttgtgtagcttaatgaattgcttctctacatgttgaaaaacattatttattaagctataaatattgtattagttttattaatatttttttaatatatgtatgtgatataattatattaatttatttaatttttaaaaaataatatttaaatgatgtaaataaaaaaaaatagagaaattaatatatggtgtaattgtaaaaatgtgaggtaaaataaaaaaataaaatttcaataatgtattttaaaaaatagagtaaaaaactaatgtgagtcctctcttaatactaacaagactttagtcaagtaatcagttcacctaaataacacaccaccgactaaagttatttaagaaaaattaacttaaaaagtgtaaacaataattaaagtatagttgtatttgtctatattcttatctatatatattaattattattttaagttggggatatttgtagcgaaacaaaattactaatatttataattattacacatatgattttaattaaaaaatatagtagcaaaaatattttattttacgattttgctacaatcgtactattttttggatgttaagtgtcaattaaacctattaagtgtcaactcaaaaacacgtagcaatatatttctttagtttatttaatacgtagtctaataatgtcatcacgtgtttttgagttgacacttgataactaaaaaaatacgactgcaacaaaatcgtaaaataagatatttttgttactacttttttaattaatatctatgtgtaataattataaatattaaaaaaatttcatcgtaaaaatcctttttaaattgcataatcacaaatatttatttcatctttggtcggaagagaccttgaggagccattgacagtttgtagtaggtgacaacggtttccacgatctcaaggtagtttctaaagagaaaaaaagattaaacataacataaactatatagacttaacatattgaaaaaaatttcatacaaatgtaaaaattaaaaaatatatcatataaaatttaatgaaaaaaaaatttatcatatttaacttttgttgttgaataaaatactatatatatatgttaatattgtaagatatacgagattctatctcaaaattaatttacatccttctcaagatgatagtatttttgggtaaatactattttagactccgtgttttgtaaaagttactaattggaccctttgttttgttaaatgataaaatggatcttgtattttccaaaatggtaaaaatagaaccctgagcttaatttttgacaacttttttttaacataactaacttgaagataattcctaatacgaacagttacaaaaaatgtaaatagatttgtcataacacctttagatcggattattannnnnntttattttgacaaaaaatcagctcaggatcctatttgtacaattttagaaaatacagggtctattttatcatttaacaaaacagaaggtctaattgataacttttgcaaaacacatagtccaaaatggtttttaccccctattttttgctcaccatcttggacaattacaagcggctcttttatggttcactattccttgaatcataagtagctctttttggctttacattttggatcgttttttttttttttttggtcttttggtggttctttagagtttggtttttgctatgatactatattaaaattgtaagatgcatgaaattttacttcaaaactaattgacaatgaggggaatagctcataaatcttatatattctattatctttttatgcattaacaatatgaaactctctaacagcttctcttctgatcaaaattattatgcca

SEQ ID NO: 80702 - DNA, 700 bp, Cannabis sativa
ttgttgtttttatgtttttgtgaaataatcctaaaaaaaccaaataactcaaaattcaaaccccaaaaacgaaaattaagaaaaatactaaagggctttagtagtgtttagcaccctcctatgtgttattatggctatttgtccaattaagtatcgggttttatatagtttaatataataacttttaaaaagtatcgttagccaattataaagcgatatatttaagagtattaggtataattggtgccctataacaatgctcggaaattaaacattgaaaatgattattttttagaagcaaaaagaaaagccttagagggaagaagagttagcaataggagcagcggttgttagggtaggctccgacgacgaattgagagaatgaatgtgagctctgactttgttgtcagttcaaatttatttaattaaataacgaaaacaacataagtcagtcacctctcaataaaacaaaaattagtcattcatgcctttttacttcttcctcaatcatcatttagatacatctttttctttttctccttttactttttttttattattattttaatatataattttttttcaaggatttttatatataaatataaagttaattagtatttttgctcatgaactttgacaagtactaaattatagtcgttaaaaatgctctctgaactattgaaattattgaatttaa

SEQ ID NO: 80703 - DNA, 1169 bp, Cannabis sativa
ctcaaaactggagctaattatggtgttgacctcttggaagagtgacaatgatccatcaccagggaatttcacacttggaatctcgaaacagttacccccgcaagtttacctttggatcaatggaaaattgccttactggagaagtggaccatgggacaaatccaagtttgtaggagtaccagatatggatacatcataccaaagtttttttattcttgaacaagactttgagaaggaaacagcatttctacatttcaatttgttggaccaatccttggtcacaaaagcgtttgtttcatctcaaggtcttctaagattgttcttgtatgccaaatacaatgttagtggctcttggtatcctacctgggagggaggaacaagtcgatgcgacgtatatggaacttgcggagagtttggggtatgcacaaaatctcaatctccaatttgcaagtgcttaaaagggtttgtaccaaaatcagaccaagagtggagagggtgcaagaggagaaccgacttactttgtgggaaaaacaacattagccaatcttcaaatggaagagaatcagatggattttacaagatgagtatgataaagcttccagacttgtatacatttgtgaacattattaatgccaacaattgctacaaatggtgcatgaataattgttcttgcgtagcttatgcttttgtaaatggaatagggtgtttggtttggtcagaagatcttattgacattcagggcttttccaatggcggggaagatctgtttattcgcctcgcacaagctgatcttggtaagggtggtgttgctttttaaggaattttaatgggtgtgtaccgtctttttcttcttcactccaacacatacattatccataatcatttgttatttagtaggaggacagaaatccaggaagactgtcatcatcctcgcatttatttctggtagtgctcttctcgtaatcgttgctattgttttcatatttaaaagatggagaaccaaccatagaagtaagaaaatgatacagcttctaacttatcaatttactctcttatagttctacttctataaaaaattatttaatatttaatctaactccaaatctgaaagctggaataggagaatctcaactacagaatctcagaagtgccaaacaacaagatccatc

SEQ ID NO: 80704 - DNA, 1230 bp, Cannabis sativa
agctccaccaaacgagctcatacagatgcaatctccatgatcatgccatatggggaatagatcttatcaggcaactccctagagggaaaggaggaccacaacatgtcatggtcgctatcgactattttacaaaatggactaaaggtgacccgttagctactataactttaaagaagctcctagattttactgttaaaaaaacatctatcagtacggtctcctaaacaagattgtattagaaaatggtaaaaaattggacatcgacatgttcaccgacttctgcaattgggtttaggaacatcttggttagtgttgtattttgctactataattctatttttaatactacaattagtcttatctttgagacatggttttaagttttttaatcttctctctgtgacatagttttgtgcatttttgtcttgtctttatgacataattttgagtgctttaaccttgtttatgtgatatgattttgttttgttttattgttggctcttctttgctcttcgatggctcgctatcaaattgttattagtggtgaggaataacaacttctaagactgaaggggttgttagtagtgcagttacataccttacacaatagtttaatgttcaagctacaaggttgaataaacttgctataataatttttatagttgtattttcttcgaacaagagagagacttcaaaaacacaatatcattgctaaagattgatgtctgttcttctaaggtggatcgatcgggccaaaactagtagattcaagaagttgtttttttctgctgctacagcagcacttatgtatcatctttagcatgccagaaaagacattctttggaactcagcagagcgaaaggaggatcaagtggtgtgtacgatcaaagaggaagttaagagaaaaatcaattgtgtttggcctaaaagtgttagtatagtagatacaaattagttttcaacattgtaaattattaaagaaaagcaaagaaaaaccaacaaaggaatataataggaaatttctataaacaagcattatagaaaggttaattacgaatcattattggagatgtctaggtcttctaattgaagatgctatcaggatgtgaagttgttgttatggagtaatgaatttcttcttgatttaccaaaaaaaaaagttaattatgatgctacaattttttttatttaattttattttaattttttttgtcaaataatgtggaaatt

SEQ ID NO: 80705 - DNA, 951 bp, Cannabis sativa
tgacaacatgtcaacctgggcactaggtgcatcaccaagtgatttgggcatcaggtgcccaagtgcttctaatgggaaatgttataattctgattttgttgcctctagcatgtttatggaaggtcattcatgtctaagtacaaagtttgagtcattttcactaagatgggcccaaaaatttaaaccttagcccgggatgtcaacctgggtgttaggtgctcgggttgactttcaggaggttgttttgactcttttcaattcttagggttgagacttggattcgtctttacttctttgttcaaaatattgaaggatggtcagttagaaaaaactttgtgggatctaaacccattccaaaggtaccgaagtcaacctgggtgcagggcaagggaccccatcgaggttgactgctataacttggggcactaaattttgtaaatatttttcttctttacacgtgtcaaatattgatgtctacatcactagggttagtttctgggtaagaacttaaataatgaaatcattgattcaatcaatgatttaaccgaagaagttgtagagtagaataactgattttagcatctaatatgaataatcatgggatcttacaagattattaattacgataatttataaatgattagatgtggctaatagagggtctaagattattctgtttcaaaattttatatttttaaatcggaatcgaatatttaatttttctacaatattaaatgattagtctagagaaatgaacttgatggaagtaagagaagaaataagcaaaatataataaaattaattctgtatattcgtccaatgatagtgtggtggtgtctccgggatctataacttcaaaagattagcttgaatagacggatgaggaataacatctataagagttatggaaggtgttgcagttacttttagtggaagtatgagatttttaag

SEQ ID NO: 80706 - DNA, 658 bp, Cannabis sativa
atagtgtgaaggttcccaagctaaagagcacaaacgatacaatcttaaaagcttatagcttatacaagaagttcaagcttcatcatggacgaccaaagggagaagaatgatccaacattgtctcgtataagtcgtctcgtcaccataatgcacgaggcaaacaacaagtatatcttctcgacagacaaaataaccattggagataaggataaaaaacagttaccaataattaattcatttatttctcatgttgtaaatataaaacgtgggaataatccacgcttcattaactattaattagataaggccaaatggaataactgccaaatgagaaattctataaatagggataaaacctatagtataaggggccaaaaaaaaaaataaactagggatcaccctacaagaaattcatcttttaatgcttgtatttattgaattctctacttagtaacacaaaacactcaaaaataataaaaatgtgtggactatgtaaatttaactacaaaattatgtatatactttgcgtcaaccttattattataatttattaatactttaactctttaattaaaaagttattataatacttcataaaaagatttttaacgaaattctgagttaacaacagtacagttagtcaaacaaaaaaacttaa

SEQ ID NO: 80707 - DNA, 719 bp, Cannabis sativa
tttttttttaaaaaaaaaaaaaagggccgattcacaatatttgttgaaaccgtttaataatctctgctctatactagtccaaaaactgatcttaaaaactaatttcactttattcatttccgagtagttatcatgcgtgagtataacatctcacatcaaaaatcaaatttaacaaaaacccaaattaaaaagagaaaaacaaattataataagttagggttaatgcttaaaaattaagaagagttaccttcttgtcgatgtagtcagcccaaaagcgagcttgtgctctcttgtaaggatcagaaggaagcaaaggagattttccaggccaaacctcatcgatgtactgcaaaataacgagcgactcacataccggctttccattgtgaatcaatactggaatcttcttgtgaatcgggttcatcttcagaagcaggggacttttgttcttcagatcctcctccctgtactcgtactgaacacctttttcggtcaaagctactctagccctcatgccgaacatgctgggccagaaatccaacagaatcacctcgtccgccattgccgaatttttctgaaacaattaaaactgtatataatataattatgaaagcagtgagtgagagaggatattagattataggacgtttatatagaaaacgaataaagaagaaaggttaaattattggtccaactacgtttgatatgatatctattct

SEQ ID NO: 80708 - DNA, 1967 bp, Cannabis sativa
gtcattttgcttcttatttttgttatgttttattatgctttatgcaaactcatacttgatttcttcatttcagtgactaaagatgttcccgtgcttagtgctaatttgttaggcgctttatagagattctacaacctccctagcacagagaggactgctaaacaccttatcacctcaaaatttttgaaaaactttaggtcgaccgacactctgctttcctcatcttcccttgcattgattccaaatattgagtctcaagatgattaggatgctctttcagtcctgccttctaatctttcagttgtcgaggtttagagagaccctagtcacgaggaggaggcatatgaagaaaggttaaccccaggtgttgttggagtcgtcttgcatgaaggcgcgatccctgttgccagttcaagtcgaggacttctattggggcaaagaaataaagggcttcaatttccaacaaccctggttctaagaaaaaattggcttcaacttctaatgcccagacacaggggccaacatcatcatcgacttctaaatctaagaaggtctataatcgagtgagccatgctttctagagctttaagagtaagcatcaaatagtttctgcccgtttggggtttctagccttaacattcctcctaagtcttctattcaggacttgtcccctgttacttctccaacttcctatacgggggaagggtacaatgtggtggagtctgggcttctgtcctcagatatattgatggacgacattagggcgagtggtcctatggatcacaatttgccacagggtgatagtttttaggataagaagtgttgccctcgtgacgaggtggatcctgggtgttcaatgtatgtttctaatgtttcttctgagggtttcaacctctaactcatgttccaaccttcttacggaccttctcacatctttctttttgtcctaatgacttgacctggtctcaatctcaaatgagtcaattctcaagcgggtttatcaagtatcttggtgagtattcccccctaagaatgggttgtgctacataattcatcagaggaaaagtatcaggaagctttgctcaaacataccatatgagttagtatttacattattcgaagttggactctcttttaataactttctgactcttatcttgatttttgtttcgcaaatttttgtcatcaaaccatacacactagcactagctcttccgcccaaagtggcctcccacgcctctagaaggccttagaggattttgctgcctcaaatgtgagtgagattgtcttcaagccaaggtcgaccttctcaagctcagctggacgaggtgacacccaaggctgacgatctttcccaacaacttcaatcatcagaggagaagtgtcaggaagctgtgctcagacataccatatgagttagtatttacgttattagaattgaggctctcttttaataactttctgactcttatcttgatttttgtttcgcaaacttttgtcatcgaacaatacacactagctccagctcttccggccgaggtggcctcccacgcctccagaaggccttgaaggatttggcttcctcaaatgaggagtgatatcgtcttcaagccaagatcaaccttattcaggctcagctgaacgaggtgacaccaaggttgacgatctttcccaacaacttcaatcatctctcaccctgcataaggagttcacgactgaggcactacacaaatgggatgaacttaaggccaatataatctgattaaagtagcgtactgtggttgtaaagaacaagggcattgagcgggaagaagataaggttgaattcttgtagtatgctatgtggataaataaccccaatgcgaatgttagcattctcggacgtgttgcgctctagcttattagggcattcaaaaacgaggacgagaaaaggagagccacatgtgaggccaaacactgtggggatg

SEQ ID NO: 80709 - DNA, 1537 bp, Cannabis sativa
tgacaactatggcagaatcattttacctggatggatctaaaagaagctgatccatgtctgcccttgaaagttggagactcccatcattatcatcacctgcaagaaagtaaaaaatacagtctcatgcgttcagagcaaagcaaaatgagatatggagcaaagatttgagtacaaagtcttgtaggaggaaaagttaccaccgggagttcgagctccagaaggaataagatggccagcagctgatgtatttctgaaatggaggccaaccaaaaggctgtaatccatgatcctctcctgttcaaggaactcacagtctctatcaatttgcctgcaacagaaaagaaaatatataaaggctgacttaattggaaagattttacataaagtacactgtttgaagatgaagaaaactcataaagcagttcaatttttcggccaaatctatgagttggggaggcttggtttggctttctcaccggcaaaagtcctgaaaccatgacttctgaagtcggaatataaagttaagatcaaggtctttcaggattgtggttccatcaatctctgtctcaggcttatctgttgttcggcccaagacagatcccttcaagtcaaaacgcctgtgaattgtatattcggtacagaaaaggttccccataatgatgaaacgtaccttaaatacaacatcaattaattaataatggtcaatctatcttgttgtaagtagaagaagcaacagcctcctcacttcatgaaaaacactgcttatattatgcttggaagaaaactaagtaacagcttataatatgcttggaagaaaactaagtatgcagttttttaccttcttctgtataggttgccccattaactttacacagtgtagaccataaaatttagtcaccagagtgttctcaaatgctcgaacatggttataataggctgacaacattcttataagcaccttgaccacaagacaaggtaacatgattagctaagaatttcaggcaaaactggaaaagatcaaccatgcatcaaaactcacttttacttctgcttttttcatagtctttatcatgtaacggtcatcattggtcaagtaaaagaaactaccactttttccaggagacgaaagctccctaagtgcatcattgccacaaatagatatcatgtaatcagctgggtctactttaaacagcttccttaatgtcctgagaacatgtcaaggcaaagatcaataggtgataaacttcacacatgactttttggtaagtactagaaccaaaattaataagtaaacaaatcctctatttggatcttggatttcaagagggaaataatgaattttgatggatttcattttcttttgtttgaattcaaacaaaaaattgagagctgtttatagaaaaaataaaacttaaattttgtataattttacaaaacataaaataattataacatacattcaagagaagtgtactatattctctaacaaagtttttccttggtaaaatccaatatccaaaacaaacacaaaataaat

SEQ ID NO: 80710 - DNA, 1945 bp, Cannabis sativa
tctctctctctctctcttttgtgatttcatgaactcaatcttggaagaaaaaggcttgaattttggtgtggatcttgtgtattctcttgcttgaagcttgaagatcataaggtagctttctttgatctatttcacttattttaatttctggttgtaagctaaataatggtgttattggtgttcttgagagaagtttagtgattattgtatgattgtgctattaggtttatgctaggatcatctatgtgttttgggaggtctttggtttggatttctgatgtttgatttctgaagaaaacactttgaattttttggattttatgccttgaataccaaggtttcaaggcttggaaatttatgtgctaagtgatttctttttgtatgccaaagttatgcttttgggtgtgttgttgagctatttgttaagcttaatttattaccaatgttagattgatttagtgatgagtaaatcttggtttgtgcatgattattagatgtattttggtgtatgaaatgcttgaaaatacctcattttgatttggaagcttgttgtcaatttatggtattttagtgttgagtttggtacatttttgggtacccaaatatgagtttttctgggttttcaacccaggagccgcgatccggttcttgagtgccacagcctgctatgtgttcagcaaggcagaatgtttttaaaatttggtttggttagaacttttgactccaaactctatttttgatgttcttggtatcgttgcaaaactcatttcgggctctatgtgttagtctatgattggagttcatattttatatatgtattaaaatgaatttgagattaaccctatttatgaaatcccgagaatctgtgactaggattattggcgcttgctcaggaacacccaaagatttagaatttccacacacttaaattatcaggtaagacagtgagttagcacatagagattagtgcaatggtgctcatgtatgttattttatatattatgcagaaaaccgagactagggttattaccttaggtttagctattttgtggtctagggttattactctagaatgtatgtgaatgtataatgtattatatatgttgatataaagagttatgcggttaagacataacaaggttcaactcggtatctaaaactgagataaaccattctaaggccttattgtaaataggcgtgtgagcgtaacacgtatgtctatgttaaatagactataaatgcagtgacatcaacacttaagtaattataattgttattcatattgttgtttatgctatcttactgggcattggctcacgtgtgctctattgtgtaagaaagggtaagtcggtagttgatcagccatgagtttgagggcctttgcggtgcattgtacatgttcaggccaagctagaccacgagggttgggtctgccaggtggaattgttgtaatctccacttttaccgcttaggtcagcgtgtagacttgtaatattttgaaaatattttacgggatcccaaaataaaatgtactctttttagatgtattttaaagtgtaattattataagttattattttattctgtattttaaagtttaatttctgctcttggctctagtatatctcggattagcaggattagtgtatgttcagtctcaacacgtggcgttccttatttttagggcgttacagaataataaaattattttatgcaaccattatatgtcataaaaaaaattaaatttgtgataattaaaaataaaaattaaagacttatttatgctatatatgacaacataaaaaatagttctttaaaaatagacccctcaataaaaatagcttgtctggaaatgttacacgcaagtgaagcaagctgcccaaacacgtagttatatcggccattaattgagtgccactttgatcgtctgactgacaacgtttaa

SEQ ID NO: 80711 - DNA, 1972 bp, Cannabis sativa
gagtgcggaaccaagatacgttcttggagggttatattaagatgggcttggcccactttacctttactaagggtccaaatgatgggtcttggatgttgacttggaatccacgtatcaaatgccggaagcacgaataacaatatttaattacagaataaataattaatgttgattgagtcaattccacgaaatcttataatcttctctgattcttactatccttaaattataggagtgttggttaatttatttatggggaaatcagttgaagagatgaatctggacattttttcttgtgagggtctctggtcggtcatccctttcgtttcgagctattggttacttagaatgctagtagatacgctccgtccaacacctatctaatgccgatcaacctttcttggcatacactgtgggccaatatcttttgcatattcgtattaatattttcgcgtccatccaatatcttatatgttcgccacgtgtcacgtcgttctatacaatattatcagtgtgatttttagaataacaattattaaatttagttattgtattattataaatctgttacatttattttttattgttttatataatttagttaatcctagagtcattaatttttttatatttttaataaaaatattaaattttgaatcaaattttatattgtgtattggggtacgatactaaaattaatgtaaatataactttttttttttttttgtcaaatataacataattttacatttttttattttaaacatggtctatgtacgatgtcaaataattacacatacctaccatatttttctttttcttttttgacttttagttttgtagtttgcaaaatagctgttttttgttataattaattatctatgtttctatgtttatttttaaaaaacagcttttttttttttttttttggaaaagaattagcatactcaattaatacttatttggtataataatgtaaggtcttaaatcttagttgacaaataattttttaagagattatatttgctatttgtggtatgtttttactcccttattttgtatattttgtatgacaagtaagtaaacctaattatcaaaaatagggtattgccatgaactattcatatgtcaattataaaatcataactagaaatggaagctcacttcataattgagttgatttaaatacttgtcacatgcagcctaaggatcaataccctacaaaccacctctcaagtattttcttttattatatatcgtgcgttgtgtagtatagttgtaacttgtaactgataagaatgtttttgttgcagctctttatgagagggttgatgtttagtcctttgagaaggtagattatttgttgtggtggtgtcattttaatgggataggaaccctcaaactacattttaagagcattcttaatagttttttttattttatcttttcaaaaaaaattatttttttttttattttacctaacacatttatattatacaatacatcaacttccttatattttctttcacatcatttaaatataatatttatattaattaaaaaattaaaaaattaaaaaatattgaaatataataaacaaatgttaatagaaaaaatgaagacaattaagtaaaaaaatttgagagttccggatgagatattttagtaaggatttagaacattgttggagatgaattttaatctcttaactattataaagcatctattaggagtgctctaatgattcggagaattatccaaattgcgaaaaaaataaggaaaaaatcagtacttagtaggggtattcatggattggtttggtccggatttttatattttttgaaccaaaccaattatatggttttttgaatattgaaaaccaaaccagatcaataaatttctcaaaaactaaactattaagaacagtttggtttggttcgaaaccacaatttaagtagaatttataattatt

SEQ ID NO: 80712 - DNA, 2166 bp, Cannabis sativa
ttaatcaacatacttgtgagtaaaactaagatcctggtaaaataatttccaacacaattctctaaccctagtcaagcatgttaacaaagtccaattattcacatttacaaatcatattcaatttcccaacaagcataaatgttaagcaaaagaacaattagaccaagcacacggttattagcagtctatagcaaacaaatgatgacggataatatttatttattttttaaagcttacttacgacacaaacacaatactaaaataaattaacactaaaattaactaaataaacatatgttctccctaaatttatttgacacattttccccaatgtgacacaaatttaaagagaagaaaacttacttgaggtccatgctacattaacaagcgattggcacccataataagtgtcatacaagataacttgaaagttatccttgtaaatgccctcaagcttggcatgacatgagtttgttccaaaagtagcaccaacaacacaagactttagatgatatgcttggagagaaatcttcggtagctcataacgggtataatatggtaaaagtgacattaatgaaaattaagaatccattggtggttcataatataataacgttgacgaactcaaatcaacaactacaagtggttcaacctccaataacacctctttcttgctttgctcatgaccatccacatcgttaattgtgattaataacttcttcactgaggatgggtgttgcttcagtcaccaaatcaaaatcatcacttgttgagcaagcatctaatgcacccattttttttagttaaaaccacttcaaaggggtcttgctcttcaattataagttcaatctcttctatgtattcaactaatggtgcttctacattattcaaataactctcataacttttgttattttagttattgtccttaaattatcacacagagatcttaccatgtccgccaagtgattaatttcttctgcaagtggtagtttattccctcttcctaaaatggttggggtgagtttcggcaataaggagagtattagtgactccaaccctaaaatgagggatcccaatgccatttgtaatcaaaatgtgtcatgtcattcaacagagttattatatcatcattgtttcttcttaacaaagactctagagttacccttctccataatccatccaattttttttatcatccaatccattataaaagaacaaaataagacactcacttgagaaattgtgataacatcctctaccaatgcatagaatgactcattatattattgagaaaaacttacaaggtaatcttgatgtagtatttcttatgtacattgcaagacaaactcatataatacaaatattagtaaaattaaactaaaagaaatcaaattagaataaaatttaattattttgatattagctaaaacattccttgataatggtgccaaaaacttgttaaaaaaattctagtacacaagtacacgtagtcgaatcaagtaatataatgataagtaaaatatcgttctcacaaagactgtagttaattaacaaacagttaaattcctaaattctatttggtgacaataataataacaaagaaagtttaaattataatgaaaagaaaacaaataattaaaatacaattaacaatgatcaaagtttagggtgattaatttcacttgaatctactttctatggtttaatatagtttaattccaatttccaattttcatgtaataacaaatttactaaagagacttatattcgggttaggacatataaatctcgatctatatttaaactttctatgtctgtcataaatttaaacatatagaggacattaagcataaaaatcctaaatgctacacaaaccatacatgtactttcatcttatattgaaatctatgtctattttactatataataatcaactcttgaaatcataaacaattaattggtggtcgggcaattaaaagaaaataaatacgaatgaaataatgcacacaagaaattgaagaaaaactagaattgtattaaaccatagaaaattatcaaaaaatatccattaaaaaccttaaatatgagtttactcataatcatcattctatacaattgcaaataacaaattagaaacatcaaacaaaagatagaagagaaaaa

SEQ ID NO: 80713 - DNA, 1039 bp, Cannabis sativa
agggcacaaaacccaacaaaatgcacctccaatccatctcattagcccatgtaggatccatcagaattgcctcagctcagcttcaggagcagaaaccgcaatgatcttctgggaattaaatgcccaccagccaacatctctgtcaatacctataacagcaatcccagcctctccgttgatctaagatgcattagtaaataaaaacattatttacttcttcctttcttggatagaaggataaatcattatgtcactaagcaccaacccgtgaggagaaggcaaaggaggatttaattccaatacttttgagaactcaatacagggtgctgcaatatttgctgcagctcgagatgggtttgtacaaattccttttaagctaagaaggttcctctagtatcaaattttagtaaagagacagcctacaaataagaggagatcctttctaattgtatactggctgttaacgattaagttttttataaaaagaatcatggaattctttggtattttctctatctgcataggaaaccatctagcaaaccatatggcatggaattgctacagtctctaaacagatgaaggctactttcttcatgggctccacataggcaacaacccttatccatgacaaagggcaatctattctttgtagggatggcttcttgaagtgatcttcaaaggaagattgatactttggggtgaatagtagtatcctatatctattttcacatgtctttcgtagggaaagcctctaactttgatccaccaaataagcttatttggtagagaattggccattctggttgaatttccaaaatatttggtctttaaaaggttgaggaattttcgagatagataagatttgattccccaattcaataacaaagatttgaaacacaatttttttattccattcattgcctatggaaatatcaaataaaattgtgacagtcagtactcccgtgatccgtaaggggaaataccaggtaagctgtgcaatcccacaccgcatggagaagatcaagtgaatgattctgag

SEQ ID NO: 80714 - DNA, 1075 bp, Cannabis sativa
ctctctctctctctctctcattagtagttatcttatttacatttcgtcacaatattaattttgtttttgaatttttctgaaatacaactgaaaagttgaagagtattttttttttttatatatataaattaattaaatctaccttcaaataaaatttaatataaatatgtttatttttatgaatattgtacttaaattatcattacacactcactcgcgtaactaagtcataatttcaaatttaatagatttgtattctttatagatggatgtttagatttgtgggaaagttaagacaaaattttgattagaaaagtataaaaattattgtgaagtgatagggataaaatttgtagaatgactaaaagaagaggtaaacataataaatttttaaaaagaataatatgtagtataatttgctcagttgaaacttgcccggataactatggccattacatatgagcccattcttaaatggatgggttaacagcaaaggcctcactggcccaccttaggcccatttgaaggccttcgggtttggtttcatcttatccttttttagggccatctaaaacaaggcgcctactagctaatagcccacaacaaattcctcaatattttttttttgacaaattcctcaatataattagtcactgaattttagtaatgtacctacttggttattaatttattaatctacctacttggtgaccacttatgtcaaataaatatggggaattttcaagttcttttttttggtaaaatttacaaaaatatgaatttttctttctaaaaaagttattttgttggaaaaataattttcaagttcttttttttggtaaaatttacaaaaatatgaatttttctttctaaaaaagttattttgttggaaaaataaaaaaaaacatgaaaaaaataatttaggataacagctacccctatactaaccagaggataactaactacctttagttacgttatactaatttttttttaactttgttttaaaaaaattccataatctttttttttttattgcaaaagtcatattttacacaaattgtattaaaaccca

SEQ ID NO: 80715 - DNA, 727 bp, Cannabis sativa
aatagagtggaagagtatggcagtggctaagttgtaaaacaagacacttattccttttttatttattttatcttaaatatttttccttaaattttcatatgggataattgagtagtccaaatttttcttcttttatgtgtcaatgtactgtaattattatttttctcatcttatagaaattaaaaattgaatttgtcaactcagaatgaagagtgaaaattaatcaaatgtcaaatgatcaatccaatcctcatgttccttctaacaataattatcgtactcgtttacatgaaatcaaataaatctaaaattgtattctgcttcgcaataaccatggtctcatatattttttttcatattgaaatgatgctatattgttaaaaagatttacaaatgcagttgtaagttcaaaatgttcaattagagttaatctggttaaattattgtaaattgtcaatttattcaaataattcgaaagatgatgtccagcacattcctcttgcgtctaatgctatgaagttgagcatagatattgcaataaatggcggtgtttttttatgaaaagcttatggcaaccgtatcatggaagatgctataaaaaatgtaattgcacgaccttctgataaagttacactcaggtgattattttcttgtttttttgttctcttttatcaaacttcttaatattagattgcatattaactatttaaatttgtttgtaactgga

SEQ ID NO: 80716 - DNA, 2291 bp, Cannabis sativa
tgatatttcttaaaagttatttttattaattatatgagattcaatatttatttacactaataatagttaacaatggagaaatactaaagggcactagtggtgtttagcatttttttatgtgtcagtatcgctattagtctaattaagtatcgggtctcacatagttcaatataatagtttttagggagtattattagtcaatcacaacatgacatgtcgagaagatactaaacactactagtacctaataacaatactcttaataatagtataacatcaaaaataatactaataccttttaacaattctcattataaaatcacccaataaattttgtaggagttaccaaatatttttaccacaaatatctatatacatataactttagagagtggataaacttaaacacatttgcattattattattattattattattattattattagctgtacacatttattatgctaattaattatctctgccacccttaccttaccctgattttattatgactcttccagtctttctttctctgcttttttctgcacacacacacaaaaaaaaaacttctaatctttttaattttattattaataatttcttcataaattacaattattacacaagtaaaaaaaaatatttatttctatttttaatttttttagatagtgatgtccatggatagataaatagtagtgcaaaaactcacacagagaaactcagtaaagtattggactcaatgaatgattgaaatgagagaattggttagttttttttttcttcttctttcttattatatatttttttttttgactgtaaaaaagaaagtgtaaagaaagaaaaaagatgaatgggattgattcttgaagaactgcttcaagggattggtggaaggtttggtttttactctgcaacccttttctttatttttttaattattattattattattaatattaattttaaataataatattaaaatatatatgtatgtatgaatgaattcatatacatccatttatctatctaagctatatctttcatattctatctattggggtttggttgttatccacttattattattataattattacaaagaaataatattttaaaaataagaaaaggctgtgttgtttttctctttattattgttattttatttattttatctaattattgattgagtgttgtgattcttgaattattcatttgatttgagtttgttatttggtgaattttgtggattttatctactctctcttggtaattttttttgggtagcttttgttggatgagaataagaagatgaagatagatcaaaagtttaaatctctatcttttaatgtaaataaataaataaaaaattctcactaattttttttaattgaagactaaagactagagatatcattaataaatgattttaatcataatatatttcaaaatagaaaattaatctttaagttttctttgaattacgtttttaaattttatttcagtccataaaaaactacgatcatggagaaattaatatttgggggagtgatcttgctaagttaacactaatgttgagcagttcttagcaatgttcgaacctactaacagaaagaaagagctttagttccgacatgagcaaggttctcttcactaaatacttcttttagctttacttcattttcttctatcttgttcctaatccaaaacaatgtttttagaactattgtggtatacaagatttttatttaaatattgaatcaatgcctttcaatatttaaatttcttttagtcttcttttaatttctataatttctttgaacgcttctgtagtaaccataaattatatttctatagtagataaggctactactaatcacaactgagatttctaactaatgcaacaagtgtttaattgaagtttagctccacttaaaggtagttttcaaataccttgaaagctatttcaatcattttcagtgttcttcacctgaatttgacatgtattagctcaatgtgctaacaatatatacaaaatcaggtttagtattaatcattgcatacataatacttctaattgctttaacataagaaatatctttcattttcttcctttccatatcaatctttgggaattgattagtagagaatataaagtattcaactagaggaatttgaacttttttagacattttcaccatattgaaacataagaattttattaaattttatctcatgtgactaacaaaatattgatatgattgataagttgatgtgtcatcgggccca

SEQ ID NO: 80717 - DNA, 4008 bp, Cannabis sativa
ggattttttaagatttctttgccgttaacataattgaccaagaagaattaatggtttatgtggtcagacaagtgtgaaaataagcttccaagagttaaagtagtggttgattacatcaccagtgttagcattgccctcagataaagaaaagtttgtggtattctgtgatgcattcagacaaggtctagggtgcgttctgatacaagctgacaggttattgcctatgcttctcgacagttaaaggagtatgagcaatgttatccgacacatgatttagaacttgtggctattgtgtttgccctaaagatatggcggcattacttgtatggagaaaagtgtgagatctatactaaccacaagaatcttaagtatttctttacttagaaagagttaaatatgagacaaagatggtggttggagttagtcaaagattaagattatgagattttgtatcatcacgagaaagccaatgtagtggcaaatgcgttgagcagaaaaggtcctagtcagatttttagtacgacaacgatttttcctcacttggctttagatatggttagggctggtattgaattcgtggttggaggacttcataacgtaacactttagtcaaacttattagaaagaatcagaagggtataattggaagattctgagttgatcaagatttcagaggaggtattagcttgtcaggctaaagatttttcaatctagaatcatggaatgttactttataaggctcgagtttgtgtcccaagcaatggtgagctcgaaaaagagatattggaggaggctcatagtggaccttttttattacacccagataccaccaaaatgtaccaaaatctaaaaccatattattggtggtgcaaaatgaagaaagatgtagtggactatgtgtccaagtgtttgacatgtcaacaaattaaagtagaatatcagaaactggcagggttactacagccattaagacttcccgagtgaaagtgggaggatgttataatggattttgtggttattttacctagaaccataggagcgtatgatttgttattgttatagtggatcgtttcacaaagtcaatacactttctatcagtaaagacaacctatacagtggacctgttggcagagttgtatgttaaagagatagtttgtcttcatggaactccaaaatccattatttcatatagagattcaaagtttacttcaaagttttgggtaagtctacagagggctataggtacaaagcttaaacttagtacaacgtttttatcctcagactaatggacagtctgagaggatgatacagatactagaagatttgttacagccctgtgttatggactttgagggttcatggagtaaatattttcctttgatagatttttctaacaacaatagctatcagagtataataggaatagctccctacgacatgttgtatggtacaaaatgtcgttccccaattcattgggatgagactaaaaaggaaatattttggtcctgagttagtttagcaaaccagtgaggtaatagaggagattaaggctcgaattcttgcttcgcaaagtagggagaaaagttatgctgaccctaagcacaaagacatataatttaaggtaggaatctatgtcttcctacgagtctcaccattgaagggtataaggagctttgcgaagaggggcaagttaagccctaggttcattcggtcatttgagatactcgagaaggtcgggtaggtagcatatcaacttgccttaccaccaacactataagctatgcataatgtattccatattttgatattgaggaaatatgtgtcacactcgactcatgtcttgagttacaaagctctagaactacattcatatttgtcatacaaggaaaaccagtttaaatcctcaataggacagaaaaagttctttgaaacaagatcatagccttggttaagatactctagaaaaatagtaaggtggaggaagccacttgggaattagactccagcatgaagaccgaatacccagagttattcaagttatattttgaggacaaaatccttttaatgggggaataagtgtaatgaccgcatgattaaaatattgaatagtagggcaattaatattaattacttatattttatgattatatgtgaatatatatgttgtgggtcccattttctaataatggacattagagttataatttttcaattttatagatttaattaaactctagatgtattttatataatgtgaagtttatctttttttataatttttctcggtaatgatggaaaatgcaacgggtggctaatagagtcacatggattattttagaaaattttatctgattagataatcatacgtgacatttggtttatcgagattagatggggttataatattggactatttttcccctaagccttaagtttgcttatggcagaagcaaggccaaaaatggagtttcgcctaacaattttaaaattggtctttagtggacttagtggtttcttcaaaggggtaattctttttcttttagtcaaggttttaatttatctttcttttaagaaaaataacagataaacattagaaaaataaaagttaatcccttgtctttctctctcttacccatcgaccctagaagaaccaagataaccagcattttgctcttcaatttctagttgtttttagcaagaatttaagggacttggaagctagattcaaggtaagccctagaaacttgttctttaagtttttaaagtttttactttgggtcttagcatgcaaggtttcaattctagttctgtctgaaccagtggtctttggagtttaatttctgggttattattgagttatttgaagcttaattgggttgctttttttttttttggttttgtgtggagttgagcaagtttgaaactcaaaattggttcaacaatggaagatttttttttattatattatttatgttttttcacttggaacttgcttattgaggtatgtttaggtgatttggagcttagtttgaagtttgggtcatttttagtttatttggagactctttgcttttctccaacaaaaaacgacaggtcgtttctatggaaattatctaccgtttttactggcaggaatccttgctattgttcaggcagctttcctgctatgttattttttcatgttttctcgatatttagggcattttcatcctatttatcaatagggaaacttctagttttgagtttatgtctctaagaaggttttagcaagttgtttgcccaatttacgtgattgtgacatagggtctctgttcagcgcttgaatttttcttcaggttgaccgacacacttgaattaggaaacgagataagactagcataagacaagtatatgtaaattagatgatgtgtatgtgattcatatactaccaacactagtagagtagcggtacggagtacattggtacagtacatgatgttcaaagggtacgatccagtgttaccaacactagtacaggacgagtatgtagtgcatgtgggacaatactcagtggtactcggggtacggttcagccctaccaacactagtacttgacgagtgcttattgcatgtggtacaaaggtcgtacttttattaagcatgttcttgatgcatatgaggccttgtaaataggtgtatgggtgcctagatacaagacggtattatattatatgttttatgtttttcttactgagtatgccaactcatagattttgttttcatgtgtaggtaagggaaaggctaaggatgagtactagtgagttcaaagctcggggttgacttgacatatcaggatggttagacctaaagagttcgatctcgcgacaatttgggcctttattttgtagtccctatgcaacatgtttataaagtgtattttgaatacaactgtaaattttaaagacgagatccctatttttttatgtttggatatacatatatttataaaagtttaaagtttaattaaaa

SEQ ID NO: 80718 - DNA, 1689 bp, Cannabis sativa
aaaaaatgagattttagtgatgtagtttaaagaaattataatgatgtataatgtaatataaatgtgttgtaaaataaaaaaaaaaaattagtaatatattttagataatattagagttgaaaaacttgtaggtagcattttctttttaataaagatctgcaatattaacggaatatatagtaataaattaataattaatcagcagcatgtatacattaaattttagaaaagggagtgatctagctagtatagttatcatcgctaggatttaacaaaaatgacaaataaggagacaagaatgactttcttttacgaagactttttcatttttcctttgaagtaggtgatggagattaatttacaggatgattatataaaaaaaaaaaaaaacaaaaaccaatcctcaatttctatgctgtagaccatttggtcttcttggtagaattttatgtctaaaaagggccacttattttcttctatacagagatacgtccactccttgaagtaatgatattaatcataggtttacaattttatttttaataataaaaaaaaaataccttattaatctgaagggaaaaagtatattaattgtaaaaaaaaatgttctcttcaattcgtaataagctaatgtaatatattatatgatattcgacgtacagttattatttgatcattatcgatattattttcttcaatttacaattattaccataaagtttgcagttatacttccctttcaaatgctttaattgtatatataagctaggctgatcgggatgtgtttgatcattgatgatatatatgtgtttttattttattttatgagatttttcttcttttttacgtatacatgtgtcatgcatgatattagttgatgagtattatagtggatcaatccaatattcaaaaataggttatctttcacaaatatatataaattggtatattaattaatgactcttctccaagagattaatgagagttagctaagccggcatcttaattaattagtcaacgtacgcgcccttattacttgttagaatagttaaaacttttaataatttttataataatgggttcccctcacgactatgtctccatgttactaataattaatcaatagttaattattcagtgttttttaataaaatatataaagaaaatcatggcattatgctccaaattccaatatttagctgagctatacaaatggaaaattttgaccatggacggagagagtctatatatatatatacacttgaaacttacctaataaactaagtctaaacggagtgaatatttatggaagacttaatggccaaataagttcacacactgcagatttcttataaaagatggaagaaaaaggaaatgtagcttgtctcgtgttgaagaattatatataagatcgagatgggtgttagatagagtctcacacattgacaatttgacatagtgtggtgtggactgccatatataatgcataatatggagacttatttggttttggtcagtgaagttcgctgatcaaaaataatttactaagaaattaacataaaatatgtgtgggccgggtctatatattaaattgacaatatattgcgagagattacttttaaaggtgtgtaatatacatttttaatatatgatatgaaatttatgtatttcgagtgcataatgatcatt

SEQ ID NO: 80719 - DNA, 2546 bp, Cannabis sativa
  modified_base (1158)..(1159): a, c, t, g, unknown or other
gagcgaggaagcccgattacccatggtagtcaatttcctttgcagatcaaagcttgttgggtttgaagctcaaagattcaatggctggaggtattgtgatccttagttatagtgcatatatgttttattaattccgcattttatacataatcatatatgtttcagtttatacatataaatgtctaacaggcagtgctaccaacatccttgggatttctatcttaagagatagagacaaaggaaagctgattcttagacaagaagactacattgaaaaaattcctaaataagttttctatgagggatgctaaggtttttaagcaaccaattactagtcagtatactctatctaaagagcaaagtcctaaaacagaaaaagagattgaagctatgaaggatgtgccatattctaatgctatagggtcagttatatatcttatggtaagtacaagaccagatttaggctatgctacgagtgtacttagtaaatacatggaaaatccaggaaaatttcactggttggccatgaaatgggtgtttagattcttgcttgggacaactaaagttggattagtctacaagaaacaaaatgctagcactataattgaaggttacagtgattcatactatgttggggacagagataataggagatctacatctgcctatttgcttttgatttgagggagctatgttagctggaaagtcaagcttcaacctgttgtggcactatcaacaatagaggctgattatgttgccacaacagaagctataaaggaagctatatggctaaaaggactaatgaatagccaaagctgcatttttatatgcattaagaatcgacccatgagactaagagtaggacctatcaagctaagactctcagagataaaacaaacaatacatcagaactggttataagaggaattcatgtggaaattgttgagtaaattccacttataaccagtcccttacatacaaatatccacatcagcacagttacaacaaaaataaacaaaggaccaggagttagttacaactgttattgtaactaactcctaaatctttgatcaaccgactttatacaagtatataaacatggaaataaagaaaatacaagtaatacacacaaaatcataagagagagagagagagagnnagagagagagagagagaggagttaaaaggaataaaccttagtttgagacttctgctccaagatctagagtagagaaagcaggttctcgtggtgagcaggtagaagaaaggaagtacatgcacaacaacagattactgagttagatcgagaacaaaacagagaagaacaaaatcaaaaagtgtacaaagagaaaattgagtcttaccttatcgttttctatgacaggaagctccaaaatattgtaaatcgacattgttgatagtggatatcaagttagatctctaagatgagcttgacagagacgtagccctaattttttgggtgaactctaaaatattttctggtgttttctctcccttactcttgtttttcatttgctaaaactaaatctgtgtgtgtgtgggtgggattctgggtttcattcttagaatcgaagaacttgctctgctagggtttcgagttttcagatttgagagactgagtgtgtgttagggtttctagactcttctttgagagtctttaagccaagggggtccaacgaaacaaggtttggtgtcgtagcgggttaaacactgccattttgtctaaaacatacttagacaaagtaaaggtcaaaattgaccttgatactgataatattttgtttggttggtgtagggtaaaatggtaaaaatcctacaatattaaagataaattgttagactatttttagcctaagtttcgggtcacattttatagttgtttttcttctttattattatttttgaaatagaattacgcttgttttcttttgtttcaggtttcgacacttggaatgtataaattggacaaatttcggaaaatagtgatctataaaatagagaaaattttgaaagagaaaaaaagctgaaacttcaagcctaaattcgactatgttttgtcagattttggacaaagtcaaaacataaaagttttagatcttttttttatctttccaacgcatcttgaatcagatcatttggagtttgtatgagaaagttatgcccattttactaaaagagatcgaagcagaaaaattgggtccagtcgccgcggcgagatcaccatggccgcggccataactcgagaacagaaacgaggtttttagaagccccagtcgccgcagcgatataccctgtggccgcgtcgagcgtccgtatggttaggggtattttcatccgacgaaccctaaaaatcagatataaatagaaaactgcgattggaaatcagggagagggatctggagacctaaaacacggtgaagagcggcaagaggagcaaattgaagatcccgagtcattccaccaacagtttctttctctattcctttttaatttctttatgctgaatactgttttaggaatggtta

SEQ ID NO: 80720 - DNA, 4399 bp, Cannabis sativa
  modified_base (1642)..(1654): a, c, t, g, unknown or other
tttttttcacctttttttatggaattttttttcaccttcatgaccataatcatcatattttgaatatcttgatatcatatttccaattcttccaattcgactttggtgatctctaacccagcccaatataaagttgattaaaaaaatagaaaattaaatatccaattataataacattcaaatttgattaaaattatacacataattgtcatattttttctttaaaaatatgtaagaaaataataaagtaacaatcaaatatgtgaagagtgttcattaaattaaaagagtgattgtcttgtgggatgtgtaaagtgcttccgagttaaaaatctatttttcattgtctctagggtcggctctgaggtgagatgaaggaggcagctgctttaggccccctactgctcaggcccccatttcaaacaaatattaaaatataattagtaataaaataaataataatactcataatactaaatatgttttgcagcttagtagtaatttaattagtttatcaattaaaaggtttaaagttcaaatcccaacaacttcacttttttattaaatttttatttttgcctatagggtcagccttgattgtctcgtggggtgttcgtttgcttttgcttgttggcagatggtaggtattttggtgatatagattgatgacaactctttttggggatgacttcgtgatagattttagtgttggaattctgtgataagatatagagttgttatgctttgctaggctttgtggtgtgtgcgcaatgacaaggtgtggaatggtaaggataagaatgttaatcaggtggttttgtgggctaaggtttttgatcaatggagttgtactcaagatgaaaaatttgattcctctttatttttttacaagacagcgaagggcatgagcactggattgtactgattggtaatacgatcaaaatcaatctggatgcaactatcttcaacaatcaaaataagtatggctatgattcttatgttggttgtgttttcaataaaagagatatcctgattggattgcagattgctattaataaaattgtataatttcttaaaaaaaaaaaaaaactaaaatagacaagtgtttctaaaaaagcaaaatagatggatgtttttctttcttttgttgaatggtaataatgtcacatgttcataagtcataactcaataattttttttttttaaaacaacaaacaatattcactgtaaataatttgagtttaatacatcatcaataaaaaaaatgagaaattatccatctaaattactttctcatccactttaacctttaactgcacaaactgctaattcatatatataacgaacataaattaaagatatttttaaaaaattagataacaaattaaaaatatcatccaagaaagatactgataacaaaaaaaatctcatcagtcatatctcaataatacttttaattggccaaagatctaggatattatatatatatatataataaattataatttttgtgactaaatttttttaataataaataatagaatgatatataattatatttaattacaatttttttaattttaattaatattatacaatttttttttgaataaatttagcaactttattaactagcaatcgnnnnnnnnnnnnnaacgcacttcgttggaacaattctccaattaaagcacacgacctggagagaaacatgaatcatggctaaaacatgagccaacttgtttacagatcgtttgacaaaacacaaactcaatattatttaaagataagagaagagtacgaacatcatgaactaaaaaataaaaaaagaatgacaaagtaatttggctttgacacccaaacgaatccagaaccaagaaccaataagaaccagtatccagtaacaacgctagaaaccaataaacccaaatcaatgagagaaactatagaaccatgtcaaaagacaagactaatgggaaaacctaattagtttcaacacatgaaactaaaaattctaaccccataaaaacactaataggaattaacctaataacagtaaaagatataagaacaaaataatggagatagaaagaaattcgaactaacgaataaaaagagagataaaagaataatattccaaacccataaggataggccgcagttaatcaacacaaccaggcgtaattgcaattaaccaaaagaaaccctaaatattaatccaaattccaaacgaaaccgatcaagaaccaaatcgacctaattaaaatcacaacaccaaccgatcggtgaataagcgcgaaagagagcgagaagagacagtcaagacttcatttatttaatgtgtgccgcatatacgaaattagattaattataatcttcttaagtaattctaatacgatactattcttcacatcatatcaagttctactgattaatgggaattgttattttcaaaatgtaaataacaattaataaaagtgaggggttgttaagctacacaccagtgcgctgggagagagagaataatgttttcacgttggaagcttttttttttttctgcattaatagtatacaaatattaattgtgtgaaaaagagttttatctacttatttttttatcaaaagattcagaataaattattagtcaattaattggagatcgatgagtcaaatgtgtttctttcatgccagctattttcacaccattcatattgatttcttgagtactatttgtctatgtataatttattagcacgtgtgatattcaatgagaaaaaaataaataatcaagttctaagatagttaacctgagttagctatttaactatggttagggtaactaaacggtagttaatttaactaagggtagtggttaaggttggaatatagttgaaaactagtacaagagagtagcaagtcttccttaaccaaaaatatcacacaacaacttgagttcctggtgagaagctataagaacaaggatcattccttttgttctaacacacattaaggtaagtgatattttattaataattcgatttttaattttttattgttattactatctttatttctagtttatatatattttcaaattttgaagtttggacaatgatcaacttatatgtagatttagtaggaacattatttttgcattattttttattttcggtatctattagaaaaattatattcaatatatttatatatataacgttgtatattgtgtagttatactaaatattctatctatatttagaaagattttaataattaataatatcgaaaataaaattcaaaataataagctacacgcacgcatataaaaaaatatgtacgagtacaattatctatttaaatttttatgtaaacattattatgaaagaattattaggatataatttcttcaggcgtcaaaaataaaaaaacacttcttttgcaaaaacaaaaataatgctcttatatctttgttgtaataaataaatctatttttttttaaaaaaaaaatcaaaataatgtttctacttaaaatactatatatataaaactaatgtatatgttacattgtattacattttttagttttaatgtaatatctctcacaattttgctcattaatttatagaaatgggagatgagaagagaggtagcattgcctttttctcaacatatagaccaccactaccattggacatatactcgtctcctcttttagtaacatcaagaaaagatgagcttcacatgactgatggactttcttacaattacaatgcccaaattattccatcaaatgctcttaaaaagattctcactcgaccaaaaatggcttctgaaggcaatggggccgatgtagactcaggtcgactctcggccatggtttttgtctctgagcgcgaaaacctcgaaacacttcacattgctctccaattcaaaaatgatgatgaaaactctcttagagtgaaagtctttagtttttctgatgttttcgacacattcaatggtattcgaatggaggatagcggttgcattgcaggtgatcaaagctatttatttatttattatttacaatttgacatgttaagatgtcttacaccatatcaacatggtacccttatataattgattattaaatcaaaatgcatcaataataatttgtcatttcttatagtgcgtggtactttagttatggtgtcctttaatatttttcattaatttattaagtataacgattgtagtccttcaaaagaaaaaaaaaaaatctacaaattttaatgtatattatatgtaaaacatatatacatattaattatagtaaatatgggtataagtacttaaagttttaagtttgtaagccacataaaatttatttttagcaaaaaattataagtatacaatgtgtaac

SEQ ID NO: 80721 - DNA, 1062 bp, Cannabis sativa
aaaaaaaaaaaaaaaccatttacattcacttcaataatatgtaagtattgttcaaaaaatttcttaaacgtttagattagtatataatttattttcgatagatctgtgtagttttttgcattagagttattttgttggtttttctttgaaatggcgagcgagatttgattttctagccagccaaacaaactggattttttaacaaattattgatgctttttgattatacattggtatcttcccgataattagggtatgaagctaagggatgacaatttttcgttggtatatggatactttttcaatccatgacaaaatatagcaaaaaatagcaaaattaatcacataaggcagaatcatcgataaaccatcaatatattatcgataatcaattaaaataccaagaaaaaaaatatcagcttgccatcgatatacgatgtattattgatggtttataaatagtctatattattgatggtttatcgatagtatatcgatggcagactaacatttttaagcttggtattttaattgattatcaatagtttatcgatagtatatcgttggtttattgatgactttaccttgtgattaattttgctatattttatcctggatcgaaatagtattgatataccattgaaaaagtgtcaaaaagtgtcaccccttacctccttaccctaattatcgagaagatatcgatatatagtcgaaaaagcatcgataatttgttaaaaaactcaatttggcgagataactagatcttgccatttcaaagaaaaaaaactagtaaaataacaccaatacaaacaacaaccacacagatctatcgaaaataaactacatatactaatctaaaatgtttaagaaattctttagacaacacctatccattattgaggtgaatgtgtgatttttttcgatgatgaggtccgacagtccaccgagagagagagagctgtacatcagtcggtttagtcggtttatactacatattttctaacccaacgtaaagatcggtttgtaaaattttgcatgcaacctacccaattaaaaaaaaaa

SEQ ID NO: 80722 - DNA, 1401 bp, Cannabis sativa
ttggtccctggtgtctctctggaaggaaatggtaagaaaaaacactgggctttctttaaatttgaacgtttaccggttttctgttttaaatgtggagttataggccatttggagaacatgtgttttgggcgaaagagagtggtcttggtggatgatgggcgtagtgttccgttgtttggcccttggattcgggatgggtctcgacttgaaaacggatttgctctattggaagtggaggatattcgggacagagaggtcttggaaaaatcggatgggcaacctgtgggattggaatcggggaatggtggttcttctggttatccgattgctgctctccccccccaaatgggaagcgatcttgctgggttgggttcgcgtcattcggagcttgttagtaagaacttacttgctggagggatggaaggtgttcctagacaacggtcagatacagctttttcggtggcgtacaatgattatgttcagcttccgttccctgctcagcatgtggcccatgtggccaaaatctttcaagataaactggggccaatccggtttggtgcaactcgtgaaggggaggctagtgggaagccccctaaatcggctatccacttgaaaaagcctcagatggtgggacctaaaggagtccacaagaagctagtgtttagattctctaaccgggatcttgagtctcattcaggggctaaacgtaagaaacccatgggctaaacgcgatggatttgtctgaatacaaggatataatgaaagttattgcaagattaaaattagaaaatgagaagttagacaagattgaagagaggttcaaaaagtttaatatcctaaaacgatatcaaaatggtcaaaaacaacctttggcggattacaaagaaagattacaagagtttatggaaatgacatggagagaagaatccaagaaaaaaagagaaagagagtattttagtttgaacgattggatgagagagatgacaagaagctccgaacaagattgtattgtttccaattctctctcgacttgttttaaaaaaattggtactcaaatctccaacttctttatgaattatttaccattgattgtctttgcttctaatgcaagtaatcatgaaacggtgtcattgtttcttgatgaggtcataactttaatccagtgcttaaatgtggaagagaatggtaacaagtcttttgtaatagatggttttgatactttattgcgatttctcaaaaaaacaatggagttgattgaaccattttggtataatgagacgaataagaaagaaagggagaagacaatattttatttgaatgatgaaatcgaagacgaatttgttcatcgtatcatcaatgaagttcttcgtttagagataagcttttttaatcctgaattca

SEQ ID NO: 80723 - DNA, 1896 bp, Cannabis sativa
atctctatattcaacaataatatcgttgtatcatacctcactataacaatttcatacacgaatcagacaaatgcaaggtaggatatctctatattcaacggccttaccctgtgagcgtcataccccaccacggtccctcatttgtacctgagacattagtatacaatatacaatagacaacatacaacatatacaaatcataacaaccataaaatatatcgatctacgttattcattttatctccaaatacacacatccataataataataataataataataataataataaatcatattctaatacgtactttaaataatgcaattaaacacatgcaaaactatctaatttccttatctcaaattctgatgcttttttatcctgtcactactctttataataacacataggtcaagaccctaatattagaattctaactctttcagtacaacaaaaagaacattattttttttaccactattttacttttagtcacaactgaggcaagttcttatcacaaaaaaacaaaaataaatagataagtccataaaaaattgacaatttatggcgtaaatatttataattaactctcagttgtaactacatacctaagtttaattttttatggtagtaatatttaagttatatttctagaacttccgtaagtacctaactgttaaatgtcaagttaatatccatatgattttcttattgatatttttaaataacaaataaaatttaataatctataccaatcatgaattgtcacgtggcaatttacttagacacttaacaggtaggtacttacaaaaatttcagaattataacatagatattattaccactagaaattaaacttaagtatttatttacaaccggaattaaatttaaatatttatgctataaattactcatattaatataataattttgccaatttggcatatatgaattgaatcttctgtattttcagcacgttgggaagaaattcacacaaaatctataatgctcttaaggataatttaattaattattttttattaaatattataaatatgtataatatagtactatacataatatttatatggatttgttgaaatggcacatcttagttcacctaattaatcatattatgataaaactaagtgacaaaactaaatcaaacattattttattgagcactcatacatataatagttctaaactaattgaatgttagataattttaattttattattattattttatagacaaatgaaaaaaaaaaatcaaaattggaaacaagagtacttaaattaggtggcgtttggtattacttttatttttaaatttttaatcacaagaatgtaattattttttttttgaaaaataaaatgcgttctataatcacttttattttttaattttaaaaaatagaaaacaaaagtgtgttctataaattttattttcattttcatttgttgattttatttaagtttagttcagattcgaagctgggatcggatgggtccagtttcgggtggggccaggattcgggttctatggtttaagttagaaatagagtctaaaatatcgattaagaaaaaaatttgtttaaaaaaattttaaaaatgacttttttttttgttttcaaaaattttaaaattttgattctcaattaaaaaaattgaaaaatcaaaacagttttatatataaaacatgattttagaaaatatttttacattttttttaaattttaaaaacaaagaattgattaaaaaagtgttatcaaacagatgcaatggttacaacttaatgcattacactgctacaaaaagccacacaaaatctcagaaatattgaagaataattaatgacaatttatgaaggtaagaacactagattgtaatg

SEQ ID NO: 80724 - DNA, 1713 bp, Cannabis sativa
gtattgaggtgtgcaagttagaaggtgtgaaatattctgggaatttctttacttggaataataaacaggggaaggatgattgaatttactcgaagatagacagagttatggccaaccagccatggcttgataagtttaacacaattgaagctgttttttttatcagaaggcacttttgaccatagtctggcagtactatcagtatatcataagatgaattttgggaagaggtcctttaaattttttcatttttggcagcaagctccggggtttattgagattctaaaagttaattgggagaaaaatctagttgggatgcctgagtataagttagtagggaagttgaagattcttaaaggggcattgaaagactttaataaaaacagtgttggggatatccaagttgcagaaacctcaacatatcagtcccttcttacatgttaagaggagctgaacaagaaccctttgtgtgaacaattaatggaaaaagaaaaggagatccgaaagaagtatggggatatccacaaagcttatttgttgtttctacaacgaaaagcaaaggtgcaatgggtcaaagatggagatgataacacagcagcctttcatgccagtatcaaaacttgaagagcacagaataaaatttatagcattaaagataagagtggagtttgggtggacaaaccagagcaagtcagctaagccttccttcaatacaacattgaaatattgctaggaaccagaatggagaagaggaaatcggttaagtcaattgtaatgcaagaagggtcggtgctaactgatcaacaaaaaaaatgttgttgaaacaatattcttcaaaagaagttaaaaatgcagtttttggtattcctggcattaaagctctagggccagatgggtatagcagctatttttccaagattgggatatagtgggggaaggggtatgtcaagcaattatttctttttcgagttcagattagctcctaaaagagattaattctaccaccttaactcttattccaaaaaatagatgcccgaatattgtaagtgactttcgtctcattgcctgctgcaatgtaatatacaaggtggcaaccaagattatttgtggaagattgagggatattattcttttgctggtagttcaaaatcaatgaggatttatgaaaaggaagtttattacttataatataatgatttgccaagacttggttaaacattatggagaaaaaaactcgaaagctaattgtatggtgaaactagatctccgaaagaagtatttatcgaagaaatactttacacctttcagtttccaaaagatttcattcagctcataatggtgtgtttaacaacaccaaaatttagtttaatgttcaatggatcttctcatgacttttttgaagcaaaaaaagggcttagacagggcgatccaatgtctctactcctatttgtgcttggcatggaatacttgtcaggatttttgaaaaagattggcgagcatagagattacaaatttcataaaaggtgtgctgaaatgcaattgaatcatctttgtttcgcagatgatgtggtattattttgtcacggggatttcaagtctatatatctcatgctacaagggctcaagttattttcccaaacttctggccttcttccaaatgagagcaaatctgttttctatagcaatggcatggatcaccgagagatacaaagg

SEQ ID NO: 80725 - DNA, 799 bp, Cannabis sativa
ctgccttaatgatgtgaagtatcttagctaaaagaacatctcttggttggaagagactttctcgatgtggaagcatttgaatcagtaggccatgtctttacagtgagaggttttctcgatgtggaagcatctcgactgaagaccatgtcttgattgggagaggcttcctcgagtgcctaagcctttgaaactttaggatttggagaattcaaccaagctcggagaggcttccttaacaacatgaaacatctctgtgttagttagtagtcccgttatccgtaaggcgaaataccgggtaagttgtgtaatcatacattacttgggaagctcaagtgtgatgattctaggactgtgtaggtatgagactacacagttgaagagagcttaaaatggattaatggatactagctatatcaataaaatacatctttgtttttggtggcctatcacttgagaactcaaaagttaagggtgcttgacttggattaatcttgggatagttgagctcctgagaagttttcctaagaagcatgctagtgaggaaaaatcacgccaaaagcactcgtgttgggttttaaggccagtcgtcattccaggaagcattcagagtgatgtacccgtgtataagagccattgattcagtggatggatacccaattgaggcttgaaacgagggcattaaaaatggtatcaaagtcttgacccaactggaagtgtggtcaataaggacgcaaaatcctataaggggaaataaactttgagaaatcttgggatgggtagcctcttgggaagttttccc

SEQ ID NO: 80726 - DNA, 1207 bp, Cannabis sativa
aaatctgattatattgaaacgagttttatttagggcataaaacccaacagttaaaacaggcccctcgggcctggtttgagcagctgaaaaactaccttcaacaactcgggttcaccaactcaaaagctgacactagcttattttacagcaacaatcatggccaacttcttcttattctcatctatgtcgatgatatattgatcacaggtgcagaccagcaacaagttcaacatcttattcaacaattacaccagcaattcgacttaaaaaagctaggatcagtcagctattttcttgggtttgaggcattcaaacaaggaaacagctattacctcacacaacataaatatacaagagatttactccatcgaaccaacatgcttgaggctaaaccacagtccacaccaatgtgtgccacaaccaaattatctctcacatccggacaacctcttgaaaatcctcagcaatatcgaagtgtcataggagccctacaatatctaactatgactagactggatatctcctttgccataaacaagcttagccaatttcttaaagcccccacaactgaccattggggagcttgcaaacgtgtactgcgatatttagcaagtactacacaccttggtctctccttttctcctactttgcatcttgatcttcaagcctatactgatgcggactaggctggctcctatgatgatcataaatctacttcaggttactgtgtgtttctcggccaaaacctgattagttggtgttctaaaaagcatactgtagtttcccgctcaagcaccgaatccgaataccgagctctggctctggccacgtctgaattaacatggatccaatccctcctcatcgagttgtcaattactctttcccagtgtcccatcctttgatgcgacaaccttggtgttggatctcttgcatcaaatccagtctaccatgcccgcacaaaacacatcgaaatcgatttacattttgtctgtgacaaagtccttgagaacagattggatgtgcggtatgtcgacacaaattatcagcttgcaaatgtactcacaaagcctcttcctgtggctcagtttgtatactttagggacaagttaacacttcaatgccccagtgtaacttgagggggggtattaggataagtttgttacatagacagttatgttaattattttcgttttctgttgtaactatt

SEQ ID NO: 80727 - DNA, 1863 bp, Cannabis sativa
  modified_base (26)..(45): a, c, t, g, unknown or other
ataaaatgatttctgatctttattannnnnnnnnnnnnnnnnnnntgaaatgggttttatttaaggcacaaaacccaacatttgagcccaaaggcattagtggccttctgtgcctgagtagatctactcgctagatttttgctttttggaggaggcacgatagctgtagggctttgagggtcacccatttttgtctttcccttgtcctgtacagaattataggttccaacatcagcaaggttttccctgttgtttccattgacccattccatcgaagggtcatcgtcaaaatattcttcatttagatctctaaacttatcttggaggagagacatcattctcaccattctctaagaaagcttttcttgatgggccaacttctattgggtctcgagcaacttctgaaacactcgatccacctcagggtcttgcctataatattacccatccttgtagtacctgtctttgacgcactctccatcgtcatcttctttcttctctccaacgttttggttattgttgacacgtttaggttgcttgttggggtcaccttcttggttgtcagcttttgatatatcccattccctcacattgctcggttgagcatgctctggagaaagagggtttacatcttctataacagcattgagactgccttaaggagttgttttggtaactgttttttaggaaacaccatggctatagcaacactgtgattttaggtcttccttcagctctcaatgaaagcaccaaaatatttactaagattttcagaaactaatataatgagagcttaagaaataataaaatgcaatataaagaagatggagatttttacgtggttcaggcgttaacgagccctagtccacaagtcagtctattagcctcaaatgatgtatttgaggtttttacaatgtttatgcaagaagccctaactttgtactctttgtttctcttgaagaagaagaaatcttagagcaattttaccagagctttggctatcatggttttgatccccccctttgtataaaaatagaagggtatttataggctaaagggtgaacatgaacatgcctatgacctacctagggtttccacaacaagcccattaaggataaaatatatacaaagagagttcactattgggccccttggatgaatttgtactcacgcgttgaagtagttggacaataggggaccaccatttgtacaagatgcatgttgccaaaaggttttaccttgaaaagtaattttctggaataacgttctagcaaaaatgtgtaggaggtgtgcatactaccatggcctgacaaagggaacaagattcgatgccgtgtcagaaaaagaataactgcccttgggcgagccgtgttcatttcgaaggtagaaattaacattctttttgggagattagcatccatgataggaccttcgagtacccttctgggtatcgcttgtgcgagctttgagctagggccattccagatcttagagtggtagtaagtcttctttgttctggaagttgaaataaggtagtatggatctccgtatatctctcggtcttcacctattcccgaatccgcggagcttctccatgacttgatttaattgggggggttaattagtgagatgttaaaattgtatcttcccttttacgccacgtgtctctcgtctcgaaacacaaataacacatataaatagtttcgtctaacattttgttaaagaaatctatattaatgtccacttgttaaatctcataattgagagcagctattatcattaggtatgtgaatgaatttgagtatggctactgtacgaaatgttttctcatagttcacactttctctctgagtataatccttt

SEQ ID NO: 80728 - DNA, 763 bp, Cannabis sativa
tatattttaatggagaagctataataagtaattgattttgttttgcaatgaaagatgaaaaacttgttagttaataataacctgggtttattggaaagagattggaagggagaatccaaaattcaggaggcatgggattgcatccttcccaattgaaaacaccaagtatctatatatcatgaacaaaaagtaaattaacataatacaacaagtaataatcttggcatgtttcttagcatatgttgaaatattgtctatgtaagtgttttttttcattacacacaaccattcaatatcataaccatcctttctctctcaagttattttgaaataactccaccttatggaagacaacagtgtctaccataattcgaggtcatagattggatggttttgtcaatagagtcaaaccttgtccacctgaattcataccagctgaaatcactacagatggacaaccagggtttggattcaccattaatccaaactacgaacattggatagtcagtgaccaacttcttatgggctggatctatagttttatatagaatcgattacaacagaagtcatgtggtatgccacttcacctgcactctcaagagccttagagaatctatttggagcttattctagagccaaaatggatgaacacaaaaccatcattcaaaccactcgcaaaggtatgacacccttgactgaatatcttagacagaagaaaatatggtatgatatgcttgccctctctagagacccttatctagaa

SEQ ID NO: 80729 - DNA, 1309 bp, Cannabis sativa
  modified_base (1281)..(1283): a, c, t, g, unknown or other
acgtgtacactgtgtacacgtggacattctaccatggcattcaacagagaaaaatggacggaaagggctaagtgctaacagaacttgagtttagggagttttaccgcaaaatttttagaattggtggttagttgtaaaaatctccctactttaggaggttttgccgcaaataacccttttatttatgtattttaatcgtatagtagatcctatcccatcaacctgaccttaatatttgatgttgatcagttttaataaattaagtaattaaaatatattcataggttagagaagtttgtcgatttaatcaatgctataatcatatataatactgtggacaataatcaatgctatatattttaatttaataaataacacaatttgttaactaattataaaagggagccacaaaaccataaaatataaaatgtaattaaaatgtaacatgtgaaaaaacttaccctaaacttaaagtgacaaataaattttttctttaattaggttatcacttatgaataataaatatatgataatgatcagattctgggtgagattagagagttggtagatgaatacaaggatgaagaagtgagtattaccttcaccggacacagcatgggcgcagcaatggccactcttgccgccactgatgttgtatacaatgactataacaagccgacgggaaaccttgagaaggccttcccggtcacggccattgttctagccagtccgcgctttggaaaccatggtttcaaggccaccttctccaacctccacaaccttcacgtcctgcgcgtgacaaataagtgtgacctcgtccctcactcgccactgccaggaatttttcgcgactacatcgaagtcggacaggagcttgtcatcgacacctttttgtcgccgtacttgaaagaacccatacattccgtacaccagcttgaggtttatttgcatggcgttgccggaacccaaggcagtgctggagggttcaagttggaagtggatcgtgatatcaaactagtgaataagagttttgatgctttgaaggatgaattactcgtgacgagcttatggggggtcgagaaaaacaagggtatgattcagttggatgatgggtcttgggtgctcatggatcgtgagatggatgaccagaaccatggattcaagccctagctatggtttacatcccaaaagttaatatatataataaataaatgtttattcatgatatcgtagatgtcatgctaataatattcagctctgatataaatatatatatatatnnntattctatataaagtgtgcttatata

SEQ ID NO: 80730 - DNA, 839 bp, Cannabis sativa
atctagatcctaataaaatatttcaacacgaagggggacaatatgaagggccttggttaaagtgggaagaggtgtgtaaaccaaaggtgttgggcggccttgactttcgggattttcatttatttaatcaagtcatggtgtctaaacaggtgtggagactattgcaaaacatggattcattaccagtgagagttttgaagcataaatatttcctaaggacatccattcttgatgctaaagataaagacaggtcttctcatttatggtctagccttgtttgggggcttgaacagttgaataagggtgttaggcgttcaattagggatggtaaataggttcgggtattcttggatttgtgggtccctaagccttattcttttaagaccattacgcagcaacatgatgattgcagtcgggttattgaatttattactcctgatggatcttcggatgtcttcaagctagagatgttctttatttccatgtatgtggagggcattttaagtataaccttggcaagggggcctggtaatgattcatggtgttggcattatgatagggaaggtgtgtataatgctaaaagtggctattctttagcgtggtcattacaatgtgaggagggggtggctgatgtggtccccttggttcgatggtggaatggggtttggaacttgaacataccaccaaaggtgaagatattcgcttggtgactattccatttagctcttcctgtaacgcccgtattttataataataaactcgaaaattatttttaataatttatatattaataatcacatggatcgggatcccgggtatcaaaatacaagttaaaagta

SEQ ID NO: 80731 - DNA, 1329 bp, Cannabis sativa
agcatgtgtgatcattttctttggttagtatttgggtgataatgaatagagaaacaagaagattgtgtaagattcctgaacaagtgagacatgaagtggcaccattttacttccatagagtagccattgccaaagaaaagaatgatagtgacaagattgacaagctcattgatcaaactgctcagacaatccgaactggtttagctgtaagaattataattttttattttatttttacattaatatgagaagataataaaatgtgttgtgttgttaaactcagccaaggtggagtgatatggatgccaatcaacatgtaaacaatgtcaaatacattggttggattctagaggtaccaaaatttaaaacaaaaagactttagttaatccaatttcttaagacattatatgattaatttttttgtgtgaatatgcagagtgtgccaagaaatgttttagaagagtattacttaacaagtatgactctggagtatagaagagaatgtaggcaatcaaatttacttgagtcgatgacaagtcccacatcgaaagtggatgaagattccaagagtaattgtataaaaaggatggcagatatgaaatatacacacatgcttaggatgcaagatgataaggcagagatagtaagagcaagaacacaatggcattacaaagagagtcatgatcatctatcaatatgatctttacacgtggcaaattttcatcactattattatttttcatgaatatgtttttttttttttggttatttaatgctttttgtttgcttgtttgttttgtttcttgtactagtatatttatttatatggccatgtaaaaatattctaactgcactttgtgtgttttcacagtgcattgattataaggttcaataaggattagcttaattattgtcaactgttttaatcaatttttttttcttattaagaaagtgagagctgagaatcattgtcattaaagtacatgatgtgatggaattataataaaaatatgagaaattgtatggtttcattgtttgaaaacttaatgaaatggaaagcaagagggaaaatggtaccaataattcgattattgattaataccaataatttcaagtacaaaaatgtgataatttttgtatactctcgttgaattttccgctcaacaaaatagaaaaaaaaaataaaagtgagattgaagatgattagtagtttggatttgttaatgaaatcctagtgtacaagctattgtattataactagaactttatatagtgttagttctgtaaggattttgagaaggtttttggttaagaatcaaaataaaacta

SEQ ID NO: 80732 - DNA, 776 bp, Cannabis sativa
tatatatataatatttattgtattgtactgctacacctactactactacattacaattaagtattaagtggtaaacgcgtggcaatcgatattgggccaatcattcttcatgggctttcttcattggacaataggctattgtattggggcccacggcccaatagatatgcagcttgcaaacaaagttgggtaccagtcaaagccacactgaaggaactttaatgaactaaagaaagatttcaaaggttagcattgttacgggctaataagattcactagacacgctataattgattagcagttttttataatatttattaaaataaaataattgaaatttgatattgagttgcactaatagtaatattacatctcacaacacaagagtattagacactatgagtgtccgatattgagttgcaccaataacgatattacacctcacagaaatattagacactatgaatgcccactaaaggagaaagaaatactaaatgacacttttagtatctagcactactgtgagttgtaatattattattagtgtgattgaatattaggttccacttgttttactttaataaatattatagaaaatcgctaattaattatagaacgacacttcatcgtggtgctatgcaccatggatgcctcatagcatagctcttctctaaaaggtacatgtggtatctaacaccctcttaatatcgttattggtgtaattaatgtaataacttttaatatcgttattggtgtcatataatttaatgtaataa

SEQ ID NO: 80733 - DNA, 992 bp, Cannabis sativa
aataataataataatttaattgtatcacacttaatataccaaatactaatatatgtatataaactggatattacaatgttcctagcaaaaatatataatttaccaaaatggtcatatctcatatgatgtctaaatatctcttatcaattaatactcaaatggttttaataagatttgttttacatagagtaatgtcactattctttaaggtcttgttttgactttgaattgtaagaggaaaaataaaaaatcctttaattctattttcatgttttgcattgaatcagttattaataattttatttttagaagaattaaaacttgggtgtagagtagttttataaaatttagaacaattaaaaataaatatatatcaaatttatagaatttgttttcctatatttttttccactattttaccgctaaaatccaaatttcaaacaaagcctagaagtttacttgtggtgaaaacttgtctctaaatgttgattttggtgatatttaatcaggtgtttatgatgatggcatctgaaatcttcagacctatgtctgatattcccaagttcttctggcgctatccgatgtcttatatcagtttcgcatcttgggcattacaggtacaactaattatacctgagttttccatttgttttagctattatgtaaccatttctatatgccacaattttaaataattaacatttgtacattattcagggtgtatataagaatgacatgattggtatagaattcgatccattagtagctggatatccaaagctgaaaggtgaaataattctccaaacaatgtttggaatgcctttggatcattccaaatggtgggatttagcagctcttgtgtgtttgttaatttcacacagattaatatttttcttgatcctcaaatataaagacaccatttcactacactctaagctatattttgacacagtggtccaccaaattggcaatttgagcagatcatcttcttc

SEQ ID NO: 80734 - DNA, 842 bp, Cannabis sativa
tgacccaatcttttagaacaggaaacaaaacaggaggcgcaaccgttatcagcgaagtaaacaaagcagacaaaaaccaaaatctttcacccattaaggcaaatattgaaggatgtcgtagataggtattgacggacccatccacaaaacttgtcttaagccttaaaactacgaaacacgatcaataaactaccagtttagtttattataagctttaactagatcaatttttataacaaaaaagaaatagtattatatcttcagtgtacttaataatctcttcagtagtacattcttatcgataagatagtaatttttaaaaaaatataactaatcaatcataaaatgcttaaaaaaaataataactagaaattcaaaagccaaatataattttctcgtgtaaaattaagcttttggcattattcatgcttttgttttttggttttttccttattataccaagtcaaaacgtgagataattcgccctaaaaaaagtcagatgatgggccaatcaatatctcgtcagtgctgacgtaagatgacatgttagaaactaattggttgttgaaatcattataaaaatgactgcgaggcttggtacaacaagtcacattactattgggccccacaagaactgaatttgggctgaaacggcccaactaaacgaataatgatgtaggggcccgcccacaaaggcccgaaagagattagctaccaaaacgtcgtagttttaaatgggtctttaaagttcgaagcgtgtgaaaagtggactcactggtcttggtcatgggtggtgtgccatatttgactcaaagtcaaaataccattccacactctaatct

SEQ ID NO: 80735 - DNA, 946 bp, Cannabis sativa
tttaatagtggactcattaattataataaatgtaaaaaaaaaaaaaacactaattcaaatttgaatataaaaatagattgacccatataagatatataggctagtataaaaatatcgggtctataagccgtaccgagcctgttctttaaaaatattgtcataacataacatgataagactcatatttattttatggcacgacacggcaaacacgacacaaatttacacatatgaaaggatgttttcaaatttaaatctatgctgagaagtacatatcacgggaccataacaattaatgctcgatggagattgcacaatcttatattatattataaataatttatttatatgtataatgaattaatatatttggcccctcaaatatatcaattatttgtttctttttcattagtaaaattatttattttaaactatttttataaagatggaaagttttataataggacaccaccgacatcattttcattttaattttgtctttttaaaaaattataatttctccaaatgcaaatattcttaactttttattttatcactttattatattttatttactatttacaaattacaaattataaaacagtttgatcatactttgataggagagataatgtgtattaaatctcgattttttttaatatttagtaaaaataaaaacttaaacttattatccttaatatatctctaataacttaaaattaatttctttcacaattatacaagtttaattttttcactgtacactataatgtctcaactctaagttgatcaaatttagagtctatatataaggtgataaggtcataacgtcatgggacaaaaaaatatttttggcctcttatttaaaaatttgtagtattttttaaaattagtaaaaataaatatataattttaaaaagagaaatttcttttagactcctgaact

SEQ ID NO: 80736 - DNA, 891 bp, Cannabis sativa
tgtgtgtgttagttttttgaatttggatttgtttaaatttaatttatatttggttggcttttgttttgttttgttttatttttttttttagatttagatttggaaataagttgtcgtggtgatggtgactttggaagtggtgggtggtgattttggtgactatggatggtggcgatggtggtgagagtttgtgacaagaaggagaagaagaaggaaaaagaaggaaatgaaaactggaaaaaatatgtatgaaaattatgatatgttaggaaaaaaaatatttttatttttttaatatatgtttacgtgaattaataaaattgtgttatgtgtacactgtattcacatggacaatctaacattgtatacctaacagctaaacttagacgaaactgtaaattgccaacggtattataactttgagaattttactgccaaataaaaaaaataaaaattaagtataaataaaataaaagtgttaaaatttttgccaccattaactcttatttatatcattttatttgtggccatagataatgcatggtaatacacttctcacaaaaagaaatgttaagttcaactcaagtaccctccttaatgttaaaaagaaaaaaaatcttttatttttagtaattatttattacataaaaatgtgataagttatattattaggaagtttaatcctatactgcaccaaattcaatctcaatttccccccaatagtctagtccaattatattggccaaacgcaggccccattctacttggttgactttttatgattgatttaatggcacgtttactatacagtaatcagaatcggaataaattaatagagaaatataacggaataaatgaaaaataataggaatcaatatttgtaatatgttg

SEQ ID NO: 80737 - DNA, 1693 bp, Cannabis sativa
atattacgtaattaattttgtccaaattcaatgaatataaaatattcatttatcacaaaatcaattctttattttatcccttaattagaaatattctaataattaatagtgcttaatttcattactattaattataactattggtataatttaataataataataataataataataacctttagatttaactagaccccataaataaaaatggggtaaaaattgatgtaaaatttaatacccacatttatttgtttctattttttttatgaatattttttgttatatatattatttctttttatgtactttatgtgaaatgaccctagctatctaactaacaatcaataattgaaacttctaatcaaatttcatattgtgtcatttataaattgtgttatatgcaagtaacatgtcattaattaatgttatatgaaatatatctttctcacttttcgatctaattagtggaattaatgttatcattaatatataatttaaaattaattaacaatgtacatgtgtgattaattaaaagaaatttcttttttatattttgaaacagtttctttttttgtatttttataaaattctacataagaacttatcatatcaactaatgaatcaacttaaatcgtaactaaatttcacatgaaaattactgaatcaactcaaatcgtaaatttaaaaataaaaaatagtatataaaattattttccaaattaaaattcagaatttgggtggaaaagaagtaaatctagatgttatttccataatggggccttgatatattctagaggttttgatcttgaaggagaattttgatatatgattaattatatttataaatatagaatatatattatatagttattaattaaagaattttttatatattacatcccaaatttaaaaagagattacaaaaatacattaatatatagaaaaaactttatactgtttgaactattttatttataaaagtatgtttttcaataaaaataataaactgtttgatattcttttattttttcacactgttttttgttctaattaaaaactcatatttttttaattttaattaattactttaaattgtgtttttaaaaaaccaaaatctgtaaaattataaataagatatacaaagaatatatttctgaaaaaattccttaattaaatatataaaaatggatatgtgtgcatttcaccataaagcatttagaactgagttaaaattaaacaatcacattttacttagcttattatataaatgatttcttgtgccaactacttagatgagtattttgtacgttgaatttactataaaataaaatcactttttaaaaagttctttatatttatacatattgttttcattgcttaaaaactacatatatatatatatacatgtttcaatactcataagtatacttttatgttaatttaatataaatttttgggtaattttcactaaaaaaaatcttagttttgttatatcattttttttttatatataaaagtacggtagtttttatttgaattactatgtgaattttaattgtgatttagattgcttcattaattgcgatgtaaatttttataaaaatacaaaaaaatacatatattttaaaatgtaaaaataaaaaagttcttttacaaaatcaattttgtgcaaattagtacatctttttat

SEQ ID NO: 80738 - DNA, 1946 bp, Cannabis sativa
cacccatttttcatcaaacttcactacaggcaccttccctccagggattcacttgcagaaacctacacagcatcaaacataaacacaattcacatattacactacataccatgcggtgtcgttttgtaattaatttgacataccatgtgggtttgtcactgagattgatgaggtgcctgttgtaaggtattttcttctcctccaaagtcagaagtaccctttggctaaatggacctgaagtgaagaaaacaaaaaaatctgagtcaaatataacccaaaaagaaaataatgaaaagcccagaaaacagagaagaagatgtatgattttacagtctccaagaagatgaggagcacccactgcagccttgacagcaacctcgagagccataatgttgtggtcgacgaacgaaagaatgtggatgtaaaaatgggacttggaagaagaggtatgagggagagataaggcgtatcaacttcgttttatagtaaatgaaattgtgttcattgccaaaaaaaaaaaaaaatactttgttgtatgctagtgaatggtttggttggtgtttcattttttgttacttttttcaaaagaataatatcgttgtcctttttccaaaaaagaatataatgtgttactcgtgctcctaaagggtggtagatggaatgctagttttatatctaatacatttgcacccaaatcttaatcatcgatgaaaatgcagaatatgcgtggaagacctctttcgaattgttgttagaaatggcttaggctcacaacgtgtcaacttaaatgttgggccagcgccgaggtcaatttaagcgttaggttccaattttagtctctaagtcgattcgtttcttttctaaaagcacttgattcttatttttggatggagaagaataaaatgttcgatgtacttcttcaaatattgtgattggaaacgccccaagttgacaatagatcaacttgggagctgggtgcactaggtgctctaagcgcctggtgccttaggtgctcaaaattgaaagtgttacgattctgattccgatgcctcaaatatgttcttgacatgtcttatttatgtcaaagtacaaactttgagctattttcactaagacagactcgaaaattgaaaccctagttagaatttcaacttgggcgctgtgtgaaaactctaggcgcccgggttgactttcgaggtgctgttttgtcattttttagtttccaggacttggattcttcttgtcttcttagtttagaatacttgaagacggtgagttggaaacaacttggtgagggatccaaacacctattctggagttctcagagtcaacctgagcgcagaactaagacttctccccggtcgactgctatgagtcaggactactcaactccgggatattttctttcttcccacgtgtcaaaaagtgatgtccacatcatcactgctagttttcttgtaaacacctagaatataataaaatctccatgattgagaaactatattacaaatatctatttctgacaatagatcttattttgtactaatgctcatatataaccataaaacaataattaaataactaataagttgttaatttttatgtctaaatatgcggtcattacagtgtggtaaattataaattttaaagtactgtgaattattaaaattttaattataatgataataatgttataatattatttgttataatcataagtatattaaaaattatgttatacaaatttttttagtttttatatatattttttttaaaaaaatataaatttatatgcatttgataattttatttttttttttaaaaaaaaaaaacactttattttgtgacgtgtagaaaaacataataaacactattcatgagatttgttaacataaaattatgaaactaaaaaatatttaataaatataaagtattttttaaagatt

SEQ ID NO: 80739 - DNA, 1573 bp, Cannabis sativa
attaatattataattaattaaatataattaattaaactttttaaaaataaaaattaatacttttgccggcgtaatagtgcgccggtaaaatgtggcaaaaattattggcgccaatctgagggttggcgccaatagttttgctggcgcactattgcgcctgcaaaagcttatcaaattaggttcatagcggataagggcattttttaacaccggtgcttacttttcaccggcgtgatttctcgccagtaaaagcaagttttaccggcgcaattactctacgcgccggtaaaaactcctttaccgaccaagcttcccagataagctttgccgacgcagttagggtacttttgccggcgcatttgtcgcgccggcaaaagtggcttttcttgtagtgccttgagggggtgtattaacttgttagttttaggtctattagtttttagtttttgtcctaactaaatttgttagcctctatgaacttccctccttttttggatttatttttgctcgacctactgtgtataaaagagattttccctttactcctttgtaatcatttttttacttgctttttcttagaaataaaactcttcaatttatgttatactgttcatatttatactattttttttaaaacagtatgaaacttgatataaccctattatgacactttcttatattctactctcttttatatttaattttttttaattaaaaaaaaatagtaaaagttttgatgtgatgttgattgtcacatttgtggcagttcattctttttttaataacaatcaattaaaaaaaaaaaaaaagagtgataaacaataaatgacaatttttttttaataagaatcaaaattttaaaaaaagtgataaataagacccctttaacgtcattattcttccattcttcttcttcatctttattgtatcttccatttttgttccaatttcttctttttcttcttctttttttttctcttgcttttgttagtaaattaaaaatgggtaataaatatttcaaagaaaacttccatagccctacattttccatagtttcgaacgcaaaaggaaatcaattattcattctctggaaaagcgaaaattaaaacatttgaaaccgatcattgaaggtttagactctgattttgaacttgatgatgaaaattttgagatacctaaagtgttgaaggtatttatgttgttttacagttgttttaacattttttttcttttttgttctagatgttctggttttttttttcttatttatgttttctactcattttaatttatttattgttgttatatatttggtatttttttgtttcttattgtatgcataattttttattattttttaatggttattttgttgttatatggcttgttctttttagctaaatacatgttactccaaacccattacttactgatattttcatctccatcatcttcgaaatgttcttctccttcttaagtttttttttttttttttcaattttttcttcatttgtttgaaagatttgttgaattaccatgatattagctgtgatattagctgtgatatttgcag

SEQ ID NO: 80740 - DNA, 2506 bp, Cannabis sativa
ctagctaaacaagccaatccaaccttttttaagccaaaacactccttttcgatcttattgggtcgaagttaaatggattaaatgttgcggtttcatatgctaaataaaactcatttaaaaagtaatcttatttactgaccaatagaagatcagaaattatttttgttcacatgttactcatttcataattatatgtttattatacaaattctgttaaatctcaaacatattattattcatgatgtaagagcttgtttatgctaagaactaagagaattcaatatatgagattgcaattcaagacttgcaaaagctacaggccttggaaaagagtttcatttatatagaggaagatacaatcgaagagaagggtaaaaaaactgaaataacaaaaagaaaccagaaaattgaaaaactgttacagtaaactaaaataacgtatttaactaattttagttacaaagtgagttgtatcatcccccctcaagcgaaagggtgttgaacaacttgaagcttgtgcttgaggtattgaaatctttcagtcgacaggggcttcgtgagtatgtctgctatttgatcacaagatggaacatatcgaacttcaaattgtatggcaattatttggtcttgaatgaagtgcaaatctatttcgatatgtttagaacgggcacagaacactggatttgcagctaaggaagctgccccttagttgtcagcccaaataataggtgtagtaggtgtatgaacattcatttcactaagaaaagagcaaatccatctaattttagcggctggatttgcaagagctcaaaattctttttctatgcttgatctagcaacaacaggttgctttttagcagaccacgatactaagttccccccaaaaaatattgcatatctacctgttgaacgtctgtcatctgggcagattgcccaatctgcatcagagtaagcttggagagataattgagttgctgctctgatgagaagtctctctgtaatggtacctttaaggtacctgaatagtcgtttacatgcctcccaatgtgttgttgttggagcatggataaaacgacttaacttattcacaataaatgctacatcaggcctagttaaagtcaaatactataagactcctagtgtgcttctgtagagagtttgatccataaagggttctccttctgtaagagatagtttgtgtgtggaggatgtgggtttgggataaggcttagtaccctccatatgtaatcgaaccaatagatctaagatgtatttggtttgagatagatatattctagtgtcatttcgaacaatttcaaccccaagaaattagtgtagagaaccaaggtcattaatagaaaagacttgattcaattcagaaatgagagtgttgataaccatcttgttgggccctgttactatgatgtcatccctcaccaaggatcctagctaaaattttgtcaagcatgcatattccacatagtttaaaagccgttagattctgtgaagcatgtaaaataggaaaaagtcacaaattgccttactctctgtccaattcaagagcatctcaaccacttgagttgctccacacagacctttggggtccttcacacatttgctccctcgaaggtcacaggtattacatcatctttatagatgattatagtaggtatacctgaattttccccctttcccttatatcccaagcctacaacttatttcttgaatttaaaaagcttgtagaaaaatagttcaatctcccaatcaaaattgttcagtctgactggggaggagagcacaggtcattctccaagtttcttaccaaacatggaaatcagttccaacatccatgccctcatgaccatgaacaaaatggaagagtggagagaaagcataggcatattacagaatctggtttgacacttcttattgaatctggtctcgatctaacacattggtggttatcctttcagcacaatgtctttgtaataaacaggcttacaacacctgttcttgataatgcctcaccttatgagactttgttccacaaacaaccagaatacagcttcctaattaaagccctttggatgatcctgttttccacatctgaggccctaccaatcacataagcttgaaattcgatctgaaaagtgcacctttgtgggatactgattacaacataaaggtcatctttggaaaagcaacacaggcagaacctatattgcatgaaaaagttacatttaatgagcaagagttcccagccaaatatcctccaaaccaacagtaggtaaatcaatcatctaatactatttttccatcaactagttttctaactaaccttatggaaaaggatttatctaactcacctactgtctctgttggaacaactcctaatggtgaggctggcccaagcacaactccaaatttggctcccaatcaggctgtaaatgttcaacacagtgccacaactatgcctacaaataccaactgtgaggaaatcagtgcc

SEQ ID NO: 80741 - DNA, 1828 bp, Cannabis sativa
tagagtgttgctgccagcaaccgagttaactcagtcaaattgtgtttttgggactcagtcagcccattttcacccgtttttaactgagttgaacctattcttagctatttggactattaattctaaattcaaccgtgacattcatttttcaaaataaggtattaaaattttagaaaaaattaccttaagtcataagctgaaaagtttgttattttcttgcacttatggctgagaacagagatcttaaaaaagatgcacaagctgatgtaaaaatttctagcaagtcaagaggctctatgggaagaacaatgttgtcaaatgaaaagtttgaggtggaggaatttgactgtacaaataactttggcatgtggcaatgtggagtattagatctattgttttgagaaggatttaatattaccttagagtccaggctagaagattattctgatgaagattggaattttatcaattgtcaagcttgtggcgcaatctatctatgtctgggaaaagatcagaagtactttgtcatgaaagaaagtgtagctgtagtcctttggaaaaagctagaggtcaagtacattacaaaaagtttagagaatcgactctaccttaagaagaaactttttcgtttccagttcaagaaaggtacccctatgattgaacatttagataaatttaacaaattttggtagatttgcaaaatttagatgtcgaaattagtgatgaagataaagctttgttgttgctaaattcattacctaaaagctatgaacatttaagcacaactctgttatgtggtaaagatgaggttaagtttatagttgtctctaacgctttggtaaataatgagtatcggtagaaggatcaacatgttcgtaaagactcaacaccagaagcattggttacaataagaaattaggttgatcgagtaatagggccaatccagatcaaagtctagaggaaagtcatcaagaagaaattttgcaaaagatgagtatgcctattgtcaacagaaagggcagtggaagaaagattgtccaaacaaggacaagtcaattgtaaatgttgcacagaaggtcgacatcaaagaagatccagccttttcagtttcatcaaatttgtattcagacaagtggattcttgattctgaatgttcctatcatatgtgtccaaatagacattggttctcgagtttcgaagaacttaatggtggagttgtgctaatgggaaacgacaatgcttgtcacacaaaagggattggaacaatattactaaagatgcacgatggtacaatcagaatacttacgaatgtgaggtacattattgagcaaaagaaaaatcttatttatttaggtgttcttgattctgatggttacaagataacattacaagatagaaacttgaaagttgtacgaggtgcatttgtagcgatgaaaggtacttaaaaggcgaatttatactttccagatgggagtactgttacaagaagagcagctatctctacaatttctgaagaaaagacatctgactcttcccgcctttggcacatgtgcttatagagagaaggctttgcaaggcttagtgaagcatggtctactgaaaggtgttaagaacaaatgtttgatttcggtgagcattgtgtgctgggaaagaaaacaagggtgaagtttagcactattgttcatcgcaccaagggaactctggattaaatctacacagtcgtttggggaccttccaagaatgcttcacttggaggtaaaagatggtttgtgacttttattgatgatttttctagataaatttaggtatacaccatgcaaacaaatat

SEQ ID NO: 80742 - DNA, 1420 bp, Cannabis sativa
  modified_base (50)..(57): a, c, t, g, unknown or other
acacaggattttttacgtggttttctaattaaaattctgcatagtccacnnnnnnnncttattcagatttctgattgtttcctcagagccttttttgtatgatttttccgtcccctttttgatctttctggccactatttataattacatagcgggcagttaattacaaagttgaatgtaatcttattaaaataatcatcccctaaaatcatggggtttgattacacatcacgcagtgtaaatgcggttatgatttgaaaatcatatagctttgattttcccgcttttaccaggtcaaaataatcgtgtatttaaacatgtctttaatcgttgtacccaggaatatctcgacagaagcttggttccaaggatcataatagcgagctggggccatttttcctttcgaggtcgatatgcacgtcttatgatgatcgtggttcttatttacaaagagttctccgaagctcttttgaatgttagcttctgacctgtcattcaacgcattcgagaggattcttgatgccgaatctttctaaccatgctatcataaatagcacaataacggtatctcaagctttcctcaggatctatagaatctagggaaacactcaaacaagtattttatgactgattctccccatcaaggcacagaccgatcgagcccaacaatttggtctgtatcaagcagtttgaagacaaccctctaaaggattaccaacaatgattcttagaagtggccacagaaacaaggatactaagtgaagacgctaaggatatggaaatggaagttggactaactgttatgagtccattctagaaatacttgaaactcaaatcactacacactattcaagagtttttagtcaaagttgacggtttcctcaagcttcaaaagtttgtcaagaaggttagaggagtttctcaattagaagcaacaaattacactgtttatttatctcctaagttccaaattgacattaatctgaaaggtgaagaagaatgaacagttaatgccttcagtgaaatagattgtccttctatttctctagacgaactcgagcagggagaaaatgacaatgaatacccttctttttctcatgatgatcttgagccggagagaattaacaaagaatctcccctacttcccaagacgattcgagacagggggcagtaacgaagattctccctctatttccattgaatataagaaatagggaagcaacagtaaagatgtatcctatgagtctcctaaaaatgttgactaagagagaaccactaaagactcccaatgagaaagggaggatgcctatgtcatcacaaaagtgttataacctgggacatacaagttggcccgctatgactaccacttgaatccagtgtcggtaccaatgtacttgattggggtgcatctaagatgata

SEQ ID NO: 80743 - DNA, 5096 bp, Cannabis sativa
tgaaaatttgggagtataatagcgacagtttaattacctcaaattacagagtagaaagtacttaaaattacattgaatacattgagttttggaaatgctaatgaatgttgcgttatgagcataaacactgaacatatatacttatatatttagtttacattacattgaatctgagaatgaatgctactgagcatctccaataaatcactagtatgctacataactcaacataactaaaaaatatattcatctcatatagcattttttgtagcattctcattaaaaatgttctaaactaaccattcataatcattaaaaatacaagtgcttagtgatatattttagattaagtatttatttgttctttcatttagattttttctttaggaaaagatctcaactactactaagaataataaaactcatcaaaagagatgggagaaaatgcattactgagtcaaatctactactattaagttctgaatacaaattggagaattcgactaccaaatagtaataaaggacactgcaaaagtgactttaggtcttcatttagattttaattacattgttaaattttgactattttaataatttatttatttttttcaagacaatttattatgaaatagactaactatattgtgtcaagtatatctagtcaatctttttaagtggggtaacaaatgggtggtgacaaaactcaaaaaaccttgacattgatattcttacaataaaaaagattggattttacattacaacaaaattaaactttgagtatttacaccatcaaaacttatttcccttttacatttttttacttccctaatcatctttttggtcctactctttctttccctaatcatcttttcaattcttctctctcctctctactcttcaagaaagagatagaacttttctccttgaactacacaatcactagactaccaagtcctactcttttacgtaaatcttcatttaaactattgtggtacaatacctctcacatgttaattttgtggcatatcactttaaactttaactttatatccaacgagttttgtaattaacaaggtagatgcaaacaatatacctttcgtggccttagacttagtcaaattgtggatttatgtttggaatttcatgaggtgttatgccggaaatgttattgtatttttttgacctaaaagataacaaaaaaaaatatatattaatgggtaaaatttaatgactccatgtgttgttttagtgtcttcggcaataaaatttagaggcacaatgttttgactaaaggcaaaaactaaaaataatgagaaacagacaaagtgctctacattgaaaattattttattgtgttagaattttaatttttttaatgaacttaagtcggtcatcatgatcagattcaagcctttattaattaacttgctttggcaaaaaagttaatgcctattgggaaggatccatcactaatggctcatgtgtgtttattcgcctttgaacctagtcaccaataagtttggttcattaaaatagaccattcaactttccagatgcactaatccaaacaataattcattcatctgaacaacactaaaggccattttaactaatccaaacaataattcattcatctgtacaacactaaaggccattttagcacttaagtcatgtttagttgaacaggtgtacaaaggtgtacaattatgtacaattagtttttttttttttctctctttttctttttctaatagaacgtataaactataaaccatgctttcgaagtaaagaataatacaactcaccacaccacaatttagtagtgactacattattggtttagataaactgcaagcggatgatgctgtcttccacttaaaagccctgactcgttttagatttgctgtccaccatgattgacgcagcggctgaacttttcttttgtaacatgaattggaaaaacaaagagataatttacatacaaatatttttattgtataattcaccttctaattaatgattgcatgattgaactgtacctgctctgctcagtcccaatcacatggaaccttgagccccattcttctaaaacattccatgaatctagtattattctccttaaaacgatattaaaaaatgtattatagttgaccattctaatccatagatcttgataatgctaatacaactcatatggatggggaaggaagcaaacaccctctattcaatttttactcgaaactttccacgatgtttctaaatatgggccctttcttaaatgatatttaatgctaaaagttaaccatttcaggcaaattcttatgtcattttcacgcaaatgttaaaaaagggacaagtgcttcgattatcaaagaagagacagcaaaacaggggatattaacacaaagcaaatttattcatttctctgtactgctcaaagaacatgtggaatcaactgtacattctttctaagcaacctttttttttaatgatcaagaaattgggaagagccaaaaagcttggcctttctctaaaaatagtgggaactactttctaccattctcttaactaagaaaatttacagaatgatacaaacaaatccaactcatttaccttcaatgaaagagattgaagaaacatgaattgtaaatgatttctaaacgtgtgtacagtgtagtgcagtgaatcccaattcagcaactctcccaaacccaaattctctttccctctaagccaccaaatcagatcaatctgtatttacagaaactcgtttatcataaatggttgtatctttactgctcaccaaacaagttcactgatatacttccgaacttcttgccctctagccgagaccctcttgccctagtctgttttggagcattaggagcttcaatatcttcggtcagattttccaaatcaatggcggttctgaaggcgggaacctttttgggagtgctaaaagcgaaatgcatttcctctgcaaccaaagcctgcatttcaataaatcaaatttatcaatcatttgaaaacacaaaaatgggattgaataacctaaaaaaagagggagagagatgagaacttacagcttccctaataaatgttgctacattataaagcttactgagatcatcatgatccacaccacttacaatatgaatctgcaaatataaaaccagagattattcaccaataattataaactaagaaaaatatatagctacaaatcaatctgaaaaatttagggcttaccagaatgtcaccaggcagagcttgaagagcacacgtttctgattctgtttctgtttctgggttcaaaatcgtgctgtctcgaacacaacgtttcttcatcgattgagtcctgctaatggtatcactgccattgttagaaacaatatccctcttcttctcaattggtcgtgcataattcacgagccccaactcaaaaccctcatcgttatccacaccaccattaatcaaaccactacgagtgaagttacaacttctgcttttctttcccaaagccatatcaaataacacttcaataaaattcacgaattcacgaatcaaatcgctgtctaaaaaaaacaagaaagatatctattaattaattgaaactatcaacgaagaaagcaaacgaaaatattctcaaatctatgaaaaatccactagaaaccctaaactagaaagcaaattttgaatgagaataaaaacgaacctgaaatagattaagggttagatacgagatcgcaatataaaatttagtgttgtgttttctgggtctgtttttaaaaggccagtcttcaattggttgctgttacaaatggaaacaagcagagtaatcttcgaaatcacggaacttcccttaaattctttttatacaccttataaagctgtttgaggcttgaggttgttgtgtttaaagctttttaatatatattatattttaaatcttttgaaaacagtaaaaatgctttgtttctacgcgtttgcggaatcaactggaattttccacaccaaaaaacttaggattccgaattttcagtaatataattttattaatggcggttaaacaaagaaataataaaaaaaatagagcactcaaaatacaattacaaaaagtagccgtttggtgaaattttacacgtggcgttcatcggtggggcagtgataggaaagagcatatcttcttctgagtggtgacgtggtaattggtcggtcagagtcggcgggtcggtagctttctatacacgttgcaatttcttggtttagttgtgcttcggaagttatcttctcaatcgtgtgtaaacacgtcactatctaccagaggtgaagcgtgtacgaattttattggttcacagtgatagtaaagttttaggatttatttctcattttatttttatttttatttttcaattgttttgacttgtttaaaaacataagaaaacatctataaaggcggctcacaactgcaattcgagttttgttgatgcggcgatttttaagatttcacacggtttaaagttcaaacttcaaagatatagtttcatcccaatgtctagtgtatgtgtttttgttagtttggttttttattttattttattttaaatcaaaataataataaataataaaatagatcctcacatattttaaatggtgtgattattaatagatactaaaaatatataatattcctaatttatgtgtgtgaatgatttgtgagtctactcttttcaaaataggattgacgcgcgagtcatataatttgattgcttaatttaaatttaattacatacccagaaattattgccgaaagagaaataaacattgaaacaaaaatggatacttcctttttaaaaaacaaatataaatgtgataaatgtagtattagtataggtatcattaaccttttttaatttatcaatttgatgatttaaaattggactccttccaaatttaaccaagtacatatttgattcaatttattgctggtttcggctgattagttttaaaatatatgtgttttaaaaattttaagaaattttttattgttcaatatagtaatagttttatagatttcaaatatcaataatataaat

SEQ ID NO: 80744 - DNA, 869 bp, Cannabis sativa
ttatttaaagtgtatataataaaattaagaagtgttaacctctatgtcatttggacttattattgatgattgtacatgtctttttctcatgtttatgtgactaattggttggttcgatgtgcttgttcttcttctggtaattaggggtttatccctcctgactgatttggcaattatttaattagcagtcaatattgattaatgaaattgtttatttctcttaaataaaagtgctaacctagtcaccttattaagatttggaataatataaaaaagctatattaagtaattttacttattcaccaaaaaaaagtaattttactcaaaatgaggctagctagatctctcacacattttttattccatatcttgaatttataatgcatgtcaatatgtcatatatagctttacacgataaatctatttctttcaaagtaaacaagctataatgtaaattaattagctggtttccaaataaaactcgttttagggatgatgatatgaaaaaaaaaaaaagaatccttttgttccattaaaggcaaatcagatgccgcaaaagggaaaaagacaaaaccatttttgtacatactactgtactgatatcacaaattatcaaaataaattgtgtaagggaatatccggaataataaagaccaaagccttacctagattcctagctaaaataaataaataaaaaactctaactagattttggaggttatcattttgacacatatatatatatatatatatatgtaaatttatagctctttatcagtacccttgggtggggtggtggggctttggcttctaaaacactatttactccctagctttgatttgtacatattatatggtacatagtctct

SEQ ID NO: 80745 - DNA, 972 bp, Cannabis sativa
aattggcaaattcgacagttggatgtaaacaacgctttcctaaatggtgtccttcaagaggaagtttacatgcaccagccacctggttatgaagactctacagtgcctaacctggtttgtaaactacacaaagccctatatggactcaagcaagctccccgagcttggtttgaacgattacaactgtcattgcacaagtttggctttgtttcctcaaagtcagatcactcactgtttgtgcaacattctcctgaggctacaacaatgattttagtctatgttgatgatatcatcatcactggcagcaacccatctgttttgtctcaactgatatctgatctcaacaatgagttttctctgaaagatctaggtgaactgagttatttcttgggcattgaagtcaagcacacatctgatggtctacacctctctcaagccaagtatattcgagatctattagtcaaaactcaaatgcaaggggctaagtctgcctctgccccaatgactagtggtcttaaactctcggcttatgggagtgatcctgttgaagatgtgcatctgtataggtccactgttggagctctccaatatctcacaatcaccaggcctgagatttcatttagcgtgagtaaagtttgtcagttcatgcatcgtcctcttcaagttcactggattgcagtgaaaagaattctacggtatctcagtggaactatacactatggacttcatctcaagaaaccttcacatacagagatagctgccttttgtgatgctgactgggcagcagatgttgatgataggagatccacttcagggtatgcaatctactttggttctaatcttgttgcctggtcttccaagaaacagcataccgtgtcacggtcaagcacagaagcagagtttcgatcactagcaaatgttgtagcagaaataacttggcttcattccctgctgttcgaattgcatgtctcc

SEQ ID NO: 80746 - DNA, 812 bp, Cannabis sativa
cagacccaccttgtcggttgcctcagccctagttcccctagaacctcttattctggttcaagccaccagatgcaaaggagcctttcttttctaatcagaggtcgagtcattaccacccctaccataactaggggtaggtagagtagtggccccaccaacactaggagtccctcgaggcttttgagtacactccacttcaccctcagctcacagtgtttccataccatatcagcataggtagttgcaccatatgttgtgatcatcaagtcatgtttaatcttgggattcaattcattcaaatatttttctttcttgctaaagtcagttggcactattcctgaagcctacctagccagtctgtcaaattgtgttgtatattctataactggcatgttctcttttttgggtcaattgtgtgaactcctttctttttgtactacggaccgcttcgttgtagtactttgcattaaataaatcttgaaactcttgccaggtaattctggtaacgtcctgggtgagagataccatgttccaccaaactaaggcatcctcttggaaatgaaaggtagcacatgtcactctatcattgccagtgactcccataaagttcaaaattctattaataacaattcgacattactcagccttcatgacatctgggcctcccaaaaagaccggaggtgcctacttacataacttttcatataatggttacattcgattgacaacaactggccccacctgcatagcaggagtaggagcaacttgcacctcaggagcaagcattacgggagcaccctactgtcttaaac

SEQ ID NO: 80747 - DNA, 1760 bp, Cannabis sativa
acgtacctccattactattgcgacatgcgaaatgaactactataaattgtgtgtgtctctaattttttacttaaactcattatttatctcgtcaatctagcgagttggtgttgaccacttttcagcgtcaacactaggtatcgtattattaaagggtatcttagtaaaagtatacccattttattaaaatagaggttattttattcaaaattattagaagtgagttagaatgcaaaatgcacttataaaaaaggcccattctgccaattatttctaaaaacaataacactaatgttgattttcatataaaatagaaatatgtcattttgttcgatcttttcccaaccagttcctctaggtgtctcggttttggctttggtgtctctcggtttagtgttagtgcaaactattgctatgtacttaaaactagggttgagcataaaattcaaaaaaattgtttaaactgttcaaaccgacctaccaaacatcactataaccgaaaccattcaaaccaaaaattgaaaaaatcgttaacaattaaaactacccttaaatggtcagttcttatttcggtaacaaattgaccgaaaaaactaaaactgactgaatttatataaaacataaataaatttatatatgtatactatttaacttaagtttatgtatatatataagatatcttataattatattaatattattaatattaataaataaaaaaaatagtttacatatatatattctccaactgctctctctgtctctctcttgctcagtggttttctctctttgtctgtcaatttttcattacaaaagcaaaaatgtctcatctcatctcattccagtctcataaatcataataatagatcatattttcaaaaatctcaagcctccattctatgaataaatctcagagtgtctttttcaatatttatcatctttttctatcttttatattcatacaaaattttatattttctcatacattctctcaattttacaaatgttaaactattagagtataggaaatcggcaagaagaaaccagccaaaaaataaattccaactatcctttaaatttgataacactttacagagacaaaaaaaaaaaaaatcagtttcagcagtttgaactaatcaaactgcaatttacattgatcggttctaaggagttttttatattagtctgttagttttcagattacaccaatccaccaaaaatcaaatctgaattttcaaataaaaaaaattaattctcaaactttatttaaaattgaatagtgggttttggtcggttccacagttatactcctattacattgtattggggtttgatactttgatcattactaaattaaaaaataaaaaaaataaagaaatgcaaacccaatttcgcactaaaaaagagaaaaggaaaaaaagaagaggaaaaaccaaaagttgaaagaaagagtatgcgaaagaaccattttccttcaattgagtcaatatacaaggaataaccctccttctccaacaaggaacggaaagaaataaaaaagcgatcctgggttaggttttcctcagtcctcactcactcagtctcagacctccattgaataacactcaaaaatgttgctttcccgtttctccatcctcaccaccaccattgtctttttggccatcttccctcagttccgggtatgctttatttttttgtagtttcactcccaatttcgaattctttcttccttttctttctgatgtgatcatcgtctttct

SEQ ID NO: 80748 - DNA, 1651 bp, Cannabis sativa
gagaatggtgaagattcaggagcttgttcttccagtcacctcagaaaaaaagttgaacttcctaaaggggttgtggaatctctcatgcatggtgatttgaaattgccttattctgataggttcccattgcctccaactgtaccttgtattgggagttgtggggaagcttattactgcaggtaagcttcagcacttagtttattgttattattattattttgaaaccttgaatacttgtctttgatctttttctttaatccctagtaccaattttgtgagtatttttctagcaagtcatgtgcacaggctgactgggaatcatgtcattccttgctctgcactggtgagaagtcagaatcagtatcaagagaggcacttgtagaatttatagagcatgctaatggtaaggcttaatttgtgggttacttctgtcaatacctgtattatgctcatgagatttcagtcctttaatcatattctcgtcccttattagacatctctctttaattcacagaaacaaatgatatattcatcgttgctgcaaaggtatgtgttaaaaaaactggtgactatcaacttttaaaaaccctttcttatttttctcttcaataatagcatcatttggagtatttgttttgtcagattttatttaagaaaaggagtcaaaggacatatcataacccgtagccgaaaacaacattttgctatgtatgctttcacttaatctagttatgtggctttctttcctgatagcagtaaattattaaactccaggcaatttcttatactatattaaggtataggaagttgaaagcgactagtcttgaagaacaaaggaaagataaaaatgtttcaggcttcacagttccagctgcactctctgaggcatggaagccaatatcaatgggacacaagagaaggtattcaattgctagtgcttacttcccacgttattttgaaagtcaaactctaaaccctgacttttgcccatggtgttttgcttgtgtccattcttgagaatactgatgaatctgtattgaattgctattgttttggtacacttcagcaaagttagtttgtagaaattattcatctaagcatttattgttggactaacccctatttttcacttgactggttttaggtggtgggactgcattgcattgccagttgatgttgaatcttctggtgaaaatgcatttaggatgcaaatgagaaacctcgcctccacggtagattttacaacctcatatcttttgatcattatttatctttgtcaattttctctcaatagccttcgttcttacaatattggaagctcattttgacacttgattgtagtgaaccaaaattgtaataatacattttctttgtggtattattgaactaacagtgagttttatttgtttcagtcgcttgagcttcttaaggcagccatcttcgacaatgattgcgaaccttgtatccatccaaatgcagaactatttttcttgatctaattagctatatatgttttatttttctttctagttattaagttgaagcccttaattctgcaaagtattctctcttgaaatttatgggcacatagttggcatgtttgagttgaacaatctgtaagttacacttcctcaaaacttcctcaaaacct

SEQ ID NO: 80749 - DNA, 1483 bp, Cannabis sativa
ggtggttcatctattacccttctcaccgaaatattttgaaacgtttctctttgatttaactctggtaatgtttcagcaatatcctctctcatcgtccattgtccagtctcagaacaatatactgtgactgatgctattgttaacagtaccactcgaaatcgatccaacaaagggtacaaaactaatccacacgtatagatagtacgaagcataaaaagatgtggaggtttggggagtttgaacgattggtgtgtgaggggattggatatataaaacccatctgtttctcctttgattagtaatagatcatcaaaagtggactcaattttaagatttttgtagagaatgttgtgagacgtggtttttgttgtttgtataagagaattatctttatataattttatgagaagtgaatgtgggagttgatgtcgttggtggatatgatgatgagttactatgcgtttgaaatgttgagagtgaattaattcccaccaatgcctgcaaacgagtccacacctggctatggttttggaatctgggagtcgaatcagaatttcatttagcaagtcatctgtaaaactggagaataaccgtaatgcttgcctcttctttgtagacctagtttgcatcaccattgttataatcaatagtataccaatgaatgaatttacctaacctgcctccttttatctcttgatccctttctgatatacatatatacctatatatagggtaatctaatggttcaaattaattatttaaaattacatcataatttatatatatattttatttataattaattttaaatattaattatagatttaattaacaaaactctaaaccttactaaacctataattttttgagaattacctatttactctttttttttttttttgtgatttaggttgctcgttagttgctagggatttttgtgtgagattttgtaaaaatacaaaagaaaaaaaaaatttattttgaagtgtgaaaataaaaaaacttataatttttttactttaattttatgtctatttaaaatttaattttatttatattttttaattttaaatttatatagaaatatattttaattaaatatatttttaaagtaataattatagtacttgtagaaaattataatatattcaacatataataattaataagtacgtgctcttaaaataattaaaaagtgatgagttcaatcttttaaaattaatattttttttttctttctttatttgtatttaattcaactttttaattaatttaataattttaaaattttatcatattatcaattttattttttaagattataatgttcaatattataagcttaattattgataaaaataatattacctattattttaaaagacatatataattgaaaaaagtaaatgcatattattatatttaaaaacatatttgtaaattttacaaaaatacgtcgacactattttttttttttattttt

SEQ ID NO: 80750 - DNA, 683 bp, Cannabis sativa
tacttggacctcgaccttgctaccagccctggattcaacctcgtatttgacctcggaacccaaacttggatctggaccttggatcccagacccggactagcacttgaacctgaactcagatttggaccccaacccttaaccagggtccgagtctagggtcggggtttggggatgggatctaggtccgaggttagggttgacgtcatgtttatggtaaatatagtatgatttaaacaactcgttaattgaagttaataccgaacataatattgtactaaataatactaatataatacaatccaacacaatatcatacaacacaatacattacagtacagtgtactaaacaagccctaaaatttgtgtcgctatccctttttcatatatgaaggaaattaaaaagaaaagagttcaactattcataaaggactatacaaactcaaataacctgatttcagaagttcacttgttaatattatgatactgtattttaatctcttatctttttctgtatacgtacacagaagggtttggatttggctgaaataaggaacataacctcatacttaatatatgtacacaagaaagaaagaaacaatgttttaaagtggtaaaaggattcttttcaaaaaaaaaaaaaggtcttgtaaaagaattaacattaatggatagattgcatttaa

SEQ ID NO: 80751 - DNA, 1712 bp, Cannabis sativa
tattaatttttttcttcactactatgatggtatatctgttgtttaggtttgtggtacatggattttatatgctacggtttttatttattttatgttgttttcagtaattattgaaatataaagttatacacaaatatttaacaagactgattctttttttataaacaaatattaaattctaaaggacaacaatcatcaatttctataaaacaacaatcacaagaaaatgtggctgttgaaaaacaggtataaatttgtttcttatatctaacattttctaaacgtgtttaggtctaaaacatttttcttcaacaaattaaatttatttcttcatcttatttttttttttacagaaaaaagaagtgacggggatatactcaagaacaatggtataaaaaggcaagaaaaaagagaacaaccaacaagcaggtcccttgaagagaatgaagaagaattaggatacgattgctttaatgataataacttgtatttaatatttcatgcgaattttaaaatttttgtaatagatattttaatacttaaatgtgtcaaatatatattataaatttttatatattacacttttgaaaaaactaacagtatgacaatgttaatttagtatatgaattcttatattagttaaaatcaaagcaagtgttttaattcttatattctactaattatttattcagctaacgatcattaatcatttttctattctttccaaaatttctgtaacaatggagataccaagcttctttggcacactgaagtgtgcattctttaccaccattttgtacctaaaacttatactaatcctctctgctggtctgccttcgatcgaaaatgagtactcccttaatacaatcattttccactcgccaccaaaggtttctgcattagacattccacttcaattggaaaacatattcaccaagtctacaatgaaatttctatcggtgataattccggtagtacaatcaacgtcaaaatcttactatcttacaagtagcaacttttgaattgacgatatggtagtcccatcagttgagtctattatcggcaacttcattagatgtttttttcaatttattttagtttattttatcgatttagaattatcattatataattttgtatatataaaattcatcaaaaaaattctatatataaatatcataaaataattttatcatttatagagaaagagaaagaaaagagagattcatgaatctaatttgtttatgctactttctattacattttacaattgtactgctcttatcatacatctacaatcaatcaggaaggattatccattttacttcagtctcttcatcagttcattgttagtgttgaatcagttatagtttgggcgacattgagtgtctattaccagcatttcaagtctatcaccaccgtcccccctcaccaagagaatgaagacgagttgagcaccgtggcccctccggagaatgaagttacggagctgagcatcgtggcccctacggagaatgaagttgtaaagctgagcaccgtggcccctccggggaatgaagatatggagtccaccaccgaccaccgtggctgagcaggaactagttttactgttttttttttttgaagaaaataatcaactttattaattgcaatcattcatgattacatgaagcaaatcagtagaaacgtcattgcttgaaagagtacgatca

SEQ ID NO: 80752 - DNA, 1316 bp, Cannabis sativa
gtagaataattctcctaaattttaatcagtgataattttaattataatatacattaaattttaatcaatgatcattttaaataggaagtacatgacattcaattgtataattaagtttatattatagaatacaattccatgtgtacgtaaattaaaagtgagtcaagaacacaagtaattgatacaactaatgaggaaacatttatagacagggtacaaccataataccaatcttttaatatatattttggtaataatagaaatattaagttatgtctaagaattgaatttgttcctcctcctcaacctcaaactaagattatcatggtcgtagtgaaaagtagaaggcttgtcctcatcaattgttccaatctcacccaacccaacactgtaactccttcccatcattccataacccatgttcatcatcatcaccggtacatgtctcaccataattctttgcgttggcaaattaatgtgatcaaactctacatgattaatatcattattggctgatttttttacctcaatattagatgatgacgacattattcttctcaaatgctgatctctcatatttttgttgtcgtttttggttgacgaataaggaacagcagtagtagtacataattctacagcaacagcaacagactcagtacaatcattcatgatcttcatggctctgtttaaaaccctaatgggtgtcatcatataacgcttcaccttgctttccttcctcattttgcttcctctgctcatcatcatcacctatatatactccctcttgttcaaaatgtatatagcgatgatatatatatgtacataaatatgtatacatatatatagttggggtgtacatatgtaattttggttttgattttggattttcttgatttgtttggacttattaattgtttctgtttcttgagagtaagaggaatgttaatatggccgtttgaaaattttcaaaattgaaatacctatatataagacacgtgaaagggtccaaataatggtaataataataattattaattaaagtatgcataatactacgtacgttagtgttacaaatgtcaattttatggaggaaatggaatacaattatcggcttaatagttttatatattgagaaagataaatgcttgaacgcataaagaatgtctaacactacttatatataatgttttagattttttatttgtaattaaattttattggttttattaaaatttaagttgattggatagttttttgttctgttagccttagtgtagttaatgggcttagcatctgtgtgtaaagtctaggtgaag

SEQ ID NO: 80753 - DNA, 1079 bp, Cannabis sativa
  modified_base (801)..(803): a, c, t, g, unknown or other
atattctgttaaaccaagaatgttaaaccaagaaataccgttagataggcacttttaatatataaagatatatatagacattcataaatgattaattacatatgataatataataattatataaaatgaaaatagataaaggagcaccaagcaacagcagcagcttatgaggagcaaaatcaagtacatgtgacaaagatagaagaagtagagagaatgggaatgaataataataatattaattggaataggaatgggaatgttttggatcaattcccatttagtggagaagtgcaaccaagcagtgttcttcaacttgcaactcttcatgatcatcacaatcttaaccctaatcgtctccttcctactcagccaaaccttagggaatacacccttgactaatccttattattgatatatttatatatatatatatatgtacgtgtgtggaatatagtatatgtcacattttattctctctctctgtttgttattacttcattatatgtgtgtatacctaagcttttcgtattatgaacttcaatattcttcaaaatatactttatcttttgagagagatattcatctttgaaaatttctccttttttttttttctttttgttgcagaacactttttgatcaattttagttgagccataatatagttggaaaagcaaattgagtaaaaaaaacaattatatatcttttgggacagtattgatttttggccttagatatcaaaaacttcagtacgaacgatttgaagacctacatgtgatgtgtgtgtatatatatatatannnatatatatataatatatataatctgagatattataaacatgtacgtacgtaaatgtaattaattaatggggtacttttgagcttaatactaacctatatatatcgccgtagtacgtaaactatttaatgttgattagaaccccggcagtcatataattaatataaatatctattctatataaagtgtgcctatataattgaaattcttgatttatgataaatttatgggtgattttttatttttatttaataagatcggaagagcggttcagcagg

SEQ ID NO: 80754 - DNA, 1424 bp, Cannabis sativa
aaatactaatactttggagaccagtagagtcatatgggtaatgtattgaagttttttgtatattgtcgccacaactagtccattttctttctcattctattattaattaatttttaccctgaaaacccaagttcttagtttcatgcgggtcaatctgcttttaccagcgtatttcatgcgggtcaagttctttctcattctacttttaccagcgtattttcacgctagcaaaaggatgagttgaaaaatttgcattagtcataggacttttgccaacgtaaaattaaaagtgttgctaaaaatgacttttgatagcgtgtaataatgtactggaaaaaattagacttttaccaacacaaatgtgcactgagaaaaatcttatttttactagcgcattaattcgctgcaaaagtctagtttttaccaatacaaatgtatgttgggaaaagttttacttttgccaacacattaatacactggcaaaagttattttgatagatagatacaattacataataatgagtttataaaaccttgtaatttaattttatttttatttaatattctttaattttaaaaaaaaaaattaattatttttaaattataataaataaaaaataaaacataaaagcttaattataaaaatttacttaataaaacttaattttaaattgttctaaatatacatgcataatacagttatagttatctaaaagttagtaaataaatatgtgtttataataccaacataaatataattttttcaactaaaataaatatatactacatattggttgtgtctctgtcaatgtcattgccatggacattattatttcccacctttatccgactagatccagcatcatcaaactctagcgaggggaggtctatctaaaatctcagaatactcacactcaatttctggacagactcccgcatcataattaggtcctgattaacttgattttgctgaaaagtagctttcctttcttgaatagacattatagtctttccattctcatataaataaacatactgatcagttattgtggtatatttattaacaaaatacactcaaacaaactatatttcaccttgtatataagaatccttagcaaacccaaggaaccaacaaggtgacaagcagtcaattgaacaagaaatagaaaaaatttagctacaaggctgtatgacagtctcatttgaaggcagacaccatcatattctctagggtaatcagagaccctagaaatataaaaataagaaagtatatagaaaataaagaagagaatatataatctacaagctcatattaatagcgtgtgccttaaagactatataacactctacaatgcatcatatagaacactaagggcccgtttggttgatggtaatgggccagaaaagaatggaatggaatacta

SEQ ID NO: 80755 - DNA, 918 bp, Cannabis sativa
atttagtgaaatgacaaattattagagatggtctataatgagatgagtataaatagtagtggctatgtaatctttggccacattacacagtagcatgcatggttggtgacatagatattttaattttgatttcacttattacaccatttacattttttttttcttaaagaaaagtaattttgaaagttatcctataggttttcttcatagtgatgattcctatatatctagtagatattcatctagcaaaaattaactcatttattttaattttttttatatgaccattttgttactgttttacaaaacctgtagttcttgaaagaaaaagagttcagacaaacaatctctggcattaaaatagaagatggtgaagatatctcatatgaaaagaccacaacaacattaaagaggtcagtccaattcttttcagctttacaggcaagtgatggacattggcccgctgaaaattcaggcgcattattcttccttccacctttggtaggcccatttatttttttttttacattactattatcttttgttagttttctaatttatctatttatataaaactgagacaatcagacaatgatatgttattctaaaattattctaaaccattaaataattattttaatatttttttcaataaattataggaatttttcattatacaataaaaattaatatattacaaaaaaatataaaaaaacttaattataaaaactcatgggtccgatggtccgacgggtatagtccgatggtcccgatgcatgggtccgacgagttgggtccgatagtcaagttgcatgggtccgatggttcgattcgtggaggtccgattggaccgatagggtcgaaaagctttgcgccgtcgattgggtcggtcaccgtgggtcgactgggtccgtcacc

SEQ ID NO: 80756 - DNA, 828 bp, Cannabis sativa
acttataaaaaaacacagtaaaaacgtaaaaaataccgcctcacagtatttttgtaaaaaaatggcaaaagttagtataccatgaaaatttcccaaatattatgagttatttgtttgagtatttgtatttttaagtgagtgcacacactttttttattgttaccaaaatctttcaacaacataaattattttaaaagaaaaattgtgaaattgtaaatgataattggtgggaaaggaagtttaataagggtgatgttactgttgagatacaattttattatttgactcatttggcaaattaataaaaattctatatttactttttttttaaggagaattctatatttgctttcaaaaatagattagatttttctaatctaactgacattttgaacaagatttaaactgagaaattcctttaaaattgatttgagtctgtacatctcgatcttagatatttttaacacaccaaaaatgacaatagtgttgaacaacttgtcaatgaaaaaaaaaataatagaaaaacaaggaatttaggtgaaacaagtcgaaacttgtgaaattctttttaaagttatggagcaacacaagtgaggagtttgaatttggtccacttagattggggtgggacctaaagaaagtgtcattcaattctgatgttgaaggatgtaaattttgggctatgtggcctcaccaaaaccattatttgaattttgagtacttttactcattattaatcattttttaattctcattgcaagaaaaaaatcatatcttaatttgcaattaccatatgatgaaagactagagtaaactcactttagtatg

SEQ ID NO: 80757 - DNA, 665 bp, Cannabis sativa
agatgttaattttctcgctcattgtttagttaagatgacttttgatgttaaaatatctgttaggtgacatgaggatcttgcttctgttgctcgtcatttgcctgttttgttgtaattaaggctgaatattgagcgaattgactgaaattcgagtgaaaaaaagaaaaaaagtgaacatgtactgcccattcacgtgtggcgggtttgagttcgggttgggtggacccataatgtagtgtgttatgtatcacggagggagatggagaaattggagtgggtgggagtggacagtgggttgcttgcggctatgagagatttttaggttaaattttcttaggaatataagtaatgtattgtgtgtaatgtaataaaaaaatatattcgcgacaaaactacttaaactctataataagtgacatttaatcacacaaattgattttttgttaataaaacccttcaaaccttacttttgatgttatttacccattccgttcaaaaagttttgttaattgtcacggtggacatgccacagtgtacactacatggtcaatttttagtgggcgacacaacgacaaccctctaaatctcacttttgttagctatttatcccttcaaatcaaaatgttctaataagtgttacgttgaacatgccagccaaactactt

SEQ ID NO: 80758 - DNA, 570 bp, Cannabis sativa
cttcgaataagatcaaatcattttgatggagtcataccatctaccttgtgtcatcttcaatttattcaaatatttgacatttcattgaatagcatagcagggcttattccttcatgcatacaaaatttcacctctatggtagataaaaagaaacagagccatataaatatttggacagaaattcccatttatgatgacatttatttaacgtatcaaattgttacatcgattatgtggagaggtgcttatcgcgagtatagcaacactcttggattattaagagtgattgatctctcgagtaataatttgattggtaaaattcctaaagagttaacaaaccttgttgaattggttcaacttaacttatcaaggaacaatttaaatggcacaatccctatgaagattgggaacttgaataagctaaactctctagatttatcccacaacaagctttccggtgtaattccaacaagcttggcaagcatatctactctatctttgttggatttgtcgaataacaaattgtcaggaagaatccctaccggcactcaactacaaacttttaatgct

SEQ ID NO: 80759 - DNA, 1309 bp, Cannabis sativa
gaaagagaaagaggttgatgataaacatgtcattatgagtgagacctaaaattggtgaaaactcatttttatcatgatcgcttataaaaaagaccattctactcgatcaaatgccctgctcatgtcaaattttaatgttgtaacccctcttgcacctgctttcttattcttgatactatggattatctcaaaggccactaatacattatctgtgatgagtttattagagagataaacactttgattctctgaaatgactaatggcagcaatcctttatattgcatcgcaatcaccataaatgcttgattctattttcttttattatattaatttaatttcctaatcttattcatgtataaataagagtttacccaattgaaataaactagtagaaattctcattcacttactcattctctcttcatcttcttcttgtattctttattttatattatacttaatagttttataattcgttattagcacgagtctctgcccaaagtaaatattgtttgttaaagttcttcaagtattttgaagtcacggtgcactaaatatatatatactcatttgactggaataattttaagaacctttttatttttcttcattagattggatagttatttgttgtattagctcatattgttaatgatcaatatttaatagacttagcatatgtgtgtataaagtctaattaaagcagaagtatagacttttctaattaactgaaactgttgatgagcagacccaaactaacttggattatgtagctaaatcatatccctaactctataaatatatactgtcttatcataattgtatatcattttgataataagataaataaatttacttcggatttagaaatttagggagaaagacttttttttttgagtgtataaggaaaaagatttagtaaatagtattatactatcaaatattactgttattattcaactacaatatttggtcatgtcattatcagttttataaatatgctgtgccatattttgttttgttttataagtccaaactagagtttatgttcagactttcacaccttttacagggctttaaacgaggaagaaaagtatttgaactatttcttgcattcacaaaaatgtattgcttatgatttgtcagattttcttcattgggacaaaacctagactcgtgtgggcaaaatgggattgtgtagtggacattcagtttcattttattatatatatatttcaataataattccagtaaagcgaaaaaatcatcagattaaattatactatctaatccattctactttaacta

SEQ ID NO: 80760 - DNA, 1040 bp, Cannabis sativa
  modified_base (41)..(78): a, c, t, g, unknown or other
tactttatatgtgtttgtttcataatcgttttagaagttcnnnnnnnnnnnnnnnnnnnnnnnnnnnnnnnnnnnnnntaagatcctggtaaaataatttaccaacaagaaatgcccaaggacaaagccttagaagaggcagcccccagaggcgacaaagtccaaaactcgctaagtctccctccaagaagaagacatcgccgaagagaaaagggggtccgtattttgtcaactatatagagctgtctgctccacgcaatcacatttatacgatcgaggaacagaacggtgtatttagaaaacctccaccaattagaggaaatcgtgaaaaaagagatcccaagaagttttgcaaatatcatacagatattagccatacaaccctagagtgctggttccttcaagatgaaattgaagaattgattagacaagggaaatttaataaatacaaaaagaacggagaaagtcatccccaagcggatgaaaacgacaacacaaataatgcgagtggttctcggctccctcacaacattttgactattattgaaggcccacatgttggtggagaatctagaaaagcacaagagcgctatgccaaggaagcaaaagaaaaacccctcaccaacgtgaacaatctgagtgaatgaccagagaaattgttcaaaaaggagtgcgatgatatcaccttcatagaaagtgatgccatatgggtacatcatccccacgccgatacactactgatagtcacaaacattggagcggataatgtacatcgtgttctggtggacaatggaagctccgtcaaccttcttaactatcaagctttcaaacaaatggggttacacgaaaaaaatttgtgaccagtgacttcaagtatctatgatttcactggagatacaatcgcataaaaatgaatgatcaaattacctataactttaggaattgcccctgttactgccaaatcgatggccaattttgcggtaatcaatcaacattctacgtataatgtagttataagttgctccatcttgaaagaaatg

SEQ ID NO: 80761 - DNA, 1114 bp, Cannabis sativa
caaaatactacctgaccaaaaagaacatcatacgtgattatataaaccaactcatcttgcttctgcaacagcaatggccattattaagtcaatcaaattttaatgcacaccaaatgtttgtagaaatgcttcaataaatataaacacaaacgtacatatatatatatatatacacatattttatataccttccacttgctattgagaatctcagcttcatccaacacttcctttatgacagaaagatctgaaaaacacaacaaaatccccctaaattcgagccattgctaattaagtcgctgaagctttaagatgacttacgttttagtgtttcacaaactagagcaaaggtagccttcttgttcttcacagaggggctgtaaatgagcgacttgatggagccaacggcgcggcgccgagcgtcgccttgaagaaccagccggagcaccttcgctgcttctctcctagcgaagtaagccgacctctcggcattgctctggcggcgattttccgacttttccgccggcgcggcggaggagtgtttcgtctttttcctcacaggagctttcgttgttgtacgcgccattgttttacgacgaaagaaaaagcttcgaattcggaagtggaaagtggaaaccaaactcaaaaactataattccctgagcaataaaacgacaccgtgtttgtttcatttaaggcataaaacgacatcgttgtaagaggtattaatatatggtttttattagagtaatatgtgacataaatactttaagtttaaaccttaattgtaaataaatatttaaatttaatttttaacggtaataatactaagttatatttctgaaactgcataagtacatgacggttaaatgtcaacttattatcacgtgtcattttcttattggtatatttaaactaattttttttaaaaaaaaaaaaaattaatgacgtggactaattaggaattgccacgtagcaatttatttaatggttaacagctaacagcaaggcgtctacagaagttttagaaatataaattactgctaaaaattaaacttagtaattgagaattaaacttagatatttatagcgtaaattactcttttcattatag

SEQ ID NO: 80762 - DNA, 1062 bp, Cannabis sativa
aaaattgacactctacacaagtggtgcaattttatatttttatgagtttttagaggttaaatttttctaactatcgtttcactagcatttatgttttaagctcaaattttggtggtaaaaccttctaaattactgaattgttagcaaatttaaagtgtcacccgattaattaccactatgagctgattatgtgtatactcttgtacacatgacacgtttatattgatacacctattattaatattatttaaaaattatctaagaattcattttaaaataaaattaaattatcaaaataaaaagtaaaatatttaaaaaataaaaaaatgtgatatattttgaaataatttttaaaaaataatagtaggtgtactaatataaacttatcacgtgaataagagtgaacacataagcaacccatattgttggtagttaactataaaaaataaatgtcatttttaaatttgctaacaattcaatagtttagagggttttactattaaaatttgagcttgaaaagttaagtgcaagtgaaatgatagttgaggaggtttagctgcaaaaaaactctattttttacacattttacttcatcagattcacacttatcttatgttttcttaatgagtattactattgagaattttaaggtacctaacaccatactgatgtaatgcggtttaagtggttaacgattttttatattatctattaaatcaaaatgtgtgagacctgatattgatttgcaccaatagcggtatgtcacctcttgccccttagcattttcattctttatatatattttctattaggtaccatgtgcctcacatcataagtggtgctttataaatagttgacggtatattataataattataaaattaaattatgtgagcgatgcttaatctactagtgtacctttggcttttaacatttctctatagagcgatctattagacactaatggcacgtttactatacagtaatcagaatcggaataaattaatagagaaatgtaacggaataaatgaaaaataatcggaatcaatatttgtaatatgt

SEQ ID NO: 80763 - DNA, 902 bp, Cannabis sativa
ccagttttgtgtgcatgggtgaggacgcacacatcggaccaccacacgtacgcgcgcactgccgctgctgtccgttcgtccgtctgaccgaccgtgccatgccgagccgagctggcgagcgagtgtggtgtcactttattttttaaggaaaatttatttattaaattattattcatttaattaattaaaacggtttttttaaaaatgtgtttgattaattggtaaatagagaccacctgatttttaccatcgttcccacaatcgcatgttctaacgtttccttcagtaatatctttcttcccgttactaccttcagtgcattgcctatataatgcatctgaactaacgggagaaatacatctctttttcactgaaaatatataccatatatacattctattatatcacatatatattctgagcagtagtgagtttttgtgtgtggtatttcgacagtcctttatcgtgcaatagagttctgactgggttcttttatccgggggacaacgaggctaatagcctacttgcacataactgggcagtgtcacgatcgtcttaaagagagcaacctagtacgtgactcaacccaaattctaattcgataacttcgtctcttttattttttgcagcaattatttttataacataagtacacaatggtagtcctagttgtcagttaacggtaagttaactgatattttgaatttgcaaacagaagtaaatttaaggtggattttttacaaaaaaaaatatataaaagtgtatacaaattaatacattaggggcttatttggtagatcgtataagattcgtattgtattaaataacaaataacactatttttggataaaataatatattgtattaatcattacgaccttatattttaatacaatgtgaat

SEQ ID NO: 80764 - DNA, 3611 bp, Cannabis sativa
aaaattagattatgtcttatttataaattttcactaagcaagggtttaattgtgaagaaaagagaattcggagtttttttgttaattaagagactttgttaagtctaattaataattaatataaatggcaattttatttgataattatttatgattattaaataaatggttttgacatttataggattgaaatcggaaaaatattgtattattgaaagatggataagtggttaaaataaagtggtaaaattgtaactagtgagtcccattagtgtggccaaccacttaagtattttttgcgcattattttattcttttttaatccatataattaaattttaaaccctagttaaaatactataaaaggaacatgatgctcttattctcatccaactcacattcaacaaaactaaatctagtttttattctctgggaactagtagatgagatactcctttctatagttatttcacacttcattcattgttcttcatcaatttgagccatattgatagagtagcatgcccacacataacaagtaaagtactcaatcatagggcgaaagacggtggttaaccaaactgaaggagagaaggagatccaagctcagatcttgttattactctgtgacagaaaggaacaatgggtaagagatctaaacggaatgcgtcatattattcttgttccatcaatgcaagattttctaaacgcttatgtgataatttcatcgtattagagaattaatatttagtatgttaattaaacatacaaaattagtaaatctagatcctggtaaaataaattccaatctatgataatattatatcattttagttatcaaaaatttataaataatattttaaatatttaaataacctagatattcttgtcgaaatttgaaaaacgattaatttaagatattttgacatataatttggaaaattatcatatacttgtgagtagatctaacatcctggtaatataatttccaacaaagactacatgtccttatattgatcttgtttagaagaaaatcaactgaatttagtccaaatggatgacctaagagggctttgtgttgatttgcaatctcaagagttggaattagtctgtttgagattgttgtcagtgcaataagaaagataagtaaatgcatactatttataaattggaaactcaaaaccaagtttttaagaaaaggtaatacttacgtactagacgaaataatgttgtattgatgggagacagaccagttatccagattaatgcatccttgaattcaaacttatttggcaccacactatgatccttcaatcattcgtgtgggtcccgagatagtaaaaaccacctaatatttgtctccttgagggaacaaccttcacgaattagaaatataaaatttctaggggagttggacactcccacctcataacttggtataaaaccttcaagtaggctagaattctataagaactcagaattaactaaaaaagggaaatttcgagataattacgaaattccttataataatccctcagagggagtactgctcaagctcttatatgcttgaggctccaagtgcctattctagacgagctaccggtactagtaccagcacactcttctcggatcactcttttaggggaaaacaacaaaactcccccagagctacaaacctaacacgacatcctttttttatgtaatgccgcaagatcttagtacatctcccacatatgctcctatagatttaacatttgattcaatcagttcagcctcgaatgtgattgtgggatcctaaggggtcttggattttcgagcttgtgaagtcataattttgaaatataagtcacctagtgtaaaagcaacagtgactctaggtaaaaataaagctctcgcaaaagaaatagaagataaagtctgaggttcgagccaagctgcatctcgcaaaaaacaacgtttaccctcaattcttttttttttttttgcaaaaatcatttatagccacttgatacctcatcattattggctttaactagataatctctaatttttacatcatttatctcaagaatggttttaggaacataagttttgggttcgaatggaagggataaattttaaggacaattaatttctagaattcgggattgtgttttctagagaaaattgggtcatgtatgtgggcgaattttatctgaatttctagaaaaataaatacagactaacccaggaatctatgaatctaataacgtaaaaattttcttaaccctaaaatcacccaaattaaagaaacaaaaattacgtaaactaaacaaacaaagcagagaaatgaaacaacaaattacaaacacaagacttcaaatacagaaaagaaagatggtagaaacaagagaatgagccacttactattttgacgaagatttctggatagtgaaaaactttgtgattgggggttcgacaattgaaacgatgaattttgagattctttgaggatggaaatgtaattggattaaacacgctagaaatatgttaaggacattgagggcatgcatgatgaaagaggaaaaatcgtatgttgcagaggaaatttgaaggcttaaaatttaaaaatggcaaaatagaatgatgttcttgtttttgtaccctgttataaaacaccgttagaccaaaagaagtctggtctaacggatgggaacaatgcaaattaaaagagacggaatatttaatgctaatgatgtgcctcaaaattctaaactgccaaaacccaaagcatgcaatttttcgaaattgggttaagacgaaaatacccttgtaatcatttatgaaattctttttaatcaaaatatttttaaggggcaatttttatactcaaaatttggctacacctcaaaaattgacacatgtccaacaaaaggaatatgaatgaattctgaatgatatcataatgttatatcaatatatgcatattaaataactcgttattattaaataaatgattaatagatattattcaaaactctttgattttatagtcaaaagcgagacaagaataataactattcattcgagattagcgagacatatgcatggattggaatatacaaacaagaaggcgatattcatccacccgagcagaatgaatgtatcaaaactacctcgcattacatatagcgagaagatcacctcgcattacaaaagccacaaagaggacataacgaggtgaaaaccctcctaacacttagcgttttttcttattaagatggataagaaagaaactcaaatcagagaagatataacgttccacgtaagcaataaccatcaaaaggataaaactaattaaatagcggttgggtagttatttaatattatcccacatgtgatttaaatgtaacgtttggattgtccacgttccatgaacaattatatttgaattaatcccaaaaaagataattgccaacttatatccttataaataggggtagattccatgagaacgaggatgacaaatttgagagaaaatattattattcaaaattagacattgtattttgtacgcgaaaaatatccctcataataaagactcgtcgaatatgtagattttaattacaaaa

SEQ ID NO: 80765 - DNA, 1142 bp, Cannabis sativa
aaaatttaaatcttgtacttgaattctattttcattaagagaaatgctaaagtacttaaaggtgtcaaagataataaaatgtggtaaattattattagtgtaatttattattagctaggttcaacacattttaatgaaataaagaaattgaaaaaccgttgatacttacattgcactatattggtgtagtgttagatacttattaagtgtgactctaataagagttgctataagtaacgttgtaactcaacattgcccatgttgagaggattctaatagtaaaactcttgaaagatactaaaaaatctcttcaatatcaaaaaattctattacatttttaacaactatactctaaaaatatttcaaatggttagcactccataaatttgctaccatatcatctcatatattatttattataactttattaagaaaaaaaaaaagagaaaaaattagtataatgcacaattttaaaatcaatattattttttagtttgatatttaaacaccttcaatagttagctatttttaagtattaattagagatgctctaatagcaatacttgactttctcccttttaagtcataaaattcatcacataatttttagaatcataaatttaggtggcaattctaaataattataatatttaatatcataaaaatagagtcgattttaaaagaatgtaagcaaaatagatctatgcctagagcacccatcttataaaactcgaaaagaaaaatattttatttataaatttaatataataattgaatattaatttatactattagaaacactaaattatcgtagcacaatgacacgttgttgagaattagggttccatctcaaaaccaattatagtgcggatcagataggatcacttatctgcgaaagatatggctctggcaccatgttgagaatcatgaggttccatctcaaaaccaattagtgatgagtagagtagctcatatattcttatatatgactcaatattttactatttattcaatgtaggacaatgtccacaatacaagcccttacataaaagttataattatctatttatcatttaaattatttacactagatagttttttacaattatgtaaattagagtcaacctcaagtctatttataa

SEQ ID NO: 80766 - DNA, 1405 bp, Cannabis sativa
cacaaatttaaagttttttatggcattcatgatgacttttccccatatttgtaagtttttttttggaaaaaatgccatatttagggtaattaagtttttatgctatatatatcaaaacatatatttattttcccatatttttgtaaataacccttttatttaataaaacagaggatccaatcgataatttttgcaaaacacaaagtctaaaatggtatttatccaaaaaaatgtggtattgtaataaaatgaagaggttttggagttgaattatttttcactgtaaatttttgaatagtttatagtatttaattattttattgcatacaaaattttttcttatacttgaaattttatttttggtattagattaaaaatctatgaaattagattaaaaaattctactaaatgtaaaaaaataaaaaatgtaccagaataagattttagaggtgtactctaaagtatgaaaactaaaatgtttatttgcctttatgaaaacttaaaatattattgcatatgaaaatttaaatatttatttacccttataaagaaatatgcagcacacctctaaaaagttgttctaatctactcttgtttgttttggtatttataagagtttttagttttttttttcataatatttatgaccaacatataagattatgaaaaaattaaattaaaaagtgctcataaatatcaaaataaacaggtgatgtattgcaacagcccttattaggaatttactgtagattttttccaaaataaatatttgaagtttaacgttaaactattgtagaggaaaataataaagacacctcaaaacattataaagacacttaatttctataaaataattaatacatatttaacttcattactaaagtatataaattctgaaataattggtagaatagtctaaaaatttgactagttgtctaaacgtttcaactttcaaccacctattgaaatttttggaccaatggtctacagggtcggaagtgattttacaaagaattatcggaaattaagcccaaaaaaaaaaaatgaaaaatatatatgaaataggctatttttccaagggactcctaaagttttagaatgagggtatttaagaaaaataaaattagtttagataaatatggtaagaaaacttaataagaaaaaatatggtatttaaaataaaaacttaatatatatgggattgaattaccataaaaaatattaaatttcccttcatatttttttttaaaaaaaataaaacaaatgaaactacattgattgtcgagttgtcactagtgccagaaaaagcgtcggagtttactgttggtgctgggaaagttgccggagttgctgtcggcaccgaaaaagttatcggaatcgacattgtcgccagaaaaattaccgg

SEQ ID NO: 80767 - DNA, 1750 bp, Cannabis sativa
tgattttgggtatttggtcggtgtcttgttctgtttttgtatccctttgtgggcaatagttgttcatatctgtttaaaatctaatgagaatgttagttatagctattaagcttcaagtcatatcttgtttggttagcagctctacttaaacaaatacattttaaacctaatatttgttggtaatcaaacgacaattgagcttttatgagattctggcattgtcatgattgagcttttttgtatcagatccaagattcttacataagtttcttatattatttattattgtttagcttcttgaaacttttatcccctttggtgtttttgagttcaaaaatagttattgtgtgcatcaattcagtcaaaaacagggatataaatgtcagtatcatttatttggaccttcagtaaagcaaacacttgagatatatgaattcttatctcaagttacttcccaattcaattgctaatttggtgaatttgcaaacattaaaactcagttattgtttacttttccatgaactacctagagatattgagaaactcatcaaccttagcatcttcatatttcttattgtggtaaattggagtatatgccatgtggattaggggataaagctaaagaaattgatgagattgaacaacttgggaggcagattgggggtgttaagctgtccaactggctctcatcacatacaaacctagtgaagttaactttgaaacaattacactgtttgaagcatttggaacttgagaggttggtatgtttagagtacatatcgaacactaatgatatcagtgaagacttgcttagttctataacaatataagtcatctctgcaaacacttgagttggtatgtttgcctaatctgaagggatggtaaagaagttgaccattcttcttctgttgcaaatgcaaatgaagacaagcacatctctttgccttcatctccattcattttcttcattgaaaatagagtgttgtccaaagcttacttgcatgccactttacccatatttggaaacaaattttcatatagagaagagtagttggaagccatttgcaattttgcagaggcaatcagaatgatgatgatgatgatgacaagtattgttagatttgtattcccaacaacgtcttctttctcacctctttccaaggttagctctaaaagacattgatgatgacagttggatcatcaaaactatatgagccaaatataatgacagttcttcctaagggtaattccagactgcatccacaaccttaaatcacttcacagacacaacagtttttttttttccgaaatgagattatattatcttcaatgataaatgaggttatgagaactgtcggagttactgcattgccattggattggaggactctgtatcagaaaagagtaccttgagatgcaagatgaacttacttattaaggtcattattgggtgtgcaaccaaagtccgctagaaatagaaatgatcttaagtatataaggatggacactatctctattagtatgagactttttgggaaggtgtccaaaaataaagccgtgagagcttagagaagcaagaactcgttgtgtgaaccaagctatgcattggctgttttagcttctgtaagaactagagactagagatactttgaagctcccttgtgcagtgtttttgagtagataatgtgaagagtttcttggatttgtatatgagggaggagagtacttgttggtgtttgagtccaataat

SEQ ID NO: 80768 - DNA, 1998 bp, Cannabis sativa
  modified_base (1697)..(1710): a, c, t, g, unknown or other
ttgtccaatttatacattccaagtgtggaaacctgaaatcaaagaaaacaagcgtaattctattctaaaaataataataaagaaggaagcgtaattagggggtctggtccgggttagggccgaggtatgggggcccaagttagggttgagaagaggtatgaggattatgttaggggcaagggtttgtgggtccaggttgggtcaaggtcacattgtgggtgtggatatgggtgggtgcgactcagactagggttgttcattggatgacatccaatggatttggactcaaccgatccaatccaattatttattgaatattgaattttgtcgtccgaccaaatccaatcgaattgagtcatctgattcgatccgatccaatggatgtattggattggatcggttccaaccattggatgcattgaatggttttttattggattggattggatccatccaatctattttagctaccatttaagttaatttccttaaaaaaatacatataaaaaaatataatttaaaactttataatccaacatacataataaatattagtttaatccaacctaattctcatgatctcatgataataaaaccgctaaaacgtaaaatttattatacgcatggacaatttcattagcattttaaaaaataaaaattaatattttagatttaaggtttttttttctttaatatatgtgttaaatgaatattgaatcaattaatatatatatacttttaaataaaatatattaaatatataaaattataaatgtatttaaaaatatataaatataattggatgaccattagatgataattggatcggtttgttcggttatccattggatcggatgtcctatccaacaaccaatctgattggattttcaaaatttacatctaatcctatccaattatgattggatatctgattctactatatcagttggaattaaatcggtcggttgtaattgaattgaatgactttctgcacacccctaggtgcgagtatggggtcaaagtcaaagtctggatctagtgtacaaaacacctcaaaataaagtaaatattgatgaaataaagtaataaatataatatgattaaaaaatatatttaaataaaaatattctacatttctaattaaaaaataaaaactgtttaaacgcattcgtttaaatttccaactttatattttgacaatataatttgttaagattttgttgcaattagataccaatagttaaatttacataataaatgttgatatatctgtgggaaatttataattaaagtatagaattaaatcaactaaaacttaaacaacaaataattagtaatgttaagatcaaaaattcacacacgataatcaaagattaaagcagggatgaatagagtattgaaatcagaaacgataaaagaataaaataatacaatcaacactaagatatatactgcagggttcaagtcttatagattgatataatctatgactctactccagttctagaataccaccgaaatcttctttattgatggaacaaaaacatggtgttgggatttaaaaaaagtaattaatggataatgtatattagagaatatatgaaatacaattataagataaataatacattaattataatatatccctaaaaaaatacattaattataagattataattaataaatatctaaaaatnnnnnnnnnnnnnngagaaggtataatcttgtaaggacgtacaagagaattaagattatacgatatgaataaaataagtcagtactgtattaaagtaaatgaaatctttaatatggaactgctaagtacgatttactatacactatacttttaatgtgtgtgattttgatttggatcacgattcacatatctggatagacatgtagtgaaggtgttgtgtataatttgattatacatgactggaccgatatgtaataaatatatttcattaacgtgtcgtttaccatgaaagagttattcat

SEQ ID NO: 80769 - DNA, 1783 bp, Cannabis sativa
gctcaaagggaaaactagagatggtctttatcttcttggtgactcttccaattgttcaagtcctactctgcaatgtcatcttgctacatcagaaaatttttcttctgatttcaattgttctcttcaatgtacttgtaatacagattgtactcaagagtgtgattacacacaacacctctgtaatacttcttcaataaataaaaatgccatttcttatccctctgagcattctgtgtttaatgtttatcagcattcgaatattgatctatggcattgtaaattaggacaccctgctgtgtccacattacaaaagatcttaccctctgttcctcatactggtaacattaaacaactcacattctgcaatgcctgtcaacttgggaaaagtcatagactgccctttattacatcatctaaacgtgcttctcaacctcttgaacttgttcatacggatctttggggtccctctcatgaaccttcaaaagatgggtttcgatactacatccatttcttggatgattatagtagattcacttggatctaccctctcacattgaaatcccaagcttttgacaggttcattcaattcaagagtatggtagaaaagcaatttcaattgcctataaaaaagtgtcaaagcagatggtggtggtgagtacaaaccatttgctcgatttcttgctgatcagggcatctccttctctcatccatgtccccacactcatccacaaaatggtagggcagaacgaaagcatagacacatcacagagacaggtcttactttgcttgcacatgcaaatctatctctcaagtattggtggcatgccttccaatgtgccacttttacaatcaacaggttgcctactcctgttattgtctatattagtccctatgaatgcctattcaaaaccaagcccgattacactatcttgaaatcttttggttgtgcctgctttccccacttaagaccatacaactctcacaagttagatttcaagtctgagcaatgtttatttcttggttactctcctgctcataaggactatttctgtgaaaacaagaatggcagaatgttcattgcaagaaatgtcatcttcaatgaacttcactatcctggggacacatttcacagtcatacagatcaggtacatacttcccctcatactaattcttttccatctgcaagtttttctactatacctgtcactattgatctttctttttctggtctgacaaatgctgctgcaacaacaatacaacatcaccacactcctgagactcactcaactacaccctccccaacacccttacctgaacctgaccaacaaacagcaaccatacctgaccaacaaacaacacccttacctgaacctgaccaacaaacaacaaccatacctaaccaacaaacagcacccttacctgagcatacaccagaaactgtgcctgaatcccacaccatacccttaccagagactcaacaaagatcaagtgttgctacttcttctgttcattcaactcatcctacgatcactcgatcgaaaaatggcattgtcaaatcgaaagcttacttggccaccaaacacccattaccagaatccatcttaccctttgaaccaaagtcccttcaagctgctctgaaagatccaaaatggctcaattccatgcaaacagaggtgcatgccttaaaaagagcaggcacatggacattagttccaaagcaacctggtatgcacatcattggaaataaatgggttcaccgcatcaagctcaatgcagatgggtc

SEQ ID NO: 80770 - DNA, 3926 bp, Cannabis sativa
tacagtgatctttctgtggactatctcaagatgttcttattgaatgttccagcaactgttattgctctaggattgtaagtaacacttcttttcctaaattacattattcatataatatagaaaccaacctctgtaatgttctgctcttggatcatcacaaactcacctaaaacactaaaatggtcatattttcatactattttactatttcatttccaacttattgggcacaaagaattggttttataattgaaacaaagaatttgttagagacgactttaaacttttttttatatatattttaggaataccaagtgaagtttcagatgctagagtttatagttagttatgccgttgtttcttttcttttcttgaatgaacagtacagattattaaattttcattaggtgattcactccttactaagttgatggttaaatcacaggttttttttcctggatgatgtaactgggtttgaaattacttatcttctggaggtacatatctaaaactcaccactttcctccatgtttcaagctacaaattcttgataatactttgtcttgatgtactttaaattaaatttcatagctaaactttgagtaaagtgatgttgattctgcagctgccagagccatacagtttcattttcacatggtttgctgctgtaccactcatagtatggctagctcaaacgctgacgaatgcgattgtgaaggactttttgatcttaaaggttagaatatacctctgcttttcactttcatagtttcatgattggtgtgtagttatttgcagtattgatgatatgtatatattatataagattcttcatttttttgcgtagggcccttgccccaactgtggaacagagaatacttccttctttggaaccatattatcgatttccaacggtggtactagcaacacagtcaaatgctcaaagtaagtgtgaatcttctttaaataaaagaaaagtacaaggtgaattgtgtacctcaccaatcttggattgtctttttctattttagaactaatacgtcatatggaaaacggagaatgctaaaactataagaccaaaacttataccctccccattcactcaaccaccaacaaaagaagacattaattaaaatattattaaaaattgtcttatttttatttgggaggaaatgagaatatttttctttcaataaaaattacacttcatgcactgtagcacaatttggcaaaaaaatgtgccaaataaagtcttggaacaaatggttaatgattttacaaactttacacaatgtattggttctttttttttttttttggccactatgtcacaaattaaaattaactttaataattgaacccacttatgttaccactattcattggggtttgaatttcaaacttttaccaaaattaacttttttttttaataatttactaacgataagttttactcagctgttcaactgaaatggtatatgactcaaactcccgcctgattaccttgccagaaggaagcaatgcttgatttacaggtacatatttcagatgcatcgttcaacttctatttttcaggctagcaatacacacgagttttgctaattatacttgtaaaataagtgcagggtaatgcattttacgagatcaaaggcttttatcagtgtcactgtagccaatgatgtcacaagacctgtattcatcatcgttttagtggagaaggaaaatagtcttcatttttgtgcagttcagtgacatcaaatgtatggactgtgaatattgtacacgtgtatctatgcttctttacaataaccaaaagcctatttgtaagggtctaaaggtgtttaaaatggggagggaaagaattaaattatgaacataaaactaagcaggctccttaactgaaaaatagattatgcaatcagtgatggaatttcacatataataacatcacttgtaaaaatccctagctccggttccttttgttttttcacttacaagagcctttactccagtcccgctgaatgatatttctttaaaatagcctctgattcccttctctcagttttttttctgcttccaaattccccatgtaaaactaaaagactaacaatatcatatatagagttttttctttgatattatgaaaattttgatcacaaaatattcgaaacaaggtgaataagcatgcaggcaccatatgaaattaagtatagcttttaagcagtaaaagtacaagcacaattatagttcaactgtattaagcttaaatgttttaacatccttaaacctacaaatcagcacttgcaaggcactagagcataggaaaaaacatggcatataaacaacacctctgcacagccaaacaaccaaaaagctaacaaatcaaaggccccttcctaatcaaacctggaacactagcttagaaaattcgtccacgagttcatcctctataggatggcaacatccaagtaatctccaatctgcatcatcaaaacaatcgcaggtaaaaacatagtagaaatccacatggaaacagggtcttttttctttatggattacattgaacagggcacgtttcttgactcccccagcatattaccgcaatatatagcttagctatcactattatacaagtcaatttcgaaatagagctagtactcttctaatgctaaccaaccatctagtaaaacgggttgaaattgaaacatcagtcatgattaaacaaaaattgcttcctacctggaagtcaagttcacccaaggcctttccatcatctactcgtctcccatttccaaaggagtgtgtcattccaacctacagaaaaaggccaataaaatccacaacatcttagtatcaaaagaaatcatggaaaaaccatattaagatataatagattcggacttctactcactagccactgaagtgtaaaaaacaacaaaagcttctaattcactataccagtttcaacacaaaacgaccccgtttatccgggtatacaaatgcaaaagacaattttgcatttcttctccttgcagctggagctacttctttcacctggaaaacaactaggatcaatcagagaaccagcagtgtaacataaatttagtcacacaaacgtgaaaatgttacttcttggggtcaatggtttgaaccacatacaagatcagttagctcacgaagagttgcatctttccaagtgtaaatttgaacctcatctttaggttctttgcctcttactgcaaaatcttcttcactatggtgacctccaatctacaacacaagaaaagccccatgagactttaccaataaatatttacttatatctttcactgcccatttacgcaacaattatgttaagccactaaaccatctgaaatgccttttgctcatactaaagtttcttttcttttcagctccagttaagttaacaaatatacaacattacataaaaagaactaagattgctactgcattgtcaaaaattctaaaccctagaaaattcgattattgaaacgcttttaaaatttaatttttttaacaaaaagattaataataatttccataccttagtgaaaacccgaagcaacaaagggcaagtctgcaagaaaaggaattaaaataattcagtaaaataaacaaatgaatagtcagaaaaaagagaggagaccgggcaagggaaaccttttcgcgatcgacgggttcggatctagggcgagggggtggaggtggcggagctctggactgaggaggcggaggagggcctggcctaccactgccggaaccggaaatttgcccggctcggctgtgggacggcggtccaccaatcttttcgtccctgcttctcttctccattgttaggtctctaaaacctctgtaattcagtttgatgtggaatgttattcgattagggctatacaagtcggtct

SEQ ID NO: 80771 - DNA, 3009 bp, Cannabis sativa
cctacttgcttaggaaagctacagtgattttctagttattgtgtacacctttgttagtcaaaatgtttctcaaaaaatgtggcaaattaaaatatttaattaaaatttaactttaataaatacataactttacataataattggaatcccgtataaaagtttacaatagtgtccaaaatatgcttttacataagtgtcgctctgcgactacaaaacgtaagcccatgttgtcccaaaactgaacattccaagcttaatcgtcctaatatgtacaaacatcctcaagttctgcactcattgatgcttaaccttcgcctttcctttacctatatatgcaaatatatatgtgagtcaacacactcagtaagaaatgcataaaacatatattaccaacttgtatgtagcacccatacacctatttactaggcttaacagatgaataaacaacgttctaaatggaagtacgacttgttggtttgagttgaggatatatggtaaagtccaaatatttgggtcatttgtgagtcatattatttatttccccatattgaacatttaggcagtcgagcaaaaattttgattcaaaatagcaattgagattttagaggaaatgcaatgtagtatagatagcaaattagcaatggtggcttacttagtgtgttcgttcttattttcttttttgttttagtctttactcaagggcgagcaaaggttaagtttaaagaaatttcttagatttattttaatgcatttctaagtgcattttattatgtgttttagtattttttatttgtttttttattcaagtttacaattgttttcttcttatttcaaattttaatggtcaaatatattatgtggatttaaatgagagaaaatatgttaaataatacaaatttaatggatttagcatgaattttagagttttaagataaaataggtgaaaaattctaagttttggatttcaacaagctttgtttgtaatcgaatataatatcttaagcttaaagttgatttttgactataatccattcacttctaggaaaaactttatgaatgaaagttctagatctctttttctgcttttcaaaacatctagaattgtccaattttgggttatatcgagaaagttatgatcaaaataatatcgctcattgtagtagaaaataaaaaaaatgagagaactgcgactctctatccaatgtcacgactcttgcaaaaaataggggaaccttccaaaattttgtctataaaacgagttggagctaggtgttctgtatcattccaacttggaggctaatttttagcatagaaggaaggctaggagcagaagacaccaacagaggactccaaacagtgttctttctcccctatctctatcctaaatgtgtttggacacgtaattttaggaataagtgtcaaaataatagtgtttatctccttaggaaggtgacctgtttggagaaaagagttgatagcttcaaagatatgttgcccaatatgctcccaattatcttgaaaaaaaatagcttgagaatccgtcagcacctggggccttgtctctaggtattcgaaaaaaactttcctcacttcttcctttgtgaaatctcccaataacatctctgcttgaattggagttacaaaaggaccttgttgaattacaccttttaaaacagttttcctattgaccaatttatcaccaagcaaactttgataaaaagaaaagaatgtttgttgtacctgagctggatcatccactctaatcccattctgttttcaatggagagaattctattttgcctttgtctagcttggatactgctgtgaaaaattattgtgttttcgtctccacccttcacctaattaagcttggctatttgttggagaaaaaatttcaaagctttgtgcaattctgcatatttagttctcgcaacaagttctttgttgtgcaattcattattaattggatctatttgaagattctcttgacacttaattagagaagcctttgcttgagcctcagctacttgaatgttggagaaaccctgcttatttagctctttgagtacacccttaagtgctttcaacttcaacacaacttgaaacattttcgttctagtcattgttttctgctaagtcactctcactagatctgaatactgagggtgagaagaccacataagaaaatacttgaatggattcctaccacttgtgcttcgggatgtacagtcagtacaaccggcgtatagtcaaataaaccttcaaacaataaaacacttcagcattgttgaatttggacaaccattgctggatggtaagaaccctatctagtttaaagtagactctatcattcttgctgcttgttattccaagtgaaaaagcttccactatattggacatctttgagttgacacatctcaatacaatctataaattcagttgttggtctgtggcttattctcttaccaattctctcttctttcagcaaaatctcattaaaatcgccaaatactatccaggcttctctagttcgaattccttgcagttcctgccaaaaaacttttcttccctctatgtcattaaaagcatacacaaatgtacaaaacaaaattattcttgtcatctacagttgaaacaagtaagtgcacaagttgactagtacacttcagaatgcttatgtaaaacttaatggattccatgccacaattattcgccctccatcatgttaagcaatgttttatgtgaaacaacatccattgaacatatgtacatacacagccccaacttttttgggccttgactcttgtctcgaggagaccaacaagctcaattttttgttaatgaattaacggcctgaccacgcttcgcttttgcttatcgttgatccctcggacattccaacttagcactctatccatttcgaagaggaggtactcctgttgcgataatttgcacacgcaagtgtacgtatcgtttcaagtagtaaactcaccaggagtgaggtcgatc

SEQ ID NO: 80772 - DNA, 1136 bp, Cannabis sativa
ctttaagtcaattatatttttcataaaagggagaaaaataagacaagtatgagtaatcttaaaccatcaagtacaataacagtgtcaaagtaacatagtgtaaatgatacagaccctcaaatatcaataaactgaaatcttacttgttatttcaagatcaacataaacttatttaatataaaaaaaacagaacaagtgacagtggattacctgcatatatgccacagcttctgaaacagagaacagtgtgttgagaaactcccatttactctccttccggagatccactaattccctcccataaatctcacttcgatacagagaagtgaagttcaatgacaggaagaaaagaaaaaaattctcttttacaaaacatgtaccgaaaaacataaaatttaagcctataaacacatactaggatcacaagggtagtagtacagtgcagccaatctttttaaaaaataaaatgcactagcggtatcagttagtaactcgaagattacttcctggaaaaagcataggatgtttatcatgcgattttcacttaataccgcgtgtcattactgtaatttcatttgatagaattagattgaaagagaccaccatagctcaaacagagctatgtcttccatattgcaggaaccaaatcaacaaggttcaaaatgtacctcacagctcgagtagataacattttggtgccatgcatagccctttttacataaccaaatcgatcagccttaaccaagttccctttctccttatcaattacaaggcctctaataacctatacaaaaatgatgaaacaaagtatttgagattacaaaggaatgagttaataaaaggaacatatcatttacttaaacaaagttggtaccaagtcagggtcaaaagcaagtccatctacaggaaaacccactttcctcagattatccatacagtaatcataagctcttccttcccaagcctacaagaaaaagaatccatgtaaaacaagaaccccccttcttcatacttccaattaaatgtagtatgaaaaaaatggattttatcctagtttatctactgtctcaaattgataatggtccatttagcagcactacacaaacaatataaggagaaaaagtaatgtttaccat

SEQ ID NO: 80773 - DNA, 1659 bp, Cannabis sativa
ctactacctcaatttccatgcctcctactgagatgaatggtcagacagttatcacaccaagtgctcaagctccattgagtactcaagttcaaacagtgactgctagtgttgataatgtctctgctccattgagtactcaagtttaaaatagacacgttgttgtcatggagcttcccagctcaattttgcatataatgcttctccaacaatggttgtttgtgttgataatgtctctcctccaactgttaatcaacatcccatggttactagaggtaaatcgagaattctcaagcctaaattctttatgcttcgcttgaacctcgctcacttaaagctattttgtaagaccctaactggtttgcaactatggatactgaaatggtggctttaagaaaaaatggtacatggatccttgttaatctacctgaaggccgagtccctattggttgtaaatgggttcataagatcaaggaaaatccagatggccctgtgtctaggtacaaagctcacttagtggctaaaggttttcatcaacaagagggatttgatttcaatgagacctttagtcctgttattcagcttgtcaccattcacattgttcttactataggatttacaaaagggtggtcgattcgtcaactcgatgtcaacaataattttctaaatggtggcttgaatgaggagatctatatggttcaacctccaagctttgttgatcctttacaccccaacaaagtttacaaactccaaaaggcactttatggtctcaaacaagctccacgagcttggtttgagaaattatccatagccttacttagttttgggtttgtgtctgctcagtatgatcattcattgtttgttcgcactactccaatacattgcacttatgtccttgtatatgctgatgacattcttgtgatagagagtcatgacaaggttgtttcctcacttatctctgaactaggctagaccttcgctcttaagggtgtacttgaatgatcctctccacatagcccaaatgcaaggtgtcaattctcaaaactctccaatgaatggtagccttcggttatctcaatatgagggtgagcctattactgatgttacactttatagatcagttgttggtgcgttgcaatatgcaaccattactcagcctgaaactgcctttagtgttaacaaggtgagtcaattcatgtatgattctctctccttacattggattgcagtcaaacacattcttagatacctggctgggacacttgacttcaggttactcatctctttagcctcactttttcatcttgaggccttttgtaatgcagcctgggcttcagaccttgatgactgtcgctctacgactggtttttgtgtatattttggaggcacacttgtttcttgggggtctaaaaagtagtccactatttctcagtcttctagtgaagttgagtttcgtagcctaattgtgagtgttattactgaagttacgtggattcagtcccttcttcaagaacttcattttcctttgtctgtgcctcctacgatctagtgggacaatttgagcactatcatgatggttgttaatccgattcttcacgctcgcaccaagcacattgagatattgatctctattttgtccgagacaagatgctttaaggtcac

SEQ ID NO: 80774 - DNA, 952 bp, Cannabis sativa
tgaagagcattaaaaaaaaaaaatattaggcactttattttattttttttttgtcttttattttttgggcctgtgcaatagtctaatttgcacctcataaggtccattataagagagtacatcataaaaaagaagatagagaattcattcaaattagttcattatccaccctgaatgcacgcattgctaattcatgattacaaatatgaattagggacgactcaaaaaaattagtaaataaattagtaaaaatctctaataaaatttttaattaatttaatgcatataaatgatctcgtagagagacaaagaactaaatctaaactgtgtatcttgaaggaaaaaaaaagaaagaaaaatcatgtcaaagatgaatccaacaccatcttcttgataaaataaataaaaataaattaatatattaaaataataatatatattgaagtaatacccatcaaatttattatttttagacaagtaatatcccatgattttaatataaagccataacaattcaatccatttaattttaataaataatggaccaaaacgctgtgacgtctcacaagtcacaccagcttaattgcaaaacttaactaagtaaaaacaggcacttaaaaccatttatatataacataaaataagcatatacatatactgtgaaacattagagcaggtgtctttgacacttgattattaaaaaacattataaatgtactgatatttattttttcaactatatagagataagaatgtctttcactccatcaaaaacgaatgtacatatatattcttcaacatttattaatattactcattaaagattaattattgagattttgtttttatatcatatatatgtcgttttgatcaccatggtagccactctggaagattattgagtatagactgcatttaaaatgaaccaaaaaaaagaaaaaactaatcacgg

SEQ ID NO: 80775 - DNA, 2091 bp, Cannabis sativa
tattatcacactagtgcagcaagaaaccaatttcttagactggtgcgtgactgttttcagcacactaagcacagaaacccggagactattttgcattttatgttgggcaatatggggtgcaaggaatgacaaagtttggaaaaacaaagcctctaatgcctcctttatttttgcattctccacttgttatcttgatcaatggaattcggctcaagctccttacttggagacatcacagagaagtttagtggctggggatggataagactgatggtgtgcacctaatgtcaatgaaatcaaggttaatgtggatgcataaatatttgggagtatccaagactatggttatggaattgtggctagagatgaacatggctttatgttggaaggtgtctctccactttgtcatggaagtgtatgtccggagctagctgaggcaattggagttcgtgaggccctaagttggataaaagacaaacaatggccgcatgtgattttacagacaaattgtctgttggtggtacaagcaattcctaatccaattcatatgatctctttatttggtgatgtaattaaagagtgtcaaaacttgcttgtgagtttaagtggtgttgctatttcatttgtgcaaaggtcagcaaatttagtagctcatgcgtttgctaaagctgctatttcttatcctgatcgtattttcagtatgagggatgtcccaactgaattgcttctgtgtttggttgctgaatttgaaagttaataaagtttgattactttcttcaaaaaaataaaacttgtaaattataatatataaaatttaaactaatataatgtaaaatttatataataataaatattatagttttatgtttattattatattattttaatattttattataattttagttaacatgttcttttgtattaaataatttgtattgttattattaaattttatatttatttttatttttgtattaatattattaatttatattttttttaataaattattaagtgaatattaaataatatttaaattttacattaatatttataatgatatattgaatacaaaattactttttttttttttatatatatttgcggcataaatacaacatgttttcaattatatacacttaaatatcacattttttattttgacggattaaataccttaagttacatttctattacttccgtcactactatttctgtttccgttacttcagtcactactatttctgttaagtgctaatttggcaagtgagacactatatgtcaatatatcattagttcacatttaatttttttttaaaaaaataattaaataattaataaaaaaaataaatttaacttatatttattttaatatataaaaaagaatttttcctttttgaaagtagataaaaaagatttaaaattaaagaacagattattcaactaaaaaaaatgaaaaactaataaaaatttcttgtatctctcttaattccctctctttcttcttccctttcttcatctgtacatttttttttttcagtttcttcaattttttttgaacggtcttctgcactctcaaactctctctcgcataatgttcacaacttttcaactgccactcactatttttatcgacgaatgatctctccaaaactaaatatgcaactccaacactcagatgccacaaaaatccaaaaaaattccagatgtaagatatcaaaacgcgcagaagaaactccaccatttttaccagcgaaggttctcggtggtctagctttgtagcgttttgggttgcgggcgtttgggtttgaggggttcgcggggaaatctcagattgaatgggattttttgtattcataaataagtagagttttttttttatatatattttaactcatttcaaaccgtgagtttcaaatttcaaatgggggtttcaattttgatgatgataatgtacaatcataaaagagtttattgtatttttatttatttatttattttgtctcagaacccactgagatttaaaacaaataaaaaaaaaccatgttattttttttggggtaaatagcgacaaaccccccccccccc

SEQ ID NO: 80776 - DNA, 1318 bp, Cannabis sativa
tttttttttttttttgaagaacagatatagtaatttaaaactaaaaaaaatattcttttgaatgaagaactttggtttaaaaaaaaactaaaaaaaaattctccaaaaaaaaaaaattatttatacctaaatagatggtcacgcccaatcattttagtttgttattttattttacactcacaacaaaaattttacaaatgttatctgcacatttgcttttctttatgttttgttattaactaaaagaataaataattcaaaggaaaaaacagagaagaagaaaaatattaaagtttattaatttctcttccaaatcacgtgattatacatgaatgaatggacataatcatcaagttaattctgtataatgttatggccatactgtggctaggtaggtgtttacccacaattaaattggttgtatttctatctctgtcattcctaaaaatattttatgtaatgaccgaaggttttttcattataatgaaccatcacttttcaaaaaaaaaaaaaaggttaattttgtttaaatgtcctaaagttgagaaaaatcattatatgcatgatgttatactagggctaacaaaaaaaaaaaagacaattaaggacaagatttagtgttagtagtttttttcatatatgatttttttttataaatattttaaaataattttttatatatttttacaaaaatttacataacaactaataaaataatttaaattggaaccaaatttcacataataactcacatagaaatcaactaaccaactactagagcaattaaaaaaaagttaggttgaatatatagagtaataaaaaaaataatatatggagtaattaaaaaaaaataataatgaactaggctacttatgacattgcctaataaataacttctccaatgaataatatttttctttaagttctaagtccaattaataattcaatcttctagattttagctcgtctataaaataattaatatatatctatgtatctgtattactaattatatatgtactgtaggatgattctttcaaactttattaaatttacgtgtacacatttcaaaataattattataataatgaagaaacgatcaaaagcaaatagggtatttaatactctatgatatattaagagaaatgttagaatgtattagtggtctagtgtccttttatgtgttatatattattattattgattcaattaaatatcaagttttatataatttaatgtaataacttgtagggagtattgtcagtcaatcgcaaagcgacatgtctacaagtgctagtcactactaatgcctaataac

SEQ ID NO: 80777 - DNA, 522 bp, Cannabis sativa
ttttttttttgaaaaaaaaaatacgtgaagcaccaaaaaataatttaaatggcaattaaaatttatattaaagcccacatgaaaattatgggatgaacttctaaaataaaaataacatgtaattcacctattttaattaataaaataaaattgacaagacatcagtacacattggttgttttgtttaaattaaacaaaacacactaccaataccactgccttatgtcgtctgctgttaggccatggattggtggttatctttttaataagaatattttaaaaaaatcataaaaatagtgtttgtatcattattttatttttactttgggagccattgtttgtatcattattactttcacaaaataaaagggtttttttttttacactttaatataatattttttgtatttttacggaattctatttagaaactcctattacaactactgctgcaacctaaattgtaacaaaaaatcgtataaaaacccctattgcaattagtgctgcaaccactttagaaac

SEQ ID NO: 80778 - DNA, 1143 bp, Cannabis sativa
catcctcatttggcatcattcttctacaagttgctataatgttaaaacgggttatcaatttgcatctaatttggctgctcaaactgaaaccagtacctcttcttcttctgctaactggcagctttttggagcctcaaattaccctcgaaagtgcctatcttctcttggaaagtcttccatgaggttttaccagttgctacagtcctttgtaaaagacacattgctgatgatccaaaatgcttactctatcacaatcaattggaaacaataaatcatgctttgttttggtgcaaccgtgcacaagcagtatggaatcaaatagatcttgttcttgatttccatttgtcttcatatatgagcattcaagattatctagtccatgtttcaaccaagctttcaaaagatcaacttgaacagttcaaaatcatcctctggtgcatctggtttgaacgtaatgctgaaactcatgaaaagaaagctaagactactgtattattacttcggtttgctacttcctatttaacagactacaagaaagctaatacgaattcgatcacagcatctcatgctacacaatcttagccaaatcatcttttaacacaaccaactgtagaggcccctcgtagctgtaataaaccgaagtggttggctcctccctctggccgtttgaaattaaacacagatgcagcatttgatgcagcaaggggacgtattggaattggtgcaatattacgaaattcactcggtaacatcgttgcttctttcattaaaccaatctccggtaatttcaatcagaagaaatggaagccttagaaattgtccacagccttcaatggctccttcaaagtaatctggatgtccactttgttgaaacagactctctcattgtagtccaaggactgcaacaaatggctgaatatcgttctgcttttcatgcaattttaaatgatatacgaattcttgtatccaatttcccacgagtactcttatctcacatgttcatcgaatagcaaatactgaagctcatgtgttagctaagtttgttcttacggtggatacaaattgttcttggttggaggaaaatccacctccacttatgactattatgtaacttttctgtttaatttatataatggtcttttc

SEQ ID NO: 80779 - DNA, 801 bp, Cannabis sativa
taataataattaacttaattattaatacatattttgcagttatataatactatacatatctatatattttatatgtgtttgattaataattagaaagcattgggaaggtgtagcctcgcaaatatggtttcatcatcatttgagaacaaattaacaaggagtgaagtaattcatattttataaaaggaaattataatttttttttcctaaatattgacatgtattaaattatgtccttgaatttttaagatggttaaaattttttcttgaattattgagatcgctgatttaagaatttttgtccaattttagtaaggaaagtgtaacatgaattaaagttcagagacatgatttggtacatatgtcaaagttcgagattcatgatttagtaggtatcaaggtttgaggagcataatttagtacatggacaatcactgaattagttaaattgtataaaattaaacaaaagttctcatatccaacaatatcaataattcaagaaacaaaaattctaattaaccttttataaatggtattaaaactttatgtctattataaatgtggagcctgtaacatcctcttacgatttgatcacatgtgatttatttagatcgccatccttgaatcacaatttgactctttacttttgaattttatactcgcaagagtagttttctttagttcaaatatcttgttaaaatatggtttaaaaagtagggttaatactattttgaatttcgtattttacaaaaataactgattggactctctattttgtaaaataataagatcggaagagcg

SEQ ID NO: 80780 - DNA, 1448 bp, Cannabis sativa
actattggtataattaaatatcatattccatataattaaatgtaataacttttaagaagtattgctaaccaatggcaaggtaaaacgtgctagacacaccactaatagcaatgcttaaaaaaattaagggtatttctacaatagaccccactaaaatgagtgcactagtgcaacacctaactatttcgacatttaaaagaatttcttagtctaattttttataatcgtgtacgttatagttatttaatacattctttaaaattttaagaaattcaaaatactttacaacataaaatttaatattcaaaccgtctattttacacacatataaaataaaaaagttatgtgtccaacacactctttgatccatattttttagcatgctaaatttttttaaacttcttaaaattttatagaatactttaaatagctacaacgtcgaccataaaaaaatttaaacattgttattagacactagcaattatattatttcttaaatatattttcttaaattaacttttagcatttttctaaaattaattgtatgtcaagggtagatcatgggtgcagacaaaaatccaataatatatacttggtttttgacaattccgtataaaaaaacaaaaataaaatggtaaaataaagaaaaaaagaaaagtaaaaaaaaaaaaataactgttgggcgttgattcccctggtggggagtgggtcccaagaagagagaattgagttgaagtgggttagggtgagttaatctaggttgacactgctttcacagattcgaagaacccccgcgcatcgcgcgcgggctaacacccccaaaagatagaaaagcgtcactgtcaaccgtccgattgtgtctgctgactcaccaaaacgacactgattgattgtcgtttatatgtttgtttattttatttgttaaaagggagagtcttttctaacgtcacatgtctgtcttgtcactgatgaatcgacgttgagtgcgtcatccacgtaagctaacctaagctaaggtttatatctctgacttgttctgtctctcctccaccaccacccgttaccacagactcactttaaagtttctcaacaaatgttagacttttttattacacgtgttaattttacattggtataacatcatcgtataattatcagctccacattattatttaatgtattatttattttaattataaatattgagataaattataattttaaattttatacacttaaatacttaatgtttatttttagatgcaaaaatacctatttttacaattttcttacaccattactagcacttctgttaactcatatatatataggcatgtgaagagttcagatacattacattttttaaaaaaacttaatattcttaatatcaaaaactaaatgctacttgttttaaaaaaaaaatcgattctcacaataattttcacatg

SEQ ID NO: 80781 - DNA, 1000 bp, Cannabis sativa
agaagagaaaagaaagaaagaaaaagaaaaaaaataataaattatttttaaattatttatttatttatttttattaattaaaataatggtttggaccaataatatttcgacacgtgtcaattttaaaaagtaaacggttcagttaaaaattaggactaacggacaaataaaaatataagtttagggactattgccgctatttttcgaggttggagacttttttgtatcaaactgaactttttgaagatttttacacaaatctcatatatatatatgaaaaatgatacccctcatatcgataacttatctatatagatagaatttactgctattaggtgttttaatttaagctaattagaatatttatcttttgaattttagtacatggacaatctacaatcattaaatcagtttaattgaatgaaattggacaaatatctttaaatccaacaatttcaatataattcatggaaatttttaactgaaaaaaaatccagaggcatcatttaatacatgttaaaattcaaataacaaaaatcctaattaactattagtttaccaatactaacgtaatcctgctatgtataattagtagtttaattatttatttttttcttattaattgtcatcttcatttcacgtatgttttttttttttttagattttttttaattgtaaataaacaggcatgcatcatgtatttcttattcttgatagcaatttttttcttttttctaagagaactatgttaactgcagagtatatttacagatgaattcattttcaagagttattggaaagtagtccattttgtgggtagtagtactagtagtagtaggtttcataaaaatatatatatttaaaaaaaaaaaaacaaaaaacaatcgaccaaagtttttattgttatacgatttgtatattaattacttgtttaaaaaaaaaaaaagattttttaatttttacacttttttttttatttttttgcattcttacagaattt

SEQ ID NO: 80782 - DNA, 672 bp, Cannabis sativa
tgatttttttctctggcgcgatagataatcaattctgacgaattttctggcgccgacatcaactccggcgacttttccagcgccggcatcaactccgacgacttttccgagaccgactgctacttcggcaacttttccgagaccgaccgctactccggcgacatttctggcaccgactgcaaattccgatgacttttccggcatcaatgacaaataaaacttcccaaataaataaaaatattaaatatgagatttagaaacctaattacatatatatggcacatcaaatgctataaaaaaacctaaaaataaaaaaatactatataaattggctaaacttaaatgtgtcatattatcataaaaacttttaaaattccatactgtgtaattttggccaatatatccaaccgtagaagaagtctatgggggcaatttaattagtccccgcctattattctcaacatgcaagcccgtcactcacggtggacacatggcatttcctaattatcatataaatgtatatatttttcttatccaattttgactaaatttatatatatttgttgtttttttttttttttgataagaaatgacttaatttatatatagaatagatatgttaattagttaagtattactatatatatgtttatttatttatggtagtgaact

SEQ ID NO: 80783 - DNA, 1261 bp, Cannabis sativa
  modified_base (940)..(944): a, c, t, g, unknown or other
ccactgtctcatattcataacttaaaggtgcaaatgacatccaggatctccttggggatgcttgctgtcagatttttccagccactttatttggaacacctcagagattgtatttcaagctaaccctgggatcgatatattcctagagcgagcttgtagaggttttttacaaccaatttttcaggtcctgtcaatgacaaatcgaggctaatgatctgtctgacattaagcaacaagacgagaaatccctcaagaattacatccaaagatttttcgatgtcaccggtaagaagaaaatccttggcgaggatacaaatgccatggccttagtagtcaagttcaaggagatgatccccttgtggtcagaccttaaaatgaaattagtctacatcatgaacgagtttctcgatagagaagatgacttatcaaactcgaggaagccaaatctcgagttaagggcttaaaaataaaaagaaaaagcaagactctcttgctcccaagtcttgggcacagaggggcagtggaaaaggaaggaaacccaagggaaaaaaagggaaaaagaaagactcaatttcaagctttttaagctcttaaaaactttttgattctcatgttagattgtaatatttttggtattttgatccacatgacagttttagaatgtataatgtgtgacttcttgatggaaaagatttaattttggccttcgttgtgattcttgactctctgaatcataaagaacatgaggcatgtaaagaccgcttagcttaaatttagaaattagcatataattaggaattaattatggaaattatttattaattctaaataattaatttatgatgatttatttgaattcagaatgcatttttgtgttacatatataaatttcatgattttactttttcagtgcccgacaacattggaacgcggtgtttgnnnnntagaatcacatcctagtatttttagtatagcaggacagtttagttagacattgggaatgtcgggattattcgagattttagaatttcccaaaatacccttagtgccttttaagtggttttggtaatggaagggcaatatagtctttttgccattagtagtttgtcctttagtggacttagcttaattaataaattaattctcttttatgggttgtatgctaatattggtatgttaataaatcataatctattcatttttataatttttataagaaaataagaaagtttccaaaagtttgcatttcactctctctctc

SEQ ID NO: 80784 - DNA, 528 bp, Cannabis sativa
aatattacctatgttacatatgcataatgagttaacaagagtagcatacatgtttctttttttctttctttacttactataaaggaacaaggatgccatgcaacctttcccggttacgaaaaatgaaatgaaatcgccagagccaaagcccgagcccccattatttcgtaagggaatcgctcaaacatccgattttcatgagctactatcattttccaatctttcatgaaatcgaacggattcaacctgaaacaataagcactcgaataaagccccccctacttagctcatactcacggtcgaccctccttcctgctacgtaacttaatctttggcctttgttgcccacctgtggaggatttaagatcgtttccactgttgtcgtcatgtctggcaacgatttttaaggggtgagcttcggtgttgaacacccattgatctaagggtatcaccgaagaaggtgagaaaagaagatagagatacttgagggtctcagcaagaaagaagctctgcatcatgttgtctttc

SEQ ID NO: 80785 - DNA, 1876 bp, Cannabis sativa
catgaaattatgtctattttttattatgtttatgttgacatttactgaaaattagaggtatcaactcctttttcttaggctgctaacttaggcactgctacctctatttgcagataaacaacgtgggaacaaatataaggaaaccgatggtggagttcacggctgaagagttttctactctcatggcaacaaatttcgaatcagtttttcatttgtgccagcttgctcatccaccacttaaagcatctgggaagggaagtgttgtgttcatgtcttctgtgtccggatttgtgtcattgaagtccatgtccgttcagggatcaaccaaaggtgctaacttgtttgattgtagtgttctttcatgtttacatgtgctgttaacttgaatagttcataactaagctgcaatctttctgtttattttttcattcttaggggcaatcaatcagcttaccaaaaatttggcttgtgagtgggcaaaagacaacataagaatcaactctgtagcaccttggtatatcgaaacatcaatggtgaagcaggtatttttattcactctgctaatgtgatttttatttctgaactaaaggtgtttagagtcgatgatttggttattttgttgcttgctacaatgcttagcgctaacctgttaaagattttgcttcatatgaaaagtaaagcttctcttaccgcatctttaaacacctttaccttattgaactccaactgttcagaattctagagacagaattagttgatacccagaaagagctgaattgtttctaatcaaacaacacagtgccaacatataagttttactatctcatctgcccaatatcttagagcagcagactcagtttctttcaattgttacattttaaaacattgcaagttcttagttaggaatcttccaaaaaatttctttggttactcttgactttgcaatttcataggtactcaacaacaaagaatacttagaagaagtgtatgcaagaactcctcttagacgacttggaaatccagaagaggtgtcctctgtggtggcattcctttgcttacctgcatcttcctacattactgggcaagttatttgtgtcgatgggggaatgtccatcaacgggttttaccctacccatgactagaagtcctgaaattacaggcctttctgtgctcaatctttgtgtgctttctccctccctgaaaatccagtaggcaacaaacgtagttaagagttcaatgatggaagatattaggtatgaatctgagagataattattctttttgcttagagggacatttgttggcttttgaatagtcaattcaggtagtggaataataatactaagttgtttatggaaagtaaaagaattccaatttttgcagagcaaaaggaaaaaaaaaaagaaatcttttgattcaaagatcacttctgtaaattctataattagtccgagcacttggctaatcctttataatatgttaatagcttttcccaagctctgataaaagccatttttttttagtgtcgattataaaatggtgaaacatttagggcttgattggtttgagatttaaaaattgtatttttttaaaagagtgttttggaaataaaaatttgaattttgtatgcgaaaaattgtttctaaaattgtgatttattgtagtgtaattttgtgtttttgagttataaaaagttagatttgtgattggttgggaatctcaaaataaaaaagagagtttgaagagtttttagattcaatgatttgaaaacatagaaaacataaaattattgttttcattttaagcttaaaattcaaaatcatattcagatttagcttttgtaaacaccaaaccaatcaagtattcttatgtagac

SEQ ID NO: 80786 - DNA, 1267 bp, Cannabis sativa
gtagtatttttcatagaacaagattcagaatgtttcccaagtcatggtattcaagtcataaccttgggattcgatctcccatcagattcgggcatcctcccgcaacatgaattatatttcctgaattgttcgtacaatgtctccaaccgattctccacatcctgtggcacaaccagaggtgccggaggaatagggacatgagcaggtcgagcttgttgctctcttagctctctaatatgataccttacttctatatagtctcttgtattgcagcatacatttgttcttaattttgaggtggtggaggattttcatcttcaccgccaaccctgaacccagatagctcgtggttaagcctaccaaattgcctcgggtgcattgcataatacgcctgtgatcacagacttttcacaatttagaactttcattcaatcaccaatgctaataagtatctccacattactcaaataccacatcgctacctacagttcctaccatgctaatgaagggaagtgttaaaagtcattttcaaatctagaatttttttagaatgttttaaaactttctaagaaatttgtaagagaaatcaagaacactctataaaattctagagaaaacttagaatcacttgaactaagattagatagttctagagttgtttagaaaatagtatgaagcaattaattagttagtaaattggaacattctattgatgtaccccctatttgtttcgacatttaggagaattttttagtccaatttttttgaaggctgtctacgttgtagttatttaggacatcttataaaattttgagaaattttaaaaaaatttgtcacgtccaaaatagtgttcaaataatctatttcacacgcgtataaaataaaaaaatctcgagtgcaacagactgtttgaaccctgttttcagcgtgctaaattttttcaaatctctcaaaattttacaagatatcttacataacaacgtaaacgataataaaaaaaaaaaactaaaaaattttctcatatgctaaaatagacatgggtgcatcgatgaaccccttttagatatacattgtaaaagtattcaacttttagtagttatttaattaaaatatatttgactcaattaattcatcaatagtgattggaatagttttctttttctcagacatcagttatttaaaaccaagataattgaattagaaaaacaacaaacaagatagtccacccaattaaagatagtatatatactgtcaaaaaaaaaaaaaa

SEQ ID NO: 80787 - DNA, 1284 bp, Cannabis sativa
tattaataaacaggtattgatcccaatttttcatcgcacctattcatattcctaagttcctatcatcaagaaaacaaaggctccaaagaattttgatgaaaaattagaagattatactattttaaaatcgattctatagattctgacacgcttccagtaatctttaattttatttttgattctcatgaactaattaagactaaattcagcattgttttgtgaaggacactgttacataggatagttgttgataactgtcctaactgtttttcagttagtctgttgtattctttctgttaagagttgttggttctgttgcttttggttggttcaggatcttgtatataaactctgtttttccacactcttgaataataatacaactctgttcttcttctctttctctcttaagattaaatactgacacggtatcagagcttcaatcgtttatcaatggagaatccgattttagcaacaggtggagcatcaagattgaacaatgctaaaacacacaacaatcaacaagttcctctacctagatcatatcctatctcattcaaccattctctgtcaataaagctcgatgagcataattttcttccctggaaacaccaagttctagcctcaatcaaaggaagtaaactccaaaagtttcttgatgatacgcgtgcaccagcaaaattcctaacagaagccgatcaaagatcgaacattatcaatccagagtttgaagaatgggaacaataagataatcttcttgtttcccggcttctatcctccatgtctgagaaaatgagatttatgattggaattttcttgttgggcacgtctccaatccaatttcaagataatattatatataatatagttgagttgcctttcttggattacaagtttcattattctatattttttttttatttttatattattgtattttatgccagttccccttaagttttatttattttttttttttgaaaatttaagtttaatattttaatttaaaagtaccttttttttaataattaaatgtataattttattttatttttatgccacaaatattatttttccaaataaagaaaaaacaaaactatttctacataaaaatattatgagttattagttctattattcctttatatttgaaaaaaggaaaaaagtaagaaaaatgtagaaataaaattaaaaaaaaaaaaaaaactatacattctcgtggaaaaaaaattatatatccaatttaacaaaatattccatatatgaaaaattgatttttttttt

SEQ ID NO: 80788 - DNA, 756 bp, Cannabis sativa
taatttgaaagagtccaaaataatatttactctggttaacatgatcaaatgcatcaaccgttttcaagctaatcctaattttgaagcttttaaagctcaagttgttcttttttacttcgtcacttatgagttctccacaagtcattggtgatctctattaccatttaacaccatatcattttgaaccaaatccattaatagaacaagaaccacataatgattgtttctttaccattaacttaaatgccaagttcattcttgctccactacgtgatcgtcaaaatatggaaaactcaattactttttttagaaaatatttcgctaatttcatacgagacattaatgaagaacaacaaaactgaagccctagttaccattcaagatatgcttactgaggtctatctttcttctcttgttcctcttgctgatgaaatcattaattgcggtagagagatgatgaacaagtattataataatttgaatgaggaagtcagttttaatgtttgtgttgaaatttgtgttgatgaactacctcaccttgattgggacgacgacgacgacgacgatgttcctattcattaggtggcggcgagtgaatagtcaatcaaaaaattagaaaaagtatgggtagaagataatcccattttttgttcgatttgtttggagaatgtttcgattggattggaagctgctaagttatcatgcactcacgtgtattataaaaatgtgttcttaagtggctataaattagtaaat

SEQ ID NO: 80789 - DNA, 646 bp, Cannabis sativa
  modified_base (27)..(30): a, c, t, g, unknown or other
tctggattacattgaaatagagttttnnnnagggcataaaacccaacagccagatcctcttggttcgccaccttggtgtctttttatcatgcttaagcatttggacttctatcaagtgatacgttgggcatggtgacttggtcttcttcctgtaagctgtactccacatggcatccttcttgcctatgtggacattccacgtcatttggacaaaaattgggataataaaatgatataatggtaagtttataatatcttttccactgttaatatcggtctattgcaatgtatagccgatacatccgatattagtttcctttactaatgttgtagaaaaggcattccactaagttaagtgtactaaaccttattaattattatcccaccaacttagtcttcacaagtcatgagatcataatctttaaggctagtgcactcaacaatgaagtctggtaatgcatgtcctttgaggctggtagatgatctcaaactgacctagtttaactacccacttcagtaggcacccttatacttttggcttcatttgaacttgcctaggtggttggaagtaaggccttagtgttttagaggccagtaccaagcagtaggttagcttttcaatggggggatgccttgactcgaccca

SEQ ID NO: 80790 - DNA, 1616 bp, Cannabis sativa
  modified_base (26)..(28): a, c, t, g, unknown or other
acaatctcaatagttcagggggaatnnntaacggcaaaaaaagttcaggagatatgatttggtacatgttgtcaaagttcgagaggaaaaaattctaattagcctttattttttacacatgaaaaaattataatttgtttaatatgatatatagttataagaaaatcaaaataatcaatatataatttccaaaagagaactaaaagtagccatttgcacacataagataaaatatgcatggaagcaactaactgattgagtcttgttctcggcactattaattatccaaaatttattgaaattggacaaaagtgatgctcctaatatattcatatattctgcaaatcttaaaacaaggattatttatttctaatcaaactaatctatttgcagcaaaagttcaagataacaacaaaggaccattgttggactggaacatgacaaaagctactccatttgaatatggctccggccacattcaaccgaaccgagctatggatcccggacttgtctacgacagaactgttaatgattacttgaacttcttatgtgctcatggctacaacaaaacatcacttcaacttttctataataaaccatttaaatgttccaaatcattcactctagctaaccttaattacccttcgattacagttaccgatctaagttcacaatcagtgacagttactagaacagttaagaatgttggctcaccaggcacctacaaggcatatgtgaaagccccaattggagtttatgtatatgttaagcccacaattttaaaatttagcaaagttggtgaagaaaagaaatttgaagttcttttcaagccaaaatttgttggaaagcctaaagattatgtgtttggacaattgaaatggtcagatggaaagcactatgttagaagtcctatagtagtaaagtactaatttacaaaaagaaatgagaaaacagtgtggctgaatgttatatttaagaatcttaatgcaaattagtacatgtattttatgtcatattttatttaatataagtatttactaaagaaaaatatcttacaacacactacaaaatatttcatttttagtcacaacaaaataatttataatatactcggctggatatgaaacaacaattaatacttctcaaacccttcaccaagatagaataaagaaggctctatttagtatacctgaaactaaatctcctagcacagataggtttgagtctggttttttttatagttgtttggtcgaaaattggtgatgaactctgctatggtatcactgagtttttatgcccaagaaatttcattcaactcaaatttctctcataccaaagcacgataacccgtctagagttgtggactttaggcctattgcttgttgcacaacaatttacaaatttgtttccaagctattgtgctctcgtcttgctaaagtgctacctctgttggtgaatgagaatcaaggagcgtttgttcacgggagatctttagcatataatgtgatgatattgcaagattttttaaagaactacagaaggaaaaatatctctcctaggtgtgacatcaagtttgacataagcaagacttaagtgagttgggacttccttgaagc

SEQ ID NO: 80791 - DNA, 2476 bp, Cannabis sativa
cacagaattaatttgtcgtttctttaatttctatgataaacaagaaagccgttgaaattcttaagctgtaagcaaagcaagaacactacaccatcccaaattatcaagcccccttccagaaactaggttgggaaaacagaaacgcctttacttaatctaaagacttgcttgttgtaatcgattctcaattcctcataatcaagttcaaatcttgggccgatataatcccaaacaagaatttaattctagagcgaaaaaaaagatctcacacttgtttacaaacttccatccacagcttaactaacagacaagattaatctgcttattaacacaaattccacaatcaatttacttaaagagctcaaaacggatctattcatatcaacaaatacacgataaataaataaaaataactaccgaaacccaaaaagagaatattgaacagaaaaagagagaaaactaaccgacatcgtgagctactacaagagatgccagaaagattaaacgaaggaccagtcgatctccgtaagaaaatattgaacgaagagttccaggaaaatcaatccaagacttcaagtctactgcctgaaaatgaaagaaattttggctcaaaaccaaaagcaaaatggtcaagaaaaatgtgattttatgtttgcactttgcagtaagaatgggggcttgggtcgtggatggcacgtgcgaaggttggggttgggacctggggtcgtggatggcacgtgcgaattcctcaaggttttctttcctcgacgttgaaacgcggaatggagctggactccgacaaagctttagactctctatgctggtcccacttttttgttccgcatattcacaaatctgacgagtgctaatcttaaccgcaggatttaattgtgatagattcatctgacggctgatatgattaacgtgagagtctcgccattgtgattttagtttagatgggctacaaatttaatatttaataatggaaacaaattaaatcacaccagccgtttatatataatattaataataatacttccaggacttctgacaaagagcaagtcgatagccaaagattttattaattttagtgtcagtttattagagggtacttaacattcaaaacattaataactttttttctaatatttgtttttcctcttaacttttttagattatattattgaaattgatacttcctataacaactttgtttaatatatcatatatttagtaattttgagcttatgataatatttttattatctatcttaattaaaaaaaaaagcttaaaaaaaatttagaaagatattgagttaagcaagatgagattttattatttaaatttgtgtgtctacaactaaatagacaatatataggccatttacaaacagaaacaacaaaaatttaaattacatccttccctcagactatctatatatgctagtgtaaagacgtgtttgaggcacataatccccgtcaaaattttaagttaattatatattttatttttcattaattacgtttaaataaagatagtgtgatacaggttctttttgaaaataaaatgtatcatctgtcatgctatttaaatgtaagtccataattttttctaccattatgtactaataaaactacacataaatattaatataaaatgtaaggttatatttggtttgatgtaatgatgattgtattggaatcaaaattactgttataatttttatttttttaaagtgatgtaatgagattacaatgtaatggtgattacattatccaatagaatctttattatattggaaaagctatgtaatgagaattacattataaatattaaataaagggaaattttatttacacctcacaaaatgataagtacaccctaatatttaaaaaaattaaacttaaaataatttttaaactatatatatttttatatgtatattttttaagaatatgaatcaaaaggaaattgaaaaaaaattaatataattaaagatatataatttatataaaataaaaattattaaaataaggtgtatttataattttttggggtgcaaataaaaatctccttaaatgaaataaaagtaaaaggactcaaatactattttttatataagaataaaaattaaagtaaacataattttgtgaatgtatcaattattctaatatttattctaacaagaaacaaacatcctaattaattctctaccatttttattccattatattactattttactattccaccaaactaaacatcacttaaattctataattttctataatattatttactaataagaaaataagaagaaaaactaaaaaaaaaaaaagacacaaaatcaaaaacaaaacaaaatacatgaaaaaaaaaagtaggcaaaaaaatgtaaaaatgataaaagaaatcatccatatatatatttaagaaaatagagtacattaaaggagagagatttttttttttttt

SEQ ID NO: 80792 - DNA, 2430 bp, Cannabis sativa
taatatgttgatgttctgctagtataactaatgaattaagatttagaagtagagaaaagcactgatgaagaaaatagatgagtaaacttacattaagtcagatactactcctaagataccaaagaatatagagactccagttcctacccagagagacaacactatgtgttctccattcacaccgtaatatgcaagctccatttcaccaaaaactgatcataatccttcaacaactgccagtagtgggttataaataaaacatcattaatagaagaaaactaattgaaacacactctgcttttctgtttggttgccgagaaaatttaagaaagaaccaagaaatttcaaaaacctcaaatcatccagtcttactgcttgcgatgctcaaattttcatttcattatcatgtcaaatcaattcaactttcaaatattcaacaaactttctacattgcctacatgttgtacgacacccaactttttgaaagatggatcaatacgagaagttaaggaagtgtgcatagacctgaagcaagagagtaaaggagaataaagttcctctagaaacgaggaaatgaagaggaagacgactccatggtcaaaaacaacaggagttctgctactgctgctgaaattcttagaggcgtaagggaataaagcgattgagaagacatgggccaagaataaaagagtatacagcgatggatttggctcccaaatggagctctcaataaccacgaccattgattctctccactgaacctcttttgtctggaaaatcatccccaattgtttattaaatttacgattcacgtacctaaacatcaataacaaaaatagattatcaaaaaaatccttcaagtaacaaaatttaagcagggaggtatatgatctaggtttaaagaaagtactgattcatcagcgatgtcttcccaaccctggcaaaagaattatacaaaccatatttcaatacaatgatcaacccttcattatttcaaatcaaaacgcaaaattcattctaatcaatacataataataaaaaaaaaaattacgcgctgtcgccaaggatgatcacctttaggaacatacgcctacgagaagccattgatggaattaaggttttatgaaaatcgaaataaagaatgagagaaagaggggtttgaacaatgccaaaaagttacatttaaattttaataggttttaacggagcaggatggttctttcggggttaaatttaacagaatattcttttatttgtaaagtatattctgttaaaccaaaaaataccgttaaataggcacttttagtatataaagatacaagtgcattggcaaatatgttttactcgtttgccatattggaatgtatgatttggtataaaaccaattcgtatatatattattggccctccacgtggactgcaatatatggtgaaagatatctcaccaaataagaaagtgaagaaaaaaataaaataataaaaaagaatcaataagcaaataaacaaatcacttcacttcaactaaaaaaaaagcatataaatagaaaataattacttacccaatcatggcactccactcggaaaaaaattattgtggtcaacttttttttttggcaattgaatatgttcttatctgagtgaaaataaatatatccaataatataaacttacttatatataaatataggcaaccaattttgtgcccagaagtgaaaaacacggattgcaatccgttgtacggtaagtgggtcccacggtacatgaaaatattttttaatttttttaatttagttgacaaccggttattctaggtttggtaaccggttgtaaatttgtttttttaattaaaaaatgaaaaggtacaaaaaatgtacaatcaatttactgttggtgttagttatagtatgaaaaggtacaacaaccttactgttcgtggcagttaatagtacaaaattactgtagatagtaggtccatgttgtcggagtgaggttattttggtattttcattcgttcatatcatctatgtatatgtggggtggtagttgagtacattatatcacgtaccgtgtatattaattgtttatgcatgatatttagtaaaattagctagtgtacaaaatatcacgtatcgagtataaaatatcacgtaccgagtatgttcatttatttttcgtagtatattgttaagaaaaatttgttataactcatgaaattatgtgttgttatatgttcagttttacattggtgtatttttttttattttaattattttgtaaattaaaaattaccacgggaatatagtttttcaccttataagattgatttttcttacctataaaataatttagttgttcgtcaataataattttgagatttgttcaagatgagataattaccttaaacacgccaaacataacaagaagtatata

SEQ ID NO: 80793 - DNA, 1075 bp, Cannabis sativa
ggaatcaaacccacctcatgcatgtctggggccatgctaccacttcaggactattttattgattttttagtttttgttggccttgtgccttaccaacttattcctcaagcttatcgcctgctctcaggcttgtacattttttacgttgccaagagctgggccccgcccagtccggctgaaattctttatgtttacgaacttttatccgtccccaagaaaggggacaaacttaaggatggttttctcaaacttcaggcccatcctgctaacgagggcccgataccttataatttccagaagaatgttaagaagtattgtaaccagtttttcttctccttcggcttcaaagccattgagtgcccggagctgctcactgagtgggttagagtccctcccatgtaccgcacagcccctactcaactctttcttcaacacgccaaagtcttctccacctacgataaagacgggttgaacgtaggggacttggtcacgactgtaaattgcaggagggctaagttgatttcagagggccaatcggtagatgacttcaatttatccaaggttctctgccccaacattcgcaatcctgagtccgagaaggtgctccgggaagatattattgcctccgaggaggataggtacaagaagtacctcttcaagagggaccaaaagtcagcctatatcaaggcccaagctgcctcggggagggttcttcatatagaagctgaaaaagaacaagcgacctcttggcccaagttcccattcccagttcctaatgttggggctcttgatgtcagcacttccgaagctggtaagtccccactaattgttcatcacgttccttctgttcatgattattctacttgtaggctggtggaatttgatgaccggctacataagtttaggatgccccattttcgatggggtgatcacgccaagagtgtaacgctcgtacttttattaaaatattaattttgtttacaagcgttaaacgcggaaaatcactatgtcgcatttttatttaatacttgaaaatgttcacaactggccagttttcgtacaaaagacataataa

SEQ ID NO: 80794 - DNA, 603 bp, Cannabis sativa
atccactagctccacctatacatacatatatataaatttagagcattgttattatgtataagtggtgcgtaaaattttctggacatatcgagttgccattaactctaaaaggtattatattgaattatatagaatctgaatcctaccaataacaatattgacagatataaagtgttaccctctaacatttctcattcatataatcacgtaaaaattaatgtaataatgttcatattggtttggtttcggattgttattaaagtttagacttaattgttatgcatgtgactcaattagattagaatattaacatcaatgatatgaaaataataatatcatcaactttgcttcaaataaaaaaaaaatacatatttcataaaatatatatataataaatttcctcccatatcttttaattttttttaaaaaagaaacaatgatttaaactaattataattaattaaacttgtgaaggttagtgatcaaatctacatacttgtgtttgaatttgatgggtaatttttaaaaaatataaataattatatagtaattagtataattaaaaacactaacattaaattactataaaaataatttacgtac

SEQ ID NO: 80795 - DNA, 1065 bp, Cannabis sativa
gtatgtttgaaggtgttaggaaggtgtagattctttaattacatgaataatagtatggacactttacacattatgcatttctggttaataaaagaagtgcataggctgtcacacactagtagtactacagtcataaaaaataacgtttttggagacaacccaacgtggactcgatattgctatacatatttgttctctatatttctttttcttctactcctattctatctactctgcacggagatcaattcgaattgggactcactcatcgtcaactttgttctctccctttaattttgtgcgcttaaaaagaatgaataataaagcttttttgaaaaaacaaaccaacaacaaaagtgataagatctatacccatatatacatatacatgcatctttaatagtactattcattccaaaatctaatcactttctcctaacataaagtagttgtatttatcaaactttttactctaatctccaaatcaagtactctccgattccttttctttaaagctcaagtcactctccaaattctaatcattaactcatctacgaattactatacttatctaaagtaatatggcaaatgattttcaataatagtcagggccggtcctaaggtatataggacctaaggcgaaattaaattttggggcccctatatatttaatttaactacaatgaaagtgatagttttagtacttaatttaatggtaaagctttaaaaaactcttaagagctctaaggttcaatccagtaagaccttttaccactacaccaaacacttattattatattttctttttatttaatattttatctatatattaatatattttttttcacaatttcggagccttgagcgttcgggggcccgatgtgcacgcctaacccgcctaccctcggggtcggccatgataatagttattagaattaattagtttgcatcttttaagtacttaacaatataaattccttattctaactttttaatacacgtaaaaattggatgattaatgcatggttgaaataaatttaataatattagtgcttccaaattaat

SEQ ID NO: 80796 - DNA, 3693 bp, Cannabis sativa
agtgatgaatcattaaaagtatatctaagtttgcttaaaacagattacaactgtttatgcgaagcagaattgataattgctcgcaaatagaaagtatggcagataataactgctcgcgcatattgtagattactaactactcaaaataacatcaaaggaaaataagagcaatggaagtgcttcaagtgttttaaatttgatcaaaatataattgtttaagttgtgaatgaaaaatgcaaacaagcaaatatatcaagttcaaatataaaaatatgaggcattcaataacaggtaaaataagagcaaagttggccatccaaccttgtaaatttgtcattacaaaagtgccacaaaaagcaaaccattgtctcggccttatggccattttcctaaaaattaaaaagaaaaaaaaagtgaatgattaaaaaccaagcctacatagtaggagacttggatggttcttctccaataacttctcctgctatctcggcttcctcttttacctttttagcttgctcgcagtaagcaaggacttccctcatggcctttcttaggaaactcaaattcatttatggattcaccatccaagctcgatagatgaagcacatggaaacaacattgcattactccttggtgtcagcctctttcgcctcaagcactgcattggctgcattgagttcctcctggagtttctggcatagctcagacttgtccttcgcctccttctgagcagcttcaagctcagcctttttggccctcttcacctcctcaacttccttgtttaagtgagtgatttctgccttagcgtcattccattccttggacacagcctcgcgctgactaatcaccttctggatctcgctctccaggtatttcatcctttccagaccctaatgttgggcaacgaaggagatgcaagtttaatgaaaacaaataaataaaaatgcataggtattttttgagattgttaaaaaaagaggtaaaacgagaagagtatagaagcttaccgagaggccaaaggcgacactcctctcgagcatctcgtctaagtggacattgttgattaagtcctagtcgttgagaaggaagggtcagaaatgacgccaacaaactgcagtgtactccacagtatactccgagccagccctcccagcctcgatgcgcatagtctcaagtgcttggctcgacgaggtagcagcctgatttgccttaagaatgggctctttagtatgcgcgggggccggagggtgagtctaaacctggttctcaggggcatcaaggtcaatggactaaaaggctcgcttcttgtcggcagttgtcttcttgggccttttgagaggctccacgttgacattagaggaagtctccgaggcaattaaccttttcttaccttttttgctcgaggaatgaagaaggtcttcgagatccatttcttctagacaaaacaatgtgttaacatttgtttgaaaacaagaaaaagaagttgggaaattatttcccgcctaaggagtttaccataatcataagaagacgaagaatgaggacaataatattcactaaagtctctacatcctgtgatcttgaatatgtcgtaggagttaattggttctaaatcccaactcgaatctatatatcctaacctatccaacatggtcccatactgctcggctatcccatagtaggagttagtataactaatttggacgtggaattctgggtaccaactatcaaacctatgtacaatgcgatctatgaggaggggattccaggtgtagaaattataacggctatctcgaaaagacactaatgtagtatgctcgaccctaagcactgtgggtgaccaaccacattgattacctcgggatgctccttctttggcttcccgagggactgcattctggaggtagtgtgcccaagccgcatagtcctgggtttccctgctgccacgatgcatacttaggatatttataatcactagtatactcgttctcaacaaggaggcccacagacctcaagttaacctcgttcagaaagaattcagctgatcgaagaccatatggaagacccaataagagcctgcgtcgctcagccatcttgggagtaaggattggtcttttcgagaccgctgtcaaaataataagattacaagtcagcgagacaaaaactaaaaacatggaataatttaaaacaatgtttattgcaaatagtcacttacgtattatacgaaaagtggttgtgttgattggggagaggccaatcgtctagaagaagtcatctttgaaaagggttttgtttggtaacccaacaatgatcttacgatcgcctgtgtgagtcccaagataataaaaacctcctgcaacattcttcctcgcaggaacgaccttgacagagtagagatactctatttccaggggagtggggcactcccatcctaaaatcttgtacagaaccttcaagcttgtaaggattctgtatgaaataggaaccaactggaatggggaaattccaagatggttaaggaaatccttaaactaatttcatggggggataatttctccggccctgatgtgttcgaggctccaagtgcctatccctgtcgagccactcgtactcgccttgccacttgtcccctcagatgctttgcgaggcgagtgagtcgagtcgttctggtgggtaacaactaaactcgccagcaactactaatctaacccatcatttttgcttgtattcaataccacaagtccttaagatgctacctacgtaatctctgatggctcgcatcctcgactcgattagttcagcctcgaaggtgacattagggtcttggggagtctttgatttacgtggcttggaagtcatgatttcaaaatccaggtcacctggttcaaaagcaatcatgactctgggtaaaaataaaggcctgggaggttcatgccaagtagcatctagcaagaaacgacgtttgccttctgttatttcttgcaagaagcgcctttgcgactagcaatattgtcttggtgggattttactaagtggtccctcattattgcatcatttatctctaatttggatttggattttgaaattctgggttcatacgtgatggcaagttcattggggcactttgtttctaaaatttctggacgataaacttctgaaccagattgggacattgttacaaaaagaaagcaatctcagttcctggatgaaatttatcaaaccagaatcttataaatttgagaaacccaaaagtctacggtctgcctaaaccctgaaatttacccagaaaaaattcaacctaaaatcgctaaaaccaaataaggtgacaaaggtgaaaactaagaaagtagtgatcaaacccagaaatgtgaaacaaaaagcatataagaaaatagagaaagatgaatcagttactgtttgaagtcgggttttggtgtaacaaacggttctgcaatcgacgatgcagcgaacgacgtggtaatttctctgaatgcttgaggtcgaaaaacaaatctgacgaaactcgcaagaagtatgtcaaagacaaagatggcatgcaaagcttcaaaaaatctgggtgaggttttttgtagggctgtgcatgagttgggttggccgggttgaggctattttagtgggccaacccaatgagatcgacctattaaattctaacccattcatttcaagttttaa

SEQ ID NO: 80797 - DNA, 2349 bp, Cannabis sativa
tagctccttaatctttttccaggccatttgttgaatataaaggcacccttccacaaaatgagttgcagattaagcagaaggaattagagctagaagttaataaattaatatcaagaagagggaaagtgagtttacatatttggcaagctttctttgtcgatatcttgttgcgaatcacgacgctgaattgctttatcatgtttgtcatgtaggtttctattgctgtagtaccgtataaagaagctgctgacatgtgtggtggttcccttcctgattacatttcaaaggtctgtatttaatttgttatacttttaaatgttcttgcatataatgttttcctttttttagtaatacatctcaacttgataaaccactttagttggtatatttgtttctttaacaattgttttctctacttttatgatttgtatgtatcacttgtcatattagttagtttggataaattggtataagaataagaattggtatgtagtgtccattctatagcattatttttcactttccagtggcacaatctgataaaaatactactgtttcttaaaggaaagcacaccacgtatagtgaagtttggggacttccctggctgcccttgtggcggtacccatgtttcggatttttcagagatcataagcgttacagtaagaatctttatgtttctgtttccaagtgtactactaaagatctgtatactttgtcttcgtttgattgataatgataaaaattacttgattgaaatgaaaccattcaagttgtttttttgttcaggtatctcaaatccggactaagaaagggatcacaaaggtgttttacaatgttggatcgtaagtgataatatgtgataaagaactaaaaaactgtcttacaaagtgataatatgatatgaaaacaacaacttatgtatggtaacagtgtgaagaaaacttgaaaaaggtataattaatgttctacataggttcttttctttgttcttcatgaatggcaattatgtaataccattgagtttatctactgaggatatatttatgctaattgctttgctaccaagtagcaatcaagatgctattttttttcatatgctttataacgcgtgtcagctgatgttgatttataaagtaaatcagtggataaagaatggccaactatgcctaatttttatctttgtgtggcatgagtttgatttaatgttgtaattgtaagccagttgtcaattctttgatattggataagaacttttctccactggaattaatggacacaatatttagtttctaagagtatctctaattatactctttaattataaaatagagaataaaccttaataagctcttaccgtacaaaaatggctcttatatagaaaatggattgggattagaaaattctttattattttgcctaattttttaatagtattttagtgttttttttgttatgaaaataatcaatcttagctaaagtagagaagatgattggagtaagattaaacaaaatggttctctattttaatatttttattatatttgctaagaaaatgataatgggaaagagggaggtcttgttaatggttttgttataatgtaggactagtagttatatatgtgtaaattgtatttaagatgtgaattttgaattatgacatctcaaaaacttaaaagggcaatttggggaaggaaatagatagaatggttgactctaatctcatgaaagatattttggcacaatcaaaatcaaaatgaatggttggggattgaatattggtttgcttaaatcagagaaatgataacaaaaatgatggggtttttatagacgtagtgtagtgtagtgtagtgtagtggtccttaatcaatggtacgaagaagattgtagatgtgggcttggtcagaaatccccaaacccaatttacataaataactcatataattttgcgtctaaaaccagttaacattcgtcattgtttaatttgttattttttttcctctttctcggaagcataaatctgttgtttaatccttttatattttcaagtttttgttacattttatatatatactttcaaccagatgatgtaattatcaaaacagaatgaagataatttaacttaattttagtcaaatttgttttaagagtttgaaaataaaaattattgattataggggttacttttttcattttgacaattaagaaaattttctacaaaattgttaaatataatcttattattgtcactatttttcaaaaaaaaaaaaattatatttttatatttagagattttttttttatatatatttttactattatttatagaaacaacaagaaaactacataaa

SEQ ID NO: 80798 - DNA, 1070 bp, Cannabis sativa
ctctctctctctctctctctattaatatatttatatatataatcttattttctttctttccccaaaacccagaaaagaaacactctcaagtttcttcctccataaataatgacacttttcatttcattcacagaataaaaaagaaagactcataaatgtggtgttcagtacgtaaaaacaagacaaaaaatatttatttgacacatggggcgagactgagaaaaaagggttctttctttaaaatgggggctgtgtgtttttattttttctttttaaaaattgtttgagtgagattattggccatttgattgagagagatgagcagtgagttttcatttcaaaaaatttgcgaggttaagttagtgaaattgtacgaaagtttttactgttgtggagtgagaagaaatagagactagcacagggttcttctcctgctgacactgacttgagtagtactactgaagaattgaattacgatgagttttgggtcgttgggggtattaatggcgcgagttattacgcctcagaagtcagcatgaacaaatgcaacaagtttgaatttctgaaatgaatcgctttcaaagagatgacaacctgtttggctgtgtgactggtgatgatgacactggtttaatacatcggccatggccatggaaatggaagtcgacacttcaagagtgggactagtgatttaggcttagtgggccgactcaaagcccactcagagttccccacacccacatctaaagttgaagaatactgttttttttctttttttgggaaatttatattatgtattaactttttcttacatttacgtttttactgttttttttttttttcaattcggcagtatactgcaggtttgtatatattatatgtttataggtgtcttcataggatttatcctctacattttttaaaaaataatgctttaaaaagtgatgatttgacatgttgaatcactttttgtgacattttttttttatcttttttgggttttattatttttataaaatattttcaaattcactctcccataatctctgttcatcttcttcttcttccac

SEQ ID NO: 80799 - DNA, 2636 bp, Cannabis sativa
  modified_base (961)..(961): a, c, t, g, unknown or other
aatttattgaataagcaatttaaaataacttataaaataacaaaataatataatttagttacattttaaaaattatattaattatatactaaatttttaatgaagaatgtacactttagttacttttttttttatttcaaacatttttaaaaaaattctggtcactgatagttattccagctcaagagttatgcctcactaggcctaatcatcacaatttactttttaagatgattattttaacacgtatgaataatatattttttcttgttaaaaaagataatcgaaataaaaggtgacgtttaagttttcttatatatatttagctctcaaaaaagtaatcaaattttaaacttaaacaaaatataccaaccaatttaacaagttaccaaaatatattatattattttatatttaaaagtaactaaataatattttacataagcttaacttacaatgtaatttcgataagatattcaaaataacttatataaggaaactaaatagtatcttaaacattgtaaaaagaaaatggtaatgtaagtgattttatgacttttttattactattattattattaggggagagaggattagaacttgggaactcttctttgtaagagatgtgtgaaagtactagactatacttatgacttagtatttttgttattaatttacgaagttgctttataatatacttattgaataaaatttaattataaaataactaaatgctttataataatttatgaaattggttgctatagtaaattttgtttaagttaatgattttctttgtgaggtgtttacgtttacttaatcttcaggttttttttttgagtattaatttcgtattgttataatttctttgtggtatataattttattactacggtatattaattttcagtattacgatatatctaatactactgtatatatttaaatgatctaatatatntatttatttttgttacaatataataatatacaatactaaaaaaattatgtaacttaattttattattattatatattttttttaaaaaaatgtaataaatgtatttttataatttttattagctaatttattagatttgaccgtaatcttaattttttttaaaagtgaacatttactaacttaatttccaaatttaaaatttttcaaaaaaaacaaaaaccaaaaatttaaatttcttaaataactaaaatttaatacaatgccttttttgatagcaaatttaaaccaaaaagtaaacgttttctctctttttatttttttaaagaaaagtaaacattttctgttttaacaatcagcttttggcaataactaaaaaatctaccatctcaataaaccaaattgatacttttaatagattatttattattgaaaattatttctaaaaaatctaccatctcaataacttttacaacacaacacaatactatatattatattatattatattatattattcaattgacataaaaaaaaataataacaaataaaataattaacaatatacaacaccgcgcgaaatgcggattagttctctagttttattataatagaattagcgtttattttttaattttattttggcaagtgtataccaatgaaaacttattatttttttgagatttttagagtgtatatgtcagctacctcttcttttcattttttttttcttttttgtcagttttttttcttttctacattttttttgcttgatacattaatttgaagcattcattttaaatattttattgcattctttccttctctcattcttatttttaaaagaaaattcgatcacacacaaaaaataattttggctcaagaattatacaatcatgatttatttttgaagattactactttgatgtgtgataacatattttttttttttacttttactagagaaaataaatagaattaaaagtaactaccaagtttcttttctatataattaacaaataaataattaaaattaaatataccatctaatttcataaattactaaaaactttttattaatttatacttaaaagttatgagatagtatattataaacaaatttattgaataagcaatttaaatatatttctaaaataatttataaaataacaaagtaatataacattttaaaaattatattaattacattttttaaaaaaaaaagttagaaaaggtgattttgcaaaaaaaaaaaaaaaaagtagtagttagaaaaggtgtgggagggtgaattgggaaagttgggagagagtttggaacaaaatgtttatagcagcagcagtggcagtgaattaaaagacaaagcaccgctctgagagaacgacaccgtttgaacaacccaactccgatcagaaatggcggaagaacgagtgatttcaccctattttgagaaatatcaaagattgaaggaagacccagaaacagagaatttgaacaagaagaatgaagcattaaaggtggtaacttgttctcaactggtttattctcaattggtttgtcagaagacctactatgagttggcttcaaagttggcttttcaggtggttggtcatttgaagaaagaggaaaagcgtaagaagaagaagatagccaaaaaggtgtccccttactttgagaa

SEQ ID NO: 80800 - DNA, 2749 bp, Cannabis sativa
agacaatagcttgctctttgttttttatggctttagatgcatcgataatagggtgggaagcatgtagaccgattgtggtggttgatggtacattcctcgaaacatcttatggaggaaaattgctgtgcgcttgcacacaagatgtagcaggtcacatttttccactagcattttgtgccgccgattctgagaatgacaaatcttggaaatggtttttcaaaaaattaaaagaagcatatggagtcagcgtaaagcaatgtctaattttatataagaatgagagcctcatcaaagcagcaagagaaatatattcagaaatttcacaagtatactgcaagtatcacctgttgagcaacctcaaaacaaacttcaaacaacatgctgccaagtacaacctgccattctttggagcagtaaaggcctatacaaaaaaataatttgaattccacatggctgaactagatggattggaaaaacgcataagatcgtacttgaaaaaagtcagttttgaaaaatggtcaaggattcacaacaacaacaagagttcttcaaccatgacaaatagcattattgaagaaagacaagtttattttattaaggaaacaaaataatgaaaaaaatttaactcatgggccttaaagtggttggaccatgagtgattgattctaagccattggatctttttaatcggcccattaagctctaaccctaaacctaataaatttctataaatagaacattaaggatttgattcttagaagactctagactctctcttgtctaacaaactgaatcaaagaaaacctcttaatttctgtcattgtatttcatattcctcttgtaatttcttcatgaaaattcgtggtctatggtgattgagagtatgcccactcatgtcaaagcaatacctagcatagtgaggaaggctatgtctaaccaaactaaaggagagaatatctaagttcagatcttgataattctttgctacataaaggaatcaggtgctagggatctgaatggaaggagtcattattattccgctgccatcaatgtaaggatttcttaatctcttatgtgtttatttcagcgtattaggagattcatgtttagggtgttagattatagaatataatcaacatactttttagtaaatctagattatggtaatataacctccaacaataacgggcaagcaggaaacctaacaatgatttcagtttagagacatgactcttcttacatagtggtcataaccgctttttcactttcataacggtaatgaccgtctcattagattcattatagtattgatcatctcatttgtttcataaccaactaattcacaaatgatcttgatcgtatcttgacatgctatgtggcacagatgtactttgcttacctcaagtatcgattcaggtgtgtgggccgacttaaatggagaacaatcaacgatttcgggccctgtgtcacaacaacaacaaaaatgattaatcacttgacctaactcattttaggtccttcattcatcaccacaagtcccactttaggtctctagggtaccaatactctaaacattgaaaaaacatgaaaaatgggggttttgaacatcaccaaaagcagtaaacaatttataaaacaacaaactatttttggtgtctcctagtagggaaaaatagtagactttttttttccgaaaatggtctatcattttctacaagaaacgtgaaaccccaagtttcaacttctaaaaacccaaccgaaacttaaataattcattaaaaacttcacagagcaatcatataacatccatacaacaatctctacgtgaaaaaagtcaaaatcatgccccaacatgaaaaataccatgagagctcaagctttgagcttaaaagctcaaacttgactctcacctcaaaacaataacaaaactatcaaaatagcatccaaaacactcctaatttaacacaaaaataaaaccaaaaccctacttatatctcagaagccacagaaccaaattttaacttctaaacctaacgttctcatgaagaaagaaaccaaaaattacctttagtttttaccccaagcttgtttttctcctagcagattactaaaggtgctgaagagcttgttggatagaagaaagtaaaaaaaaattggtttggttgcttcagttttttctttgctcgagagaagaaggagaatgtgtaaggtaagggttttgtttacgatttcttagccactatgaaatctctaacccttgtgcatttagtcaaccccgagtacttttaactacaattactacaaaaagtacaattcccgtcaatttctatatgtcatttaaagaatttacgtttatttataaaaccgacgtgtatgccatagtcgcaaatagttttttattaacgttgtttttgaaatgacgcaaaaaacaattatcttcatttaaaaagtaacgcaaaacatacgcacttttgtgatatttttagccttccataaaaattacgaactaaactcattgtgacatttttggcttccgaggtcgcctaacctgaaaatcttttcattctacaaataactcaaattatacccacatgttccaaataaatctttgtagttaataaattacgcttatttatctacttatgaaaaaaatcataattcaccctaaattatattagtggatcataatcctacttattactatttgataaacccatattatattataaatcctaatttttcataatta

SEQ ID NO: 80801 - DNA, 1007 bp, Cannabis sativa
ttcaatttgaaggaaaactcattagtatggacgtttttgtgattatagacttaaaatcttaggtgtctttgtaggtcagttgcaaattcacatcacacaaggtatcatatgttgctctgattgtgattttgtgagataataaggttttgatttgacataattaatgactttttctaatatataatatcacatgtttagaattgggatgttgatattcattatctttaattaatgttgcttaaagcttgagaaaacaaccctctagccctactttaacatatataaatatgcttaaaacttgtttaacacttgtcaaaattctttgtattctttactctaattcattgtatcaagaagcatggtcctttttctttttcttttctctctagttttatcaatgcttttcttgttttagttgaattaaacttgcattgatgggaaatgagatgaaatttgcttttgtagcatccttcttataaaaagctacatgggaattttgtcaatgattttgggttatgcttatgaggattgattgtcactttggtgattactacataattagatagcatttggcaaggatgatttgagtttgagatataagactaatcaccatttagcacaatgtatgtttgatttgattttaagtctaagatcccttgaaactattctttaccccaaatataaaaatattactacgaatattctacgacgtctaatataacacaatttaatattgacttttatataatttattttaattttaaatatcgtgaaacctaataatatcaatttactacaaggtgttcaacaccttaagtgaccatacattaacaatcaaaaatagaatactgatatcagagatcagtggtatttattattatcacgaagtaacaatttacagataggtaacaaaattctataataattattaaattaaaaaaaaacgacaccttataataatattagacagtgatgtttttaatatttctcctaatataatgtagcat

SEQ ID NO: 80802 - DNA, 1080 bp, Cannabis sativa
aggattttatttaaatcaatccaagtatgttgaagagctactgcagagaaccaaaatgctgcacttaaagtcatgtccaactcccatgtcagtggggaagacaatgtctattactgatggtgtgcctcttgaaaatccaactgaatatagaagtattataggaggattacagtacttgacttatactagaccagatatcagctatgccacaaacaagttgagtcaatttttaaaggctccaacaaatgttcatcttagtgcagccaagcgggtgttaagatacatcaaaggaactccacatcatggtctacatattccttactcagaaagacttgtgttaacgggtttctctgatgcagattgggcgtgttgtccagatgatcgaaggtcaattgcagggtactgcgtataccttggtgatgcccttgtctcgtggtcctccaagaaacaaccagttgtgtctcgatcaagcacggaatctgaatacagatctcttgctcaagtgactgccgaaatatcctggatccaagctctcttacaagaactcaatattcctctggacagaacaccaattacttggtgtgacaacatgggcgccagcgctttagcctcgaatcccgtttaccatgctcggacgaaacacattgaattggatgttcattttgtccgagataaggtgctgaacaaagctttggaaatcagatacattccctcaagtgagcaaattgcagattgccttaccaagagcctttcccatactcagtttcattttcttgtgaccaaactcggtgtgttgaagaacccacttcgtttgagaggggatgtgaagaaaatgaatttgtcataggtgccttttagtcatttcagctgcactaaattttaggacagctcatcattgtgcaatgattgattgtacaaattctgttatgattttgtacctcagaatatcctgattttgtatacgtgtaatagatctagaatattcctgtatgtacaaactttgcctatataatgaaatgttagacctcagctacatttgagctgagcaaaatcattcccctgcatctctctgcatttttt

SEQ ID NO: 80803 - DNA, 1114 bp, Cannabis sativa
taaaattatgaatagttaatatttaatacacgttataacttcacaagtggctgagtgagccacgaatgttatgggggcaaaagaattattttgataaaaaaaaaaagtactaataaaaaaatattatttttattagagaaaaaaatataaattttacgaagacaattaaatatatgagaattaatataaaaaaatatacaaataaaaatgagaaatataaatttataaaggtaaaatgaaaatatatggtgacaaaaaatattgtaagggcaaaaatgcaaatatccaaaaaattaatacaataattattaaaagttgagaagaatcatgtgctctttgcgctttataattgtgccctttttgagtgtgtatgtatctagtattagtcatttttaaaataaatttaattatactaaataaaatatttttgcaaatttaatcgcacataattaaagttatagttatataaatgaataattaatgtttattattaattatttcacgaattttaataattgagatcatgatagaaagaagaatttatttttctcttattagggttaatagtaatgtttagagagttataatgttatttttgaataattagttatactctatcaacatattttgtgttacactaaaatgaccctttcttttctcaagaataaatattatggtcttaaaatataagtgactctatttggacttaatattttaaaaaattattatatttctgttaaaaagtaaaaactaataaaaattatcatatattttgtgggataatgccaataaatatattcctaccactatactacatgatatgtgtttgtttcttcatatctataattcgcttcttaaaaagttattttggtacaatactctctatctatttcgacatctaagaaaaaaaattattctaactttttttcataatcacgtgtagtttagttttttaagaatacatataaatttttagaaaattcctaataaacaatattttagttttagaggtataccaaaatgacctgtttagagggtttactatacaaggtcggctcaagggtggggtagcatgggctcatgtcatcccccatcttagcctaaaaaatccttt

SEQ ID NO: 80804 - DNA, 1128 bp, Cannabis sativa
atgataatgtaagcaaaggcaaggattgaaatgagcagaacaggaccagtgaacaacaagaagaagcttcctgcaaattatagcaccaagtataaagaacgcaaaagttccatcaaataaaaaaaaatagtgtgaaaagggacagaaaatttggaaatcaaacctgtaaacccaaaaacagttccaccagttgcattgaacaatacagtgatagtgtgagttgaaaactttcctggcaacaaaaatgcaataccaacccataaaataaaaacgacccacattagaactttgagtatgaatttggccaaagaggtaaaaagagatgttttcctcttgacataactaggctccacagtcggaggcaacagaagaggcttctcaacagagtttccgtccatggcgaaaaccttacacaataactttggcacaaattattagtctgaaatacagtctcatgactgacactagggaccaacaaccctacttatattatttgttgtactaggaaaaggaaaatccaacatgtgtggaacccaattctttatgaaccaggaatattaagaaaaataatagaaaccatatgatttgtttttgtcatagtaaaaataagagcgaaacatgtatcctcatttgtacaacgtaattattagccattcaagtcctatctcctcaacaatttgtttatttaagacctcaaatgctgtcatcaatccctttaaagaaaaataaatgagcttttgttcagtaatgaaaagggaaaaaaaatgaaccaagagaaaataaaagaaaagaaaaatgagtggagaaggagatattagttaaaaaagagaagagacacacaaatagtactttcatacaattaagatgaaaatggttgagatgaaagcaaaatgagtgtgaaagaaaaagaatgacgtagacgttaggttgcgtggagttaaagggtaccactacattttcttttctattttttgtgttttttcttaaaattaagtaaattgacaagttttattttggattgctaagactaattaggatttttacccctgaactttgacatgtactaaatcatgccccttaaacttttaaggtcattgaaaatgtcccctgaactattcagattgttgg

SEQ ID NO: 80805 - DNA, 1239 bp, Cannabis sativa
actattcattattatgtgaatgcagcatatcccgccttaactaattcttcggcaacatcttgcaaaatgaaatttgtaccaagaacacagcctgccaatttcagcatctcattcaagtttttgagcatttcataactctccttggaaaaggatgagtctcatctccacagttgagttttgtgaatattgttatccacctcaatctatggccaaccaagaactttctttagcctaatctgactcttgagattcgtaaattatatctttcgaatgtcctgcattgtggggctatagactaagaagtgaatttgttgccttttctgccaggtcttatgtccatggattctaaatgcccaaggaaagcaacccatatgtgtcttcatgtttctcaacttccatgctctcagcaacagtaatggcctcatcaagtctccccgcacagcctgaaagaggactcgtaagcttttccacataaatcgtaacaacacataatagggtctcaaacgagcaccacaaatcaattcaactccaacacatgtttgaaaacaatgttatgaataaatctatcattcgaagcattcatcatagccttggaaacccttatcgaaaacttgtgaaagaatctgtctggcctgggaaactcttctactgcaaatcagcaaatagattgcaaatttggggtggggtccatataacaaggaaaatgatgttttagtctttctcaaaactaggtgttttgtaagttgagttgaggagttgtagtttccgccatgttaggagctgtagaaaccaagcagtagcaaagaagcttctcatgacagcagtaaccttaagctgagacctttcaaaacaagattgattctgtttagttccaccatcccagcccacggaaagaaaccaaccaaaaagtaatggtgtatgtcaaaccgctcctacgctacaaaccccaccgaaatatcctccacggggtgccattttaaatttcataaatgtggttcaaacttgcaccacagcaccacctgattgttcattatttatcacaaaattttagcaacccctaaaaaaaagtagaagccactgaggctctacagtttaaaaactgttttttgttttttaaaattgaaaacagttttcaaaaactaataagagacgtttagcaaaactttttaaaaataaaaaactagaaaacagaaaacatcaaaatgctgtttttaattttcaaaaataattttttttgtc

SEQ ID NO: 80806 - DNA, 1507 bp, Cannabis sativa
tgtaatttttttttgttgtttttatgtttttgtgaaataatctctttataaatgcacatattactttaaatcatatgtgagcttgagtgagctatttgatttctattctatatcactaaaattttactttaatattttctttattcatcctaaatattatctcaccataacatttctgtatacattataaaagatgtatccatccatctctgtatattataaaggagaagataataatttaaataaaaaataatgaattatattttacttatatagatgtacaaaggtttgattaggtgagaaaaataatgctagctatgagatccgtctcaaactaattaggatcttgggtaaaataatttaatagggtttttattatataaaaaaaaatatttttttatatgtataatgataaaaatctaaaatatagtattttaaagataaaatcagacttttttcttaataaaatatgatcaaatgaagtatcttaaaaagtaaattagatatattttttaagaaaatagttatattttaataaataatggtaaatatacaaaatataatattttaaaaaaaataaatttaattagaatatttttgttaaaagattttttagactgatcgtggaggccttgagcatgaccactgcttaggggtgttcacggattggtttggtcagaattttcaatttttacaaaccaaaccactatttcagtttttaaaaattcaaaaccaaaccaaactaatgaaatgatcaaaccaaaccaaaccacttaaaaacaaattggtttggttcaaaccatggtttgtatttggtagttgttctatttttttttacaataattgtttatttttttgatatttttttttacttttaataaatttataatacatgagtaacaataaaaaattattatcataacaatataaactcaatatcaatattctacttaaagttgttctaaatgtcaacattttgtctaaaaaatatatataagtatacatatgataattatactgattggtttggtttgaaccgttaccaagatttttaaaattgtgactgaaccagcgaattcaaaacggttcggattgatcaaatcatacatactgaatttatttaatccggtctcaaatgatttggttcacattggttggagtttggaaccataaattacagattatatgaacacccactgtcgtactctgccttgccagctatatgtataatctaaacacaataaaacataaagaataaatttaatttttatgcttatatatcttttaactcttaaattctaaaatatcacatttgttttctaacacaggaaaagaaaatatgtattatttaaatatattttggtcaaacattattggctaattagcaattttcacccccaaactttgatatgtactaaattatgcccctcaaacttttttggccattaaaaattccccctgaactatcaagattgttaaatttaaagacttttatctaattttagta

SEQ ID NO: 80807 - DNA, 2730 bp, Cannabis sativa
  modified_base (349)..(352): a, c, t, g, unknown or other
gagagagagagagagaacaagagatgaagggggcgactacttgttagggtttattatgtaggatttatagtgtttttaattcggccgaatcccattcataataatattttttttaaaaaaaaactgggatgttttgcgtccgttttgcactgacgctaaatttgatgattttgcatcgacgctcaactgacgtaaatattctgtaaactgatgctaaacctgcgtctgcacataactgacgctaaaattgaccagtaattatttgcatcggtggtttaatatattcgtcgccaaaaccaacgcaaaatgcaatatttgtagtagtgataagaataataatttataattnnnnacaatttttttacttttaatcacagattttattgtgactaaaagtaagatttttttgtaatgtatatatataaagatatgttgttgctaagaagaagaattcatggtatatcatacagtaagagataagatatggctattaatgagggctcatctttcttgaaaataaaatctcccatcattaataacaattatctttgtattaattaatatatagttgaggaaaaagagatcgaaactcataaatgtcatgatagaataattaattaatatgatcaacatattcaattgaagtagttgtagaatactactataaatagaatgataatatgtagaaatgatatatacaaatacaatagtgagttcatcaaaatcaagaaatcaaatcataatctaaaatatatatcatatcaatatgggcaagagtggtgtgatgatgatggtgatttacatagtagttgttggtgttgtgtttgttccatctcctacttttgcaatctcatcatcagatcaggatcgtatcgtgatgaacggtcaagatggaaagatggtgagtattatggaccgtgataccctttttgaggtactattgaaggaaagattgtcacaagacaatcaatgcttgagtagaggttgtgctccttggagtccttgccaacctggttgtcattgtgttggacccactggagcgactactattggaatatgcatttaaaaatataaatatatataataataatgtcatttgtaatgaatagtaataaggcatgttatgtgtatgcatgcatacattataaatgacttttatgtttacgtatagtaaatacttatatctacatatatgggtatataactatatgtactttttatcatgtattttcttttatctttaatgaaataatgaaataacattagatatatatgcagttttgtgattaatgttatctctacatatgggtacaattatattttgtgttgtatagttattaaaatacttgaattttttaaaacaactatattaatacaaaacatataccaattaaaacaacaaataaaaattacaaagactttaaagcccaaaaccaatcaatatctacacttatagctttaatgggaatgtaggtaatagcttatcctattatgtacaatagtctttacatttgtgctcctaaaaaacaatatttctagtagtcatccatgcatattatgtacacaacaaaaagaagaaccggcgaaatttagaaattttacttcttgacaaccaccccaaccaatccttcaactctctaaaataaaatttactcaaacaaccaaaggtgctcaactgtttcttcttattatcatcacaaaaaagacacctgctatatgctagaatcgccaaagtatttacgtctatctctagtttgtaatttcttggaggcaaccaaccagccaataaatttacgctttgacatagtactcctattccacaccaaatcagctcaaaacactctttcaagctcagaatttaacaacttaattataggtatatgaaatattgtaagtacctaggtcaacatttgggatgctcttcagctaatctttaacagagacaatcttacttcaataccagcttgcttcaagcggggctttatcaggaagaaggtgatgaaatagatgcatgtatatgatcacgaggttatatttgtttttcaatttttttgttataaaatagctgatttgacaaagttagaaaattttttattagaaatcataaaaaattttgtggtaacctaaaaccatttttatgttagtccatgtactaaaggtgatcaatatgcccatttaaataattaggtcactattacaaaaatgaattttagtgacccacgctaagcaacactaaagatttgtagtgaccctttattgccggtcactaatgtgagttactaaaaaaaatagtatatactgatcattcaaaatgaatcactataatatttgagtctctatcactatagcctattagagttgcattctgtcattctctaaagatgaaagcaattcgcaataagcgtatctattatttcttttttttaaaaaaaattattttcctacatagtgaccttcacatagggtcattaatgcattttatttttttaatatcaaatttctcagtatagccccatctctggggacaaacggtctccctacagacttgtcactgcaactcaaaaggacattgagatcccctataaaggcccatggttcaaaacatcggtcgacatccttcttaatgttctcccaaaactcgaatttttcttcctcatacggagtaccataggtagcaaaaagagtccaagaaatagatgttagacttttatttgggcttacattaaattt

SEQ ID NO: 80808 - DNA, 1119 bp, Cannabis sativa
atgttagttagggtgttacaagtcccatacctacatagtctcagaatcatcacacatgaccttccccatgcaatgtgggattgtgcagctcccagtctttctccttcgaatcacgagactctgactgtcacacagcttaaatccaagacccagatcaacagttggtaatagaatccaattgattctattataactaacttcaactcaacctactctcgttcttacccctttaaataaactctaagcttgatcaacttagagttgagacattgtattgtacagtgagatttatagagagaacttgaatcattgagagagaaatctgtaatgggagcttgagtaagatcgatcatttctaatctatgtgtaacctcgttcttgataatgaattcgactcaaggcattaccttggccttggagtagaaccagctacattgactcggatctaaaccaagtaaatttggttatgttcttatctattttaacttttcttgtatttatttattttgatcaccaagtatttgcactgtgttctgtttttagttttgtctattttagattggcttgctattgctttatgtgtattgcaggttgtgaatttgaacaaatttatatcagagttgggacacctgatgcatcaaagttgctttcattgatttcgagatcaagatctctaagactcgaggaattatgaagttcattcataattaagaacttatttactggccaggaacaagttcttatcaagatgtcgacatcaaaatttgaggaggagaggtttgatgggaaaaataatttttattgatggaaaaaaaaaatgatggcacgcatggggaatcttacactcgaagaagcctgaaagaagataggaagatctttgaaaaactaaaaaaagaaggaataagtgctaaagaaatctaagaacactattattcttagcttgagtgatcaagtcttaaaaaaagtgatcaatgagaagaatgctcataaaatgtgggttaagctcttgccaaatcgaatttacttgaagtaaaagtttcatggattcaagatgaatgaatcaaagtctatagataaattcaccaagatggtatcagatttggagtccatcaaggtaaa

SEQ ID NO: 80809 - DNA, 688 bp, Cannabis sativa
ttctgttatatgttatataggcacattttataacattttatataatatatatatatatagaaaccaccacagtaactaccgaagcaaccgaaactgtagatttttaaaaaaaataatgtttctttcatatattattattttaggttatactatacagaaatttctttatattacttttcacttgtataattgagcacatctataaaaaagaaatatcatggaaatgaaggacattattaatagagaactaggaacataataaataaggtaataaaaccttatatatatttataaaacaaaaacttagttgagagcataagtattgttttttttagaatataatggcctatttaccgtaaaaagtgcgtattgtttcttggaaaatctcaaatatgattggttggacgatgacaacactagtttttagagaaaaatgtgaaaattaaagattcccccaaaggttagtaactttatatggagagcaccttcgggtatcctcccaacttgtttgcaacttctcaagcgtcatgtggttattagccccatttgtccggtatgtcatgaggttgaggaatccattttcatgctctagtgagttgttcttttgctagagcctgttggaatagatctttggttagtatttctagttggtcagctgatagttttggctcttggtttcaatctcttt

SEQ ID NO: 80810 - DNA, 948 bp, Cannabis sativa
gggcataaaacccaacagtgttttcattggctatccaccaggtatgaaggcttataaactccttgatctcaatactaatcgagttttttgtactagagattttcaatttcatgagcatatttttcctttcctaaatacttctccaccagctgattatgatagttttttacagcttcctactagtttcactcaagctgccacttctgcacccattacaccagaaatccctactggttttacactagaaatccctgtcacaaaccagctgcctacttgttttacaccagcagtgataccagttccaaaccagctacctactggttttacaccagctgttcgttcccctccttcagccccttataatcagtccacatctcaacctcaaaatgctcctacaaactctatacaagacctattcgaaatagtcataagccttcctacttgaatgattatcattattttttgactaattgcactaatgctgttttttctcaggatcttgatcggggaactttgtatcctctctccaaggtcattgattactctaggctctctctaacatatcaagctcttgtgctatccatttccagacttactaaaccttcttcttatgatcaagctcatggcatccgtgaatgggataatgccatggataatgaaatcatagctcttgaagccaatgatacttgggtcattgtttctcttcctgcccatcaacatgcaatcggatgtaagtgggtttacaaaatcaaattcaatgttgatggcagtgtagagaggtttaaagctcgattagttgcaaaggggtacaatcaataagaaggcattgactattctgagacttttgctcccatcaccaaattagtcactgtcaagcttgttttggccttagcagctattaatggttggtttctacaccaacttgatgtcaacaatgctttcctaaat

SEQ ID NO: 80811 - DNA, 1455 bp, Cannabis sativa
actaaaattagaaaaaagtccttaaatctaacaatctcaaatagttcagaagacaaaaatcttaattaggagattgattagcagctagcatcctacaatctaacttattggaatgaattaagatagtatagtaagatgaaccgatgtgaacagaatataaaagaacaatttggagttcgcacaatgaaatttttttcagaattaattaattggatgattgcaatagaaataatggagttagtatttcaattgataacaaggttaagcaaaagcatatcatgatgaatctcacatttcatagtattcatatgtttgaaatgacaaaagtttcaccgtgattgtgttgatgaaatctaggttttgaattaatgttgaaatctacaatgttttttgaacttttttattttgctcattattattttacatggcttgatcgaatattgttggatattttaaatagaggttgaagatgattgtttatagatgttcgaaaggtgtaaagagcatgaatatcaaatatatatttaaatataaatttcaaactttaattcttatagcatgatagaataaatgctatactcttttacttatttattattatcataagttatcaccattaaatactagatatgttatcttattattttatcactagttttatttattttattattttgaatgaattattatacataattttttgtaagattatttcgaatgaattatgatttcaacattataaactattttattttttaaaaaaattgtgcaaagtcccagccttaacttacattttacactttcatgtaagaaaagaattaacgtacataaaatcaatcactataatgatatgttgtaatatataaaacgcttaaatcaaaaaaaaaaaaatcactataatgatattttttatttatttgatggtaaagcatacattttgaattttaattattataacaacaacattttccattcggtcccccgccaaggttgtatacacatttccctccatttttataggaactctgaatacatatctcattgcagacgccctcagaataagtgcattcacccacgcaaattgttggtagatttattgcacttcccggctctgttattcatttatccattatgttaatataaacataattaataatattcaatatataaatgtaaaataaaaaaaaataattatacatgagaaaaaataataaaatagtatgagaagaaaaaattagtggggtgtcatttttattataccaataaaggtattttgtaatgttggtacttataattttttttagagaaatgttaagggttatacattaaggtactatgtattattattagtgcaatttaattttagtcccacacattttaatttattatataatatagaaaatacacaacgtactataatattgttgggcatagtagtagttttttctttcatat

SEQ ID NO: 80812 - DNA, 2913 bp, Cannabis sativa
tgttgaggatacaagcaataccaatgattaagagttagttaaggtctgttgcattctgttaagactgttacattgtctgttgtatttggttgttaggattggttaagtgttttcactcctgaagaggtatatatatatgaacctctcccttgtataattattcattcagagaataaagatttactctcttctctgcttctctctctgtttttagctctctaaaacttcaacttggtatcagagcaggtcgttcatggccacttctagagaagcttcagctcctctctcaggcgttccaacctcgatgctccttcctcctctgcgcctggatcgaagtaactattttttctggcggtctcaagttcttcccgccattagagctcatgatcttgaagatattcttcttcaacgaacagcaagaccagctccacgaatccctgaaacagagggttccaccaatctggtacgtaaccctgacttcattcgttggatgcgtttagatcaattcctcatttcttggctactctcctctatttctgaatccatgattggtcatgttgttaattgcgagacctctgctgcgatttggacaaccctcgaacaactcttcaacactagatccaaggcccgcatgattcacctgatgtcgatgctgcaaaacaccaagaaagggtctatgtcgattgatgaatacatgcttaagatgaaaggtttcgttgatagccttcgtgcagctggaaaccctgtctctgaagatcaattaattctctacattcttgctggtgtgggcagtgaatatgaatcagtggttgtcaatctcacctccagagatcagttgacccttcaagaagtacaatatatgctgcagaatcacgaaatgcgtcttgaaatcaatcaaactacttctgttcttgattttagcaatcccatggccaatcttgcccaattcaagaaatcgggatctactgtcagtaataacaggcctcctccatcctctaattccaatcgtggccgtggaagaaacaacaacaactccaatcgtggccgtggctcaaccaacaactcgagagttatttgtcaattatgtggtcgtccaggtcacaccgtgatcaagtgctacaggcgttttgacattagctattcgggccctgatgacagtacaacaaaccccactgaatcccaatctcaggcatatattgcctcagcctccacagttcaagatggtgcctggtatatggatagtggtgccacaaaccatatgacatccgaccctagccaaatgtcccacaagacttcctacaaaggcaaagaaaaggttatagttggtaatggctctaaacttcctattttaaatgttggttctagtgttcttgctgctaatagacctttgcaccttaaaaatgttttgcatgtcccatccatcaccaagaatctcattagcatctctaaatttactaaggataatgatgttaccattgaatttacccctgattgttgttctgtcaaggatcagatcacgaagaagcctcttcttcagggaactgttaaagaagggttatatcagctacaacctcctcagccttcccatttttcttctacatctcttgttgcaaatgttgttgaaactgtacagcaatgtactaagaatcacaatcttgtaaatttgtggcataaacgacttggccaccccaataaagttgtcatgaataaagttttacatttcttgcacattccgactgctaatccctctttttgcaatgcatgtcaatatggaaagttgcatcaaattcatttttcttcttctcaaaataagaccacggctccattccaaataatccacacggatctttggggcccctctccccaccaatccattgaaggatacaaatactacatccatttcttggatgattatactaaattcacttggatatttcccctcaaggccaagtctgatactaccagaaccttcttacagtttaattcatatgttgaacgacaatttgacactaaaatcaaatctgtccaatcggattggggtggtgaatttcgaccccttgctcccatctttgccaaacttggcattgtgtttcgacacccttgtcctcacactcatcagcaacaaggtcgtgctgagcgaaagcatcgacatgttactgaaatggggctcactttgcttgcccaagctaaacttcctctcacactttggtgggatgcttttactgctgccacatatcttattaacaggttacctgttcaaaaacaacactatatcactccatatgagctactgttctctcaaaaacctgactacaccttcttaaaggtattcgggtgtgcctgtttcccattacttcggccatatcagtcacaaaaattcaactttaaaacctcaacatgtgtgtttctgggatatagtccctgccataaaggctataaatgccttcatccatcaggccgtgtttacattgctcgaagtgtctcctttgatgagactacatttccctaccaaacattgttctcaccacctatttctccacttcattcctctgctacaactcctcaatatataccagtacctcctatttcacccactgtaccaacagaaatgcctcctactgtcatcattcaaccacaattatctcatactcaaacacaaataccaactgcttcacatactgctcctacacctatttctcactctccaccacctggtttccctctgcctatatattcaccatttccctcaacaacttctcctcttatgtctgcccaagagtctcacaataatgtccctcttcctacttcacctgttgcttcccctgtctctcacatcccaccagttgtcccacaaatttccacacaccctatgatcacacgatccaaaataggttcattaaagccacggttatt

SEQ ID NO: 80813 - DNA, 515 bp, Cannabis sativa
ttcttaggaatgagaatataaaaaaaaaattgtttggtatgattttggtgaaacactttttttttctttttggttgaaaaaaagagggggtcaagtggtgtgcataccacccacatgagcatatacactgctcctaagatagttgtccggctgctatgatagttgtcaattgatgcctattgtgtgtcacaataaatttattaattatttttatttttttattattatttattttagtatagcagtaaatataagttgattttactaaaactgtgtttaatttattatttactctcaaacaaaaattaattaggaatttcaagttgcaactaaataatataaaaaaacaaataacaaaagataattgcgattttaaaaacagttaaaaattagggttgagatgcaaaatagctctcaatttagttactaagttagtaaatgtctattttttaaaaaaattaaaaaaatggccaaatctaataaattagataataaaaattataaaaatagattta

SEQ ID NO: 80814 - DNA, 1710 bp, Cannabis sativa
cagtaatgctagtagaagcatcagctgctgcatccgtattaagtttccaagcttcagcatcaactggacgccaaggaacgtgagcagtagtaggaggagagacatggtgagaagaacctgatgctttgacattaactgcggaagcagtttttacttgtgcattcttgtagttttgtagaaaaaccatggagtagagggctgaatcagcagcacgtgtagcgttcttgccatgaacaaccttattcctctcagtccaaatggcccatagtgtacaaaagagttgttccatctcagctttgttgtaaattgaagacagatgttgcaagtaatcaccatttttcattgatgcatcaacctgccaattgaagtgaaggttcaaagatctccacactgttttggcatacttactattgaaaagtgcatgtccctttgattcccatgcttgcttacaaattgagcatgtggaatcggtaattattttccgtcgaacaagtgaagtggcaacaggaagtgcatcgtgaatatcacgccaagcaaagatctttgttttttagggaattttcaaagaccaaaaaaatttccaccatgtagcagccaaggtggatgtggagcttaggtcctcatcttccaatgaagttgcaaaatgataagcgctctgcactgaaaattttccaaaagagtgatgatgccatattagtttgtctctcgtggggaaatagctcaatggcatggtgaggatcttttcaacatcaagagggctaaaatattgttgcagcaaggaaaggttccattgtttctcatcagtaatgaggttagcaaccacaccattcctaggacccgagtattgtattggtgtaaaagttgtatgaccatgaatccaaggatcgaaaccacttctaattgatcttccttcactaattttccaccttaagccttgaatcaacaattccctaccccaccgtatcccttgccaagtaagagaaggggaatggcccacgcttgcttgtaaaaaagagttgtgagggaagtatttgcttttgagtagctttcttaggagtgaatttggattctcgacaagacgccatgcttgtttggcgaggagggcttgattaaagtgaatgaaagatcgaaagcccataccaccttctcccttggttttgcaaagaagattccaagatcgccaatgaatcttggagccattttcattcattccccaccagaaattagccatcatactctcaagttgattgtagaagtacacaggcaaacggaagcaactcgtagcataggtcgggatagattgcacaactgctttaaggagtacttctcggccaccagcagagaaatttttttcgttccaagactgcatcagtttcgaaattctctccttaatatgactgaatagttcctttttatctcttccaaagtaggatggtaagcctaggtacttttcatgacattcactaattggcatggagaggtgtcgatggaaataaacttgggcagcaagtgttgtgttgggggagaaagacatgacagatttgtctggattgatcaattgaccagaagcttgatggtaggtgtccaacaccctcttgatagctaggcataagctttcatcggcctggcaaaacagaagactatcatcaacgaagagtaagtgtgaaatcatgggagcccgtcttatgagtttgaagccatgcaggttgt

SEQ ID NO: 80815 - DNA, 981 bp, Cannabis sativa
tctggatggatttagttcaggtttcttcaaagtgatgtgggatgatattggaaaagaaatttgcacggctgttaataacttctttgagacaggtaacatgccccttaagcttcactctgctatgatatctttgattcctaagcataaaaatctgactagagcaattgattataggccgattgattgctgctcggtgctctataaatgtgggtctaagcttctttgctctagaatatctttggtacttcctaaggtgataaatcagagccagggggctttcataaaaggggggtcaatagctcataatgtgatgattctctaggatcttttgaaaaactactcaaggaagatagtttctcctcgacgtgccattaagattgacttaagcaaggcttatgacacaatcaactgggattttcttgaagatattctcaattcctataacatgccttaaaagtttgtctgttgggtgatgatctgtatttggtctacatcttattccattattatgaatggaagagttcaacggggtttcaaaggtgaaaaagggatgtgccaaggtgaccctttattcccccttctctttgttctaataatggaatatcttactagattacttcttgtggcagccaagacaaccaagtacaagtttcacctgatgtgcaagtttcttagattgatcaatctttactttgttgacgatcttattttgtttagcaagggttcaagttagtcccttgatgctctcactcaggtgttggaggaattcaacaatgcatcaggtttacaaatcaattctgagaagtctcatatttattttagggatgtagatcgtagggagaatttgctatgttatctaaaattagacttgctgaagggacctttcctctgaaatatcttggaatacctttgagaccaactaaatggaagaaaaaatattgtggcatcatcataaataaaatcaagcagagactgcacact

SEQ ID NO: 80816 - DNA, 2914 bp, Cannabis sativa
tttgaatttgtcatgaaggtatgttttgaagtgtgatatggcattgtcattattgcttgcaacaactatgtcatccacataaatgagaatggccaagaatatattgttggtcttttttatgaataatgagttgtccgagagggattgagtgaaaccatccgtaaggagagtttgactaagtttgctaaaccattgtcgtgaggcttgtttgaggccataaatgcttttgttaagtttgcataccgagtttggaggtgcttggtaacccggagggattttcatgtagacttcttcatgaagatctccatggagaaaggcattattgatgtctaattgatggacattccaattgttcatggcagctaaggccaaaaaaattttgagagtgttgaatttagctacgggagcataggtttcagaataatcaattccatgtcgttgagtgaagcctttggctactaaacgagctttgaatctctcaacagccccactttcgttatatttgaccttatatacccatttacaaccaacggctttatggccgggtgggagtttggtaatgatccatgtgttatttttttcaagggcggtggtttctttatccatggcgagaagccaatgtcgaaattgagccgcttcagcatagcttttaggttcaatttcagagtaggctgctaatacagcggctcgaaattgggggtgtaacttgatgtatgacaagaatggctcaattggatgagatgtagagttggcatgacaaacatagtcatttaaatgggtaggtttatgtagaatcctgccagctttagtagttttgggagctcctgagatggcagattgagtgggagaaccaatggtgcttggttcagagatggaagctggatgatgttcagcttgtggaaccagtggtactggtttattgttggaaataatggcagcaggagctgctgtatttgtggtggcggcagggatgggtttaactggtgctgagttgcgaccaggtggggatttatccactggatgaaggtgcggtttaagaaccaaatgaggtgaatgatcagtatgagcagtgtcatctggtgtgacaccagatggtgtggtaggatcaatgactggtttggaaccaggagaattgatgcattcgggtactggtgtgaaaccagtttgagaatgtgaattttgggtaagtttactgtggtgtgcgttttggtgaataggttgagatgttggaagcacaatatcagtaaacaatttatgaatttcagatgtggatgttgatgaaaccatgggaaaaatattttcatggaagacaacatctcttgaaacataaatttgtttagtttcaatgtctagtaaggtataggctttcatgccatgagggtaaccaatgaagagagaagcccgacttctaggtgtgaatttatttcttgtggaagggagggtggagccataagctaggcacccaaaactgcgtaagtgttcatattttggggctgtaccatgaagaatttggtacgaagttataccgttgaataatttggagggtgttctattcattaggtatgtagccgtttggactaagtaggaccaatataccaagggtaagttggattgaaatcctagtgctcgggctatgtttagtatgtgttgatgttttcgttccacaacggagttttgttgtggtctttccacacaagagtggtaatggataatgccttttgaggcataaaaagattgtaagttcaattcttttgcattgtccgagcgaattgctttaatagacaaagagaattgagtacaaatcatattaaaaaaattcggaattatgtgttgaacatccgatttattcttaagcatgtaaagccaagtgaaccttgacttgtcatcaactatggtaaggaaatatttgtaaccttctatagtagtgatgtgaaaagggccccaaatgttcatgtgaaccaaatcgaatatatttttggcaaagttattattagaaataaatggcaatcttttttgttttgctaaatggcaaatatgacaatgtaaagatgatttgggatgtgaaatgtggtgttttttattaaaaaaacttgaaatacacattgatggatgtccaaggcgattgtgccattggtttacattgtgtttattgaaacaaaaagaaattgaaggggcagttgtagctgctgtagtaacagtatgagcaataatagctgctgtagtaacagtatgagcagtaatagctgctgtagtgggttcttggtgaagcaagaacaatttgccacatttctcagctttcccaatcaccacattcattgtaggatcccgaataacacagcaattgtgatgaaacaacactgagttaaaagtattcagcatgtaatcagttatggaaaaaaggttaagctgaaattagggtacaaatagaacattctgcagtgttatttttgagtttattttgacagtaccaatattgtggacaggaagggattgtccatttggtaaggacacaaatttagggaatggtgtactagaaaaagatgaaaaacacttgaaattacaacacatgtggtgagttgcaccactatccataatccaagaagttgagtgagaatttgtacctgccatattggatgcagcaggtgttgttgcatgttgttctgcattagagttgttgcttaattgctggctcaacaaagaaattagttgttggcattgagatgttagatcagtaggacccgagatgctgtcatggtcatttttctgattgttgacagtagcgagattgaatttagccttgcttttgtctcgctttcttttgtccccataaccaggaggaaatccatggagaaagtagcacttgtcgacaagatgaccgggtttgccacagttggagcaagaaggcctaggtttc

SEQ ID NO: 80817 - DNA, 2991 bp, Cannabis sativa
  modified_base (823)..(823): a, c, t, g, unknown or other
  modified_base (2475)..(2480): a, c, t, g, unknown or other
gacctaatttccacttctgcactttatttttacacttttttaacctttctttaaaatttccagtaacctccttaccccaaacagccaacttgtctccacaaaactgaattttatgcataacatcatcagactcacaaatctcccagctatcctttacaatctgataacaaagagattccctcaaccacgcattttcaaactgaaaccgcttaatagaattgtggcctgcagcaggaaccatgaccataagaatcggagcatggtctaaagttgaaatttcaagattatggaagcagaagtgaacatgttcaaccaagcaagattagctagccctatcgaaacgcacttctatccaatgattagtgccccacccacgctcccaagtaaacgaataaccatataactccatgtcttgaagtccactgtcaaccaaagactgctgaaaaccttggattaaaaagtcagggtacctattaaacttattttattttaattaatgttatgtttgatgtagatgaaaggaaagaagaaggtttcgagagatcattcggctccaccgactcagccacgaatacatccaatgaggccaaagaagcaatctgtcaacgttacatttttcctgcaaagagacaagtattgcttggaccttcaaagattatgaaaaattagcttgctaagaaattaaagagatattatattaaaccagaagtgttcggaggagaaggccaagagtgttggatcagcgtagatgaggtggaagatgcgtgcgagctgcagaagattggaaatactgtaatgtctctttggtgcaggtataatagtnaataactaagttaatatctaagctaaaaattatatttacagctgtttacattaataatctgttttgatttacttatttgcaaaaaaaacacactttatcttagtgaattgagaaatacatactcatttaataaacatgcttcagtaacaactagagttggtaagctcgaacaacattcagagaatctatgtcaacgattgatggatatgcaacctaaacaatagttgatatgttcgtgaaatttagagtaagtaagtttttataataataaatgtaacgaactaatggatcgattagtgagttgactaaattaacatgttttaatctgtagtgatcactggatgacaattatgatccatgccaatactcaaagtattgcatatctcgactcaacgaatgactttatcccggctgatattatgaattgtatcaaaaagtaattgttataattttttaaatttagattatgttacaaatcaattcactaattaattttttttttatttagtgttgtggacattacaggatccaaaaaattttacgaaataagggtccagtaaacatcaattagtacatgtgtcgacaacatccggatggaatacaatgcggttattatgttatgaagattatccaaagttttatgatggttgttaatcttgcaattttttttgaaaaatcatgtaaacattaataattcttctttctttagtttttattttagttatacttttaatgtaataattaatattttctatcttttgttttacaatttaagtcagacgcttcccacagtaacgagaaaatcagtgcagtacggaatgagtgggatacagtttaagtcaaacgctctctacaacaaattttttgaaaaatcatgtcaacttgaaaaacggaatgtatataatgttacttgctgcaatgtagttcttttgttttaatgctgagatcaaattactttaatgtattataaacttagtttgacatattttctttttaatgattaacaatattattgatctaacgagtgtaataataaatggaatacatatatatacacatgaaataaatcgtatttcatatatattagattgtttgttttgtggtgcatgatgatgggaggtgaaatatttttattgagtagtgagtgagtgagtgctaccccattattatacttagtaaatataataatgtttgacattgtaggaccaactttatgttatgaaaattccaaaggccatgaagagggtcaagttatggaatgggacattggactcttattgaacctaattctggcccttcgaacaccaaatcatgtagtcttatacacagatgacaaaaaaatcatttattcatgaggctcaactttatgatttaaaagtaataaatagacatattagttttataatttatgtgattttattattacaattatactttactacacataatgtcgttttataacatccacaaagtcactcaaaaagataataaaagaaaagaaagatatataaattgcactagtggtacaaatatcttcttctcccccttatttttatttaattagtgttgtcttttaaatttaaagtaaaatcactaggaaagtttgtgaatatataagtgtatattataagatgtaataataataataatannnnnnataataataataatagtaaattaaccacatcatatactaaatcaataaacttgtggttcatgctgcaaaacgaaaaaacttgtggttcaaatcatgacacttcataattaaatgaattaacaaaagaatgaaaacgaatataatattactatataatgaatccactcacaaattggccaatgaaaaaaaaaatatatattttttataaaaatggccaattggtagaataatgaaatatataatatagtgaaaaaaaatagaaggtggaaagatccaatcatcaattaatcttaaaaattatctagtgaaggcagttatatgcaacaataaactagacatatttatatttgaaaagacaaataataaggatacaaaagatacaatctctcatattaaggagagaaaatatataggaactatttcacaaatacacaaaaataataaaaaaaaattataaaaatacagttttatagaattttaaatatttttatgattttttttattttattta

SEQ ID NO: 80818 - DNA, 1425 bp, Cannabis sativa
tgtccagattcaatgaacataaaatattcatttatcacaaaatcaattatttatttatttccttaaatagaaatatatttcccaatatagaaatattcttatataaccgtccaaacctgcagcaaccaaacacaagaacagagacacaaaagtatacacacaactacaacaatctagattgagtgttgttgattagagatatacacaaacaaatagaaaagaagaatacaagaagaacttgttctcagagttcaccctaaaaccaaggttacatctccgtcaagctccctcaaaggcctaattgtgcacgagctatcaacttcaatgggttcaaaacaatggtgctggagattccaagctacaaaacaacaaggtaatctcattcttgcttctctttaatctctctattttctgcttaaaactctgtataaatctctctattttctctctaattctcacaatttctttcttgtatttttgggttcattacaagaaatatcacttttgcgctggtaaaagtaacttttaccaatacattttgcaaactgcagtggcaaaaatgttaaagttttaccagtgcacatttgtagtggctaaaatctaacttttaccaacacattgacgcgctgggagaagtcatttttgcccgggcttttcattttgtgctgtcaaaagttctaataccaacgttgatttgccaaccccttttgccaacacatcagaagtaaattctattttaccagcgcaatactaaacttttgccagcacaaaaatatactggcaaaagtgacatttcttgtagtggtttctctctctaaattagagctgagcttctctctctaaaagctctagagccaatgcacaaatgcaggttgtaaaagctttattctctcatatatgattttcttttcttttataattttttgatggttgagtataaactgttatgttactgtatttagttgttgagactcagataagatgttgtgataatctgttatgaagtgtgttggaatcttgagagtattgagttgtttgttgtaactgaattcccttttgttgagagttggttgtgttgttgaagcccctttgttatttgtatccttgtatatttttaattaatagtgatacagtgatcgtttgtatgaaaatttatgcaacaacttttaattttaatttagcactcgtaccattgttactcatttttagtctacatattctctttttagtttaaaataaaataaatacatatattctttttcgcgccgtctcactactaaattctacaaacctcaataatgttgaagtattacagtttgtatggaattttttttaagttggtgatatatatggctatagtaatccaacttagatagccacaaaaacgatatgggacatgtttcaaaattcttcactctaattaat

SEQ ID NO: 80819 - DNA, 2000 bp, Cannabis sativa
  modified_base (1968)..(1968): a, c, t, g, unknown or other
attgaggagatttcattttcttcagcggaggttgcggagaagtagccccgcatggagccatgaagattataagttggaatgcgagggattgggcaacccttcaacattcagacatctgaaactgcttgtccaaaagcagcgtccgcatttgctttttattatggaatctaaagtagtctgtaattctattaatcgtgtccgttctgtccttaagtttagcaatggattggaggttcctaggcaaggtttgaagggggattgttgttgttatggaaggatgatattgatgtaactctgaattcgttctcaatgaatcattttgatgtttttgttttgtatgattgttgcccacggttccactttaccgctttttatggttctcccgaaactcaccaacgatctcatacttggaacttattaaaaagctttgcccctagttctacatcggtcccatggttaattatgggcaattttaatgaactcttatctaatgatgacaaagaagggggtcctctaagacgagaatccttaatggaggaatttaggcaaactgtggatgtgtgcaacttgactcctctggctttttcgggtgataagtttacttggacaaataggagttttaatgggttacttgttaaggagagacttgatcgaggctttattaatgaaaaatggaaagagttgtttaatgagaatcacatctctcatctggactacttcagttcagaccaccaggcgattgaatattttgtttctcttcatgctcaggatcggccagcttcaactatgcataaaagattccgttttgagcagttttggttgaaggactccgaatgttgggatgttattattaagaactggtctaatccttccactgatggttccatgtttcatcttttgcagaatatttttgcttgttctgaagctgttcaacattggcattttgggaagtatggacagatgaaaaatgacatcaataatgctcatcaacgtgttgcttctttgcacaacagtaggcattcttctactgcccacactactcaaatgcttgatgctaaaaaaattctagatgatttattggagaaggaggaattgtattggcaacaaagggctagagttgattggctgaaaggtggtgatgctaataccaaattttttcattctcgagccaaagctagatacaataacaacaagattaaatcccttctatctagtgatggtagaattcttagatcagaggccgattttgcagctgaagcatcttctttcttttccaatttattcactacagctggggaggatggtgatgctcttgatatagtgatatctactattaatacttccattactgatgagatgaacttgattttaacccaaaattttactagatctgatgtggaggaagctttgaattctatggctccggataaatcacctggtattgatgggatgttggctatgtttttttcagaagcactgggatgttgttggctctttagttacaaattgtgttcttgcaatcttgaatgaaggggctgatatgtctgaaattaactcagctttaatcactctcatcccaaaagtggagcaaccacaacagttaagcgactacaaaccaattagtttatgctcggttctctataaacttgtttctaaggctattgtcaatcggtttaaaaaggtgcttcctgctgctatttcgcaaaatcagagtgcttttcttccgggacggcttattacagacaatgttcttcttgcctttgaactagttcactgtttaaaaaataagaaaaggggtaaacttagctatgccgcattaaagcttgacatgagtatggcttttgacagggtcgaatggaattttttgcatgcggttatactaaaaatgggttttcatgagaattgggtgaatgtgatcatgcaatgtgtttcttcctcaactctctcatgttgggttttatgccctanataaaactcatttcaatataaagatcggaaga

SEQ ID NO: 80820 - DNA, 1500 bp, Cannabis sativa
atgaacttagaataaagatatgtctacttcactttgtgtaaagtaatatataacatgaccacttcaccttttgtaaacttatgatacatattgtgtatgcaaataccattactctttcaaagatggcaaaggtatattacaagttgatacattacaatacaacgacaattcttgcaaattatctttatttcacaactcgtgttgctgctactactaacaatactcttgtttaagtacataagaacaattaagaaggttaaaacttaaattataataaataataattacttaaaaaaattccaaactagatagcttcttcatcattgggaatacgaacatgagttctgacaataaagaaattctcatagatgaatccagcaaggccaccaccaatcaaaggcccaacccaataaacccaatgatgggtccaattaccggagaccaaagcaggtccaaaagaccttgctgggttcatagaagccccagagaagggtccaccagcaaggatattggcaccaacaacaaacccaacaagaattgggcccagcccatcaagagcccctctcttggggtccaccatagtagcgtagaccgtaaacagcagagaaaatgtgagaataatctcccatattattccttgtaaataacccacaccacttgccaacgaatgaattggagtaccctataattaattaattaattaattaataatgtatcattaaataattaaatcgattttataatttttttactataacaaaattaaattgactactattctaatggagtggccatgtgataaaattatagcatgtatatatatatatatgataaatttaaagaaaatattaaatttaagtggcacttcttaaaaagaatacatctaagttataatctcaaaatatatatagaataaaaaaaacgtatgaagtatgttatttgaaatctaatttttaacataataaatcaatattcataaatttttaataaattaacaaaatttggtgctccattttaaggatactatcaaaagactacctaaaaacatatgactaaataagaaaaaaataataattaattttacatatttataggaaaaaattcatttatatatatatttaatagagaaaataacaaattctgaaaaaaaaaaaaagaaagaaaatgaacaaataattttttaacacaactttgaatcctaatctatacatccaaacaaataaaataaaaactaaaattgtaacataatattttaattaaaaaatcataaacacattatatataatagttataattaatatttatatacaattattaaaatgagatttaattaacttacaagtcctccagtaatgtaatgtagaagaaagcaagctgaggtagaagccaacaattggacaatccaataaagaatggatctgacgacggtgatgttaccgccgatgagaaggccaagagtcacggcggggttaaggtggccgcccgaaatgtggccggcgg

SEQ ID NO: 80821 - DNA, 949 bp, Cannabis sativa
agaattgtaattttaatgtacatgtttttttttttttttaaagggcttaattttaaaatttcgcacaaagccccaaaatacttgggctggccctgtatagtgtcatctgaaaaaattataatatactctacctaagaaatgtatcgaagcaggtattcatgtttacggtaactaaatagttatatagttttatattgtatttttatgtgagtaaaaattaaggataattaataaaatgttgaaaataaaaatgaaatttatttattgtatacgtgtgtattttattttacacaaagatgataggagtatgattatttagacaaaaaagatgatggaatatattgatgaattcttaaaagctgtcatttgttgtcaagttagaactctctcctctcacctcatcttatccatctatgatgttttttttttttttttttgaacaaaagttgtgaatattattcaatatcgttcaactattacaatatcttttaaggaaatgggagcagagagctcatcataactacaatctgacagaaaataaaatcctttagcaacacaatgagcaaccttatttacagatcatttaacaaaacaaatagaaacatagtttagagaggagagtaataaacgacaatcatgattaagaatccaaactgagaggtcataggaaccgagctattgatagcttgtactataactaacgcatttgattcaaccaccacctccgacaagcctttgcgctttatctagcttagcgcttccttgaccccgaacacttcagcaagctctggttgcacagtctcgagtctattgtcagccacggcttctaataagcagccaaacccatatcgtctctcactatcaaatatagctccatcgacattaatctccatcgtatgcaccattggtttgtgccaccgctaggaaccattgttgtaatcaaccaaca

SEQ ID NO: 80822 - DNA, 2620 bp, Cannabis sativa
caacaatttcaatagttcaggtggtatttttaacgacattaaaagtttaggaggcataatttggtacatgtcaaagttcgggaggcaaaaatctcaattagacaaacattaaatatggaatttgaaaacctaatttacatatatatgacatatcaaatattataaaaatacctaaaaatataaaaatatcatataaattagtcaaacttaaaagtaccatatttaagtaaacaacttttaaaatttcatagtgactgtaattttatcttaatttaatgtaaatttatttaaaaaaaaaaaaaactggactatccattaaaaaaaaatcagacagtttaacttttcaatcacgagattatcatggtaatgatatgatttaaaaaaaaaaaaaataggttacctaattaaaaagtaaaaaaagaatcataaattttgtaattatatatttatatagtagttttgctgtttggaagtgacatatattgtctcaaataatttatggtgtaatcgtgacatgaaatatgaaatgagccacacatttaaataatttttatttatatttattttatttatctaaaaagtgtaaaaatgcacacaatatatagggtccatagcactttgcatgccaaatcattaaagaaatagatagatcaattaatttgggaatacattacatattgcatatacatatagagatagagtagaggtagagccaaaaggaccacaaaattatataaaagaaaatagacttggcaaaggaatgccttacaataatgagttttcttattaattatttagaggtccatttttgttagttaatgtgacattgaaatataatgtttggagtatttcaagctattaggagctttagttagatgcctctttcacccctcgtatttttattaaaagacatttttttttttgacaatgacttttcattgaatataattagagtttagtacatcaaagagaaatagaagaaaatcatccatccaaactaatttgtcattcactctgagtgtatgaactgctaactcatgtgcagccatattggccgagcgacgaacatgaattagagatgtctcaggaaaattagatagtaaactagcaatatcatctaaaatagagccaagttcattacagaaagaagatcttttaaaaaaaagctgaaatcaacgctaagcaatcagattcaaacaaactaataggtagcccgatagtaagagtccaatctaaagccaccattaaagttacagcttctgcttccatgactgcaaaagtccctacaaaaccataaaaaaacatctaataagggcattatactaaaaaaattattcttttaaaataaattaataataataaaataaactattaataccaaaactatcatattattactgacaataaaattttacagagtgatagattaaggttgaaagaatcctagtaatactattatttactcagcccaaaggctgaggaaatgatctctgttcaaaataatcttttgagcttttacctcagcaactactaaaaatattaatacttaaacatattgaacctaaaattactcattcaatgaaagtgataaaatagtaataagattacatataaaagtttagcagcaaaattaattccaaaagaaaggagtactgaccgaataaagattttgaaagacaagccaccactccgtctgtgttgttgcgaattatagcaccaatacctatagtattagtatgcttatcaattgatgcatcaacattgactttaaattatcccataggaggagtaacccaactagaggtagaagtgcacttattcccttgctgaatgttaatattttttcgacttttactaaattcctcatgaagcttatgaattcgtgagacaacaaccgtgggcgaaaatagctctcgaccatgaacaatctgtgtgcactcactccaaacgtaccaagcggcaactaaaaataattcaaattcaacctgagacagcacttcagacgccaaaagaatagttaatttgttgaaaggaagtttccaaagagagattttttaggaaactaaaattaagtagcttccaaacctttctaaaaccccggcaccaaaagatagcatgcccattagactcaatactaaagccacaaataagacaagtggagtggggaagaatagatcgtttttggagcccttttgaagttggaagtatctcatgaaaacctctccagttataatttaatactttgtttggtaaatgaagctttcaaaactttttctaccagattaaaaatacatccttagaaggagaagtagcagacaaatttaactgagaagccacataatatccacttttaacggaataagaaccatcttccgtatagtgctaaatccaagagtcttctttaggaaatttgcaaagagatatggaaccaatacattattgatcagtttcattaaacaaaactcgtaataaatccacattccaccttatccttgtctctgccataacttctttcaccaacaaattagaatgtgaatgattgaaagaggtaggcttaaatgaaaaaggtcggagcagccaaggatctttaaacacaagaatggtgtcaccagttccaacc

SEQ ID NO: 80823 - DNA, 630 bp, Cannabis sativa
tgttacaccaatccacaatgtctgtagtttgtggcttacaactcccattattcatagaggtttgaatataccataaataccaagacaccattacaaagaactcacatttctccttctccaaaccagcaaccaacctcattaataaggctaaaacatcttcctcatcctcatgacatacctgcttttgaagaccacattacttccaattaggacgattcagtttgcattcccaaagtgcatgaaaaatagattctttaccactataagaacatcttggacaacaatgatcaacatgaatccccctttatgcaagagcaaaatttgtcggaagccaagaatgagccaatttctagacaaaatatttcacctttggaggaattttgtatccacatcttactgaatattcttcatttttacaatagtgccacataattttatcctcaatctccaagctacaacacaacaacttcaaaatcaactcgacatcctcttcattaaaattagttttcacgaattcagtgtcccattgctcatttggttgcttcaagtcaacaacatacaattatgatggaatacttggcttatcatagatcttaaaactaactggtctcgatataccttatacatcgc

SEQ ID NO: 80824 - DNA, 1748 bp, Cannabis sativa
aggcctagtttgcttatgcctagggtcgaccctgtctataggtttaatagacactgtagatatttttataataaaataaaaagaaaataataataatttttaagtttaattaattagacttgtgattaataatgtaatttttttttatgcaaaatattttttaacaaaaagaaacaattcaaaaatatgtgttatttatgaaagttacattttgttttgtgttgttggaatgcatgtcttcttcttcacatataagtgtgtgtaggatgacaaatataagggtctcataacattatttatttttcatgagagattatataaatatgttagaggtaaaaatatttcaatatctaaataaaatgattaatttaaataaattatgtggatgttaaatttgtactttagtttataatgatgaaaagacatgtcgtaatgaatttataagattaatttaccttatagtcaaatgttcaaatatgtttatctattgatttagtgaaatatataattaaaatgagaagtataataataaagtggttgtgcattttttattaaaaatatcaatttttattttggggatgataagagaatattttaaaatattttttttttgtgcatattggatcttacagctcatcatcattgattttatctttttttttcctagaaagtgattatctatttttttttttttttttaatatagataatatacttaccataattaattaattattattattttttattaataagagtaaatgagaaaaaaagagtttcttattttattgatacagaatatttttaattacttgtttatggttttaaatagaatcatttcttttactagtaacttgtaaattaagtcgcgcacggtgtcgtcaaatttttgtaatttttcaaactttattttttattttttcttttgtactgattgaaaaattatataaataaatataatctaaaaatattgacaaatcgtataaattagtaatgtaaactatgactaatatgaactacttgaagctagctcaagtggctataggtgggtttgtgtgtcttggaggtttcgagttcgagtctcaaataaaacatgattgtaatatataaacgcttaaataaaaaaaaaactattactaatatgagtttaattgaaatatgagtttaattgaaatttataaaaaatatatatatatatataataaaattattactatatactataacatgggtacatttttaaaataagactgatttattcaatttctcaagaagaattaaaaatattaactttaggtaaagactcatttaacaattacttaaagaaaaaatatattaattttgagacaaataaaaataacaataaaatttgggctatatcaagcaaacaagacaacttgtgggtgaaatgggttaatttgatctatctcaaaggtcaattaatttggagctactacacaaagcaggatgctagttggtacttcaagaagttgatgaatcttaggggttcaacgagtgaagctgatctgaaccttgctgtcaatggaaagaaattctatccctcaaagttttacaacatgcagctgaaagagaacaaagtcaagtatgcgggtgcagtgtgggataaacttgtgttgccaaaacatagatttatctattggcaagttgtgaactcccagcttataacccgagagctgctgaacgggatagtgccaattcctgatgtaaactgtccagtttgtcatcaag

SEQ ID NO: 80825 - DNA, 930 bp, Cannabis sativa
taaaattaaaaaataaaagtggttttagaacacatttttgttgttcaaaaataaaattttaaaaacaaacttttaattatatttttatgattaaaaaaattaaaatgaaaatattattaattgccttttaaaaaaaaattcttccttattttttttttcttgtttacataattaattagttaaaaaatattatttaattaaaatgtcataattggtaatataaagctctcacatgggacacaattgatcagtcagtctcagccaaaacatatatattatacaatccttattatgtaacatctttttcttcatcatcatttttcttcctaacttttttcttcttttttttttttttgggttaaataaaaacagaaaaagttattatcttttaaattgtgatgaaagagtcatctatactaaagaagaaatttgttacttttgactgaagtaatgtaattataattaccctacttgtagagcaagtctagtgcttaaaatgatttaaagaaaaaaaataattattaataatgataattttattggaaccaattaattgactctaatatgactttacaataaaatgtgttaacttcttaaatttaaataatttcattattgaattggatttatgataaatataaagttttgtacaaagtctaagttaaacatatattaagcaattagtagtgtgcttcattatgacactgaattcttattattattattgttattgtggaaatatatgatagtataagactagactaatctacttcaatagtgagataattatatcgatattgcatataaaagaaagaaagtgcttccatattgtataataagtattagtaccaatcaatttttattttattttatttttaaaatatcaatttatattagttcaacatggacatatctagatatatatatata

SEQ ID NO: 80826 - DNA, 1460 bp, Cannabis sativa
aaaggtcatgatctctcaaccttcatctcccccacgccccctgttcctctgaaatttctcacagaagctgatgagcgatcaggtatactcaatcctgcctacttattttggattaaacaagatcaataactctatgcttggctcttatcatcaatgtttgaaactattctaatgcgtattgttggctgtgaaacctgttctgatgtttggagcattctcggtcaatacttcgcatctcaatttgctacaaaaattgatcaatatcaaactcagcttcgtaatttcaagaaaggatctaagtcgatcaatgactatcttcttggcattaagacttgggtggatcgtcttggttctgttggccaatctttgacagtgaaagaatacatctctgcgatctttaatggtttacctccagactatgatatcttcatcatctcggttaactctcgacatgaagaatatacagttgtagagattgaatcgcttcttttagctcaggagcacaggattgaaaaacacactcaagatctggactcagctccttcagttaatctagctcataatcgtggtgcgttcaagaatcgcacatcttcctctgatccatcaaatcaaggcgcaaatggtcaaaatcgtgggaatttcactcagtcttcgaggtcacctcactggaatccttatgctactggtcctcgaagctctgctcctactaatttttgtcaatcctcagctcctacttcaaataatcctcgtggtccatcccctgcttcaatgaactctaaaccagtgtgtcaactttgtggacgaattggtcatattgcctccaaatgctatcaacggttcaacatggaatttcctggtcttggtgctggaaacacagacaaaggatcttcacaaatgcaagctatgatagttctgcctccactgttagtgatccgtcttggtatcccgattctggtgcgacgaatcactgcactttcaatgaacaaaatctgatgcagaagtaagaatattatggtacagatcaaattcatgttggtgatggtactggactcgcaatcaataatgttggtaagaccttctttcatactcctcttacttcacatactctagttctcaataatctgttacatgtgcccagtatcactcgtaaccttctcagtgtctctcaatttgcgcatgataaccatgttttctttgattttcatcctgatttttgtcttgtgaaggatcaggtatctcaccaagttctgatggaaggcaaacttaagaatggtctgtatgccttcacatttgattctgttcatccttgttcagtttcatctatgccttttgcccttactcttaataacagtacatctgtctccaatgtaataaatcctcattctactgtttcttcttttgctttatggcatggcagattgggacatccatctgctagagttgtcaagaatgtattacag

SEQ ID NO: 80827 - DNA, 3049 bp, Cannabis sativa
attatagtattctgctctaatgcgcatagatattaattaatatttttattaaaactataaaaaataacaattttattattaattttatataaaaaaaaaatataaatggtttataatttaatactatacatagatatattaacaaaataataaaaatgacaaaaagttaataaaaattttaaaatttaatacatagatatattaacagaaaatttatgctagcaacgttaagtgctcaagcaataatactataggcggacttaagagtgttgaaggagggctaaagcccaccttaagatttgataatgtattaatatataattgttggttgcacatatatatatatataaatatagtagttaaatagaataattagttaagatgttttgagtttacggagaccatgtttcgaatcctcttgctcctttttttcaaagtgtatctaaattttttttattaaaaaaaaaccaacaaagtataagattttaaccaaattcaaacttatgaagaatagggagatgttgttaaacctatacttaaatttagtttagtcatttattgttttggatttttttcaatgtataactaagcctactttaaaattaaattggggatccgccactaaataatactaatgtaattttaccttatatattaatttataataaatcataataaaataaataataaatattaattattgaattaaaagaatatttagtatgtttagttttttttaaaaaaaatattctgactatttaattaattttatgaaatcgtttatttaatgtttttttaataaacatatgatattataaataataaagatatatattggtaaaaaatatatagaattattatagatataaaacatatttataacttgcaaaattatttgtacggttatttttttttcttaattttaattaaacatatataattatcaagacattgttgtttattatttttattaaatatttgttaaaataaatcatactaaaatagataataaacatgtatactataataaaaaaaatagtatgtttattatatatcaaactatttattatttatttaattttattttaaaacatgtttatttatatttaaaaaacaacttatatttgtaataaattatatattttctaataattatattataaaataaacataaatttataataaatcatattaaaatagatcataaacatttatattataattaaaaaaatatttagtatgtttattatataaaataatttttttatttaaatgacatattatattattattaaaaaaattccaaaacattactataataagcctactacattattatattattaatataattcttctaaataaaaaatgtagtataatgttgatttgggtttaattgagattttattctttattgagtaagaaaacatttttgaatatcactaacatgattagaatcatgtccacatatttaatatcaatgtgaatatttattgtattgtattacaattctaaaaatatttattgttaaggatagtgttatatatatttatagtaaatttactcattaattcataataatatttaatgatcaatttgtatagttttatgtaaatatgtcttcaaatgtatacattttaaaaattatttttttgacatattttttgtaattatgttatttttattgtacaattaaaaaaaaaaaaaaaaaaccctaaaaaataatgctgttagattatttccaatgagagaggtaaaagatgtattcgatacaaaaagtaattttgtaataaatttgcatcaaattatagtattgtgctttaatgtacaattgtaaaacttgatgcaaaagtatttaattaatatttttattaaaaatataaaaaaaaataatttaattattattttactatgtaaaacaattaaaaaaatatataaatagttcatgctatagataaatgttattgggataaattttctctccccgcgagaaagactatactaatgatagacctcacaatattaagtaaaataggtactttgcattatcgaaagagacctctctatatttgatcaaactgcagtatcatctaggaaaagtgcaaatgcgcattaaatcaacaaagataacgatcaaacattcaagtatcattaatcaaggagttatagaactgttataaccgttgtaattagtacaattaaatacttactattattattattattattattatttataacgatctcataatgaccacaatttgtaaccattacctattgttaatcctgaaaaattataaggctaattctcgaaattagtcaacgattagtctcaagaagtgaaagaaactgactttaagaatcacccaagcaatgaccaggtcacgcgtatatcctgtgaccactcaaccaaaccctagcttgggagtcactcaacaaagtagggataaaggtgactcggccaagtagggttgaaggtcactcgaccatgtgaagaaccatggtcactcaaacatgtgagcatcaaggtcactcggccatgtgaagaaccatggtcactgggccatgtcaagactaaggtcactcggccatgctaagatcgagatcactcggccatgtgagcatcaaggtcactcggccatgtcaagaccaaagtcacttggccgtggatgtacaagtcactcaaccatgtgttaagcctgcacatcccttggccatgcaacttgcaagtcattcggccattgatgtgcaagtcactcggccatgtgccaaacttgcacatttcttgtccatgcaacatgaaagtcactcggccatggatgtgcaagtcacttggccatgtgtcaaactttcacattccttggccatgcaaacatgaaagtaacttggccatggatgtgcaagttacgcgtccatgtgccaaacttgcacatcccctggtgtcacgggctcatcttttcaggtagcggatcacccgtgcggcaccttgacttctctaagacaaggtcagtcttccaaccatccgagtaataatgggctcattttttgc

SEQ ID NO: 80828 - DNA, 1392 bp, Cannabis sativa
atataaatagatgagtgttcctcacgtacactccaaaccaactctacattttaaaaatctactaaatatcaaatacgagatgaaaatgaaagatgaattggcatcaagttaatgaatatttacaatgattatataaaacgtgtgactttgtgtttagtattactctctaataaaaccaaatatctcaatcttcactttcacgaatctctcttatgctttgtgtacgtatcttcattttctcatatctgtacaattcttttctttagcatactaaaataaaaagaaagaatttcacgtcagtaagtaaaatttcagattaattagagacagtcatgacaactagtagttataagtattaagtattatttagttgcaggttataaaataaagagaaatgctaaaaggcaccagtagtgacaaacaccttcctatgtgtcaatatggctattggtctaatttagtatcggatctcatatagtttaatataatagtttttaagaagtatcgctagccaatcgcaaagcgacacatcttaagggttctaggcaccactggtacccaataacaatgctctaaaataaaataaagattgtataacaaattaagtttaattgttatgctttcgttcttttcttgcattgtactcaacattgggttctataaataaaagcttactctagttagttcagtgtgttctttaatgccattgtttctagctaagaaattgatttttagatgctctctgttttcttcttcttcttttctattatatggtatcaattgctactgactcacgtcaatggagtcctcctcgattgatcctaccagccactttgctccaactacacctcccgcatccccaactctagcgattccttcttggaatctgttctctaattctgtatcatcttctcttacgatcaaattggattgcctcaacttgaaatcacaagttgttcccactgtgattggccatgatctcgatgatatcttgtttcatggtgtccctcatccctctactctggtgaatggcaatccaaatcctacgtttgcttagtgaaaaaagaaggatcagctgctcttgtcatggctttgatcctccatgtctaaaggcactcttgcttctgttgcaaatttcagtcatcctccactatttggaaagccctggaacaaagatttaacagtaagtctcgtgccaagcttctttagctaaagagtcaattctctaccattcgtaaaggtaatctctcgatttctgattacactgacgaagttcagaatcttgtagattctttagctgtcgcaggctctgttgtcaatgatcaagatatcattctccaactcctgaatgaattggaaccagagtacgactctgctgtatcaggcattaca

SEQ ID NO: 80829 - DNA, 959 bp, Cannabis sativa
tttatgtttctctttgattccctagacttcagaaaataagtcaatatgggagtgtataatcaaagagaaagatataaatcttaacaaagaaagaaaagaattgccatgctgccaatttcttattgatgatttttatatttctctttaattccatagactttagaaaataagtcaatgtggggatgcataatcaaagtaaaaataaaaatcttaataaagagaaatgttatgctgtcaaaattttcctaaatataaattttgatggaaagtgaaatctggaaagaaaaaaaagctcataaatgaaacgccaaaatccagattttttactgaaacgattcatgcccgtgagctaaacttcaaaagaaaaaaaacttcccaagttatatatatgttcggtcagctaagtgtaaaaactgatcatatatataatccaaatcgaaaacattctcaaaattgcgatttaccatgaatattgtatatatgaaatatatgtagtttaatatacatggtcagttttaataaatacttaaagtaatgagtgtatacacatagccttatctatattagtatgtatatatggaaaagggatcttggcaaagaaaacatagccaaggaaaaaagctagcgtggcacttgatacattttataaaaaaaatatataaaataaagaattataataatgtattgccagttttttttcatatatacatatgtatcaattatatctatatatatatacaataagatcgtgaaaatttgaaggggtaatccaatccatatatttgaaacccccagttgatcatgaagaaaagtgtgtaatgcttactgaactgaacaatatatacatatgtaactacatttgaaaagcacagactgaatttaggattaattgaaatgtactgattgttttatgttagtccaagtgggagtttgttaggctttgtgccttaaataaaact

SEQ ID NO: 80830 - DNA, 1193 bp, Cannabis sativa
ttaacataaaccacttcaaaaatctaaattgataactaatcagattgtaatgggttttatttaaggcacaaaacccaacaggggcttgcttcaagaaattcatctgggaaaacaatggaatggttaaaaattaagaagtcgagaaaaaataaagaaatattctccgtacaaagacatatcacctgatacttgtctctgagtttgcttagaaagacgattgtttatttttttcattttcttctcagaattttccttgtatactggctcttgctgaagtttagcgtctgctagatacaacttgtgttctcgcaattttgtagtggtacacaatagacgccaatcgtgatcttggacgggaaggctgctcagaacctcaacaatttccacacgatctttatccaaaacaaatcaaaatattctaccagcgagcatagataagtgttatcataaagaacagaaataatcatcaagtgtaaatatatgtgtcatacgaggttaacgattgaagttaattctaattcctaacattttaaatgtgtagaaccacttcgatttccaatctcccatattggaaacggtaccctcaaccccgttgacttcagaatttgcccatttactgaagcaataaaagctattgtcatggccaacgttttttatatcataagaatagctaaaatccttgattgtgggttctcctcgagtgtattccatatacattgcgtaaaacctaaggattatggggtagctgttgggcgtaagctggaatggggagacatcgtaataagttaggatatcctttatgaaaggatgaaaaggaagcatgatgtcgcaacgaatgatagggattgaaaccattacgttttaggttggaataattccaggattggtaaggggaagatgaggtcattgcatcgacattgaatttgaaggggcaatatgaatcatattcaaccgttcaaatgttgttcggtaaaactttttaacctacgagcctaagtctttgcaggagaatggttcatccagaggagcactatccactgagaacgtttcactcccctcaaccccgcgagtaggtaacttggaatcttcacccatttccacgacctctgcgtctaggacaactcgtggataaatgaagttgccttgagtagataccgtgaattcacttttccacacctctagagtaatcgatg

SEQ ID NO: 80831 - DNA, 543 bp, Cannabis sativa
atacaaaatatatagtataattgtatgcaagtgtaagtgatgaaattaataccttgttaaataggattcctacaagagcaagctcagaagccatttctaaatcagcatcatcaaaaataatgagtggtgacttgcctcctaattctagtgataccggtttcaagttgcttgctgctgctgccttcattacttcacgcccaatctctccagacccagtaaaactcacctataaaaatatacagtatattcatcatcatgaaaccattcattaattaatcaattaatatgtgtagtcatgtttcaccttgtcaatgtccatatgagaactaatggcagcacctgcagtatgtccatatccatttaccacattgagcaccccatctgggatacctgcctatataataatggtattcacatgatacattaatattattactataatacttattaaaaaggactttttcatttttacacttcaaatcagttttttttttttgcatttttacgaaattatacatagaaattcctattgcaactagcgct

SEQ ID NO: 80832 - DNA, 519 bp, Cannabis sativa
tttttttttttttgaaaatggtatgatacttaatttgaaagatcaatataaattaaatactataaatataattgtactatataccctaaaataaagtactgttaattttttaactccatattaaaaattacaataaaataaaggcatatgtacgtacaaataaataatgtatattaatgaaagtccatgcccaataactttatttacttctacaatttattattattgttattattatttataatttttgaatttgaagtactcacataataaactcaactacaaagaaaccatacataataattgtgtaggacaaaattgtataatataattatgggtaaattgcgacataaatacctaatgtttcgattttatacacttaaatacctaatatttatttttggtgagaaaaatatctaatgttacaattctcttacaccgttactaccacttccattattaacttataaatatagacacgtggagggctcaaatgcattacatttattttttatttta

SEQ ID NO: 80833 - DNA, 2322 bp, Cannabis sativa
tttttttttaaagagacctattctaagcttctgaataaagaaaatgtggtagatcgataaagattttttttttttcttgctggatgctttaaaattcaaagtgcattaaatctgaaatttcaatagaaatccatgcaccgacactttgaaatatatacaacatatattgagaaatatatataagaaaacattcttccattactgtatctgatcaactcttttcccatataaaaagtgctacaattattaatcaatattaaaataagaaaattatagatcgagtttttgctcataattaatcaagatatattacattatatactgtcgctatttaatttctaacttctaaagaaaaaggttatatccccataaaaaaatgttatatgtattactgtgtatggaagatctaataaatagtggatctggttctccaggaagagaaatatttcgaggaaacattgactgaccaaatcaattatctttcaataaatattcttttgtcacatatattatttattttattattattttttaaaagggttgttatacagagcctaaaataatgtaaaatattaacttttctttccactgaaaaataaatatgtatattttttctttttaatctgagctgtgtatacttataataattattgtatgtagagcatttaaagataatttaattacgagtgtcagactttttttgtgcaattaataatcaactatataccttaatgaaactttcggcccccatatttataagcaaaataattggtatatgcacacgcttacattatatttactcaaatcagtacaattctctacaaggacttgtgcttcgccattaataaagtttgtcagcccgagaaaagatttataaaatagggagaatttaaataatttataatatacttacaaatgaaatttcatttttaatttcttctaatgatatgtattcttttttttaaaaaaaaaaaaagtgtgatattattattatagaaataaatgaataaataagtgttttcaggatgttcaaacttcaaagaataccctttttgaacgagaaaatgggatagcaaatagataatcacattaattccaatctataatataatatagggtaaatatttatttagctttatgctttgttaaaatacatatttatatttagtaacttttgtttaagattataatcaattgttatcctctcttctaaaagatcactacacactttggtaccttatgtatatttaaatttttaatatttctaaattagcctctcttttctgtggtttcgaatatgaatgacacaaagacttttacagaaaccttccaggctaccttggcccaaaactgatcaaccacttgcccaatggagagtaggcaaagacaggcaattagtctagttcttaggtaaagtgacggttggtttggttttcgcatcacactttagtgatgaatccaagcctctagtctcgaataatgacttcacatttaacagaaaaaacttaagggtgatatcttcaggggtcatccagaagcaaaatacgaaaagagtgttcgagacacaaattggatagcgataactgatcaactttctaattataaagagcatttcattactcatttggcaaatggcattacaacataatactctacgggtggaacatgcaaataatcacaacatagtacttatatatatgctttgattttgccattaagaagatattatatcatcacaaattaactcagagggaaaaaaagtaaattataaaagcactttttttatgtatataaataatgaacacaataattatataattatattaattatcagctatttacggctgccgtgtaatgcaattaattatcttgtattatagaggatagtatattaataaaaatcaaccaacagctcattacaaaataatatgagacaaatcaatcgtacttttgatcatattggctaaagcccattgtgttataatgtatgagcatccgaattaaacatcctaggagccttagaaaattagcaattagccaactgaggcgccatgctacttaattacaaacagaaacaaaatataaacatcctaggagccttagaaaattagcaattagccaactgaggcgccatgctacttaattacaaacagaaacaaaatatctataactgaacaatcattaacaacattgataacaatcattaaggatagtaatagtatattcagttaattcatatgtacggatactttagtattacaaattaagaaaaagatcattaattaattgtatatatatcgtacatagatcctttttattgtt

SEQ ID NO: 80834 - DNA, 2328 bp, Cannabis sativa
  modified_base (2156)..(2160): a, c, t, g, unknown or other
ccccatcatatataatgtgtgccacttctttaactaacaagaagtgtgtccacttctaagtgtccaccatagaaatactaaataaaactaaacaaattaaaataaacccaccaaaagtgcatgtaaactcactttttaaaacatatatactaaattattactcatttaaccttaaaacgctctcaacataagtagtgaattcaatcacaggatatcttttacttataatttgaatcgtcttactcttggagtcataccaacagatataaccagtcaaaaataaagtaactattaaaatctcatcacttaaaaatcttattcgacaaaatttaccaagcttagttagaataagatcatttaaactaaacgacaaatattcgtaccaagaatcagaatcaccataattcttcataacccatacgtgaactattgtgacttcatccacatatatcatagaaagacacccaaaaattttagctatgtctccaccattattacctttctcaacttgaggtaactttacaagattaaatttctccttacttatatcaaaagcaattattcctgtaaaaatttccggatcatcttcctcatcacttgtattgccatttctatagcaaatataccaatgaatgaagttattaacattaatggacgtgctaatagatggtgtaaccctaacagatttaaattctggaaataagttagacattgtaattgctttccatgaattgcttctcatactataaatcgcaattttatgaccctttttaagtcgagatgtaaaaaccaccacttttaaatcattggttaaggggtcatagccaagcccacgtaaacgataatattcatcttcaatcagatttaaaggaggaagttttttagactcattagtagttgggttccatatataatacaagggactcaatttattatccctactatcagaaattcctattatgcccttatcactgcctataaatgataaagaacacgattcatcatcatccgatgatgaatccatcgcagaatagggcagttgatttaaggaaatctcagaaaataatccattacccaaactacaaattgataaatcgtgactgttggatgcttctctatagttgataaaaataacacgaggtagttgttgactgttgaggtggagattcatgaaatattgagtccttagtagagagagccaagatttacatacacactcacactttttcacagatttagcatcgagcctagaaagaatattctctagtaaatcaaaagagatatcattgcaaaccacactttcttcttcttcttcgttaggattagtcattattggagacttaaattttgaaatttctaaagaagacattgagaattgagatatgaagccaagaataagaaaagtgaaattttcacaactacatattaatagtgtgaggtttcctatttcaaatcaacgtatattttttattattattatcttttttttaattttaatttaaagttatgttttctcagctaataaaaatatctaatttttttttcgataaaagtcaataaaaaagatctgttgtttaaatataatatttgaaggaaggaatgtgatttcaaaaaaaaaaaaatagtcgttcagtttttttttttttggataaaatttagtcgttcaatttcttatttatttttataatgtaaagctattaatttataaattataataaaaattaattaaatttatgaaataagagtaattattatctatttagtattaatgtggaagataagcgatttgtttttttatacgagattttcaccaaaaataaaaaaataaaaaataaataaaagaagagaataacaagacaaagtaaatcgaccttctaaaatatctccaattgttagagtaatttggtgtagaatctacaccaatttgatgtaagatctttaatttttggtgtaacaactctaataatttagactaaatatctcattaaataaatatattttgtattttatattattcatattaataacccaaaaataactaatttatgatataatttagtaaaataaaatatctattaaatccaccttttttttaaaaaaaaaaaaaaagaaaacttaaataaaatcatgcgtttattaaattattattttacttnnnnnttatttttatttatgttgttctttttagttttataagttaatgttatgtttttttttattttatttaaaaatagtatttttgttattgtaattttgtattttctactatgttagtgttctaaattaattgttactgtgataaattttaatttgaaaaataaaataaaa

SEQ ID NO: 80835 - DNA, 4251 bp, Cannabis sativa
  modified_base (4176)..(4202): a, c, t, g, unknown or other
aaaaaaagcctgtatctaaggatgtggtgttctagaggctggcgaagactatgctgttgaggaatacaccgaggctatccctctgaggaggcaaagtgccctaggagatcaatggatttctccaccatccgtggtgaccatgacgaagatgaaagattttctagagcgtggttaccttgagaatgtcgaatgcttccttccctcccttaactagagaaaggttactgcgcttagtcaggagttcataccaggaagggtgcgatgttacccttgctcccataattaaaaaaagattacggactactatcacataagtccgacctaattcacccctaagggcctcaagtacttgtccaccttgttcatcctctacgcctcacaaggatggggtgagtcgtccccgcatgataataattggctttttgatatgaagtgaagtcccaagtagaacaggtcggggtacttctattttctcaaatcgagaagaaatggttaacagacaccatggccactgaggtgaccaaaatagggggttttgtggatgagcactattttgtcaagggagtggacaccgcccatagtagttttcaataggtgtcgtcctactaccgccctccgttcacacttgagcttaggaaaagggtgtagaagattcttcaacttcctcctactgcacggaatatctctatcttggccaccgaggccaattttgttgagtaccaactttattcggccgattttgtaccaaaggctgtgaagacagcaaaggagacggtgcccagacaagagactccgagcatgaagaggaaaagcatgctcctccaatcagccaaatacctgttgagaaatctatcaagattagagaagaacataaaagagttgctcggccacctaccccagtggcaggaaagagaaaagccgtcttggtggagtaggaacaggaggattcctcagatggtgagcctccttctccgcttgttcgagagaatgctcctgcttacgtgaaaggtattttcactcacatttaaattttatgtgtatgagcttatatcatacttgtctttaacccccttattttgtccgcatgcttctatatctcagaaggtgttccaagctttgaagaagaggtcgtgtgaaagctctcgccagatacctccagctaaacagtcgaaggtggacgagatattgcccaaggagaagtgcttgattgagtcacccattcatgtcactaaggaggtggcattggagttggagccattaacatagaagacctccaagttgaaaggtgccaagggaggaagcacggatgggtctggtccgcccaagcctttaaatacttctatcattcttaaccctgagaccaagaagggcaaggagatgcttcaacattactaggacaagttactccctgaggtaaatgattagttagtcggatgagatgagatatccgtggaactactaatggacagactcctaaaggaggcaacttgagtaagtatttttcccttggtttttatcttatccttttatctgtgcaggttttaaccttttcttgtgcagctcaaccatggaggcatttcttagttattgtgtggcccaataaggaaaatcttgaggtagccaaccccacagctccaacggaccaaaacactgagcccctaaccaccaatgaccaagttaatctgtataaacaaccagggacttcgaccgtgtgaaaccttcttttattttttttaatcggcccatgggcctttttttaatacaatatggccgacaaagcagcctttaaacgtggtaatacttcattttattttaaaacaacttgctgaccgggcagcctttaatctcaagtttatgtcgtgcttttgtcatcttttcaaaatgaatattttccattgtttaagtaattacacatacaaactgctatgtttttccttgagcttgttatttacctatgctttgtacgagtatagttgcccctaaatgaccgagcagacttatgactgttagtcacttgcatttcacaagttcagttttcgtttgttcgacttctggcttcgagcaaaccctttgtacacatttgaatggtaaattcataacttgctataaaaaatgattgacacaattagaatgatagttaagatctttgttcatttatttgtcagaataattttgttaccgcagtaacttacatatattgaattatgaaagatattacatgatctaacaaatctttagctaattaaaacataaaacaattgcatttttcaagctgtactttaaagatggtcatctgactgagtgctagttattttatccaaaccattgagcgggatctgcccagtaggccatctacttaagcgtaaatgttcttgaattgtgtacttaaagggtgtcatcaaaccttgtacacttactggtcatatttcctaaaatgttcaacgctccaatatattggtactagaacgagctcaatgtttttgacataccatcccagcttgtatgatccagagtttgtgaattcaaacacttggtatggtctttccccattaggccaagcacaccagtcgtgctgacttttgtgttcatgaatactcttgtaaggaccatagctcccacaaagaattttcttaccaccacttgcttgttgaagtactaagccatgttttgttgatgagccactaactttaggtttgctgaggatcttttttcttcaatcttgtcaagtgattctaccaggagggcatgattagtttcttaatcgtaggttaatctcctttgggacagagcttctaactgcatgggcagcatggcttcataaccaaaggccatagcaaatggtgtttgctcggttgctattttctcagttgttcggtatgaccacaattcttccgatagttcctctaaccacttccttttagcctcttcaagccatttcttcatggtgtctttgagtgtcttgttgactgcctcgaccaaaccatttgttttagggtgtgccactgcggagaaactttttatgatttcatgtgtcacacagaaatctaaaaacatctggctatcaaactgtttgccattttccgaaacaatcttgtacagaagttcgaaccgacatattatatttttcaacacaaagtccaacaattttttagatgtgattattgcttaacgctcgccatctgtccactttgtaaaataatccaaatgagaccactgcatattgtaatccgcccttgcccttgggcaattgtctaatcggatctattccccatatggaaaaaggctaaggacattacatttttattagctcattaggcagtgcatggggatctttaaaaatctctggcatttgtaacatttcttcacataggcctttgaatcttctatctttgtcggctagaaatattcttgcctttgtattttctttgatagactttgtttcgctacgtggttaccacaaaatccatcatataccttggataggagtcgtgcagcctcttcttttgttacacatctaagtaatggcatggagaaacctcttctatacatcacaccttgaactatgatataccgtgtagcttttttcatcatcttctgagctttgttcctatcatttggaagttcttcggtgttgaggtacaagcttctataggtgtcatccaatttggtgttatgtctatcattttgacttaatctgcacaattgatgctgggttcttctaagaattagacgagactaagttggccttatgtgttacagtgctgcatgtgagccgtactagggcatcagtagttgcattttcttctcttagaatctgcgtgagggtgtaacccttaaattgtgtgagaaagtcttgtatattgcttagataggtcatcattttctctcctctggctgcgtactctcccgaaatatgattcactaccaactccaaatcactacagacctcaatgtacttaacatgtactgctcgagaaatttttagtccagctatgagtatttcatactttactttgttgttgggggccttgaacctaaatttgattgctctgtgtaggtgatgcactcaagtgtaacgagggaaattcctgcaccatagagttggtatgtagttgatctgtttacatgcaatctctaggtagatctgtctgttggaagttattttaccaggatctnnnnnnnnnnnnnnnnnnnnnnnnnnnaacaacctaaatatgaacttctaacacgatatgaaattaaacacataag

SEQ ID NO: 80836 - DNA, 1119 bp, Cannabis sativa
ttattatttgaacaatatgatgtcgactaaattttcataaaaagaacaatgaatctcaagttgacatgttttaataaaattttaagatatgatgtccattattatttttattatttatttatttttttgtgtgaacaaattatgatgtcgactaaattttcatgaaaagaagaatgaatctcaagttgacacgtttcagttaataggtgggttaagattttttttattgaaaaaacatgtcggttaagatttaaaggcagtcaaattctagtcaataagattaatttatttacatgttttgtttgtattatcaattttattttgtctttttccataaatacataatcaaactatttttattgtgactcttaatttcccttacacgtggcaagtgttatcagttaagattaatcatcaaatatctagattctagcttcacaatataatcaagaaacccttcagtacttgttattatagagtattgttattccatacaataatatttagaggctacactttataattagttaatgataataataatattaatatgatactaaaaaaagtgttagatattattatattttttagcatttttttatataataatattaaattaattatattttttgcactcttaattttgacatatactaaatcatgctcttaaattattaagattgttgttcgatttaaggacatttatcttctagtttcattcaattttactaattttgtaatcgtctatgtattagatcatgctttctagactttaatatctattaaatcatgtttctcgaattttaacatataccaactcaaacttcctgaactttcatttatgttagatttttttttactaaaattggaaaaatatattaaatcccacaatctcaatagtttaagaagatacaaccttaaaagtttatggggcataatttaatacatgttaatatttatgggataaaaatcttaattagctataaatttccacgaaaatatattattgtaactttttgttttttcatttttatataatgtaattaaactaaaataattgttttaattgttgagaaaaaatgagggtaaattgaatatgtattttgtaaaagttattaa

SEQ ID NO: 80837 - DNA, 884 bp, Cannabis sativa
tctctctctctctctgtctctgtctctctttctctttctctcgagcttacaccaccaatcggcatccaccatcgtggctgtagcaccgacgaccacacattagaggtatatttttattatttaataaaattaatttatatttattttatatattctgttatatatataaatatatataaatttatttaaatatattattgattttaattcatattaattatttatttcattttagatttaggtatttagtattagatttaagtagtatatacaaaaataaatatttggttttaattaattgttcgactataagttttaggtaataaaaatattattggatttagattaattatttaggtattaatttttgtattaaaaaatatttacattaattatttaggtattagtttgattttcatttcatttcttattaaataattattaaaaaataattaatttagattatttatttttatttaaaattttattgaaaaaaattcttagttctgtaaatataaaaatataatgttttaaagacttttttatttacatttttagtcgttatcaaacttttttatttaggtaattttttttatatataagatgataatatttataaagattaaaattttatccacttttactttaatttgatgaatttgtaaatgtaagcttttaatttaacattttaaatattttatgggtttcgggttctttgtgttgattgaagattgtacaattgtagctatctttattggagaaagatataatcttcaaaaaatttaaattatttatttagtggagtttgaatatgttagatactcatccgtagggaagtaggttctgcgaatacatgtactacggtcggatgggtagataatttt

SEQ ID NO: 80838 - DNA, 1250 bp, Cannabis sativa
gtgttacttgtttgtattcattatgctatataagttctattttagttataatcagtttgagttatttcatgttatttgtttttattcatcataacactaataaagaaccggttttattttaattataaccggtttcagttattttatgttatttataattatttattatgttaaagaaccgattatattttaattataaccggttttagttattagtttatattcatagaacttgttatatttttagttatatctgagacatttacttctggtgacttttccagcaacggtgacttttccggtgactttttcaatgacaatgactttttcggtgacttttctgccggcggtgatttttccggtaaaatttattggttttttacaaatatggaatttccactttttttgacaaaaatatggcataaaaaactcatataaatataaaaaaagaaacccttaaccctatagtgttatttatttatgccataaaaatataactatacccttaatttccatatttaagcaaattattgagcgggttatatttttgttgggtttctcggtttgtgtttttcattggattatatttgcgaggattattcaattttggtgatttacaaaaatttatgtacaaccccaaatccctagttcctatcccatttcttttcctagacattaatattttgccacctcaactaaaagtacacttatacatttaatagatctctccgaaaacaaactcatttgtcttgtttttaatttaataatattttttaaatagaaaaatatcatgactttatctttttctcttcattcctatcaatatattttcattctttttttcttcaacaatcagaacaaaatataggaggaagaaaaacaaaaaacatacaaaatggtttgcaaaaggcgtaaatgaatcaatgaaaatctgtgttcatccacattttctttaaggatgtactgaacagagaaatggagcaaaaaatttgatgtggccatctcggaaagcttcttcgacggtggcagtcttacaagaatttgaggatcgatggtgactcaataattatcgattaaagaagcattcgagtctgagctttttaactgtattgtgatattggggtagtttaggtgacacttggatcgagaataaggctagcaagaatgagtgttaggctatttttagcctatgttttggatccaatttatgtgcatttctagctgtgttgggacggaattacgcttgtttt

SEQ ID NO: 80839 - DNA, 1116 bp, Cannabis sativa
gaagaggcagattcttgtgaactgacattggaggaaagattgtctatagccatagatgttgccaatgggctggagtatcttcaagagggctatcctactcaaatagtacactgtgatttgaaaccacaaaatgtgcttcttgacaatgatatggtggctcatatagcagattttggaattggaaagcttcttttagacaaaccaaatggagaagaagctagcacaacaagtttcctaagaggaacaattggttatattcccccaggtatgcatctttttttttctttaaaaatggtatgcattttattgggtctatatattcactattattaatagcacctatatgaatatattttttttttattatttttctagtaccataaactaagataacaatttgtttttgcattgtaaaaccagagtatggacaaaggactcaagtatcaaccaaaggggacatatatagctttggtgttatgttgctagagatgattacaaggaaacgccccacaagcagtttgtttttagatgggcttgatctaaggaaatgggtggtttctgcattcccaaacgacattatggatgttattgacatcacactgaaacaacaagcaagcataggaggattagttggcagtgtagagagggttgagcaatgttgttatcgtttggttcaagttgcattgttatgtacagaagagaaccctcatgaaagacctctcatgtcttcagttgtgagtaagttgttgagtatttcgagggaactgagatttgaagctccattgtccaaacacaaggaaagagctacaatccctggactttgtgagtctagtgatcaatcctgatatgggtgaaatcaattacgggactttttagagcactactatttagattaatgaagcatatattatactctttcatttggataaaaaagattgcatgtataaattctccaagtatgtgtgatgtactacttttgtgatgtacaactgtaaatatataaggcgtctgattccaacccgctttgtacgacagccgattgagttacattggactattacagtagggattgggtaaaatacctattaatagggataataatttataacctttgat

SEQ ID NO: 80840 - DNA, 731 bp, Cannabis sativa
ttgaaataaggtattaaaaaaaaggacaatgctgctagggttgtagggtgtgtatacaacgaggttgacgaattgagtagctcactttgtagcgaaaagtgctttaaataaaaatgcttctcctgtgtgggaaggggttgttcctcctatagcaactgctgctttagcagttgatttgtctcccctataatatctttgagcattattattagctaccagtagtgttcaacactttttataagtaacgctctatgattagttaccgatattgcttaaaaactattttttttaagttacatgagatccgatacttaattacaccaataacagtatgacatcaaagaaagtcctaagtaccaatagtacattttaacaattctcaatatctttttgatttttgtaatcgaaaaaaagaaaaaactttaatgtttgaggtaagggaagacatttatatgattaaaaatagatttatacattgttaattttgtatgtttttctaataatatagagagagtgtcattaggttagaatggtggtgggagcatcaaactctaattggtttcccaaagtgaaagtaataatattgttgttgttattctttatggtgtggagatttgatactttttttttatgaagttcttagtaaagttttgtagattgaaaatttacacatggaattgggaaccatttacactttattatgtgttaaaattagtataacatgtaatgat

SEQ ID NO: 80841 - DNA, 999 bp, Cannabis sativa
  modified_base (42)..(48): a, c, t, g, unknown or other
aaaaagtaaaaaataccacttggcagtatttttgtaaaaaannnnnnnaagttagtataccatgtaaatttaacggctagatcatgtaattttatggctcataacgtggccagatgggcttttactcggaacttgtatgggtcccttgatgttgctgctattctcacaaatatttgttgtaacgaccatgaagtctaatgttcttattgttttattaatgaacgaatcttttcaaaaataacatatgccacgaattagaattggaatgttctaacatggaatataaaataaatggtagtgttttagggtcaaattaatggggcgcctaattataatgagaagaagttcctaaccatacatagccaatgcaacttcaagaaggttcttctagttctaacatccactcattaagtgagagtttgagagttctgttatgttgttgttatggttgtcaaaataatgcaagtcagccaacctaagttagccacgcgtctccacattgtttaatagaatggcaccacgtagtcttagggttagggaccaccattggccttttgtctgcttttttaacacagacatatattgatataaaaagtaaaaaaattgactaacactgccgtacaaagaatactcttcttactcttctattctttctttttttttcttgaaacagttctagtcttctattctagattctctaatattactctcgatgatatactatttgttttatatattttctgattattattattacttaaattataaaattatattaaattttatattttatatttcaaattttaatatatttttctatacaatttttaatggagtaatttacggtataaatacttaattttaattctcagttagcggtaataatacctaagttataattttgaaactgctataggtacctagttaaataaattgacacgtggcaattcctgattggtccaagtcgttaaatttttattattttttaaaaaaattaat

SEQ ID NO: 80842 - DNA, 1694 bp, Cannabis sativa
aaaaaaaaaatgaaattaagatggcaatataagaatagaattgggaataggaataaaatcaaatttataaaaataataatttttttcaatcttgcattgcattgtaatcattattcctttcattttaaaatacaataatcattccactaaaataatagaaaagtcataataatattctaatatttaaaaatacaaccaaataaaataataaaataataaaataatattctaatatttccattctataccattacctctaatcaaaacatatataaaattggtaaagaattattaaattttttttcaattttgcattaaaatatcaatctacccacttttaaatgtaatagtcattcaatcattccatcaaagaatgaaaaacacattccaattacatttcaatacttaaaaatgtatccaaacaatggaataaaatttgattattttccattccttttcattaccaaacacattttaaaagaaaccaaatccttaattaaaacattaggaaatatatctttttagcataccctgaagggtgattaggttaactctgttatatttcggcgttcattataaaacaacttttcgaatttgaatcttccaatttcttaaaaaaaatttacaagagaaacatataaaggtctagcagaaacatttctgctcttggaggtaataaaatagaatggaaataatttttatttttagtttggttgtatttaaaattattggaataccattctgatagaattcttttcatcattttagtggaataattattttattttgaaatggaaggaaagattattctaatacaagatttgaaaaaatttaataattttttttatccattttttttttttatgtatttaaaattttattccattcttattccaattttaattttatattttcattcctccacctaacttcttggctagtaaacccaaatcaaatcctaccatctctctactcctaagcaaacctcacccattttttcacaagaaaacagagagaatctttgacaaatagagttgaatattttcctctctttttctcaaagaaacacaaaaatcaagtgacttacctcttcaacaactgcgtcgtagaagcgaatgtcatcggcgttgaagtgatgtgaagcgcacacaagcaaaccctggacaacctgggagcactcggagtcttgaagctgagaagagatgggtctaaacctggaagcaaagtctttaaaatgatcttcgtccttgaactcagccgctcggaaaatgctgtcgttgtcatccggaaaattgcagtacttgattcttagaatgtcggcgtaatccccttcaatcataatccgaacggagtaccatgcattatccgggtacgaccggaactccaaccgggcttcttcatcgtcggccatccttaaaagaaacaaacaataagaaatggtgattttgatttttgaaataaatgtttgttttaatctaatataataaataaatagtaataagtaatagttgggattgtgggtttgtgagatgtgggactaagggacgcgtgcggtgtgttgattgtaggtacttcgaggcagccatagcgtggcaagctcccacctctccacttctctattttactgtatactctgctattctctctttccaatttagctataattaataagagaaatgttattgggtaatagt

SEQ ID NO: 80843 - DNA, 917 bp, Cannabis sativa
gtttcaacagtcctatcaacagtaccacggtggttagtatcagtatgctatggcacctggtggtcactcgtctaatcttggtggtcctccacctaataacatgcctagtcgcggtccctcatacaatcggggtcaaagcaataacacaggacaaaaagtgcagtgtcaactgtgtcacaaattggggcacactgtgaaacagtgtttctatcgctttgacaagtcatttactggtcccaaatcatttacaaactttccaccagttgccaacatagctgaaatgcaagccatgcttactggccccgacactgccaatgatgacaattggtaccccaatactggtgctatacatcacttaacaccagaaattgccaacctcaacactagcagtccctacactggtaatgaacatgtctttgttggaaatggagcaggcttgggcattgagcacataggtaactcctctatcttatctcccttttctttacaacaattaaatcttcataacttacttcatgtccctgccataaccaaaaatttgcttagtgtttctcaatttgctcaagataacaaagttttatttgagtttcacccttcctattgttgtgttaaggacatcataaccaagaagatcttgttggcttggaaccttgaccaaggcctgtacaagtttcaacctatatctcttaactctgttccaagtccttcactacagatcagccctactcagcttttaactctcaatgtcacaatcatactactagtgtcaatagctcttctttttctttgtggcacagcaggcttggccaccctgctgctagagttgtaacattggctttatccaaatgtaatataccattttctaataaaaatgttagtgaagtttgtcaagcttgttgccttggaaaaacacataa

SEQ ID NO: 80844 - DNA, 764 bp, Cannabis sativa
tataattggttaacctatacgtcagcaaggcaatcacatcttcttcttaattaataagtaaataaagtttagatataatgtactattagtttattaatgcattacttcatttatatacctgcctaattaataatgtttttaaattgtacagctctttctatttttctacaattattctatttgtccagtgtacaaaattagctgaaagaaaacactcaaactaagaatattttacaataaacaatttgacattattacactagggtccactttatatttataattattgggatttttacatgatatattatattttgacattttattatttttgtactgccacaaggtagaatttacaaaaatattgtatggttttatactatcctagtataaaactttcattgtggccataaggccacatgtttttttgcatgttatttttctatttttttattaattaatatttttaaaacaaattgtgatgtgaggttcttggcagttcactttttaaacaaaataacaaataaaataaaataaaaaactttatatattattatttattatgtaatcacacattaccccctcatttaacatttcatcattttatatttttttcatgatcccctttattcttaagctttacatttctatgttcatcttcttcttcaggtttttctttatttttatttttttatgtttacaaattcatacaattgtttggactttagccctcaaatgttcttgatgagagagagagagagaga

SEQ ID NO: 80845 - DNA, 2645 bp, Cannabis sativa
gatattgacttgcaaaagtttccacatcttattttagggggaaaataagattgatgctcatagtgaaactgttgtttgaaggatagaacaccgagcctagggccaatgtcaacctaggtgcttagtgtgcttgtacaccggtgcctagtgatgcctgggggctaactcactacttgaaaaatatgttctcctttacaagtctcatatatcttttttggagcataacaagatgaatgatcaagatagaatcccaatcgaatcgacagaaccaccaacggggtggttatgtcaacctaggcgcccagtgactagggtgatgtcaacctaggcgcttaactctccaactagggcctagatgtctttttttctttcccgaaagcaattgtatctttcttgtggatgaaaataagggaaattcccagacaacttagtcctggagtgcccccggttgagatacgtcaacttgggtgccccttgggccatgcactgggtgcccaggtaggggtcaacatctttgaaactagtttaattgatgttcaatcttctttttcgttaatagtgctccacggatttcagttttgtcaaattttcatgagcagaacttggtgaaacaaaattagagcccaagtttaaatgttaacatgggcgtccatagttttgtataggctctttcaagatgtttttgatgaaatatcatatccttgtattgttccttgatggatttaaggaattggggtccaaggatatccccagaaacctaaaccctaaccacggtcccaaatcgactatatgtcaacctgggctttcattaaggcttcttggttcaatttcatgttgactcatctccaaagtttgaaacttggatggggtatgtctctcatgtatcttaggaaagtagctaagaagatttcccataagaagttgatgggaaccaaagctgatgcaagacggcgcatatcatgtcaacttgggcgcccaacactgatgctggacccaggttgagccctgagatgctcacgtgacatcctcaacttcatggttcatcattttaggctcattaggacctacttacttgaacttttttgaatgatggcagcttgaaacgtcttttctggaccttagtgcttacctgggcgctaactagtgtcaactaaggcaccaacacagttttcgatgcccaagttgacaatcattagtcccaatggctggggcccagggttgtttccttcttgccatgcgtcaaaagtgttgtccatgtcattgggttacatttttcaagtaaacatttaccccttagtcagtatgacacgggtgtcatgttgactttccgaaacaaactatgtctgtttcatgcaaaaccaccactttggcatcactttttgtcacgtgaccttttttttttgtcctcccactgaaattctctacgaactgggagttttcaaaagtttttttttaaaaaaaaataatttttcaatgatttcctagttgcattagagatattgctataagtacaagagctcatcattcacattaccctcttctcttctccttagccacacgtctatataagcttacattgctctacttgggcttgcttcaacttgcttcaagattttcaattcaaggtaaatttcaatatttttttgaatctcaaagaaagtgactcaacgatttcaatgaaatcgacagaattttattttgacaagcattccccctccaaattctacttttaggaattttttgtttgtttgttgaagcttcatttccatttctagcttttggaaatattttcatttgagctgaaataagcttaattgaactaaaatgagctaaagttaagctaattaagcttggacaaatcatcccgtggtgagaaatgggtcataaaaaataacctcgaagattaccatctctttttttccctcatattgcttagtacattagagaaaagtagacaatgcctaagtctgcaaccttagaaactgcaaggggtggaaataaagtagtcttaaagcttctgacttcagccattaagagtgagaatgttgctgacaaggattatgagcttgaacccctagtcaagagcactcttagtgaaaagcaacttgaatccattagaaataattaaaaccttcttgatgaaaaagcaaagaaacttaggccaaattgaaatgccctactagcttaggcgcgctatagtatttttcttaattattgtgcaagtctttggtaaccaaaaggtgcattgaaaaatattttaataaaaaaaggtaatttgcggtcaaactccttgaagtttaaagtttggcatgatcaacctcctagactagaaaaattagagctaaactccccaaccaccacaatcattttgctctgtactccttcgatccatttggtctgttaagtgccaaagtggactaccaatgtgtacacaagtgtacaagtggcaaaatttaattgatctacctaatattaattatttaaatattataaaattatttcaaaaaataaaaaatattttaaaattaaaaatatatgaattttagttaaaataaattatttcctttttctttctttgttatttttcttctttttttctttctcttcttctcgacctttccaaccttggcttcccaaaccttgat

SEQ ID NO: 80846 - DNA, 960 bp, Cannabis sativa
ttgtttctatttgattttgatggaatggttaacaacttttaacacaacattgtacttttgatgattttgctgaaacaaattattaatgagggtatgatcataaaggtaacattttataaaaataaaatagtcaaatttgttaaaactatttgccaaacactccttaaactaattgtatttgctcactatatataaatttagtattacaattatttattatttttaattaggatataataaaattaagggattatttcataaatatgcaaaaattataaattttttattatatttgtatatttttatatatatatttttacagattttatttattttacaaaaatatggagtattgttttgacgttacgggaaagcaaaatgatttgtttctacaactatacaaagtattgtttttccgtgatcagaacaatgttggtttggttgctgctatggaaacagcaacgtgtaagcaatatttttggttgaaaaaaaataaacgaaccagtaaaaaaaatcatcaaaatgtaaataaaaaataaaaaaattcgtgaaaatataaaaataaaatccgttaaattatataaaaaaatattttttaagtgtattatataaaatttcataaattaatgacctaattattaataagtagacaaatatatagtttatgactcaattattatgccatgaaaagttggagaattgcatatacatgaatatttttgagaaatttcgccatatactatttttttaacttattttttttttcgaatttcggtttaggttgattcagtggtttctccgtttttatgtgtattgttacacggattttggtgacgatgtaggtttcttcgttagttgctatatatagggatttctgtatggaattctgtagaaataaaaaaaaataataataaaaaaaaaaaaataactgtttttaagtgtaaaaataataataaaaaa

SEQ ID NO: 80847 - DNA, 1060 bp, Cannabis sativa
actaaaagtcacatttaattacaaaaaatttatgttgtcactaaaagtagcagtttttttttttttttttgtagtgtatgatttataaagtaaataataaattaatcaaaaatgttatattttaaaattttaagtttttacttaactaatattattttattttttaaattattatatattttattaatatataactaaaacaaaagtaatagattatagaatcatttatctttattttattttttattaatggagctctttcaataagtttgcaattggtaatttgattaattgtatgccatcaattctatggaatctaactatctttaattatatgagtttggctatgcgtttagattgtttatatatatggtttttttttttcttttgattaaagtgttttaataatttttttaaggtttttaaaaaggttataatgtgttgtgttttctatggatcaaatgaaaagaagaaaaaactctattaacctatattggtagaaaaactctacttctatatatgttactcaatctatactctaattgggttggagttttaaatggatgatgaggtctattgttgtagaattggaagaattaatgaaattataaaatgattttgttaggttgagtttggaacaatgttattttttaagatatatttagtagttctgtataaattatgtaattttcccaaagaaaataattaattagagtatttataaaatagtaaattcaatttaattcaatcttcaaagtatctattgaattagattagaaaatttaaaatatatacttgtacaggttaaatgttaattgacatgtaaatgctttttcttagaaacactttggtacaagttagttaggttctgttagagttgttaattagtttgttatttagtcagagtcggttgtaagttagttgttctgcaactaacattttctgctggtttaactatcttacagagctatataagctcttgcttcagttgtaatcttcaattgagaatataataaaacagctctgatttcttccctctgttattctctctattctcata

SEQ ID NO: 80848 - DNA, 1638 bp, Cannabis sativa
aacccaaagtccactaattattgtattattgaaacttaattttttttcatatttattttcaagccttatggtatttttaataagtgttcctcaagctttgttgcatttgtgatagtttaattattggtgagagtccaaactgcaaaaatcgcatcacaccgcactattttttgcggtgcggtttccgcgattttttagttttgcggtgcgggtgcagtttgggaaattagaaaaactacatgtgcgggttgatttaaaaaatagtcaaaaaccgtactatccgcaccgcgaacacccctagagtgtatggtgaacttcagaatgccacgtggcttcattgataggtgtgatttgtcacgtatttatttgaattgaagatctaatattcttcgcacttttttcatgcttcaatgttggcggcttattaatcttttagttaaaggctataaagttttttctttcttattaatgtaaacgacatagtttgcttattttattgattttgctctttgagagcgatttatcatcatataatggactattttttattttatttgtctattaattgaaattaatatttttctctaaaaaaaatatgtatatacatagagaaatattaaagggtactaatagtacttaacactaattaaatgattatattattattagtgtaattaaatttcaaatgacacataatttaatttaataattattataaaatatcgctaattatttacaaaccaccatctcattttcgtggtaatgtaagacactatttgagaaattattatagaattgctaattttttttaatatgtaaagggctttttgctttcataacatttattggcttattacaacataaggcttactttatattttcattaatgaggatattcttttctgtgatgcttaatattctcttctttcttctttactttcatatttaagaacaaactagatatgacttagataaagaaaaaggtagataaaaatatatatatttttttatacatatcacaatacatgaacaagaagtgatgctcttgaagcataaatttatatatattaacatgtagtgcagattcaaaatttaaagtgcgggggacgtaattatttttgtaaagccagaggtaaaagtaaattttaaaaaaataaattgctcttagtgagatttaaacttttgatctctattttaaatattatttagcttaacgattatattaaaattaatattatatctataaatatcacgttttattataatttcatgtcgtaactaactaaaatacatatatatattttttgattttttttttcagctgaaacaactgctccatctcacttttatgtgggtctgctccaattaacatgtcattgttgtgttatgatcaatataactctcgatgaattaactgcacttaagttagataacaaattaattaatttagatagataattttttattattttttttttttacgatgtacttaattaactcattattttcaataaagtggaaaaataatgtcatgcttttattattaagaggaaaattgtagttctcaatatcttatagggtgattctacaatgcacccctataaaagggatgtgctgatacacccttaacttgttttg

SEQ ID NO: 80849 - DNA, 2620 bp, Cannabis sativa
aaaaacaacaattttcattaaataaataaataaaataataaaagaattgaaaagtaccatagatattatgtgattttcttttaattaacagataaaattttgcgaaatttatttgtggtttatattgattttgatatgaggtggaacacgtggagatcagttattgttcggtcgtttcgttttcagtatttttctatttaattttttttttttcgtttggagaagatatcattttcctggaaggagaagaaagaaagtaaatatacgcattaattaatttactctgaaaattcaaaacctgtccctactactcccagtactgcaccattataattattgttattattttttgtataaatgagatatttctttttatttcagtctaataagtaagaaactaataaataaataaaaaaaaagactttgaaagaagctaaactaaataaaaaagactcgatttatttatgtatataatttgtggcagtggtccccaaatactacgtacgattacgaagtagtattttttatgttttccactcttgatgattttatattaggctcttcttaaatgtttttaaacagcgggaataaataatttgcatgaaacacgttttggtcgctgacacatgtagtatataaattagtgtgagttgacgagttttatttggagagttttatagtgagagaagaaaaactagagatagagagagagagaaagagaagttaattaaaatggttcgaacaccatgttgtgaccagaatggaatgaagaagggtacatggacacctgaagaggataggaaacttgtggcttatgtcactaggtatggttgctggaactggcgccaacttcccaagtttgcaggtacaaaatcaccactttttcactatttatacacacacatgtatgtatggatcttatctattattattattaacttacaaaattaattgggttttgtgaatcttttgttgatgatcaggtctgaaaagatgtgggaagagttgccggttgcgttggatgaattatctgaggccaaatgtaaagagaggaaactatacacatgaagaagaggaaaccattaccaggctacatgcctctcttgggaacaagtcagtactactattttctcataaactatttatattaataatatatagaaattttattaattaaatatgattaatactaaattatttaacttctcgaagataataattggtctcacataccatagcaagactttttaaaataaatatatgcttaatttgtcctaccttctaattattaagaagtaataatttaattgtaatatatttattatattttccagatggtctgcaatagctgccgaattacccggaagaactgacaatgaggttaagaactattggcatactaatctgaagaagcgccaaaagcaaaactcttcatcggtcgaaataagtcaattagagaaatcatcatcaagtagcacagccagtataattactacagattattgtttgagtcctaataatgtggatgattattatagttccgaaatccaagaagtgttaatggagccaaataacaacaacaataataatagcaatgaggcgatgaagatgattatgagtagtaatagtactagtagaagtagtcagttggaaacagttgtcaataaaaacaatattaataacgtacactcgccattgtcacctcaaccgtcctcatcgggcagtgaaatctcaactacgacaaccgacactagtactagtacaagcagagctagtactgataataataataataatgccactactgaaaccaccacaaattatagtactaattacttcgttggggacttatcttataattataatgacctctttgaagatgatcaagccttacaacacgagttgttcagtgatagcttttggacggagccatttttggctgaccataattcttacatcccaactactactactcatgatcatgattatcttattactaatgctaattccttaatggatagcgatgatcttttgtctcctaccttggatagcatcctcttgtttacctctaattctagtactagtacagcaggtcatttttacgatgaaaatctagtaggattattgtgatttttacgaatattgtttatataaatatgattatgtatccatgcatcttttgtaagatatatgcatagaaacttagctaaataaatataatacaggatttaattagttacttagcattcagtttccgatcattatttttttgttttgctaaatcaggaaatgaattatatattgcaacaaaacttcttttacaacttattatcgatcagcgacattttcatggctatatcttctatacaattctcctacaaccattcgatatcctttactttcattttcttaggcaatattatagacattctacttttgatatatcttcctttgctacaatgtatgattacgggtattgtacactacaagaaaattatatcttgacggtacttaagagagccccgtaatagacctatctcgacggttattgaacgctgaggaactgaccgtcgagatagggtgtgtcatctgttagataaattaacaattaacccaagat

SEQ ID NO: 80850 - DNA, 1167 bp, Cannabis sativa
  modified_base (1117)..(1124): a, c, t, g, unknown or other
aatttttagatttttaataattactcttataattaatgtattatttatcttataattttatttcatatattctctaatatattattcattaattacttgcttttagggtataaatccgaacaaaagatgcttcaccgaaatctttggggtaactgttttgtcttgtctccttctagccttaactttcttttgttttatcatcatctaacactattttcttgtcttcaagcttgtgttagttatgcctacaccatggataacaaacataagaaggtatcggagctttttgagaagcttggggtcactgaagaccaggtgtttgctctgaaggagcatgttatttctcttgagagtgaggtgaccaagcttgaagaagcgaccaaagatcccaagactcgagaaagtgctttgaggaagaacttggtggctgctcgaaagaaaacttttgatcttgaagaatcttctcgtgatgccctagataaggagactgttgtggctaatggtctgagagaccaagtgaaggtcttgaagaagaaagtaaccacccttgtatttcatgtccttcttgatgttaccttctacaatggagccaagttgtttagatggaaaggcttccttgacacataggtgccagacttcatcaggcggtgtgagtagcattttgatgtagaaactctcaagaaaattgacttaattatgaatggtgatgaattagttgttggagaaactttaggagttgaagcctataaccctgagcatcctgacttccttccttctgctagtgatgtgcctcctagggagagtgaaggcagggaggaagctattgttgacatgacaggcttccagaaccttctttgagtgtgttcttctttttggattttagcatttagctttagtgtgttagttggtcattctcgggtggcctttcaatgtggctaactcttagtaaaatgttttagaattttgttttatttaaattagaaattatttccaatttaataaaaattttattccaatacttattttattaattttactttgtccattaccgcttgaccgtataacatttacacggtacaccatgtcttaagaaacttaatgtaaagaccgcttagtnnnnnnnngaaattagcagttaattatgttgattatgaaaattatttatag

SEQ ID NO: 80851 - DNA, 861 bp, Cannabis sativa
ctcctggtctggtctgtgtgcctattcccactcggtcccaacattgtttgatgatgttacaggtgaccaaacaatgaaggatagtttcctcatgctcaccacaaactggacagatactagatacatcaactctcttaacccgaagttgtgtaagagttggtaagcagtttgtacctgctctccaaaccaggtttgctacttttggtgggagtttcagactccaaaatttacgccagaactgggatgcttcatcctcgaaccatctaccctttagtttttgaagagtggagtatgcactcttaatagaacagatgcccgaattctctctacaccagaagagttgatcattgttttgggtgatcttcaaggggatactaacaatcagctgtttatccctatcactgaaaaggtcagatatcaactcctcatcccaaaatagcccatccatggtcattaggctagacacaaatgcaccagtaagtgcgggatgagtagattccaccatgagattgttatcatcgtttagccatggctcacccaaaactgggatagagcggccactcccgacacaccatcgaatgccacttttcaaaaggtcttgagcttcaaagatacttcgccacacaaagctcgggttggcaccaatttgagcagataagaaagacccgtgaggaaagtatcgcgccttgaaaaccctcgatacaagtgagtttgcctttgtaagaattctccaaccttgattccctagtaaagcaagattaaaatcgtgcaaatctcgaaagcccattccacccccacttttatgtttacaaagcttatcccatgccatccaatggataccttttttatcacccttaggtt

SEQ ID NO: 80852 - DNA, 3389 bp, Cannabis sativa
atgatacccatcaaaatataaattttattagtcattccatcatattttattcaaatgagtcatgctctgaataataattaataaatagatttaaattaaatatttttcactctttttactctaataattaaaaaactataaatataaataaaaattattctattattcattaaagcaaaaagagtaaaagatatttaatttgtatctatttatcaattattatttactatattactcatatatttcataataaaatgtgatggaatgaatatattattgtaaaattatattttgagaagtattattaaatagtcatatcctataaagagcataatttaaccgtgtaaaatgttgagataacaaaaataataattatggtaagtatatataatatgactgtaatgctaggcaaatattgtatgatgtggtgttgaactttattaacaattacaataatataaagattctaatctattggatatatttgtttctggcattattataaataattaaacttacttaattatatgcattaattaagctgtgtataaattatgttttatatggtaattatcattcaatagattgctaatattattaatctatagtcataaaaagtaagtactatttagtttagtgtggtaaatttgtgttgtatatatgattaatctggaaactgtgcagatgtatttgacctatcaaatattttttataggtgaaattagtgataactaattctgttagtgttaactaattaagcacataagtttacttttctttttgttgagttgtgcatattttgtttagctcatctttcttattagcatgcctctttgatggaaaatacatagattgcatcttttttgttttctctctcttgtgagttcttgcatgtgcaagaattttagcttgaagagtgttcaaccatggtgatttagggctgctaataaagaaagtttgtccagccagatcgtgaggggtaattcatgcatcggagggagtctaatccttgaagatcgagtgggttagtcgatttttgatatccaagaactaattagaaaattattgttcggtaaaattaatacgtaagtatacgcaatcaaaacaagtaatataatgataaataaagtatcattcccacgaggattgattatcaaatatcaatcaattaattctttgattctatttgattaataaaaatcgttggagaaaaagtaagtaaaacaaaacaataattaaaatttaagaaataacaatgaaaaaaaataaagattgttataattcctaactatcttttattttacttcttaatgtaattaattgcccaatttctcttcttcttatttaattgacaagttgaattaagtagtttataatctggttaagacttataaactcaatctatgtaaaaacttcatatattcctatggtaaagtttaataataaagatagcattaagcatagcaactaataaaattatacaaacaccttaggtactttcgtcctaaatctaagttgtatccataattaaagcatattcaaatttcactttctagaattttgatttgaatttataaataaaaattatagatgcccaataaataattacaaaattaaaacagattgtacggaattgatcaaagagaagaagaagaagaagaagaaattaaacaattacattaatccatagaataaattcaagtggttcacataataatccttaaaaaaaattatagctactagaaataattctaaaataatagaaattcaattaaaaaatataaaagatgaagagaggtagaacactgttggagtcctccaccggtgccttctgcttcttgccctccttttatactcaaaatttctctcaattttatgaatgatgttagatctaacctcccagcccctttaaatacaaaattaggaaggttttccaaaatcctccaatacccaatataaacctgatgctaaaagtaaaaactaacaaattcaagcataaattagaacaataaaatactaaaacgcacctcaccttaaattggacactaaaaaaatgcataaaaataaacctaataattactgtctaaaaacttttgttgtaaaacaatttgtaagaactcgttgattggttagtgaaatttttaccttgaaaagtcctaagaagtaaatcatagctagaatatttgattccaattgcagtgaacatcgtaaaagtatttgtattttccaatttttaatctaaatatgagaaacataactaaatgcatgcaactcaataaattgttcaacatatagttaggtaccggggctaagccaagagggggcacgtggggtcatttgtctcccttaattttttgttaattacatttttatatacatattataaaatatttcacgttttgtcctcaaaaaattaatatcttttatttatatctttatagcttttttattttgtcccctgaaaatttatgtttttcatttttatcctcataaaatttatatttcttatttttacttatatatatttttatttttatgctactaaaatgcacatttttctcaattaaaattacatttttcattattagtaccctaaacattttaagtaatttttcaaactgcccacactgatataactaaaactgtattaaattgcacagcaaaaattaaaaaaaaaaattaatctgcacctaatttaaataatactagtttttaaataaggtataatatattgtaagaaactaccataaaaggttgggacggggcagaaaaatattgtgaggggccaatatgtaaaaaaaataataataaaggactattaaatattttttataaaaaaaaaataaaaaaaataaaaaaaattgtctagcaccctctactttatcatgatgagatattactaattaaaaatatttttaaattaagtattaaacctcaggtaatttaatttaataattacgaaaaaatattactaattattcccaatgtcctacttcaacgtcaagatagtactagatatcatagctgtctaacacatacaagtggtcggttagtatgcatatataatttagttatattataaagtatgaaaacgacatatttataacactaatattcattttgaaagtatttgcaaaaacaagagaataaacaaataggaactaaagaaaaaggtagataatcactttaggctagttcaagtggccatagatgagtttgtgttggaagtttctatattcgagtctcaaataaaatatagatgttatatataaacgcttaaatgaaaaaaaaaaaaaaaaaaaaaccagataactagtgaacaaacatatataattagcccatttatttttgctttttgacttgtaagttagtttgtatcaaatttgttg

SEQ ID NO: 80853 - DNA, 1908 bp, Cannabis sativa
tttatgttaggttccataggagtggtggctggtttggaaccaagacagccggagtcttgtagtaattgaagggtaaagggcctttgagtaacggatatgcctttggggcatctagcaatttcaaggccaagaaagaagtggaggttgccgaggtccttcagtttgaaccgtgcatctagtgatgaaatgaaggtgttcatggctgtgatgttgtttgtagcaactatgatatcatctacatagatgagtaatgcaaggaaggtgtcattgtgatgtctaatgaacaatgaatgatcattttgggattgttggaaaccttgttgaaggagggtagtgcttagtttggcataccattgtctagatgcttgttttaagccatatagacttttctttaacttgcaaactgcatttttagggagatctcctttgggagtatatccttgtggtaatttcatataaacttcttcatgtaattctccatgaaaaaaggcattatttatgtccatatggtgtaaatgccaatttttcattgcagcaagagcaaggagtaattttagagtattgaatttggccacaggggcacaagtttcaaagtaatcgataccaggttgttggttgtatcctttggcgacaagtctggctttacatctttgtaatgagccatcggggtttaatttctttttgtaaacccatttatttccaatggcatgatggccatcgggtaagggaacaacaatccatgagtcattagtttccaaagcatctatttcatcatccacagctctattccaaattgcaagaagtttggcttcagcataggttcgtggttcaggaaactgtgctgcagtgagaatggcagcaataaatttggagctaaaccgatgataagagagaaatttagagagagggtgatctgtggttgatgaagtagtagtgatgactcccggacgaggtgttccttatgataatttgccaagaacacaaggaagaggatctggccgtggttcatcatcgaactcaaggctcatctgtcaagtttgcatgaaatcaggccattcagtagctgtttgtcactataggtttgacaaaaattgggttacacccaaaccaactttcccaaatccaagagcctatctcactgaatgtgacactgaatcagaccctcataatcccactgttcttcccgattttggtgatgatttgtcttggtttgctgatacaggggcaacaaattatatcaccaacacactcaacactcttgatgctgctgtagcctatgcaggactagaaactttagcagttgcagatggtaagaaaatttgtatctcacacaggttctgctactttaaattccctcaataattgcccactaaaatttaattctgttcttcaaattccatctattaaaaagaacttggttagtgtttctaaactaacagaggatgacaatatttttcttgaatttcataaacattggtgttttgtcaaggacaaacacactgggcaggtgcttctcaaagggaaagttaacgatagactctaccaattaggtgctgactctccatcatcttcagctgcaacattacaatgtaatcttgtatcgagttttgtagatgaatgtacctatgtctgtaatccatgtaattccacagaagatacaattgacaatgagaattgtactactttgcccattaataaaacaactacctttgttgattataatgtatcttcacctgcattatttttctcatctgtcagtaaagacataaatacatggcattgcaaacttggccacccagcaccacaaacaatgagtaaaatcttaccccttgtttcccatattggcaccattaaagatctcaagttctctactgcttgtcaattaggcaaaagccacaccttaccatt

SEQ ID NO: 80854 - DNA, 1130 bp, Cannabis sativa
agagagagagagagagaggaatcgagaaaaagaaagagaatgggaaagatgaaggatgcctgagaatgatttgatccagagaggaagatgactagttttggtcattgacgacagacttgaaggagttggatcaaggtactggccactagtgaagtgttgaagaagatgaagatgataaagtaggggacgagttggaggacttcaagagatcaacggagcaactgagcatccaagatggaggatgagatgaactgccacgtggaaaccattttcgccatcttattttgatatgtttccgacattagactccaccacgagtgtctctgactaaggatgatggttttgtagctctcgattgggtctctagtgatgatcttagcttacttctcgattctcgtcattcttattcttctggttgtaaatatttttggttgttgggaaaatgcagttgaaagaagaaaaaaaaaagaagagatttttaagtttatgtgacatttttattgttatgtttgaactatggggaaatgcaagaaaagtataccattttttattttttatttttgaaaaactacaactaaaatattaattatgtatgtgattcttagagtttaaaggtgtatctaattttgaatctgtatttttcttgccaattctcttttagggggttttgttgattgttatttgatgttaatgtacattgttaacttaacatgtatgtaatcatgtattgattagaattaaaggatttgactaatgatttttaattttacttagttttttcttgaataatttattttaattagttaaaatataaatctcaaaatattttttttatctaattttttagtatttaaaatactttttaaataaaaaaaaaataatgatttgaatttattactatcaaaattctaatgaaaagtatttttatcactaaaatttttatataaatatttaccatatgaagttgaggatcaaaatgatctggccaaaaaaaattagtgcaaaagatgttcaatggtttcgtagtttgtaaaacttaaaatgtgtataatactagccttgtaaggaggctaaatttaggggtgggcatccgatccaatctaaattttttttctccatccgatccaatc

SEQ ID NO: 80855 - DNA, 2415 bp, Cannabis sativa
tttttcatcatacttacttaatttatatgcccctgattctagaacttcgaccacctgatatggtccttcccagttaggtccgagcacacctgccgtactgtcttttgtgtttaaaaatactcttcttagggacttaaaactagaagtttgtttaaatactccatacatccaatactgatgtactttaccaatgtccatgcatctgatactaatgtactttaccaatgtcattgtaagtacatcagtatccaagtgtaagtaaactttattgctgattatcacgtcattgtaaattcaatgcacttataaatcatgggacttaacctttgaagcatataatcacaattactttccactgtgatgacatcactgtaattgtgaataactatatgttttgaatttatcagaaattgtatatcaaaccataaatataaaaataacatgttaacttaaatgacttctaatcttctattgattgcaaataagattatattaaaatagattttatttaaggcataaaattctaacaataaggtccactaatgtcagtgtggataatttttaataaagattgactacaattagcagtcttctttcttgttttagttaattttctacaagtgcaattagcacaaatatccccaccagaatcattaagagaaggaatcattttaggtttaattgaacaatcaaccatttcttttgaaatatgataatattttatgccataacaataaggatgtttccttaatataaaaggggaagctaaaggagtcattgacaatttacaaataccatcggaataatagtttccaataatctagagtcaaacatgatatcaatattatgattggcaaaaggaaaagaatatccttgtttaaccaaaagcggaagcgaaactaaattccttttaaaagtagggacataagaaaatattattcaatacaatttgaacactaaactataattcaagaataaataacgtcaacttcaacataagtgtccactttaagctttgactccctctcacttggcttcctgagatcccttagcccctggttgtgcttgcttctttccatattttccttatcctttgttgggcttgagttgagaaacatagtgagaaaattcattcttctacttttacaacttgctttcctcagacacacactcagaaattaggttactaatacttcatgtcttattataagtgtcggaggttatcttgataaggctaaaaagaggcaggaagtgcatgaagagcacaataaataatgtaagagtcagggagaggaatattatgatctttcaacttggactgaacattcacaattttcaaaataaaatatcgcactccttttaattcatcatacttaatggttatcatttcatccataagatgtctagcttcagtgtttttaccagttgcatatggctttctataacattgaaaaactcattagcatttgtggtgtttggcaaacaactaaataaatgttcaggaatggaacttttaatttatagcgatgaggctaagacatgtttacttttcccaatgtgcatgaagacttttcttggcaacagtattgagattagtaagatcaatagatttttcttctcgcaggcataagtccaaattcattatgcctaaagtaattatcacatctcgttttcatgccttaaagttggtgcattcaaaatttggatggaaacgtttattgttgttcacagaaaagagaccaaaaatttaaaacttgattaagctatatgagccaagcaattaaaaaatattgtagagtcaacttgtctttatatactcccttttgggatgagaatataacacacacatgatctacctttatgaagttaccaataaagaaaaaatacatatcaattaagaatttattacatttggacaaataaatttcttaaacaatatatattaattagagccaaaaaaaaaaataaacactactacaaaaagtacaattcttgtcaatttttaagtgtcatttaaagaatttgcgtcggtttagaaaaccgacgtatataccgtagtcgcaaatagttttttattagagtcgtttgttaaaggacgcaaaaaacaattatattcactacaacatttatggttattagaggcggaggattccgctggtaataatccccaagtccgctggtaaaagttaatagcggcggggtccaccggtaatgcttggtcgctaaaaatgggtattagcagcggactgaaacctccaccgctaataatagtgtcaaacacataaactgacattattagtagcggcagactaatccgcctctaatgcttttttgtttttttcattacatgttaatataataaaaattaaaattaaaattaaaaatattactataatttaaattatatttactgat

SEQ ID NO: 80856 - DNA, 2853 bp, Cannabis sativa
ttggataaagaaactggtaaaataattgctttgaagagaatcaacctgaggcaggaactacttcaagctatccctctaactggatcatcaatttcacttcaagaacaacccattgatgttgagattcctgctaacgcaattcgacaaatttccttctacaagattctccaccatccaaatgttgcacggtatatttctttctttctttctctattaatttttcacttaattattaatagtaataagaatatgtaatttggggggaaaattttcagtttggagtatataggaattgaccctcaagatcattttattcgtcttggatttgagtatgttggtgtggatctcaaaaaatttcaaaaggataatcccataagagccagtcacccaaagttgataaaggttccatttttatgttcttgttgtgtttgttttaatgtttttagctttttggattgaaaaaatgagcctaagctgaattgggtaacttttttgtagaggctaatgtatcaacttcttagtggtattgcttattaccattctattaacgcttcccatggaaatatcaatcccacgaatgtgctcataagttacagagacgatgacagtgatgctgaacatgtcaatttacagatcacagatcttgatttggtaattgaaaatgttttaatgtttattatggtttttgattatttcaaatgtattatacgatttatgacaaaagtgttgatttggtacatgaatgcagtgtatacagccatcttaccaagcacctgaaatttttttggagtctaatcaattatctagtgctgttgatatgttctctgctggttgcatatttggtcaaatgctgattgggaaaccaattttcgataaagaagatgaactaggcagcattttcaagtataatcacaacttatcattgcacatatttttgactaattagtcaatttgttagtataattgaatagttaatctgttaatttgtattgtaggcttttgggtacaccaactaaacaaactatgcctggggtgattgatctggatgagaaactaaaaaagtaccaaaaacattccccaaaggtaacattaatctctttaagatctttctctctgtttcttctccttgtttcaaattcaaacatattatcttattaattatatacaatgtattgtaaacacttcttgcaggacctgtctgaacaattcattgatgttgaaccagctggaattgatcttctgtctgttagttttggttttatttgttattatatataagctgattaaaatcataagatttatttatttctgggaatttcataatctttggtatgcagaaactgctgtgtttgaatccaagagaaagaattatggctgctgaggcacttaagcatcgttactttgatgaaattaaggcaaagaaacgcgtggctacaccagctgctcaagtgggaagctcgtctgccgggccttctgctgcaatggacagctcggctgctggtgcttcttctgtcaaggaaagctcggctgctggtgcttcttctgtcaaggaaagctcgggtagtggtgcttcttctatcaaggaaagctcgggtactggtgcttcttctgtcaaggaaagctcagctactcacgcttctgctgtggcgggctgctcggctactggtgcttcttctggcctggaaagcttggctgctggtgcttcttctgtcgaggaaagctcagctactggcgcttctgctggggcgggctgctcggctggtggtgcttctgctggcctggaaagctcggctgctggtgcttcttctgtcaaggaaagctcgggtactggtgcttcttctgtcaaggaaagctcagctactcacgcttctgctgtggcgggctgctcggctggtggtggttctgcttctgcacatgtgaatccttaaaatgttttccatttggttcatgttattgtttggtcatatatggatggacacattgcatataattgtttgtatgataaaaatgcaacaaattcattcattatgtttggacacttaaggtaggattatagtacgatatacaaataaacatattgtaggatttgctttatatcaatgaatatatcagctcatcaaatttatatgactatttatgagattctgcaatgcaatctttaagagtgagttatggtgtatgtatcactacatatcaaagccttgttcatcatagtaaattctccttcacgcaaatgagggacccaaaatcctttatccaaaggaaaacgagaaaaagcattagagaccttgactctttctctcttatgctttacttctcagatgagaaaattaatgataagtcaaattccgtggtgataatatttatagttgtcaaaagtaatacatcattccaaatatgattttttttatcatctctcatttacataaaatttgacacattttttttacaaaaaatactcaaatggttggcaaaaattgtccattatgatcttacatatcacattttaaatgttaaattaatgaagtttcttagtaaaaataactttttctaaaaaaaaatatgacatggctattattttttttggacaacactccaacatttatattctcaaaatttgtcttaaattgaactacattgcatatgtagcaagaccaattcaatagacaatctcattggagattacggctttagagggtttagggtttcaagtgttactcgttagtgtgattagggcttttaatagatggaactaacgtttacacgttaattttgacaaaaaattaaagataaacactgttaaaagatgtgtaccttaagatttattataactaaaagtttaggaacatattt

SEQ ID NO: 80857 - DNA, 1167 bp, Cannabis sativa
gaatgtcaaattaccatgaaatttgaaaaaaaaaatatttctcaatgtaatttcggacgtgaaggttgactaggaggttgtaatagaaagttgtaattaacactcttctaactcaaatggtcagacacgtggtttggaggtttgaatccttcttggctaccgagatagagatttactgtagttttctgggccttaggttcgagttcctcttagctaccgatgtaggaaatttttatagttttttcgagtttgaagccaggagccctatgtgaaggacaatgagtcttaattgtttcttcttcttctctataatttgtgaagttcataaaatgtttgttttcgggtttttatacaacttattaacttttccttgtgcaggaagtatctaactgggagcgttaatggaagctaaaccttagagaaaacagaaaagagagtttgattattgagagtgagaatttgtgaaattttctaagaaataataccaattacttatttagttcattctttttcttatcattttatttttgtcaccatttccactactactagtgtgtatatttcatttactattgtaaataattagggggtctattaaattactcagagatcttaattagaacaacattgtagcaatattgagttgtatttcttgtgtgtataaaatgtgtgaagacataataatacaaaaatgtattttagtaatttattgtaatacaacattactttcccttgattgttttttttttttttctaataataaacattgttaaaaataattagaacctaattaaatcaaagaaaaaagaagagaaattatttatccaaactagctcgtcattcacgaacttcagatcaaaatgcaggcaacccatagcgtaagaggccgatccaatgcaaccattaaagcgataacttctgtttggattactgcaaatacgaaacagagagaacaaaaagtaagaaaatgaaagcatagtggtgaacaatgacatatcaagagtggagtaaaagtaatggatcaaatatatagttgtatgaaattatgtgtaggtatttataactctagagttgagtaaaagtacattacaacagttaggccaacataccagacaatgattttgaaagatatgcaacgacttctccagttgaatttcgaactacata

SEQ ID NO: 80858 - DNA, 1887 bp, Cannabis sativa
agagtttgttaggcgtattgaaacagtattgttgactagcccagtaagcacttttaacagaaaatttacccgactttgctgcattccagaacacaatgtccgtgcctcccgttaaaggcttgatgatgagaatatcattagaaattcctccattgaaacactcacggataagttgctcattccacattctagtaccctccacaaacagatccttgacctgcaaaaggggctgattcttcttgaacttaaaattcagcttgatctcctcctccttcctactggggatccaaggtctatcccaaatttcaaaattaccatccgcaatcataatgcccgcttcctccacacaaatattacgcgcctccaaaagacttttccagcatttcgaatcagtccctttttttttttccacagtccatatcgaacagatatgacaatatttatctttaaacattttgacctagtcctttccttcatcttttagcaacatccaacagagttttgcaataagagcccgattcatatctgcaaagcgtctgaaacccaggccgccgcacctcttaggctggcaaagatcaggccagcttttaaacgcacaatatcgcttcttttcaacattcccattccagcaaaatcttgcaattagcgatccaactcatcacaaagagtcttaaagattaaagcagtagacatgaaataatttggaatattttgaagaaccgaatgaaccaacaccgttctgcccgcttgtgataggtgccttgccttccaaccttcgagtctacttaatattttctccttgagaaagagataattgtctctcttttttgccgagaaaaagaaggggtttccaagatgtttctcccttcgatccaggcaattaacctcaattacactcttaatttcttcacggcatcgttgagacaagttcggagagaagataactccacttttggatgtgttaactctttgactagaccataattcatacatttgaatgcacctcataagattttcgacattagaagtggaagcatggcagaaaaaaatagagtcgtccgcatattattgatgggaaatagagtcagcccttctggcaatacgaatcccatgcacttccctgttaccttcagcacgcgaaacaagttttgaaagtacctcactgcataagataaaaagatatggtgacagggggtcaccctggcggagtccgcgcttaggattgaagggagcaaggggggcactgtttagtaagatggaaaagttgaccgtagtgacacactgcataatgagattacacacatgtgacgagaatccgttcgcacgcaaaacctgaagaaggaagctccattcaaggcgatcgtacgccttactcatgtccgttttaatagccataagtccccctttccctttcttgtgcttgatcgtatgcaacacttcttgagcaactatggagcactcagcaatacttcggccagggaggaaagcaaattgaaaaggggacaccaatggatcaataactcctttgaggcgatccgtaataatacgggagatgatcttataaccaaagttacaaagactaataggccagaaaagctcgaactttgtagcatttggacctttgggaataaggcagatgaaagttcgattcacctctttgtctagaatacctatagagaaaaacttcctcaccatttcaatgacatcttccccaataatattccagtatttttgaaagaaaatacctggataaccatccggccccggggccttgaggggatgcatcttgaacaccgtatcgcgtacttcctcagctgaaggaactcgaccaatttcatcattatccatctctgacactttatccaaaaataaagaatcgagttcttg

SEQ ID NO: 80859 - DNA, 992 bp, Cannabis sativa
atatatattgatgattgatgattttgttatgttattaatgcatattgttgtgtaactgagatgattacattgttgaacaaacattacaaacctcacaactaatccaaattaattacactcaatttcaattattaaacaaagattttccaaggcagccataatatttttagattatcatttcattggcattatgtatatgggtatgtatgatttggttgagtcatcatgaactcattaatacgtacgtaatgataatgaatgcttgtagtattaagaaatatgactgagatagatgacactttcgatctaaaaatttcgctactatttcttatcactgtttatattattattgatcctaaatattaataatatatatgctaagcttcttaattttaaaatttctctaattcagcacacaaactcttccttgtcttcttctttctttctttctttatttcctttttcgttattcgctcttcataggcaaaatatattatacaaacagtccatcccaataatagaaatgaaacaataaatttaaattataaatttagtgtaccctaaatattgattagtataaaagtactgacaaataagtagtgttacgaaattttattaatccttcaaggaatatatgaaacataaatataaatcatgaggagaaagaagtacattaatttgacattatgacaaatcacatagtaatctttttaaagattatcatacggagaacagagggctgtgattttttgagtcagcatgaactcatttatatctaatatatacgaaatcaagtaaaaaaagtagtaggcatttgtcttaattcctttgtctcagtgttgttggaactttgtatgaaattatgtaaaaataaaaaagggaagtgtgtgagtaggagccccaacactacatttgaagtgtatatctagtgcaagtttgagatatgagtttgggtctcaaaggatacttagttttgtgcgcatgggtgagga

SEQ ID NO: 80860 - DNA, 2350 bp, Cannabis sativa
ccgccccatcactatcccaacacatatgggccccaaccgcagcagcctatgccccctcggcctaaagtttcagacaatgcaaaagatccttgtccaaaacgcggacatacagctcaggaagtacaaggtaatgttatatttaagtatttgaagagcttctgcaatgagtgaccacataaaaatttgcagagctaaaattagagtaactaacattaatgtcttctctactctactaaatgcagatcatcccaagttacaaaatacaaaaaaggtttcaaaagtgtctttgagtgaaatgatgtgggcaaggctcgagcaattctctacaatgaacaagttcaagagaatagttctcttggtaattcttttcaactaatctatttttttattatttttatgtgggatagttttagatctcttgttttgcttagcatgctcttcttcggtgatgatatttatttgattcttttccctctttttttgattttgaatttacagtttattggttggtatatgtcagtaaatgatgctggttttaaggcattaatttctgatatggatactagcagcagaggaatgattaacgaggatgaactaagagtcggattgcataagcttgatgatcaaattccagattcacatgttcatgttctaatgataattgtaagtgtggcactttttcttccttaattctggtacaattacaatgatgagaaggacctaacttgagaattggatttacagggtgatctagataaggatggatatttgaactatctagaaattgtgggcttatttgctaagctaagattgataggcaatgatgacaagtaccttcgcatagcctttgaattattcgacgaaaaccaaaccaaatacatagaaattgacgatctacgacattgtttggctgatgttgttcatgaaaacattgaagaagttgttgaagccattatggaagaagggacattgataaggtatgataagaaagacacaatccttgttttttattttgctcttatttactcaatttccttaaatgaactttgtttgtaggatggaaaaataagttatgatgagtttgttgcgatgatgatgtctgatataaaatggagaaaatcatcaaggaagtaatcacaagagcggttcaacaacagtctcagtctgaattggaagaaccatagagtaattttcttttgttattgttttgaaatgcttctcagttgattttctaatttgagatatcattctgcttttctgttttgaaaagggttgcacttgtttgtttttgagtgtttgctatgtttcatttctaccaaagaatagttccattagaatcattgtcttctgttactctttcttttagtatttagatgaaaaaacaaaaacctattaatgattagttagtttaatctggttgttaggtagttagagttcagttagtgtcggttagcttagctggtgtgaagctgtaataactgaattttgttacatctgtagctctctctatcttgatctctccattgtatataatgatacttactagctagtgtgtgtcacattaaatgagattttttgcctagtcttcttctttctcagattttttctcttctctttcatctttctctaccttttatctttctaaaatgtcatttaactcttaacaaaagtaatattatttattcatttctgtatggtaactttccataaacaaaagtttgagttcagtgtacatattttttgtatttattaatgcttcaacaaagaaaatattatggaggcaattcattttattttaagacttttatagtttaaacctcatcttgttaagttttgttggtttttctgtgttgaattctctagtatatatattttgaaaggatttctctgtgtattttaatatgatgttttatctacttcattggttctaaacatcaagaagattttttttttttttttgaaataaaatgttcgacctcccggtcattacaaaagaggtttataagtatggaagaaacatttaaacaaccataccgattatggataaaagtttacttaaccatattatgggtcataaagttataagtcgctacaggaaataaacaactaacaaaagatgaagcaattcttttacaaaagctagaatagttcacaatttttcatctagagtcctctccattgagagtgttgatcactacctttgagtcgctttccacaattacgaacttgcaacccttatcctttgtcgtttccaaagccaaacaacaaacagtatcctcgccacaaatagcatcaaaaaaacctaaccttgcagtagtcacccaagccaccacaccatggtagtctctag

SEQ ID NO: 80861 - DNA, 1030 bp, Cannabis sativa
taaattgttattgatataatgtaatatcgagtctcctaaaatttaactcataaaaaagtaacattagatcatagtccactattattttattatagattttacttacatcaaaatagcagataataaaaattaaatgaaacgaaaatacaatcataaaacgatataagagtaccttttcaaggaccaaataatgagataatttccaatcttcatcaccaatgtcagaataaatacaaagaccctaacaatatttatttcaatatttttcagtcattaaaaattattaagaatctattttactaagtgagatgctaaaataaaatttgatatgattcacatcattaattttctccaatatgaaccaaatattacattataaatacatacaaatgaaaattaattaatataacattcttgatagtaaaacctaagaaaaaaaacaccttgattggctttttttccttttgatttgagatcagtgactaagatagtgagagacgacttgaagatgtggaggaaatgatcacaccaagaaaacaaaaaataatgagtttagagagaaacatgaggaatagagaaaaaacttaccatcaaataaggaattatgagatttagctgagagagagagggtgtcatcatcgagggagagagagagttattcatcgaaggagagagagaagacgaagcccttgtcattgttgtctgggccttcacgcgagaggcaatctttgttgtctcgcctgaacagtcgcgttgtcttggctgtcgagggaggcagtcgtcgtcgttgtcgagggttgtggttttagggtttggggtttcgggtctctgataaccgaataaggaataagagaaacttaaagtttctttatcgccttatgtacaaacgaagacttttgttttcgattattagaaaataaccgaatactaaagtctttgtttttaaacgagcaataaaagcgatgatacaactcttaaaataattttatcttctcatttataattaataaatgaaaaaaataaagataaa

SEQ ID NO: 80862 - DNA, 1812 bp, Cannabis sativa
atatgaggttggatggttttttgcaataaattgatagttgagagagttttttcacaaattactttaaacacaattggcacttacagttaaatttaacaaatcttggtcggatctctagcgtttttgtactatttggctaaccatctcaaaactaattaatggtgagtgtagtagttcatattcttatatatgacttaatatttttatatttaatctatgtaagataatattctttaatattaagtatcattagtgtctaataataatattattcttattaaattataatgtacgagattcaatattaaattgtatcaataacagtatgtaagtatgtagtatgtgactcttgctgtccaaattaacatttctcaaaatatacattaataagggtaagaggccaaagagggtgagcgtacaccacacttgacatgacacaacacactttgaatgaaagctattttttctcctttttaggctggaaaaatgccatacttgcttacttcttcaacactcactatatcaccttttattgtatttgtatttatgttattggtcatttattttaattttttgggttctcttgtttggtcaccgccacacctaatattaatgctactaatctactttatgtaactatgtgcttattcacttccctctattttcccaactgtcttttttagtcactcatgtacccatctttttatacctcatctatcccataagtactagattaaaaaaaatatatcttaaattttatatatttaatttaataattattataaaaaaccaccaaatattcacaaagaccgctaactactcataaaaacaatactttgtaatactaatgtctaatagtaatactatctcataaaagaaatactaaaggcaaggtcgatcttaggttaaaacggactaggcataaccttaagctaagacgagctaagtctatacttagggtctacccaaccgaagagaatcctatattttttcactcttttttaaaggactaactaatttttctctagagtcctctatatgtattttcaagatacttaaggtgacaaatattataaaatgttacatactattattggtatattttaatattgagtttcttgtattttaatttaataaacaatataaaaaaggagaaattttatttttatagtttttaaaatataaatttgtaaaaatatggattttcaaaaaaaaatattttatgagaaaattttagaaaaaaaataaaaataacaacataaggtacctagttatcccttttggtaatttaccataatggtacttggttacccttactgattttccattcttttttttttttaattttcccttaaaataatataaaaattcataaaatgtataatttcctttataaaaaattgttaaccaattttaaaatattatataatataagtccaattaggacttttgtcctccaaactttgatatgtgtcaaatcatgctctctaaacttttaagactgttaaaaattctccttaaattattgagattgttgaatttaatgacttatatccaattttagtaaaaaaaaagtctaacatgaatcaaagttctaaagagtatgatttagtatatgtcaaagtttgaaggatataatttagtaaatatcaaaatctaaggaacataatttaatacatgaataattattaattattaaaattaaacgaaattgtacaaaaattcttaaatccaaccataatttttaacagtaacaaaagtttagaaacataggcaataatataattagcaataatataatgttgttaggct

SEQ ID NO: 80863 - DNA, 1216 bp, Cannabis sativa
tgattgcgtatacttgcgtagtgattataaatttagcaacaagctcttacaaagatctctgagtattcactcttggaacgaaatatctctcttgagtgtattctttctgaataaattcatcttcataaatagtgaaatgagaccactattaataggggctaattacatagtaatggtttcccttaatctataagaaataaaatagaaaagtagcatgtttctataattacaatgaagaaattgggaaatctaggctaattgcctttattctctgaaggtatgaattaatcccacaaaattagggattggtttgtggcatgcaagcttggagatgacatcgatcacttatgaaattgcaactcacatctcctggtcagtgcatgcgagttgatcacacgaccgagctggttgggtgtccatcagtgatcttgctcgaatatcttgctatttgtctatgactatgagcttcatattaatcttcatgggctgctaggagtaaactgaactaaattaggccggagtttactccttaaacccaaactcactcatcaatggaggatttgtgaaatataggattacatagtttgacaaaaatttacaaacaaattttaataaaaaattgcaacaaaatcctataccacaattatggtgtccatatttttttaataaatactgtaaaaaattcctaacccaattttatcatataattaagaattcatattcttacataaaaaattaaattcatcaattcataacataacaacatatatatacatataaatacataaatatccaatacagtatttaatctatacaattgtaaagataactcttgatactagttgttgatttttatggtccatattagagttaaaaaaacagaaacaggatttgattgaaaataatttaatccaatatgaactataagtccaaagatctcaacctaatgtatatagattaaatctagactaatgaatagagagacaatgcctcttgtagcctattaggggatccttgctatcttttcgtattttatcgaacatccaattcaagaacttgctgaagagttcataccacaatcttctaagctagtctcaacactcaagaatagagtgggctattaaattctattggatgagtataattatgtaatcacagtatattctcaactcataagatactgtgaagagatatggatgatcacaaaactcacacc

SEQ ID NO: 80864 - DNA, 794 bp, Cannabis sativa
tcccaccaattacaatcttttaagtaaatggattttatccacttaacccaaaatattgtctttctttgaagcaacatcccaaacatacttgctcactgttgccatgttctattcttcaatatctctatgcctaagaccattagccttcttaggcttacaaactgtttttcgagcaatatttcatggacctgatgcattatctacacctttccacaaaaaaggacctgcaaatatcattaattctcttcaatactcgcttatgatggtgttcgattaaaattctcaatatagattcatatgtattgatgtattactatttgaaatttgacccaaataaaatgatcaatttagtaattatgggtcaggggtttgtagatatcttaaacgatatttttaatttattaaggggctaaattgaaaatacttaaaattaataacctagctatgaggttatatattggtagtagtccccaagaaatttgagaaatttcattctcatatattcctccatcaagaaaaaattagaaaactcttggaagatcattaccataagatcatctaaattagatgtattaagatcatcattaactatgaattaaggtcagggcatcttaattcttttggaatcgctgtgctaaccttaaaaatttagtcccctaacaaaaaaaaatgcagattgtgaataatatatattttttttaatattatagattatatatgagaaacttacaaaaatactggaatttaggttaaattttacaaaaatactgtcacatggaaaagttttcaaaaat

SEQ ID NO: 80865 - DNA, 751 bp, Cannabis sativa
tgcttgtgaagaaatctactcatctttcatctgtggcagtcaaatatgtaaaacccatttttatataagttagttaaactagtgcaaaaggaatcgtgttttttctttatttttttattattaatttttgcggcgccaatggttttatgttatgaaaaaatttgatagtactgagcaaagtgtacgagattaaattatatatttttattttattttgtgacataaatagtaagtaaataattttttttaatgtaataagtttttcttattattgttatttgctaggaattctaaatccggggtagtgtaaaaaacttggtattgtataattcaacgcggcaagtaaaacggtggctcgactggtatatggacttttgtccttttttttttttttgtctttttaaaaaaaaaagattggtatgttttttttcttccaagagtgttgtcttttgtttttacaaaatattaaattttgaacaaaaatttataattgtactgttacttgaaatgttttacaaaaatattctttttataaaacaaccgtaaaacactaaacggaacactcaaaaataacagtatcaacctggttcgttggtttcgaccactcaaaaattaaatctcatttgaccattaaatccagaatggtcaaaaatagggttagagacctcactctcgagtttaagaaccttaaaagtatcaaaacgataacctgagagctcaggatcgaggtacccatcgcccaggttgacaa

SEQ ID NO: 80866 - DNA, 1050 bp, Cannabis sativa
aactatatcttaattagctaaaaattgagatatgcaaaaagtttagaggaactatcctttatatagtctcgatctatatcaaagtatatacatagatttaaaattgttacaatttgacttatttcaattttgttagtacatttgataataaatttcataaaatcctaaatgtaggaatctaattttatcttctgttgatgagttattgccatttattacaaattaatttaaatatattaaagattatgggctaatcttgattgataacaaaagttgacattatagaagaaacctaaaaggctaacaaacttccaatataacctccttacaaagttacaacaagttctatttgcaaagttgtcaacttctccttaatattactttaaacataatatatggttgttgtccaatatttcttccagaaatgagagaactacatttttcattttttttttgatatctcaataattgtaatcctaaattttgtataaagatgtctattttttttttgtattattttaaatattttgtttaaaacaaacatatttattaagtactagtagtgccttacactaaccatgatgtagcgacttgtgactattatcaaatttttcataacaacttttgaattaaattatgtgagactcaataataaattgcatcaatattaatatgacacttcatgatagtgttaaagatcatcacaccccactataaaaaggcacatttagcattggtgaaaaatgtctatccatgtaattgatcgacgcaatagattaccctaaatttgagtcgtcaattgtgaaatcaatacctataagttctcaatggcatcggtccacacactaatacaaaaatttaaactgaggccagagaaaaaattaaaaatatatttgaccttaagctaaaaatctagagaaaatgctcgaagcgtcttagtgttagtttacctctctttttagttaattttcttatgggtttctaagttcccttattattaaggcggacgatgaaacctagtgtatttgatacagaataacatttcttctg

SEQ ID NO: 80867 - DNA, 2284 bp, Cannabis sativa
aaaggttatgtgacgttatatttaatattttgattatgaaaaaaatatttatcaattaaaattattttaaaattatatttaattaatgtataataaaaagacttatcctaaaagaaaaagttaagcagaaaattagctttttatttttccagggagagagagaaagtgagagtatactatgctttggaaattttttaggtggggcaaattacaaatgaagtcattcagcaaaaagaaaagaaaagaaaatagtaataattaagttggcaactctcttcattatataagaaacaaaaaattgatcagtataaaattccaacaagaaactcaaaatttcaaattaatacaacacctaaatataatgtagacaggttttctaaaaataaataaatatatatgtagacaatacgtggtccggacaaataaataaatataattgaacactgtcccagtaaataaactacaataaattaataataattaatacaagttaaattacaatagcactagctaactatatgtagttcactcgtttaattatattcgtaatatatatgtatattgaagagattgtgaatagtgcacattagaactcaatatgtatgtatattctaaagaaaaaattagaacacaaacactaaatatttaagtaatgatgatttattacatcatgggagccaatgctagctagagagaagaaatggagaaataaagagggcacaagtagatgatactagcacaagccaatggtagataggaatatttattatatacaaggctatcatattttttttttttttgatactttgagttttttttctcttttggaatattcccagagttcataaatagtgttcatcaactttcttttccacaaataataaaatcagattaataatagtcacttaaaatgccaaacaccataaagtaatatatcgctattaatttattttaagattgagttctacacattttaatttaacaaaataatataaaaaaatgttaactataaggtgctacatagtataatactgaacatcttaatgtgccaaataataatactcatttataatatgaggagtgttatcgtcatcctcttattataacctcttagtcaacctccgtatttaaaaacatatattggaatatttttttcaattttttttatggctttgttcgttatagttacacatcattcttgtaaatttctgaattttttttttgaataatttacaatgtcaaaaataggtttgaagttttttgaacacgttagaatgtcaggaactctatttttagtactgtaaattattcagaattttttaaaaatttatagggacgatattataactataatgaataacactatgaaaaaaaatattttgacacgtgatttcacatggagattgactaagagattgtaataggagattgtaattatcactctttgttatacctagttttcgcaaaaaaataaaataaaatggctactcttgcacaaggtcccacatgccaagagtgccttgaagacactaaagttaaccttgcgactttgaccaagacttataaatgtcaaataagttaagacatccttcttgagggtcccgtggcacttctagaggattcaaaactattaaccaaccattcggtgtcgggactcacacacccaagtgtgcccaaactaggattcatgggcctgcgcaagcgttggccaacaaggacttgacttatttgggcataaaattacttaggtttgtgcataaagttaatatggcatcaaaccctcaaggaaaaggcagatgcgcccattgtcatatggaaatggcagtgcccatcaaaattgatgggcactgccacaaggaaatagcagtgctcttcattttttatgggcactgccataagggaatggcagcggtcgctccttacaaacaatgaagggaaaattgttcaaatatgctccctcaacattaaagaatgcaaaacaaatgagagaaattatttcccacctatggctaaccctagccgaccactaccatatgaaaatggcagtgctcttcaattttgatgggcactgccacaaggaaatggcagtggtcggcaatgaagagggaaagtgagattttttgccaacaatatcttttcaccaataatatgtcaaaaccaagtggtatagaaaccacttggccaaccactgccataaagaaatggcaatgctcttcaattttgatgggcactgccacaagggaatggcatgttggaattattctaccaggatctagatttacta

SEQ ID NO: 80868 - DNA, 798 bp, Cannabis sativa
cattcatcttataaatcataagtctagtacactctcttaaaaaggtgttttggtagactagtttatcttatttaagtgagttttttagtttatttttttttttttataatcacgtatattgtacatagttatttagagttatatatcgatatatctttaaaaaattctgaataattttttttcttggtaattaaaaaaaatctattgataagtgcaattttttacacttgggcacaaatcagagttacctattgttgaactcaaaatctcaaactaatctgtatcctctatacttgttttctctcttttaaagtataaaacaaatttccttttcaatcctatatacaagaaaatttaggcaccgtctagttgaaagacttgaaaatattggaataataagaatataaataggaatggaatgaagataaatttaaaataaatgaaagaaattgataaataaaaattattaaattttttctcatcttacattgaagtattttttttttatttcaaaatagaatagtcattcttctaaaataatgaaaatgtctaattagtcacaaaatagtcatttagtactattccattaaaataatataatactttaaaatgtaataattaaataaaagaatataataaaaattattcttttttttttttctatttcattccggcctccaaccaaaacacgaatcttaaaatgtatataggaatgtcaatggggcgggtcggatctgatccgactctgatccgacctgatccagatcatatacagatcttccccgccccgccccgctg

SEQ ID NO: 80869 - DNA, 2015 bp, Cannabis sativa
tctattcccatagcagatcttcacagtgacctcccaattctaacaccacctactacaaataatcatgttatggttactcggtcaaagataggcatggttaaactaaagttatttgttgctattgttccaagactttgtatgaaatcaaagatagtcaaagacactctcaaggaccctctatggtttgttgctatgagtaaagaaagcaatgctttaatcaaaaataaaatgtggacatttatgccttttacctctgacatgaaagtggtttctaactagtgagtctttagagttaagcttaagtcaaatggtgaagtggacatgtataaagcagggctagtggcaaaaggtttttagcaaactcccagtcttgattacttcaaaacttgtattccagttgtcaagccttcaaccattcgagttgtgttcactttggctgcttgttatcactagcctatacgaaaaatcgacatcaataatgtatttctaaatggggaactcactgaaactatatgtatgactcaaccaaagggtttttataactctaagtttcctaatcatggttgttttctccacaaagccctacatggcttagagtaagccccaatggtatggtttaataagctgcaacaatctatgctacttcagtgggatcttcaaaatgcaaaagcagacacctccctcttctttacaaagaaagcaggcaagctcatcctccttcttgtgtacgtagatgacattcttattaccggagaagatacaactcacatttatacggtaatctctgatcatcattctcaatttgctctaaagaacatgggagcagtttagtactttggctttaaggtccatcaagatacctctggtatctatataaatcaagccaaatatatatatatatatatatatattagagaattattggttaaaacaaatatgtacagtgctattcccactcccactcttatgtgtcgaaatggtaagttttcttctactagtgattaccccatggttgatccatctctgtacataagtgtaatctgtactttacactacctaactatgactagatcagacatatcattagctatcaacaagctatctcaatttcttcaagcttcatctgttgaacattggaactcatgcaaaagaatattcagatatctagttggtacctctactcttgggcctcatttcaaacaaactcaacatcctcagttggttgcctattctgacgtaaattgggcaagttcaattgatggtcaaaggtctacttcaagctactatgtattctttggagaaaaactaatttaatggaattcaaagaagaagatttattgttgccagttccaacactgaatttgagtatcgatcccttgctcttgccaccactaaaataaagtggctacaacatctctttaagaaacttggtcttcatctttcttaaccacccacactgtggtgtgataacttaggtgttgccttactcaccacaaacttagtttttcacacaagaacaaaacatattaagttagatctccattttgttcttgaccaagttctatcccagccacttgatattcgacatgttcttactacacaccaaattgcagacatcctcaccaaaccattgtcgatatcgtaatttgaaacctttagggacaagttaacacttagatccctgagtgtcacttgagaggggggtcttagtagtagtgagtcagttagcaaggggtcaaagtttgttgcttagctagtctaatagattctggtttgaatcttggtcatgtaatcatgtatataaaaatgatcttaattcaatgaaaaagagttgagctcatttttactctcaaattcaatttttcatttgttctctttgttttctttcaactcacgatattaaacgaatttctatattcatcacctgtttaatttttttcaccctaacatttgtaattctatttttgacattgtatggaactgtctatacgcaagaatctatagtttgcatcttt

SEQ ID NO: 80870 - DNA, 1602 bp, Cannabis sativa
tatatattttcatatttcaatagttttaattttaggattataataattaatattatatttaaatttatttataatttattaataaatttatatattattattattaataatattcatattcatttcactaaaatagaaacaaatataaatttaataaaagagtgggaaggttggtgggtggggtgggctaattagagccgtgagatgaagagaaaaatgaagggctgggattgaatgaggaatatggagacaagattcggtagattctgttctttgttttcacatttgctttgcggctgtgtcttacacccttttaccctatcttatgttatgtttggtataaacaaattcaaatgtaagataacatattacacaacataaaatttatttttatataacaaaaaagaaataactaaaattagcacaattaagcttaaaatattatttttaactattttaaaatatacataatttattttattatttaacaaaatataaataatatatatttttttaatatacagggagagaaattcgaattcaagattttttatttatgagaaatattataaaaccactaaattatgtctataatatctaaaacgatattaatctgtaattttttgattaatgttataaatatatctataatatatacatattaaaaaaaataaattaaatagtaatttacagtttaatacttaaaattaactctcagtttaaatataaatatttaagtttaatttttttttatggtaataatacttaaattataactttataatttttataagtatctgcactccctgattaatccaagtcattaattttttttatttataagttattttaaatataccaataaaaaaataacgtctgaaactattttattaagttctaaaaatataacttaagtattattactgtaaaaaattagacttaaatatttatttacatttgagagaaacttaatatttaagttacaaattagtcaaaattaaagttataactatttattgtaccaaacaaagcatagtgattataagtgcaatggcggattttcccacaaaaactacttacccaccaaacacaccttaacatatcaaaccctcatctctctctcaactcactctctctctccaatctccagtttcacgttgttgtctcatctcagtacatcttcattcaaggttcgtttcttcttccatttcttatgattttcatttttgtttgagtaaatgttcattcattgtttatgcttttggatctggttgatgttcctatatttcggaaaaaagagaaataatttatacacagtgatgggaatcgagtaaaggattcaaaattgctagcttttcttaaatggattatgatatatttatttacagggaccgattgaatttcggtaatttagtctcttctcttcgtcccaagaagccatttttagctgatgtttcgatattttggtggtttcataatgacacccatttttttaattattattattattattattgtaattaatcttcaaatactttatgcctaaaagcttttaattgtaattctaatcctggttgtgtccacgctctaaatgtcccgatt

SEQ ID NO: 80871 - DNA, 1529 bp, Cannabis sativa
aaaaccacaaatataactaaacatcgtgtacttatgtgtaacgacaatgaataaaattatttgtgtaattaaaatgaataaaattatcagcgtaattaaaatataatagacttgtaattttataaataaaatagaaaaaaaatgttacagtataatgttttttttattaattttttattgttatttcattttgttttatactgagcattacattttcaataatttataaaagattttaatttataaaattttctacacttaaattaaaataattaaattgagtttttctattattattatatgattatttattattattattatgttggggaatagtgatgggatcttttatttatttgatgaaaaaatattgagacttattttatatttattgggaggagagtaatccataacatcaaaaaataaatattattttagattttttattttgttaaataataaataaaatttatattttttaaaatgatacaaaatagtataataaactcattttttttatcaaaataaaatttaataataacccgattataagtgttatgacaatattagttacaatttctgcatatgtccatgttaagaattgttttcaagttaattatatttttttttttaaaaaaaaaaaagatcaaaaattaaacttagggtactattttgtatcattaaaaaaaaaaaacaagattcattttgccgtttaacaaaacagatagtccaatcgataactttacaaaacacaggatctaaaataatattaacccctaaaaaaataatgaatcaaaagttaaaacatcaaaattgacaatctatcatatgttttctcttcaatttttctttttcttttatattaaaaaaaatgagatcacgtggtgtagatttcttctccacctcttcggaaacatagacaatcccaacaaccacgtgtcggtcatagaaataaactttctcttccaatttttattagctaaacctcaaaacactcaaatgttaaaaacaaacaaactctcaactagtgcttaaaatataaatacgggccgaactttttgacacaacaccacaaaactggcacgagctcggaaggtatgagcacgactaggtacgaaaaaatatgagcttgagcacaacatgatacaatactataaattggcataatacgatacggaaaatatatgattaaacacaacacgacaatggcagaactattcgatactatgaggtggccatgactttctaattttttggggattttatttttaatacatgtaatttatataaaattgtattaagttaattaatcttttagttactaaaaagaaaatttatacatgtttgctataataagaaggctatgcaaaaaatttaaaaaaataaagaaaagccaatatttatgtgtgtgatgtattatgagtgaaattctgaaaatgtggtatatatgtactttactcggtgatataaaattgggtaatctgcggcataaatacattcgcaaaaatacctaatgttacaattctctt

SEQ ID NO: 80872 - DNA, 1700 bp, Cannabis sativa
tagaaatgacgctaaatggtttatgacattttaaaactgtcacaaaaaccttattacgtctgttcaaaaatgtcatatctattaccaaaatattttttttttaacatattgcgtcacttataaaatgaagcacaaatataagtaagggaaaattacaaatttctcatgcaataactttatataatagtaaatacataatacaaaaaaaaagttaaaataacatttttaaaacttacataaaattagtaatcgattctattaactaatcacacaataccaaaattgttaatagaatcgatcctaaaacttaaattccatatatatatatcgtaatctctaaatatataaactaataacatatgcaaaagataacaattcacaatgtttgtcatttaaataactactttatgcataatagtaaaaaaaaataacaataaaaaaacagagtaatagaactatagtgtatgactaaactttatacatatatatcctattatagaaactaaaatgctcaaactaactacgaatccaatgaaacataacaagtccaatggaacaaaacaagacaagcataccaaaataagaaatttctttttaatattttgttactatatttccccacatttataaaaacgaaactcatcaattatcataacactaaatatttttagatagtttttctcttctctttccttaatattctttttctaagaatataaatgtaaaaatttgtatgtttggtgatgtatatatattaaaatttaaaagattagataaatgagcattatgtaatgtattgtgttgtgtgtactataagaaagagaagatcatattaattccaaattcatccattaacaattgtttctattcttcacaatcaaatcagtctaattaatttgactaaaagatctcactaataatgcataataagactagaaacttattaatgttagtgaaaaataacagaacaataaataattctctcattaccaagatcatatttttccaccatattaagcacaaaagtatgaaataatatgtatatgtacctgcaatatttcctggtttggtttgtggggaagaagtgggtgaaagagttgaacaccccacttaaaggcctctttcttgaaccattcacgttcatcattcataggagccataccacctaatctgaccttcatatcactcctatcatcactctccttccaagccttcacgatcaaactcgctacaaaagggacgaaagctctaacaaatatgtaatcatgtccctgcatgtatttatttactcaatttgcaaatgggcaagatcaaaaatgttcaatctttaatatccatactctaatattaagccttatacccaagttgggaaaatgataaaggaaaaaactttacttaccagccttcactctctctatatatatacatccaatggaacataataagataagtattttgaaacacaccatgataagaccatccaaaaatgaatatgaataaagcttaatttctttatagaagagaaaagagttttgaaatctcataaaactgatttgatcatcaaagtacttgtcaaaattttagtacagaaaaaagcttacatactgaaacaagctgaaatacactccttttgctcatcagaataaaattccatgttaagaaaatttcaactggtgatgaaaatttcaactagtggtttt

SEQ ID NO: 80873 - DNA, 1815 bp, Cannabis sativa
  modified_base (1010)..(1013): a, c, t, g, unknown or other
taaaacgggtataatatgtaatttttaccaaaattaggtgctccttaggcccaaagccaagtctcaatactgcatcttatacacacttataaaaaagtgttcctatccaatgaaattctttttactatcacacacttaaatatttcacctatccaatgaaagtctcaatattgtaggtttttttttataaaaataaatggtattttaaaaaattatttaaaaaaatatatatttattaaaagttttttttttttttttgtttttttagacccttaataaaagtgggctctaggcgcgagtttagccctcctggactgactgcctaaaacattcacatcctttatataaaagttccaacatataatgatttaaaattccatccaaacattggtgtaaaagtgaattaaaaatttatacttttttttttctttctttaaaacatacttcacgtatggtgtaacaaatttgttcattattggagctcatattccttacaaaatgctgttcttaaatatgagaaaaattaatggagattatttttatatgacataaataaataatataaaattaaaaatatgaaattaaaaagtaatcaaagtttaaaatatgggaaataaaaaaaagaccataaataaatttgataaaatttctaataacaaatatcgtcataaaagtcgttggagaagacactggtactggaaaagtcatcacaaaagtttttgttcactacaaaaagaaagactacttttattgacaacctttcagtcacaacaaaattttttgtgactaaatataatttttagtcacaataaaaaagttatttgtgagtaaccatagtatttaaacacaagttatcacttatttaattttagtcacaacaagtatttgtgactaaaaacatatttagtcataacaaattgtaatttttgtgacaaatactattagccacggactttttagtcacaacgtaagaacaataatttataattagtcacaagttttgttgtgannnnaagtaagattttttgtagtggttattgaaaaagtcactaaaaaaattattgaaaaaaccaacggagttgtgtcatcatcggaaaagtcactagagttagatgtctcaaatataaattaaaatagaactagttctataacataatgtacctatacattatctttatagcactccattagagagctttgactatccttgtccatgttcagatctaggagattctcaaatttttattggccctatgacttatggtgcgattgttggttatatggttgttatcgttatggttggttgtttaattatttccttttattctatattgaataatagggttctaattaccaaaattttattagaagatatttgagtgatagtcattgatagatgtgatatgtcacatgttctttcagaatcaatatctaccattttttgtgcttctttgatacttcaaaattaacagtttatttgtattttagttgaatgtactattagggtttttattctcctttttcagtgatatatcatcataaatgaaagaagccatttcatttgcattatgcctacagtttccacataatttagttctaattcttgtagccttacgttttacgaaggagaatggtatcaacatctctaataaattatagagtaaccaattactcagcttgaacataataaagtaactagttacccattgaatttgaatagaaaatatagtagggattttaaaacaccataaataaacaaaagataacaccaacaaaataaataacacaaagaaaaaaaaaacgaacacgcaaaaa

SEQ ID NO: 80874 - DNA, 1273 bp, Cannabis sativa
gaaaacgttgatataagattcgtgtaatttttagttggaatttgtcatatatggtgtttttaagtgttctggaaagttataggttatttgggatagttttgagttggaaatgagagaggtttgagaattctggagtagaaaatagcaagccgtttttacaaaattggtctactttttttactggcagtaacccaaaaaaacggcctgtcattttcatagaaacgacctactgtgttttggggaatttctcaaaagtcttgttttttatgttttctcgatattagggtattgtcacactatttttatcgataaaacaacttttagttttgaatttaagtccccgaaagtgatatagcaagtcacttaccagttttgcattaaatgtgacttagggccttaaaaatttttgagcagtagttttcactcaagtttaccgatatacttgcattcggaatcaaggtaagattagtataaatagatgcatatgtgtaagtgcagcatattctataactcttatagacgttgtatctcattcgactgttcaggctaagtcatatgaacgagacctttacataatgcagttccaaatctcggagatcaccacatcatcattagacaaatatatagaattttattctagtatatttagtttattcattattttatttccttcaggttcatttttgtttgattaatcatttaatattctcaatattaagtatatttttattcaaaactgtattttgaacttgattaatctagaactttccatctcagtcacatctatttgattctatggattaagataattaatgaactcaatagatcccatgaataatcaagtcagatgtttagaatgaaccatttcatttcacatattttcttgttttaaattactgatacagttaagtgattcttttatttgagattacatatgtaattaataaaattatttatttcttgtttatattatttttaaattaattatctctcttaatcttaaactctaataagtcgttacaaatagatgcacctcttgaatgatcttttaaatatactctcaacatactcaatactcccactcaattagacacttcctcttttattattgtctttgatcatttaattgagattgtttttaatttatgatttgaaattattacttgtttaatctcattgtacaagtattcctaaatttcaataattagacaattatgatattcaaaaggtgtatctcatactttgaatatatttttaaattgtttatctaata

SEQ ID NO: 80875 - DNA, 1029 bp, Cannabis sativa
ttctctttgtaacttgagttcattgttctatcctctaagttacaaccgtcaaaaaaaaaaaaaaaaggaaatcaacatggaataataaaaactttccaaacctcttttatatatacaacaaatttccacgttttaatttgtacctctcaaggattattatatagtgaattaaagagaaatgctagaggattatagtggtgtggtacaatttaatatcgactttaatatatttttaatttaataattaatcaactattataatagtgaattaatatcgacctgacatgacacactacttttaatattatcataaaccaacaaaaaggtgactactgtattcggtctactataagaaacaaatatgacacgagtctattcgatatatataaatgattaaggccacacacatatataggaaggactgctttccacgaaagccaccatatgttaaaacgagctagagctacacatccgattacgtacgtatacagattacaatttaataaaatataatatgctctttatatatattattatattactatctcagctgttagctagatatatatttatatatatatatatatataggttcacctcaccagctacacgaattcatatatgaagaaaagaagagaaaaacacatacaagagatacaagcccatcatataatatatatatatctaactttttctacttccaccaattttgttcttttttcacttaatttatttgattcaaattaagatggaatatttggatcaacggcccataaaaataggagttggcacaataagtacaaggccttcttcttctgatcatcatattaatgatggtggtctttgtaataatcgttctgagtccttccggacgctggagatgggtgtaccgaaatctgaatcggcagaggtgagattagcatggcttcgttcacaaataattggtggcaattacgaagtggaatataagtctccttttggaaaacgaaccattgtctatgccgaccacaccgcttctggccgatctct

SEQ ID NO: 80876 - DNA, 1865 bp, Cannabis sativa
catttcgggaaaaggggaatgttatgcaaattatttataggttcttttgagatattggacaaagttggtcaggtagcttatagtttggccttactgccaacattagtagaaacacataatgttttctacattttcatgttacgaatgtttaaacctgaatagacacatgtgcttaaatataagaatttgaacttgtagtaggatatgagttatatggcacgccctgtgcgcgtgatagaaaaaggaacaaaagtcttacgaaataagactatagcctaaaaatcctgtggagtgatagttctaatagagaagcgacaagagagttagagacggatatgcaaaatcagtaccccaagttattctcaggttagtaaatttcaagaatgaatttctttttaaaggaggatagattgtaataacaaaaatatttagttattattgtctattaaattattctagttatttagatgtggaattaatgcttgcgaagaatataatagtaactcgttaaataaaattctatttttctaagttatgagaattatgtcattttcttttttggacttcttataatttactatgggttttaaggcttaataccttaagtgttgcacttataaaattagaaaatgatttttttattatttaattgtttagaggtagttaaattgttatgttatggatatcattggtaatatagtagttacatggacgtgtattaggacaggttgttattccttctgttattttcgttagttgttaggtttggttagttgctagctgtcgacagttggttatattgttagttagttggttaggcgtttgttaccgttgtgtactgtataaatatcatcttataacaaatgcttattcaataatatcagaggcttcttttctctcctcgtcctttcttcttctttctctttcttttctttgttttctctgttctattttaatggctaaggttggcacctcttacatggtatcagagccatggccgccattaatggcgaacatggccacggttggtcctaaaaactcgaattctcaacctgttcatcatggagcccccatttcaactcaaagaaatcgcaccatggatcaagaagacactacggttcacttcaatcatacgatcttgatcatgcttaatgatcacaactattttctatggaaatagcagatccttggtgcaattcgtggaaacaggctataaaaattcatccaagactccctcctcctcctcatcaaattcttagtgaagctgaccaagctgcacaaaacttcaatcctgagtacctaaactgggaggttcaagatcagcttcttgtgtcttggctcctatcttcgatgtctgagagtttactaactcgaatggttggtttcaattctacaaaacagatttggaaagctcttgaacaacacttcactctaaaggtttcgtccaaaatccttgagttcatagcaaaactccaaatgttgaagaaaggaacactgaaccttaacgattaccttctcaaagtcaagcaacatgtcgatcttttggcctttgttggagagattatgtctgatcgtgaccacatagctgctattttcaagggcttaccaagcgaatatgatacctttatcatttcgacaaacacttggattggaggctatacagttggggaaattgaagctttacttcttgcattcgaatctcgaatcgagaaggaggatcaagaagttgaacctactgtgaacatcgttactgcagatcatgatccgactatggaagctttctttgctcaaaccagtcgcaactacagatcccctgcctatcctagaggtcaatattggctcagtagcttcaattctccaaattt

SEQ ID NO: 80877 - DNA, 1792 bp, Cannabis sativa
ttatttcttagacggtttcaagagatcgatattcctactaaattacacttacaaagaaagttaagggagttagctaaaccatcaacaacttttcttgtcgacccagaggtgaaaatgaatacacatggtcgaccaccttcaaaatttgatcattctactcgtcgagatccatctgcttttgaatatgtttctactaaatacagtaaatcttctatttcttctaatttgaatacgaagaataaagatgtacgtctgaacacttcacagcactcgcaatcttatctaaagtcattaccatgtgagttgaaatcatacatttattttgttaaagatgtagaaagtgatggaaattgtggttttcgagctattgcagacttgatggccatggtgaggatggttggatgcaagttagaaaagactaaaagattgaattagtttctcatagaaatgactataatttactttatggttgtcctaatagagtggatgaaatactttatattttaagagctacccatgcttcaaatattggatgactatgcctgatatgggacacattatagcttctcgttataatgttgtcttagtgcacttatcaatacaacaatgtctgacatttctcctacttaaatctaatcctttgctagctattttatacaaaatcattacaattggtttcgtcaataataatcacttcattgaggtagagattttatttataatttttaaatgctactttatcatttaatcttatgacatagtatattattcctcttattttattatgtgttttgtgcaggtattcatgcagaacgattctccaataccgcccgctgctactaattgggttaggtaccgctattcatgtgcagaagaatggaaaactccttatgaagcacggatgagagcatttcgtgacttagttgggaaagaaatagcaacacaagagactattaatttagatactccataaaatattttttttattttaattttcatttaccataatttagatactcttctgtctctaaataattaccaatacacacaccaaacatattctcccaagcttcacagcagctcacatagaacttataagaaaatcttaagtttcagcaagaaaattgatttttattatcaaacttcacacatactacaatattgcaaagatgagctactttaaagaagaaaagaaatatgagatggtggacaatgtaacctatcttgctacttgctttttgaaccaaaaatatacgctcactcaaaacctttgcattgtttaaataaatggtcaataatttattgctaaaaattataacacccatgcttctctactaaattataattaatctattgactgacaaaattggactaataaaagtaaatctttgcattacacataattcatgaggatataagtgaggagattttgtaaatttcttcagctgggtgctacaggtgcaagctcccatactttaatggttccatcatcactagcagaagcaagtactcgtttctcttgataaagacatgaaaaaacattagctaaaagtgtgaaggtgaatatggtggcacaatttaaggcactaaataatgtgtaaattagtactatgtctagctctctcaaccttgtatctttgattttgtaatttttaaatggtaaggcataaccaaaccaaacacaataatatgcaaaagctagatgatgattgtgaaaataaacagtggagaaaatgatattacatttttcagcaaaacagagcaccagtgactataggtaatagaagaaagt

SEQ ID NO: 80878 - DNA, 1647 bp, Cannabis sativa
caaaaccccaccagaagtcgcggaccaaaccatcaatcctattcacaagccggttggacaacttggtggtttgcatggcatagatgggcatagacaatcccacagatttgatgagggtagctcttccagcttttgataatgtttttgccttccacccctgaagtttagtcatgagattatcaaggatgaagttaaaatcaacatctttttgccttgatctaaagagcggcaatcccaagtacttaagaactccctcaggagaatcaatacccaaagcttccttaattcctctcctcataccagtcggggtatttttgctaaagaaaattgatgtcttaagtttgtttaccttctgcccagaccacgagcagaacttgtcaagacactcccaaacggatttagcttcatttatgtttgcccggcctaccaaaattaggtcatctgcaaagaaaatgtgggaaagcgccgggccccccctgcttagtttaatcccatgaatagtctcgttccggatcgcttcttctaaaagtctagaaagcatttccgtcgcacatatgaagaggtagggggacaacgggtcaccttggcgaatatcgtaagagggagagatcgtaccgactggcccccccattgagacaaatattaagagaggtggttgaaatacactgagagacccaactgcagaatttttgagggaaaccgaaacaaccaagaatatgatctataaacttccaactaagcctatcataagctttgaccaggtcaatcttgatcgcaaagaacccttcttttcctctcttcttattgaaggagtggataatctcttgcaccagcacattattatcttgaatattccttcctggaacaaaagcaacttgagttgggcatataagagaggggagaatgggcttaattctattcgcaatgattttagagatgaccttatatgtcacattgcaaagagaaataggcctaaaatgagtcggtctcttcgggttctgcaccttaggaatcaacactatattcgtagcgttcatacccttatgcaacctccctttgtcaaagaaattagtaacagcatcacagaaatcattcccaactgactcccagtagtgtttgaagaataaaacagacattccatcaggccccggggctttgtggttgttcatggcaaacagggtacttcttatttcttcacgggatggggcctcaaccatcccagcctggtcctcaggagacattctttccctaattagatggccacagttcagaggcctagcattggtagatcccgagaagatacccttaaagtaatccaagaaatcctgaccaattaactcccgctcatttatccaaacattatgcttgtttaaaatgcaatcgatagcatttcttcttcctctaatagcagcagagagaaagaagaacttggaacatttatctccatccttaagccactatattctcgcccttggtttccagtataccgctttcctagttctagcttcattcagattccgtctgatgtcgcactccaaactccaatctctagaaccagtaggcatcatctggactttatcaagtttaatctccaaatctttgataacctcatcaattttcccaaactgcactctcttccactgaagg

SEQ ID NO: 80879 - DNA, 944 bp, Cannabis sativa
tatttattatacttacattatcatctttaaaaaataatagtttacagtacgaaaatagtgtttcctggtattctagtttaacacgtgtgttcaaaatactttaaatctatttttggcactataaaccatttgaaatttttcaaaaatttacaagaataatgtgagtataaagaacaccgctatgaaaaaaaatatttcgatatttattttcaaacacaaaaattaattaagagattgtaataagaaatttacataacactcctcaaagatatatttatagagagagagctttttataggtatatattttgttgttgtgaccctttgaatggagtattgtggtggaccttattataagccttattttcatttttatagcaactttaatatatggaatggggagtgggaccttaaaaccctagctactactgctttttataagcttaccaaacctaaaaggaaaaaaaaaacatatggaacctgacatgacaaatataatctcttatccttactacttattcttttaagacataattttatttattttttaattcttctcttgaaatatattgaaagattcttataacaatttgaatgtagctagctagctagggtcatcttaattatttaattattaaaattaattgaaaattaaagtatcatgatatgatgatgatgaactttattaattaattaataatataaatatatatatatatggctgaggttaatttgtgttccatggcacattctaagccaaaactttattaatgattttgctccacttttatataaacataaacatataataagggattttatattatattatatatatcacatgtgtatttatattagatattattaattattatatattgcgtttgggggccaatgcatgtgtgaactctctatatattgttacctaacgatcatatatagtat

SEQ ID NO: 80880 - DNA, 2123 bp, Cannabis sativa
  modified_base (984)..(996): a, c, t, g, unknown or other
  modified_base (2095)..(2096): a, c, t, g, unknown or other
ttttttttttttttgttgttgaataaagacttgggttgttttgagttgaagtaattggattcatattccaatttttattttactttattaatagaaaaaaaaaaaattgggagtttagagcaaattagttttgaaacatctgcagtttcaaaagtcaaaaaatccaggtatgaatatgattttcttaaaaaataaatatatgaaaatcaaccattaattctatcaaaaataattctatcaaaaaaaaaaaaaataataataataataaaatcaaccattattatcatttatccacacttgcacttgcatttgcatttgatacattacttttcttagtcaataaaatacaacttcttctgttttttagaactttatccaacacaaaatcgaatttttactgtttatattggtttagggttttaaaatgagaagaaaaaactgttatttaaatgaattggagaagaaatatcctttaatcatgtaaataattaagtatattaatcaaagatcaaacatctagagtcatattactaaaacttaactgagcataatagtacaacaaatagcattactcattttttgttttgtgagagaaaatattggttgtaatgtaataacagaccagaaaattttcgaccaatggatgtgatttgtgggactcaaccaaaagtgatagaatgatcaagagttgtaagtttgtaactgtcaaatttcaaaagttttgttggtgccaaataaataaacatgcatgtcttgaattatgtcaatatcggactgaatcttacgcattaagacatgagaaatttatcaatctatacttaaattagatttatccacttaaactatgctaccgcatcatgcaaaatatgctacaataaagtttttcatctaattttactcctaaaaaaaaaataaaaaactaacactcaccaaacttctcatctctctctaacactcaccaaacttctcatctctctctctctnnnnnnnnnnnnntctctctctctctctcaaaaactcataccacacacacacccacactctaccagtcagaccacccgtcacttgagctactgtagttcggtcaccttacattaatgtggagttagttggacaaccttgaaattaaaacttttagaaagaaattcctttaaaaaataataggtatgtaatttctttagtaattattattggatttagttgtatttatgttgatatgaatagatctacacatatccttgtttttatgtatcattgaaatacagcgattttgcattttctggatttttttgcgagtttagcgatctttaacgatgttattagcgacatttagcgataaaagagtgtgttggaggtcggggatgaaatataacgatatgtggcgatgtgtcgcaatgtatgtcgcgacacactgtagttttgtgttattttgatgatttttgccatttatatcgatattatttgcgatgtttattgatatatttaggcatagtgtctggtgaagtccaaaatgacatttatcgacatgcagcgatgtgtcgcgatatagttttcgatgtattccacgataaattacaatatttttcgcaatatttctcgacatattttttatatgaattattttttttctcatttttgtttgcatattcaactgtgtttgtagttgtactttatgatggggcttgggctgtcaaaagtttcaactggatattcaataacccaaaaaagtaagatgttaatgtttgaggttaacacttctttatagaagaagcatgaaaatttgtatgaagagttggatatagaccctcttgtgtatgaactgaaagtagaggtgtgttacatgtacatgaaaggcaatataataccgctggaagttttagtgaaagatagtcaagtaagttttttcttaagaatgaaggcaaaaatgagtgtggagaacttgatgccactatttgtgactaaggttaaaaggcatgcgattttggagcttatttttccaactgtccccccaagaagtgttgttgggagtattttcccaaaaacagatccagcggtaggtttgaatgagcaggcccctactaatatagatgagganngggttgacaatgtatttgaccagtttg

SEQ ID NO: 80881 - DNA, 2311 bp, Cannabis sativa
  modified_base (254)..(255): a, c, t, g, unknown or other
  modified_base (644)..(645): a, c, t, g, unknown or other
agaatcttgattttgcattcttgaccgattaccctgctctaatttgtgggaaagtttaagactaatggtgtagaatcaaatcaatgaaactttaaacaaccaaacaatttgcaatgacaggattatcaaaccgagcacaataatcaataaaaaacacaggcaaactgagtatgtaaaatcagaaaataccaaatgcaggaaataaaaagatcaacaccaagatatataatggttcaagtctgatagatcgatgnnatctatggctctactccagttctagaacaccaccgtaatctttttattgattgagcaagaatatgtacaatacaatcgagatgagattctctaatgagttctcataaagtgttttaactctcacactttcactcaagaatcttcttcatctacagaagattcttcttataaaatccaaaacccaatctctcttttttctctgcacctctctctctacctctcaatcttttctctctccaactcttaatctcatctgaacagcgtactcactcgtatttcaatcgtgtcttcaaatgtttagtcaaggtggtatatatagccttaggatcaagatcctaaagtcagtggctgcaagaggcgaggttgttaagttagttagaaataactannttaaccaactcctctttgagcgaagtctccacgtcagcttaagtaccagagccttcgggaacatgaatgagcttccgagcttgaggaccacatacccttgctgatgatgcttccagataggatatagtctgctggagtcgactatccggatctaccattccaggagggaaaactagccagctggaactcctctccagggaagagctagctatcctgaagactagacccggagtagacatgacactcatccaaaaaccctttccggactcgactatcattcctcacaacttctttcgggatcgagtgagtgaacaacttcccagaaataacgatcgtggagacctcttcatttagaggaactataccacaaaatcataattacttattttttaaatgtaatttttctcaacaaattgtcaaccgaatctaaatttggattggctgcaattggtcctctcaattcagtgaatggactcgttggatagaagatatgtgcaaatatgtataagtaacaatagttgtgtcaatttttttagcaacaatttgttatatttagctaaataaaaattcttgttattttaatagttattcttatatatatttaaaaataaattataatattttcttaatgaatatatatatatttttttttgaaacttttcttaatgaatatctatggggtgcaaattgcgagccatcccaacttattaactcatcaattgggctgcacgcatacgagggaagcctatgctgacctataaaggaatttttataaaaatattgaattttaaataaaagtttataattttactgttacacagaatttttttacaaaaatactattttttataaaataatagtaaaataacaaaacagaataattaaaataacaatagaacaaacaaaaaacaaccatgaaaacttaacacaatacacaatataaaacttatacaggatttttagaagaaaacatacaatatttttttaaaaaaattcatcccacaataaaaactaaaaaaaattaaaaaaattgagtatttgtataaaaactgctaactataaaaccaaacaagcccaaattctattagaaagaatagcgcacgttctttttgttgcagccgaaacgaaaatggagatcactttgaggttcttacacgtgtcatcatttaacaccataactgagtctgaaagaaagggggtgctgttggcaagtgaaatgtgttggacatctacctgagcctttctggtcaaatcattcataaaaaggccattatttatttttttctactttattctagtcagtttaggtgttatgaaaatcatggaagttgttggaaaccgttgctttagttcagtgttcttagcagctcctctggaagatgtgttattgaacaataagaagatttgtgcttacaatcatggaatggtgtccaggcattcttccagattgaacaaaatctcttgcaaattgcctgagaatgagcttggagaaaaccccagaagccagatccttaccaagtccaagaacaagatggaagaatacaatatagccatgaagaagatgatgaggaatccttatgagtatcatcatgatctgggtcagtttctttttcctcctatttgatttttaacaatctttattgaaagttcagtcttttatttattt

SEQ ID NO: 80882 - DNA, 1740 bp, Cannabis sativa
gtggttcaggcattaatgatcctaaatttgcgagtttatatattagcctttttttagcttcaaagtgtattacaagtaagttttacaatgaagaacctaattcttgacacaaagtgatctctcttggtttttcttggaaaagaagaagaaaattcagaataaaaactagcagagtttcaattttaagttttttctccctctttgcaagaagggatattatggtttatatattttagagtttggattttgacatacctgtgatacgttcgggtttttatgtaaaagcaagcccactaatggggtaaaatacacaaaatgcatgactttgatgcccactaagagatatccagctcgtgggggtgatggttccgtacgaatgaggagactgttttgtgcaaaacacgtgttacacggagattacgcttggaaaacaaaagtatcagaggagccgtcagacaaagaggagtgtaggcagtggtggtgcgtgcactaccatgatctgacacagagaacaatatttgatcctgtgtcagaagggtggaaacatcatttttaaggtagtattttgcctcccctctcacgataagcatccggttgtcatcctatagtaggcgtccaggagtttcccgtgcagtctgtttctaggtgctcccttatcctcattcgaaggtcttcattacttccaatctcgaaagactagggagacctctgggtctcgaaagaaccctatgccccggaggcaaagcttctgagttgtcactaggcttgggtctgtcctaaatttgacttggtattccacaaacgagaaggtttaggcccattgttggatgatgattaccctcctgtttcgccacatgtctcttctccaaaacacaaataatatttatctccgtgcttttgtgacttaagagtgatagaagcttgcagtcttcctcctagataatcttagagtcatcagacacgtgggtaaatctgtaagtaacagaagtacatttctctttccggcactcgacagtcgaagagttaggaattggtgtggaggacaactggcatctcatacgtgtctctactttcttgggttcgtgagtgctacgcgctttgggaagacgctttttgtgcaaaacagtagaatgacagccatttactatcaacgtgggctctgaggtgaatataaatgataaaataatacctcaatcttagcaaaagcatttaatgtcgtcccttcggttcctcatccgttggatcgcgatttgtgctttttctagagagatcttaacccttgatcttaaagcacgtggatcggcaaaaataaactaatattctattaaaaaaattccacaatatataacatagcatacaaaattcatatactacaaacataaatagacataccatagtgcaaacttaatataccacaaatctatcatagtaaaaaataaatatactaaaaacaaataaattttaaccttcttattttttcttttctctttcctatatgttataccatagcaaataaatcgatataccacaaacgagacaaaagaccgagaagaggtagaaagttaaggtaaatctttcaagattataattgtacttgtcaaatttttaacagtttggtcattttacttaatatttaaagaaaaacatttttttttagttttgagatttagggtccctatatgtgaaaattacatgaaatatgggatttcataacaaagttagaaaaatatggcattttta

SEQ ID NO: 80883 - DNA, 1299 bp, Cannabis sativa
aacaaatttaagtgatatttccactcccttggcaatttccgttgagtccatctctgttgttttttgctcggggtcattgaaatcatgctcagatattgcttcttcatttgcttcaggtatcattttgacgttgagctccttctgcttgcactgctggcttggagcacatttatcatcacagtgaaagcacaaccctttctccctattctgctgtatctgagcgtctgttaagcatctaatttccctttgtgtacatgcaggaagatatttgaagttgttttgaccaagactagagctaggtccttagtaatttgtgcacccatagctccttgttttttgaagaaaagaatgagcagtttgcaacttctcttcaatatcttgggctacctccattgcttcatctgcattcagctctgattgttggaactaagccattcaagaaagtgctcaattgaaattccagtggtatgttgtttaatggagcgaaaagtctaatgaaatccttcttgtaatcgccacagttccttcttgttttactaaaaaaagttagtcatacagggagcccatttgtgtgtactagaaatgcttcaacaccattctcttcatttcttcccaactaagaattgttcgcttcttattctcatattgataccaaagcaaggcatcaccggagaaggaaattaaagttgcttcgatcttttctctctcatcatagttgtagctagaaaaataccacttgacttgcattatccacccatttggaatctccccatcgaaggttggcattttaagtttccgcaatttgcgttcttgacaatggtggtgaaacccatgagatctttctgagttaacagctcctagcgagtgctttcccagcgttcttcatggtcgaaaaccccactaaacccccctcgtggtctcgagtggctccgcgcaaagaattcttgtccactgtctctttttcttgtgttattcccaagttcttggacctttcttgtactttcttgacttgccaagaaaactctgaaattgttgttgcatttgtcggctcagttcttgattggagtctttaaccccggccatttccaacttcacttcttccatttcttcctccatgagagtcaatggttccccttttcgttagtcttctttggttcgatgtttgtagcttaccgcaccaaatacaatacaactagcctctgacttccatatgctctcttctctctcctctttctgagaacgtttcatgcatactgggggtttccatggcccttctggccatggaaaacaccaaaaccc

SEQ ID NO: 80884 - DNA, 1973 bp, Cannabis sativa
tactttgctagtcttcttaggccaatttataggcccagacatatttaggccttggcttggtgccacgtatcttctatctagaaatgtgaaaaacatttatgttaaagccttcatctgatcgagagttatggagacttattgccttgatttgagattaccatgcactggagctggactttttgtaatctagtgttgttggagacgtggtaacatttggtcagtgtgtggggattgcgtgactcccacaagcaagtgatgcctacagtaatggaatgggagtaggcatatgtcaatgctcttatatcgaggcaaatttcaccattatgaggaaaccctttgattttaatatttgcattaatatgctcatacagttagatcaatgggaagtgtgtattttacctgctgatctaggccattggattaaaagaacatggatcactctccttctttataaataccattcaaaggaacaagtcaacatgttttccattttcatttgcgttttaaagcttttgagaaagataaattcctaaataacctacaaaaaatatttttcaagtggatgtctaatcctggctctgagttcatcaacaaacttctcagccttcaaactcgtttatttcccaaatatagacctttaatcgtcactaactacgtcttcatatttctagggagatttcgacgaggttacaaggaggctcctcacttttcagatgagagtctcactgtcgactcagagttcacaaccaccacccctaggtttctgctaatacaactatgtatgatatccctttgtctctttgcactttatttttacattttcaggctatttttaggttagtaaattgaagggaaatgccatgagttagggaattttatggtttacgctaattaaaatcatatgctccaccgtgtaggacgattatcatgttagtcttttgtgatgacgtagagacccaaaggaatctggataattatatagccatgccatgcgtagaaaactaaaattatcctatttgcctgactattaatcttgtggattttggtagatctctttgaaggtcttgggtatccaggatccttatggttccaaaacctaagatctatccctatgttttgcttctttccttttaagctcctgatctaatgctcaaggagcttgatgtttctaaatataaggtttgaaaggaacttctttaagcagttattaagaagaattctctagtaccctcactatctcaatttagtttaggtactaaatgcttggtctgtatatttaatgatttcacaatagctaaaggaaactcgaatcacaaaccaatgtgggatgaaggcgacaaaaatcataatctggcacggaacgttaatgccgaacatgtgctcgtcgaagaggtgcggaaagagggcacatagtgggtgatggatagtgccataaaaatattctgcagctacaatatatttttggacatggaagatgcctgcagcttcaaaaataccccatgtctattccagaataaactttcaaggagggatgggaaagccatcataagtgttgatgctttctggtcttggagtagagttgatagttttatcaaagcacacctcccactttgagactacctggtaaagctcttgacattattaattacccctttcttgatgatcccactgatttatcaaaggcattttggtccctggggactttcttgatagtgtacctcttgaagtgttgaagcagtttgtgagtctgagatacgtacccaaccatcttttttcccttagattaatattctcctgagacttggtttagcacaagctgagatgtgttatggacttcaatgttctaagctccaatttctttggccaaatggagttcatctatcatggcttcgcgttcaacttcattatttgaagcatcaaagaggaaatggagggtactcttgtgttaatgaccttgtagagagacaaaaaat

SEQ ID NO: 80885 - DNA, 1988 bp, Cannabis sativa
ttttcatgtttcctcgatatttagggtattgccacgctatttatcgataacttataattttgagtttaggtccccaaaaagattttagcaagttatttaattatttcatgtaaatatggcatagggcctcagttcagtgcataattttgattcaggttgactgacacacttgaatttagaaatgagataagattagtataaaatgtatacatgtatatctgtatgtgtgttatatgcgtgttgtattatgtaatttgtatactacaaacaccagtacggttgcggttatagtgcattggtacagtatataatgttaaggggtatgacacaacgttacaaacactagtaccggacgagtacggagtgcatgtggtacaacactcaattgtactcgaagtaggagcaaactctaccaacacaaattttagaaaaatacttagtgcatgtggtatagaggtcatacttctgttaagaacattcttggtcatttcttaagccttgtaaatagatgtatgggtgtattatgttatatattttatacttttcttacagagtttgtcgactcatagatactgtttacatgtgtaggtaagggaatggcaaaggctgagcactagtaagtccaaagtttgaggatgattgtacatattaggacggttagaccaagagtgttcagtctcaggacaacttgggtcatcattttgtagtcgcagagcaacacttttgtaaaatatattgggatgatgttgtaaacttttttaaacaggatcccagattttatgtaaggttatatatttataaaggtttaaagtttaattaaaattttaaatatggcactattttcaaagaaaccctttgattagcaaaggtgtgtatagtaattatataatcactgtagcgggcctaatcaagtacggcgttacaatggtaattgtattagatggttatttcacatttgagtggagagtagacatataacttctactactcaaatagaacatatataaattagtaacctaacaagattcatgactataagtacgtgaacaatcgagtctcgagtcttaagtctaggatcccctttgcataatggcaagaaaataatcgtcgtgcaaagtatatcttgttgactttattcaatgaatagatcagagaaaaatatgagacttttatcaacacttgtgatatctggaagacacttcacaatcattatggtgcctctcatgaacaattagtataagagagaaatattcttctaaacaagttaacattttgatagaattacaacatgatatgacaaggtaaatttaatttactctatatcccgattatatcagtggaataaattattctttgccactaacaatattttctattgcttacagatttcaaagtttacttgataattcaagaaagtgagacttcttcaaagttcgagttggatgagattttagaaaagcattgaaggagtacaattttagttttagtttaagaattttttttttaaaaagcaatttctttttatttattgttttaattcttagttacatatttgtttttgattcattttaatttaatttaatcctttatcaaatttagtaaataattatctaatttgaaattatatatgcaaagttaatttttactaaataaaaatttaaatactcatagtataattttaaaatcaaaaagttgaatgtttaattattttttttttaatgaatgatgtttataataaaactatttgactagtaacttataaaatatttctacactaaaatttcactgatttaaaactattttaattctaaaaatttaaacttattcattaaatgagatttaatttagagttttgaatatttattcaaaatttacaaggattagggatttaaatctaatattgtagaatcaacgattcattaaaaaatctattttagaaataacgacattttgttagaactatctaactaaataaatatttaaattta

SEQ ID NO: 80886 - DNA, 1571 bp, Cannabis sativa
ttatttttagtatattatatatgtaataaaaataaaaataaaaataaaaataaaataaaaaagtgactgggttggcgggtgggttcgggttcaaccagaaacccggtgaccataaaataccaacccgcgaacccgctcgaaagtgtaccgggttggactcgactctcccgaacagaacgagttttcttttaattttacgggttggccgggtccgagtcaaacctggtcaaaatgttcagtcctaatagagataggtgactgttgtcggaagaattttgataataccaaatgttgcgagtattcaaacaaaattagaatactcgctagcagttatgtgagtacttacttagaataccgagtactcaaagtaatagctacgaaatagacaaaaaccaaagtagaaacgtagaaaagacaagagaattatagtggctcagttagagcttggtctgcttaatccattttaagtaatagtttcaacccagtttatttgatttagatcatccttttatatagaaagcaagtgttctttaggattacataaatagtcagatctgatagtttttacaataaatgacaatattaaatcaaaataaacgtttaaagaataaataaagaacaatttcatccgttcttgacttaattgcaacaatttatgctacttgataattcgcaggttgtccatccatatttcaaacacacgagctcgcgtgctctattgtgttgtactcgcaggatgggcctttaggcctattttgttgaatgtttgcattcacccttgatcgcgtagtcaaatattctgtgcattgacaatttggaacatccgagtccccgacgagtcatcgacacactagtcatttggattaaacctatgtaattgcaggagggatatacttggtcatcacatataatcagtatatgcgcgaccaatattaacttcccttggctctacttatctgttgattatgggggcatagtatgcgagtagagcctgccgcaaattcacatcatgcgaggtgaactaatcgttctttttgattgcactggttcctatgtccacacttcttctttttgcggttgataatactttcggcagttaacagcactttcatcggttaacaacgctctctgcggttaataatattttttgcagttaacagcacgtgagtggagacaaacatacccttgcaacaaatcatctttttctgtaaaaaattggatccacgtgacaacttttcacgagactgctcatatttttagacaaaaaaaatgtggcttttctctaaaaattaattatttttttttataaaaaaatccaaaatatatcgaaaaaagagtaaaaaaaaactgtttaaagcataacttgttaccctaaagaagtaacaaactattcactgtttttctcatatttttttttttatttttttctttagaaaaataaatcttagaaaatatagatttttttttttaaaaaaaagcacatgctacaaaaactcataaaatatttaatttcttcaatgaaaaaaggaattatttcacaaatacataaaagtagcaaaaaaaaaaaaaaa

SEQ ID NO: 80887 - DNA, 1625 bp, Cannabis sativa
ttttttttttttttttctttgagagaaatttataaggctgtttttataaaagttctacctacctatttcctactttgtattaacaatttaagcgcatagagttagtagtaagaattttactactacattaattgatttatcagatctatttaatttagattcttagaatacgctttggcttacagtttgttatcaataaaatgttaaatgtcggaaaccattattgacgaactattcaactaacacttaccaagttaacacgtttgaatatataaacaaacgaattttgtatgtagaatgaataatcttatatgcaaataaaattcgttgttgggatcaaactttgtagatgtatagaatatagtgttactaagagcttaaacacattgtaagttaaatgcgcaatatgtacgtcatattggaaaactgtgcatttgtaataaactaattattaggtagggattgaatcatttaaatcatatttttttaaaaaaaaataaattaacattcgaaacatatacacataagaaaacagaacatgtacatccttaaaatggtttaagaaaacagttaatagttaagagcgattataggaacatgtacatgcaatctaataatatataaaaataagttatatatgaaaaatgctaattaagagacaccaaagtgatgcttattaattttttcctacaatcaagaaaacgtccaatgtggaagcaatgcacaaccatacatccatacatatatatatatatataatatcttcaaatacacattctgtacaggacagccaccaattaataaaattcaaactaaacgaaaaagcaaaaaagaacagctttacaaatcattgatgtttgccaaaattttccatatattgtaaatgttagaagaaactaattaaaaaaactaattaaccgaatgctttcactactgtcaggtattcggtttttaagaaataaaaattccaaaagtaaggctatttgttaagaaaaatgtacacttattacgatgtcaatcgggaaattattatcatcaaagtatgtcaaatattcacttaaacttgtattaataatatgtacaatattgaaaactatataaaaaaatatgaaaaaagaggtgaaatgtgcagatatgattacttggtgaagataaaaagcaaagaatgccattattaaatatttgatgttttgcattattatgtgtgcatcaaatgtgtaaaccttactttgtacatcgaagtgaaattattgggccatttatggtatgctaagtcgatactcattatttatatcaatatataaataaacataaaaaaaattacatctacaaaaataatggaatagtgcacgtagtataagtattgcttcaaaaaaatgatgtttaagaatcgactcaatagattttatcaaaaaaaaaaaaatcatttgaagccaatatatataatatcttagacttcaattgtatacaactataaaatttaatccactataccctttctttattattatttttgaaaaaaaaaaagacctctataactaatgttatagacataatttttctatattaaaatcaactccacaaaataacggtaaaaaacacagtgaaaattaaaaaaaaaaaaa

SEQ ID NO: 80888 - DNA, 1695 bp, Cannabis sativa
atgatgatgatggaaacttcagataggggagagaaagactctactgatgatcagttcactcaaactgtgttttcttggactcttcatgacatttccaatgaaaatctctataaagataaggtttttagcctatacatataactttgttcatcaatcttcatattttactttggattttgtcaagtggttctttttttctttttttatttatatatcttctctgtttattagttgggtttttacagaatcattgttcagtttttaggatacttgaaccattatgacaaagttcttgcctgaaatatttgagcatgagataacaggggaaacccattttagtaacaatgatccaaatattgtgggcatacttttgatccaagtatcagattataacaatgataaagagcctttttcatagtcaaaattgttgcatgttttaggattcaaatgtgatttttagcactaatttgtaatgtaatgaagttatgtttggctgtgtgttgtgagttcttctgtcatgatcatgtgatacgatgtgttctgatttacctttgatgtcagcatatcatttgagtgtaactatatttttggtggcaactgagtattgaccataacactatagtttaaagtttaaacacaaaccagttgagcttttccattcagtttgtatagaagttgcaagtttccttacctaaccaaaccttcatttttttccaggtggaaacgattcccgaatcattccaatcaattcagcattatttgggatcttttgtctaccctctattggaagaaactcgagcgcagttatactcaagtatggaggaactgtatagattaccttttgctgaggtagttgctttcaatgaaacgaagccataccgacaaaacatgtatcaagttagagttgataactggaagaacagattcagtgataggagcaaggagtcttacaaaactttgcctggagacatgttgattttagtcaatgctataccagaaacgttttctgacttagagaggacaggcagatcatggtcctttttatcagtctcttatatcacagagaatgagaacagggataatagtagttcttctaccacagaagatgagagcagggatgatagtacttctattacttatttcaaagtcatgtcttcaaaaaagtttgagctagatatgcatatggagacaaagttgtttgttgttttcttggggaatttaactaccaacaaaagagtttggagatcattgcacatgtcaaacaatctgaggatgcttgattacgttctaagtaaccgttcttgggtaagtttttaaatttgcaaattttgctcagttaatatcattgacgatgatttgtttttcatttcattttaacaggttagggaaaactgtgatgcctgttcggaggagaactgtagcaaacttgacgagatgttggtgaagagtctatcttctaatatgaatgaatctcagattggtgcagttcttgcctgtcttcacatgatgcattgcgagaacagagatgcttttgagcttatatggggtccgcctgggactgggaagacgaaaaccaatgctacccttcttgtttctctcttgaagatgaactatagaactcttgtttgtgcaccaacaaatgttgcgataactgaagtggcttctcgagtactgaagatagttacagaatctaaa

SEQ ID NO: 80889 - DNA, 948 bp, Cannabis sativa
tgtaaattataatattgcattattgtattctcaatcatttatcatttatcatttatcatttatcatttatgtttttgctttcttgtttctagtaataagtaatagaaatgtaatacaaaataattaagaataaaaatagatgtttactttatagaagttcatcaattataatagttaattataattttatatatttttcataactctaaatcttattgaaacaatttctaaataccaattgacaccatgcaatatatgtttttatattaattatattagtgttaatttttaaatatattgatataaacgatacattttaagagtgaaacaaggagaattttccaatttaatttgctgttgctagctaatatattctaaaaaaaaaaaacatattatacaataatatatgatacatacattgctaataatatataatgcatggctctaaactttaaagtgacataacatatttaatttaactattgtaacttttacacaatatatagtactattcaattctctaatcttctttcttttacctcttatatagaaacatacatataatccttggataaaaagttacatatatatattatctttgtaataatatgaacgagtcaaccgtgatgagacattatttatcatctctatttatatacattataattattttttaattaatttttgatggtactatttgcttattttcatgaaaatatataatgggaattgtgtgtgtgttttttgttaatgaggcacatttttcatggcttaacaagaagtgtaaaatattgtacatatggttcaaacttttgaggaagaaaattaaaattagctagggatagagtaactaaaaaattaataaatattccttaagtaatttgatgagttgtgacatatatgattataattattagaactaagattaaggtaggagaaattgatggt

SEQ ID NO: 80890 - DNA, 1614 bp, Cannabis sativa
aattaataaatttgaaattaacctagaccaatagagtaaagcctgtttgactcaccatcgtcaagttccttcagatcctcatccatgaaggggagacctctctcaatgtgcctgttgactgcctcagcatatgcctagcaattgaccctgctcctctgttaggcctccgagtaccctggtatgcaggtcgtatcacaggttgcccaactagtgcaggccctggtaaagggggaggcaatgacgacccgacaacatctccaccacgagaagtcttggccaccttggccctcactcatctcgtgggctcatctgaaggtctcctagtaaaacctctcaacctgaaagatatacttgcaaaaagaaagtagcaaagtcataaagcaatcttaaacattcaatacaagacaaaagcatggtgttatcaactattaaataccatcgtcattagaagaggaactatcagagtcctcgacaatagccttgcccttgcccctagatatgggctcgaggcgagtaggtctctcagaaggctagcctcttggcccgatacggagagaggcatcacctactggacccccgctggctagtcactgacggagaggcctttccttcttctccaaattccgtgcaatgtgagataaaggtacctcattatcatccaagacaggagcttgcccatcttcagggcaggccccatctgtaaccagcgctcttacaactctaggagcaagaggatacaaaccatacttccagaaatgaccacattggtcaaacatattatatttctctattctgctgaaagagatgggatgtatagtttgccctatggatagaacgtttgaagaatggaatagcccagaattcgtagtgcccgatcctacggaggccataggctggcgctcccactgaccttcaacatggctgtacaattagtgtcacccaaccattggagactgatttaactgaaataaaaatatcaagtcgtgttctgcttcggcgttgactttagatcaaagtagtaaccaatcaagtagggggtagactaagactagcctagctccctatacaggaagaacatcaccaaaagatacttgatgcttttttacgtgaaatgtgtcaagcacatcccaatgtaggcagcgatgtctagaaaatactgatgaagcggtaacactgccccatgctcaatgtgaccacattaacaaacctatagggagcctgtacgcctgataattcctgtagggaatctcacagtggacatcccctactaagccactagcaagaatctcgctaaaggcctcatcaaaaagagtaaaagcaagggagacccaactgtctccctgtgatctcgcatctagtatctttggcttagaagactcctctaggacatgatctagcccaagctctgaaggctcacccagtggcttaccatttgcgtcatgacgatcttagtgtttcggttttatgccctaaataaaactccatttcaatgtaatctctattatttaaatatcaataaagagacagaagtatttttactacttattgtgtcatttggttcatgttatcatttatttgtttatttgatttctaaattcatccaaatccttatca

SEQ ID NO: 80891 - DNA, 644 bp, Cannabis sativa
tttcgcataagtttagctgcaatatcacaaagatatctttcaagtacataatttgagcctagaaaattgcagatagtgctaatcatgaagtattgaaggtagagtgtgtcataaaactcacattaagaaaaaccactaaaattgaacatgtatagcttaagaaagaaaacggtttaatgatatgaatagtctaattacagaagacaagaatactaaattcaaatcatatatatactttgatatacccacaaatggggaatgaggaatcatgttatgatgttttctcattgtagcattcatttctaacttttataaagaatttatagtttcataatcatagataactcatgctaaatatgaatgtgagtactaaaattaactgttgtcataacatcacaaaaattatgaaaattcaactcaccaacaaagccacatactttaaaagattcaactcttgtgatgaatcttagcaaacttagtagtcaggtgcacacatcaaccagcagtttcaagatagaaatctttttcctcttcctgtccaatttaaaacagaaaaacatgaactaaaacaagttgtcactgcctcacagagttcattctagtatattagtaagataatgtcacatggtgaaagacacaatgtg

SEQ ID NO: 80892 - DNA, 2610 bp, Cannabis sativa
atctgatggcttgtgggattacataaacaggtctacttgacctcgttttgaatctctaatgttttacttatttttctcttaattcagtctcctcataaaatatttttctatgtttttcagctcagaagcagttgattttgtcaggaaccaacttagacaacatggagatgttcaggtattgaccccttcaatttccgatatcaaaactagccaatatacaagtataagaatttcacatatgcaaactgagattctgagcgtaaaatcaacatgggtttttagttattaattgaccaaaaggaccgaacttaaccttctacttgttctgattacagcttgctagtgaaaagcttgccgaagcagctctggtatgataacaagattacaactttttcttcactttttaactatgttcaacttcaatctgattatctaagtttctgaacatatatggctataggatcgtcgcacacaagataatgtcagcatcgtcattgctgatttggggtacgtgtctatttgtacaagcacaatttgcatatttttaccaaactcatgatggccttgtgtttagccataaacttgttcttataatatcttgtaggcaaacagattggcgaaatttgccgcttcaagaacaaaactttttcttggaattaggccaagctgtagccacccttggaatcgtatcgcttggactttggatgacaactttgctttcttcataagtttttggaaggaatcccaacaatgtataggaaccaaccaacatagtaaacaaaatgaatgtagggaagtgttcatttagagttggtatgatctgtataacgtaattgtacatgtctcatatcttaattatgtattataatactcttttggtttaggttaattaagagtaatcttggcatagtaatctgtagttttctttaatgtcattcttttccagttcgaaacgtttcttctaacttttgtctcaaatggtgaccttatcttagcaagctagatgaagaagaagctatggagactttgtaattaaggatcagatgaaggagaataatatatgtaagttaaaaaggaaatttataggcgacataaaagcaagttgcatatcttctctgaaacattgtcgtatttttggattattgtcgtttatttctgtcctttcatagccaatgttttttcaaatgtattagtgtgtctgtttagtatatatggtattattgtggccgttttaacataagttcaaaattttcttcctttttgtattgcatgtcgtttatattggtgacctattttcatttgacgtcgttttgcttttttgggtgttatgtcgttttctcattgtagacttttcataaaacatctaatagacatggatgttttaaaacaaaattgatagataattttaaacttatctaatcacattatagagttgtgaactaatttaaaaaattaagattttcgttcctaaatttatagctataggaggttgtcttttttctcttgttagattcgttggccttctctgaacattgatctggtttggttgggattgtgttttgctattgcaattcgatttttgccattgcaattagtcttgtctttgtaacatagttttgagttttttggtcttgtctctgtgacatagttttgagtgttttagtattttccgtgtgatatgattttgtttcattgttagttcttctttgttctttgaggactcgccatcaaattgctcttagtggttgggaataataagttatctgcaattaaaagggatttttgtcaaacgatttgagaattgagctgttgattatttgattcatttttctaattctaatcccgatcttgtctcccacgagggagatgtcccaaataaattgtatgttataattttagctaattggtattaataaaatttcataatttataaaaaaaaatagacatggatggatggcttatgtgattacatgatgagcaaatgagatttattttattttgaatgttgtcatagggacacaaaattgtacacattcttttgtacaaaattataatataattaatcttaagtatacatttaaaagttaaacatataaaaattaagtatattgtcggtaaaaaaatatgtagtttattcaagcttacaataaaaaaatagttagtactcgtaggaaagtagtagaggagaaagattagattcaattaagagaaaaccgattcagtattttaaattattgataaaccatcgacaagagatgagaagtaagttgatgttcatattgtcatatgtaatttctagaccaattagtatacaaactcatagttagatttatgttaatatatgaaatgagacaatggaagggcaacttcaatggaggcactttattttggtgttgatcgatctcacaaattttattttactttttttatttatttatttatttttttttttgaatcaaaatatgattttatttaataactttcagcaaaaacaatagagtttaaaacaaaaggagcatcgtgctcactgaaagtacaatctggcaaagaacaagaacctctcgcaacacaatgagcggccttattcgcagatcgtttaacaaaacataa

SEQ ID NO: 80893 - DNA, 1779 bp, Cannabis sativa
ataataataataataatgatcatatacatcatcaatactatgggatggagattatggatcatgatcatcacgatcaagattatgatcatcatgagattgtggagaagaataacaacaacaacaataagggtttgttcagttcggggatcttgtcgccgggaccggcttcgcttccgcctattcatcccaactttttctctccaccgtcggatagcttcttccatgatctgagccctgtaattcatcatcatcatcatcatcaaggtagtagtaataacaattacttcatttctcctaggatgatttcttctccaaatactccatcaattgactttttactcagcaatattttctcatcaacagatcaaaatttgtagattattaattattttttttttgttttgatttgggtacaagaaacaacaagagattttttatttttacttttataattattttaattatatattagatttgtttataataattattatatggttgatacatttatagaaaagagtattaataaatgccacgtatgtacatgtgtcatatgaggtagggtagggtttatatattttaatattttctctttttttccttggtttttaatattttgggtttttgtgagacattagatggaatagtacttaagcagattgttaactatatatatttcttgcattatatataatcatgggtatatcactacatatatatatgcatgatcatgtggtgatgatatatgtactaatatatgtatatatattagcatttttggataccatatttttgtcatatactctatattgttatctgagaaaaagaacaatgttctttctcaattcaatatgatgatctttctgttattaatttatttatgtctcactaattaattataatttcttcatcatttgtctcatgcatatctaactttcagctttttcaattcgagttctatattttctacctaatttacatcatcattgtttatatatatatatatatatatatgatgattaattaaattaactatagataataatatcttgacagtagttaatttactcgtttaacttctttttttcccaaagtaatgtggtttgctatatgtaggttgagaaagtcatactaattaaaagagttagagtgataaaattttagtcaaattcacaatatatgcataaagtaataatgataagtgtgtgtaaaatttgtgtatgatttatgtgggtaaaatattattacccataaatttaatgttatatttagttacaaacttatttgtgaatatataatggcactaattttgaacaaaaaatataaataataatttatcacttttctttacctttttatgttcagtaatgttagacatgataaaaaaaaattcatgtctaacaatatatgaaaactcttcagaattttttttaatgccctacactaatttaatgatcattaacttaaggggtaaattgtattaaagatctaaaaactaatatctagggaatatcaagaatgcaccttcaacataattattattgaattacacaaattcataaaagatgtgaatatgttaattcactccagaaacggtggttaattattaatatattaataattgattatttgatcgatatataactgccaccggccatttatatgtatatatatatattagttgtaataatcttgtgacagctcaacatttgatacaattttcctcatgagtttctaatctaaatctgcaagtagtgtatataaatatatataggagga

SEQ ID NO: 80894 - DNA, 797 bp, Cannabis sativa
gtttcctccacgagctttttcttcaaggtctatcagaattcttttttcatttaggcccatgtgttttacgggccatgatttaattcaacagactcgactttgttgatacattcttggacaacttttgagttctacagttatagctattgtaaaaatggcatgaaatatgagatttgataagaaaattttaaaagtatggtacttataaatttgccattctctaatagtagtttttttacatttcactaagaatcagaataattaataggagaaataaatcggtttaaaatataaaataattaaaaataatattttattatgctatttactaaattgtccgaaaagaaaactagaattatattattttgtttacataattaaaaaaggtaatcaaaatattttaatttgacaaaattgttattattaaaacatgtaattattttctgtttatagatttttaaaggacatatttgtcattttcatttttaattgataaaattaaaattaaaataaattaagttagtaaagggaaatgtattccctgtaaaaatgggaggagaacataccattaatttttattccctttaaataaacatggcattaagattttttatggtatttgataaatcacaattttataaatttaatatccaaattcatatttcatgttttgtttctagcctaattattttttttttctttagtttattttgcatttgtactttagaatttttatttctctatctttccttccactctaacaattttagtgtgttttgtgtttacttgaggtatta

SEQ ID NO: 80895 - DNA, 666 bp, Cannabis sativa
agaccaaggagttggtatagaaggtccaaaagggtacctattagaagaaaattcaagctcaaaatcccaagcttgagaaggttattaagaagaaaatctaagttggtttcttctgttagagtttcaatttcaaatgttgtaaagagattgaaggaaagtcaatctcatttgagtgatctatttgctggaaactacatgttcttacaggtctctcctacttctttgaagtgtcttaataaggctagtaccaacaatgtttataaccttaataatggcttttcttcaaggtaccctcccaaaattgctaactgaataatgggtttacttattatgttaatatgagatttagtctataataaaaatcttttctttctttatatctatctatctatctatctatatatatacttgttgtatttactgtgttatttttctttcacaaaaatgttgcagggtcttagatctacaacttggtagatataagcaaaacatatatattgtattagatataatgtttcaaaatcatttatgtaaatttgatttggattaagattttagtgatgttgtatattgagtgagcgttttggataagcataatcaccaattttgttcgctaaaccaattatgttctttttaattttatggcaaaacattggatcactcaac

SEQ ID NO: 80896 - DNA, 1959 bp, Cannabis sativa
  modified_base (1891)..(1906): a, c, t, g, unknown or other
aagttctatagatttatgatttagggttttctatattaaagcacttttaggaatatgtttagatctgtgatatatatttcttgagtgttttataaatcctaacaaattaatcttagcaagttcacatgctttcagtttcaaaaatggtaacacattaacacataggacaatcgtaatatattaaatttctactatgagatgcatgataatataactgtgtgagacttctatgtatgtcatcttattcactaatggatgagcatgttattaatcaaccattaatcagtatttatttaaaaataataaataaataatgatgatgaactagataataattgggtatttctaatttgacaaccctttaaaaattagaaatcaaattacaaaactattctccatagatgcaagggtatttttgtaaattcctaggattgtcggaagccttaaaatcaacaaaatatttttaattaattattgttaaataaaccttttatttaagacatcttttaaatcctttaaataaattaaaacaattttaattaatttattcttaaataaatttaatatttaagacaactttattatcatattagttttgtcttaaaataataacatttattattttatttggaactgagacaacttttgtcttaatatggttatagattttaaatttgaatttcaaatctataactgacttaaatttatttaattcaaaattaaatttgaaaaaataaatatcccacaaaattatattattttgccttaattataataaaatactcttattaaataattaagataattaccaatttaaatttaaatttcaaattagtaaccataatatttattttgaattaaaaaaattgaaaaataaatatccaaaataatatttaattattttcatcaaaataataatatgataatttatttttacctcaattttggccaaccaacaacgatggcgtatttatgaatgataacgccacatgtacacaatttttgaatgcttaattaatttttaaaacctacttctaattattattttgcaacaatcgattgacccatcttccccctttataaaaaaaaaaaaaattaaaaattagggtttcagtttgtcctaacctaacattatgtgaattttctatttcgatacaatcttctacatctatgccacaaacccatttctctattcaaccagctacatttagatttctccttggtttttaaaaatttacttactatttttctactgttatgcttatttgtgaaaaagaaacaataatttcaattaattggtaatctactttgataatttttttacaatctttagattgatgaagatgatttcaacaatgagcaaaatagttaacaatcattaattttatagttgctattactttttttttacttaaattttcattttttaaaagaaagaaaaaactaaatagcttgaaccaatcttggactgacatactaatttggaacttaaaagtgttaaaaaataagattgagcgtaaagttacctctaattagaggtcattcatactattttttgttaattaaggttatgtgtgtaataattttaaattttaaagagttttgttgtaattatttcaattatttaagttaaaaaaatattattaaaagatctttatatattaacaaattgcataaaattaattaataactatttgtaatttatttatttaattaattttaattaaatttttattagtaaataaaatatcaagttacaagttatttattattattttttaatttttaaattaatcatagctattcaccaatgatttaatgattaaaaataaacgtaaccatgatcgttacatatttgatttaactattgaaacctcctccatatatatannnnnnnnnnnnnnnnacttcttaatgggtattacccatgaacggttactatacaaatttaattataaa

SEQ ID NO: 80897 - DNA, 2816 bp, Cannabis sativa
actctgagaattaatgtatgcttgacccacgaaatcctaatttccatgtaaaatatttagagtgttctatgataatagatataggttaaatataaacttttttcaactaaagaatcattattaacacacaattattatacattagctctcaaaaaggaatataaaccctatgagaaatatattagtgctccaaatcttgaaatcctttcttatatttcagccacgtgcaaatcaaatcactttgtgatgacccaaatcttgatgatgatgtatggtggtatagggaaatgttgaaatgataattataatggtggtagtggaggtgatgatagcttggtacatcttggctaagaggaaagaaaaaaaaatgatcgaggtgatgatgttaattttagctaagaggcttaatggtcttggagaccacaagaactttatatttgatgagatagagaaagaatttggaatgaaggattatagcttctgtggtaaagtttatacgataaaaaatggactttagagtaatggttttggtctaaaggggatgcaaatgaagagaaagattgaaagtgtgtttggattttcaagtgacgagtgatgactttgattaatagtatttatagactaagaactaatccttagcaacgtcctatctaaccgtacatcccatgaaatagcatgaacatatttttagatcattctaggctataatcagttgaggattccttctaatttgactacataagctcctatcattttaaaatttgaattatacctctacctatgtagaaaccacctgatcttactctatctcaatttttcaaaatatagtcaaactctccactcttattacttagatgccagatgtcaaaaggttcatttttccctaataaattccctatatatcgtgccatatagccttcattgaagagtcttaataactagttctaatatttatgacgcgagcacaactttgactacaactgttcttaaatttcgaaactaattaattatatatcatgtactcaatatgcaccttgattaataatttaataacatacactaaccataaatgtctttaataaggttattgattcaaactctaaccaccaatacctatctcttgctccacttactccttagaagttgttattattattattatgtttttttttgttctaagagccaaatgctccaagtcatccacgtgtatgttattattctagagttcatttcaaattaatttgaatatactagttgatgttctcatgcactcataaccataaacatatatataaacatatattgtattcatttcacttatatctatttgccacaatgataataataataatagcaataataacattattttgtaatctcgtaggctaaatttgaaatgaatggtgcctttagcccatattaatttgttggagttcaataaagaaaaatgacatatttttattatacttaacaaaatactataaacaaataacatattataagcatttcattatctccacatcgagttaactaaaagaaattaataacatagtagagaataataacaaaatacttttagttattacaattttaaattgaaatgattgtaataaagaattgattgctttccgttttagttgtggtaaactgattcacacaccatatttttcataaagtttgggaataaaaattttttatatcaaatttacgaatatggtaaattacaatatatgcattatcagatacgttacctaattaaaaatgtagaagccttttgttttgttttttttttttttgttaatagcatagatttatattttgctcaacattaataggaattttttattagggtggattccaaagctcaattttagctataaaaattacttatagtttagtaattattttattaataataaaaaaaaaattgtgaaacaataaaattaaaattcgaatctaaatataaaaataaactatttacttaagaaaaataattgggcgagcaaagaaggataagaatttgagcataacatggaaaaccagacgtacaggtcgtatagacttaccttttttaaaaatattagtatgatgcgatctgcatttttatggcaccacgatcgacccatatctttatacattaaaagtgtctatctaacagcaattgttgggttaacattttgttattcttcttcttttaattttaacagaagttaacccttccgttaactattgctattcaatttaaaacgtacggtggtagattctctttcttctccctcaaacttaaaaattaaaccataatttattgggattttccttttcctcaagtaagaacgaaggatacaatttaaaatcttctaatctatatgactgagtttcgagggaacaccctaagagatttagtttataattgatttttttgttttgattcattaatataagattcagtatgattgtgtatatccattacctttttcttttcaattgacttccttgggtgaatataaatgtctaatttggaatttcaaacccgactcaatcaaaatgccgctcgagttcaagactttcggctctggatattcaccgctgaactagaacaatcgtcctcctaaaaaaaccattcttctcgatggctgtgactatgagcactggcttgttgtaatggagttcgccaacggctccaaaccctttgaagagagtgagttggcaaaattggctttatgaaaacttttattaggaaaatgacttttcaaatattttaattagcaaaatagccttcttttaaaattgatataataattaatataataaataca

SEQ ID NO: 80898 - DNA, 904 bp, Cannabis sativa
tttaaaatatgaaatttacatttaatgtaaatcggatgcactataaataaaatagtacagattggattgaatgaacattaataagtgataacttttgttacaccatactattagcctcttgtatttcattttaaaaaagattcaactttttaaaaataacttatttttgactataatataacattttaaattgagagttttttcctctattcctttgctcacggtttagctaaactactggtatattttgcaggaatgaaaaaaaaaccacgtgtaattatatcatgtgaaatttaattgttttactaaaaaagaattgataaaaaaaaaataactatactgtagaaacgtaagtgatttaactaatttataatattaatttaagtaatctttaataatataatagattttttttatatcttatatattattttttatttttttttaatttatagtttaggttgcttcaataatttttatttgggttgctatgtcgattttagttatagttgcgtgagttgttacgtgtaaatctataaaaatgtaaaaaaaaattattttcaagtgtttatttttattagagagagaataatattatttaattagagagagaattgagtaactgttaatggatgttaacttaaaaaaaaagttaatcaatcagttaactactttgatgatatggctagaaattattagtggcacaagtggaaataaggaattcgggaagcagatttttctctaatataatatctctcaactcaacttagtcaatatagttggctttatcttggcaaaaacttgactaccatttatgtagaatggaactgacaacttgaattctacaaattatttgtccatttgaatgtgttctgcagcatcttcttccaaatgggtgctttag

SEQ ID NO: 80899 - DNA, 852 bp, Cannabis sativa
tattcctatacatgttcctgatctagctattaacctaccaaatcaaatcatcaacacgcatgccatgataactagatcaaaggtaggtatacacaaacctatatcggtattcaccatgagcccaaaatagtgaaagaagcacttgaagatcccatatggaataaaatcataactaaagactttttgctttggtaaaaaaaacatggaccttagtttgttttagccctaacatgactattattactaacaagtggatctttggaataaagttcaatgcatatggcttagttgaaaggtataaggttaggcttgtggcaagaggcttccaacaaactcctgggcttgactattttgagacatttagcccagtagtaaaaccatcaacaattcgagtaatcttcaccatggcagcatgttatcagtgggaaatacatcaagttgacatcaataatgtcttcttgaatggagaccttcaagaaagagtgtacatggcccaaccagaagggttcaaagaccccaatttccccacccatatttgcctacctaacaaagccatttggcctgaaacaggaaccaagaacttgatacaacaagctgcaacagtcgttggtgcagtgggggttccaaactccaaagcagactcctctcttttttaataagaaggaatgcaaattagttcttttacttgtctacgtggacaatattttcatcactggtgtagactcctcataaattcaaaaggtaatcacaaatctgaatcttcagtttgcacttaaaaatatgggactcgctatctactataaagacctaattcatatcataaagaagatcatgttggaattaattttacca

SEQ ID NO: 80900 - DNA, 1548 bp, Cannabis sativa
ttaaagagcatttatgagaacattctatatttagttatgttagagtctttcacattctcacattgttgtgaaaatataataacatatataaaatttatgaattacttttctcatgattgttaattaattttaacatagagagtcccatgcatcatatatttctaacaaaccctgatcatcaagttatgatcaagaacaactctaaacagggcaaaagtaacattgcttaggtggatttaacctctaagccacataagaaatcctattgtgtgttaattataaggttttaccaaatttgagttttcattatttttagttgatgagaaaccatgctattggaattaaatccaactaaaactatcctaaccataaatcaactacaagaaattagaaacaacttgcacaattaacatacttataaaatagttacatcaagatcctaacagaaaaaaatacaaaatagactaaagtatttacctgccagctcaccaatccagacatcttcatttcacattgctccacttttataaatagatgctcatggttttagtttctatctaggtctgaagactagagagagagagatcatgtaattgctctgagttcaaagataagaactcagagttgggaaaaagtgagattatgaaaagttgagagaaaagaaagagaggacttgagtaagaaagaaggagaaacagagctgagagttatcgagacttaccaattgaatttgtagttggaagctccatcaatttgtactggatcttgattgaaattagtgcaaggaccatactcattcctgaggcgagctcaaagaggaagtcccatcaactcagggggaacctctataaaactctgtgtttgattctcttcttccttactcttctcttctacataatcgaaacacattcactcaatattgtttgcattttctaattctaaccctaacgaaatacaataaagaaattgatcaattttctttcttttaattttggtaaagttagaatttcttgagtaactgttgtgtgtttgtttctaatagtaaatcaaaagttatacggggacgtttttggtacatttgttggtttgttaaaaggtcgaatttgaccttgtgatctatgtgttagagttgacttgagtagggacattctaggaattcccaacacatgctaacacattacaagattcttgtcgaagttaaaagaggataaaaagctggccacctgcttggaaccaaggcctaggccaaccagggttccgaagccttaagagggttagctagggtcccatgacccagccaagaatcggccagggtcaccaaacccaggcatacaagctctaattttgtagggtgaaaccctagggctagccaactccaatgattaataagtcctaggactggcccaagtctcaagcaagacccctagggtcgaccagggttagttttgaatcgaaattaatgtgtgttatttcaaagctcgaatatgtgcctcgtgttctttatgtctcaaagagtcaagaatcacaatgaaggccaaaattgaatct

SEQ ID NO: 80901 - DNA, 2071 bp, Cannabis sativa
ttagggcataaaacccaaaagttgtcaactatcaaataccatcgtcatcagaagaggaactatcacagtcctatacaactaccttgcccttacctttagatgcaggcatggagtgaggaggtctctcagatcctggcctttgggcctaatatggagagaagcatcactagctagaccccactgccaggggccgacggagagccctctccttcctctctagattctatgcaatgcgagataaaggtacctcatcatccaagttagatcttgcccatctccaaggcaagcgccatctacagctggtgctcctgcaactcaaggaacaggaggatacaagccatacttccgaaagttggccacacaggtaaacctcaatatgtttctagtctcttctgaaagagataagatgtggtttgccctatcccttatttacaaagtgggaatagaatggttgaaaaatggtagtctctagaagcaccgatgacaaacctctttaacatcctaagcaatgaagtatttgtcggcatactcgccagcttcaggcatagatgaactattgctatcatctagccactggtggccaacttggctaaagtagaagtatctggactgatgtatctccaaaatagactccaaacattgatgaaaggtacttgataccttccggggaggtttgtgtggacacatcctgaaataagcagcaacatctcaaaagtacggatgaagaggtaacacggctccttgctcaatatggtactctaactgtgccatgcagttgagggccaatctatgtgctggttgatcctgtggaggtatcctacaatggataccgcccactagcccattagcctatattctctcaaaattgtctggcgagatagaagatatagggggaatgcacctatttccttatgaactcgcatccaaaatcttagggtcagaagactgctctgagacatgatttaagacaagtgtcgaaggctcaccaagcctgttcagtagattaccattggtatcataacgaccctaaggacaaccgaagagaacaatacaaggtttgtgtctcttcttcctaaccagtacaagctcctcaatattaaacccaacatcgggactttcatctccatggtcagtcccggagctaacatcaacatgagcctaggtagcctcttttactgtctcaattcaaccccatgtaaccaaccaaatcgcatgagggtcacacacagtcactctcctataagtctgcttcgtgttggctataattacaaaataagcatgaaactagtaaaacacatttaaatcagcagtacccaaaggtaccttccaggtaaaacataatgtacaaggtctatcatcgaccaagtgtcgtcttaagtacaattactaagacgtatggtaagtcctaagttttataattaactacaatagactcactacctagccttatatagagtattcaagagaaaccacgcagaaggccacagttgtatatgcctccacagctatcacaagaccctagctaaggtcaatagagggagaaaaactggctgccaacttggagccttggccttggccagcaagagttctaggccttagtggccggccaaaccgcaagacctagtctagtggccagccaggaaccctaattccaggcataggttggccagcctaaggggtaccaccccttggccggctagacccattgatagcctccctttgctagccaggcctcaaacaaggcctccatggctgaccaggatctacgtggttcaaaacttatgtttttcaagaactcaaacatgttcttcatgttcttcgtgttcttcgtgactcaaagagccaagaatcacaacgaaggtcagatttagatttttttggtctagaaatcacacattatgtatcctaaggctatcatgcagatcaaaataccaaaaggataacagtataacgtaagaatcaaagaatgttcaatgtagggaatagtgtgttcggctttatgccctaaataaaactctatttcaatgtaatctataccatttaaatatcaataaaaagacagaagtatttt

SEQ ID NO: 80902 - DNA, 1529 bp, Cannabis sativa
tatattatgtacatggaagatggtgacacccatggattgaaactgtgtgtggagctgaagcttattagagttagagggatgggcatcatggggattgataggtcgaacgtaaacaaaagtgggatggccttgagaaacgctggctttcaccatgaattttccaaggtaaccagtgcctccaaaaattagtatcttattttttggagaagccataacaaatatgtcttttcttattattagcttttatatgcttaggaagaaaagaaaattatttaactgatcacctcatgagcttgttagttcctcacaaaaagcacgccttttatagccacaaagtccactttaaaagtctacttagaacttgtctaatgcaatcaacttatcaagtgggctttgttttttttttttttacaacaattaagtggccgttcgattagttattttttaaaggggtgagatgtaaactggtcttaaatttgaaatataatataaaaatacatttattgtatattatttttttttaaaaaaaagaatatataataattaaattaattaagttatttaacttttttagtatggtatattattatattgtaacaaaaatgaatggatatttaaattattaaatatatatatatataaaaatatttgatatattgtattactaaaaattaatatactgtattaatagaattatatgtcacaaaaaaattatagcaatattaaattaataatcaaaacatatatatatatatatatatatcatactaacacaattatatatatacaactattaaaatatgtacatatatcagaaaatttatgtataataaaataaaaattaagtattatcttaaatacataatattatagataacaaaaattatatactgtacaacaaaatatatttacttatcataaaaaattaatataatattattattacaaaaattgtacataccatattaataaatttatatatcagtattatatataataaaataaacactaaacatgcatgatttaaaataaaatgatatactatacaataaaatttatataccatataacaaaaaaaatatataccttatattagaaatatatatacaataacaacaaataaaaataaaaataaacagatgttaataaaattatttatcatgtcaacaaaagtatatatgtgagtatgtgtatatttatatagggtgtgtatatttttgtgtatatatgtataaatttaagttaataattttatttttcttttaagaaaaattaatttaatgttgtgaaaattgtaaaatataattcattttattgttgttgtttatatgtgtgtgattgtgtatatatattattatgaatatgaatttgtatttttttaacaatagtataaatatatatatgtatgattatatatgtactaggtggaagttacgtgccgagccacgtattgttagttttatttaaggttttgagtttttttttttagattttggtaactaaagtggtataattatttgaacgatttg

SEQ ID NO: 80903 - DNA, 917 bp, Cannabis sativa
taaaatatggccacgtaggataattttttagtgacctgtcattgccacgtgggcaaaattaggacttaacgaggttatacacacgacacgtaccttaatgtaaagggaacagtactttgtagggtagtttttccaccaaaatacgaggttggatggttttttacaagtaaattgatagttgaggagattttgtcgtaaattactctatattttatatagaggttccaaaataaataaattaaatgagtcaaacatgacttgcttataatttttgatattcaatatgaattatttaataataaatatttataacttaacattcatacatatatcaaatattaaactctttatttaataatcagaaaatatctttacaagctttttagggtataaaccctaacatctctgtgcgacgtcggcaacagaccatgaagaagtatcgttgaccttcccctctcaccttaggtggactttcggtcccttttctcgaaaccttgaagcctaaaaacctcgaacccatttttactttctccctcttggtgctctcgttatcacgacgtcaccaccaccgccacctcaggcgatccaaccgagaactaacggaaccccaaggttcctcctcgcgaatcttgacacttagcctggtgttgatatgttttttttgtcgattgattttgtattttagtttgtggtatttgtgattacagatttgaaatcgattgcggggtttgtgggtttttgttgggtttgtgatgtgagaaaatgtttcaacagtggtggtagtagtggttgtggatggtggtgggtttggtggtgttgatagatgaaagaagaagaagaagaaagttgaaaatttgaagtgatggtgggaggtagttttggtggttgtgttatgatggtggtggtggaaaaaaaaa

SEQ ID NO: 80904 - DNA, 1836 bp, Cannabis sativa
aatatgggtatttgaaatatgtaccaaatattacacatagacatagtgataataaaatctttttttcaactatttttttaattctccaactaatcatttttttttagataagatatgcattactatgagatattagtattgtctaacactaattataaattgtattttgtaattagttaacgatactctataaaagttaaagaattattaaaaaaacactattagtgtctagcacctttcttgatgtcataccgttatgatgtaattaagtatcgaatatcatataatataaaataatatcttttaattataggacgtcacttataaaaagtactaaataccgctgatacttaataataactctaaattatataaatttaacatttaattacacatattacacattaaaaagtgttagacaccactaacaccttttaacattactcattaatttctatacatattttagatgaaacacatcattattcttttaataaaagctataaatataattatcttattcttaaaaaagaaaaaataaaattaccattttatttgattggtggaaacaaatctattcacatagagaggtgagaaaagagaattgaattgatatgtccataaagtagacaaaaaacattaataataataataataataataataattctactctcttctctttctcttctcttgacttaattcagaaaacaagctaagcttaatagctataacctttgtggttctcctctctttctaatttctattccataacacttataattttcttatctcaattctcacacacaatttatcaaacacttaagctacatattcatatatacacatatatagttatatacatatatatatacacacttttcttagctgattttgttctgttcttctaatggggtctgttctggtctgttaaaggtttgttctttttggtgggtctgtgaaaattattcccttttcattgatgggtctcttaccttatattaacaccaaaaaacaaaatatagcttacagatggatctagactggtaaacctcttctcttctcctccgttaatctctctctctctctctctctctctctcttgctatttttagcttcagtttttcccacctctcaataattttatgttttgggtttttttttttttttgatttaatttaaattcacttcatttatttgatgtgatttttggtgcagtaatctttgacaacatatattctcaaattctctggtccccctttttcgtatcttgattaatccggtaagtttaagcttaaattttgatctagttttgtgattaatttataattataattatatgattgttaattttttttattggaattattgaattgaagaaacccagaaagccaaatgggttgttgaagttaatttaattgggtttccatttaaaaaacatggtttggtttgagttaattaccatttatgttcttaatgatttgggatttgggttaatatagaaatttatacaaaatcatttggattaataacaagaaaatttattattgattaataattgataataataatttggttcaagatccaaaataaagaaccattcttgcttcaacataaaattcttaacgttacatattactcacgggaatatggttttttatttattaacataataattataataatatttataaaattccttgggaatagatacaagagcacagtacattgcattttgttttgttgtggttgaaagttttgttctttgttctttgttttgtaaatattttgaaatttgtaactgaaattgaatatctcagtttatttcttatcttg

SEQ ID NO: 80905 - DNA, 1129 bp, Cannabis sativa
tagttttctcaggatggtaggttatggtttctggtaagtatagtttaggaggcagtttacttttatagagtatttgtgttaggctcatggagtgagttgatcggagggagaattttctctccgatgtatggtcattgtttaacgcgtttgtagtttgcttctttctttattttaattgctttcatttattaggattgaccttttacttttactctttttttttgtaatttcttttttgaacttatcctttccttgttggttgttgtgggtaacttttcagtcatattagcaaaagttgtatcattaatggttgcattggattggtctctcactcttggtcttcctcttcatgtggtggagttagattgcttagccttggtttcgactctcccgaagcgtttttccttttgtaatgaactaggtttcttattaaatgattttgctagtttgctttccagttttcctgaggcatccctaattcatgttagacgtacaacctataaagctgctcatgaattagctgtgcatgcactagggtggatggtaaattggcttggattgatgatttttcttcttttttgattgttgttaataaataactcttatgcgacaaaagatgagcaaacacaagggaaaataactcttgagtccaaagatggggaagactttatttttgacaaaggaaaataaaaaatcatttggagtccatcttctccttctgggcttcacttttattttgttcactttgaatgggcaaagaatgtcaaggtattggggtttttcttggaaaaggatgcgacttagacattggtgcaatattgagtctttgaccgaggtcgaaagttgatgtttatcagagttcttttgtgaaccaaaatcatgatttatgaggcggtggctattcgaatgacattgttggaatattttttttatagaggccgactcgttagcggtgactgttcttttgtagcttatgtgaccaaccaaataattgactcaaatggctttgttctcctctttgatacccttcaattgaaattccttacacttccatggttgttgatagaggatgagcttattcggattcaacacttggtgccatcaatcaacttgaggataaggtgaattt

SEQ ID NO: 80906 - DNA, 1051 bp, Cannabis sativa
attaaaaaaatacactccggactatatctcctaacccatgccaaaagggcttgggttgccggggttctacgaataccccggcaattccaagataagattttcatggcgacggtgggggcttgcatagggccgcctcctcacccaaatcacagtttatattctcaggtaggttagtctcaatattttctcctattccgacatttgaattcatacctgcgtttagttcttctctaatttcgattcccaatcttttcaccggagctttaccattctgtctagctcctcgacgaccaccactggaagttcccccccttttgcgattgtaactccttctctttgacgtctcctctcgactgctactaccagggacaaaggtattgatatccaactggggcagcatggtgattggtgttgatggagttttctctcccaaagcttcgacttcttctccatttgtgatcacaggaacgatcgtcactgtagccttcctcttcttcgcaccagagaaagaaacacccgatgtagaaaagttggtattttcatgggagactactatatgattaggcccaagttctttactctgggctgggtccagaacttgatgaataacctcctctaaattactattagtgggccaagtgacataagtgggttcagggtgttgatgtggcactctagacttgcaaattttttcatgtggtaattccaccatttgatcacgtgtagggccaatgtcagccactagactggctattatcccttcatctctccttctgttgtcaatattagtcataggatgagtcctagacctttgtgaaagcctcagtccttgtctcagttaactctcattacccaaactagcttccttccatagtttctcaatgcacgccttctttgccccctgcgaaatcaccctatttggtgagggtgtccttccaacggctccctgttgtcttgtactctgcattagggaccttgtgcagtcactttcatccccagttattaccgatttacccttgttcctagttcccaccggctctccgatctcaga

SEQ ID NO: 80907 - DNA, 1506 bp, Cannabis sativa
aatttgcaattaaattttcttttttaaaactcttatgaataaactcacaactagttgggtagagacaatagtcacatccaaacaaactcattaatcaaaatcatatctaaaactgaattattacaatcccaattctaaaaaagtactaaatcaacaacttttcatatctctttcgtaattttcaaataacacaattccacaaattaggtctttccccaaaatcatagaaattcaattttgataatctccgaacaccaaccgctctacaagtctaaaaatttgaactttaacagtgcaatgaatttgattcaacaatttaagataccccagaaagctaacaaacacatcagaattaagaattaagaaatgcgtacctgtgatcatgaaaatagcgaaaattagggtttattatgagatggaattgatctgagaattgatttggtaataatgaaaagggtaatttggggaaaagaaaaataattgaggaatcaaattctcattctgattctgattttggaggaatggaatgagatttcttttaataaagcgaatcattcatttttcgataagaaagaaaaaaaagaagataaaatggagagaaaggaatcccattccctaattttattttatttttgggaaaaaactcactccctaatttaattctaaaaaaaatcaacattgtctcaaatgtgaagtttatttagggatttttgcagcgaaattcttttaacatttataattgttacacatatgactttaataaaaaaaatagcgtactttattttacaattttgttgcagtcgtgccttttttttagccatcaagtgtcaattcagaaacacgtggtgacatattattagactgtgtattagataagctaaagaaatatgtcaccattctgagctggcacttaacgagcttaattggcacttagcagttaaaaaatggtacgactgcaacaaaatcgtaagataaagtacttttaccgccactttttttatttgagtcatatttgtaacaattacaaaatttaagagagtttcgccggaaatatcccaatttatttactttattatttttttcataaatttatttacttcaatgaatattaaaaaataaaagtaatctttactattcttttttttttttttaccaaattcatttcttagaatgtgaagaaattacactcaattatttctttaaaaaatatggtttcataaaaaattatttttaattaatttatttcatgttttattattatatttttttattatttttagaaataagattttaatctattagtaaattttatgttaagtgtacctataataatttcacacatgtgcattggattaacagtttatattgagtttacggtaaggattaatggtgttacaaaatattgatgtaggggattttgtagaaaaatatgtggtacaccctccaaaatgagtatttcagtaaaaaaattatttgtttccacattcagaaaagcttaattctagt

SEQ ID NO: 80908 - DNA, 1081 bp, Cannabis sativa
aatacttggtattcctatattcctatatgctctaagaggatttctagtgcaaattgtgaaaacctaatagaaaagatgattgctagaattagtgcatggagttctcggaatcttttctatgctgggggagcagtgttgattaattcgtttctactggcgatccaatgtcatattgggctcagataatgattctttctaagaaaatcttaaaaacagttgaacaaatttacaaagatcatctttggagtggagtcgctgatttgaaaaaacctagtttaattgcttggaatgttgtttgtaaagagaagaaatatggtggtttaggctttaaaagcttggacaagtggattaggtttgtggaattacgctgtaatgaggaacaaaagtggtacgcctctaccatttggaagaggtatagcgttccaaaacataggtacattgtttggctagctgcttggatcagtcgattgaagaaaaaggatagattgttgaggcaagagattcaaatagataatcaatgcttaatttttggcttggaggttgagtcacataatcattcatgtgtctacaacatgaaaggtttccatgaaattctagtttgggtgggttttgggatataccaatccaagttcaaaagtgtgctaaattggataagaatgtgctaaggtagtaagtgtatatttttaccatcaatgcttgtgtttactttgtttggaagaaaaagaatcggtgcacactattatgaactttgtcaattgtgtaaaaaactagatttgattggatagcctacaagttaagaagataggagataatagataaatattggttttggggaatctttaactaattatatccaagtcaaatcttataattagttaaagattcccgtattaaattaaaatatgtaaaatttgatattgaaatgcactaataataacatatgatacctggaagcttaaggtgtccattagcatattttgactcaattaggatctataattctatatattgcaatattgtactcatttttataaacttaaattttagtgatgagtgcattattatgttcttataaataatt

SEQ ID NO: 80909 - DNA, 1992 bp, Cannabis sativa
  modified_base (1233)..(1236): a, c, t, g, unknown or other
taattccaaaacttgttggtgcacatgtgaataaagatgttagataaaagattcgaattttattgaagtaacagctcagtaaaacaaatacctacgaggatatcctccttcaagaaagcttcgatggcaccaccgaagaattgtggtagaattaaagacgagattatagcaagcggagccaaaacccataaaaacgaacccttttcttcattgaaaggtgcagataccaatttactttcctctactaactggtgagtcaacccgtggaatgaaactgatcctgattttccacgaaatggctctactccttcatatctaacaatgggcaacctagaattttcgtttccagaattttccaactttgcattgcatttgcatacaaaacctccttttttaaagcttggcagcgacgtaagcttctcaaacctctttgaacctacattcacatctcccattagaaaaaaaaaatggataagtaaataaatagcactatactatatggtttcttttcccaccagatttcacgtcaagcaaaatgagtgtaaatgcaataaattctcaagtagaaggcagtataattggtataagggaattcgtacatctgggtgtagttccaaaaagaagtctttggttcctaaaaccaacatcttttccagaaacctgagaaattaacaatgtataaattaattttacattgaagagtgcaagaaaaatgagatgtttgagaaattcgcttacatttgatacaccccgagaagggacacccaatttcgggggagaaaaaccaagacaaatggattgcagcaccattttattttggtgagttagggttttagcagaagcagagttttagctcagtagctaaaacgttaaacccctcagtcctcaccacctgctcctcccccgcctgaaattgtaatcaatgcttaataggtcattgggctttgttattctgggcttatagttatacacaattaagaggaccaaatattttctttttttcttcacaaagctcatctggttagattaattaaattcgtacgatttaatctaatttaatttgtagagtggggatattcacacttttgtaaattaaattggattgaaaaattcaaaatttatacatatacgaattaaatattgaaataataatgttggagttataaaataaaaataatttattttgttttgttactagttttataaagaaatatttttttttcataaatattnnnnaatttaatattgaaaagtaaccaagtggatttgattcaaaatataaaatccgcacttaatacagatcgaatgcactataaacaaaacagtacgaattaaattggataaacaccaacttattcaaagtagccctaatttaatcttaacaaatttcaatatattgattcatgagttactatttattattattataattattattattttatatttaaaagtcatcaactggtataaatctattacatccgtaataataatattaatattttatagagagttttgatagatttctaaaacaaaattggaagccaacatgtatttcaaacatcataaaagaagatatattaaaaagaaaaatgttctgtactaattttattaataaattgtatgataacttattatactttattaattcattagtttttaaatttggtttgaaggtaatgtacaagataacttaatataatcaagaaatcataattaattcactgaaaataaaaatggaatcatgatttaaatgtatatgagataatattatctaaaaattatatatatttttctatataataaagaaaagtaatcaatattgtaagtaactaaaatgttacttttttttttttttagaattactaaaatgttactttaataatttgaaaagggaaattttattatttgcccttaataatataactcataccaaaatttataccattttataatttgttcaaattgattcttctaattttaaaagattcc

SEQ ID NO: 80910 - DNA, 980 bp, Cannabis sativa
gttatcctggaaagtgtcgaattcttggacgaagccgcatgattcgcataccaggctttctgagtcgaagtcgcggactaatgatttggacttgcaattggcgcaggaacctgacatttttgaatagtaattaggttttgcaataaagggtctgtttggttgccgagaaaatacgtaaagctgagatttgggaaggaaaatggcaaggtactactacaagttttgtgtaaacagaggtaatttgatgggatagagcgatggaaaagttgaagaaattcatgcatatagaaaatcaaagtgattgattgaaatcatgggtttgattgtaagaacaaaattgatggattcatggaataatcggccgggaaagttagagaaagtgagaaaatagggaatgggaagaggaagggattttagggaacggaaaggtttttttcttctttctttccaagcactcccaacatcaggattgctaatgtgcaacagtaataatcgacactttttataggtgacgctttatgattagttaacgatattttttaaaaattattttttaaaattatataaaactcgatacttaattacattaatagctgtataagaccgaaaaatatgctagacaacattaataccttttaacaattttttttaaaatataatgtatataatctacttttccttttatattttacaacacactttacagtgagtttctttaaaatacattataaaaaccatactttttttttaaaaaaaaaaattattatattttattcattttaattataaaatattaatatatacatatatctacatacaaaagataattattaaaatttaaaataattgataaaatatatttaaaataatgaatagtttttaatgaatgtaaatcatgaataatgtattttaagaaattttaaaatgaagaaatagtttagaacatctactttagtgtatttttgtacggttctttaaat

SEQ ID NO: 80911 - DNA, 1537 bp, Cannabis sativa
ttttatattctcacttttaaaaatacaaatttaaaacctaaaaattgaaaatacagtcaaacacattcttattctttgagtgttctttctcaatgaactgtttgaagcaggtaaaggaatggtttcattgggccgggggactgcctccatttctctacctcagatcaccaagtgaatcgaagggctaaggtaagtaagtttaaagaagaaggctatctcagctactttggctgccttgtgtactacatttgggttaactgaaataataaattttagaatggctcgataaaaaaatagtgatagaatagtgcacaaaattaaagatgtaattaaaagtaaattttttttttatatttgacctaagcatgtaactagtagtgaaaaatattggtttcaaacattgtaaagattttataaatattttttgaatcctcttcaaattaattagagaatacattaggttgtacaaatcagtttttggaataatgatattcttgcattaaaaaaatatatatattttagttatcactaaaagtgaaattattataacaaaatgtcagcggtactcatcgtcactaaggtgaggtaatgtatatcaacagagaaaataaaaaagggtcagcctttgaagcaaatcgaatgaggtgtttttctctccatatataacagaaagatttatcagctattacatagtattttgaatattggggcgcatgaaatacttttatttattttatttcttgtgaagaactttttcttttttttgataagtatcttgtgaagaacttcatttattgtttttccttttagttaagattcctattttttctttctctcctcttccctcaccaactctcgtagaaataattaatcatgaaaagaaatattatgtttgaagaaagaaaattatttatatttggacagctatagctagcaaggtactcattctctactttacgtggccaatgcatgcagtgcaagaacctgccacgtacgtacgacgccctcatatatccaacaacaacacatgaaaaataaagagcattgccattattaatttgatcttctttctttgatattctctctctccctctgacgttatactaattaattcaataataataaacaaaatatttcataaaggtgaacttgcagaaaatattagttttgaagtactgcatcttaattataattcgagcatttcgttaaccaattattcatattaaatatttatattatacattaatggaaaaaaaaatatcgatgcaattattgcaaaaaaagcaggataagtgatgatggactggagatttataccttcatcgcaagtagtaaattaatattgtttcgactgattcatgttggcaaggatttggaatgagacaaacgtatgttgaagatattggtcaacatttttgttttatatctttatatctatgtatacctatataactgaaattattggtttttgaaaatttcacttttaatttttatttaataaaataataaaatattatttatctataataaaataata

SEQ ID NO: 80912 - DNA, 1057 bp, Cannabis sativa
tttggtcgggttaacccgaccaaaccggcaaaaaagtttcattctccctttttgaacggtgtttccaagtttatacttctctctctgtcctaatttcctttctgtagtcttcttcatcaactataacacacatatatatatatacatataaataaataattaatattaattttaaaaaataaataaatatatatttttttctccaacaccaatcgttgacagcatttgaagaagacttattactcaaagtcctttcttcaacaccaccacctttcatcttaatctcatagttatacagccaaaatgaaaaaccacaaccagtacactattttccaattcacaacaactctttcactgaataattccaatccaaccctttccttgccaactcctttaacgcttctctattataaaatactctgacaactttgacatcaaggatatacaaacctagtgccaactgcccgcaattgaaaaatttagcccaagctttgaaattatagtgcagagtagaggcgattgggcctcctccgttgctgggaaacgcttctgcacctctatccaccatagatgacgatatagggagagagagatgtatgagagagagagaagagcggctgagacagagtaatagatttagggtttctttcttttttagtttatattttttaataatatttatatacaaattatattagtatataatatataagtaaaattttaaaaacataaaatatgaaattcttattcgggtttggtcggtttatctcggtttcattgggcggttatctcttttttcaacccgcccaatatacagattgggcgggttatatttttgtcagttttttcggtttgcattttttgtcggatttttacggttcggtttgggcgggttattcgggttgggcggtttacaaaaaattttgtacagccctaattataactactaaatatatcatactaattatcaaagtgtagtagtactatttataatagtgtgccacttttattcttataaaattattgaaattataataaataaaggataaatgtaaaa

SEQ ID NO: 80913 - DNA, 1410 bp, Cannabis sativa
accaaataggaaaccatattaatgtataccagccgaaaatatacaatgaataataaaatatttttgtcaattaaatatgccaaaaatgtaattaacaatttgtatttcgagttgcttaaaatatttcataaataattataacaaaaatttgtataatttaacttttgtgagattacaaatttgactgtcaacttatttaaatcttctatatatattttggagaaattgattctgattgtaaaataagactgcttaatatttcgaatatgcatgaggcctttttctctttaatgtatttaggagttaaccttcgttctacaaaatgaaagtactcggattgtggatatataatagaaaagatacaaaagaatctccatggttggaccagttagtatttgtcgtttgtagagagagctcagttaatccattattggctcttggagattcgtaacttttggatgagtatctttatcttacctcaaaatattaccgctgaaatagatagaatgtgttgtaactttcttcgggggagaaaagggaaccgaagtaaacctcacttgacttcttgggatcaaatttgtcttccaaaagatcatggtgtattggattttagagataggaaaaaatagaatattgcgttaatggccaagtatatttgagttatttcaatcaagtatgattgtatatggattcgatgagttaatgcaatttatatgaggaacgaagatttttgggactttaaattgaataaggacaatagctggtacattaataagattatcaagcttcgaaaggtagttgacagacaagcttttacggaagctagttgctctagaaaattcaaagttaaattgttttaaaacactctgataaatgctgctaaggtcagttttcacatattgtcaaatcccccttgctccatatgggacatgcgatggagattgggggtacgaagtacgcggtaggatctattacctctttcggaggagctagctctcagagcaccctcgtctgggtatgctgcagcatacctttctcaaatctcctcaacctttcttaaagaattcagatgacagatccaactcagaagctggtcctctttagcaaccttcgtgagaatttttgctaagtcacaaacaatctcctctttgatctcttttggagcttgaatttggcctctcttgttgacattaccaatacttagaaaatttgcgatgattccatgctcgtggagcaatggtgtagtcactaaaccttcaactctcagttgggcttcagtgaaagctttgaattgggccactttgcaagcaaatcacaaagtatcaataattgcttggtaaagtcaaacatatagaagtagattcaacaagtatatcaactacttcatacttcataagagcaaaagattca

SEQ ID NO: 80914 - DNA, 1935 bp, Cannabis sativa
gcaaaatcaccaattatcttaagcctaacaatgtgcagtcttcaaattcattggtgcatattcaacaaccaagtacatggaacaaaaataaatataattttttttttaattaaaaaagatgaaatagagataaacctgattcctttcacgggcattcccggaaatagccgttaagacgccccacacgtgaggaccgttgttctggagaggctgagatgataagttggaggcaacagaaactatgaaatccttggaggttggggaatcagttgggtaaggttttagagttaagctgagcttttgaagaggtgaagaggccgatttattctctgggttgtcttcgtgaaccacggcagccattgaaggaagaagagttttggcggggggtttgaaaccctaatttacccacctaaacaaaaactaacttgactttcttctttcttgtgaatgtgatcgaaaaccacgtcaatgaaaatgaaatgaagcttacagagtacgagagacagtttcatctacacccgctcagttgtcaaatctatctattattatgtactaatttatttagtggactctgggctctattatgttttttcataaactgtgggctctacatttaggcccaaaatatacaaatctggtactcttcagattttaattttaattaaagataggatttttatttccatatttttgtattttattgagcaatgttttttttcaatataataaaaaatttgatcgctgagagtaacacgatacattttttctaacaaaaaatctcaatttttatttatagtgcatatcttattaactcatgcgctgcggtattatattgatctacagaatgattaccataaaaatatcacacatttttagattttggtaaatttaattaatagtaatactaaatcataaaaacggttttaagttcaagtgactttatctaaactaatcactaaccaaatcctaagtaaactccaaaagcgtgtattgtaacttgaaagtaaaaccaataaaatcaaacaaaattgagaatctgctactaaactaaagatgaagaatactaaggggaatactcagtcaaatcaggttatcacctaaccgattcccttgaagaggcagatcagtcttcaagctctacaaatcaggcttcttggtggaaatacttttggagtatgaatattccttcgaaaatcaagatttttacttggaaagtgtttcacgatgcaattcctattgctgcatctttattccaaaggaagatcatagactcggctgcttgcagcctttgtacaaatgcatgggagtctgttggccatgccttattctgctgcaaacatgccaaatatgtttggaggactgcttgttttttcatagattatgcagctgcttcgaggatgaagaatggagattttattatgcatttatttaccattgtctctaaggctgatatggaaaggatttttttttcacaatgtggcttatttggaatgacagaaacaactttattcatggaaaaccaacacaatcttcatctcagatttgggtaaagtctcatgcctatatctgtaattttcagcaacaggtttccaaccagaaatgctcgagtgcattctcttctggtgtggcatcacaaattccatggcatcccccctaatgtcccaactaaaaatgaatattgatgttgcttgtgatggcttccaaacataaaattggtgtaggagtcatcattcgaaattctatgggtcaagtggttgctgtcctctctaaaacacttattggaaagtataaaccttaagaaatcgaagctaaagctttgtctactgggttagtttgggcttttcaacataacatttaagtggacctcacagaaactgactctcttattttagctaactctattaatagttcttcatcaactctttccccttttca

SEQ ID NO: 80915 - DNA, 1263 bp, Cannabis sativa
atgagattaaaccattactatctgggggagcatgttctattgcaaatttcaaaaaagtttcaactccatctacatagtctttggcagttctatcacgaattgacatccaatttctatccatatctattctttaaaattttctctactgaaaaaaaaaagaaaaaaaaataatatattatacaaacaactattcagtcctagtctataacattttaaatctacaactcaacttataattactcaaacaattatacaaataaactaagaactctaacataaaaataattattttatttaaaatatgcataccttcataggtgagccactacgaactataaaaataggaagctcacacttttagtaaatagccactttaatgctgattgagagaattatacctgaaataaaattataatgccattaagttttacatatattttcaaatatatatatatattaaatttaaaaataatataaaattaatttctgtaacttgttaaacattaatattacacaactttattaaagaaaaaaaaaacaagtgagagcatgctaattcaaatcaaatagacatatatcaaatattcaatacccctataatatatatatgcttcatagttagtttcatatagctgagtcatttgtttttaaaaaaaaaattaagtcatttcataactctaatttcaagtaatttatctagtagtagtgaaatatatgctgcttgattgaatgacattgatttaagctataatatcatgatatgatttactttaaagaactgaatataatactgcaattggtgcacacgatatcctcatttatcctatttcaataaaattaaatcatctaccaaaatatagtattttcaattacgggttggaataaacataatcgaaaggtagcataaaatataattgtctaaaactaaatagtaaacaaaacatctcttgccaagggtgtgcattccagggatgtttatcaatgaaacatccaattgaaacaaatgcaatactcataaaatgtcctacccaattttctaatccaattgaagtcataaacaaagttagcaaaggtctaaaccctttacagaaaatgtatataccaccaacgctctcccataaaatctatgagaaatggtgtcgacacccattacattacccaagatttgagaaacttcaacccatacatgctttggaggaatcaggatagcatgaaaaattacactaactaagtttaagcttgcccagaacaatatactggtcg

SEQ ID NO: 80916 - DNA, 1470 bp, Cannabis sativa
cttaacccataaaattcatattgtgtctgtgtgctatgttaaattccgttttgccgccccttgatctttaaaataatgataaaaagtgctacttccaaagccaaatgggttcagaaatggtggtaaaaagaagaagccttcaaaaaatcacagcccaccgttttatgggcaagttgcacagttgcttttggctctttttgattttgagtcagtgagtgagtgagctcacttaattgggtccaattttgtaacgtcagaattcaatccataacaaagtttagaaacatgggttatgacacaatgacagtgacaatgttatccaaaatcaaatccaatgaatggtgggacatttttattattacaaactctataattttctttttcctatcttagaagaaagaatctttgtgtgtgttttttttcatttcttaaatcatatgtatagatttcgaatacaaattcctacaaaggcattagaaagaacatagcaatagcaaagacttttgttcattcattcacaatgcctctcttcttcatcatcatatgaggccataaaatcaatcacccaacgaaaaaatatatatattatatataaaagaaagaagaaaaggtaaaaaaaaaaagaggaaaattgtgaaactttggtgaaaatggattgacttggccattttatgattaaggaggtggtttggttactcttctgatcaaataaaccaggtcttgggctttctctgcttcaatgtcgaagatattgacgatttttcaaattcacaaactttggggggactgagtgtgtgcgacgatgatggtagatttgatcagttttgttcattattatgtcttgaaaatacttgtgtagagtctactactgttctcgggtcgtgctttctcttactactgcgtcgttttgatctgggcgatcgagtctttgttgaggaggagtgtttcgctgcctgttgttggttccgcattgcaagattttcggtggaaggaagctcgggaggggcatcgggccatggtgttcttttggagggtacagtcacttccaaaggaggatcaattatccatctgtcataacaatattacaatgttatcatcatgaatagtttcttaagaaaaaaaaactaaacatagctgaaaatgttgaagtgatctaataaatttgtgtatgtttgatatgaatacacacaagattagataatttaactcaattataagctttattttttctatcaaaaaataaaatatggaagactaacaaaaaagcccaatgctaagaaaaaaagcatgttgggtctttgaaacaattcaaatagttttgataataaaaagtttagtctgttttaccgagaaggtctaccgttcaaatccgtataaacctataaaatagaatatttttaatatatacaattacgaaaacttataattaaaaggggattcttgattagtttatcaattcttctatttatt

SEQ ID NO: 80917 - DNA, 1506 bp, Cannabis sativa
  modified_base (1380)..(1397): a, c, t, g, unknown or other
atttttcctgacggttttaaatagctacttagtttttttagtgacggtccccaaaaaaattgtttttcggaccgtcgcgaattctgatatttgtattagtgtatatggccaaatctctacattattgttcatcacaactaattaagcttgatctagttcaaactttgacacgattacctttgttcctttcctccataattctctatcaatctcatctaggtcagttcttggtttgctaatgcccattgcctcaacttcaaccatgtactctgaaacaaaattccatagcctactcagatatgtagcactcaaccataaatgcttctaggcgatagtggttactcacataatttttaagtacctttatctttctttcaaatggatatatccatcttgcccatactggcccaaacaaccttgtttatctcgctagatgaactattaaatgtgtcatgatatcaaaaaatcaaagatggcagataaaagttttcaaggttgcacaatgattttactacatttttatgtaatgcatctaatttatctatttctaattctttcttgcataacttattaaaaaaatgcaaatatttttcaataactctcgaatattttttttgcaaaactgatttaatagcaatcaaaagcaaaagttgtattaatgcatgacaattatgtgatttcatactcattactttcaattcatcgttatttcgttatttatcaaatttttgatgttaaacaagtatccatcaagtactttaatatttgaaaataatttttatgaattgtgatttttgtgactaataccgtttgtcatgaatattttagtcacaatatatgaatattaatttataattagccacaaattttttacttttagtcacaagttttattatgaataaaagtaaaaaaaaaatttagtgcccaataagggcccatttatttttatttatttattattatctttaattataatacatatatcttttatgtgctttcgtaagtaattagtaaatattttaattttattttaaataatattgtatattttagatgttttgaggtcaattttagattattaaaaaatatatataataatttaattttgctataatttatccttttcatttataatttcatttgtttctaaataaaactaaataaaaggatctactctaagttttacctgcccgtccctgatggagaatattcaaagatggaggatgaggatgggaacctattatttaccccattttattcctaatcagctgtcacaagattaaaatattagaaaactctcactattgatctgtcgtgccaccttgaaacctaacttagaaaaatttttaagtcacagtaaaacttgtgactaaaagtaannnnnnnnnnnnnnnnnntaaattattattcctatgttgtgattaaaagatccgtgactaaaggtactagtcacgaaaattacaatttcctgtgactacatgtatttttagtcacaatacttgttgt

SEQ ID NO: 80918 - DNA, 1942 bp, Cannabis sativa
aaaaaaaaaaaaaaattcttaaaaggtgtaatttaaggtgaatttttaaaattactatatttttaatgttttatttataattttatgacataaagtttttttttatacaaaactaccctttaaagttttaaaattataaaaatataatttttttaaaaaaagaaaaaaaaaataacgagaaattaacctcacgacagttataatacaactataaataaactataaaataataaaaaaatagtgtttttatttttactaaaaaaattattttttataaataaaacatttaaaatgtaaaaaaaacaaatatgttaattttaaatttttattcaaaaaatttctaattttagttagggttaatacatactgaccaatagatgtatagtcaatattgagcagtaaaggcttttcaaaatcagagtttattttgactgaaagatgaaaaggatatgacaaaactaaaggtcataataggaatagaggaatattagctaccctcccttttcttttctttattcaatttaaattactaaagaaatttattattattacaatatattcacattcactacaggggtcaactatatataatttttttttttaagaaaaaaaaacatttgatcactttatataactagtaaatgttcttactatatttgatgcctgaccagtactttcgagttttgatgcaaagctatatatagtatggttttgagttttgtctataggaagttttatgggataagatgaggaatttgtatttattaatcaaaaaaaaaaatctttatattatattttattaaaaagtaattattgttataagtgacttgcctattctatttttactctctacctaagtctattacataatatatattaacgtaaagagtataatagagatatatattatctataaaagtgagtacatcttagagaatataaaaataaaggtaaaaattataataaataaagtaaagtgggtatacaatataattttctcaaattttatttgcacacagccaaaatcttataagtagaaattatacaatatataagatagttataagagtttattttttataacataaattaaataataccataagattatgtatttttttttttaatttatatgggcttttttatgccatatttataaaataataaataaatttgataaaacttgtaataataagttttgttagaaaagtcaccggtaccgaaaaaatcgccgaaaagtcatcgtcaccggtaaagtcactatcgctagaaaagttaccagaaatgtatgtctcaaatataaataaaaatagaatcggttctataacataaggaataaaaataaataacacaaataatcgctctgtcaaaaaagctcaggcggtattattaaaagtggcgcgctctgctagggctttgaactgtgattgaatcttcttcctccctcgaattcgaagggttccctgcctcagggattggtgttcccacctccaccatggatgaactattgaagaaaaccaataatcttcaagtaactgatgaagatgaatgggaaatagataagagtttatccatcacgatcgccaaattcaatctcagaggaagattgtgtacaaacacagaacacagtcggggcttcctgaaaaaagtcctgggaggcatatggagattaaaggagacggaatggaatatcaaaattaaagacaaattcgatacaggtctatttctaacctttacctttgcatctgaatcaattcaaaacaaaatactcactaaaatgccatggtatttatctaacggattgttaattttggggaaaatggaaaactcaaacgaatcttgggctaatgatctgaccaacttcccaatttggggcaaggctatgggggtgccgactgatctactaaccaagaacaacacaacaagaatggccaacaaggca

SEQ ID NO: 80919 - DNA, 918 bp, Cannabis sativa
atttgatcaaactccgatttgggttagactaaaaagtataccacctttttattggaacaagaccaaccttcaggagctggctggaaaggtctcatcagtttatgagctacctagatatattgagaaaaactttgagagaggttcgtttggcatggggacgttacgatttcgggcaacggtcgatgtaaataaaccgctgttctcaggtttctacttgaggaggaagggaattaaggatctgtggatccaataccagtatgaaagactaccgaaactatgctttaaatgtggagctctagctcacgaccttcggtattgtttcaaaaccccaactgtcatcaaagatgcgaatggtgttttttttccaatgtatggcacttggatggatgaggatgcaaaggaaaaatcgcctttccatctcccactaccaaaatggttcaacgattggatatctcaacaaaaagagttaaaggaccctgcggtccaaaaacaaatggtgctccagaggaaaatacaaagggctgaggcctctgaatggagggaactcaagcgacaactaccggggaaaagaaggcaagttgaagtggtagtggaggatagaccggaggccggcgaagtagtcatgaatcgctttccggcagtcgaacttctgggcataggcgagattaccccttttgagaatacggcggagggagtcgttgaaaaagtgattccaatcagacccctgcatgagattgtgaccgtccctggtgttccaaccaatcccgatcctgcgatttacagtacgaagcctgggcagccaggccctgttacagaggcgtgctcccatgctgaagaaccagacaagactaatgtaaatctcaatgctttggagaatggcgggaaaggaaacttacccacaaaaggaatgaaatcacc

SEQ ID NO: 80920 - DNA, 1372 bp, Cannabis sativa
aaccttgattgcaatgagagagatatttgagaaccaataatcttcttatgaaaacctagttttcatgtatttttattttagaatatattatggtgacataaatatttaaacttaaccttaaatcaagaatttaaatgacaagacaatataccttagctcttaaagaagatctagctacccgagcccaagccttgtgtaagctcacgagtagtttgagatgatcttgaaatttagaaacaaaatgataatgattttagaatttgtaggcactattatggtttatggaagatatgggaaataatgatggtgtatggatggcctatatatagtgcttatatggaataagatgtgggatgtagagtaatatgtgactatgtatacaaggcacaagggtacgaggaaattagtgtgatgatgagagagcttggccttttaaagtgtgagaagaaagatggtggtgtatagtaatggtttgatctatggggaacacaagggacaagagaattatattgattatacgagagagcttaagtgagtgaagtatatgagttgagtggtatttataaccctttaactaactacactaacgtcccttagcgacctgactactaaccttacattttaaaatcaattaaataagttgaaaggtatttcaaaacaataatttgtttaagggtcccttcatactcggtcaagactagaataaaggagagtttattttcatgcattgccaaaacatgattaataagcattatttatatatatgttgttagctatttactccataagctctaagtgtgccaccttaccatttgaccaagtctttattggcttgatgactaaccaaaagataccatccatccatgttttattcttaatgctacacgtaagccatttgcaagtgtcttccatatacttaatatcattcaaagaaaatccactaaaattctatcaatgctataagtccaaactaatctcaaatttctcaacatagctacatatcacaaaactataccttaatactcgatttggccgctatcgttactattgatattattatttaattaagtaattcaacctatatcacttaaagaaaataataataataataagactaaattctattcctataggccacgtaaataattttccaacatatccaattcttcaactcacttcataaatatttgtcatggactattttgtcatgctaaaattatcacatgattataaaagtatcacaatttatttaactttgaaaactaacattaattcatttatcataaatattctaaacaatcaactaattccacatcgacatagctaatctaacataacggaaaataataacccaatattttggttattacaa

SEQ ID NO: 80921 - DNA, 1059 bp, Cannabis sativa
  modified_base (271)..(274): a, c, t, g, unknown or other
ttataatcatatatgtagggtataaaattcatttgttaagttatatatttttttgtaaattatatttgtatccagcaagtcaatattcatatttatgttgtattttgaaattggctaattatgatttttgtctcctgaacattgacatgtaccgacatgtaccaaatatgtaccaaatcatataccaaatcatatccaaatcatatcccaaatcatatcccttgaacttttaaggtcgttaaaaatgtcccctgaactattgagattgttnnnnttaaggacttttgtctaattttggtaaaaaagtctaacatagattataacatagattaaaattcagggagtaagatttagtatatgtcaaagttcgaggggcattatttgatatatatcaaagtctgaggagcataatttagtacatacacaatcactaaaatagtaaaattgaatgaaatcagacaaaaatccttaaatctaacaatctcaatacttcatggggtatttttaacgagctaattcaaaaaatatgatttggtacatggcaaagtgcggaggacgaaagtcataattaacctttaaaatttgcttacttacatgttcgccatctttaatatggtgggaataccgaatatgtagttgatttttattttcgtttttttttaaacgaatagttgatttttatttttagttgacatgtttttctctcaagcttatagaaaataattaattcgtattgttgtataaattattggaaatgtaatcaaaattttgttttgattttgatttttctttttctaacaaagaaaatataaataaagaaatttttttaccctcaatagtcaataggaagagttgtacataggtacagggatggcccagcctaacccgagtcatatttttaagaaaaataattgcataatacaccaattttttttttaaaaaaaaaaaaattatacttttagtttaattttttttttttactcgaattattcatgatgggctaaggctcgtgccgtactttgacaaacccaaatatacgactgaatatgattcaaaata

SEQ ID NO: 80922 - DNA, 896 bp, Cannabis sativa
ttttaaagatggttctaattggaatcgaaccattcttgctaaatttttttgggctatcatgaagaaatatgatgtgttatgggtgaagtgagtcaatacaatatacttaaaggggtgaatttctgggagtaccaactcccgcaagataccaactggtcttggaagaagatttgtcatcttagacatgtcttcagcatgcaaaatgtgttggatgctggtatgaaaggtaagttcaaggctgctctattacataacaatcttcttcaacttgatcatgagagctactttcgagttgtttggaatagacttatcttgcctaaatatatgtttattatttggcaaactatgcatgttcatcttcttactagggatctcctccctcgatttggtactgatgttgttgaaaatatttgttttgtttgtgatttgggaattgagagtcattctcacttttttttcgagtgtcatttctcggttgaagtggtgattgcaatatttggttggattggctattgagcatgacctttacacttcaatggttggctgagttctataactaatatggcagggaagttggaagctgaaataatttttgctattattgcgcagtgtataatatatggactaataggaacaagtgcatccatgaagggtactgtcatacaaacctgcacttagttactgatattaaaagatatattaagtgtcgattgtatagcttacaaaaaagaaaattaaatacttgtaattatggaatgattagtaatattttggattaagtttttctttttcaactaatgttgattgggtgttttggttctgttgttgtaattaatgattttttttttgataaaaaaacatattattattaatatatatattggagaacattgtcc

SEQ ID NO: 80923 - DNA, 1702 bp, Cannabis sativa
aaataaaactatcaatacgtggctcggcacgtacattcacctagtatatatatatttaattacataattatttattatatctcttgcatttatcagtctaaaagctcgtgtgctcttggtcaaccacatgcatttttatctaattgtaattaaagtatgtatgcatgaagcttaggagttcgtaactcgaagttgcgtcaaccatccgatcaattcgcaaaagtggaaatcggtcttaaaggcaagctttgtttaaatctatgaaatctatacatattctccatattccattaggctttggaaccaaaactcgattggctagccatatgtgatatagagcttattagaggaagtcgatgtttgttagcttttctgcttttatttttactactttcgctctcactggatctagaggtctttacttttgccagagtggatctgccttaagatctatgttcagtgcatgacagatcacatgagaactgatttcggccatctcaaaatgattccaaggtaatacatcactgttcttctttgactttggagacaatcttttctttaacagctagaggtagattctttcccaccttgatgactttagtaggatcttcatcattgatgcataccttttctgcctattctatagtttcaattatccattctatgccaatctgtggatctagcttatcctcttctcggaccacccctagtgctagctgagaagatgttttggcttctgttatgtttccttcttggaccatgaggacagttttagttgaaacattgtagcagcttcttacactcttttggtttcctctgattgttccaatacttctagtatcactggggaatttcacacatagatcgcggatggatgttaccgccccaaagtcgactagaaaaagttgttctagattgatgatataagttgttggacaatcaactaccataaaggtgatgtacttgaaagaggacaccacattatttccagagaccactacgtttcttctcactgcaagttgtatctttcccactgggatcaaggtgtctctgttgaagcattgtaattgaactagacaaggtgatcgattcgtttccactagaccgatagctttaaaagcatctttgaaaatgacattgactgagcttccattgtctacaagaattctggaaactcttttgttagcaatatgtgcttctattaccaaagggtcgttgtgagaaaaatgcacgtgcttggcattatcttccctaaaggttatcgaaagattcacaatccaagggcgttgagcaggtgattgtaccaagtggcaagtttcatcttattccaattcatttaagcagttttttttgttcattctgggtgcttccaacaatgtgtgagcctctagaaatggttacgacatggccatctaatgttggtggtgtagcttcgggagggtatggatttctaagactaggagcaatgcaggtctttctgttggagcattctgtaccccttgaggggcctgtgggtttggagcttacattctaggaacttgtggatgacctactcccttaggaggattaatggcttaatgttgtcctagaatgaaaagctggccatgtgctaccctttgtccagggcaaatgactggtatccttacccaattggatggatgtcaaatttagaccaatctttgatctcatcccttagataatc

SEQ ID NO: 80924 - DNA, 1892 bp, Cannabis sativa
gataaaagcgagacatagagataagttagcacattcaaagtatatatttattatatgtgatgatcaagtatttctccccgcaccctatgtaaagatcatgtctttgttaacggttggtccaaatgactaaacgtctgataactcgtccaaaacccacggattctatgttgttgtttatcgagatttttgaaaatcgatttataatatgtgaaagctaaagaaattaatcaaagataaagaaaataataacaataatttttacatggttagggcgttaatgagctttattctacaagccaatattattgttttaaagctagaaaagccttcaggtttacaagaatatctgaactctatattttgtctgagcaattgaggaatgagttttcaacccctttgcatgaagggttcttcgtatattatagtgtttagggtttttattcgataacattttttctactgatggggtattataagtaacatattgacttgggcttatttgattaagcctagtccatgaggcgcttggtgtatagtgatgtggatgccacatcatggtacagttgtcaaaaacggtatcttcgtagagaattaaagaaatattaaatgcttgatttctaattactctttccatatttaagaatgtatgatctttgggcgagatccttgggagttaatacttgatatctctgactaatgtgtgggtccaagttagcaatcttttgtaggatttgtttgggccaagccaagttttcttcccttagaaatttgtgctttgacatatgtcgtgcaattgtgattggaaaatctactgaagttaacttccctcgaggctacacagacctcctagagggaagggtgtctttagcatctggacaaaatttgtacgtctaggatgaagggagaaagcgcttctaacctttcttcaattcctaaatatgacaaccatagactttcgtttcctatctggtcagaataaaaatggtgttgaaaattagatttcgaagaatcactagataatttttcctcgctagtcactggaaaaatggacgaactactctaggtcgaggacaaactatatacatgaagagttagggtacattcagtcaaaagatggagtaggttgtcgtcattttggtgttcacctcctcagaagtcggttgggttcacttaaaaaaaatggaaggatgaagaggtgaatcgccgaactacattaaaatgggtttttcataaaaacacgttcaatatgccgaccagatgaaaaataaagatccaataaaaagatccttcgttttcttaaagattactaagaacaaaaattcttgaagttttccaaccaacctagagatcatgtaaactaattaccaatatggaaaagctagattaaaagaaatatattgaacacacatataaaagaaatatgattaaatatattgattaaacacacataggcaataatgttataatatttgagcaactcataaattaatgcatggaatgttatttatactcttataacatattattttttaccagtgttgacttaattatatattattattctataaaacttaattatatattgttgttgaatgggttgattaatttggtaagataagagatgcaagagtagataatgtgaggaaagatcatgtttaggggaaagaggagccaccatagccacatgggctctgtcaagtacaactctcctcggcacacacttcttacaatggccttcccacattcttcagctgactcttctggaataactgatcttaactttatctcctgtaattgatgatatatatcattatttattatcaaccaaccacactaattaattgcaattaattatattaataaatcatatcattaccagatcacgtgacaat

SEQ ID NO: 80925 - DNA, 1700 bp, Cannabis sativa
ataagctattgaaatttcagcacgtaacagagctcaaccacgataaatcatacatccaatcatgttttcagccccgtttcacatacatatacattatgaatttattaggttttaaactctattatgtgcaccaaaaaggttaattatgcaactgcaccagaagatctattaaagattgacgtaattgaaccagcatgtaaatattagagaccgggtcacgcaggaaataagaggtgtaattatgcaactgcaccaatcataatgctgaaaggagggttttaatagaataaatgaaggaaaagaaaataccagcttcagttttacctcaaatatttgcagtccggataaagggttcctataaaatgtttacagacatattcaaatactctccaagcatctgtttccagcatatcttcagttgctgacatcattggtgtaattggaggatggtcacctgcatctgtgcctccacgtggtttgtgataaccatcagaaagaagtggccttacataactacccaatgtcgggttatttgctagcgcaccaagagttcctttaaagtcaaacgaagatggatatgctgtgctctctgtacgtggatagctagaacagcagagtataagataatagtttcataataagcaaaagaaggacatgacactgaaaaacaatgccatctgatattatttaaaatccatcacaaaagaggaaacatatttcccgaagatcaggttgtcagttcaccaaaactcaaccagtcatacatttattcttctcctaggcatttatctacccttttttaacatcaaaaaaatttgacagcctaagaagccagccatagactagacatctatctacctagacattctacattgaaacaagtaattatagtagagcaaactctgatcaagggaaaccaacaaaaaagtgaatgtagttcatggccaaccaacataatggagatcgatgcaataaaattgaagtattacaatgaaaataaaatgaattggtatcagtagagaagagttggcaactacctgatgaaaccacgaatatataagcgttcagccacttgcatagttgtttggggtccaaggcctaatgcacttgaagcaatctgaatcaattaagaaaaaaaatgaacaaaataaaataaaaggacaatgtacagggattgtatgagataatccgttcttatttgaagagcttggccaactttagttagtcctacagagcaaattagaaataattctacaatataactaaacaacttgaaaatactttcacctaaagaagagaaacaaaacttcaaaagaccacactgtaattacttcccaattcaaaagaatagttattacttaagcaagaaaatggactctcataaaagagtatagttttgggtaattattattaaaaaaaatgcaaattacttacaacactatgctgttaggtgggcataagaggattatatagggcaatgacaaaagattcaactttgaacagagttgaaaatgcaaaatgcaagcttttaaagaccggccacattcattttgtttcatgcaaatcttctttttgtgagtgagtgtgtttgtgtgttggattcactgtcctcccttatgtgtcctccaatacttttcaatatcatttttcttttcttactaaaagttacacaaaccttgaggaaaaacatatatttcggg

SEQ ID NO: 80926 - DNA, 1693 bp, Cannabis sativa
  modified_base (459)..(465): a, c, t, g, unknown or other
ttttgtatttcacagtttcattcttcaatgtcatcatctactatgtgattctggaggtttacagtagtaataggtctatcaaatttaaaactgcattggatttaaagagaaaaaggaaaaaaaaaataaaaaaaaaatagtaaaatcatagaaaacgccgttgccggggatcgaacccgggtcacccgcgtgacaggcgggaatacttaccactatactacaacgacttttttgttaagggtttcgaaacttatatacatatagaattgaaaactctataacatatattaaagtacttaaatattaatatagtcaaagacgtggtgatacaaaaccaacgtggcaatgcatggtaggttaaaattggagaaatgttaaagggcaccagtggtgcctagcaccctcctacgtgtcaatatcgctattggtccaactaagtatcgggtttcatataatttnnnnnnntagcttttagggagtatcgctagccaatcgcaacacgacatgtcgagaaggtgctaggcaccactggtgccttataacaatgttcttaaaatcgtaatctctcatataatcacaccattaaataatgaaaaatacatatagagttataatctctcatataatcacaccattaaatgatgaaaaatacataaattatcatttcacttgtatttaattctccaaatttaaattttgacagtactataatttaaggtactatctatggctgccaacatagctgcttatgtgtataatttaaacacgtgccgcatttatattggtacacttaattaaattatttaaaaattgtaaaaagttattttaaaaattaaagtttgaaaattaaaaattgaatcaggttcttagcttattcctaaaaaaatcatattattcttataaaaaaatacatttttattttaaaaaaaataattaattaataattaaaaaaactaaaaaaaaacctatgttgtctctctttaactttcactgctatctttcttcttcatcaacaaagctttcttactaaaaaaatgatggtatttaaatttgcaaaaaaaaaaataaacataaaaagattttaccacaaaaaagaaataaagaaattaagtgtataaaaattaaaacataaggaggtcttgccaaaaaaaaaaaaaattaaaagaattaagtgtttaaaaattaaaacataaacaaatttcgccgtaaattgctcaaaataatttaaagaggaaagtgtaggaaaacttttaagtcaactttattttggaatattgggaagacttttcattgccatattacacttttggtcaacacggcaatgaaaagtcacaattaatgaaagtgaaagagctaattattaagctcttttttgtattatttattataatatttggaatgtttcttcaccattcaattctcatcatatatatcagtcataactttttgttttgataggagactcactatagacttttctcatgtcactcataactctcatctcatatttattatcaatgacttgaaaaagaaaaatcttcatcatttatatatatagtaacaatattatatttaaaaatagttttaaaaaattaagtcttaatttaaatcaattataaataaaaataatttttaaattttgattagttttatatttttaaagtctcgtatttaaaaagtaaataatatattt

SEQ ID NO: 80927 - DNA, 2376 bp, Cannabis sativa
ttttttttttttttcaatatattcagtgcggtaagaaatttttaacacattaacgaaccatattgataggaggaaaaaaatgttgtgtctttattagaaacacaccttgcaaataaagtagttttggtacctaaccatactgtccccatataaaatataaataattgggtgagtatctagtgcaccatagaaggataagtctccaatattttaatttctataatcatgttgtaattaccataggtttatgaaaaaaaatattatatgtgcaacagaatatttatcacaatgtacataaaaaacacaaaatctttctcaaataccaaaataaaagaaagtgtatcagaatattcggaattaatttatgaaaaatgttaaaaaatatgtagtgtttaactgcttataactattattattataaaatatcattaaacattttatttactaagtatggtgatactatatactactgatgatgtctagtaacaattcttaaatttaatgagaaaattttggcaaaaatatataagtttccaaccatcaagattagggacttatattaaggagtgtgtataaattgatccaaactattgagaatcgttcgatcaaattacaattgactgtataacattagatatctaatcgtgattggatcagattggatgttatttttaaatatctaattggattgtatcgaatggtagatggtggtgtcaaaaaatttaatacatccaatcgaattaattagcattttaataattatattttatattgttatacgtaaaatctatatgtatatataaaaattaacatcaaaattttatttatttttttcttggattggatgcattcagtctaattcaatccaattcaatacatactgaacctaaaatattgaatgggtctgattcgattcaaaaaataatagatttaatatattgggtaaatataaattaaactaataaataataattaataaatatatatatatgaaaaataaatatatatatatgaaacacttccaatggatagaaccgatccaatccaacatctaatagatgttggatcaattggatgaaaaaaattaattggatcggattggatggtaaaatttaacatctaatatataacatcggatcgaattggatctaaataggcctaaaaatattaaatgtgttccaataaacacccctacttatatgcataaaagtaaattttttaaaaatttatactacaatttaatattatcaacatgagttattttttgaacaactactaaatttgttaaaatgagaattaaaaaaatctcgaatttaaaaactatcactattattttttaaagttggagacttatttatatgaaagtaaattttttaagaattttttgcacaattttccgttaatttgatttatagcttaagagcatgacacacatgaagtagtggtccccaagtctaactctcttttttttgaaaaatgcgtttataaataaaattaaagttagacctcatggtcattacaaaagatattaacaggtatagtagatatgtctaccatgcccgtgacattgttggcaaacgcccatttagccacattatgggccgcaaagttacagtttctagctatagaagaaaaattacaattagtcataaaagtagagaggagtttgcagggacgcacatagttctcaatcccccaagtagggttatccccttttaggttcttaattacaatcgctgaatcactctccaccaaaacaaaaggatgatgcaaagaaaccgccgtctccatggctaaaagacaggccgcggcttctccagcgagtgggtcagagaagtgtagcctttttgctgccacccacaaaactgatccgttatggtctctcgcaatcgcaacagcacacatagtttcacctccgactttgacatcgcagttgattttaacccaatcttctggcggcgaagaccaagcctgggtctcaatagactgtggaggggggagaaggcaggaaccataatctgtgtaacataatctgtgtaacaagaagaaatggagtcaatatagtgtttaatgttacccattgatttattatgcaccttgtcgttgcgtgccctccaaatcgtatctaccacaatcgaggcatagaggaacaacttatcagtatcaactcctctggatttaaggttccatagaaaggtaacccagtcccacatccgggctcccgaatccggaacaggcataaccccccaaggagaggatcgccacaagtgaaaggcaaagtcgcaatacaggaacaagtgctctgtggtctcctcagcctccccacaaatagggcaggagacctcctcaaatcccattctcttagcaagaggggct

SEQ ID NO: 80928 - DNA, 1011 bp, Cannabis sativa
ctctctctctctctctcatatgtagtcatgtgcttgccttttcccatctcatgtttagattcttaattagacatacttgtaagttaatttgagtaaaataatatcaatcacactgcatggtcacgaggtacccattatgtatatatgacccatacacaaatcttatttacttatatatatatgtacaccctaaaataaattccaatgattcatatttatatgtataattaatatcaattatatatggcctatattgtaatcacagtacatcacgtgatcaactttcaaaattttataaaatatagaaaataaaccatcaacagatttgtggttgaagtgcatcaagtcaaatggttagatctaagttataatttaataagacaggttagaattaatgaaaattcagaaccttataaataaggtcatacatttgtgatatatatactatttacaaaaatttgagtttgagaggacaaaaggatcgtaccatatattaatagatctcaatttgccatctgttaattaattttaatttacacgtccttgtccatataaagatatattatttatagatctaaatctaaattaacctcaatgatatatttatataataattaatttagtttttaacggtaggataaaggtctgcatccgataataaagttttaacctaattcagaattagacatagacttgataaatcatggcagcatcctcttgcagctttgttttttctatttttcagcttttaaaatactttaaaagggtcattttggacataaacattacttaattaaaccacaggaactactaattaattagatccaatcaaaatcacgttaatctctacaaaaaactcattctcttatatagctaatgaaaggttccatgtatatatatatacttgctccatattattaaatgtaatatatataagcctaacaaagaagcaaagataggataggacctatatatacataatatatataggtttgattcattttgattctt

SEQ ID NO: 80929 - DNA, 1743 bp, Cannabis sativa
  modified_base (444)..(446): a, c, t, g, unknown or other
attaaaggggtttttctaggttatcctgaaggagttaagggttacagaatctggttaaaggaaaaagggggtttcaaaactattattagcagggatgttatatttgaagaaaatgaatttccttgtttacttaaaactaaccctgcaggtacattagacactaaccctgcaggtacaatacaatttgaccctattctatggagattggaggatcaagaagaacctaatatcaatcaagtggaaccagctggaagagaacctgaagcagatgaggatcaggtggaacaaacagataactctaatagagaagaactacaagctaaagagcaacagggagatgaaactgaggttgttcagcctgctgaaactctagatgactaccaattgaccagagatagagagaaaaggacacctaaacctaatcctaagtacagtttcaacatnnngaatgaagatatagcctatgctttcatgacagctatggaatcactaagttcagagcctcaaacatataaagaagcaatgacagggcctaatgctaagaagtggtttaaagctatggatgaggagatggtttcactaaagaagaatagaacctgggtaatggttctgaggcctaaagggaaaagagtaatagcatgcaaatgggtttacaagcatatgaagggcagattcaagggagaacctgtaaggtttaaggctaggttagtagctaaaggattcacacagaaagagggggttgactacactgagatattctcaccattagccaagtacaagactataaggattatgctatctatagcaaatcagtatgatatggaaattgatcaaatggaagttactacaactttcttacatggagacctagaagaagagatctatatggagcagcctaaggggtttgaagttaaaggaaagaacgaaatggtctgcaaactggttaagtccttgtatggactcaaacaagctcccagacaatggaatagaaagtttgatgcttttatgataaagcatgagtttaacagaagctatcatgacacctgtttgtactacaagggaagctctataaaagatgtcatctatctacttctatatgtagatgacatgcttattataagccatgaaagatctagggttgatatgattaaaagtctgctcaagacagaatttgaaattcaaaatcttggtaatgctacaaagatccttgggatttctattttaagggatagagataaaaggaaaattgattcttagataagaagattacaatgagaaaattctagacaagttttctatgagcgttgctaaggttgttaagcaaccaattactagtcagtacactatatctaaagagcaaagccctaaaagagaaaaagaggttgaagctatgaaggatgtaccatattcaaaagttgtagggtcagtcatatatcttatggtaagtacaaaacctgatttaggctatgctatgagtgtactcagtaaatatatggaaaatctaggaaaagttcactggttggccatgaaatgggtgtttagatacctacttgggacaactaaagtgggattagtctacaagcgacaaaatgctagcactataatagaaggatacagtgatttagactatgctgaggacagagataataggagatctacatctgcctattttttcttgcttgggggaagttgtgttggctggaaagtccagctacaacctgttgtggcactctcaacaacaga

SEQ ID NO: 80930 - DNA, 1007 bp, Cannabis sativa
attcagttagaagatcgatacaaagagttaaaagaacgaatgtcacatatggatcaactaattcattctttaatgaaaaatcaagtaagtgatattcttaaagactagattgctttcaatgtttctaacgattaattgatgatattaatagaatcattcttaccagactgtggagcaatcaaataatcatgttcctgctgatacggtaacatctcatttatatttgaaactatattttattgctaaatctgttcatacttaaattttgtgttgaaatgttattgaagagcaaaaaggttaacacgcatggcgatagatgcaagattttggattggtgtggatctggtgaaactattgcagatgggcacttcgtctcaagcgatccaaaggatctcgtccatcaaattcctctcggacctaatgctatgaaagtaggaatagatgtggtaagacaacctggtgcatttttgtggaggcctactccagccattacttgtatcgaagaagctattgccaatacaattgcatgaccagctgataaagttataatgaggtaataatttcttcaatatttcatttatgttctaaattttttctttatggtatatgcatttttgtacttttatttttccttgatgttttatttagccccaaattaacgagtaatcaaaaggttgaagtagcacaagaagaactagcgaagatcgcggagtataatcatggactcaactgtttactttcggcgtgctttcgtaatgattgaatttctttccatatcttcatttgttgttgttatgagataacttgtattaacttagatttttaactagaatttgtattaggtctttcagatctttcatataatatacttaatcagtctttattgtgttttttgatgatatttatttgtttcaatattttaaaaattggatacaacacacctagaacattagtattatgatatttgcaatgagtacacaaaaatgaaaagaatagtaaattcatca

SEQ ID NO: 80931 - DNA, 2323 bp, Cannabis sativa
cttacaacagtatctctgaatgtataattcttagataataatatagtcttagcttagctgcgtatcgactttcaatctctcgctcccctttgccagtgaacatacatcactatatatagggctagcaaacttgaggaggaagagtttcctctctcgttacaatgcccataaacagaaagatcatgggatcaatgctgaatgcaagaatcgtgggattgaggctgagtacactgatagtgggatcatgtgtatgttgtatccacgtaaattgatccctgagttatagggattaagctgatgactcatgatgcaaaagcttaattcgctaaatatcttactcaggatgtgccagcgaggcatcctgctcggcctatcttccgagcagatgttccaagtggactccatgtgtcaccattctcgtgatgccacgtcagagtgcaaaatttgggataacaattccaatttgacaattcaaacaacgaggcagagtatgaagtcttgatagatggcttgaaaatagctgaagtattaaaagtcaagaatcttgtatgctacagtgattcacagataaatgtaaataaagttgtaggggaatactagccaaagggtttataaatttcaaaatacttggagaaggtttagaagaacttggaatagttttattattttaaaattgaacaaactccaagagaacaaaactctaatgctgacgccttggcgaaattggccctgcaaaacgaacttcataactttaatttagtgccagtggaagtgttaaacgaatcgagtatatgtgaaaaggaagaagttgagatgattaacaacttgcctacatggatgacgcccatagtcaactatctactcaacggacaacttatagcagacaaaaacgaggcacaaaaactcttgtattcagtaccctcgcctacatatataggaaggggcaaattgtataggaggggttattcaatgcctcttctatagtgtgttctccccacagaagcaaacgagataatcaaagaaatacacgtaggtttttgtggagaccctacaggttggcagagtctttcaaagaaaataattcgacaaggatacgactggccaacaataaataaagacaaacacgaatttgtcagaaagtgagataagtgtcaaagattttcacatatacctcacgtaccactgacagaactaagaatgatgagctcgctatgtccatttccgatatgggggattgatttgagtggggcattgcccacagggcgtggaggatcaaagtacgcagtggtggccgtcgacttcttcacaaagtggagagaggctgaacctctagtttccatatcttccaagaaagttcttgactttgtcgtccagaacataatatacagatttggaatacccatttaaatagtgtttgataacggaacttagtttgatggagacttattcaccgagttttgcaaaaggagtaaaatttttaagagcttctcgtctgtttcacgacctcatgccaatggactggtagaagctattaataaaaccttgaaggatactattaaacagaagttggacgctgcaaaaggtagatgggtagaagaactaccacaagtactttgggctcaccgaacgactaagaaaacagcaatagggcatactccattctcgctggcatttggttcggaggcaatgctgctactagaagttaatattgcgacccacagacaagaattctataatcaagaagaaaaccaagaactcttgaagttgtccttggatctacttgaaaaaaaacgtgctgagtcgcaaactactaatgcagcataccaacatcgaattacgagatattttaccaaaagggtaaagaaaaggctctttaatgtcggtgattttgtactaaggcgagtatttgcaaacacgagagatgcatctgcaggagtatttaacccaaactgggaagatccttatgttatcgaggcaattgttggaacggggtttataaattagctcggcttaacgactcgctaataaagaaccactagaatgttgagcatttcagaacctactaccagtaaactcataaaaatgttgtaatctctctttttgatgtaatttttaaaattcaattattattaatagagttgaagtattttcaagtaatattctttaaaactactgaggggcatatatatgtatttgattaattggagtctatccaaaaatacatgatgtattgcaaacccactcaactttaacattttttccaataattgattaaagttttctatgaacaatgtaaatgttggaatttattttacaaggatct

SEQ ID NO: 80932 - DNA, 800 bp, Cannabis sativa
actttagaaacggattgtctttcaattgttcaagctgttcgtagctctatggttatggatttctttatttggcaaagttgtaagtgattgtaagaatttgttaagtactttgcgaatgtttcttttcattttgtaaaatgatcagtaaatgtagcagctcattcctttgcgagggcttctatatcccatcctgatcgactgttcaacttggacactgttctagttgagttgttacctaatttggtaacagagatattcgtttgataaaatgatgacttttattttaaaaaagaaaggtcaaaattataattggttagtttttgacaaacatttaattgattacaattattttaataaataaataataatttgtttttaaaacaaatttggaaactatttttgaaatttaaagttggctcatataattggtatatactatataccacttatgtgtgaacacatttatatggttttaatttccttttaatttatttactaaatagtttaaaataaaatgggtaagtcaaacctattttatgacctagctattgcctatatatattaagtgatgtatgaattgaaaaataagtgctttgtgacaagtaattttcacaaaaaaaaaaaaaaaaatctaccctaatctagctactctctttggagtcattattcccactgtgtattcgtaactaaattagtaagggtgcgtttggaaaaccacgatgaaattggatttgtgtgtaattgaagataattacacaattcaacatgtttgtctaaccatgtaattacactgtaactgt

SEQ ID NO: 80933 - DNA, 1747 bp, Cannabis sativa
gtagtcccaatcaatccattcaaatcctcaacaaccatgtagttccatatctacatagtatcaaaaccatcacataagactttctcccaggccatgtgggattgtacagctcccggtattttccttacagatcatggggctctgattgtcatagtttgactcattcccccttgatctcattttccccttggtagtgaatagatcagcccacataatcgtcgccttcaattcacctaggatttcggaaaatactcataaattctcccaccattactaacattacataacctctaacaaaacattctgttctccaaatcaattagattgttgcctccattagctactcatatcctatattttgcttaggaatatcagcaaatttaactcatattgtcatttctctaatttgtctactctgtcagatgagttatcatttaataacatacatacatacatcgtgcattcagatctttttatgtcccccattgggtgtacaatgtttagtatcagtataaatcaaaatagcaattataatattgcccataaaattttaacctgagtcagtcgaaggaacgatacccaagtcctcttgagtcataaccagcacttgggcaagaccggtacactcttctcctttaacatcagtctttgttaattgtaggcaggttcttcttagatggccctctactccacaataaaaattagatctagctctacattggcagatatggtgtcttttgaatcttgaacactcaagataaggtcaccatttcttgttctcaccttaaccgccatcttggtcaccctagaaccttttgttcacataattggtagtttatttagtttttgcttcctgatatgcttataagttggttccataagtttcactacatacagtggcacaaaaggaagtcgatggcagaggaatagacacaagaagagcctattgttctctcaaatctcgaatatttccccttcttgtctaattatatccttcatagcagcaattacttgttcccaatgttgaggcgagattctcttccttaccatttgccctgagcctagacaactcgctaatcaaactattcagtttccttagctacctaatttatcacatttaatccacatcttctaaccatttaaaactcagacagatatcaatattaatatgcatataccatacacatattctaataataatcatcactatgctacttttcccaaaatgctttataatagtctaggctggtaatataatagcaaataatataaatacttactataccatgagtcgacctgtcttcgcatcaaatgtacatattcgaccagtcttcatgacctttaaaactatgtctactcttataccaacttgtaacgctctatctcataaggacgccacatgtgattttataaactagtttaatactaatagatcaactaattattaaaaattgtgataatataaaaaaaatatgactaaaataaaacactaaaaacgaacatcataacaacattaaaaatgtattttggagaccctgctgtaagagttttacaaaaaggctaagtacaacgacaaatcaaatacagattcaaaatacacagcagatacaacccaaaataactcttaacaactcgacatacagaccggtagggttaatatgtacattgctgaagaagactatcacctcatggttaatctagtggttctttgcctttacctgcaccacatagcactcgtgagtcacaa

SEQ ID NO: 80934 - DNA, 2186 bp, Cannabis sativa
caagtgctctgtggtctcctcagcctccccacaaatagggcaggaaacctcctcaaaacccattctcttagcaagaggggctcgtaagggtagagtataggatactccaccaatggaccttgtgtcgctccaaaatctttgagttccaaagtttgttccatagtgccggagcaatgttgcacaagggagcctggttaagggcttgaacaagctaggcagacttggttgaaaatagaccatttgattcttttgtccagatccatctatctctttcttggccactcggattaccgtctcttaagatgttactaacagtttcctggtcaaaaaggttgtggagcttgggtgtgtcccatttgttactatcagtactcttagtaacacgcctttttcattaatttcttcaaatcaatttaaatttattaatttatagtgtatattttaatttattggattctttatttttgctataatatttttataggttcttacaatcatttaaatagctgcttattatttagtctacatttatactttaagattgattgtaatttgacattgaggtttcgctttctctgtgtttacaccgatgtacgattattataagatttcccaagtttacttaacaattttcctagagtatccctatttcatgacatcttagaaattaattgtacatacgttcaaagcagataagaaatttgatttgatgattttttttccatcatttttatactctctagtagtgggttgacgaatcgatttggtttttggattttcaattttttcaaaccaaaccagtattaaggtattttaaaaatttaaaactaaaccagaccaattaaatgatcaaaccaaaccaaactaatccactaaaaaataaattggtttggttcgaaaccataatttatattttgctagttgttttaatttaatttacaataattgtttattttttcggtaattttttacttttaataagtttataatatataaataacaataaaaattattatcataacaatataaagtcaatatcaatattctatctaaaattatttccaaatatcaatattttgccaaaagatatatattaaatatatgtaaaataattatatggatttgtctgcttttaatcgctactgagattttaaaaccgtgaccaaactagaaaattttaaaacggttcagattgatcaaatcattcacaccggattcatttagtctggtctcaaatgatttggtctagattaaataaggtttgaaactacagattgtgaataatataaataccccaactctccagttgttatttgaatgattagttgcccttttcattttcattttaatttgtaaatagttaaattgaagataataaattaataatgtacaatatatttaaaattaagaggtttttttatttttacactttaaaataagttttcttattttttttttacagaattctacacagaaagtcatattgcaactagcgctgcaacctaaatcgcaacaaaaaattgtataacaacccacatagaaactaccggaaaaaccactttagaaacacaaatcgtaaatttaaaaaaaaaattaaaaaaataataaatagagtaatttctctaaaattaattacttgctccaattattattaagtagtttgataactaaacaaacaaagcatcatatgtcgactctctaaaaagacgtgagctaattaaaaactttcttagattttttctttttggtatatagagatacaagattttttgaatccaattcacattcatttttggatacatgcaaaaataaatgtaccaaatgctgcaaagaatagttaattaatatgtcgacatagacaaattaataattttgatgtgctaataataataaatacttctcctatattaacataaatggctgtaattaaaagcaagataaattatataacttctcaaagggtatgagaagcagatagagagaagcactgactcataatttattttcaagccatatataattcattacataagagttttgataatgaacttttttttttttttttaatttaagcgtttatatattacattagcataatttgagactcgaactcaggacctccaatatacattatgaccacttgaggctagttttgataattgacctaatgtatatatttccaaacc

SEQ ID NO: 80935 - DNA, 1455 bp, Cannabis sativa
taataaaaatataaagaggggaagcgaatgaaaaaggaaagtggggggtgagagttggccgagtcttgaagcataatcatcgtgatatcgtgcatgcatttttgttctctcttcttcttcttcttcttcttctctccccatctctctctctctctctctctctaaacccctttcttcttcttcttcttcccctaaatactccatcgctccattcaaatctccgctcaccggaatctcactccaaacttctccaactaacacaacactcaaaactatatatatatatatattatataatatgcacaaataaatatatatgtatttcgtattttttttttgtagatgcaccggcggcaaatgagctagttcttgaagtaatctaagtcggaggttaggttttcgttcagttctttctttcttttttattttaatgattttacgttgtatttgtcaaaggagtactgtgaattggggatttttgttttacgaattcgattttttttttgtgtggaagttgtttcaggttttctttagagtttgaaatggcttgtatgaatgtgtcgtgtggtgcttcgacttcgattgattggaagagaggttgggctttgcgatctggtggatatgctaatctttgtgataagtgcgggtaaattatttgatttctctttgattcttttatcagaaatgtttgcattttttacgaagatttaggccttttgtttttctagattgattgattgatttttcttttatttatttatttatttttaatttctactgttttatacgttttttcaagtaatctatttactttttggttttattatttgattttattttttatcctatttttgtatataaatatatatacacgtgtatttgtgtgtaaaatgtatgtgtatttatagaacacacaccatgtaattaggtaatattttcacgaagttgttgtttaatataatgaagtttattggattaatctgacgtatataataatcgatgttgtttaacaatattagctcaatgataatgatttctaataccaaaaagaaaaataataatcaaaatgttttagcaatacttcgatgacaatatgatctatggtattaaaacgctctcatttgattaaaattttgtatgaaaagcaaaatttattggggattttagtataattgggtttaaaaaagtgttttaagaacaattttcatttttgcaaagttaagccaatcgattattagctccctaattagggaaagaatgacttttggtgtaggccattcataccaaatttatgccattaaattataagacccatttagtatatgaatttggactgatgcgctttctttctgaaacataaagtgatcatatacaaagctgtgctcggtgagtgtagtgaccagtgttgttatgtatatgttttatatgttataataatcatttgacatcttaggt

SEQ ID NO: 80936 - DNA, 2400 bp, Cannabis sativa
  modified_base (66)..(66): a, c, t, g, unknown or other
ttattttcattattttagaattcatattaggttgttaatccaacatacatgatagtaaatagatcntggtaaaataatttctaacatatttctctattgggatatgttttttgtggcttaaataggtgttctggagcttattggaagttttggggtagttttgtgctcgaactgaggttttatgaaaatatgcagtagaaaacagaaggttgtttatccaaaaatggtctaccatttttagtaagcaaggacctagaaaaatattctgtcattttctactgcatatttagggtattgcctcgctatttatcgacaggaaaacttttggttgtaagtctaagtccccaaatagtgatttagcaaatcacttatcattttttgtatgttatgacttaaggacctttaaatcgtcgagcagcagtttccactcaggttgaccagcacacctgaatttggagttgatgtaagattagtataataattgcatatatgaatacatgtttagtatgaatgtcagtttttattagaataacatatcagggtatcgataaggtgtacatagaattacactgagatagcaacagataaatgttaggaaaattagtagccattagattagtatatctggatattagttaaatgtacatagagttgcactaagatatcaacagatatatgctagtctttgtcgtacaaatgttctaaacttagtacgcgtagaacgcggggtagggttgtaattgggtgtataggcgcctgattattatttggtatatgtttatgttatgtttgtgcttttcctaccgattcttttgactcacatatattatttacttgtgaaggtaaaggcaaagcaaaggctgaacaacagtaaacgcgggctagatgaagattgtacatatcgaggcagttagacccagagtgttcagatctttagaacaattaggttttttttttttttttaaaagttgctaggtaaaaacttttataacttcagttttttgaaacgagatcctgggatatgtactgtatttatgtaattaagtttaagtttgattatgaaaatttcaattactcacattttttagtaaatcctttgattagcaaagcagtgtacagtacttttaaaacacaataaatgcctaatttagtagggtgttacactgtggtaatagagctgctaggttgtcttccgaagatcatcacaatatgtacaatgatcataagatataagctcgactcacggttccgtaaggtttaagctttagtagtttcatttatagtatggaataagaaaaacttgttagaaagcatgttcgtagctcgataactaaataggcgtatattttagattctcaagtaagcagtaattagattttaaccttgatcgcggtctgactaggctaacttatgatttcgcaggctcgtccaatagaatggacactaggtgaaacacgagaagccaaggcgattcggtcatccattggtgctcagggagtttagattccccctaatgttcgtggccgaggtagaggccaaagaggtaaagcatgcagtaagggtaatgttaacccactgtaggctgcccaggattgggaacagaggtttgtagaaatgaaaacctgaatttatgaacaagatgaagagatttggtgattaaggcaacaaggtgctcctacgacctgaagtgtagatatctcatgttcttgttctactagtggatgttatgaaagtcaagaaacggttaacagtcatcaaaaaaatattgaacttcatgtgtgttactgtcaatgacaaagtgtcatgtgccaccattcaattctaggaggatgccttggtttggtgggagatggtattcctcacctaggacattaccagaattacctgagaagagttccaggacttgttcaacactaagtactacagtgaggaaatttgttcaacactaagtactacactaagtactacccagttggcccaaggggagagtatgttagtgacaaaatatacaactcaatttgacaggttggccaggttagccttaaaaatagtgccaaccaattttagtaaaaaggaaaagtatgtggcgggattgaatcccaacattaagcatgatttgatgattaccacatatgacacgactacttatgctactatggtagagaacgaactacgagccgagggtgtagtagaaagtattcagaagtattggaggacttaaatcgttggtggggccattgcttctcctgcctcttgtttgcatccgataattccagttagaataagagctttcgagggaactaaggctgtggtaattaataatttggtatgttatgtcgaactgccccagtttgattgaccattttatcaatcttctagaagcatctggttttgataaaa

SEQ ID NO: 80937 - DNA, 4238 bp, Cannabis sativa
acccaaaagagagttgagtaacatcaaaaaaaaaactattttaatcaaagtaataaaattttacctttgtgatgtatgtctaaactatcttggggaagcatcattacccaattgctctcgcatttgtctattactctcctccacctcacggagtcgtctctctatctctaacaagcgatcgttggcctcatcattctttttccttttagggtaatgagtgtggaaaaattgggtttgtgtcactccataacccatggctcggactcgaccaccatgctcatttgtctcgagggccatggtcaaaatttcattcttcccttccatgcatatccttccctctcccacttgctttcgaaagtcatcctacaaacataataaattgaattaaaaataaattatgaaaaataaaaatataaatacaattatatatttaaaacttacaatctgtttagcgatatccacagttgggccctccacctcacctttcgtgttcgtttgaagtcttttccacatttcaaatctatcaatgtcgatgagttggtcgcctaactctttctccatttcttcttccacgttcttcacaccacctcgtccaaagtggtcgttgtaaatatttttcactgggcagtttttctctttgtcacccactcaggagtcaatctagatgccacaaattccttctaatcattctcatcaattaaattcttcataaagtttaggtggcttagaaggtggaaagccacatctttgaattcataaatactttctattaggaatgttttccaatctctccatctcttgaaatggtggttttcttgttctcctcaaacaactcgaaaaaactcttcaaaaaatgacaattattgttatatataagtacaaatcataattaatagtgagaaataaatttaaggtacttaatgttacctttatttcatttaaacatttttctttaagtacaacatccaccttaggcccactgatatcttgtggtggaatattaactcgcacccaagtctcaagtcgggtagtgaaagtaatcgttcgttaactcacacccaagtctcaacctccatctgcttccccgcgctcttcattttagtaagatctaatcttttgcttctctgtctagtatttttctactatggtattgcttgtggaggttcttctgattctctatgaggttcttttggctcggatggtgcatcatgataatcgacaatgaattagccccaatcatcataatccttgtctagtgttggatccataatgaatagtcctacacaaatatggaaaacatatattaaattataaaaaatatatatatacaaattgataaataaaattaaatatgtcaaaaaagtaaatactaatacgtgtctgataactcatggattatgagttgatagttttattcacccacaatcctttttatcatcacgagatgatatgatatcatccccaacagtgacatcaataggtggtggagtaatttgatgaatttggttactgagcatgagatcatcgccactagactcttggttagcataatattttgcttgagttgtgaggaaaactgaccagagtgcatctaatggatcgctcatgtaaaatatttgagtggcttgtgacgccattataaacctatcagacttatggcctatttgattaaagtccactaatttgaatctaaattcatcatctttaaccctgttatcactcctaacccaatcacaaagaaaaatagggattcataaactactgtaatctaattctcaaatttcttaaattataccgtaaaaggacatatcacattcaataggatttttattttttgaactagatatttgaaaagtcttagcaactatcataacatagttattttgtgtttttctagatttatcacggtcttgagtacaaaattgagtactattaatatagaacaattggtatttgagtacatcacacgaaggacctcataatatacaaagtagtgtgttcaatatatttcttggagtttcacacattttcacatgtaccttacatgcccaagtgatgaattagtgagtacaagtgtatcaatatgatacgtaacaaaataataaatgcatacaacctttttttgtaaccatgcactgaaatttcgataatgttcatcttgtacccattttttattccttgacttagtcggattagtggtcttgattcaattaacatcgagtaaagcattaacatttcagtttcaattgaatattttgtaatgctaagtatgaaaagttaactaaagctcactcaatgtacggttggacctcatcaatattttacaaaaaaagtagatgcgctttgtcacgatcagctcgactcacaccgcaaataaaaaaacacccctactccctctacttatttcattattaacttgaatagggcaagagccaacaattttaacctcagacaagtagatctgaacagaattcaatgtctcttcaacaatgtatgattaaatacttctacttctcacataacacttcaagattttcatgtatcgtttaaatgtgtacatccatctcgaatacataggtccacacaacttctctctttcactaaatgcactgttaggtgaactattatgacttataacacatttagtcacaacaaattgtgatttttgtgacaaatacttttagtcacgaaaattttagtcacaacataagaatgataatttataatttcacaactttttttttttaattttaatcacaaattttattgtcactaaaagtaagattttttgtagtggggaagcaagctagcgcttcgaagaaattggatccttcgtcggatgacccaattctaaaaaaaatccttggccaaacctacacagattatgatgattattgggttctccgattttgaataagagaatgaagaacttctaaaggggcaaaccgggcgatttagctggaggggtgctaaaatctctcattcttgcaaatgcttttatttatcgagttttttaaaaactgaaaaagagatgaagctaaagaaaacgtgtttaaaaattgaataagaagagatttttacatgattaaggcattaacgagtcttagttcacgagtcaatattattaagctcttggctatggaggggtagagccttatttataggctatccgactaatggatctggttgacccgtatctattaggatttttgcatataaaataagctcacttatggggtaaatataattaaatatttactattggactagttaggtgaggccccgtgtcttggtaaccattatccgtagatggacacactgttgacagagataggtgtgtgtgtgtgtgcattggtttggagagatcgaggatgttagagtagtggacattgggaaaacaatgtgatttcctttctgttgtgagtctttatatggtctgacacagaggacaagtcgcttgatttctcgagatcacgtaaattgagtgtcatgtggctcgagttccatgaccttgagcgactacgaatgccctttcacaattcacattatgttcccccacatgcatcttaagagtatctttctttgtcttagacacgtttgacttttcaatggagtgagggatcaggcttctcaaatggcccgtttattagtcatccaaaaatgctgataacaatttcaacctagcagaaattggacattaattaaggaaaccatttcttcttaattagattggtatcatgcaagatttggaggattgtatcaacagaggtaagtcaccctatcatgcaagatgttcctattagctcatggagttttcattgtacatttttatacttctgtgggcagagataaaatcatagcacataatcgatcgtatcaattcccacagaatcgttggaaatgactttataataccacaaataagcagaatgtggaaactttttcatatttgaaattagcataagaagcttcacttcctcaacatcaaaacttcattcatctcttaaggggaacaccaatatcaatatgcacacacactcttaggtactcctaacaaatatgcacacacactcatgaacgacatgtttagtcttgaatcgtgattgaagatcatggatttgaacccacatgtcaaccttgtttagtgcaacagtcttaggattctcccctatttccagacattcaatgataagttgcttgcgattgtaagtcgaagggtttcctgtaatgactcgttg

SEQ ID NO: 80938 - DNA, 1649 bp, Cannabis sativa
tgttctagctcactgagctgttatagatgtctaattgttatctgatcggattagatgttattttagagaatctaattggattggattagatgttccatggggtatccagaaattaaatacattcaacatctaatcgaatcaattaatatttttatttactttgagtaattagattttaaatagtgtatatacatgtattaaaattaacattaaaattttactctcttttttgggattagatggatctagtccaatccaatacatactgaatctaaaatattaaatagatccaattcaatctcatcaaaaaaatactaggtttaaaagattggataaacccaaattaaacaaaataaatatacatgaaatgcatctaatggatataatcgatcgaatctaatatctaaatagatgctggatcgattgaatgactgaaattaatttaatcagattagatgacaaaatctataacacccaatatataattggatcaagatatggtctaatgaacacctttgtttgaaagttaaattttaagaaaaaaagaaaaaagataaaagaaatatacaaaaaaataggatattttttatataaaataaaatatgttttatttataattttacaatctaaagtttttatttataaaattgagattttaaagttttaaaattatacaaatacgatttgcccaacataaagtaagaaaataattataaaataacgaaaattcaacatcacagcaactattaatcaactataactaaactatataaaactcaacaaacaataatcaagaaactaacatcatgacatgtataaataaactataaaaaaaaattaaaaaagaacattgagttgcttaccgaaatctgtaaaaaaataaaaaattcttcaggttcaggtatatgttaataaatttttaaaattcttctattacatgaaaattaaaaaaaaaataaaaaattaacgtgtgaaaaataatcaatttaaatatttagtatggattattttgttaaatcaaattttcttccatgcaatttttctttcctcgtccaatatgaaatttttttttttttattttttttttttcatttttttactacattatccttatcattttcttttcccctgtcaaattcaaactttcaaacataagcataaagttattaagacatttttcctttggtaaattagagcttcactcaatcaaccaaagaatttacaaaacctgggaatttttaagcaaaattagggagcaattacagttaataaaagagagctgcctaaaccaactcctcttaagctcactttggactgcagaaacaacaaaattctattgtatacatcatgttttactctatgcacatttacatgaataggagaaacaacatattatcccaataaactttttttcaatttttccaaacagagtagattgttgcattcctccaaaaagttattgaaatattatttagatagagactttttactatagaggggtgtttatataatttatctatttaattaataacagggtttgagcagaaataaaattgtatagaacaggtgatcaaagtgagtaaacttaattctattatataatttatttatttattaacgcacatcggccaaacaaagaaagctacatt

SEQ ID NO: 80939 - DNA, 2213 bp, Cannabis sativa
agagagagagagagagagctaagaaatgggattttaatcaaaatcttcaaaatagtttatttttcattttctctagataaacttatgtttttctctcaagtctactgggcagctgccaagagtgaggcaatccacctatttccaatttttttaatttctaattctaccctttattaaatgcctaaacttaatgttcaaacttaacacgctacaactctctaaaataaaaaattttatgttttacccttgtgactttaatgacccttcgttgtatttttcattgccaccgagctaaaatcataaaaatgacatattttgcatttaacattaataatactcttagaatttgataaaatcttcggaattgagaaattataactctaatgttcatttctgaaaatagaacccacgacatatatattcacatataatcattctataacaataattagcatctattgtcccactgatctatatctaaatcatgtggtcattatactttgaccttatgggtactttttctaaatgtgacaaatgagctagtggagctctccttttataggtgaaggaggtcctattaattagaataaaataatccaaaaaatagagaaaataaatttaggctatttttgactatagatgataatctaatggtgaaaaataacttctgaggttgattatcaattttttgagctcgagtcgtgacgacgagactcgctccgtgtaagttgtagcttaaattcgttactcccttagaggtgaaatttttagtcgaaagcttcaaaataaagattgaagtgtgagacatgacttaatagagcataaaaatagcttcaaaacacaagttgaatcacgtcaatcgaatcaatattgagtgagttgtggccattttactgaaggtcgttctgggccccacgcccaggttgacatgtgatgtcaacctggacgctggatgagtgagaaaacgtgtcgggtgtattttttgatgcctatgttatatttgtatatcacttagcctgtttttgtcttttgttaaaactagtcacttttttggagatgttgctattttacgtaaacgggactcaaaacccccaattttcgagtaagtcactttgtcaaaaaagtgaacatatgaagttgtgaatttgactcttctgacttgatcgatctcagttactatgaaatactaagtgaatgattgagatagaatcaaaatcaaataagcagaacccaacgcaccaggccatttgtcaacctaggcactaggtactcttttcaaagcttccaggatgtcgtcttgacacttccaaggtacttgaacttgagtacgaggtctcctattcaatttttgaccattttaaagagagtgctcagtgtagaattttcatttgaatgatcgaaaccagcgcaccaagttgattgtcaacctgggcattcagctcagtttccaagccctcaggattgtggttttgtccccgagtattcttgtatcttcgttatttcatatgatggaaaagatgtccaaaacacttttttaggaaactagttggaaatagcccaagttgacaatatgccaacttgggcgccgctgggcctactagttccaccaggttgtcaacctgggcattgggtccagttttaaaccacctggaagtttcgtttgctccccagaaatagaattttaatctttgctaagaacggacaatatgcccagaataattttcgaagaaactccttagaagtggcccaggttgacaaaatgtcaaccaggcgttggggaagcaccaagtgttagactaggtgctcgtcccttgttctggcaccccaagttaggttatttcttccccaaaagcacttgttttcctatttttgatgaagacgaagaagatgcatgagtctgatttttgatctaatgcttggaagtggccaaggttgacatattgtcaacctgggcgtttggtacccaggcaccaggtactcaaaaataaaagttctccatgttagggtttatgccctaaaaagcctatgaagatattttctcattattaaataaagagttaaagatttgatatatatgtgtgaatgttaagttattaatatttattattgaataatttatattaaatatcagaatattttttattcatatatgaggatgtggcttgtagttgtatagagaactagaccacttagcttgttggaaattattttac

SEQ ID NO: 80940 - DNA, 2107 bp, Cannabis sativa
agttgccgacccgaaattgcagaaattttaagtgtcaaagaagcacttagttggataaagaggaataacaagtcaaatgtcattttagagacggactgtattttggttgttcaagctattcttagctcggtttctatgccttctatttttggtttatttgttaaagattgtcaagttattttatcttctttaagtaatgtttttattggttatgttaaacggtctgttaacaaagctgcacactgtatgacacgtggtgcttgttattggtcaggtcgtctcttttttgagagtgatatttcctttgctcttcagtcctctgtattagcggatatttttgtctaacaaagattatttttaaaaaaatatatatataaaagaaagaaaataaaatataaaacaaatacaatatctaatatattaatttttatatttttaaggaacatcattttcctatttattcacacatgaaatcaaatgactcaagtaggctttttgttgggagtttattaaagaaattatttagtaagatgtttataaataaatagaatatatgattggatatataattaatgttaataattgactataaaaaaaaatacataatgaaaattcatatatattatacaatctaagtacatagtttttttttttttaagaagattgtattgcttcaagcttttaaaactttttctaaccaaaacatcacttttaaaaaagctcgaaaatgtaatctatatacaattagtcaaaccattctatacatctttttgacaaaatcattgtaatttctcatctttacattcagtttttgacaccaaagtacttcattcctacttcttctcgaaatatatataatagatcatatatagcagcaaggggtgtagcaaaagctgctactgaaatatatataatagatcgtatatgatcatatacatgcagaatttgttgccaataccagttacttctttacactatgaactcatttgacccacaaattatcttgctttatgggcgccattgcccatacgtatttaccaagagcagtcttgtacccaaaagagcaaatttcaaaatcccaatcccccttcttttcgcgctttacataaatatgaccaagctacgtaacccgacccattgtaaaggaaaactctgcatatagcaatgatcctcttcaaaatgctgattagcataattttcccccaataagaatgattatctatttggaacaccaagataacgaaagggcacttgacttctagagcatattgtacatcattatgtttcatacctgagtagtatatagctaatttctcattacttggcttcaaaccacaattttctgagaatagtttgagccattgtaaaagcaaataaatagacttgtaatctccatgataaaaaaagtaacacatcgtctgcaaaatacaaatgattaagcttgagatttctacatcttttatgaaacttaaaagactttttttcctacccactgtatccatgatccttgataaatattccatataccaagaataaagataagagggggacattgaatctccttggcgaagctcccctttttgcttcaaagaaaccataaagtgcaccatttatcatgagagtaaatcgaggagtcttgatacaaatcacgactggttgaatgaactcttgaggaaactcaaaagcttgtaagacttcttcgataaaatctcactctacggtatcatatgccttctttatatctaatttaatcatgtagttgggtatagaattaactctctggccataatgtctcacgagattttgaaaaaccaaaatattgtaagcaatataccgaccttgaacaaaactactatggttttgtgagatcagatccaacaaaacagttcagaggagataagttttgtagcaattttgtaaacaacattacaacatgctatttgtaatatcttggaaattagcacagtaatattaaatttttctcatttttattttaaggagtacgatttgatagttatcaaagtttagggggaaaacttactaatttacaaagggcccgtttggcacagcttttgaaaaagctaaaagctgtgacaaaaatgtgttt

SEQ ID NO: 80941 - DNA, 526 bp, Cannabis sativa
cttctttcttcttctttttctgcagaaaccttctgagccatctttttctctctcgtctcaccatcggagccaaagcacagtctcaccatcgtagacccaaaacctccgagacccaaaaccccgaaacccaaaacccccaagctcgaaacccaaaaccctgacctcctcctcgccccaatctctctctgtctttgacgaagtcttcgtggtggtcgactaacctccggcgacagcaaatataaaaacacctactttgacagtggtactgagagagagtgagtgagtgattgaagaaaatcagctttaatggagtattgaaccccagtcctctggaagtagaacccatttgtcatttctcacagtcctcactgtctcccttcaggggtcgtgaccttcattctcttaaaccccaaatgtacgttcatttatcttctacctctatcactctaagaaaccccatcaaacaccacaacatcactactactgaaagaaaaaggagaaaaaaaaagaaaaaaaaaaggagaaa

SEQ ID NO: 80942 - DNA, 1074 bp, Cannabis sativa
gaggtattctatgtattgttggagctccgtttttagactagttttcttcgcttttggtagtatttccctcttcggtccttggtcatgttggtgttgtttgctaggccttttggaaggcgagaattgaggttatgtgggataacaagaacccattagcaaggggttgtagtgcactctattgttgctttctttaacaaatgaaaaaaatgcaaaatctcatgttgttgagagtgattctcctcctggtgttgtcactgatcagcgataggaacctccatttgttaatacagttaaagttaatgtggatgcctcagtatttgctttaagagggcatattggcttcggttggttggcaagggaccatgttagaagggtgctccatgctactgctatgttgtagcagggtttctttgaacctttaattgcagaatccattggccttaaggaagtgttgagcgggatgaagactacaaattatgatgaagttgtgttgaaaacggattatcaagtgcttgtcaacgttattcacattacagtaacaatgtcatctccctttggtttacctgatgctgattgtaagttgctactcaatggattaagtcatgtttcttttcattttgttaagcaatccgcgaacaacgtctttaatttttcgactaggcatgcttgtttatactcaggtcgtagttatagtcgggggcttgtccctactgatttgcaagctattatcatagctaatttgctttaataaaagattacttttcttaaaaaaaaaagatataattattcttatatagatgtatacgtttaaataaaggacttaaaatgtataactaattacaatttataattaattcaaattgggacttgatttttttttttttttgacaaattagaaattacgcttatgctagccttacaaattaaaactagtcatactgatcttacaaaattaaaattaaccttattgactatacaaaagaaagttagctacttacattggttatacaaactaaaactagtaacattggtcttacaaaataaaaaaagtaagctacttataaaactagacat

SEQ ID NO: 80943 - DNA, 717 bp, Cannabis sativa
atatatactaggaacagataataaaactatcatataatttaaagtttaattaaactgcattacttctatctattttttcaaacttctcaatgactattcccacaaataacaacaacctttttattcgaatcatcaagattataaatatgcattctctctaatttagaagcctttcaaatcaaataaaattaaaaataataaaatataaaatattaacaatcaaatactaagcattctcatattctgtattatataaaataaaattaaatcaatacatataataatgaataaattattaacaatgattaaaataaaaattaataaattagagtcagtagagttagttgttaaaaagaaagtataatcaatgaaaaaacttaaattaaaattctaaaactgaacaaaaagcccaattgtgtagatacatgttatacatatatatgaaataaaataattaaaaaacagtacttaatagtaatcaaaaccaaatatatatgtataataatttttatatacatgataccaaaataaaatatatttatatacctgtattatctaaataaaaaaaatacaacaacaatatatatacatttaccatgtgacggagaatgatatacaatacttcaataatatggagctttgaagtttgaaatagtgtaattttttttaaaaatagtaaaacatgtatatcgatggctataatggtgaaagagagtg

SEQ ID NO: 80944 - DNA, 2103 bp, Cannabis sativa
agttcctggtaaaataacttccaacagaagcatgatctgcaatgttagaaagctcctgacctctcaaatattcctgcaaataatcaagcacccatttttccacatctgcaataggaaaatccttaaaagtaaacaaggaatgatttctcctgttccaaacaacccataaaatgctgaaacataaacaacgttgctccttagttaaatgttcaaagcctgcaaaaagaaagtctttaatgtcctgaagcttatgatcactgtaaaactgggaaagacttgttttttttttccaaattttgctagctctagaacatcctaggagagcatgagtgacagaatcaacttcattagaacatatcgagcaatttggacagttaaggatctttctattaaacaagtttaaggaagtagggagaacatgatgaaaagccctccaaatgaaatgcttaattttgggagggatctgaagattccaaacagttttccaatatctgtgaaaaaaatctggattagatgtagaaggagcagaagtaatggaggaagttcgagcaatggctaggtgataggtcgagttaacagttaaattacccgaagaatggtagccccaaataagagaatcttcttgagaagggtcaatagggatggtaagaatggtgtgaacaatgtcatcagggaaataagtgttaggcttatgaagatcccaacatccaaactcatttatgaaaaaggagatagtattttcaggtggatgcatattgtctttaaacctaatagttttgaaaccagggatccaataattatgaagagttgaaacagatttaccatttcctattttccaaatgaaccgagtaagaagatccctaccccataagatactattccaagagtaagaaggagtatgacctttagaagccgaaaggaaatcattgttcttaaaatatttagcctttaaaattctggaaacaaaggaattaggattagtgaaaatacgccaagcttgtttagcaagaagagcttgattatgagagacagaagttcgaaatcctaaacccccatgaaacttagacacacagagagaattccaacttttccaatgagtcttagccttattaccagttgatccccaccaaaagtgagcaatgagtttatcaaggtcatgaaaaatggagacaggggttctaaagcaagacatagcataagaaggaattgcttagataaccgctttaataagagtctcctttccagcttttgagaaaaatttattgttccacacctgaagcttagaactagctttttgaagaagataatgaaaggaagactttttggatctaccaaacattgagggacaaccagatacttagaaacattttttttttttgaaggaacaaaagaaaagacttgtttttaataccaagagtattgtaaaaaaaagttgagaaaaaatagtggcaatgggggaggagggtccaaagggcaaatggggtaaaaataaaatataatataaaagctcggtgactaatcataatatagcacaaacttagggtcttttctaatttctcaataaagacatctacacaaaagtcaaaaccctagtctttcagtcatacatatatcttagggttttctgcacgagactcctagagcttcgagagtcgaaaccccagctcgctcactcaatcatcatcagtcttgtagcttggtaaacatggtaagcgaattcgaaccttatgttttcatcacatgatttcattcgttctcacttattcttctcactcaaggatttcgccataaactgacattttcagcttaaaattgatttgagtgtctgtacgaacctagattttcagtttagttttgcttcattacagatcgagaacaatgtctgttttataaagttgttacgacacttcccagttaatgtaaatggtttatttttaaaatgattactttgcgtatttttattccttaattagttgtttcttagtgaatcatttttctgattaaatggcactgtaataggggttatgagatatattatagtgtttcttcccctgccttgggcagcacctcaatatgtgtttgacttttttgcagagcatacca

SEQ ID NO: 80945 - DNA, 797 bp, Cannabis sativa
tgatagtgatatacaagatatgaatctattggtgataatgatgacacttgctctctattagtagtaagtaatatgaaaccaatgaatttagcctcttcttcattgagattttgatggatcctttgagaaggtttgttggtagggacaaattctacctaattaatattattacttcatgttgttcttgtagaaggtaaagaccttcagagagaaaaggcaaaggccaaggcaagaaaccatgaaacagaaaaatgcataaatataatgaaagagcattactcaacagaatagctcaagcctttattcatactaacagagaagtgatacaagtccaaaacaaaaccagtaaaatacaaacaaaaaaactaactaactgaaacctcctaactgtcaagtaacagaatcaagaatatgtttaacatcccccttcaaacgaaaaggtgtttcaaacatcttgagtttggacctgagatacaaaaacctctctgtagacaggggctttgttagaacatctgcaatttgatccacagcaggtacatatctgacagatagttttttggatagaatgtgttctctaacaaagtagagatctatctcgatgtgcttggatcgagcatggaatagagggtttgctgcaatggcagcagcactttgattgtcaacccatagtataggacaagtaggtgttgagaactgaagttctaaaagcagagatattaaccacttgatttctgcaacaacagtagcaagtgatctgaactcacttttagtgctatatctagcaaccacattctgtt

SEQ ID NO: 80946 - DNA, 746 bp, Cannabis sativa
tggttcttgagaagaggatgatcaaaagcaggttgcttgtatatatcaacacaatcgatcacgtcaccatcatcactctgccggccaatttactaattaaattttattaccattaagaaatatatgtaccattttcttaaattgaatttgatctctgagagcatatttttaaaaatgacaataaattgtagtaagtattgccatgaggaagcttgtacaaaatattgacatataacaagaatacaaacctctatggttttgatcgttcccttacgtttgcctatatctgtactatgtaatcttcttccatctgcaaagttaataaggataaaacataaaattgccaaaggtaatatgctactccttgtaacgacggttctaatcatgatattagtgttgtgaagatattccaattaagcacagctatttgatccatatatccatgtctctgtatatattgtgtgtttaatgtttacttttcattcaatatatacaatataactaagatatcttataagtatccaaaatttctatatattacaataaaaaaaatctcaactttattaaaacttttatggaaaaaaaagcatatattatagtattttagtatatatttaaaatagaattttgtttattttaaatttttttattgtagttaaattatgagattcaaaatatatatatactgataaaatatttgaagatatatagagattatatatttttttttatctgaatatatttta

SEQ ID NO: 80947 - DNA, 1615 bp, Cannabis sativa
gagctcactagaaaaaaaagttttgaggtgtgtggttcttttatgtttttctaagtggttatactagcttattattttgcatttatttttgtgttgttttagtagtttttttgttttgattttttaagattgggcttgataatataactgctattgcattgagtattgaggctgtgaagaacattttttagttttttttaatcatgttttcatttcttttgtttgatttgttttagtattgttttacagttattttaccgttattttgccatgattatttatttgacactacaaaaaataggccaatctcggtgggtccggccttccattattgttctatctcgacgggcgcagcccaccgtgaatttgaatgccaacattgagaaagattcattctcgacgggctaggcccaccgagaaagataggcaatctcagcgggcctaaccccccgaaataggtgagcgatcccggcaggctaagccccttgtgataggtcattttttgattaaaaaaaattacagaaattaaaatttacttattgctgccaatgttatacatctatgctttcacccaaattttagaccataataatcactgatataaagcaaaaataattttttacacaagtatcaataaataattataacaaaataatttcaccaaaggttttcccttgaattgaatgattattccaatcaagaaaatttcaacaattatactgacatagaaacaaagctaaatatctatatatacatcaataaatttttattaatcataaatagaaaaaattaatctaaacaactcaatttaaaaaatgaaatcaataaaaatatccttataatgacattgaaagttcttgcctttgatatgaaaagtcaccatcctagaagaaaaaaaaatacgaaataagaaaactaaaaagaaaaagaacttttataccatttagatgaagagaagaaagactatcctataatttatatgagcacaatattttttaatttatgatgttcaaggctcagcaacgtccctagcttcggtgtcatctcaagagaagcttcttccccaacaacaccgtatgttgttcgcctgaaaagaatacaaaagaagaagaaaaataagaaaacaatattcacagagagagagagagagatggactaatctcctgccgttcacgatgtcgagctctttggcttccattagcaccgccactgcacgtgaaaaaaaagaagaagaacaagatggagggctccatcactcatgagacctctgttgcctgctggtgcgagagagaagatgagagaaatagaaataaggtgcggctgagaagttaaagttgattagggttttcattttttatttgtctatctttgggccaatcttgacgggcccagcttggaccagtgagattgggtacacggttgtacccaatctcggtggtccaagttgggctcgtcgagatagggtccaaaatttatgatttttttcaaaaataaaaaaaatatatatatatattattatgatcaattgtggcagtttttaagagcccgctgagatagagaccgatctcgacgtacacgcgcgggcccgccaagattggtttgtcgaaattgttca

SEQ ID NO: 80948 - DNA, 1258 bp, Cannabis sativa
tgagggcggagcatgccaacgctgagcagaggagggaagaggaggggagggctttagctaaagccaatgccaagatggaggctaccgttaagcagaaggtgtctgaatccttggacaaatcattgaccaataaatgaaaggcgaccaagacagaaagggagtgtggatacatgtataaagacttgcattccaaggctcttacccaaatcacagacttggaaactgatctgaagcaggccaagatggacgtccaagagaaggagaagaagactccaatcttgtctcaatagtatgataagcaagctaagattattgaagataaattcattaatgagactactttggagaaaaaggtgaagctacatctcagcatgtagcagaaggtagaggaacctgaagtagaagctatcaagagggctgaggaggatgagagtaaattggctgcatcgacaaagtctcttgaggaattccaaaaaataataactaaagtggagggtgaaaattaaaatttaaagggatgtctttaggagtaagaaccctagcatgacaaggctctagaataggcctttgactactcattatatactctctggcagctcaaaaattgatgatcaatcttttgcccaagctgttggcattggagtaggcaggcaaagctaagggaatacctcagggataaggagcggtcaatcctggaaccaccattcccattggtgagaatatgaactactctgctcttctagcttctaaattgcctatttcgactgagtctactatcccagaggccccatctaatgtctaagtccaggatgtgcaatcatttgataactccgctcagccataatgtatatttattttatttttctttttggggggacaagggttcacctttttgagtgtgcggagacaatatattatacccttgctgtggggttttcaagtacttggtactatttattaattcttttgatattttaactttatattgtagaaattgctatgttttaatttttccaacctcgtgaggttctagttccaaaggcataaacctttagttttttttttttgattaaatacttacacttgaatattctttgtgagaatgcaattacaataaggtttatttgaagatttgagtagctaattaattatctcataattgaacattttagtttcatttaccatttattttcagggtttttcaaaatttgctctttaattgacctgaattaattaatttaagtgacatgaatgctat

SEQ ID NO: 80949 - DNA, 2147 bp, Cannabis sativa
taggtgttgttcggttcccatttttagacgttatattcgcactttcagaagattagagaaccttttaaaatgttatatcaatagtagaaatatatagcatacttaatatattctgatgaagattacgactaagtgatttttggtttatttttctcactttcttatttgtcagctggatattatcgaagtgcttttgaaggcatgtaactccataaaagactatgaaagaaaggtaagattttgtttgatatgtaattattatcactctttggtctctttatatttgatgtcctttaatttctagaaatctactttgtttatataaatgaaaaatccagctatagcccctttaggatagtaaaatcacctttctttttacaatcttttaaggttttgaaattttggttagaattcttatttcatataataacattgtctaatttatttgtctagtaataagctataacttgtttctttggcagtgcaagagaatagttttcgagtatggacctctattccttgccaatgcagagaaatacctcgaacaaaacgatatctgcaccgctcttcatgcctgcaaatcaccgcctcacgcagctgaagaaggtttacattccgactcttagttatggccataactaatgaaaaaggagttacaaacattggaaagtagaaatgtaaaaaaaaaagattacatatgttttcccacatttcctcaattgtctgtatcatataatttaaacttgaaattatgcttttcctacaaaatatttgattgtgtgcttgtataatattgagaccctttgtttatgaaaatttcaatggcatattagttttggtctcctcttctctactctttttaattgacttgaccccaaattatagtcattaatcatcaaaactttgatcctttaggacaaacaaaccagttggtatctctatataccttatctttatggtctaaagaataataatatattggatataaacaactcgacttcatatcacattcataaatcctaatcaaataattgtgtcatttggattcgattcaattttaatttgtgtttttaacttgtaataattcagttgaattgtcactcctaatctaaagaataagtgtaaatagcaacataagtatttaaagttttaagtttgtaaatttttaacggcataagtatttaaagtttatagaagtgtaatttttctctgatttcgttagtacaaattctgttattcttaaatagggcacacataaaaattaaattctaaataattggactaaattctaaattattgggtctagacaaaaacatatagtatcagttacttttaaatattcttttaataaattcaaaacggagttcctgttaacaaaattagagaaaaattacagttttataaacattaaataattacgtagctaaaaataaatattaaatttatgacttttataaactcaaatctttgagtacttatactttatttatataaaataaataataataatataatgttactcattattacttttgcctaaattattggtatggtacattttcagttgtgttctcccaatagtttggcttatatataattatttaactttgctatacgtgtcgattaaagattctaaaataacaaatacaaacaaagtgaaattgggtacaactcattcaatatacgtaataatcaccaagaaaagtagttgcattgcatgactcacttttctagcttttgttttgtttgatgaactattattattattattatgagtctgtatttccagaaccttcccagctttcattcaatatagtactcaaaattagttgtacattttagtctttttcattagtttatttgcaatttttaaaaactaacataacctattaagaatacacatggagagaaaaagagtgtcacacttattcacaatgagagggacaacaacaacaacattaattcatcatacaaattattactataaatgtgtacaaaattttggtttgggttcatttcaaccttcaaactcaccatcccatgttacaaaacattgaatcccacacttctaagcttaatgtgatgttattttcgagttaggggtatcaatttaaaaatgattatttaataaatggatgaattgtgtt

SEQ ID NO: 80950 - DNA, 880 bp, Cannabis sativa
aattatgaaatgcaaaggcaggttgtacaattttcctttgattattattatgatcattatttatttttcgaaaggcctgtaattattttcatttgttataatttctcatgatttttggccattccttgcgcgtgggtttacgaagaaggaagacgttaatgagcctggacttagcaacaacatgttactaagtgcaattaaatgggtcgttcgatggcttcactttacaaacatttttatgtttactttcagttttagtactttttaggctttaaattctttgtcactactcaccaaccacaataatatttcacttaattattcatatgaaaaagattaaaaaggcttacatatttgttttctacaagtatcaatatgagtggcaaaactataataaatgagtgccaaatattaataaaaagaagacaaaggcaagctctttattttactcaattattaattacaacgaccataataaatgagtccaagattcataattagcatttaagtattatctcacgatcgcttggaggaaaattcgtgagtcgtgaccaaaaaaggaaaacaaaattgttttacaaaaattataattctagataattatttttcgaaaacaaaacttctttaataaaaataaaaaaattaatttttttgttgtaattaaaaaatttaaaaataaaattattattaaatgccaccataattaagtaattattttcgattataacttatgttatggggtcgttatacctttttgtgggtattgtgaatgaaatttatcgtttttgtgctcgcttctaagggggtactcggataaacaaaagatgcattagtgcacttggttgaggttatgctagcataaaacagatgatggtatggg

SEQ ID NO: 80951 - DNA, 1256 bp, Cannabis sativa
ttatttagggcacaaagccccacagttgcttggctatgattttgagattgtttatagacctagggcggccaacagtgttctaatgctttatctcgagttcccacaacggcatgctcagttctcacctctaccacttggttaaactgggatattgtggaataagaaattcaacaagatgcctttctctctcgggtttgagctaatttagccaatggtactatggttccttatgttttgttgaatgataaattagaccctgtattttttaaaatagtactaaatagtaccatgaactgattttcggtcaatgtaaaacttaataattagtcgatctgtaggtgttattacaaaactggttatgtttctgcgtctgtttgtgctaggaattatcttcaagttggttgtattaaaaaaatgttgtctaaaattgagctcatgatcctatttgtataattttagaaaatacagagttcattttgtcatttaacaaaacataaggtccaattaataacttttaccaaataagagatctaaaatagtattaacccttacaaaatgttattaaaactatggcattatagtggtcttttataaactaacaaaacaactatcatcaacttgtttggttggaataagttctctttcatattgaattgtttaatattttaaattttacatcaatagcactcataataataaaaggaattaaagatcacaaatcttctcttcgttaaatttattagtagctaattaattaagcttatccttattacatgtatagtgtatgtgttgtattataaattctaattttaaattagttaaagaaactatttgttagcaatctattgataaataaataaatggttagtgggcaaagtttttttttttcttaagggaacatcaaccactattaataaaagggaaattttattttttatatttgggtccaaaattaaaaaataattcaaaaatagtcatcctctcaaaattgatgttgttcttttattaggtaccaaaatacccttcagataacaaattcttagcttctattgcctttctcttttctctttctttttatcttttcaccatcaattttctctctctcttcaaatcctccattatataagatttttgcgctaaaaatcttgtaagaaaaacactcattcaactgagaggagtgctaccgtcaacctcatgttacaacctcttagtcaacctctacacccgaaaatatatgtcgaaatactttttttcaa

SEQ ID NO: 80952 - DNA, 1989 bp, Cannabis sativa
  modified_base (62)..(73): a, c, t, g, unknown or other
ttaattggagagtattttttttatttttgtttacctagtatattaaaacaatatatgctatnnnnnnnnnnnnattgtcaaatttcccttttaattttaattaaatattgtggtggtaatacttttttaattaattatttgtgaatataattgaatttaatttatgtgtagcttaattaatttaaaatacattaaatgatttgtgtattttgagtttgtaagaacatcttcaatgaatggtatagagtttgtgctaaatttaacttaaaaaattaataagtgttatatttagggcaaatgttacaattgtgctacgatgtataagtggtaaaataaatgttattttaataagaacgtgtaagaatgttaacaaaaatattatactatgtaaaaaataatattaaatatataaatgaaaatataaataattattaattacaggtgtatttgacaatatttttttaatcactttttttgttttttaaattaaaaaaaatgaactctttttaaaaatcatgttttataaaattgttttccctttccaaattaattgagaatcataattttaaaattttggaaaaaaaatcactttcaagatttttttaaacaattttttttaatcaatattttagacttcgaccctaacctaggttttggaacccaaacctaggcccggaccctaaccacgacctggaccccgacaacatgacccaaacccaaaactggacccgaacctagaccccaaacccagatctcgacctggaccctagactcagatcttgacccgaaccccggacccccacccgagcttagacctgacttggaccctaactcagaccccgaactcgaacccagacccagatcctggaccggacccagacctcggacccagtcctagacctagaccaagacccggacccaaaactaggacctgaacccagacccaaacttggaatcgtacccagacctcgacgccaaatctgaaccacaaaccaggacccagacttggaccctagatcggacccagacctggaccggacccaaacccggaccccaaacctgaatcctaacctagatttggatcccaaacccaaaccctaaacccgaaccccagaccggatccggactccaacctagacctcggacctggactcggaccccaaacaaggacctggacccggaccccagcctcattccggatcttaacctcaacctcagcgcctgatccagacttggacttagaccctagaccaagactcggacccggaccccaactcccgtactcggacccagaccctagatcccaaaccccagaccccgacccagaccctgacctagaccccagcggtggtcccggacttgacccccatccaggccacgaatcccgatcccggacctgacttaaataaaattaacaaatgaaaataaaaatgaaatttacagactacacgtttgttttttatttttaaaattgaaaaataaaagtggttctagaatacatttttatttttaaaaaataaaattttaaaaacaaaattttatttttatttttgcaattaaaaaatttaaaaatgtaagtgttaccaaatgccaccgttaatgagtaacaaaagtgtaaataaaaaagtgatatttattatggtgtaaaatttaactcataatactatatttggtactaaatttaacacaacttttagtatatatcaaatttaaaccacattatatacgagagtttaattttataaacatgagctaaaagatatataccttatatttatataatataacactttattagagatgctctaaggtaattatatagatggttattttatttaaatttaatattaaatattaattatttttctgaagaaaaaaaatgacagttaatttaagggaaatttgaaaaaatatgcataaaataccttaaatttttttccctaatctaatacattttaaaatttaaaaaatatgaccactttacaataa

SEQ ID NO: 80953 - DNA, 1394 bp, Cannabis sativa
attaagccaccgagactagatctgtgtgatgagggacaaatgtgggaaaaagggaaagagtatgagtgagaactcaaaactctaaattattaataaataataatccataccaatacgctaaaaaatatatgtttataaatgacctctaaaagaaagatcaatatagtatattaaaattgagatttttttttaatgttgacttagattttcaataaaatatataataatatgaaaataaaggtaattggataaatactatgcagagttaaactttattgtgtcttagaaattttttttacccttatttagaaaaatatattattttcaaaatcagtaagaaaaattatgtaaatttttagaagattttttttttttttttggatctctaaggctagatgagctctagcaggcctaatctaccttaacatagggccagtcttttggtgtggtgtttattaaataaataaataaaaataaggtacaatctaatttattaggcaattaatttaatttaatttagctgtctttttttttttaactaatttaattgtctttcattaaattcaaaataacctgaccaagcaaaaagataaatagcatgactaaaattagcttgaaaatgaagctcattttaacggtaaaacacgacataaaaacagattctaataaaaaagatctacataagattctaacaaaaaaaaaaaatctacataagagaggtaaatatagaacatattaaagctgagattttttgtatgtcaattttgattttttttcattaaaatagataataactaataaaaaaaaagttacaatctcaataaatgaaataagacatctaattttctttcattaaagtcaatttttacaattcttcaaaacaactttccaaatttatatgaaggaattattatttaaattacaacaattttattatgcaataaatacaaatctcattaatagactcacatggtttaccattcaattgaaaaagaaatgtatattgcataatttattttttcctaacaaatcaaaattaaatataagaagccacttgtaaaaatcctcaccaaatccttattcaaaaaaatccataaacaaataaataataattggaaaaaagagagagaaaaaaaaataaataaaaggaaagaaggaagaagatgaaacagatcgttattatggtttttgtttacctttgacatcgtacttatctatctaatgttacaatacatagagagagattcatattgaagccaaagttgaacgccattagttctaccaagaagaaaaaagagacctttcaacaactgattcaccaaactccattggtcaaattccctcttctttccctctctagggaacctcttttggaaggtagtgatggcggcagt

SEQ ID NO: 80954 - DNA, 977 bp, Cannabis sativa
attaaataatttggaccaatcaaaccgtgacacctggacagtgacatggcacttaacaacaggtacctacaaaacttataaaagtgtaacagaaggtatttttactgccaaaattttaacttaggtattaaactgcagctgagagataaacttgagtatttatgccgcaaattactcttcttaaaaataagagtaattagtggcaaaaccccctaactctcaattcacttataaataatcatctaacctcaaattttagtggaaaaatcctctaaaatactattttgtttgcatatttaaaatgtcatctccctagcatcgttaactccttattttgcttatgtggcaatgacaaatcatttaattattggccaacgtgaccacttttaccaagttagaaaatataaaaacaaaaagtaaatatttaaaataaataaaaatcataaaccaaacttaatataaatcttctctaaaaaaactaattaacataaatcataaaccaaacttaaaactaaaaaaatagaaataaaatcaaaactaaactaatttagggaaacctaaatcagaaattaaaataagaaaagaagaaggagacaaaaaagaagacgaggaaaagaaggagacgaagatcaaaagaaggagacgaaaacaaaaagtaaaagagtcgagacgaagacgtgaagaagaaaaaataagaaggatcgaagcttgaaagttggctggaagggaggtgaaatggcatttcgaaggcataacgtggatgaagcacctcctgattacagtaagtgttactctcgactcctcctactttagatttctagggtttttgttggagataattttgcaaggtttatggctgattgagtttcaaataatgtcccttttatatgataattttggttggtgctgggttagttgattaagaataagtaggtgtggtccattagtaggtgttatattaaagttaaaaaatttag

SEQ ID NO: 80955 - DNA, 866 bp, Cannabis sativa
taaacgcatcaaatttaagcatgtaaattgtcgatggtttaaaattgtcaggtatactataggtgacggttttaaactgtcgacaattctcatttacaaatacaccggatgttttaaggcacttttaaaaattgttgcttatacctcccgacagtttaaaatcgtcaaaaatgccctattttttccaacgattttaaacatttacttaatttttttgtgataatttctcacacaaaaaaatatttttagaaccgcgaatacttttttgtactagtatatatactgtatacataatcttatcattttgtgtatacacatattttgtgtgcacaaaattttcttttacagattaaaaagattaattttgagcaatatagttacaacctacaatgactcctcatggtattaattagctagtattactttcacatgcaatatacctaacaaatcaaaccatattcacacatgcttactccttattgggttccaatttaatttatttaggttttatatgatagattctttcatgcaccaattatataatgcgccttcaccaattttcgacattcataatagggcttccttgtcgttctcgtcaacctttgtgcatgtaattaaacaattttacaaatacatgtatttatacaaatgataccaactctacattttaattaagagcattgctattaggcatcagtactacctactatcttctcggcatgttgcgttgcgattggttagtgatactccctaaaagttattatattaaattatgtgagacccaatacttaattgaaccaatagcaatattgatacattggagaatgttaagcagcactagtatttctctttaattaattatcaca

SEQ ID NO: 80956 - DNA, 1080 bp, Cannabis sativa
tatatatatataaagaaaaaagtaataaaagtgacagacaattatagagatatgtcattttctttggctctcttttttcccttaattattttctcctgcttctccttgtctttctatatattttgtccattggcagacaggatcagatatctccagaatttagaatttgctgatatatataaaaatgtgaaaattattaataaaaaaaattgaagataataaaagtatttgtaaggataaatattgtttttttataacctgtataaatatttaggtttgttgtcaaagtttgaaaaatatatacatatttattgtgaaagtgtacccttgtaatgtagtatatagtagcacttacaaaattgttattagagatcaaacaatatatagactatttgtcactcatataaattaattttagctagtcacaacttattatttatactcacaattaatgagttgtgattttgtgagtaataattttaatttcttagtcacaatttttttatataaattttatagtgactaaaaataatatttattgaactccaactagttaatacatacatatacatacaaaatgcaagatatgatatgaactatgaagtgtttaacgatatgaattgattgaagtttttcgaaaacattgttttttaaaagctagtttttcctaaaagttgttggagatttttacacttagaaatagaagaagtttttggttgtataatattccattaccttcattttcattggtgtcttagagattctaaatcaatttgttcttagtacgtattatcttttagaatattacattattttttagtaattttataaatttatcagatataacagttaatcacaaagttacgaattataaataaaaggtaggaatactactatttcatactaattcattatctaggcctaacagcaatttcatgtgctattttattggtattcctttttacatttgacaagagaaagtagtttgagaaagaagagcaaacttttctctagacttccatgcgaaccaatttcaacctgagatattggaaaacctgatagcctcacaccattgtagag

SEQ ID NO: 80957 - DNA, 1089 bp, Cannabis sativa
caaacagccagataattctttgcataaaattccatagtttttacagcctctatttatatgaaataacaaactcttcaataacaaattgcaaagtaacagaataacaacttctagaaattagcataggctattcttcagctcctctccacctaacgaaatccttcagccagctgggtctcatccgcaccctcttctctttcggctccagttcctcttctgcgtgagaaaggcttgttgtttcccttgagctgatgccagccgaagtctcctttctctcaaccatcacacttgggtcttcttcttgggtccaaccgtggacctgctcttttatgcttccttggtccagctggattgggcctagctcttgggccgaacttaagtccgtaacacaaaataattggaagaatttattctgaaggagaaaaatgagtagttttaaagaaatatgttattgttatctatctattatttaatttaagtgtgttggactcatgaataaggcttgcatgtgcctatatattaattaatatatatggttctaactagtactgaaagcatatgtaagatttaaaagaatttattaagtgatttgagtgatagtgtagacttttggttgttatgtttggaacgtataaaaggggcaaaaattaaccatcaagacttttcttaataaaaaataaaagaatgataaatgaaagaattgagtggttgtaataatatactacctactcatgcagtgtagtagtcagtcatatataaacaaattcaaatctcaaatctgcaactgcaaatccaaattagtctactcaccaaaaatgaagaatcatttgcccttcctcactcttatgtttagcttcataatgatcatgatcatgtgttgttgctatgttactctacaacaacatactcttaacaactctttcattagttcccctcaatcgagatgcttcccttattagaatattttatatggacttacataaacaagtgtttctcatagagtgttaatattaatatatgtggataactatatgcatggtataatgccgattatgcaattaggataataatgggatggtcggttttatt

SEQ ID NO: 80958 - DNA, 1650 bp, Cannabis sativa
tatatatatatatatagttagtgcaaactacgttcgaaaacatatggataaaatatatttcatatatatatcattagtgatctcaactcaaacccttaatatatgttttgggtatactgatcattttaatataaaaagcaaaacatagtcttttcaaatcataaattatcattgatatttgataccaaagaataatacataatgatgcaacacattttttatccttaataaattcaatataatgtgatactcgtttaaaaatatataattgatattaattacaaattatagtatacaatatatatgcaatttgagtgtattatcattaatactcctaaattcaactaataatttctatatgatttagtctcaaagaaagtagtgcaaaatatttagatataccaacagtagaaaattaagcatttcaaaaatacccctgcaccaacactccaaagtcacaaaaactaagatcaaacttgacctttcccccttgtgcggatcaagagggttttcccttcaaaactctgcctttttggcagtataaagccttttttattatgctaaaaccctagcagccaacaaagcctcttctcctttgaaaaccctagcagttactctgtattcttctcaaagaaaagcttcagccgattctccttcttctccctttcttcttgctgcagtagcagctcttcgatagcagccgattctccttcttctccttttcttcttgctacagtaacaactcttccatggcaatgattctccttcttctccctttcttctcgctgcagcaacagctcttctatggcagttgaatctgctgcggccttttgttcctccttcagcccttatatctttctcaagctctacacgagctttgtatggtcgaacctacacacatgaaaaacaacccaaaatcagagaaaaactaaagaaaaaccaacagaaaactaaaagaagaacactagaaataattttggagttccctctaaattagaggtacgtctccgtcaagcgaccctcgaagttgcttgagtcttcactatcaaaatcaatatcgggttacaagaattttggagattccaagctacaaagtcagctggtaatctctatggctctttctctcttttcttccttttttatttttttggtttgtattacaatatatatttctaactctctctctctctctgttttttttctcttgactgaggttatatcttcatggaaaaatggctgctactatatcctctttttgagctgaaaagcacaccccatttaaagggcaagttgaaccccttatatattgttggtgttaactgtgatgttgtgttattagctgagaaaaaatagttattaaaactgttattatttttccttgagttgctgaaagtttgttggaatctttcacattttgttatttacttcttgagttgttattgtagagagttgataagatttaagcatatgaaacaaaactgactactccaacagttataatggtctgttgaggcttgtataaaattttttactttattttccttgtaacttgtttaaggtattttcccatgtgacagttagaatggagatttatccaacaatttctacctaaattcccatactaatagtccaaaaaagtctttgcctttg

SEQ ID NO: 80959 - DNA, 4010 bp, Cannabis sativa
  modified_base (28)..(49): a, c, t, g, unknown or other
  modified_base (3736)..(3744): a, c, t, g, unknown or other
  modified_base (3960)..(3961): a, c, t, g, unknown or other
atcagaaatctaataagatagactcgtnnnnnnnnnnnnnnnnnnnnnncaaaaccacgtaaaaaagctttgtgttatttcttttctttttactactgttatttctgtgcaaattcatcacgaaataggctttaatttagttaacaaaaatctgtgttaacagtttggtgctttcattaagagccttcatgaaaaaagctccaaaaaaaaccctcctgatcaaaagaaaaaaaaaacctttcttcatggctgataacggagaaaatgttgatactcatcctgaagagaccacccatcgtcgtgtcgagaaagagccaatggactctcagaggcctcccaactcgtgatctacgcggaccactcattccaggaggacccaacctgaaggtggctcaagtacacgatccacacgttcaagaagaacttagcatgagaatggccaaaacccaaaagtaagggatgaagaacccgatcttggaggcgctcaacctacagattatgataatgatggtgcctatgatccaacaagatatgtgccaatcgtcgagttggaaaatcgtcgtctcaggtgccacctggaggaggtgaaccgatgaaatggtaagttggaacgggaggcagtcgctgccagggcggcacaggagaacaacgcacaaaatcaacttgatcctggagtgagaagaccacgaggtagaactcgtgtctcacgaactaggaggcaggagacggctcaggagaacccttaaaacatttaggaagaacaacctggggaaactgagggtccctctgagaatgaacaaccaaatgatcaaccagaaccttctcacagtaatgagaacagaaggcgaccagaaaccagggaacagggaatccctcgtgggaacgagggaaatcttaggactcaacctgagacacatgggtcaccaacaaggcatcgccaacatccttctcgaaccaatagggaaagggcacgtacaaaccccagcagggggtatgcaacgactcatacccaagggagaaggacgggacgtgaagaggcgagcattacctcaagacgcataaaaacccatagtcaatcaatgtgaggaggagaaagtactcgttgcaataatgatcgagaaagtacaagcacaagtaaaaaatgaaagttactcaagaacgaggtccatgagcaagacgaggtccatgagtaggataaagtccataagtaggacgaggtccgctagcaactataaccaacaggatcttcgcaatcacttgaaccaaaaaaaacctgatcttcgccaataactcggtcaaaagcaagaggatcctatccaattgtgaatagatgagttggagaataaactcaagaggtatcaagtcgaggaacaaggaaaacagtctagatatgactggaatgaggaactcaagctgttccatccagacatcatgaatactccattcccccagggattcaaaaaccctcacatctcatatgtcatagtgattcacaattgatagtaaattagattctcagggaatactaggctaagggcttaaaaatggccaagtatctagaaaaagttttgaagaacttagaaaagttcgattatttcaaaatcgagcaaattcaaagagaacaaaactctaacgccagccttaggaaaactggcctcgcagaatgacttggatggactaaacttgatttcggtggaaatgttaaatgagcaaagtatatgtgaaaaggaagatgtcgagatgatagatagctctcccacatggatgacacccaaactcaaccatctactcaacggacaactcccaactgacaagaaggaggcatgaaaactcatgtattcaatgcctcgctacacaataatagagggaaaattgtatagaagaggctatccagtgcctctccttcagtgtgttcttcctgcagaagcaaacgagatcatcaaggaaattcatgtaggctttgcagggatcatgcaggttggcagagtttgttgaaaaagattattatataaggatattattggccaaccataaacaacgacaaccatgaatttgtcaaaaagtgtgataagtgtcagagattctcgcatatacctcgtgttccaccaacaaaactgagaatgatgaccttgccttacccatttgctatgtgggggattgacttgattgggcacttcccacagggcgaggaggagtcaagtacgcggtggtggctgtcgattttttaaccaaatggacagaggctgaacctctagtttctataacctggaagaaagtcctcgactttgttgtcaaaaacattgtctataggtttggaattccaatgaagatagtatctgaaaacaagacttagtttaatggtgaattattcactgatttttgtgaaaggaactagataattaaaagcttctcgtcagtatccaggcctcaggcgaatggacaagtggaagttgttaacaagaccttgaaggatactatcaagaagaaactagacgctgccaagggtatatgggtcgatgaactacctcaagtactttaggctcataggacgactgggaaaacagcaacgggacatactccattctcgctagcatttggctcagagactatgttgcctgtagaagtaaatatctcgactcatagacgtgagttttataaccaagaagaaaaccaagaacttttaaaattgtccttggatctacttgataaaaaacttactgggtcgtaggttactaatgcagcataccaacaccgagtaacaagatacttcaacaaaagggtgaaaaacaggtttttcaacgttggagacttggtgttaagatgagtatttgcaaatacaagagacgcatttgcaggagtattcaacccaaactgggagggtccttatgtgatcgaagcgatagtaggaactggagtttacaaattagctcaactgaatggctcgttgataaataactatggaacgtgaaacatttgcgaccctactaccaataaattaatgatgaaactcatatttcttgatgtaatattttgaacttcagttattaataaagttaatcattttcaagtaattacaaagtgttattctttaaaattacatgaggggcatatgtgtatgattaaccagaatttatatggaaatacatgatatattaaaaacccaccacttgaaaataatttcaaaattttttaagttcttttctattaaacctttctgacgagaaaggaaaatcaaaaagtgtgaatgacttctgattaaacctttctaatgagaaaggaaaattaaaagttgtaaatgagatataacgcataagctacaggcaagctgaatactaatggctcgcattgtatatgaaagtattaaacaagacaccaagatatcttgaaaaaatacttaaacctaacatatgaatagaaggcccaactgttcatataagcaattaaaaatatacaaagtgaagaatcattaaaagtatattcaagtttgcttaaaacagactataactgtttgtgcgaagcagaatcgataactgctcgcaaaccaaaagcatagcagatattaactgctcgcgcacatagtagatgactaactacttaaataatatcaaaggaaaatacaagcaatgggaattcctaatgtattttgcatttgatcaaaatttaattgtttgaattgtgaatgaaaatgcaagcaaacaaatatatattaagttcaaatataaaagtacgaagcatnnnnnnnnnataaaataaaagcaaagttggccatccaaccttacaaatttgtctttacaaaagtgccacaagggggcaaaccattgtctcagccttaaggtcatctgctcaaataaaataaaaataaataaaaaccaagcctacatagtaggagacttggacagttcttcttctgttgctgctgttggaattatatttatccacgatcttagatctactcacaannatgttgatttaacaacctaatattggacttctaaaacgatgaactaaac

SEQ ID NO: 80960 - DNA, 1433 bp, Cannabis sativa
agctgtttgaaaataaggagggtattttaggaaaaagataaatattgacctatttagcaaatattaatacatataaatttaggggattaattttagggtaatatatgcatacgaaaatcaaatttcccaagtttagagagtccatgcccaacagtataatttgaagactcattaccaataggtccaatacaaagacacgtgtcaagtagaaaagcaaagattgggggtagttgaattctttcatctttggacttttggtagttggacttggtatactactagaaagcagttattttagttatttgagtacttgtatattttttattcagcaaacacatattttttaattttcaaaataaaaaattgttcccaaaaatagtggatcatgcctaattctatcccacttttccatattcagtgacacaatcaatatacctaactcaattccattcaaaaataatatattgtaaatattgagtatgttaatattatatcatgaatttaaaataaaatattattttgatttgttttgttcaaccactagttttagtttaagtaatataaaaaaaggttgagaaaatttacaccatacacccaaaaatagtcttattttacatttttatagatttttttttatatatatttttgtggacatttttttttataagttttcacttatttagagaaaaatattattgagaaaattacattctatactcattttttgtttcatattttaaattttatcttcattttactactctttaatttatacccacttttataagttatattcccattatgtacattaaaaagtctaattttgataagttttgtgatgttatatttggtattttgattataaaagagggtatttatcaattaaaattatttaagagttatatttgattaatgtgtaataaaaatgggtaattttcaacttatcccaatattattttccaaataacattattctaaaataacagaaaaacaatactttgtattattgaaaaaaaaaattatgttatttcccataacatcaacatcaatacaatattgtttctaaagcaacaaaaaacaacactccatatttttctaaaaaaaatccataaaaatataaaaaaaataaaaaaatctataaaaatgtaatttttttgtcatttttgcatatttataaaataattccaaataagtttcagaattattttttttttcttttccagcttttataagtttcaagcctatataaaatgttttttttatatataaaaaactaaaataatttcacggaaaagtaaatactaaatatgattctttcaaaatttcctccatgtttaataaccaatgtattatttgattttcagcaataaaattagttattatattaaaaaaaatatatatgattctttcaaaataaaaattaaaataaataa

SEQ ID NO: 80961 - DNA, 1950 bp, Cannabis sativa
ggcataaaacccaacaaacacttgccctagtctataagaattttttcaagtattcttgtagactaagtttggtgagcttcatctttacgagttaatttttcttctcttctccttttcgctacccttcacaatgagagtaggctttatgatttatctctgccccttttgaggtttgtgttcattgcaattaagggagtgttagctcgctgagcttccttaacctcttatggattactagctgggtataagggagcttatggctccttaggccgcgctcgaccttttgataaatttaagaccatatcgggagaacttgtggccttataggaagctctcaactccttacattgtgtctgtggtacttcgagtgcattttaggtgctacaaaatcaatactccttttagagaggcgtccttctcagattcgtattcgattcctcttttccttttaatattttaagggagatgatgcatctgtgaactgatttgaccttttgctttcgatatttttaagggagatgatggtttcgttaactgactcgacattttgtttttgatcttgtaagggagatgatgatttcgtaaaccgaccagaccttttgtttttgatattttaaccctgtacatgctttatggctaacttcaaagagaatcctcctcatcattgtgtgtgctctttcttgtagaactaccttcaggctttcactctcttcgtggaccgttaggggtagttgatccctatagtcagaagagtttttttttttttttttgcttaggcaatttcaattgacaagtataacaagcaagttaggaaaatatgtggagagtgatgaatgccatatgtaaagtgaaaatattccattgataaggaaaatatacgatcacctaaatacacatgttatgttcagagatcaacttaagtgcctcctataatttagtgaaatgtaccataggtatacttgccactgctatgagcgctttctcacatagtggaacttcactttgaggagtatcttagatgtttgatttttattggtggtagataggaggttttacttgaatgtgccagcttccaagtgttgggaatatcatctaatagaccctatagggattagatgagctccccgataaacattcactagtacctcctattaagactatatttccttcctccatacagatgtatttcttcactcattcatagaagtcgtctaagccatctaattctcttttaagcatatttctccacaacccgcccccaaggtgtacccctgcagctatggaaaatttgaggtcatccttggatattctccctactttggtaacctctgtgttgaagcgctggatgtagcttcgcaaactttcttctcttccttgcttcacattggtgatacttgtgacatgcatactattatcacatgcggtctgatgttgctggaggaatttgtttgaaagttatttccaagagatgatcgtcccctagatctaactgtttgaactatttatacacgactcctttcaatgtgatcacaaaatattgacacatttccttacatgacatcttcttcatttttattagctcattaaatgcgccaagagggtactttgggtcagtggtaccgtcatatggtgtcgtatgtggctccttgaagttcagtggcaatggatccatttgaacctcccgagagagaggggattcttcatcaaaatcctcattatcattcaagtctcttcgcgtggctatggccatcttctggcgcaggtcttacatttctgtctccagctccttcatcctttcactcatcctctctcgagggttattgagaggaacttgggtcttgtgtatggtttgcattgggccttgctctttggggggagtcacatgcgaggtgtctctgttggatatattttaccaggatctagattaactaacaagtatgtttcattaac

SEQ ID NO: 80962 - DNA, 1037 bp, Cannabis sativa
tatttttataaatatttgtatgtggactgtataaatgtttaatgggccggcccaaagtatttttgtaattttttttccttttttgtatttttttgtttttttcccttttttttttttctataatactgaaacagataaaaaaatctactaaaatattccaataaatgtataaagttaccccacaatattaatataataatatgaatatatatagggaatgagacaaaactactcatatgaatttatattaataaatgaaaatgggcaacaaagactaagtcatacatactctgatatactcacattttttttttcttctgaatgagtcactaatatgtaacatagctaattaaggctactcattcatcaatatcataaaaagaaaaagaaaactacaaaatattgtgttgaaattttctttggggttttgtgtttttttggtaatcaaaacgatgaatttggaaaacaatatcttaagctacaccatattgactcactactcaattggtctcatcttatcttttattatagttgagttgggttggcattggcctcaaagtatttaaatttcacctacaaccgaactaaccataacttcaacaattttcaaccaaaaacttcaacaacataggtacactaatgtctacattcaacatggtaaaagtccaagcttgtttggatattttatatcttaacaaggttttttgttttttctcttttggttcttttttcgtttttttttttaacaagtctaaattggaacactactagaaatatagtgtatatattcgatttttatcgatccaaaacataaaaatcgaaaataaaagtagaaagaaaaagaaagaaaaaatttgtgggcctatatcttcaattatttcaaaataatcgaagacataaatctctacaaatctagccccatatcagatatatatagaggtttatatcttcgattatttttattataatttttattttttaaaatatggccacgtaggataattttttagtgacctgtcattgccacgtgggcaaaa

SEQ ID NO: 80963 - DNA, 1121 bp, Cannabis sativa
  modified_base (49)..(89): a, c, t, g, unknown or other
  modified_base (697)..(699): a, c, t, g, unknown or other
gacctttatatgtgtttattttatcgtcttagaaagttcatatttaggnnnnnnnnnnnnnnnnnnnnnnnnnnnnnnnnnnnnnnnnnaaaataatttccaacaacttttacttcaactagacttcacactagggtggaacatttatacctgaaaacccacccacccgggaaacctggccgaccggaacccaaaaaaaaaaaggttttaaaaattgtaggggcaggttcgtgtgcaacctgattacacactaggtcgggttcgaggttagagaaattgaacatttttgaaactcaagttgcaccccggacctgcccaaaaccaggatacaatattaattttaaaaaaacacatgtttttctaacctaataatacttactcttcagccgaaccccaaaaaagtccaaaatataaaagggggttttacaaaaaaatactgaattttgggcaaagtttacaattcaactgtcacacgatattttgtacaaattttattttttttttatataaaatgatcgtaaaataacaaaacagaacaattaaaacaatagtggaacaactaaaaaataattgtggaacaacagtgaaaacttaacacagtacacagtataaaacttacaaagtatttttgaaaaaaaaaatacagtatttttgaacaaaaattctgcctcacagtaaaaaagtaaaaaagttaaannnttcagtatgtggtgtaaaaattcaaaaaataaaaccgtaattccatccccaaatcccatccccccaccccagatccctctttccctcatttttccattttgtcgtctctccctctatctaacattctcattggcagcccagccagccacacgcacgacgtcgaccatcactggcctcctcctcacctcaggtacgtttgtgtgtgtgtgtgtgtgtgtgtgtgtttttttttttttcattatgtccatatctctttctcgtattttctcaattttttttttctattcctctccagggtccagggtgagttccgccctctcactataaaaaattgatacttttagtgataattttttaatcacaatataatttttttgtgactaaatgtgacttttagccacaataaaatgttacttgtgact

SEQ ID NO: 80964 - DNA, 1545 bp, Cannabis sativa
gaaaatcaaatttccctttctagagaagcaactaatagtagcttttcaaaaaacacttctctataagctaaagctcaaagccgaacaaagctaaattaacacataactaccctcctaactccttagatgtgtagtgatgagtttctttcatccaaatcttttcacgttaaatcagtactatataaataaataaattaatatatacaatattctcaaattaagattgttaaattatttgaggtaacaatcatttaagttacctcgcatagttgagcatagtgcttatatatttcactgctttcatcttgatcgccaactagagttccaccataccaaccattggcttcatccacggatgacattgccagatacctaaaagtataagctagttagcaaaatactttgtactatacacactactttcttcactttttttttttggctgaatttactccataggcattttaagaaagcatgtgtatgcatttgtatattctttcaatacctgtgaatgatatcctcatcattgccattatcaccagaagaaacccaatattggttacgaaaacaatcaacttctttctcgtcagtggattcgccattagtttctcctgaaataacttttggggaagaaacattttcttcatatttcctctgaccaaacaaccagtttgggcttttgagctgtatttcactgccaaaaaaaattgctgctattgtgacaattacgtccttcactcaaattttcaggcacaaaagaacaagagaaatgaaatgctaaaggtcatcctaaagtgcccaacaccctataatattattggaggtgtgaatgaatattagatcccgcatatttataactaaattaaattattttgaattatgtaaaacctaattacttattgcaccaacaacaatatgtcatgtcctctagaatattggacactaaagtgctctatagcaaagctcaaaaacaataaattagtacattgaccacccatatttttttcaaaagccaagaagtaaaattattaataacaaatggaaaaagtataacaaaaaatcaaagcaacactaaaaggacttagaaaaatcaattactattaactacatgaaactctaataacaataaaatttgaagaaaaaataaggagtagataaatcaacaaaaatgtgaatggatagggtggaaaggaagacatgactgagatcaaatgtatacagcaatctacgcaactacacaaagagatttgacacagaactgtaattcaacattatttcagtaaaggacaatgataacccgtactaaaataaaatatacttatgctcgaagacataggaacaaggggaggggcttataatagataggcatccacaggggcaagagtttgtcattttatgtattctaaattaatctatatatagcagactaaggctctaacctagtaagattattgcttatattttggagaggagaagctctagttaggggagatccaaacctctcaatagtttgtaactttatttgtaatttcagattttcaataa

SEQ ID NO: 80965 - DNA, 1289 bp, Cannabis sativa
ttagtagaacttgtaattttgcagcccataatgtggctaactgggcttttattaacaagttgtatgggattattccggtttcttcggttccggagaactttttatgtaatcaccgcgagatctaactttgattattaatggtacgattacgcttatttttttttttttaaaaaaaagaaatattataataggaaatagtaaatagtaatagttgagagagacttcgaagtttaatcgcaaattaaagcttcttgatagaaagagttaaattgtgaatttggacaaaagttaaaaaagaacttgttaataattaatttgttagagatcatgtgtccttcctctactgtagttttgtctcatttatattttcgaaaaggaaaatgctaaaaagtaatattattagtgtttagtatccaatttagtgtcatattgttattggtgtaattaaatattgattctcatataacttaagaaaattatttttagagaatattactaagcaattgtagggcgccacctataaaaggtattagcaccaataatgttcaatgacaatattatttccaaaaatagccaataatgagttgttacaactagcctggtagtggtaagtagtgagagtcaaatgatatattgagattttttttctttttctggtcagttagtagctagtcgatcgatgagatgagtatgagcctgtttggcatagtttttaaaaaagttaagatgttttttgaaaaaattataataaagatgtgtttggtaaacaattcaaaaatagcttattgaagaatttatggagaagctacaactaaacactaaaatgataagttgaaaaatatctttttttttatatctgttaatcaaaatatcctcatattattttttatttaaaatatacctactttttgagatcaacgttgatgcaacagtgtttaacgagacccatagctacgatgttgagtatgtggctagaggagcatacgacttatttctggagggtcgcacaaggatgtttcatgggtcggtgacacctaaagctgttgaggcgattgggatccgcaaagctttgagttggatcaaagataataattggccacgtatgctcttggaaaccgtatgcctttttgtggaacaagccacacgtaattccattgtcatgattttcatgtttggtcaagtggtaaacgattgtaaggctttgctaagttttttgagaaatgtgtctattttttttttttttttgaaaatgaaatatctacttcattgaaatttagcattcatcatac

SEQ ID NO: 80966 - DNA, 706 bp, Cannabis sativa
atttagtaccatgaaaaccaataggacattttgttggttctagatgcaagctattggttcgatactgctcgttcgtcttattctcgatatactgtctaaagtatcatcgggagatcaaattctcaatttcattcttcattgtctgtactcttcaaaagtacacccaatgtctttatgaaagcaatactatttgttcggatctctctgtattttttaacctaaatgactaatagggaaaatctacctatcttatcaaaatgatttgcacattggattctcgatgtatgcatccggaatgggaatactaataaaagattaaagatttgctcctacttcttgtgatttgaggcctagtagatctattcctactaccttacaaccttccttgggagaggttgagttgaagaagctcttacagaatcagtacctattgaatccccctccccccaaatctattggaaaagggactactagtagtggttcatcttatcttattagtagctattcgtgggaagaagactagctctggctttcaagcatgaattagatcttggattcagcattggttgggcatggcattagattagggaaggggcctatatatgttaagctctaaattgaaatgctttactctactcttaggaggcgtttggttgagaggaatgaaaatataggaataggaatgggaatggaaatgggaatagga

SEQ ID NO: 80967 - DNA, 1405 bp, Cannabis sativa
  modified_base (1257)..(1257): a, c, t, g, unknown or other
taattaattattagtatatgtttaaggtttgttttatattatatatatatattggataaatatatatagttagtgctttgttaggctcatcgaaactctaatatttgcaataatatatttaatagatatatttataaggatatgttaatagaaaatatgcttatacttatatataaacttaatatttctatacctttatatattccatatatgtatcttctatataaatataccattatcctattgttatccagattccacttcactttaaatatttaggaataatttttattattattatttttattataactctttcatgaggagaatatgtatcataatataaaatcgaaaaactcataatatatttatatatatatatatgccatagtatataaatatggttgagaagcacatattataaataatattcactacatcatcttctttaactgctgtcacattattaatttaataataattaaaaaaaattaattaattacaatgacatacaatgaattgtgacaatagattccaacattttcccactaattttttctttattatttcttaaatatatagctagagatgatcatcatgaacgtaaaatgtagccttcagctatatatatatatatatatatataaatatgtatataggtgtatatatataatcctatatgatatgattaaagtgtgtattgatattttcataagtggaccaattaatgatcaaactcaatcaagtgccttatccatataacttgaataccatcatataaatataaatatatattaattatgtaatattagtatttatgtttttcttagctaattaatcaattaattttttagattatgatgtatcatgttgatcctattttctctctctttctagctagaaaaataaaagtgattgtgatacttatatataattaatgagtagaatatataaaagctggttagtatagctagagatcgatcagatgagaacaactaagaaaagaagcaatcatgtttttgtggtaacccacttacaaatttttcaaatattcataaaaaaaataaagacaatatataattaaaaatataaaaataaataaaagaagaagaaaagaagagaaaggtgcaatcccaccacttcaataaagtttttaaataattcagaaaaacaacaaataatttcacacctcaataccttagttagtggaatctctctatctctctctctatagtctatataaatatatatatatanatatatatatatatttatacaaaagctttacattattatgaaatgtcacaagtagtgaaattattagaattaaaataaattttatataatatattttaatttaataattataatagaaaattgctaattaattataaataatactaat

SEQ ID NO: 80968 - DNA, 547 bp, Cannabis sativa
aagatgtaagtaatattttgggtttggttgatgggaaatcaaagttgatgaaaaagcctttatatagaaattgggatggtgggaagtgttgaaaagtccaaatacatgttccagcttagcaaaacagaatgttggaacacataagtttagtattagtacgtagtagctaggtagaaatttgaatggtaaaagggttttaatgagttaggtgtgctaccaaaatagtatggctcttgctgagctgggaaacacgcaaattttataatagaatagagaggtggaggtggatatatatgaactaggaaggaaggagtaaagaaaacaagagcatcgttatggggtattaataatgcataatttgattcaattcaatcacaactgatcgattcaattataattgatcgctaaacgtttgatattcaattatgataaaatcagattagatgttattttttgaatatctaattagattgaattggattggatcggatgttggatgaggtgtctaaaaatttaatacatttaacatccaatcaaactaattaat

SEQ ID NO: 80969 - DNA, 1528 bp, Cannabis sativa
  modified_base (1498)..(1502): a, c, t, g, unknown or other
atcacacctatcaataacaaacaaagatcctctaataaaaattggataaagacaccccaattactagaataatggaaaaaatcatgatagaccatgttaaaaatttcaaaaaataaatctcgaagaatcataaaataagatgtcaaaagacattggtaaaaattttaaaataacctatgcatccataaccaaaacagactagagatcgaataggggtgtaaaaataatgttattagaaacaaataaaacaccaagacccttacataaagaaagacaagacaaaatggagagcaaaaacaaatggcactaatcaccaaagggaccacacgaaattgatcattgtctcaccgaccacaccccaactgtctttgaccacagactgagaatttccaaaacccagatacgagccataaggtccttgccaaagtctcatcgaaatcattgattaaaaaagcagatctaaaatggaccaccaaagaggaaaaactcttcttagaacgacccaacccagagccagcaccgctgaatgatttggcaaaacatgtgacccatcgcttgagaatcaacacgacacaaccaaaaagatatcgcagaccaacaaagacatcgtaggaacgaaaaggcaacccatgataatagccaccataaaaccaagtctcaaaggccaaacaaagcatccccctgaccatggccacacaccaaacccagagctggtgaatcatggtcgaagagggagaacgaagacaccaggccgcagcagatgcaaaacatagagaaaaaaccttacgcgacatttatgataagtgagtaattatttgtattttaaagtgtgcagatgtaaatttctctatttaatacaatttttttaaacttttattcctcaattaattcaagagtattgttattcaaaggtaaagttgtacattcgtggcaaactttttggcacggcacgagcaggacacggtacaaaaaaaaatatgagcttcagtccgacatgacacgaataaatatgagactggacatgacacaacaagcacgaatgtattagtgcaaaaacacgacacataaacacaaaataaaatcaagaattaaatctacaaaaccaatttttttttatttagtagttagtctattttttttttttataaaaaatgtacatttttttttaaaaaattaaaattatatgtatattttctaaaatatttaaattatttataaaaaaaattctaaattcctaatcatatggtttcttgttggcaaaagtgatttttttaaaaaacaaaataatagaagatctatttgttgaaacaattcatttatgtcttaaaaattaaaaattaatttgaaaagcataaaaaaattaccaattttctataaatataaatcagacacattcatatagtttgtattataaatatgggctggtccattttacaaaaataagatggggttcgttgaaaaatgcctcttttattcatcaattaatcaaatttacctnnnnntttatatttatttgaaacatacctct

SEQ ID NO: 80970 - DNA, 4400 bp, Cannabis sativa
tatacatgtgtcattcaaatttcaccttaaaaaggatacacctagacaaactgtcaggacaaaaggtatgtttagaggtggggtgtgcacaccaccatggtctgacacaggggacaagatctgatcctctatcagaaaaagaaatagccatcactggggtgcttggggtctctcttcatggttgacgtctgacttcctttatgcagttggcgtccgtgttagattctttaagtgccttccaagtttcggttggacatatgttgagctttgtcttctctgaggttctagagatatgacgaggcctctagatctgaatggcagtatgctgcaggaaaaatccctatatagccattgggccagatttattctcggatctgcaaagcttctccatgacctgatctaattaagaggacatgattagtgaccgtttgaggttgtgtttctcattttatgccacgcgtccttcatccaggataatagttcatttagtcttacctttaccactcaacccaggccttaagaactgcccctgttcttgacattactttgatcttgaagtcttttctcacttcagtagtaatcctggtaacctttctaaacacatccagaaatctatgtacctcacttacattcactgttctactgacaaccccttgatataaactaccatactaatttttaatgagtctctcatttccattgctaatttattgaaattcaggattcttgaattcctctcccaaaattaccacaagagtttcactgtctggtttatacattaccatttctctcttgcaatttatactatctattatcccaaattttgtccacttgacatggtatgtccacatagtcaaaatcaaaagacatgtggggaacaactcatcactaacctgccaggttagtgcgtgcagccttcaacctccaggttagtgcatgcagccttcaaccagccagattagtgtgtgtgacctttaacctgccaggttagtgcgtgcagccttaaacttgccaggttagtgtttgtagccttccaacctgccaggttagtgcgtgcaaccttcaacatgcagctttcaacctgttaagttagtgcatgtagccttccaagtgccaggttagtgcgtgcaaccttcaacctgtcaggttagtgcctccaaccttccaacctgctaggttagtgccatgcaccttccaacatgcaagatcccatggctgcctggtggacacaagaaaacacagatctacatacctgccagtaaagccctagctgaacctatagctagtcggctaggagtgtcagcttccatacactgggcaaccttcagcaaggctggtaggccaagctgaacaacaaagctatatggacaacctccaaagatagggttgtacagacatgtcgaataacctccaaagacagggctagtaggccaaaatgtgtagatagcccttaacaggccgaacaaattgtagggtgcaccacgagccttctagaagattctcaagcttacttacaattatgggacaagtccaatagcccatgaagatagggatattccctcaaagatattatcctagattctagggatttatctatctttttttttttgtatttcaaattaaagataaaaaagatgttattttccctattttaaagggacatattttctatttgaattaggatcttttgtaagccttatactatataaacggcactagatcacatgaaaaagggccaattctaagtttcacacgccaatagtctctctccctctctctctctaagcctcacacgccattaaggtctcttagactctaagtctattttcttcataagttcttcataaaatctcacaagttctttatctgtaacacattgttctcacaattgtaatactgacgagatccatagctagaaattacaaggtctaaacttgtaatttgcatggtattatcccaagagtaaatacaactaaaaagggagtaggtcattaccctaacatcaagggggccaaacctccatgaatttatgtgttacttttactatttattattcttatttacaagtggtgataatcaataattaataaggctctgctgtgagttggctaaatttcatgtcaacgctatctttatacttagctaagcactctaaatctcttattacactaattgtacaatttattgtctaataaaacaacaaactatgttatttgataagataactagtgatcatttttacttaatgaagtaatcaattgtcttatgttgtcttatgagacaaccgtatttaccttacagcgggttcatagagtaataacagtatcactcacactgttacttaataaagtaacctaatatttctagttgtcgaataaaataacccatatatatacattctactctctatactcactagagaaatcatcctcactcacaggagataaccaattctttattaggtacccacgtaccacatcatcttaacaatacatcacatggtctaatatactaccatgaaattagtttaaacttggttttcctctctaagaaaacatctttcattttcaaacattcaaggtaaacttaccagtcttattttctttcccagcagaacttcattacccacatctagaaggtcatctgaatttcctctttcaataataagggtcataacccataccttaattgatacaggatggaaacttctaagaatcttcccatatgttattgtcattaataattgataccctgtccatcttaataatacccaactaaatcacttgagtacatgccctccacttcccggatgagcattaccttttttaggttttaagttgtcattgtatatccaagattgattgatcgatcaaacctagatgcattcaccatcttcgttgtatattcttgagcaatctaagtaaactcctccatcttagcaataccgtgatctcactatcataccttaataagtcactagtcaagttatactccaattaaaagggttcaatccatgttcctcgggctcagtcctctactatatgaacgtcacttctgtagtataagatggcacaactcacttaatcatcatctttaactcaccttaaatcctgaatggacacgctcatatccatctattattccacactcagggattctgaatcacctctagagcaagaaggttccattatctgaattgcttaaacaactgtacctaatagttcttcatatctcacggaccacttgggcacatcttgagaatttaacttatcagagaaccattttattgatttatcaattctctaatatgtcagtctcgtcaactaatctgtcgtgtaatgatgcaccttacttcgtgatctaggtggcaatgaatcaccatttctttgatcattcccgaaatgtcaaattttccattgaatcacacaaattctctattggaaaaccttatccattgtcttactaatcatcccctcatactgattataattctcaagtaacaacaatgtaaataagcatttccttgcttagcaattaagcatatatttctaccatactttcttaattggtataacttcataatatactacaaccaaacataattcatgtttttctagagatacttctaacaacatcatataacaattaatcatataatagggagcaaattatacttactatccatgagatgagttggtcttcacaccaaatgtacatatccagtcagtcttcagaacctttaaaattatggttgctctgataccatgttgtaatgccctaacctctaggaaagccacatgtgtgcttttataaaatagtttatgataataaactaacaatttatgtaaaaatgtgatttaataaaaattttgctaattgaaaagtcatggcagaatcacttttacaataggggatccctttttaaaatattacaagatatgtaattacaatgttattataaaatacacgttaatatttaaaacatctaaaaaatgtcaatctcgacaactcaacaccacttgctagataagctgatatgtacattttctagagaagattcttgactcattgttgtccaaatatttcttacctaatgcctgcaccacatagcatctgtgagtcgcaaaaactcagcaagaaaagtagtaatacaacatcacaaatcattacacaactatcaaacaatcaaaatcaaataatcatataatactcatataattaaatccagataaacatagatactcagttacaaaaaatatcaatataaaacattcagtaatatacaatcacttttttaataatacaatccatacccgttacttcataaatcaccaattttcattgttgcttaccaaaacaactttcatgcctagcccggcatcccaatatccttgttattg

SEQ ID NO: 80971 - DNA, 847 bp, Cannabis sativa
ttctatgacaatgagtacgttttattcttgctgcagcagttttctctatttattttgtaatgttaaattctattttactatgagacttacattttagttaaactgcactgtaggaaatcatgattctccccatcggagcaatcaggtttgaagaggcattgcaaatgggctctgagacttatcagcatttgaaggtgattttgtttaccttaactttcataaaaaatactctcagtgcttttgcttacattacaatataagagagagttatatttcggtagttttatcatttgtgtgctgttttagtttatttctaagtggaaaattttcaaattttcttcattttaacattgtttgagaatctataagaaaactgtaatggtaatctctgaatgatcacgacatcaataatggatgactttaggccaagaaactgacatgattagtacttctttaaatgagatattattcagctttaattgtttgcatttcctagacaactttcttgattaatatgataattttgttacaggagttttgacaaaaaagagatataaaaatatagatgaggggacattactattattcacttaatcattgactgtattgttattaaaaaagagcaggttgttattacagaaaaatatggtgcacatggatgtaacattggtgaaaatggtggttttgctccagacatctccaggtaaggtttttttttgggggggtggggggtgttaccagaaatcattgtcttctatgtgttatggtaattcttttttcaatacttccttaagaaacagagagagagaggagaagatttatttaactatatgactataaaatctta

SEQ ID NO: 80972 - DNA, 771 bp, Cannabis sativa
  modified_base (421)..(430): a, c, t, g, unknown or other
acttgtttcctccatcttcactgacgctattgccgaagcgaatgtggcgaccggcgaagatgccccttttggcccgacccattacgattttagagtcgggcacatattttctcagagagtccttcactcccggagctaagttcttctctcccacttttttcattatgttttttatcatttctcttcctctaaacgccattttctcttttgtagatacgtttcgggatgaaaaagcttaaatatttctgggatttcgggcacggaaatgggagacaccgcgattctggacggcgattagatagaagataatagttctcgcttctgctactgaaatattgatgtcgactgttcgtttcgctacacaggatacttttctaaaatttacgcggacccacgtataacataataataataataatannnnnnnnnntaataataataataataagtactccatataattattttttaactttttttttaaaataaatttaaaatttaggttactcccatatttttttttaagtgaattgctatacagattttagttgttatttaagttgctctgttaattattatagagatttctatatgaaattacgtaaaatgcaaaaaaaaaattatgttaaagtgttaaaataaaaaagtccctaaaaaatataacaaaatagtgtttaatgtaggggcagggccgtctcaaggtgatgagaggcctagggcgaaatttgaaacaagacattttcttttaataaaaattaaaataaattttaa

SEQ ID NO: 80973 - DNA, 1410 bp, Cannabis sativa
gacaatcataatcaactaagaaagcaagaaaaagttgttgaaaatagaatttcattcaagtaaccattattatttgaaggaaggggcatccaaaacaataaaaaaatatctttgaaataaaaaaaaaattaccttcaaaatgagactaaatatatggaaaactttagtaataatcaatgcatcaggcttaccaattaaagattaggaagaacaaatttatttggcagcaaaacctaaatcacttagctcctacaaacacaaataacaattatggttatgaagaatcatttaatacattgtcatgaagaaatattgaataagaacaaagataatagaactacatttaaaggatccgtaattattatcgaattcttccttagtaatttcattaccttgtgtttctttttaacctgtgcttcagtcatttcacaagcttcagctaataccttaataacttaataactataagattaaagcaactgagtgcttttgctagcccaataatgatgaaagcaattgaatgctttcattggcttggagtggaaagttttattttttatctccagtatgtaatccaaacttaagactatagtttgaagagtattgcacaattgcaaatgtatttagaaatttctacattcagtaaaaagaaatctaataaaaaaatttacaaatctacaaaatttctcagctaatacataaaatttaattatagaaaaatatttattattaaatacatcaactaaaaaaatatcaatcaaaacaacaccaattgttttaacttttaaataacaaagaaagcaataggaaaggaatcgcaatcaacctgaaagcgaggttgtaaatctacgatttgggatttcgagtgaaaggaagcatcatcggtgaaagacttcgagtttcaaggatcgcagccatagaggcaagtggtagtcggagtcgcacgaaggaggccaattccaaggatagcagtcttagatgccagtggtagttagtctgaatcccatgaaggacgcgagttcaaagtcgaattcgttatatttatcattaacaactcttccttctttcgtgttaatggaggaattccttttgaatatttattctctgtcaacaaactattttttttatcgttattttaaaccgttcatctttctttcgtactaatgaactattgcctttaatatttttattctctgttaataatttttttttgtctttattattttaattttttaaagttaaggaccgccagacacagatatcaatcgttactttagaataaaagataagttaaaaaactagaatcattaagggtgcgtttagaagtaactgtgtaattactaggtagggtaattactagggtggtaattacacagtgtagtaattacactatattttaaaatgtaaagt

SEQ ID NO: 80974 - DNA, 827 bp, Cannabis sativa
gtcacaagtaacattttgttgtgagtagtcacaaaaaaattatgttgtgtgactaaaaaattatcactacaattaaagtagcaattttttgtagagtaacactggcaatgtgtagcatgtttaggtattaaaaatgagaaattaaaaaaatagagtaaaaagggccctaaaatgactaaacctctactatttaagtggtggacattgatggggttttgagggtttaggtctaggatgaaaaatgaggaagatgaagaaatgaacctttaatcaaggttataaaatcttatggcaccaattatttggtaataaatgccatcatgacaggcgtcagccaatggtgtatgacagtagttattaccaaataactgatgacatatgtgatctaccaactattctcattatatcgatgattttgttttagttatcagttaaaatagttacctttaaaggttgattttgtaatagtttagtaatatgacacatttaagtatatatttatttcaaattggtatgtttgtacatttttttcaaagaatattatggataaaatattaattaatagaatagccaacaattgagtatatactcatatatatatatgtgattaattataatacctagagaatatactggattcaccaaaaaaatcttgcagatatttcaaaaaagaaacattaatccatagaagtatattggtggattgtcaactatttggcaacttgtattcgatggactctctataaatgatcttcttccattccagtttgtaagcacgtatatatatatttatatacttttctataattcttttacttagcaagaaa

SEQ ID NO: 80975 - DNA, 814 bp, Cannabis sativa
gcaggaggcacactgctgcagccaatggggtcatgattttcgacctgactataaaaaccttggcatccttaagactcaatttcccaatgttcccataattgctctgactgtatgtcttttttctacctatgtatagtttctattatttaaattttaaaggaaccaagatgaagcatctggttttaccattcaatgtctcggttaagttcacaacggcactgtatattttacaggcaacagctacacaaaaggttcaatatgatttgatggagatgctccacattccaaagtgtgtcaaatttgtcagcactgtcaataggccaaacctcttttatacggtacttaaatttgttcatagtttttggatatggaattcagaagctgaagtttcaattttcctattctgcaggtacgagaaaaatcatctgttgggaaggtggctattgatgaaatttcagagttcattcaagaaaattatataaataatgaatctgggatagtttattgcttctctagaaaggaatgtgaacaggtatgtgacatgtcctatttctttaactttttctttcattacatgtcaatacttgtgtaagtttgttactcgttacatccctttcaaaaagggcgaaattgtttctactatttgataagagtggttagaaccccaagcggtaagaaaatgctggaatgcgtgagtagccgcactgttccagggttcgaatcccattttcccttaactcaaaaacttggggtgattgggaggtctctcgactgacctgccaggacctcgtgggattagttgggtgaagcccgg

SEQ ID NO: 80976 - DNA, 1096 bp, Cannabis sativa
  modified_base (137)..(150): a, c, t, g, unknown or other
ttttgacactttttttcaaatataaccaacttgaagacaattcctaatacgaacagatacaaaaaatataaacagttttgtcatagctcttttaaatcggactaaaaatcaatttagggtcctatttgtactatttnnnnnnnnnnnnnntctattttgtcatttaacaaaatggatggtccaattaataacttttgcaaaacacaagtccaaaacggtatttttctttctccaattattgggtccttttttaaataaaggaccaataatttttctttctcctaagatccacccaatcctaggaccaaccttgtatcatgtaattggattctatttatggcattgttgttaaatagttattattttaatcttttgtattttttttcaaaataaaaaatcttttgtgttagttgcctatataaggctttcttagttattagttgtattctttcacttttttaactttgtaattgaatgaaactctatttatatgcatcttttttattcttcatttgttatttttctcttcacaaataattctcatgatattagagtaagatttatgaaagcaaatttcttaagcataatcacaacttttgtaggcgttcgtacaacatctgtatagttcgacattcaatttttcagtattgatttctttgagttcttttttcttaattcgcatagcagttttggctattgattttcgcatagctaatttaagagctgactcgacatacctacaacatttaacggtttgagattaacaattatagtacccaataaattactaaaatctcctacatatccctattcaaaatttcccttacaacatctatttataaattaatctaacaaaagaaggttatcaggggtaaattaaatccattaaatttacgtttgagcactaatacactacttcttttagtgacaaaccttttaatcacaacataaaagttacttgtgactaaacataatatttaaatataaattgtcacaaatttagttttagtcacaacaaattgtgatttgtgtgacttatacatgtagctacggaccttttagtcacaatataggaatgatgatttataattagcca

SEQ ID NO: 80977 - DNA, 1379 bp, Cannabis sativa
aatggtatttaccctatataatatatttgagtttaaacatttacttattccattagatttataataaaaaaattattggtatatttgacataaaaaaaatatgtataaatatattattgtagcagcaaccacaacaactcaatcaaccaagtattaatctgattgcgatttttgagttaaatcttataaatttggattaatttgattgtgatttttgagtttaaagcttataaatttgtgtggtgtaaatattatatttcgtaaaaaaaattaaatgattaaaaattgcatttgaatttaaaacatattttcacccaaattttgtgaagtttaatattctcgtaagttaatatgtttacttttgattcatttctatcaattagtttaattgccaatatatcacatatggacaggaagaatgattttcatttttcatgtaggatttttaatttataatagggatcttagtatgtgaaaatgaaattattactaggaggtaggttcaagcaaataaaattagagtaactctatttgaatcctttcatactaaataatattaatcttttgagaaaagagaaaaataagcatgtgtcaaatacatttgttgaacatatcatatatgttccaatcaggccatctccaattggcttgcaaaatataaaaaataatgtagtttcacattaaatataatctaattagactgcatacctaaatttataaatgagaatatttatcgtatctcgctaaatttagtgggggtattgtaaaccacgctaaaattatttttagtgttatggttaaaatagaaaataaatttaatactaaaattatgctttttttggttttaatttaacactaaatttaaatttcaccattgaaattagtctcagtaatcctttattatggtaaagtttgtactaatgttcttacaaacattccattctagaagaatttaatatcacttgagtgtgcttgaaaaatccataatttggaaacttaatgattttgaagagcttggcgtttgttatgaaatgagagaagaaacacctttcccatatagaataaaactaatgtgacagttctaagttttcaatgtaggagcaaaagtgtgacagttctaagagaatattcactatagagaacaaacaaattataatcatatcaattctaacttgtaataatgtaaatccaatgttgtatcaaattccatttcattcaaacttcttaacctcaaaatggtcaaattcactagctacatataactatgaaaaccctgtacaattggtgtaaaaaaacaaaaaagatatatagattcaaaatcttgcaaccaaaatattacaaaaaaacactaaaaatgctctcaaccccatgatgaaaac

SEQ ID NO: 80978 - DNA, 1375 bp, Cannabis sativa
catgaaagggtggaataggagcattgttttttcttattgatcatctagagaatattgaacaacttttatatatatatataaatgatttaaggttatattaaataaaacaatataataaggtatattgatttagttacaaaattctaacatatttaataagttactctgagccctgaggtagttatacattagtgctttaaatttgattaagttaagaaattaaattgccaaacaaaaatgacactttattgggagcatttatggtaaaatttcttagagtgacgacagtacttaaggacatttatgctaaaatcccttaaatatatgtgtgcatgcatagtgtaatagttattcaagtcacataagagttcaaaagtgctcttaaaaaaacaacctaataatatcgaattggtggcactgcagcgctgtatgactagaaatgtcagtgctgtggctcttgttgtgcaacacatgattgttttttttattgtgttaattttccaaaaatgttacaagtttgcaatataatttattttaagggaagttttaattaagagagtgacctcacacacaatgttagtgagcatctcttacattcttttcttttatattggattcttcagcaatattgtatgtaaattactcatcatttctatgagctagactcatgaataatattaaaaagagaaataaagtttttggacaaaattcttaaaagttattcaagcttttcttgtttagtactttctcttgtaatttaatcttcttcatcttcttcttttcttaattatgatgtttgtatttttaatttgcctacttatacgtttgaagaatattatttttccttctattttgtattatatacatcacataacttcaatatatataaatattaattatataattaaatgcacacaataaataaacgtatatacgaattctactagaattcgttatgtgtcgtagtcgtacaaggctttatcatattgactcgagtgatcatcaaaatttatatgtatacggaaatacgtacggactttattttgaataaaaatataagcacatatatatatgtattatattaatatatatttatatatatatatagattcagtatttactaggcagaggctctaacaaagattcttacttgtggtgtgtgtgttcatgctaattaagtgtcatatgctatgtaactaatttgatatccaatcttgtttattttatttaaataataatttaaaaaactgctaatttggtattacgtacttatggtgcatggtactcggcaccatagcatactacaggataaaaattaaagttgggtgaccggaccctacaagagattttatctatttttattctcttctttatt

SEQ ID NO: 80979 - DNA, 1542 bp, Cannabis sativa
aatcaattataccataaatactattgttttttttttatttcattgacttagtttcccattattctagtcaaagttttatataaataagaattcaccccagtaaaataaattaatgaaaaattcttattcagtttctctttctctcttatcattcttattcattttttcttatttattttatattatttataataagtttataacaaaaaccacattatttatactcactattcacaaactccaagctaatatactcactaataatattaacataaactaataactaaattgcaaactttaaactaatctctttatttgaaaacttatttagtaattttctcctaattagctaggtatgcatttgaaacagttgatgacactaatttcttataatgtacacttaaatagtacaatggttttataatttagagccttgcaaataaacaaacaaaatcatttgttcaaaaccttctaatattactattttaattttaattaagagattatgattagagatacttttatttttaactagatttttagccaactaatgcaagtcataataaatgaaatttaaactaaaatcgtaatattagatgtaaataatgacattaaaattcgcaataaatataagaaaagacaccaaaatttaaaaaggttcagtcctagatgtcggtaataacttactctccttgtcttttattgatcaaagttgcaaaataaaaaacaggctcttgaatgcaagaaaaataacaatggcagagtcttttcgctccaagtactcaaattttcagatccctttcttaggtcatggttgaccctttatgtaggagaaaaggtcggtgcttctcacttcaagagatgcgatcaatgcggtgttatctcaatcgcctccttaatttttggtggtggttgaaatctgattcttatgtttatatccctctatttttgtggctttgtaactgtctttgaacttcttgcgggatttgaatatttgaattaactactaacgatgaaggtctcccgagggtgtgacatgatcgttaaccaccttcgaagatagaagctaatacttgggggtaacacccccgagacccaacatgaggagggtgtcaattgctatctcggggtgacccccgagacccctttgatgttgtgggtagtcatggtgtcatggatgtactcatctacttttgagattgtcattacgtccatggtgggggtagtgtcatctaccccctagactgatttgacccataggtgtgtggtgatcgtttatcccacctataaattagtctaccctttttccttcttggaggcaaccactttgctcaagctaggcgtaaagcctaaaggtgactgtcagactttcattccaacgatcatgaccaaccataatgactaacggtcataactttacatattctccattaatcaaatcctgatatttctgtgtcacgtgtcgttactgttgccacgtaaacacttatatatgagaaatgtaaaaagtattagcagtgtttagcactaggtactagctac

SEQ ID NO: 80980 - DNA, 1744 bp, Cannabis sativa
  modified_base (1680)..(1686): a, c, t, g, unknown or other
tctcgttgtaacaagaggtgcattatcgtaaacctaaatctttcacgcttcaatgtctacctcaacaaccacctaatgcttttgagactataagttcagggcaaagtatatgaagcattggtccttccaacatggtaagtaacaatctgccataccttggtagtaatctataacaacatctggcaatgtaaaagtgctcctgtcacccgtgtgtgccccccaaatactagtaaaaaattatgggcatgaggtgttcaaaatcacatttgactgagggcacgagtttgggaaaatgtgtgatctcctcctcagcatgtgcgcaatgacatttatatgctgcatgaaaattaaagaaaaccaccaattaaaccaaatgaaccatgtttgtaaaaaaaatcactgaatatcgtaaataaaattgcaacatattgcaacatgtcaaaagacgttcccaacaatgtcaacaatatcgaaacaacagaattcctaaactatactttctttgttatgggaaggcttcagcctctgtcaaaattgattggcttagatatcgataaaatgtagcaaacaatatcgatacatatcactaaaacataattcctatgatatttggcttccatattgataggagtcgcaaacaatgttgccaaagtcgctaaatttgaattcctaaatgtttggtttagatatcgctaacaatgtcaacaaaagttgctaaaactgaatttctattatatttggtttagatatcgacaacaatcactaacaatgtcgatgcaaattgctacagaatttttttatcatatttggcttagatatcgtaaggtacaacaataaaaatattgaaacacgttataaaaaaatacttacattcttccaaccattgttcaaccaccaacaacttcgtaaagaaattggcatcactgacgctagtgtggagtcctaggacagttatttgggatgtccccaagcacccacctcttgaacgtacgtagcaatctacggtctgctggtctttctagacctatgttctctgaaagaagccactttttttttccttagtgtagtctagaaaataataatgcaacttcctttttctcacaaatggtacctcttctggggtccattcaggattaggataacgttttgtgattgtatttgaccaatggccgtgataataggtagacggtgccccttcatcatcttatttctaatcttctgggaacacatcttcatattcactctcatgaggtcgatcatctattggttgggatggttgtggtgcaccgtccttctattgagatttataccctaaaagtaaataatcaatagatactatgttagagaatatatgaaatacatttataagataaatgatttgttaattataagagtatagttattaaatatctgaagattccttattcatataggttaaggtataatcttgtaaggatgtacaagagaattaagattatatgatatgaataaactaagttggtagtgaataaaagtattaggaatctttaatatggaactgctaagtacattttactatacactatacttctagtgtgtataattttgatccagatcacatatgtagatggacatgtagtaaaagtagtgtgtatgattagattatgtatgactggacctaggggtgaaaatcggtcggtnnnnnnnggtttttaaaattttataaccgaccggtcggttacggtttttattttacgaaaaccgt

SEQ ID NO: 80981 - DNA, 2309 bp, Cannabis sativa
atgagtttctttatatatggaaattttaagtagattatcataatatataagtaattaatatttcacacccttttcctaggtcatcttcaacaaaatataatatacctagatttacattttcttttttattatttttttcttgctagtaaaaaaatattatctagtgtagattctttctctactattttggtactttttcataattttagagatcacctactaactattatgatcttatattatcttatgattcttatcttaaatgtccacctaatattacctataacaatacatttacatttttttaatagcaatacacttacaaagctaattaatttttttagcattatgttaatgaactttatttttcttcttcttcttttttgttttttaaaaatgtttgattctttatgttaaacttaatactctccctttttgaattgtgcttcatccccattattgttctatatgttacaatatatgtttatatattcatagcttaaaaattctcaattaattctatttgtaattttccgatgtgacactaccaaaaaaactattttttagtaataatgttttattaaacatcacttttaattacaataaaaattacttgtcactaggaagtagcatttagatactagtcgtcattaatttagttttaataacaacaagtattttaattaaaaatacatttaatgataataaattataatttttataactaatacttttagctaagcacaaattttttagtgaaaacataataatgatgattcatgtacggttgtctcaagacaatgagaaacctatgacgaaacttgaaacgagatattttctttttataaaaaattaaaaataaatattaattaaattttaacacaatattaattattttatctctatttaaaataacacaatatttacacattgtatgtaaagccttttactatttaaaataacttaaaggtggcaagggcatggatcaaaccctatacctcaccatcattaattaacaattctaatcatttgtgccattacttttttttacaattaattaattaaatattaatatattaatattttttacatgtatatatattaattttattataaatttatatttagtcacaatacttttacttttaattacaaattttattatagtaccataaagtccaccaaaaacatccataaaaaagatagtgtaattttttttctacataattagttaggatatatgtattgtttttattttatgcatggtaaaatgtagtaatataaataatgccaagaatgaaaaatcaaacataaaaatttattacataaaaaaaaaaaatttcttccttctttaatgagtcgaaagtactagtcctaaaaagaaatcttacttgattagttctttttcctttttaccaatgaaaaataatgtacaagaaagggtaattaatttattcttaatgaattttcagctaccataccccaaaaagggcatttttttttcttttctcaaagttgtaataattatgattatgacaaatatttcatgtagtctacaaaaaataattattttagtgacaaaatcttttaacaagatataaatttattataattaaatgttatttttaatcaaaacaaaatattatttgtaattaaaacattatattagatataagttaatacttatttaattttagttataataattattgtgattaaaaatacctgtagtcataataaattataatttttgtgagtaatatttagccataaattttttagtcataatttaaaaataataatttgtaatttgtcacaacttttttacttttattcataaattttattatgactaaaaatataatttaagggatacgattttgtcccgtgatgtactttcacggaatgtattccatggtacattagatgagtctcagggtacgttattattttttaaccttgattactcctatatcaaccccaactctcagatcaaataagcccctatctaatatacatcacggaatacattttgtgaaagtacatcaacatttattgtaatggtatcaagtagcaattaatatatttgacatttttagtaacttattaaattaaaaagagggacaagaaatgtcaaaaaaaaaaaaaaaaaggacaagaaaataaagaaataaaatatattttcatagccctttgtgatggtgagacgtgtgagtgaggcccatgcaaaagaaccaatgggggcccaccttgcttcaatatcatacgtcatgattgggcttaacgaattgacaacttcataattgagg

SEQ ID NO: 80982 - DNA, 2826 bp, Cannabis sativa
tgttttacctgggactcgaacccatgacttctaacacacacacccacctatggccacttgaactagtctcaagtggttttatttgttagagttctgtagctagcatttttctttactggtgctgtttgtggctttgttgtaagttctttctggtttgtgatttaataaatttacttcttctaatgaaaaaaaaagataatataaataataaataatctataatgatcatttttctataaattttgaaataagaatatttattaatataatttttttttaggaaaaaaatttattaatataatcttacaatttgggttcatttactataaattctgaataattttcttgtaaaagttattaatttgctgacatactaaatagattcaaaacaatgccaaaagtcattgtttcgtggtcaaataagaggactactttttttcttgcaatgcgactattctttcaatttcgtggtatttagtatttttaaatattaattttggtggtagagatttgtatagtttaatataataatttttattattgttagttatggagacttttaatataataattttaaaaatatttttagtcaaatcaacatatctacatatatttcaatatgtctgatatatttatggtatgtagtatgtacactcccatctcccaaccaccgatgccttaagattacagaaaatgaaaatggtattgaagtaatgaaatgaggatgagagtctcttctcctcgtttgttgtttttcaccatattaccattcctcacagttacagttgcagttgcagaccaaggattaggaacagtaaccgattatgagaggaggtgtcggaagaatgaaccaccaattagattccctttccgattcaaacaaacccaacccaataacccactcaccggtttcgacatctcctgcaccaaatctcacaacaaaacaatactcttgattccaaccattacaggacccagcgccgagctgtacgtaagagacataaactatgtttcacaacaaatccaaatataccacgacccacatcaatgccttcccacactactgctgctttcccaaaacaacagcaataacaccactagaccattcaattttcctttcaaattcagatacgatcgtcgaaccaattacacaacccacactctcctcaattgctcttcagcccctcatcatcgttaccttaaacaagagttttgtaacattaagttggttccttctgattatgatattgatacggtgatttacgagcgttgtcctaagatgtacgacactgtatcaattccagatagcatatacaaggcgtccatttctgggaatgatgatcgaagctatgtaactttgacatggtccgaacccgattgtagagcttgcgaagcgaatcgaatgggttgcagactcagtaatcgtagtgaccaacaagttcagtgtttcgatctaccagtacaaaaaaaaggtaaagagaactgcctaatacttgtttctttatttaatcttattaatatggttattaatgataattatttcaaaacagaaccaacaaagattttgcaaatgatcagaagtactctatgtgagttgggtttctacttttctatttaattttctttcaactaattagtagtctttcatttttttatgctttgctatgtgttttgcagttattgtcttagccacttctgttttatgttcaatagtgttagctgttctgttttatctatacataacacacaaaaacgataaagaacatgaagaaagaattgaaacatttttagaggattatgttgctatgaagccatcaagatatacttattccgatattaagaagattacaaaatacttcaaggataagttgggtgaaggagcttatggaacggtgtttaaaggaaagctttctagtgagattttggtcgcggtaaagatcctaaataattccaaggggaatggagaagagttcttgaatgaagtagctactattggtcaaattcaccatgtgaatgtggttcgtttggttggatattgtgctgaagggtttaaaagagctcttatttatgaattcttacccaatggttcgcttaataactacatttccttagaagccagcggtggacaccgtttgctgagttgggagaaattgcaagacattgccataggtgttgccaagggaatgagtatctccaccaaggttgtgaccaacgaatccttcatttcgatattaaacctcataatgttttgttggacagtaacttcaaacctaaaatttctgattttggtttagcaaagttatgttctaaggatcaaagtttagtatcaatgactacggttagagggactattgggtacatggcaccagaagtgttctctaaaaactttggtaatgtgtcctacaaatcagatgtttatagttttggaatgttgttgttggaaatagttggaggaaagaaaaataccactgaaagagatgaaatttactatcctgaatggatatataatcacttagaaaaaggagaagatctcagaatacaaattggagaagtgggagacaatagaattgctaacaaacttgcaattgtaggactttggtgcatccagtggcacccaatgagtcgtccaacaatgaaaattgtagtccaaatgttagaaggtgtaaaagttcttgacatgcccccaaatcctttttgtcaaaacaggtcaattaatgacaaatacgaaggtgccacaaagactactgattcttgattatgatgttcttgcagtgatttatggtttgtacaggatgagtatgtaattttgttttcaaactaaatgta

SEQ ID NO: 80983 - DNA, 698 bp, Cannabis sativa
aaaatgacaaaagttagtatactaggtaaatttccctatatatatgtatataatattagaaaaatctaggaggggccatgggccatggccaccccacaaataggcatagttccgccactgactttattcaactcccctacttttccttctcactacaaagaaacaagatttttaccagcgaaattcatgaatctcgcctacaaaagttgatatttaccaacgaattaaagaaattacgctggcctttgttagacttttttttttctaatggaaaatcttttgccgacacattaatttgccggtaaaagttacatttgtcgacaaattttcgttgttttgtcggcaaaaagtttgcaatcgaaccacgaaaaggtgccaattttttgcgattttcttacttttgacaggaatttttcctcgtgaaagtaacaattgggggaaaaaaacttttgccggcagacaattgcaccgataacaattgtgtctttagggttttaaataagtttttctggtgcatttttacttttactggtaagcttgaattttgttgacgaaaattcttcaaataagatatgatcctttcttcttttcaatttttacgtctgatctttctctcctctccatctctctcaatgtggtatttccttcgccagagccacgtcccccactccgcccgtcccccactccgcccgtccccc

SEQ ID NO: 80984 - DNA, 3713 bp, Cannabis sativa
tctctctctctctctctctaggacgacagtcaaaccactagggtcacgaatcacgcacattgactggtaagtgcacattcaccacaataatggacaagtatttttcaaatatttagaagagtatgtagttcatcttcagtagatttttgtggttactgtttgtattgatgttattatactatttttctataaaatggggagatatgggttttccagtgaaatttgggtgttttgaacaatatcgatggtttttcaatattatcttgatagttagcgtactaaggttagggatgattcttttcaattattttaagatagtttctcgataatttccatggctatctgaattttttaacattttgacatttttttgttttattatcgatattatctcaatggcttgtcgatacattctcgattgcttcttgaaaattggtttttctatccatcatgagtgtttatcgattgtttatttgtcgattgttgttagaaaaatttattttatctccatcacgattgtttctcaatatgctctccattcgtacttgtaaaatgtcattctatatacttcattattgtttatcaaagtttttttgatattttttcaatgaaatatatgatttttccaatttttgagtgtttttgatatttttgttagttatttcttaactaactttttttttgtatgaaattgtaggattgactatgtttctggttatattttatgatggtgtttagagtattgaggattttaattggatttataaaagcgaatgaagtttgacattgataggttaaatcgacacaactttacacaaaatacgtgatattttatataaagagttggatgttgacccattagagtatgatttgaaattgaagatatgttcgttgtacatgaaagggcaactggttctgccagagattattaagaaagaacatcaactaagagtgttcttatagatgagggcaacattgttaaacacataatttatgctattatttgtgaccaaggtgaaaaaggttgggaatttggagcctactcccctattaattatctcactcgaagtgcggttggtcttttgtccatgaaacaaatgttgtgatgggtgtgaaagaggaggttccttccaatatatagatgaaaatcatgaacagctaggatttggtcagttcgttaagttcgatggtcccttttacaataatgatccgattttagatctaaataatgatgacaaagatgatttgatagtcgataaaactgtaaagatacattccttgagattggattgtgcaccaagcaactatggtgcagagtgacaatgaacacctcgtaatgaaaattaaaatacacttgaaactagtagtagtcgataaggcagatcagaagaacatgccccccataatgcaccataatgcaccattctcaacattctcgttatttgaagtttgtaccaagttcaaagctcttacgtggataaagaaaagtataataaaaaatcatgtgttaactacttcttacaaagtaaggaatcagggaagatacatcttggtaatttatacaaaaataaggaagaattgagataagtagtgggtaggcttgcacttaataacaatttttagtggatggtgaagaagtctgtcactgatgtactttacattacatgaaaggatccatattgcaaatagagattgtgggagaagaagaatatgcattctgaaaactttaaggttatcgtatttcacaataaacacacatgtaacttggatgttaaacattttgatcatcgtcaagcagcagcgtgagtggttggtgaccttattaagggaatgtacacccaagatggaactatgtacaaggataaagacataatgagggatatgtttgataattatgggatccagatgagttatgtgaagacgtggatgtgcagggagaagacacttacgtatactaggggtacgcaggtgttttcctattagaagctaccttggtacttatacatgctgcaatagaagaatctaggtaccattactggtctgtatgtagaggaggagtgattcaagtactgttttgtctcacttggtgcatgtagaagggggtttactttctcttgtcatgtgataagtatcgatgatacattcttgaagatgaagtatggtgacataatattagttattgtggcatacgatgcaaacaattatttctgattgcttttggaatagttgacaatgttaataataactcttggatatatttcttgtagaagttgagggaagcaattggcgtggttgagaacttagtgtttgtgtcagatatacatcaaatcataaaccatgttatagcacttgttttacctgaaacatgccactgggcatgttatcacgatattgttatgaacgtgcatgccaagttcaaaattgatgcatgtcataagcatatatggtttgtagcttactcgtggtcgaagactgattgtgatagacagtttgagaaacttagatagatagatcctgccattattgtatatgttgagattatagagtttgaaaaatgggtttgtccttattatttaggcgattgttacaacataacgaccaacagcgttgtcgaaagcttcaatagtgtgatagaagaattcataaaacatccaataactaatttggttgaatttatcaagtttgtattgcaaacttggttcgttaatcgccttaaaaaggcagacaaatatgcaattcctttaccgacccttttttgaaaatgatttggcaagataacataatgatgtgaggttcaaaagcctccaacgaaatagaatcattttgtttaacgttggtgggggtcctactaatgaaagaggatgttatgtgaacctagttgaaaggttatgaacatgcaatgtgtttacattgctgaaaattccttacactcatgcatgtgccgcggcattaaaaataaatgtgactgtgtgcgctctatgctctctgtattattcaaaagatacatggaggaagacttacgataatacaattaatcttgttggtgacgaggatgattggaagagcaaggttggaagatgacgagagaaacgtttcccttctggtgatataaaagtaatgcaatctcaaaattgtggcaattgtgacgtttcgggccacaatagagctacatgcaaagcctgtatttgaggcttagtctaatattacttgtaataatatgtattgtgaaccgtatttggtcatattgtttttttgttttctacataaaaaatcaagtggtaagcaggtggtatttttatttgctaaaaaatattatttttgccttatcgatgtatttttggtagttttttgacatgttcgcaaaataaaatttcttagtaacagggtacacaaacttattaaattatcgatattatgttaatagtttatcgacaggttctcaatgccatattgcttagtaataaagtttttatccttatcaatttatcgataatatgttgatactttattgatagattctcgatataatattatttagtaacatggttttctgtccttgatcaatttatcgataatatgtcgatgctttatagagagattctcgatacaatactgttgtcgagtgaatttcgcaacaccaaaaagtattatttaattgataaaaaagagaattatttgagaaatgataagtgcgagtattcaacctaaaatgg

SEQ ID NO: 80985 - DNA, 1024 bp, Cannabis sativa
actaatgtatataattaataactttatttaaccataataaatatacatggtagcatttgtgtgtgctgtttctttttctgtgaaaatattccatatatcaatgatgataagttcctttgcagtttgtttgctacatatatcatagacaaatatagcattatttgattagactaaaattattgtgcacacaattatggacttttttatttaaaaaaaataacaataaataaatattcaccatatattctctcacacttctttaaaaaatttgttaagaaaaagaaatggagctaaagagttattaatactttttgcacaggaatattgcactaaagaataattttgtataatcagcaaaaaaaaaaaaaaaaaagaagaaagaatacttttgtataatgagcaaaaaaaaaaaaggaataattttgtatacatgggacaaaacatgcagtttttactagtttaaacttcaaagaggcctttttagcggccaaatattctccaaaataaacttctattccctttctttatttacttttttattgtatatttatatataaaggtactctttctttatgtaagagcaccatttttgcaactactagagtattttttaagccattaatttttaatgcaatggataaaatatatttggttataatagaattgattgcatcagaatttggtataaaaagtaaaatatgtgattgtgtcataaataactggaaaaaaaggtgtatttcatttctcttttcttcctaccttccaaaaatttcttccattaaattctacaaatccagatttttttattatttattttatcttttgaagtttttatgatatcttaatcccatgctttcaaaacaactccatcttccttatcttttttgaaatgaaatcgtttattagaatcacagttagatctacctcaatgtcgttacaaaataagtgagttggaactaacaatacaggcaagctaccaaactgtttatggataaaagttcactttgtcatattatggacaata

SEQ ID NO: 80986 - DNA, 577 bp, Cannabis sativa
tttaacactatacatgtcgttcatattttttttttctttgaagaactttgctaaaagcagaattcgatacccagctttgttctacccacaaagagaaagtttggtctcatttccaagctataagggccagtttggcactttgataaaaatgtgtttgataaatagtaaaaataagatagcttatttacggagaagctacagttaaaagttaaaattagtacaaacttaatttttttttaaaaaaaaatattttgattaaaaaaatataataaaaaaaaaagaattaaaaatattatataaaataagtttttatacatttgtgattataataaactagattataatattatcactattattataatagatcttaacaactcattgaattcacattactttgaaatttataatttaccaaacactaagctcagtttttttccacaattcttttgcaactgatttttctcacagcacagtcacaactgcttttttccacagcacaaattatgccaaactgaccctaagttaattttccaatggattctcagctaaattattaaaaaaaatttagtgggtt

SEQ ID NO: 80987 - DNA, 1156 bp, Cannabis sativa
aagaaagaaaagactttttttttcttttttttcttttgtccttttgtcaaaatcattcaaaacttctctcataaattgacttcatttatttataagataaattttaaacactttcttttttaataagtaaaaaaataaataaataaacacttttttttacttttttttttctttatagagaagtatacctataattatttgaggtaaattagtgatatgaagtgatgttttagatttgtttttagaaattatatcttcaatagtactaaaagtttgtgtcactataatttcatattattttaacataattaaatgtctttatttttaactacatatttaaattagttaagtagcaatagcacccaatattactatgagatggcttcataagtagttagttaattattttttataatgattatttaattaaaatatgtaaaatcttattttaaagtatattaatagtaatataagacagatacattttgtgttaaatattagtgaagctttttattattataagtaaaaaagtgtttagtttctaatataaaaataactgtatctaattttaatattttaaaataaaaattacctagtttagttatgtagtgaaaattaatattaataaataatatgattatttatatttctattcattctataatacttagttgtatttatatatattattgcaaaattttacaacgcattttttaaaaagggtgtactgatgtatttttatctattttagcattcaggagaattttttagttatttttttttcttcattattgtgtatattgtaattacttaagacatctataaaatttcaagaaattccaaaaagaaaaaaaacaccttgaaaatagagtttaaatagtacgtagctcgtgtgaatctttacttttatatgcatatacaatagattgtttgaacattaatttttaaattttaaattaatctaaatttcttaaaattttataaaatattttaaataactataacgtacataattaaaaaaaataaactaaaaaacttttttaaattttaaaataattgaggatgtattaatgtgcctttttttgagttgcattgtagaactatattattttttatcttatgataaagaaataagaattttgtacctcataatatt

SEQ ID NO: 80988 - DNA, 1867 bp, Cannabis sativa
caggcttgactaacccttacaactcggaaattttcaccaaggtgttttcaaacctcttacaatagttttgcgctgccaaggactattaacctatttctcagattattgtagtgacaatctcactataaccatgttgtttacaataccggtgccaacctcacctctatcacaatataaaaatgtgtttgaaactacaagcaaaatcactctagatgtatgatgatacaatagaaacctagagtgataagcaagcacacttgaaatgaataaatataaattatggctcaaagtgtgtgaaaagtgtttgttggattttaaacttaggagctcattaatatcactttaataggttcgtgtatgatataaatgctcagccaactacaatttttgagtaaaaatcaagtttacatagtgttggggtgaaatgtacccgtttctagtcgttagcacgcatttctaggagaaatctatggtgaacaagaattttgaatgggaaccaaaattctggaatgattacaaccgaaattctggattccaatcaaaattttggatggcttacaatggcaaattttgcatttttttcaactaaaacgtgcataactttttactcgattacccgattttagaaattctaattttgttctcttagttaaatgaaatttgatttagaaagtcaatcaaaaaaatttttttgaaccatcaggttagaaaacttgtcgcaaaagttagtgagtgggcaaaaatttatacttattaaccctaaagtactatgcaaaacactttaacaagactaaagtaaatttgcaccatttgattgtgtgtagtcttgatgtagatgaacttcctagcttgatttgcatgttttgatcaaaagttgaattttccagagagttgactttgactttgacttttgggttgacttttgactttgagcttttgaagacctcttttgaataaggtcttgagttcttcattccttgatgaatctcttactcttattaactatgaggtagttgatatatttattgaatccacttcgggttactttgagaagtttggtaaaattactgttttgccttagaaaaatttattttaccttttgattgagctacaaaataaaaaaattattagtaacaaataataatcaaatattttttaatcaacaaaataagaagacctaaaagtttgagttaacagcggagccttatttatgatcaaaatcaccacatctaaactataaaatcaagtaattaaatagacacaacgatttgtagaggttcaacccccttgattagcgggtaataacctactctcctttttgttgtattcattcgagagataataccacacagattacaggctcttaccttgtaatttctagtgtgggtctctttgaatgtgatagggactttccaactctagctttgactattaaagtcttaaccgggtagcttatggctggtcagatacttggcctctcatatgacgcgcttgatgacaaagaatgacttttttgtcaatcattaaattttttttctttttttttttttttgttgcacacgttcccactagggaactattgatcttttgcatggccattttgtaggcagtgcaactgcccactaaattttaaagggaagagcatgccagaacctatataaggttcatttggccatccttcatttccacacttattatttcctctcactctcttcaaattctctttgagaaaaagaaaaaaaagatcttcatctcccttggcaacctgacgcccccaaggtccccaactctaagaattcttgcttcactttaacgagctaactgtcccacaagcatcctcagtggacttcatgttgggttttgtgcc

SEQ ID NO: 80989 - DNA, 1615 bp, Cannabis sativa
tgaccttactcaatcaatggttctcaccacctgatgttgatcgaattgtaaccattcctttgagttttttccgtaaagatgacatccttatctggcatcacaactattcgggtgcatacacagctcaaacagggtaccatttggctgcctctcttgaagatagtgacaacagctcgtgttcttcatcaactgcttcatggtggaaattcctatggtcgctgaatttgcctcagaaaatcaagatcttcatttggcgggtctacaatgatgcccttcctgttgctacagctcttgttaaaagaaaggtaatcacggaatccacctgttcaatatgtcatcaagcttgggaatccattggacatgccctctttgtttgtaattatgctaaattggtttggaggcactctaattttactcttgactggaacaactccatgacaatgcgcaaaggcgattatatggttcacttggctgcaatattctcaaaacttgagatggaaaatattttttgtgtcatgtggtcaatttggactgagagaaacaaaattgttcacggaaatagagctaaaacagccaaggatcttgcttttttttgcattgaattactggcagaattaccacaatacacaacataaatttcgtccagatctaactctcacagcaaatcacccttaaacaccagctactgcccacattgctcatgctgcatctgcaattgccaatatcccgtggacacctccaacacctggatcactcaagatgaacgtcgatgctgctgtcgactaacaggaaaatcactggtgttggtgctctaattcgagactcaaatggtcatgtagcagctaccttatccaaaccagtgattggatgtttcgaatctcatgaaatggaggcacttgctatgtttcatagcttaacttgggcactacaactccaactgccgatctctcaaattgaaacggatgctcttcgggtagctaatgctttatgcaaaccttcatctgcaatctcttcttttcaagatttgattgttgatatttctagtcttttgtcgtttttccctaatgtgaatgtttctcatgtcaaacgttcagcaaatatgacagctgatagtttggctaagtttgcgttaggggtggatgagacttgttttcggttggattgtttacctccgcctataaactctattattctaaatgactttcatatttaatttataataagtttattttctcaaaaccaaaaaaaaaataaaaacagaatatttcattatttaacaaaatattcttattaaatttttaaataaattacttcttatttatttagtaaaaaaataactcatgtttaatttgctaatcataattatcattcgctccctccctatcaattctctaccaactcttttgatgaaatcacattcatcatgagactcatgggtgcaatatatacacacacaaatattttatcacagttataatcgtaaacattagtttttttttttgttttttttttttacaattagaattcgaccactactcattttttgcatggtgatgtgatctcaaaggccattctcaagacacgcttcaaatattgagttataattggttaggta

SEQ ID NO: 80990 - DNA, 957 bp, Cannabis sativa
agacataggcgtgtagaggtatttaggtaataaattgtgcaaaatggatttttcatgtaaaaatttcaaataaatatagggtataaaaaaatctctgtgttttttatataagtaaataaatcctatttagattggttaattattttttttaataagaaaagatgggttgaaaagttggaaaaaatatagttaggcacgacataatggcgggttgttataaataatgaatattattttaataaaacttattaaaaattagcatatgatatggatatggtaaatgattttagaattattaatattaattagtttgaccaaatagcctacattatatttatattgcaacaagaaacatctgcttttttttttctcgctgttcaaattggcaaatcgtacccatgccctaaagctaaaaggaaatactatttaaaataaatataatattattacagtctaagagatatgtataaaacattagtgcctcatttaatgtctttggatattttatgtaataataataataaaataaataaatatatatatagctattttaattgtatgttggtactgtttggaaacatgggcaatgaaaatatatcctctggtagcgctagctactaattaagatttcattacttgtgaggtgatatcataatctcataaattattcgttatgtatagttattctcttcgtttttattttaaatttttgtcgagtaagagagatcgaatatattgttaattaattaaagaataatttaatatttttggtcttcaattttttacactattatatattatattctttatagtatcttaattattaataatatattttttaaaatataacatttacagtaatataattttttttatcacattttattcaattttatcgtaaaataagtaaactatgaagtaaatgatagttcataaaatggatataaattaaatatt

SEQ ID NO: 80991 - DNA, 930 bp, Cannabis sativa
  modified_base (38)..(62): a, c, t, g, unknown or other
ttaacgggagatcaaacctaatcgttaaatttaacagnnnnnnnnnnnnnnnnnnnnnnnnntctgttaaaccaagaaatgccgtatatatatgaaatgcaaaccacgtcattatcactattgatcaaatgagtgtgttaaattgttaatatgttatagattatataatatgtatatataattatatatataaatactttttaataaaaagagaaagaaaaaatcaaattgtctataattaatatatttttgtaaaataaaaattgataataataatatatatatttaattattgtgtattgtctttgtatatatatgataataatatattgtgtaattgcattattttgtagttttctttgttaaaaaagttatacatatttttacaaaaaagcatagccctcccaacccacccgaatttgatccacccgggcctaaaaccaaaaaaaacctatttttcataagagcgggttcggtcccaagatttcaaaaccctaacgtagaaaattcaaaaactcatttgatgtgaaaactactaaattatgcctataaccatgtacattgatatcttttggtggggtcccatgagtatcttactaattttatgccttggactaatatttttaatatttttagataaaataaatataactcaattctatcatatatttttcatatataaaatttaatttaaatttatatatacttttaaatagatttaaatatatatatttagatacaatatgtcgctgatttaagtattgtgactaaaaatatatttaaaataaattgtaatttttgtgactaatacctttagttatagacacattttagccacaacataaaaataataattaataatttataattatttttatataatcataaattttattaggactaaaaataaaattttttgtggtgaatatt

SEQ ID NO: 80992 - DNA, 1357 bp, Cannabis sativa
gcagatatgtgaagtcgattccacgtgtcaccagcatgcgatgccacgtcagagtgccaaatttgggataacaacatggaaatttagctccttggtttcaatcgttggaggctcactaatgtctacggcgaacccaatcgctccctttgccattcgacctggaatctcctttgtactctcgctaatgaatcggacctcccatgatgtgtcattggtgatttcaacaacatcaccactcatgaaggcaagaaaggaggatggccgtaccccaattcacttattaatggcttcaattcggccctccatgattgtcaattatgtgaacttgacctccatggctaccaatttacatgaaagcgtggaagagggagcaacaaccatattgaaataaggttagacaaagcttttgtaactcaatcatggtttttgtttatttctgaagcttctctgtccaacttcaacttctcttcatctaatcacacccccatttttctcgaaccattacctggtgctagccccagttttatcaagcttttgcgttatgaaaatgcatggtcacgcgagcctctttgtagttaaattgtgaggagctgctaggtttcgaatgggagtctttctcttgctgagaaaacacatatgtgcatctctaagcttagtgaatggggtcagagttaactggaaacttcaaacagagattgactaggaacaagaggaaaatggcagatcttatacaaatagatactcctacttcggctcaggatttttcaaagcgagcattgtacttattttgagattttagctcaacaagaacttcactagaaacaacgatcgaaataattctggctacactcggggacaagaatagcaagtatttccatgccactgctagtacacataaacgccataaccagattgtccaactgtaaaactccaatggtgaatggaaagactggaattcgggccttgatcaggtaatcaccgattactttaattctctttatgctactgattttgcgatctgtggttcaatggttaatggcatccgtcgctctgttactgttgaacaaaatgatgctttactgttgccagtcacacctaaagaaattaaacaagcacttttccaaatgcacccggatgtagctccggggcctaacggaatgggacctggtttttataaacaacattgggacactgtatgacccgatattgtgcaacttgtcactgatttttttggtttcgaattcttaccacttggtctaaacgacacacatctggttctaattctgaaaaagaagtagttttctacaatgggtgacttgcaacccatcgctctttgcaatgtctcgtataaaattct

SEQ ID NO: 80993 - DNA, 1446 bp, Cannabis sativa
acccaaatcattttaataattttaatattataacattatatataaataaatgaaatattttttccttttcttttttagttatcatattttcatttttaaattaataaataaaaaaacaaaaccgtaactacaaatctacctctctcttatgctcttcactttctctctaatagaacagttgacgctgctgcctcccatcaccggtgacgaaccgaatgtcgtccacccaagacccgctcaaccccctaaataacaaagatgaagactccatcttcgcaaccgtgaacccagacgcaaaaaagattcgcaagagagtaaagggggtttggggaagcgatgatggggtttcgagtgccggagagactgtcagtggcctctgcttggctcaccaaggtcgagaaacggccattcacatcgttctgagattttatttttatttagttttttcttttgagattttgatttggtttttgttattgattcagatacaaaactatggtatggtatggtgtggtggtgaatttttttattttatttggatttatttttgatgttatggtggtggtaatagtgcatatgctggtagtagtaatagtggtgattataatggtggtgaagtagtagtgatggtggtgatggtggcaatggtgaggtagtagtggtagtgatgatgatttgggagaagaagaaggacgagaggagcagatgatggatggtggagaagatggaaaaaaacagggaaaaatattaaagtaaagaaaaggaaaaaaaaaattacagaaaagaaaaggaaataaagattattaaagttttaatattttagtattttttttttataatttattaaatttattttatagttttccatgtggatattaaatttcccatgtaagacaattcggtgactaagactgacatgttggcatttaacagggtaaaatggacggaatagtgaatttacaaacgaaatgacacttaggtggcgtttagttgggaggaatgaaaacataagaatatgaatgagaatagaaataagaacggaatggaatcaaatttaaaatgcataaaaaaaagtgataaaaacattattaaattttttttcatcttgcattaaaatggtcattcattccatttcaaaatgaaatagtcattccaccaaatgatggaaaagtcattccaatactttaaactgcaaccaaacaaatgaatataatgaaaaatattttctttcctttccattccattttacctccatcccaacgccaccttataaggattttcccacccaaaaaaaaaaaaataggggttcaatgtctaacaattgaaacatacagggtttggtcacaaatttctctaatatatatacaaaaaaaaagaggggatcagcgtcagctacccccaatgtaggtctgcccatgtgtgtagacacacacacatatatatata

SEQ ID NO: 80994 - DNA, 1660 bp, Cannabis sativa
ttccgctattccttaatcctattctcatgaattaattagggctatatacagatttacagtatttttaacataccattcctacatgcaacataaaaagacgttaatggagatttcataataagcgctttgatagtatgtatgacccttgtagtaatgagtaaataagaaatgactcgaatgcaaatcaaattaccactacaagaaatgtcacttttgccagcacattcttatgccagcaaaagtttggtattgcgctggtaaaatggaatttacttctaatgtgttggcaaaaggggttggcaaattaacgttggtattagaacttttgctagcacaaaatgaaaatcgttggcgaaaatgactttttccaccgcgtaagtgcgctagtaaaagttagattttagccactgtaaatatgcgctgataaaactttgatttttgtgagcgcagtttgcgaaatgcgctgaaaagttacttttaccagtgcagtagcgaacagtacttgtaaaagtgacttttttgtagtgtactttaaccaaattaaaacattcaaaaagtatgtattaattaatatattatatataagttatttttaattaataatagactaagaattattcaaaaagtattgtatcatacttattgtaaatttcaaatttatatttccaaatatttctgatgtattttgaatttaagtttattagaatatcttaaatgtgtattagaaacttacaataataaaaaaaatataattaaaatattaattacaaatgaataatagaatacttataaatcaaaattggatttataaatataaatattaattaaaataaaaataacacgaaccttatgccttctgtactttattatgaaaaaattgaaataattagttttgtgtatatatatatttattaggttaatgttacgtgcaatgtacgcataattaattaattttctttttaattaggtttaattaagtgatattaagtgtaatacatgtatgttcaatttttttaattagataatgtatttttattttttaatttttgaaatagaatttgagattttgatatttgataaattattttagctattgcgtctatattgtactctttagatgtgattatatatgtatataaaagtaaaagaatgagtttcattgttatttttatatttattttatattgatctctctataaatagggattatattagaaaatattttgataaaatttgagtttaattagagaattaattactttcaaaatacattttatatattatgtctaaacatatatatttttttttaaaaaaaataatgatagtgatagatacaatattcttaatttgtagttaggagattatagttataagaaagtgtacaaattattagaagcatatatatattattaattatttttaaaataaatgttatcgtgaaattaaagtttaaatatatatatatattatatatataaatgcaatatttatttttaaatatatatataatttaataaattttttcatataaaatatttatataatttttatttttaaatatatataataatatttataaaaactattttgttagaaataaaataagttagattaaaaattttagttaaactaaaaattctttttatatagtttttttttt

SEQ ID NO: 80995 - DNA, 520 bp, Cannabis sativa
gtattcatagagatttggttgctggaatctcttttctgggtatggattttttggtttaaagctaggattaatggctggatataggtccagccactcaatgtcactttttcttcggcctgaaagtttcgaaaggaacttcctcaatgtgtcagcttgtttgtccatcggcttcttaacttcagaattgccttgctctatttccttacaatctctattaagttggtcatttttgggagcattcttcattgagttctttactacatttgcccaactttgtttttttgttgcattcctcaccactttttcattcacatattgccttggagatacctgttggctctcagattttcttcccataactccattgagacaccgcataaagtcactccatcctttagctgattcctcctctgggatgattactgcctttatcttgttatttctcagcaccgatagtttgagaaactccccttttctgtttgaaaaacattccaaaaaatagctagctgtgctgttccta

SEQ ID NO: 80996 - DNA, 1342 bp, Cannabis sativa
attcccaaacccaaaagttcaaaattataagaggtacctagaaatctttagaatctcatgaatgggtgaaaatgaacgattttaggtcaacatcgatacccaattagataatcaagttataatcgagtcttagttaaggtttcaagccctaatttcatctattccatgatcagtaagaaacaactcaagaacttgataaagttgcattaagaaatctagaaaaaattcgtacattcaatagtaattgtataaagtaatggaaagtaactcactgtttggagcttttttgatatgctcggaaggaaacatcaatggattctctagcaacttcttcaaagatttgagagacaaatacgaagaaaattgtatctttgattctatgataatgaaaatggctaaaaaggttcccacgaaggattgaactccttttataggtggctaaaacaggaaattaattcagccaaaatttgaaatttgggtttcgcccccaaaagtgtacattaaagtactcattgtgaatgacagacttcacgcatgctgtaccccttaaccgtcagtgcgttacttgaggtaaagctttcaagaggcatttaattccctagacactaaagagactctcaatcaagtcatgtcggatcaacttaaacaaccaggacacgcgtcacccatccggatagcttcctagccaagtgaagttcacatgcaaccaagaaggtcccgcgttgacttggggaaaaatattatccgaatttttgaattatgatgtggtacccaactagatgacacgtatcttatattcctcaatctaggcggatggcttaactccagcagcccgtaaagattgatatgaagatccatgtcagaggtacatagtaggatgtccgagcaaagtcattggtggacatccaaccaaatcaaccgcgtgatcaactagcatgcactaaacaacaaatgtttgttggcaattctagcagtgatgatgttatctcaaaacttgcatgttatgaagcaatccctatttttatgggattaattcgtacattcagagaataaaagcaattaacctagatttgtccaatttattcattgtaattatagattaagggaaaccattcctatgtaattagcccgtataaatagtggcctcatctcattattcagggataccaaatttatcagagagaacaataaatagagaaatgatgatgcaagagcaaattactcaaagatcttttacgagagttttcgagaaggaatacttcattctttgtctcataagttaatacaactgaaatggaagtaggctattaccactatcatagggacgaacctctataaatcc

SEQ ID NO: 80997 - DNA, 1718 bp, Cannabis sativa
cccacttctctcagcatcttcctcttctcctcacgcgcggtgaggaatctcctaatcttcccccagtttcctcgacttcgatatcaggggcatgcctagagtgaacaaggtgttcatgggcggacaccgtggattcgctatcacgaatctcgattgtccctagttcaacgagttcttgaaccattctttctacgtcttcggagagcaaagcaggtataaaactatcttctttatcctgctcgtcaacaaaagcaccaccgcctcagtcgagcatttggctatccgacaggtcgctcatctgaaagatagaagatatttttagtgtggtgatagtgcgaaaaaaaagtaaagtgacctcacccgcataaaaaatactactaaaagcataaaggatgacctagcctctcaagaaatggctgggtgtatcctagtagcctaatgatcatgttgttacataaaaattaaggtataggagcacacccaccatttcgagaacttacgcaatcttctcagattgtaaatcgcatatgtgtgacggatagggtgcctcaaaaaatggctaggggtttcacagtgacccaatgggcatgcgttcttgagcatgaccatggagttattgggaaacacccaacatttcgaaaacctgaccaattacaacatgcgattacatcgtgcatatataactagcggcgtatctctagaagtagctgtggagtctctagtgtcttaaggaacatgcatttctcgcataacaattgggtcaatggaaaatcctcactatttcaagaaaaccaactagttaaaacatgcgattaagcaggaaaagagaaaattggccatatgtcgcaaatggctgggtgtatcgcaataactcaaggaacatacgatcgcacggacgaacattaattaacgacaacacacccaccattcgaatgacctagccagtatttccaacaaaagcatatacaaaacataaggcaaaccctaagttctaaacacgggttgggatgactaaatccccagattccctaagtatacacatgcgagtattcaagatgttcatcgcaatattcgcgagtattcaaaacagcaagcaaaaaagatgcaaatactcgaagtgttcctcctaaaactcacaattatgcaactttttggcctattttctcctggggatcacctagtttttagcagaaaaaaagtaaggctctatgtgtattccctacgatgagatacattctttactccttaaaatttaaaatggagattgtttctcaaaatccgaagaaaaattcacaagttgtttcgaaaactaaccttcagatttgtcgattcttcttttgatcggtttcgattgcctctaaaatttagaaaagtttgagtttcaggagagaggaggatagaaatttagaaatgggtttttgaatctttgaaattacagagagaaaggggaagaggacaatggaaatgagagggaaaatatgaaatgggttcatattaggaggcttaaataccattatcccacattaattaggattatgacacttggaaaaatgaatgcctaaggtcatcccatctaacggttatccatgggcacgcctacacgaaatccgaagagtttcgtaatttggcagcttaaataggatgaaatgtaataattacgaccgtcattttttgaaaccctcgatgggacaaccaaaggtcaccacctcgtgacatct

SEQ ID NO: 80998 - DNA, 1346 bp, Cannabis sativa
ttatctattatcacttgtgatggtattttaataatgatgagggggcggaggagtttgcagtttcagagatccgaacagcggagatcgtggccgcggagacggcggaggaagagaggcagggctgccacgtgggcagtcagctccagcggcgttgcagttaaccgggaacttgtagaaagcagcacattgctccctcgaacgctgcgaaggcctagaaggaagacagtttcccccgtcacctttactgggcaacttcaggcaagttcccggctcggaggagaagaagttgccggagtaggtgaagttttccaatttgggcaaggcacaaatactcggaggaatatgcccagaaagcttgttgtgagccacgtccagttgctctaagtttttcaacttccccatcgattcaggcaacgagccgactaactggttatagctaacgtcgaacacagtcagtttttcgaacataccaatatctgtgggcaaacagcctttaagaccgctgttagtgatgattaactcggtaagggtattcttcatttgtgccaaactcaaaggaaaacaactgttgagattgttattagctaaaactataaccgaaacaggggatgtccctatgttttggggcaaattagaagtgaacttgttgttgtttataaacagagcatctagtttcaagtcgaataagcgagagggaatgttgccatcgaagaagttgaatctcatgtccaagtatctgagtgaagggatggatagaacaacagttgggaatttcccagacaatctgttgttacttacatcgagctcgtaaaggagtttgagatttgaaaagctttttgggatacttccatagaaacgattggagttgatgtggaacagagctaagtcagttaactcaccgagctgttcgggtaatgggccttcaatgttgccatggttaaggtctataccggccactgtggtggtgttgaggggatcatttggtgtgggtgcacagtacactccggtgtagctgcacacatcgaaaccccaccagtcatcggtgagtttatttgggtctgaggtgatttgagctttccaaatttggagaactccgaatgcgttaatgattttttcgtttggcggccagttggattgttggtgagatggtttggagaaaattatgatggagaaaattacaaaaatggctaatgtgaaatgcgagttcttcatttttttttttttttgagagagattgatatttgattgatgttgtgggagaaatgagctgacatgttgagatttatataaacgataaaattttgaggtttttggataatgcaaagttatgctaatttgttttctgc

SEQ ID NO: 80999 - DNA, 1388 bp, Cannabis sativa
aaattttctagactaattttttttcctacggaaaactttggagaattggagttgtttcatatcgagaccacatatatatatttatataaataataatgataatttaagactagtgatgggttgaatcatatatttaataaccatttccaaaaacaaaaaaatttctgattttttttttttgttttaatttgggagaaaattcaacatcataataattttaatttataggaccatccatcacttattctgaacacgcgtgctacaaaagccgaaaacaccaaatagtaaaagattgagagttgagacacataagtttcacttttttcttttgttcttcttgttgagatattagttgaaaagttggttcaattcttacatggtagcatttgtaattatgaacaagacaaaaccaaaaaaaaaagtattttgaagccaaaattggattttggaattttctttcaaacatgggaataaaagtctgtagtggaaggaatgaaaatcctgtagtaatatatatatatatatacatatatatatatatttttgcataaagatttttttttttttttttgtttattaaagactctatatacatttatagttacacaaattgggataccccaaaccaaaccctcccaacatgagttagcacatgagctagcttcaagtaattgtagttaaaagaactattaagtaactatgtatatatatatattttatatgtatatattttatgtcattgcttgaaatttaatcttttatgaggattagaattattgacccaaataaaaaaagaaaaataccagtaaagacttccctatggccacatggttttgagggttttatttattactatttgatttaatatttcatatgaagtagtctgactctgacctaactagctaccacatataccagctgaaaattaatgaatatggtgtgtatatcttggcgcattttagcttggatagagcttcagtgctaaaatgcgcatctgtaaacatgtacaatacaagacaaggatatttgagaagatagaatggcttcataattaattccatatagttgttctatcagatattaccacgtgtggaagagaatcaacacgtgcgacaggattcgataatatcacagtaaaaggtcagtttaattcttaagttataaacagtactaaattatataatttagtgattaattttgctaatcattatatatatgctttaaaaaaaaacaaacttgggttttgcttcttttaaataattaattatatctatacataatatgtatgcaaatatatataaatatatatagtactgacctccattgagccaaagaagaagaggttttcgatgaggagaggaagtagcttgagtaagccaatagaagag

SEQ ID NO: 81000 - DNA, 2698 bp, Cannabis sativa
  modified_base (825)..(827): a, c, t, g, unknown or other
ttgctattgcagtgctattcatactgattttcgacttttggatcgcaaaagtaggaaccaggctgaacaataacgtaaattgttcaaggtatcacattgctctctccacttttatgttttattaatattgaatctttgttcagcgctgaatttgataatcatttcttttggaagttttacaaaacatacataacctttcttctcaaaaaatgtgcttgcaatagttgagttttttcgttgtggtagcatatcaaacaagttctttgaatcgagtaaagtgagccttcgaaatcagtctcctattcttttggcattagtttgtgaatttatattgatcttccatttttggtcattgtgtgatttgagattggaggagcatgtgatgaatgagagaacaagtctatttttcacagcttgttagttaataagtttccgaatacaccacccattttgttcctaactatgtttcaaatatgacaacaaacttttcatgaatttgaagagaacttattgcttatttggttgttttctcttgtagaaattctatcatcatttttaaggtatcaaattattctaaaatcacagttttgtaagttttatttttgattaattatattttcatcatttttaataggtacaatgagcaatccaataaatcatctcaacaatcggtaagattttatgattgataactaattgatatgatatgagacatactttattattctttgaggtatattgcttacttttgtggttgaattacattttatgtctatgtacttattgtttagattttgaatttttggagatttttttttttttttnnnttttatttttttttttaaattatgttgatttgttttctagaacagataaaaatactaaccaaattagtttacatattttggattcccaccttctaatcagaacatcattgagtttcttgccatcaaaaatcatctcaatatgccatctccaaagggtttaacgcactaataggaggacacacatacaaaatcaagacaaggaaactttacaatcaaaagcactaatattaagtgctacaagtattttataaacttcaagtcaatgattattttactcattcaaaaacagagaagaagttgtcacaaaattaaacacttaaatcaaaacatagaataattcacgctccctacatcatcatcaaacacaatccagatttctcttctccatcaaatgcgtttggaatgatcatggtgtttagtggttcttccttaaagattaggctgaacaatagtgtataagcagaagcaacatctaacacagctggaagcatttctctatttgaaacttacctagctacacttttgtagacgcaacaacagccccttctcttctcacttcatttctacaacaacaacatcaaacaaatgacattttaaatataaactggctctcagttataggcacatagatgaaagttccatttgatagtctttatgtaattgatcagcttatagccattagtcccttctttcattgaaagcaaaggaaaatataatataagaatttgctttatgttatttatagtttaagagctaaacattatttggccaaggaaggtgtttttagaccactaactgtttgctaatttctacatctagcgtggttacaaagtttgggcagattggaaaaaagattgtcttaaaattgcaggacgaattatgaaagattttaagacaaattacatccgacgtcataatgcctttggccaaagagaatatggtgaaggagctcgctattccccaaaaaaccatcttgaaattgatcaacaagattgggtaaaatttgttgcgagtcgtctaacacttgagcgtctggtacgtacatgtatattcaatacatttatataattagcttggatatatgagccttaatagtatttaacttacacattcttattgtaggctttgagaaaggcacaatctgaaggagctcgccagaatacattaaggcaccacgcaattcgtagaggcatggtgactctccgaaaggatgtggtaatgaattacatacttgtttctatttagtttaattgtttacaatgacttcatcaataatatctttaattgtgttcttttataaatagagcctttgatttcaatcatgtaaaagtaagtagcaatatgattttgttgttgactaaggaatcctaacccttttttctaaagggtgtctttgacaagtttgttttatatgccatattcattttcagagagcaccatctgaagcaaaaaacacttctgcaacaataagaaaatatttgtatatactatattcatgtgaagaatgtgagaagtttattgaatctttttaaggatttatctagacaaggactaattaggacgtaacatggttttagcactggacaagatttagctaatgaagttaattgagctagtaatttttgttgaaatttcattgctgcaacattgtttgctgatataagcatttctgtaagcctttggtgtatattgattgaaattttctatacacgaacaaaaggaggccattgagtttatcttacatagtattatttcacttatttcagtatgttgtaaaactagtaaaatttacaaccacaaaaggttacatttgctgcactttatattattactatatactatgtgttttgttaggccttaggataaataaa

SEQ ID NO: 81001 - DNA, 2575 bp, Cannabis sativa
tacaatatcttattttagaatgacaaatatgttgttatatatgtttattgcatatgatgaaagtgaatagaaagtattaggataagaaaaaagaaccgtggagatggatggcaatgctgtagctttgttcatctctttgccaagcgcaataaggctcgaaatccacgtacgtatcagctatggtggctgctgttgttgtttccatttggccttcctcttcacctcttttattcctttgtaattgtatgatcaaattttatgggaattactcttgttcttgtacaatatagaataatatatatttatagtatttggttggttggttggcttgaagtggaggttacttacttttcttggttgtgtttgttagatgagaattattcctctttggcttgatatacaggatatgagatgagagagaaggatatactttctccctctagggagtctttcttatggcaattgcaaatacagtattgatgatatttgatattatttgtttgaggttattctttttgtgaatttagtctctcaaatgtaataatattcttgccctcctcaacagttgctcacacacatgaagaaactagctttgaaattattgataattaacttgatataactatttgtgtgattctttcttactacttcacttactataaaaataccgatttagtccccaaaatattaaaaagaacccttaagggagagagtggaagagataagtggaatccattgtttgaaaaaaaaggaaggagatgagagttggaggaagcctttcgtggacattgtaataaatggtagagaattgaaccatatataagaaggctactccactcattaccaattgagaacctcatattactcaacatggtattaaagtcatatcccttgcaggcaagtgatcctatccgatccatatataagaacatggatttcctcatgattctcaacaatcctccaaatctcaaaaatctgatcctcccacattttgaaagaatttaagaagacaaaatagatataccaaatatcaaattattcttaaaaaaataataaatatttatattaaaaaaaatattatggtaattttaataactaatttcctctccatcctttcaaatacaacacaaaagagaattactatcctctccatccttcttaactctccctccatgttactctccatccatcctactctccctcattcctcccaaacattccctaagagttgtttatattaccaatggccaaatcaactgaaaatttaaaaattgtacacagatttctcttgagataatcatgtttgagaaaaaggtgctttcatacttcaaaaatggtaagattttctcattgaaaaaggaaaaagaaagatcctaaatgataatatccccataatgaaaaagagtccaaatttttcaaatacaaagtagtgttgttatgtacacattcatacgtggactggagattcagagagtatattcacagctaagaacagctgcaatatttcatcttttatttttgtgtgaaatattaacttgcacacatcaaagagaacattcccactccattttcattaagactgattcaaaagaagagcactgaatttataattagtgtaaaactcgaagttgcacaaaaccaatgagttacattcggaatctgaactctgtctctcaacggtacacaatcaagcaacaccgtttacttaaatgtgaaaaagaagatatccaaaaatgggattttggaacacttgaagagccttggctactaaaatctgagaaactatgtttaactatcactacaactatgtttcaagactctaacctcttgagagcggttttatctaccacctcctttccctaacacacgggcataagcacgacacgaagagaagaaatactcaccacctgttgttaggaggtttgactttataaatacgaacaatccaattagatgttgtgaatgcctcttccaagtgttctagtttaatatccttatttccaatttcaacccctcttgcacgatcatacctgttagcacccaaaaacatgaaggaaacaaacagtagtaagttaatatggatattccgtagataatataacatgggaccaggctaactgagaaatagagacaatgggaactggaaggtagagttcttaaagagtttagtttgagaatctttagcattactttttgcttttatagaaaagaaaaggtgaaaagtaatgcaacaagtttgggtatccttaaaactgagacggcataaatgtccttgagttcatgtcccatgtaaaagaaatatgctttaacactgttatcacacactttagatgaaacacaatgtgtgaaatgagagcatacatcatatatgattactaccacatttttacaaaataaattcaagataatgagcttacccagggggttttccatattctgtcgtcagctctccaaaccggtagtatgataatttgtacctaataaccacacacaaagaggaaaagaacagattatcattgtgtatttgtacctaaaaccataaacagaatttttatctttgtgtatttgaatgtga

SEQ ID NO: 81002 - DNA, 1141 bp, Cannabis sativa
ctctctctctctctcttcaaattcctcttaagaaaaaggaaaaaggaagctcttcatcttccttaggaacccgacacccccaagtctctaaatcccaagatttttgctcgttttgactatccaagctttccacaagcatccgcaacggacttcattagtgggtaagctttaaaatctcgctcactacttgttttcttgaattcttcattgtttttttcaagctttctacattcttaattctcacattagattgtaatcttttttgcattatgatctgcatgatagctttaagatgcataatgtatgatttcttgaagaaaaatatttgatttttagctttgttttgattcttcactttttgagtcacgaaaaactcgttcgagtctttaaaaaatatatatttttgatccattacacaccctggccagcctataaggtcatgtttgtgacctggccagcacattgtgccatctatggaggttggccgattctagggtttaacctagaaccttggctggttcttgcatgggttagggaccctggtcggcacacaacaataccttgggaccctggccggcagatcgcttcagtcccgaggaaatgaccaactttttttcctcttttgactctagcaagaactttattatggccttatgagcttgttcaacccttgtccaatatttgattcccttaggaattctatatggcacttcttagggcgagtatattgtagtcaagtaatcaacttaagactcaacgttcatctaggttcttgtacttggaatttgtactttgctgatcccgcgtgacttttggggaggtgacaattgaatagaggaagatttgctcagtcttctctttgaagaccactttccagctggttctttgagtagctcctcaagtgatctcaaggtcagtagtggttccctagagcttgaggtccagcatcaccactattcagagcgaataggcgatgaattttacgccctatttgtctaggagttgaaccaagggtggaggtagttcctccctagttcgtggacttatattttccaggatggtgtgcctgacacattgcccactagtcgggaaactccatcaatgagagatcttcctatcgcaaagattgcagttactattg

SEQ ID NO: 81003 - DNA, 1272 bp, Cannabis sativa
ttcaaatttgtttgataaacttttaacaatataataactatattatactaaattaatatttcaaataaaacatagataaattaattattttctcatcatgacttagaatttgagttcataatactatgtttttttttttattattatatatgggttaagacttgatagctgaccaattatttactcataacttaaattactaattatttattttattttatttttttatgtatacatatactaaaaaaagagaggctatagtggtgtactgtcaagtgtaataaaggaaaggaaaaggaatataaagttttgggggaaagatgtatataataaataatacaattgattaatttaaaatatacaaggccatgtgttagattcttggctatgcctagctagctaggttatattatatatatgatccagctttaaacagtataagaattaagaatagtattcacatttatatatgtttttccctcatcaaaaaattccaccctttaattaatttccttctactataagttgctctctagattcactttattataactcacatttcaatttgctctcttacacatttaaagatgaacattgatattttagtgccaactagcgttttataattaattagcgatattttttaaaaattattgtttaaaattatatgatatctaagaacatctctactaaaagagtgctaaagaagtagtatattattaattatattttagcacacttaagaaaaatactattccaataatattctaaaaagtaaattaaatttggcacatgctaaaaattgtattaaatttagcataagatatagcattgtgttaaatttaacctacaataaattttatttttttatttactatattgtcactaataattataatttattgacttttacataattttatcttctttatttactatattactattatttaagcaaataaaaaaataaaaaataataatatttatatattttcaataaaatattaaacgataatcaataataataatttttttttatatatttacattgtaagctatatatataaatttattttttatatcatgatttagcataaattttatatcttgtatttaaaataatctaatatacctaattatataatggtataacactgaagaaaatactaaatctggtaacttttaacctttctctgcaaagattgatctttttttttttgaaaaatacgtttataaataaaattgaaattaaacttcatggtcattacaaaa

SEQ ID NO: 81004 - DNA, 1738 bp, Cannabis sativa
caaatcaaccatagattcaacacacttctttttttttttgcttagttatattgtttaatagatgttttttttcttatctttttttttttaaaaaaaagaactatttaattaatttaaattaaaaaatatttatataattttttaataaatatcacccctagaaaacacaaacatattataaatgactatttgttggtgtagtttttttcactaattttgtgcaatgaggagaatttattacttaatgattcatactaaatatgacacaaaataaaaatatgataccaaataaaataattttgtttaaaaaatatcactttttatattatttacattaataaggaataatagctaatttatatataattatacatattatgaacaactaatttattatttttaaacaaattaaaatgaatagaaggaaaggtaaagattatacaccaaaatggcataaattcaaaaaccctttaattttttttagaagaacatcaagtttattaaactaagaaacatagatgagaattagagagagaattccctctccttaaaacacaccagacacatggctagaaactctagctttctttgctagtccatttgcaaaagtattcaaacaacgcttaataaagaaaaaattacaatctgaaagtttattaactaaatctaaaaccaacaaagataagttcaaaaaaccccaatcaaggggacatttcttctggtccaacgccctgagcacttcttgacaatctgagagaatatagattttactccaagagttttgaatagtccactcaagagcacattggattgcacgagtctccgcctccattgtcgactctgctctgacttgttgagtactgtaagcccaagaattgtttgccaaattaatcatgaccaccgctagtccagcagtgtcatcaaaccaggacacatcagtaaggaaaacaaagtcaaccttgtccctgtacattccctgctcttcaacaaaactcaacccttcacagttgttttgatcttctccaaaggaagagaagttcgaataagaggttaaaatctttccaacaatagcttctgattttgctggtgtgctttggaacttgaaaatatttctttgttgacatgcctcttgaaataaacatccctcataaattaaaaacttatgtctattgatacctatcatcaaggaaagtttccacaaaatgaatcactgagtttctcaggatgtgctcagccaaacacggaaacactccagcaaaccatactgccttcacaaaggcacagtcacgaaaaagatgaagatagctttcttcatggtttgcacaaaaactgcagtctttatctacaataaatggcaatctagagttagtaggaagagtctcattccaaactctccacaacattactgcaattcttggatgaatttcaagactccatatctatttccaaatctcttttttagggcccaagctcttggtcaatttggtaagcatatttgatagagaataccccattcttcctatcttttgaaataagttgattagtatggggaagagatattctagtaatagaaataatttttctcccaagagacttcccaaaaatctacaaatacaccgattcagttcctcccatttccacctaccaaaatggtcaaagaaaggtcagtcaacataatgcctagcattctcaacaagaggattgaaagccgctctatattctagctcaaccatggaat

SEQ ID NO: 81005 - DNA, 3740 bp, Cannabis sativa
  modified_base (3687)..(3699): a, c, t, g, unknown or other
ttctaagaagattgtgtcttttactagaatttactcattaacggctcagtgtccttacacatctcaacaaggagaaaaaacacattatgggcacattcatggcataggcaagaagagctggaatatttcaaattaaacaaattatatatttaagaaaatggagataaataatctgatagtttcattttttacttgggagaggatatttgttaaacttggaatttgaaatgatcttaaattaaaacataaatcctttatttgttcaatgcttctgactgacaattaattaagagaattatgttgaatgctaattttggatcggatcattggtattggtttaaagagacttcaagggtttattcggtgaagagtgcttacaagagtctctaggtgcttcatggtaggtggtcgaaagataacaattcaggcctttggatggtattatggcaactcaaaaattcctccttaggttaaagacttactatggagggcatgttctggtgtttaccaacactgacctagttaaaaggttgggcatgttgatgaggtcgtcatttgcccggtgtgccaaggtgtgaataaaaaatcttctacattttggttgagtgtcatttatccaaagcttgttggtagcgggtcgatggggctatttgcaacctttcagacagatttttcaagatggttttatcaattagtcatcgaattttcaaagactttggtttgtcatgttgcgatgatttgttggtctctttagaaagcaagaaatgggcttgtttggcaaagtaaaaaatatgttgcaaatgaggtggtcgttgttgcattgtcttactttaatcaatggaagattgctcacaaaatttctgcaaacacaatagattctagtacttgtgtatttaggtggagcattggtcggtttgcagtattgatatgattaaagtcaatgtaagatgcctctgtcacttttggagttctttatttcgggatcggagggctggcccgtgatcatcatggagttgtcctttacattggtccaaataattatctagtcgtgtctttcctcttttgacggaggcaattgggttgaaggaagctttgagctggatcaaagaatggggcctagatcaagttgttgttgagtcaaattgtaaaagcatcatttatgctctgtatagttcggctcctttattatgtctttttggtttagttatttttgattgtcatactttaatatctgatcttaacaatgtttcttgtgtttttgttaaacgatctacaaacaaagcagccaattgtttggcgactgccacttgttcctcctcaggttgtggctatagtgagagaatcgtccctatttcttttcaagctattttaatggataatttgttcaatcataaataagatgcatctctttttgtcaaaaaagacataaatcctttcaacaaaaaaaaaccataaatataaatatgacaataagaggttgacatattattccatttattatttttttttaacaatattattcttactatcagcataattttttttaataattacataaaacattaatttttgtaaaaaaaattatatttttacttttaaagttttttttttacatttttacagtattctataaaaatacaagaaaatcacatgaaaataacaagaaaataacgtaaaaacaacattaaaataacacaaaaaaataatatacaaataacaaaaaattaacaataaaataataagaaaaaaaatacaacataaaaatacaccaaaagatcatatttaaataaaatcttaaaaactgtaaaaatattgaaaactccgtaaggactgtacttttgtaatttttttattatttttgtgtttttttttaaattattccttttctttaacaatatttttttttattttaaactgtctgaattatgcatgatgtggtgtcacctccatttgtttgtttcttgacaagttaggaaatttactcatatatctatgatatattaatgtggttatataaaaaagtaatatttttttaaaaaaaatattataatttaaatttaaactcactacacatatctcttattttttatcttatattaaatgtatatatataacataaagttatttttttttaatatttcaattcaaagttaaactcattgcacatttaaaaaaaatatctttcaatattatattttttaccaaaaaaaaaatatatttctactattattatttaaaaagaaataaaaaaaagtgttgatatttcaaaaataataaaaagtatgataaaactaaaagtattacggtaattaaactaaaattaaaaataacaacaaattttgaatattattattttttttatttttataaataacacttaaattaaatattatttcataaaaaataattttgtatattgaataacacacacaaaaaaacactaattatacaactaaaaacatatatagccaaaatacaaacaaataatataactaaatatacgtgcaatattaacctaatatatagagaaattattctatgtactatttttttaactttttttaaaaaaaatttacggtttgggttgctcttgtgattgctctagtagtttctatgtgggttattatgtggattttggttgtgatttaggttgctttgttggttgctatttgggttgcttgtataaaaatgcaaaatgcaaaaaaaaaaatattttaaagtataaaaataaaaataaaaaataaaaactcatatattatatgtatagagaaataataataaatattttagtaaaaaactaatatacctaaatcttaaaatttattatgtataactgaatgtagttttttttttttatcaagaacttaatctagctattagatgaaggaaaatttggtttagtgtatttaaatgtaaagtatggtctttttaatatactactcaaccagaaatagaatacttacatgtacttttaatattttttcctcccaaaaatattcttacatttcaaataagcctctctctctaactctctcactctaacccccaaagccccaaaatccataagctcaaccaccctgaaactcttgaaatccctacacattactggagttctcaatttgctcattttctagttttttaaggcgccgcgaaacatcgctaaatgtctctaaatcacattgctaaacacatcgcaagatgtcatgaaatcgcactcaagttttcaagatgattagcgatgtttagcaatatgttgtgcattttttagtctcaaatcagaaatacatcgttaatatcatcgccaaatatctctaatcaatggtaaatttcatccttaacttcaaatttggtctatcattgcaaatacattgctaaatattacaaaaaattggaaaaccagaagaaaaatgcaaaaaacgagagaggtcgtgagagaagatgacggcaggggcttgcgatcagggttctgggcctgtgtgtttgatgacaggagttctgggtcggggttcaacgtcggagaatgagcgagttagagagaaaagaaaattgaaatgtaaaaaaaaaaaattgaaagaaaaaaatataaaaagtataaatatactatttctaattgagtggtatattaaaacactatattttacatttaaagtcaaatttccctaataaaatgttgggttttgtgccctnnnnnnnnnnnnnttcaatataatcagatttagttattaataaagatcagaaat

SEQ ID NO: 81006 - DNA, 806 bp, Cannabis sativa
taaaataaaaattattaaaatgaactatatttaaaaaattatgggatgcattttgaaatagtagaataaaaaacttaatgacgttaagaaacacactaattgtgtgatttttaagattatctcactcttttttaaaaaaaaaaaagacaaaagtaacgggtcccttgcgttttaccggattgttggaactgtttttctatataaacgtttagaattttcattttttaaatatcataaataaacaaaaatcatatgcatgtgtaaattttgtgaaatgaaaatgtgttatatatatatatagaaattaaaatatacatatatatacttttgacatttttacattttaagtaacctgtggcttgtacttgttgaatttatgattgtaaagtttcaaaactatcactttagctaaacttacaaggtacccatcttccagttttcaccaaactaagtctgctaatcactataagaaaatctatgagtccaaatcgtttgaggtcaaaaaaccatccgatttcatggctactacaaatttcttaacccttttgattctaacattggcattaagcttttcatacttattacctcacgtaagccccattgattttacatatccggcggttttcaacttcggcgattccaattctgacaccggcggaattgctgccggaatcgctttcccggttgggcaaccctatggccaaacctacttcctcaaaccctctggccgcttctgcgatggccgtctcatcattgattttcttagtaagtttatgtcttttatttacttcttgtacgatcactct

SEQ ID NO: 81007 - DNA, 4317 bp, Cannabis sativa
cagaaccaaattgcaaaatctaaggaaaggtactcaatctctcaatgattacttacttaaagtcaagcaacacgtcgatcttcttgcctctgttggtgaaattctcagtgatcgggatcacattgctgcgatcttcaaggggcttccaagtgcctatgacacgtttgtcatttcgactaatactcgcattgagggatacactgtgggggagattgaagctctgcttcttgcctcagagtccaggattgagaagactgaccaagaacctgatcttagtgtcaatcttgctgtcactgatgctgatccacaacaaccagaagcaaatatggcctatcagaatcgatcgagaccaagttttcctcctggtttttctccaagaagtaatatgcaatttggatcttatgttccccatttctctggttcaagaagcaattccacttccagaggcactccatattttccaaatatgtttactcccaggggattcaactacaatctgccccaatataatccttctcaattccctcaatctaaccgagggggtaataatcgtggaggcagggttggttcttcttcaggtcgtccccaatgccaactctgtcataaagttggtcacacagtggtggattgcttctacagattcgataagagtttcaccggggtgtcaccaaacaacactacatctccccaagctcacctgctgcatactatgaatcagaatgacaccaattggtacccagattctggtgccacgaatcattgcacccctgatgctcagaatcttgcttcttgcacagtctatgagggcccagaacagctgtttgttggggatggtacaggtttgtccatcaaccatattggccattctttcatttctaattcctccaactcttctcctcttttgttaaataatttgctccatgttcctgctttaactaagaatttacttagtgtatccaaatttgctagagataaccatgtgttttttgagtttcaccctgatgtgtgctatgtcaaagatcaggttcatcatcaggtgctcttgactgggacgtaccggaatggcctgtattcctttgactcatccgaggtgcatctcagtccctctccttccactcctgctgtgttttccactccttcacatcagtcacaagttcagccacaaatcttgactgcttcggcttctatttcacctcagtgtactgattccactttcataaacacacagccttgtatgtcttcctttgatatttggcacaatcgacttggccatccttctgaaaggatagtcaagtctgtgcttaatgcatgtaatctgccaagtgttaataaaagttctaattccatttgttcagcttgttgtttgggcaaaattcataaatttccctttcccaaaacttctgctactacatatactaagcctcttgagcttgttgtttcagatctatggggaccctcttttactccttcagtcaatggttataagtactatgtccactttgttgatgcatattcaagatttacatggatctatatgcttaaaaccaaagatgaagccttaaaaacctttcaacactttaaagctgaatctgaattacaacttggcactaagataaaggtgcttcaaacagattgggggggagagtataggtcattcactaatacactacaagaagctggtattgtccataggcacccgtgtcccaccactcatgaacaaaatggcttagctgagcgcaaacataggcacattgttgaaaatggcctcactttacttgctcaagcatccatgcccttaaagttttgggatgaagcatttaggacagctgtttatattcataaccgattgcctacacctgtccttatgcataaatctcccatagaagcactcttcaatgttaaacccgattacaatagctttaagacatttggatgctcttgctatccaaacattagaccctacaataaacataagctccaatttaggtcctctccatgtaccttcattggttatagcttaaatcataagggatataaatgtttagatgcatcgggtagagtttatatttcgagggatgttatctttgatgagtgcacttttccccatgcttcccaaaatcacactcctataacatctgatgttatgtcatccttctatccctctgctaccattcctactgtgtctactccaacttcccagtcaacagatgcatctcccactgatcatggctctgtcactaatgattttctatgcagctcttacatgcctttgcaggttcccaccattcctactgtgtctccaccaacaacaacagctgttcctcgctcagttactgatgctgaaccaatatctgctactgcagacacttcatcagcaccaacacaggagcctaatgtctgctcagccactaatcggtctgcttctgacactgttgttgtgcctccaagagcagaacccacatctgctactgctgcctctaatatacctgatcctaacaacaacacagcagcctctcaaaatactcattctatgcagactcgtgccaagtctggtataaggaaaatgaaagtttatttggctaccaaagaaccaacaagtgtcaaacaagctttgcaaagtgctcaatggaatggtgctatgtctgatgaaatggtggctttaaagaaaaataaaacatggacatatgttgtgttacctgaagggagagaggccattggttgtaagtgggtttatcgcaagaaagagaatcctgatggaaccacatccaagtacaaagctcgtcttgtggctaaaggttttcatcagcaacccggtttcgattttactgaaacctttagccccgtggttaagccagtcaccattcgtgtggttctgtccattgctatatctcgaggatggaatattaagcaattggacgttaataatgcatttctcaatggagatttgcatgaggaagtttacatgcaccagccccccgggtttgttcttcctgatgctcctcaccttgtgtgcaagcttcacaaggccttgtatgggctcaaacaggctccacgggcttggtttgacaagttacacaccagtcttcttgctcttgggtttacatcctcaaaatctgacaggtctttgttcattttacacacatcctcctctactacattcatcttggtttatgtagatgatatagtcatcaccggcagtgactccactctcataaccaccatcatcaactctctgaattctcagttttctctcaaggatcttggcaatctaacatattttctgggtattgaagttcagaccacacctcacgggttgcacttatctcagtcaaagtatattcgtgaccttcttattaaagctcaaatggaggatgctaagcctctgccaactcccatggtaagtggtttaaaactatctgctcatggtcatgaaccatttgacaatcctcagctttataggtcgattgtgggggcattacaatacttgctaattactcggcctgaactctcctatagtgtaaacaaagtctgtcagttcatgaaatctcctttacaacctcattggcaagctgtaaagcgtatccttcgatacctcagtggcactatagattatggtttgcacttccataagtctctctcaactgatcgttgtgatgctgattgggcctcggatcctgatgacaggcgctctacttctggatttgctatcttcttaggaggcaacttaattacttggcaatgcaagaagcaacaaacaatcagccgttccagcactgaagcagagtatcgcagccttgctaatgtcgtctctgaactcacctggcttcaatcactctttactgagcttcagattactcaatccacagctccggttgtttggtgtgacaacctcagcaccgttctacttgctgcaaaccctgtcttacatgctcgcacaaaacacattgagcttgatctttacttcgagaaaaggttcttcggcaacaagtgcaagtgaaacatgttcctgccttggatcaacttgctgatggccttactaaaccagtttccactcaaagtttttctggttttcgatccaaactcacaattgatagacctaccaattctgagtttgcggggaggtattaggagatctgttgttagagtcggttagtaggttgttattactgttcagaggttgttatttcagttagattaagcttgcttcatttcaatctgtactggtatgtgtactctatataaattgactctgctcttgtatcaaattcattaagacaataatacaaacagatctctttccttctttctttctctttc

SEQ ID NO: 81008 - DNA, 1015 bp, Cannabis sativa
tattgtaactctgagttgcctgtgtagtactctcttgggccactttggacagtcatgtaacatgttttgttttgggccactatggctatgagtactttgaaaattatcgttacttgaagacttagatttttcttcatgtcccatccactcaatcaaactatttttaaccataattctctcaaaaatcagatgatggagaaagagagatttacaacttctatttctcccacacaattcctataagatatctccaacatcatcataatttagtatggagccattatatacatagagtttcaagcttgtaacaccaaatggttaaacatcacatataaaatgttcaaaactcattattttcccaccaataatgtcttggaactcctaccacaaaataagctcataaaataaaataatataagaattattaaatattatattagatcttgtgttttataaaagtcactaattcgactttctactttattaaatgataaaataaaccttctattttctaaaatagtaaaaataagaaccttaaccgattttttttttgtcaaaataaaacttaataataactcgatatacagatattataataaaattggttatattcttgcatctattcgtgctagaaattattttcagtcggttaattatatcaatgaaaaattgtcaaaaattaaattcagtatctcccattttagaaaattcagggcatattttatcatttaaagaaatagatagtccaataaacacaaggtcaaaaataatatttatcaataaaaattaggagtatattgagaaatacctcttttatttatcaattaaccaaaattacctctaattttatattcaattgaaacatacctctttttatttaattgtattgtacccaaaataccctgatataagggagtcacatagagagtatattgatgtgacaggggtaaaatcggtaaagtatttagaaaaagaggtaaaagtgataggttttaaaaaagaaagtaaaaatgaa

SEQ ID NO: 81009 - DNA, 1733 bp, Cannabis sativa
agtgtataaaaattagtattgtttatattgtaaactaaaaaataaaactacaagtcaacagcaacatcatcgtcgccatcgtcatcatcgtcctgggtgggaggagcagcctgtgaagaatacccagcgccaggaggtcgaaatggtggaatcagagcagtcaggggcatgttgaatccttgaacgacactagccagatgcatcagttattactaaaatgtgctcaaggtttgattttgagtctacatcatttgttgttgtcacttgttccatgcttactactcttccacccttcgattcagagcctcatattcctcttgagtgaaagtaggttggatggagggacctaccctgagagttacccttttggcccccgccctaagcctcaacaactggcccagtcccctcaagttgcgtgaccgctcacccattacctgtgtcataacaagcatgtgtgtgggaaactgggtgggtcgatattgtactggaaggagacattgatcggctctggttgagtttcacgaatcttaaccattttggcctacaaaaaatttgaacaaacaattagagttgaatagaaatattttaatatagaataattttattaaagatataaaattacttacatacagttgttgtgtgtgttcatcgcgccatttgttgttcttgttctggaacttttgaaaagtgttcgcagcactcggaagttcccccgacatgggatcagcctacttttatacaatacaaaatattagaaatatagtattcaaaaaatatcaatttttagacaaatttgctgacaacatcataccttgctaatgatgtggtcgactatggtcttagacccccatccaccttgaatctttatttgggctcgggttttcacattttgtttggctcttgcctataatttaatgtaaatttatttttagcaacataagcaaaaaaaacataatttaatggagattcaattttacaactttaatttttatacttgttgttttaggtctttccagtatgcaataacctctgcccagacttccagtttgaccacatctagacgtgatctcctagtcgcttcttcctctccatatatctcagtattatcgttccatgccttttttgtgtctgctttccagtcacgtagcccttttgacattgatttaagactgcaatcctcgaacataggattgtcagttgggagctcaaatttagtccgaaaaaaataaacattaaaatcatatataattttttttgtaggatagatattttgtttgatctattacaataaaaatttgaaagttaccactagtctattcttgatagtctaaatgaccccttcgtcaacgtcctcaaaattgaacttgttcataggaattgtatggcgaacaaccaacttgacataatttgtcatagtcatttatagaggccccaatccccttataatattgaaattttaacttatgccccgtaggctgtttggcctgttcatcttcaatattttttcccttgtacttttccgtaactctgcttttcttactattacctgcacttgcatcagccattctacgcatacaagctatatttattaatataaaaataattaattaatcaacttattaacaaaaggaacatgcagttcatttaattaatggagggtttaaatattacaatacttaaagtctacaagtcatcagaatcatcatcatcattaacagttacattattttcat

SEQ ID NO: 81010 - DNA, 1079 bp, Cannabis sativa
cctcattgagagtcaaaccaactcaaattcagtttcagccaattaaaagttaatcaaatcagccaattaagattaatgccatctcagataaagaattaaagaatctaactaactcatcgacggatcctaagttactcttatgtaaaataggaaaagacaatattatgcattgtaatagaaaaagtaagagctcagatttagattccaagtaagaaaatctagaaaatcagaaatttatatttaaaataggaaaagacaatcttataaatatcatgaaattctcatttgaaacctatataattttgaaactttcgaaaagtctaaagacttcaaagtcatgactgaaaagcaattaggtaaattattaaagatactttgataagatcatagtggaaagtgtttggatttcaaattcaaagactaattgctggaagaagggatattatctcaacttacaacacctgaaacacctcagcagaacagtgttgcagagagaagaaaccgacccttgtttgacatggtcagatcaatgttgagttactcatcactatcattgaacttctgaggatacacacttcaagcggctacttacattttgaatctagtaccatcaaagagcagaagcaacactctaatagaatgagaagaaatccagtttgaaatatttttgtatttagggtggccctgctcatgttcttaaattgaagactacgaaacttgctcccaagtttgaagtgtgtatgtttgtatgggttatttagaggaaactcgaggtggatacttttatagtcatgaggacaataaaatatttgtatcgacaaatgttatatttctaaaacatgaatatatgaaagatcacaaaccacatagtcaagtggttatcgaggaaatatgaaatgatccgattttgaaaccatcaatttcagtaccatcagttgaatgaccaacagtgatcaccactattcttcaaaaggaaaccctgatgcatcatcgtagtgggagggttgtgagacaacctatctgctatgaatatgtggcacatgttcttgaatctaacacaaacaaggacgatctattga

SEQ ID NO: 81011 - DNA, 847 bp, Cannabis sativa
aataatgccgaccactttaaaaattatattagatgtgtgcttattaattatgttgtgtgcgtacgtacgtagtaattagattaattgatccttaattaattttaaaaactgatgaaaatactagagaactacacatcctcatgtaaaatttgtaacaaatgtgacaaatatgtatatgtatgtatatattgtttgaaaagaaatagaattcacatattatgccctatattatataatatatatatactctaattcatagtaataaaattaggatattatagcaacaaatattatgctctattaactttatacattgtaataaatttaaatatatatatatatatcggccatgagtgttagaatttaaaatgtgtgtgcacgtgattctatcttaaaattaattggcaatgagaatagaaattcatttatatatattttattttcacacattattaattataataatgatttttgtctcttttaataataaaaaatagtgttacttgctgcgaagttcttttgttttaattaatacttagaacaaattactttatagtgtattataaacttagtttgacatattttttttttattaacaatattattgatctaacgaatgtaataataaatggaatacatacacatatgaaataaataaatgtatttcatatatacgtatagatacattaggttttttttttttttttttggtgcatgatggtcgaaggtgaaatatttttattgagtagtgagtgagtgactaccccattatacttagtaaatataataatgtttgacattgtaagacccacttaatgttataaaaattccaaaggccatgaagagg

SEQ ID NO: 81012 - DNA, 4140 bp, Cannabis sativa
gaagatgacccctgtggaggaggatgtgcaacctcctccacaggagccatgagaggtgtagcttggaactgtagagggttagggcagacctctacagttctggagctgaaagccctgattcggtcgtgcgatcctgatttcattttcattaccgaactcaaagtagatgcttcaagtctggtacgttcccttatgaaacttcacttttataataatattgttgttccggctgtgggatgtgtggggggtttaattttagcttggaaagggggttttgaatttgaaaatattagtgtttctaaaaatcaaataacgggttttgtgtactctgaccctgtaaggagcccctggttgttgtcgtgtgtgtacggtcctccatatttccatgagaagaagaaattttggtctagcttgatgctgtctggggaaaaatttggtggcccttggttaatcttaggcgatgttaattttgttctgagcaactctgagcgggttgggtctaaggggagggatcagtttattcccttcatctcggagttaattaaccgtcatgcgttagttgacctgcctatcaaaggggatatcatgacttgagacaatcatagagacggtactaatcatgttaagttggccctggataaagctcttgtgaataatgattggctgggaatctttcccaaaacggtggttcgatctctcactacctgtaattctgaccatcggcccctctttgtgaatacgaagcatcagtctctggcgccagaaggccttttcgttttgaagcttggtggacaagggaccctcgtagctcattggtggtagatcaagcttggggtctgtctcccatgttggggccccggctagagtgtttaagagagttggtgcgaccagcttggctctgagtaactggaaccgagtgcaatttggcaagctggattcttgcatctctaagttggagggccagttacatgttatccaaagtatgcctgttggtgaaaggaagtgggcaacggaagccgaggtgaggaaagagcttaatgaagccttaaggcggaaagctatttactggcaatagagatctagggtttcttggattaaggatggtgataagtgtactaattttttcttcatctctgccacgatccgtaatagaagaaactcagtggatagtatcttgaacaaggatggtgtgtggataaccaataaagctgtcattggtaatgagtttactgcttttctatgtgacatcttcaaaaacccgccttagggcccactagagagcttagactacctaatccatgattatctctcccctttggagcaggctgatcttgaggtgatcccggatcacgaggaaattagataaatgatgttctctacgggaagcttgaaggccccgggtcctgatggtatgtcagttctcttcttcaaacactactggaactttatggggaaggatttctgtgatgtagtggtggactttttccagtcagggaatatgcatagaggctttaatgctacaaatattaccctcattcctaaggttcccaaccctaagaaagtgtcccgattcagacctatctccttgtgtaatgtgatttacaaggtaatctcaaaaatcattgcgaatagaatcagagtgttattgcccagattgatttgtcctacccaagcagcgtttgtcccgggccggagcatccaagataataatgtcttatccaggaaatcatacactcttttacgaggaaaaaagggaaagaggggttttttgcaatcaagattgaccttgttaaggcgtatgataaattgagttggcagtttattaatcacgttctgcgtagtttcaaggccactgacaaattctaccattgggtcagtcagtgtatcacaacaacttctttcaaccttttcctcaatggaagaaagtttaacagtttgactccggagtgtggcataagacaaggagaccccctatctccctacatctttatctgggtgggtaaaatcctctcgcgtatcattgagcatgccatcgatagaggtaccatcaaaggcataaagctgagcagagatggccccaaactctctcaccttttctttgctgatgatctgatccttgttggcagggcaaaccttgaagaagctaggagtttgtggcattgcgtggagaagttttgtgattggtctggtcagaaaattaataagctcaaaatctctattttctttagcggtaacacaagtgatggtatgaaacgaggtatcaggattgaactgtgaattgggtaacataaactatttgggactcccgctttttaggtcacgccaaaaagatgcggactttaacttcatccttgataacctggtgtcaaaacttcatgggtggaaattaaaaacattatccaaggtcggtcgtgctacgttgatcaagtcggtggggctggctttgcctatctactcgatgcatacgacaaagctgtctaaaaagcttgcatctcggattgatggtatgatgagggacttttggtggggttgtgagcaaggtaatagaggcatctgtcttaaagcctgggaccagttgtgcctccccgaatcccggggagggcttggatttagaaagactgtggagatgaaccaagcgttgctggccaagtggggttgggctctgcttactgaagaacagtcgatgtgctgtaatgtcctcaaatctaagtaccttaagggtaagcagtttcttgactgtgaggttaagagctcagattcttggtttgggagaaatgtggtgcgatctaaagagactttaagaaaaggggcatgcaagctaatatctgatgggagagagacaagtatttggaatgacccttgggttatccatagtacggatttccaccctaagcctaatgatcgccaacatcggagtttggagagagtgtcggaattacttttacccgacgggaattgggacatttctaagttgcaaaatcttttcgactaggaaactattagaaacatcttaagaggcggtaatccaagcggccagagaagggatagatgggtctggacaaaggaacctaatggcctgttttcaaccaagtctgcctatcttatacaagcgctcgctgaggcgccttcgtgcaccattgctccgacattatggaacaaactctggaactcaaagattttagaacgacacaaagttcattggtggagtatcctctccaatgcactacccctaagagcccttcttgctaagagaatgggttttgaggaggtctcctgccctatttgtggggagatgaggagaccacagagcacttgttcctgtactgcaactttgctttccacttttggaggtcttctccttgggggtcatgcctgtcctggattctggagcccgaatgtgggactgggttacttttctctggaatcttaaatccagaggagtcgatactgatgagcttttcctctatgcctcgattgtggttgatacgatttcagagctcgcaacgacaaggtacataacaaatcaatgggtaacattaagcattatattaactctatttcttcttgttacgcagattatggctcctgcttgttttccccaccacagccttctgaaactcttgcttggtctccacctctggaggattgggttaaaatcaattgcgatgtaaaggtcggaggcgacactatgtgtgctgtggcaattgcaagggaccataaggaatcagttttgtgggtggcggcaaaaagactacacttctcggacccactcactggagaagctgcgacctgtcttttagctatggagacggccgtctcattgcatcatccttttgttatggtggagagtgattctgagattgttatcaagaacctaagagggactgactccttttggggaatcgagaactatgtgcgacaatgcaagatcctctctggttttatgactaattgtaatttttcttgtatttctagaaacagtaactatgcggcccataatatggccaaatgggcgtttaccaacaatgttacggggatggtagagatatctactatacctggtaatatcttttgtaatgaccgtcaggtctaacttcacttttatttataaacgcgtttttttcagagagagagagagag

SEQ ID NO: 81013 - DNA, 1892 bp, Cannabis sativa
gttaagagtgcatacaagctgcttcaagcattgaaaggaacttgggattcagaggatacaatagtaaaaaaaaattggaagaagctttgggctttaaaattccaccaaagatgaaaaatttattgtgccaggctggcagggaatgtcttccaataatggttcagcttcaaaccaagagagtagacgtcagttctctgtgccatgtttgtaatgtggaggaagagactattttgcatgctttaatttcttgtacttgtgccgcttcctgttgggaaagagaaagaattggtactgatttacaactagactttacatttcttgactggtgtatttcttgctttcagcttgtggattaatttggataagaaatgcttaattgtggccatctgttgggccctttgaaatgcgaggaatgattgggtcggacaaaagaaggcgacaaggactgatagaatactatcattagcagaaaggtacgttcatcaatgaagaaattttcaaaactcagagattgagtcatcttggtctaagtttcagttgggagatggagtggaacaatggacgtcaccatcgttgaatagtattaaggtcaatattgatgtctcttttttttatgaaggttgcaagttcggccttagctttgtggctcgtgtttctagaggcttacttcttgaaggttccacaacccttcataatttggcggccaccccagaacttgctgaaggcttgggatttcgcgacgctctaagctggatcaaaaagcgtcaatggcaacgagtgattatagaaacagattgtttgaccattgtgcaggctttgcggagttccgctaatatgattttttggtgtttggacaagtgattaatgattgtaaaagtttactttcccttttgtgaaatatttctattgtttttgttaaatgatcagttaatatggtggctcataactttgttagagcttttatattatatcatgtttagaagatgttccaactcacttgttatcttgtttgatagttaattttaatgcaaaaatttccattcaaaaaaagccaaaacaataaacacacaataattagactaaaaaaattgacaacccagccaattaattctattgaaacaatttacttctcctagcataggtgaaacgcatcaagggtctaacacaccaactaaacagtgtgatgtggaattccatccagtttttgattggatctttttcgtctaccgactaaaacaatcgtagagaagcaccctccaaactttcttcaacaactgctactttcgccttctttggttcgatgatatgatcgtagaaatattcctcaatgttaacaatccaaccatagtgatcctcaatgatacgccattgtagagtccccaagaccgggtaccctaataccacaatgctacccagccaagtcaaaacagaatgcttctagaaaatagggcaccaaacagaaaggaaaaagtagataaacagtaattggtacatttgatattgtataatagctgaataaaaatgcaaagaaaacaatgaaacacgaggtgctcgagagacctcaactctcccgagaggcaatgctgaatctcatacaatttctatacccctctcctatatataatgctcaattgcagcctactccccctacgattacccatttacactgtttatttaaggcctaatatactgtcaattagtacataattggcttcattaatttcttctaacatagcaagtttacttgaccaaatacgattggcttccgagatagagaaatatattcttctagttaatgcatactccggttatatttgcgtcagatctaaataaaaaaggtagatacaatcacaacatatctatttcgagagcacatgctaataacgcatgta

SEQ ID NO: 81014 - DNA, 849 bp, Cannabis sativa
cttaaaatggcccaatgatgaccttgaagcccaagccaaattcttccaattgtatggccctgactatactaacctttataaagcccaagcctctctaatatccaatccccctgatctatctatgatgattgtccatctattgggctgcaaaaaaaggcaacctcacacttggtatcagccaactcctgcgattactcaattccaactgcccacctgccctgtagttgaagaaactgggaagaagcctgctgtcgaggacgacaatggtgaaaagaaattcagtattggtacttgtgaaaactctagaggcaagtctaagagaaggctgcgtaggagtggaattgctacttcaagaagaagttcgggagtcaagactcgtagaggaaggagaaaagaggctgttgatgcccaagaatttactggcaattttgaagtagtcttggataattgcgtggaaatcccagttaaagatgatcaaaattttggcgatggcgaggaggcggcctcaagcatgcccccaccgtcctcatgaggtgcctttcttggaattgtcgtaggattcgtagacccacgacggagagaactctctggagtttaatccatgatactaatgcggatgttattttcttatccgaaactaaggtgggagtagagactatgatggaagttgttaatcgcctgggattttttaatgttagatgtattacttgtttgggcattggtgggggtttttgtctagcttggaggaatggggttgtgattgatattcctgagacttttgagacgggcttccatggtatcattcctagttcgagaggtagttgctcttggcatctcttttgcatctat

SEQ ID NO: 81015 - DNA, 1564 bp, Cannabis sativa
tattattattattattattgaggtttagctcacttagttctaatcatcaagactagtaactgtgaaggtagttaaacggtcgaggcttttctaactatccaagtactatatataagagagtccaaagactcattttgggacgtgattaaagtttaaaaactctttaggctgagatgaattctctatagagtttttgagtgagtttgagggttgtaaaagagacagtgtgtgtgtttgatctattagaatatttctaatatagtacaaaattatttaaattgattctgtattatgtatatgattacaaactaaaatatgataagaatgaatattttaaatatggttggattataatttcatttctcgatttgattttttgaattaattatcaaaatattttgattattattgttgttgttgcatttgtttgtgtaattaatgagttgctcatttttaagaatgatggactgttggatgttgctgactacattcacacaatatcttgtgaagtcaggttccttcagttttatttgtatgtagaagattagactttgatcgtcatttatcctcaacagttggtattcttttttcacttgatatttagttctattaaacccgaatcgcccctgctgctaactccataaactagtccacatagctgtttttaggagaaattccaaccctagagaagatcgattctagcatgaatgagcaaaggagaatccaactaatacatggaatattgattcctctacaatattgcagaaaatacagtgaagctccacatgaacatgcttaagatggagttgagaacgagttggcaaacaacccgaaagagctttccacgcaaagtgcatcaccttaggagggactttaatcttccacataaccttccaaaatcagcttccatattggaactccaatttccattaacagattgtagatgatgacaagagcttttaactgaatagaaaccagagggctccttattccaaatcagttgtcttccatcacattaggactcaaagagacctggttaataagttcaatatctcaaggctcaaacaacttagaaacaacctccatatcccattacttacaatcagctttcataagctgcaaaattttacaatcgatcaatccaagatgtgttgaaacaacacaagggttatcatcatttaacaaccaaggtgtatttaacacctcagttgaagcacttgatccaattcttctcttggcacccgctttgatcagttgttgagactcaaaaatacttcgccaaatgaaactcggaatagcacccaactccgcttcaagaaaggaacatcgagggaaataccgatcgctttataaatctgacccacaagagagtcttgatacagtaataatctccatcactgctttcccaacagagataaattgtagtctcgcaaactttggaaccccaatccaccagaatttttattcttgcacaatcttctctaactaaaccagctaacacctttagagttattagtagaagaactccaccaatatttggacattaaactttcaaggtgagaac

SEQ ID NO: 81016 - DNA, 1441 bp, Cannabis sativa
tcgttttagaagttcatatttaagttgttaaatcaacatacttgtgagtatatctaagttcctggtaaaataacttccaacagtgaggtcttagactgtgtggattcaattgtacacagttattttaattttgaattgagtcagctagttatcgatgatgaagttaagaaggcgttatttcaaatgcatcctgacaagagtctaggcccagatggtatgacacttgctttctatcaaaagtgttggaatattgtggggcgtgatgtcatcggcagtgtgtgtaagttctttgagaatggtttctttgagtatgtctatagtgatgctaatttcatcttgattctgaagcaaaaaaatcctgaacgtatgactgatcttcggcccatagctttgtgtagtgttttgtataaaattattacaaaagttatgattaatagaatgaagccattcatgaacacaattatctctgctaatctaagtgcctttattcctggtcgtttaatcttagataatatcctagtgtcgtttgaaattacactatgttaacctcaataatcgacataattgatttttgagattagtcaacaatcagccccagcagtcgagagacatcgattgcaagagtcggtcgaagaatgattgagtcaatgcatatggcctaaggctcgttaatcttggaaatccatgattacaagtcttggggtatatctgcgcaacttggaggttacaattgttagtaagatcaacttactaggttacaattgttggaggattttcgtagtaataggttcagaattggatctatttcttatatttccaatgcatcttgaatcgtttgattctaatgtatatcgagaaagttatagccaaaatactaagactggcaaattgtaacagtttggtatgcgagttgacggctcacatgcaagccggcaggctgttgagcggctctctagctattgtgcgatcccatggggggttgtgcaagcccatgagccattgggtgagtcgaggggaattttggtgagtcatggaaccttcatgcaagtggtggagcatccgttcgacttgtgaatgaaagagggagaggttatacatgtgtggataggcgtcatgtgtggtgaatgtcggagtgagtgtatgggggctcgcatgtgaattcacagggggcgcgcatgcgagccgtgggtgagtggtgaaaggtgagcctggcaaggtgcgagggggtaggggctcacatgcgagccctggggggctcgcccgggagccgtgagtgaatgtaggggagggagttcaagtgagggggagtgtggtgtgtacgagtggggggctgtcatgggagcccatggggggctcgcacgtgagccgtgagtgcgtgtgggcaagggagtgtggtgtgtgcgagtggggggcctcgcacgcgagccgtgagtgcatgtgg

SEQ ID NO: 81017 - DNA, 2350 bp, Cannabis sativa
catcataacaatattaacagacaccaaaactttcaaaacctctaaaaacattaataatggcagcctttattaatgttacaaataataatagatacttttctttgtctataattcttcttcttattctcttcatttttctttgttcaactccgtcgtctcatgctcgccctactcccaccaccaccaccattatttcgagtaatagtagccaagttcggttgccattactcgaagttacaaagaaagtaattgaggcgagcttaagaagaaatatcggaaagcctctccaacctaatcggttaagccctgggggccctgattcccgccaccactaatgtataatttttggataaaaaaatttctcctgtagtcatgcttaaattttctatattaaaattattaagagtattaggcatgattaatttcggaattaagatcttctgtccaaaattatttgtatcaaattttcagaaattttaattatataattgaggtttttttttcattctattttaattaaagtacgtaccttataatataaatatataataatattattgctatgaccacaaagaattattaggagaaaaaatttaaaaattatatgatgtatagatatatgtattaattaattatatatataatatatggaagtggtgtgcaccaagtatattaatacataatatttaattaatatctaagcaactataagtgggttccatttggatgattgcaactataattgataatggaagatgagagtttattttataaaaaatatagaatggggacactatatattttttgttttgtttttatcaataaggacatttttttttagtatttagaaaaattataatttaattttttttataatcatgtgtattataattttttttagattatatataaaaattttattgaataaatcgaacattatttaatattacatacagataatgctcagttggcaaaataagataaaaataagcaaattaagtcgttttaaaaaaaaaattaaaaccctaacaatatcatcaactaaatgtctcataagtcgccaatttaaaacaatgcgaaaaataataaatttctaccttgttataacaatgcgaaaaatattaaattttcatagtaatactttgtacttgatttcaaaatatttaaaataattatatatatatgtacattactagctaaccaattatttctatctaaaccagaaagaacgaaaataaaatttaattgatggtggaattgtccttagtggaatcaattatatataaataaatatatatatttttaatcaaaagaatataatgttaccatatatatagtaaattgacattaaagtgaattttatttttgtcaagttatgtatgcattaaatatttaagtcgcgtatgtggttggggtctcaatttgggtgcgagtccaggattaggatttaagttcgaggctaggtctaaatctagactcagggtcggatctaggtccaggtttgggtttgcgtttggggctcgagttcgagcccgagtctaagtctggtttggggtttgaggttaggatcgaggctcgggtttgggtctaaggcttagggtcgggctcagagttcgggtctgtgtttcaattcacagtccaggtttgggtctaggtccgaggttggagtacgagttcggatcggggtctggttctgagtccaacagatcagggtctaggtctgagtttgctttagggtccagggccagggagcaggtttaggttcgagttcaggtctaagtttaggtacgagatccgcatccaagtctagatttgggatttggttctggggctggggtcaatgtctgagtgggttcggggtcggggttcgggtccgtgtttgagtttgaggttggggttgggtccaagtccaagtttaggatcggggtccaagttcgagttcgggtctgtgtctgtggctcgagtttgggttcgattccaagtcaacaagcttagttagtttctaaaagcccctacaaccttacattggcaagcatgtaaaaagttactaaagtatttgaaaggaacagtaaatgaggagaagaatgttatttggatgcagatttgacaaattgtgttaatgatagaaggagtacaagagaccatgttgtgtacttaagtgggaacctcatatcttggtctgctaaaaaacagcaagcagtggcaaggtcaagcacaaaaagtgaatttcgtgctttagccaacactgcagcagagatcaagtggattagttctcttctacaagagcatcatgctcctttgtctcagtctccaatcatctgggtagataatcagattgttgcagctcttg

SEQ ID NO: 81018 - DNA, 1439 bp, Cannabis sativa
cgagttgcatacattgtctgtcagaagaaggctttccgtcctccctcacttatttgtggataagggaatgccctctggtgaacaaaaagtacaaccgaaaggagagtgggaatgaggattactggaacaagattagtcacatacccaatgccacaatctcaggtttgttcttgtcttctaatcaaacagccaatatatgaataaatatgatgatcaccttattccatatataatggtcttcttttgaaaggcaggcttttatgtattttccatttaataaagtactcaaatgaataatcaaacttcccattttcttggttgcagattattacttgacctgattgatcttcaacagtggaaagccatatcagttcaaaatgagagaacttgtagagaatttctaatctttcctaaattactcaatcttgaaatttacaatctttcctaattaattagttaatggtaaatttatctcttctaatgcaggtatgtcttatctccgggtatgagttagattgtgttttggttgttctagtattagagtacttgttttgttttgtttatgttttattatttattatgatgtttgagatgtttcctttatatcataattgtgttccagcattgtaaccttggttttcctcggccataattaaagagtattattgaaagcattttacatccaatcatgtttttcaccttcaatttgtctcttgtaatgcaggaaggacaaagagatagcttcttcaactacatgaaccaagcaatgttcgaatcaggaaaattaagtctggtttttcttcattattatttatgatgtttgagatgttttctttgtaccgttttgtaattacacacttgtcataatagtgttccagcttgtattgtaaccacggttttcctggaccataattaagtgagggctatgagataataagtaagtaatgtacttactggttttattaaattgcaggactaggagaaagttttttatattttaataactctctatatgtaaaggaattctgttcatgtattgtattttataaatataagaaaaatgctaatttataaaaaagaggaattagaaagtgattttggttgttatacaaaactcaattgattgtctagatcaatttttaaacttttttaagtgttattttatttggtctgattagtggatagactcattgattaaaactacttatcctctgatatatgtttgaggatgaaatggaattggcaaacattaccccatcttaccatctttctatttatggatatggtattgaagaagatatggtgcctaccactattatttctcttactatttggtattttttggcaaacttaggggactggacaaaaaagggcttacacaactcacctccttgcaaacacttgaaatcttggagtgccctgagttggagacattgtca

SEQ ID NO: 81019 - DNA, 566 bp, Cannabis sativa
ctaattttgttatttatggttgatgttttacttttgtattcttatgtttgtaatcgattttctattattgttatatataggaatgcatcattaatttaagtttgttcataacaatgttcttatttttttccctttcaattattaatttaaccggatttgatttattgatatatttagaatatttttcaatatttgtatatatatattgaaattaaattttttttaattctaattcaattttcagatgatatatatatattctaagagatcttagtttattatatcattatgattatatataatttttatagtaggttgaatatacctgtcttgatgagtttggagatttagcgttgaatttgttcgtgacttgagtgctttgttttgatgttttatgagttttcttcgtttcatgtattgaatgcttttgatttgttgtcgatcttgatgcaattgcaggtagctggtgtcggagaagatgatcgacagttaattagaacctagcgaagccaccggagctaaggaagacaattgacagtgactcaaggatggtgaatttgctagtt

SEQ ID NO: 81020 - DNA, 611 bp, Cannabis sativa
cataaatttttccattttttttttggcatttaaccctcctttttttttttctgagaattgctttaaatttttagatttctttttctgtacgataaatttataaataaataatttgcggcataaatatttaaatttaagtaataatacttaagttatatttctgaattctgtaacagttaaatgtcaactcattatatgcacgtcatttttttattggtatatttgaattgtttttttttctaaataataaaaattttgtcacttgtaccagtcagagatttccacgtggcaatttataccgtaaattactctagatttattgacactaatattgtgaaattttttgtagtacacctcttaaaattaaaatgttgttttagtagaatttttattttttttttatctatttttctatttacaaaatttagtttaattgttttttatgattacgtacattataatttatttaagattatttatatattttaaggaaattctgaatagtttactataccaagaaaaactagagttgtacaaaaaaatttgtaaactgtccaaaccgaataacccgcccaaaccgaaccgaaaaaaccgataaaaattacaaaccg

SEQ ID NO: 81021 - DNA, 947 bp, Cannabis sativa
aaaaaaaaaattattagaaagcaattttgagggcttaattaagaaaattaaaattgaggggcccataggagcaaatatcctaaacttgattcttgctctttggggtttcttcttcttcgtctgaccaacaaagggttttacccgcaaaaacaaagttcagatttcacaaagaattcctccatggacgtaatcaagacccagcaagtatcttcgagacccattgagaaggtcgtagtgcacccgctcgtcttgctcagcatcgtcgataacttcaatcgagtcgccaaggacactcgcaaacgagtcgtcggtgtcttactcggaagcacttttaaaggcaccgtcgatgtcaccaacagttatgcaggtatcctattattgctttccctctattcatgtttcaccacacaaactatttcttttaggagcccaaatgctctgctcaattttatgttttcagggaattcgcccaatcaatgcatgataatctgtcaaaccctagaagtattcttgtggtttctacttagactttatattattttttataatgggtttatcagtattgacatttctgcgtgataaaactgagtaattttaaactgaacttttctttggaaaatgactgagctggtagatgtttagagattgaagatctcaaactattaaaaaacgagtctttaataaaagcatagttaggatatatgggctgtgctactctctgtgcttcaatgtccatgctatcactgtctctgaacttatttgggaaggttacagctcaactcaactgagtatttatttatacatatgatagattttacttaagtgaaggtattttctggggctccagtgtgaacaatcttgtaggtaagattaaaatttatataaggattggaagccacgagatcaagaagtacctgtggatggatgcatcttggatgtcaaattat

SEQ ID NO: 81022 - DNA, 1395 bp, Cannabis sativa
  modified_base (1326)..(1346): a, c, t, g, unknown or other
caaatttttccatgtggctactattatcaagcggaagagaaattttattagggttgtttctgataatggagtgaattggattgaaggccgacaagcaatgggagattatttcatctctaaattccaggcagtgtattccacattcttccttgtttctccaaatctcgttccctatgtccaacaggtggttactaatgagatgaatgtgactcttttgagaatttttctgcttctgaggattcgggatgtgatttggtctttgccggctcttacagcttcgaggcctgatgatatgcctagaaaattttataaggattactgggatatagtgggcaatgatgtggttaacactgttatccaattttttgagacaagtgagtttgtaaagactttgaatcaaacttttgttgtgcttattccaaaaaaactaggggcacatacttttgatgagtttaggccaataagcttatgcaattttgcgtatacagtcatttcaaaactcttggcaaatcgtttgcggccttttcttagtgatattatttccccattctagtctgcttttgttccggggagatggattgcggaaaatagtatcattgcccatgagattatggattcttttaagaaaagaagcagcttgtgtagctatgttggccttaaacttgacatgtctaaagcctatggtaggatcgaaaggaagttcctggaacagtcattgagatcttttggttttcatgagagattcatttctcttattttgaagtatgtctcctcagtttcttaccccgttctccttaatggaggccctctcagacaattttgtcctcaaagaggattacgtcagggtgatccgttatcatcgtatttgtttattatctgtagtgaggttctttatcagatgttgttgaaacagtttgaacaaggacggttgcatggttttaagatcaattctcgatgcccttctatctctcacttgatgtgtgcagacgatacttttgtttctgtagagctgatttgagagaagttgtttgtgttcagaagtgtctagaggattattgcacgtggtctgggcaggttatcaatgtggggaagtctgctattgtcttttcaaaaaatgttgaggctcacaaagagtggatatttataaagcattgggttttcgggctctgaatctgcatgataagtttttagggaacccaatattcttctttaacagcaagaaaaaagatttccaatttgttagggataatcttcgtgctcgcattgagggatgacgctgaaaaattctctctcaggcgggagtgactaggggtgttcatccgatcnnnnnnnnnnnnnnnnnnnnnaacaacatccaatccgcactaagtgcggatttcatattttggatccaat

SEQ ID NO: 81023 - DNA, 674 bp, Cannabis sativa
gactttagcatttctttttcaataaatacataactatatttatgtgtagcgtgtttgactgtttgtataattggaaagagagaaatgagaaaggttgaatacatggaattaaaataacgctgagagccttcagtcttacgaaaaaaaaagtaacgctgagaggaagactgactgactgactgactgtgaaggaagagagaatcttcttgaattttacattgatggaatgaatgagagaaatatggtaatggaaaatgattgatttttttttttacaataaaaaatggtatggttaatttagtaatggccaaccactatttatgtgtgagtactaagtaccaaaggggtgggtgatcttatctttttaaattaggtcaccatttcaaatgagaaatttgaccattcattcttaaatcttaatattatactttacaaaatattttagagaaattttatttacactttaaaaatttataaaaacactctcttttaatatttttaattttatataaaatttataattatattaatttttttcaacttttttctttcaattcatattcttaaaaaataagctaattaggatttttgcccctaaattttgacatgcaccaaattacgtcccctgaacttttaaggtcattaaaaataccccatgaactattgagattgtt

SEQ ID NO: 81024 - DNA, 1441 bp, Cannabis sativa
  modified_base (71)..(73): a, c, t, g, unknown or other
tttaacatagtattatataaaaatatgatatatgatccagttcaatataatataatacaatacgacctaannnggcgttccaaacgaaccctaaatgcgcgctttattagcttagataaatgtgtttgatgaaactaaaaatttattataattttcaatttttatagcagtgagtaagcacatctaaaataacatcactatcccactctaacaaatcattcttaagtaagggaacaactgttttaccaattagagcaagatcgatgacgagagatttaacatatggatttaactcatcacacaaccgatcgaagatcattcaggatacttacttatgtacctgcaccaattgatctctctgcatcccaatggccaccaacgattaatcctctatttttgaataatcgctgcaatttgttccatttttctggtctttaattaggtcttcctgtaccatagccacagaactaatctgaaaaatgcccaaaaccctagcagaccactattcaatgacctgtccatatgtgatgactaagtgaagaaaggagcagaaactgagagaaagggatattgataagaaagagattaagcgtcatggcatgggatcatgggagggagcttcagtgattgaagaagaagaagattgtggttcaaatctatctctcggtgattgaggccaatttttaataaggccggtaattaagacctaatattattaatcaatagagaaaaataattgtatatccattttattttatttattttaaattttactttcatttttatagaaagatctattattatactctttaagttaacgtaaaatatgtgctagacttctggtgacaactattattaatgggaaggtgtttttcaatgagatgggatgctatttgaagatattatagctttattgtctaaatttctgcgggcagtttgacttgcgataagatttctatagctcatggtttggcaaaacatgtcattcggttagacaataagctatcctggttcgaggagcttccaccgccgatcgtgattaatcatgtgtgactcagttcaccaagtcaaaaagaaaatatatgtactgctagacttaataagttggcagtggaagaatattggacaatccactcaaaaaaatggatataatttaataaaatataatataagaatattttttattaatggatataaaaaagatatatattcttcaacttatccctgaaatgcaaaatgaacctatatttagaaactaagttaatacatgtctagttttaaaataattaacaaaatgatcaaatataataaattagctaataaaaattataaaaaaaatatagggtgcaatttctacttgtttcgtcatccagaagattttttagtctattttttttcatattcatttacgttataactatttaagatatcctacaaaatt

SEQ ID NO: 81025 - DNA, 2939 bp, Cannabis sativa
ctgtcatctacattttctttgatttggagaatccatttgcaaccaattgggatcttccaggaggtaagagaacaagttctaaagttttgtttttcaccagtgctctgttttttgagttcatagcaacattccttttagatattcaagagctttcttcacagtagtgggaagaagagatgtcatcaagaattttgtcaatgcctaaatcggtcctcttgttccaccatggccgattccaactctgataccatgttgaatgagagaaacaagagcaaaaaaaaccaaaagaacaaaaccagtgaattgtatagatattgattgtattgttacactgattgttaagatgagctttaatatacaaaactaagagaagagaagttagttacaagggaaagttagttataacaagagtgagagtgagctgaagtgatagctcactgtaacagaaactaattaatttgtttatctaacattaccattgaagtttccctaacaagtttgtaaattgggtaataaaataccgttacaatatttttacaattttttagcaatataaatttcattagaactattaataacatagtccagagtctagagaatagagtttgcgcgccttgattacaaattaaagttttgctcctctttgtgaatgttgctcatcacaaaatgttgagtagcacttttggagatatattattattggtatgttttaatggagtctcctatattttaatttaaaagataatatcgctaagtaactattgacctccatgtcaaatttgtgttgtttacattcttattataaatcaaggggaccctagtcctacaccaaggttgacttcgacatcctcgagatggaagttcaaactttaataacttgattctaactcactatctttcagtattctatatcatgaagacatggaacaacctaatccaagccccaagagctgagattacatgaacctgcaacccaaaagccaacctgggcacctagggtttcacctggcgtccaagttgacatatccaactagggtttcagtttatgggactgtctgagtgaaaaatgctcaaaaattctattaggacattaactagacataccaaagatatatttgaggcattagaattagaatcagagtaagttcattttttagcacccggggcctcgagcacccaacactcaagttgacaatctgcaatctgggcaccttccaagtattaaattggagatttgacttttgaatattatttgtcttcatcaagaatagggaatatgtccttttgaagaataaacaacatttcctgggtgctaaaaataaggcccagcgcccaggttgacacatggggctggccctgcgcccaatttaacattttgtcaacctgggccatttttaatggaatttttcaagaataattatgatcatattcttatttttcaacaaatattcagatacaacaatttttggagaccaaacagaatttctggagggccagaacttagatccaacgcccaggttgccaatatgtcaacctaggctgtttctgatcaagttcaccaaaaagtgttcttgacatcttttttaatcatcaaaaataatgaagattcaagaaaactatgggaaaaaaccacaaacccaagcccttggaaataagtaccagcgcctaagttgacctagtattgggcctagcgcccaggttgaccatcaacctgggatgctatctttaattgctcaaatgccaaatctgatatgaccattaaatccaaaattatcaaaaacaggttaggaaaccttgtcctcatgttcaaaacccttggaattatcaaaaacgagatcccaggagctcgaaagtaagtatccagtgcccaggttgacaaatggcttggtgcgatgggttctacttatccaattttgatgttgttttgcctgtctgtctagtttttcacaataacaaagatccatgaagtcaaagaattcaaattcataactttttatttctcatttctggctcactcaaaaataaagagttttgagtctctcatttttgcaaaaatagcaacatctctgagaactggtgactagcttcgccagaacacagaaactgactaagtgattttaaatatcacttaggcatcttaaagtacatcatccaggttgatgccatattacaacctgggcgctaggatgtcaacctgggcgctggatgtcgacttgggcacttggtcatgaactgccctcagtaaaacaaggataactcactcaattttgatctgattgatgagattaaacttgcattttgaagctaattcaatgatatatcaagtcatgtatcatattccaatcgtaattctgaagcttttgtcattaaaattcacccaaagggagttacaaaaataagcgtcgagttactcgtagtgggacccatcgggctccgaaaaatggccatcaccaccaaaagctaattttcactgttagatcatcgtcaatggtaaagaacatattatttgtattttcccctatttttgtagaccttcttcacctgtaaaagaagagctccataaactcatttttcatatttaaaaaaactacctacaagatcagagcttcgctctctagtttatttttctagaatttggagctttgacacttagtatttttttgtaattattatctcgtgagaaattaaaactcgaagtagacgtagctccattacttttgcgatacagggagtgaactactttaaatttgttctctctcttataattacttaactacttaatcattctcgttaatttagtgagagagtgtggcttaaaagtctagcccaaatttttgggtcattatttttgtactttcattgagagccacaaatcgagaaagatactagcaagatagttgcatcatgttctacaagtgttgatagatagactccaatag

SEQ ID NO: 81026 - DNA, 1626 bp, Cannabis sativa
atctaaacattctatatactatatagtcaataatgtccctatctataatcaagctcggcccaaacggattaggtctgtgtttaggatttacttagttggagcacaatttttttttctttataaatttatatatatttttttaaagaatattacattttttttctaaataaggtccccaaaatttattttttctaatgacccattatatttcagagccaaccttttgtataatcaatgaaattgattttgtgccatatcgttaaaattttgtgctacacttttctgtttttatttgttcaattctcatttgttaatatagatatgttactagatattagttttaggagtgtttatggataatttcatattttgaatctaattaaattcacataatagttcaaatctaatttaattcaatctgtaaaaagttggattcactaacgcattaaggttgtgtaacaaaactttgggatcacaatatggtatctttcacttatttaacctacagagaaaagtttaaaactttaaggttgcttctgtatttttaaaacttgtatgcagtggaaaaaaaaaaaaaagatttacaagcactagacaacaacattctgctttttcagttctttgttccaattttattttatctttgataaatctcttcttcttttttctttttttttttttgcagttggaataggctggccggttaggttgctgtcaaaatattgtgtctaaattttcaacctgaaaataagattcttgttttagtgttgatgcacattaattctttctttctctctttttcttttctttaattaataaattgttaaaataccattttaaaaattatattttacaaaaattatttattgaatttctgtaaataaatacccaagtttaatttttatcaataataatacttacttaaggtactagctgttaatattaaataacttgacacatgtcaatttttaattggtgcaagtcatcaaatttttatttttttcaaaaaaaaaataatttaaatatactaataaaaaaataacgtgtgataatgacttaaaatttaaaaatcacgtagttccaaaaatataaaattattactaataattaaacttagtatttatttgattatttatgccataaattactctattttaaaatagtaaaatatgacatgagttcaattttcaataattttattttttaaatttttaacacaaaaaaatataaaaaatataactaattttgtcattagatccgattattattaaattttaatttgtaatttaaggtcctatttatataattttcaaaaaaatatagaatgtattaataagttttacaaaaccatccaaaataatttaataaattaatgatcgttgtgtacaggatcactttgactttgttgttaaacgttccacaaaatattatagtgaaatccattaatgatgttataaaactctacaagatctcgcaactcaatatcagaagaattttatttctcaaatcttatttccaatgtctcacatatgataagactaatgtcctgtttgggaaatctaaaatattaacattgtacaaaatgactttaccatcatcatcatcattatattattattattatta

SEQ ID NO: 81027 - DNA, 1138 bp, Cannabis sativa
aaatggtcatgaatctgaatatagacagtgttaaaacacatttatttatgatttaaaatacttgactcaatcaaatcttaattccattagtgtcaattcatattcattccaaaatgagatcttgtctttttcccccaaatatgaatttggccccatagattcatcattgaacattagctaataaaagataatacatttataattatgtgatagaaaaatgcagtgaaaaaataaacattattcatcaaaaaatgtcatggaaaggatttaagaattgaaaaactagcaatacccagatgaaattaggattagaaattaacaaaaagtaaaagagaattaattacctgttgggaagagagttttgaggagaagaagctgtcattttgagttgatgaggaaagaaatataagaggaaaggatcgaaacgcttaaatatgagcaaaaggaatctttgaagagaatcatattcatcacccacacacatgcactgcagatgctatttttttttctttgaattattattattatttaggatatttacgtggaaaggcacttaatatttgtaattataatacatatagttaaataaaaaaagtaattaaatattttatcttacaattttattaaaatagtactattttgattattaaatgtcaatattattaaactatgtattaaataattattatttattttatcttttaataaaaaatatacaaatttgaatcgaaaaggatctgcaataaaattttaaaataaagtatttttgtcactacttatatgtataataattagaaatattatgagatttcacctatatcctttgttatttcagattttttttcttctttatttatttttgtgattggattaataagaatcaaaatgagagagtgaattcatgtgtgtccttttagaatttaatcaaggagttttctttctttcaaaaatttgtacactctaaaagaaaatattcaaaaagtattctcatataaaagtttttaagtttttttgggaaatttatggtaaaagtttcacaatatagttttacaaaaattagtgttttatgtaattattttaggagtttttacaaaaatactgaattttgggtaagagtttataattttactgtcacaca

SEQ ID NO: 81028 - DNA, 1138 bp, Cannabis sativa
taaggagattcaaacttaatgtgtggtactactaggctatttctgtgactagtaaaatagtaaaaatagtaaaaaaaaaaaatggtaaatttctgaatgtaaaattagttttggagtccccattatgttgttccttttgggctttagtatagtttattatcttttgggctttagtatagtttattatcttttgggctttgcctaatctacccaaatttgctgattccatgctaagtctatcttatctatccaactttcacaaattttacatatattatggattttttttttcttttctgatttcttatttttgttaagagaaagttggtaaaaaatttctaagaaaattatctcaacacttaattcctataatagtaagatgtcactctttgaaatgaacaataacgtagcacaaaagaaattttatttatttatttattaacaaaattatatagagtttaatttgaatataattatatgactaataaattgacatgttcatttatgattggactcaactatacatgaactccaatatttagtctttgattaagaggaaattagggtaaagtgtcaaccctaatttgttcactaatccacttcaatataattttaataataaattaaaaaaaaaaaccattaaaatttcatctccaaaccgacaagaacacttgctaatcaagaaaataataataataataaatatgtggtgttaagaaaaatggaattattaatatataaaatatgtgtagctataactatatatataggtcaaaacaaaagaaaagaaaacgatattaattaataaattaattattatgaaattattaatggattaataagaaattaaaatattggagattgtgtttggaaacatgggcaaaaggaaagattacaacatgtgtaatatggaacctaataattatgttaattaagttattagattttgtctttacttaagagattaattaataatgatctgactagatgttcaaccacttcaatcatgttctataatagtatatatttatatgtatatatatataattattttttaattaattaattatggatacgtaaacttgcaccatatacatatatacccatagagtgcaaatgtgaacagtagaataatatt

SEQ ID NO: 81029 - DNA, 1393 bp, Cannabis sativa
  modified_base (33)..(46): a, c, t, g, unknown or other
  modified_base (88)..(92): a, c, t, g, unknown or other
  modified_base (203)..(203): a, c, t, g, unknown or other
ttagccacgaatttttagtcacaacataagaannnnnnnnnnnnnntagtcacaactttttcacttttagtcataagttttgttgtgnnnnnaagtaagattttttgtagtgccagagccccatcgttcataccgattcccaacccacgttgcacatggtaatctctctcactctctcattacatttctctctctctctctcnctctctctctctctgtctttctctctttccctctttcgatctctctcttttcctctaattttggcttttttgtttaggttgtgcaatggtatatggtggtggtgaggcaagggttgcgatggggtcttgtggtggtgcggcgagagtttggtggtggtgttgttattttgaatttggataaaatttttataaataattattttcttcggtgtgtttgttatcaaccggaatcaataatgtaaaattttatttttactcagttcttgtcggttctaaattgacactatatttcgatactgatggtttataatcgacatagaaaagtacttttttgcgtctaccgttgatacgttggttacctgaactaacgacataagtataaatgtcagtttaaaagcgacgaaaatataactttttgtagtagtatactggatacacactcaaatagcccacacttattacacacagtgatgcgtatatgtattacatttatatcattaagggactacaaatatttttaattgtgcggttgagattaattatacatcattctgtgtaaaagttgtgtgtaatttgaaagtctcttaatcatttagttgaaattcttgaattaaaaatatttcaaattaatttgataagacatccaattaatgaattggtgtaattaatttcagtgaaattaataataaacaacattaattagtggtgaaaggataaacaaataaaaaaaaattattttatgctaaatttaaattatatttttgaataatttgtatttttgcctcctgaatttttgaaaatatttgatcttacctcctaaaatatatggtttgttaaaaattctccttaaaatataacaattatataattatatctcttctgttaagttctgtttcttttattgttaaaagttagtatttttacgtctcgaactttgatcaatacaaaattttaccccattttattataaaaataatttaaaaaattataatattttatatttctgagaaaattaataaaaattattaaaaaaactgataaaaatattaaattatttaaagagtattaagtttacttaaaaaaaattaaattattcttaaaaaaatattttcaaactttatttttttttaacaaacaagtatcttataaaatcaaactaaaattattgaaaatccaataaataatttaaa

SEQ ID NO: 81030 - DNA, 2453 bp, Cannabis sativa
atggaataaaaattatttcctttctattccatttcattttattacctccaaccaaacgctttaaattttttactcaaatatgacagctttaagtttaattattttttatgacattttttttgaactattttataatatttgctacataaatttaattttcaaacacatttaatctttagataaatcaattttagaaaaataaaaaatttcatttcttcttctctgtcaaacctacctccaccacccctagcaactccactatccacattcattcacaaggttcacatccggcaaacagcgatcgacgatccacccatctagtgacgatcggtgagcacgaaattcaccaaagatccttcattaaaaaattaattttttcatcaagaaactagtattttcataaaaaaaacttattttttcatcaataaactagtttcttcatcatgaaattaattttaattatataaaaataaaatttataagagtttttaaacttttttttttaaaatatactacatttggtgcagttaaaattacatgccatatatatatatcaaaactttcattttccttacattttatgtaaatagtccattattcagtccaagaggcctaaacaaaaattccttttacaaaatacacgattttttataataattttgaaaaataccacatattcttagaataaagacccaattttttctttctccttaaagacacacactatttgggtcgaccctaatactcaagagtctaaatattattcaactttcaagccatatgttaattataattatatatctaatctaaatacaatgttgagatttcgtatcaaaattatattagttgtctttatgtatacacgatataattgttcactatttctttagactttttctttagtgatcatactatattttcatgatattaaataatacgtactttgttctacgttatgaatttaataaaaaaaaaagggtgagtgattagtgttatggttatgcggtggcattgcaacaaacgacatagaaggactaaaacgacagtgagattccaattatcaattatgaagacaacaaacgacatacaaagacctaaacgacagtaacattaccctctgttaaaggcaacaaacaatataaaaggaccgaaacgacagtgagataatcaaaaaacaacaaaggaggaccaaaacgacagacagaactacaaaatgatatgtttattgatttaatctttatacaaaaataaataaattaaacttttgatggacacaaagtgcgtgtttggaaagtaattaatttttcgtgtagtgagaagtaattacacaatttaacatgtttgtctgattatacaattacattataactatgtaattgaaataaattgaggggttacaattacacactctcataaaaattcaatgtaattactaaatttttctattttaaatattaactactaaaaaatattattttcttgtgaaattattaactattttgtcaaccaaaatattaagaattcatatataactactactctatatttaaatacaccttgaattttaaaatataatgtaactacaagactgtaataatcgtaaacttatatttttttttagtgagaagtgaaaaaaagttcaagtaaacttataggatttcttagttgactttttagacaacttttttatttatgtatagttatttttggaatatggaatttaggagggaaataaaacaaaaacaaattccattaaactatactctatttttcttcttcttcttcttatattaattcaaataattttttttttcttttcagaattttttgtatgtaagtcttttttttttcttttttaaaacccaagtctcaaaccaaaattaagaatagaatgaagaaatgatgaagtgaagtgaaataaagatagtatcaaatcccaaacattgaagtaaaataaaacctcactataaacttttctctgtgacttaatatatttgtttacatataattaagtatagatacatacccaaaacataatatatactactatactatacatctacacaataagcacttgatttcttcataatctcataactaataagctctatattcaaacacactcattcaagtgaaacattgagaatctgggttagcttgaaataataataaaaatagtaattggtaactaacaatggctatatagctgcattaattttttaaaaggtatcaaaaagtaaaattatcttctaattccaaattctctattaactccagaaacttaaccactgtctattataccaattttcaagtgataatgaatctaaattttcatatccttgttgccccaaatcctcaatatagttgcttgttgttgccattagtactcctctgtcttcaaatcttgtttctgttttgtttttcgaatcggtgtttcgatacttattttcttc

SEQ ID NO: 81031 - DNA, 947 bp, Cannabis sativa
tgtttctttttagttttccccaaactttgaatatttttttcgtagataatttttgtgggttttgtatctattattttcatttttgtaggttttagattttctaatttatttttttctgttgtttttttttttttttgtaatcattatgtttgatttatgtttagtttattatgtttttcatttttgtttttttagttttaaattttgttataatttttgttgtttttatttatgtttttgatttccaaatgtgtttttgttttttatttcgttttgttcatttgatcagtttttcttttattttatagtttttccatagtttctttatagtttaaacactatttctctgtgtgtccgtattttaatagtttttaaatagtttctgtggtgtccatttatatattatcaataggtaaacataagaactatcatagagattgatattgaaggagtttaattgggttgatctactactttattttatttttatatttttttattgtgtttctatatgttttgttgtttatataaggtttggtttatatctatgtttctgttattgtattttttttttaattttttgttctatgttggtttgctcatggttgttttgtagttgtattacagttttgtaacttttgtatgcccattcattatatttcctttgttttaaaaatgcaggattgggtatacaaatttagtcctagagattattatatagatccaagtgtgtttctacaagtacctactctgttattcttaatattaagaatactatctcgggtaatttgttgaagatgttccgagatacccaatttggtcattttttagatattcttgagtttgtattccatcccccaaattattcacagccttctattgagggaggttaagcagcccaattcgaaagaattttgggtaaatgttgtgttggaatttattttacc

SEQ ID NO: 81032 - DNA, 3071 bp, Cannabis sativa
tgtataaaattagttatttagagccattctttgcttatgagtttcattgggtagtttgacttcagtagccaatccaatgacctgaagaagcttcaccacataccaagtcatgtcaatttgccaccattctaacccatgccttgctgagtactcaaatgcatggtgattgttgtgccaaccttctccaaatgctaacaatgccacccacctacattatgaaccaatcttataaaacattaattactatgaacaaatttctttctttgttgcaaaaaaaaaaaaattgagtctttaagtgtttaccaattgtttctggacaaatcatgagtcttccatgcttgttttccccaaacatggcaagcagagttaactagccaagtaatatggtacacccatatgaccctcacaccctgcagtgatacaacaatcacattttacatcttcaaaattaatcttccaaaaagaaaaagtgaaattgaattgttaccattccccacacaaggaaaggaaatcctccaagtgcatatagtagagttgccattgctattgggtgaacaatgtaagtattcttaaggaacttatcaataagagaccaacaaagtggaaagcagtggattgtaatcattttcttaaaaagattcaattaaaacttcacagttgggcaagtaggcacctctcgttcacaggtagagtgcaatttgggcattagttgttattggatgagtatctttatgcttccacataaaatagtcaaggagattgataaactttgtagagactttttgtggagtgtgaaaggtaactctagtaagatgcatctagcttcttgggatcttgtttacaaacctaaggtttgggttttcgtaaaggaaccaagtgaaaaaaggcttcgctttctaaataaatttgggctatttcaacaaagcaagatgttctgtgggttaaatagatcaatgctatctatttaaaaaagggtaaatagtggcataagtgctcaatgttttatatttgtaagcggcataaactcaatgtttatttttagcggcacaagtacctaatgtttgtaaaactgtaatttttttcttattttatcagtacagactctggtattgtcttaaacatggtacatataaagctcgaattctatatcattgggtctagatagaaatatgtactatcagttacttccaaatgttcctttaataaattcaaaatagagtctgtactgacgaaactggaaaaaaatacagttttacaaatattgggtacttataccgctaaaaataaacatttagtttataccgcttacaaatataaaattttgggtatttatgccgctatttaagacaattacataagacacactattatatttggtgagaagaaaaaaaattaggaaggaaggagagtttagaaaagatggagaaatgataataaatctcctatattaaaagtatctttgtaatggtagaaatatatagttattttattaaaaaaaattatattctcctcttcaaatattatatgtttttttttttttttatgaaaagtatttaggacataatatactttgttttgtcattttctctcgtctttctaaaaatggatgaattagatcttgaacatttgggggagaaagtatacttccatcttacctctccctactttcctccctaccaaacatttattctctctttctaactcttactttccatttatttcatttcacccaaaaaaaatttgtgccaaacagagatacttttctattttgtaaaaaaatcacttacattaaaagttgtaatattttttttaatatatatatatttttttaagtttcatacacttatatggtaaatatttttttaacggattcaatactatatgttatatttttgttaccgcttctaatcccaatttcgttaattctttttaaatctgactaatctaacacctatcaattgattaattgtctactttcaataatctttttattaaataatttcaaaactaaaaaaaaaaaatattttattataaaaatgaaataaataaataataacatgattctattgtgtttttttctcgatatttcaacttctataattatttactgattttttaaaaataaaaaaaatcagttggactgttaatatatttataattggcattttagttaaccaagatcaacacttagcgaaatttattgtaacgactacaacaaaaatacaatatataaagtatttaattcgtcaaaaaaaataatagtatataaatgtatgtaattaaaaatataaaatattaatgccgtaaatatcccttaaaaaatataaaaatttcaacaaaatctaagtaggttgtgagctttaattttttattttattttgttgagcttcctccacattttttttgttacttgatttgttcttacagttacaagaatctccacaatgctcttttagttgtctcaatatcatgtggatggttgagtaattttgatccaaataataataagtataaagtgataaaatataatagccccaatatatgtatattatgttgtgactttttattttaaacttttgtatttgttagttttatagttattagctatacaaaataaaaattaagtcattaagtatattttactaatattttgtattattgtaaaaaatattttaatttaatttttcagctttaatttttttcggagcctcttccacattattatgagtatttaatttgtttttacagttatcacatgtacaaaaatctccacagtagtttccatatagaaaacaatcacaatacctccatatagaaaacaatcacaataccttcaagaataaaaatacattatggtttagaaattattagtaaattcaattttgatgatttctttaaaaagatcattaaatttcaaatttgggtttaattgatatatataaagagataattagcaaaatgaacttggaagattgaaagaataagagcttacttatattcaaaaggaaataaggtactcctactttcatatcgatatgggataatggaatgttaagaaaatgtgtacatat

SEQ ID NO: 81033 - DNA, 952 bp, Cannabis sativa
aaaacccatttaaacaaaagaaaacgtttagaaaaatactttttttggcaattacgttgagagttccaagattacgatggggtttcgtgattagatgtggatttcgcgattgggtcgtgggttttgcgatggggttgtgtgacttgggattgggtcggggttttgtggtagagatgaggccagcgatcgtgggtctcgtgcaaaggtggtgggtttcgtgtggtcggaggtcatggatttgtgggtctttcaggtggttggtgagagttagagattgagggagagggagagtaaacgagagagagggagagttgagttttgaatagaaaggatattatgtgggattaagatttttagagtattaaatttctatttatttagaatagaatattaaaacactttatacttaatttaagcatgatttaccaaatttctcatatgttaaagtacgttttcgtaaagtaaattttgcacaaatagcttagggtttaattagctgaaacacaaaagttggtattgaaagtgacaaaccccttttctctaatatattgtactttatttctgtttgtcttgattaatatcatgtgaccaatagaactaagttaagtaatatactcataattagattcgtacaagaatatacaacatacaaaataatatatacaattaaaaatgacaaatattaatttctcaaaaaaaaaaaataataacaaatgttaatgtcttttcttttgaaacgttggttgggtggattgtactccatgaaactctttttttctttttatatatatattagatgcgagttagccacgtaaatattagttttattttaagtttttgtgattttttttaagaatttagtgactaattgtaaattatgttataaacgatatgttttataaaactaattgttaagaatgtcataattgtgtatataaacctataatataca

SEQ ID NO: 81034 - DNA, 2179 bp, Cannabis sativa
agctcagggaactagagctttccttagatggttcttcctccaccactttggattcatgatccggccttacagggtcctaaggaaaatctcggactacacccaggtacttctggtgtaatttatgaggtctagaacacagcgatgcagagccttcaaactttcttttcttaaaaggtgttgttctctcattagtttccgatgtaggcaaaacaccaatatcgcccccaaaattctttatctcatacaaatctaattccccaaagtgtttaagatcataaagtaaattttcttgggcttcaaagaaatgagctaaagcccttttctcttcactattttgcacggccccaagcccaacaaacttattcaatttattattttcagcctcgtttgattctttctggccgagcatagtagtggagtgggccttgtcaacaaccccacttaaattagaatctttatgggtctgaagtgggcccccacccccattaactattgcactaggcaaacaattcaacccatgaggccccataacatcacttgaacccacggccgacccaacaagagtactcaggccaatatcaattggcccacctcccacaccattgagagcctctttctccaaattcaaaccgatttccaaaatcgaggcattccgtccttctacagctaaaaccggtttggtagtagaaaacttttcaccaaaaacctgtcccttatcacccttattaccagaaatggctaaatcttgaacaggtcgtcggaggccttgggagccacaccgcctgcaagtttacctcggatcctgtagcatcaatgggccgtgaagttattttcagcggatttcgaaatcaccgagcattggaaggaccagggggcttcgaacggtcaccaccgttcccgtcaaccgcccgtgagggaagaggagcacgaaccttgttcccctgagacctggcctgcacaccacggtccgtatccgactttagacccgaaaaaaacatctccataagctgaagaaggagaaagccaaggaccgaacataggaaatggtttgtcatctctgttcacaatcatcacaggtgaggataagctacatccccttctttggtgaccgagaatgccacatttatagcagaaaattcccactttttcaaacttgaaatgaagccactgtttcacaccattagccaaatcaaagaaacaacctgaaacgagtggcttctcaaagtcaatatccacaagcactctaagaactttgctccatatgaaaggtttatcatcttccagatccactttcaccacttttccagcaagactacccaaaagattaccatttgcacaagaaaaatactcatgtggtagattatggatttgcatccatattctcagccatttaaacacaaccggtccagcagtcttcggggaccattccttcaacacgatagtgtacccacggaagcaccatggaccattctgtaaaaccttatctttgtcttccacagcttcaaacccgaattcaaagcaattagagatcctttcatggtcctccatagccacaactgagaccttttttttccaagttttagcagcaaagtcaaccatggcattctcatccacattcataggagccaccactttgccaaataaacccaaagcaggtaaagctttcagagaagattcactggggatcaaagagatagtggtttcaagacaagtaaagcattttcctttaagaggattggtggcaataatgacctccataactacccgacagcaaaagacaagagaaagtagacaagagagggaatccccaaggtcaaaggcaaccccacacaacaagaaaaggcacactcagaagcaaatacgagactaaaagatcaaataaagaaccccaaccacccttaaaaacagaaccaaaagacaacacaacacctcaaacagagaatagaccagaagaaaacacactcaaagcataaaaagatcctgaagcaaagagtaaaaagaccactaaaaacaacacacacagagtaacagtagagaatcagggataaaaggcaaaaggtagaaggaaatgagactcaaaaaaagcaaccaaaagaataccaacactaagggagaaggaataatagatgaccattccttttccatgatcacgcgcctgaagctgattaacttattttag

SEQ ID NO: 81035 - DNA, 774 bp, Cannabis sativa
agtactcttcttcttgttccaccttatttaggtcaagtgtaactctatctctttgaatgctctattgtgtttctatgtgaacacatgtagggttaaaagttcctgcatctttactgttagggtaactcttagataaacatggaaattcaatcgcatgaaatatcacatccctgctaattaggatcttaaaacctccttgctctctaacccataatctataacctttagttccctcttgatagcctagaaacatacgctcaatagctcttggttcaagttttcctacactttgctgtgcataagatgcatacccaaacactcttaggtttgacaaatctggtggtcttcctaaccaattctcctcatgggttttcaactctattgcactagagagacacctttttacaagatagccagcagtaaccactgcttcaccctagaaacctaagttaaacaggatacacttagatttatttaggatagtcatatccatcctcttagccaccctattatgttgaggtgtacgcctaacacttctatatctcaacaaaccatgttctccacagtaagcatcaaattggtcattgcaaaatttgaatccaatgtctgtgctcgacaccttaagtttcttattagtctggttttagggttttctaggggtgttcgcggtgcgggtggtgcggtttttaaccattttttcaaaccaacccgcacatgcgttttttccaattttccaaaccgcacccgcaccgcaatactaaaaaaccgcaaaaa

SEQ ID NO: 81036 - DNA, 2066 bp, Cannabis sativa
  modified_base (1026)..(1045): a, c, t, g, unknown or other
gccaaattgttttcaaaaaacaattttctgtttttaaaaacaaaaaactattttttagttatgatgtcaaacatgcactaaattttgcacaaaacctattcttttgcaataacttttactctgttctttaaaatatacaattaggacaattaataataaattttaaagaagcttacaaatttgagaagcaattttagtgtggtttattttttatttttttgaatgatagtgtggtttatttagttagtttctttaagaaaaaaaataaaaacaaaagaacaaaaaaaaaactctctgttataaagcatgctctaaagtctaaaagtagtggtgcccattacctaagatcacctaagaccttagatcattttcaatgcaagagataaatattatgataaatatggaacaaaaataaacaaatgttatatttaaattcattttcaggtgtaatttgctattacataataatattttaaaatataaattatgacaaaaataaaatatcattaaggattatcaatcaattaaatatttaaaaaataattaatagcaaaattgtatataaaaaaaaaactatatttaaactcaacattaataatcaatggtaaaactataattgaaaaatattttgtgtaccatatttgccataatattatatcatgtacagtggcacaactttaggtatgaaccaaaattaacacaagatttatcaccatttgaaaactaattttcttaaaaatattaaaatatatagtattacaccactattatagcacttcatcaaagatctaagaagtcaatagggtataatttaatacacattaaaacctccacacataagattaattttggagctaagcaaattgtattctaatttttagcaaaagtaaataaataaataaataattgtattctaattaaaaaattatactatattgaatatggaggttggtacaatttttttttccaaagagcctaaaagaatcaactttttctgaaagcaacctaataataataataataatnnnnnnnnnnnnnnnnnnnntaataataataataatgatgatggtttgaatatagaagtttttttttttgtaccatatttaataaataattctgaaaattactaaaaaaaattatatagttatagctataggtagtcttaattaatattaggattctcttcacaaaaatgtaaagaagtggaataaagtaatgaattattaaatacatttgatatctttcttctaaacctgatactctgtgattaaatgggtgcaaagtatttacttgaaaggacaatcgttctagcaagacatgacaagagagaatcctaattggtattggagaaactcctcaagcttatattattgaccaattacgagtccatgatacaagttgctagagtaaatggaaaattcaaggttatcaagttttatgactattgatattgagaaggtagattatatatgctcgtgtggtttggagtaagctctcagttctcaagcacagattcattgtttgataagcggtgaattctcagttgataaatatagacaagcttcaaagattaaacttgtctattaattctccactattttcgctaagagtcacgatcaattgttttttctctatccacgatcaattgttttttctctatcctttttttattgctctactgcgtatagttcatggtttttgtgtttcacaacttggcccattgtatatgcagactggaggatttggattggaaagttgggatttgacatacatatatcaggtgttgattgttgttctagttgttgtggtttacttcatttgggtaaacaggaacgtttgtacttttgaacatagttcttacactagtgagctgattaattaagcaagattttaaagctagatttggttgcttagggtgaaggaagttgtctctgaaagataaggataagcttattatcaattctataaatagtagtatttccaattctcaactttgtcttagcttttgttgtaatattttttgtctaatttaatgagaaaaattctcctttaaaaaaaaaaaaaaa

SEQ ID NO: 81037 - DNA, 971 bp, Cannabis sativa
tgacaattaattagtaatatgacacatgatgcaacactaattgacatttatcttttgggaatttttcatgaatacctttaatttcatgtttttatttataattaatgttatggccaataaattttttaattgcagaagtatatttataaaattttaaaattacaaaaatatatttttttcaacaaaaatataaaaaataacgataaagcaacctcatgataattataaattaactataaataaactataaaataaaaataacctcgttatcctataatacaactaaaaaaataatttattatttttactgaaaagctatttatacaaataataaaaaaactcaaagaataaaaatgaaattttttctgtgttgatttatttttataatttttttaaattattttatctattatgtaaatttttcattatattattacaattattatatgtatgtagaacatcatgttatttggccaataccatatcaagatagtatcttataattagttatcagtttcttatattattaaaatatataaaatatgccaaagtatattacttttcgcatgttgtcacttgacccttagcattttttatttatgttggatatatgtgaatgaacattgctatcagctaccatatggtacccaacaccatattgttgcaattgataatcaattttttttatattatttattaaattaaattgtgttaaacctaatattaatttacactaataacgatttgatgatcatgttgtgatgcttggtaccataagataccctttaattttttttttttttttgataaatcaaattagtttataatgcattatttcaacctctatttccaagagcattgttttattaagacttgcaaatactactatttgacaaggtgcccttctgcattatgtgtgtgaataaaagttgcatacgtaagtaggtacgtaagtaatatatatgtatgta

SEQ ID NO: 81038 - DNA, 1077 bp, Cannabis sativa
  modified_base (1047)..(1050): a, c, t, g, unknown or other
gcaaccttcgtctgattaaaacctgatgcaactttcggccaaccacagtaacttttgtctgattgaaatcttcgtctgatgcaaccttcggctaaccacttaacaactacccagcaattatcgtctgattgtataagtgataatgtaagatgtattttagtaattaaaaagacgtaaaaattataaatattattcatactttataaagatatttttgtaataaaatataaatttgtattttgtacgtaatagttactttttcttcatatataaatatatatttatataattattaatttggaaagaaacaaaattagaagggaaagaagaatcgaagtccaagttgtagttctagtattctagaagatgtgtcattgatagtttaaacttttctcattattaataatttaatatagataaatatatacttctaataaataacatgaaaactttctttcaaaaagaaaaaaaaaaaaacaaaacctgaaaactacatttgtgatgaccttgagctcaaatctggcgtatatttatgaccagtcaattacagagaccccaaaaagaatatcacttattattgttgttgtttttatattaccaaatatatatcgagagaaaatatatcagggagcaaactttgacccgtgtcatggctggccatgtaatttttgtaatatgtgcaaaatttaatttcaataaactttttaaatatataataattaagaaacaactcacaattttcgccagtagttttataaatttcatccattgtttttttttttgttttttcctttttgaatcaaatttcatccattgttgattatgtatatttataatatttataagaaaagtcaaataacaaaaataagtgagttttaatcttaatctcgatcttagtggctgagtaataacaatcggaatattctttggttcctagcacatgaaagtttgttagtatgtgatcaatcttgtattctataaaaatcattatattaaactatatgggactcgatacttaattgcaccaatagcgatattgacacgtannnnggtgctaggcaccagtggtgcccttta

SEQ ID NO: 81039 - DNA, 2517 bp, Cannabis sativa
attcataaacattaaatttaaattgtaagtgtttatgtggtgttatctctttgcagagataattataccatagattttgtatcaataataaaatacaaaatacataaaacatgaaattatataaatataatttggtattggcatacaagttaaagaatatgaagctcaatttcataaaaaaaaatcataatgaaatactttcaaagagaaaaatattatattaatactttcaaaaatgtcacaataaattatctacaataaagtgaaattgggaataaaattctcatactaataattgaaagtaaattatttaataactaaaacaattaattcagcttcatcttaaacttggaaaatctctacccttctgttcatctatctgtttccactcgctaggatagcaatctaagtttaagcagttggagctgaaataaaaagaaaataagcatggttagtagatctagaattagtaacccaaagagatagtaattctctaaaacacatgaattcattgtaaagttagaaataccttgtttctctgaccaaaacttaggacactagggttttcaaagcccctttttgttgtaatagacgcatttccttttttctttgcctttggatgagcagccttcttgcccttattagttgtgttaacaacttgaggaggcttcttgctattcttcaatttcttcttctttgtgggttttgaagtagagacagtgtttgactctagttttgccgtaccagtcgtagcattactagaactaggagctttgtttcctcctttttgcggtcctccaatcaaattttcaaatttctgaaggttgttgattaactcgtgaaagtcaaatgttaacttgttcatgacataatttgaagtaaagggcaaaatagctagagtcaaactatttaagatcaaactcacttgagtttcccgatctataatggctccatgattttcagcttcctagatataactagccatttggagtaggttatcacgcacgttctgatgaggtttcatctgtgcatcgataaattttttggtcgcctcaaaacaagcttgatctaacgccatcccaaacagttcacttaactgatttaggatatttgcagtcgtgagagtgtttgcaaaccttgttttcaaggtatcaaccatgctagacagcataaagtttcgagctttattgttatgctcaaacttttcgttgactgccttggtagctcaggagcttcttcagttaatacaaacggagagttttcatgcatgagagcaatataaatgttctcttttcatttgacaaagttagctctagagagcttgttttcgatcaatagtgacacaattgggttgttcatagtcatattgtaaactttaaatatcaataaatagaaatgcatccttttattcgatcaagttgaaaacctggcgttgtccagtttgggcgagagtcaaggtcattctatcttatgagattccaccacggtttcatactttgtaagccctactcttagcaatcactattagagtgatcattactgagaataaaagacttacaataatacttatctttggaaattctacgacgttaaattgttaatgaatgaacatctattatggatgaatctcattaaaacaagaactatgtagaaccaaatgggagatcgaatatccttatagtaaggatcattattttaaagtatgtattttaatctttatttatataatctatttattttaatatatatttaattatttaaaattactaattagataactataattataaattttaatttaataaatacaaaattatacttagattgatctaaaaacaaataaaaattatttttcttcttagtattaattctcaataaatattatgaaaattacttaatttaagttgttataaaatattaattaatgttcaactcaaatttaattttgtataaatatatatgactaaattcgaaatccaatgtatttaaaaatatattcattttttatatttatataaaataaaataaatcctaaaaaattattttaatttatgttgatttaaaaataattaataaattaatttttaacacaaatataattttcctatttaatgagatttcttaagaaaaatatccaatatttaagtctcttgaacgaaataaacttaaatattaattttctatttaattcaatatatttagaaaaatactaaaagtctactcaaaatataactatctacacatttgattaacaaattatttatattctaataaaactaaaatatattttagtgtattgattttaataaatcatctataaatataatctatgttatctcaatttttgcactctgatgtggcatcacatgaatggtgacacgtggaatccacttggaacatctgctcgggaagcgtagtctgagcaggatatctcgccagcatgcccagagcaaagtattcgacaatccgcgcagagcgatcaacacttagcgaattcagatttcgcatcgtgagtca

SEQ ID NO: 81040 - DNA, 2313 bp, Cannabis sativa
gaaacaaaatcgaatactaaaaaatattgaatgttgaccctgatttatttatttcatttttaagaagaaaattagcacattaattgggcccacacatataaaataaatataataaacaaattaaaagacaaaaacaaaagtaataacgtgttccttattcttccaaaaaagtggtccccaccaatactacccgttgttccaaaacaaaaccttctttttctttcccattatcgaccgttaggcatatattaattaaataaatccaatggttcagatcaaccaaagcattctatgtcttcaacgtggacggctgagatgaattcgacatctgtaccttagtggaggagtacaaatcatactctcaaaacaggaaacgatgatagatcgtctcttttatcgaactccatcatcattaccgtcattaaaatcatgccacgtgttaatcaaagattaatatcaaccgatcgagcaatcttgagattcgtgtcccgaagttataggtaatgttaacaaatttacgcgtaaatttaaaaaaggatagtaaatttttaaactcgctgagttgacctcgagtcaactcactcactcactcactaccactactccccctataaatactgcttccacctaacttttgttattttattcttgaaacagaaactatcgccttctcaactctctctctctctctatcacgagattttctcactctttctctctctaaaatgtctcagtcaagcgcaatcttcgctactttcatggtagccactttgtttttcagcttatcgattgctcagtctccggccatatctccagcagcatcaccgactaaatctccaccggcggccactcctccaccggctcttgctccggccgctattcctccatctccggtagcgaaaccaccgaaatcttcacctcctcctgcaatcgcaccttctccgtctgcaatcgtaccttctcctgctgcgatcgctcctactccttccaccgtcgactctcctccgtctcctcctccctcatcgagcgattcaccggcatcctctccggcggaaggtccctcgtcgatctcttctcctccaactgaagcacctgctccgtctaaaaatggcgctgttctcaacagacttgctttctccggatcggttgcagtcgctctctgcgccgccaccgttttgtccatgtaggcttgtggatctgatttgatcggatctttctctctatttttagcgcttgattatgatatcgtttttttttcgtttttttctaggatgattataatgtcgtttagtttttttattttagtcgtttttattttttgacgatgaaacattgtgttttagtcaatttatcataaattattttaactcttgtgtttcctatttttcttaattattattatttaattttatatctgctttgtgccttattatgagaagtactttaccaattagattatttaaacaaaatgtttcatattgacattcaatttatttgtgggacttttttattcttacacttaaattatttttttttacaattttattaaattctaaaattacaacaaaaaaatggtataaaaatacttattgtaactactttatttttaattagtgaaatttgatattattcataatttcataaatgatcaccaaaatattaggaataatggattttgaatttaaaaataagtaaccaaatttaggatcatatattcaaacactaataaacaggataataatccgtaatctgttgttgatatttttttgtgggttttaattaaatttattttctttataataaagttagttgactcagtattgactttggtattgtaaatatgaagtagccttttgttggtcctcgtttattttttctaaagcaaaggcgaaagctttttcaaaagcataattaatggcgtagcattcttttttttttttttttcgaatcaaaatattttgtaaatatttctataaaaaatatttagtttgtatttgatatttacttgttgacggggcattttttttttttaaaaaaatttcagatagataattgatttaatttacaaaactaaaattcggaaaatagcctacaaaaaaagtatagctcatgtcattttaagtaatataaaatgaaaattcacatttgtcttgaaattattgctcaaaacaagtttttgtggaatgtctgtcttttaaaatggttagattttatcagcaaatataaattgaatcaagttatgagcatgtgataatgagctaaatattattaatcaatcaaggcatattacctaaattttttgttttaaaaaat

SEQ ID NO: 81041 - DNA, 518 bp, Cannabis sativa
tgaaagtagtgaaggaaaagaaagattccctataataccatatatgatatttgtggatgaatggtgagtgtacaatgcatatagacagacaacaactgtatgtttatttgcagatatcgataaaagttttatctagttaaggtaatgaggttataaatggatattcatacttattatatccctacatagctatttattcatatacatatacttccattttttgacaaactttcaaatacctacactgacacatatatatatatatatgtgtttctttctagtttgtacatgtacctgctgtcgtctatcacatgctctctcaactacaataatattattaattaatttctcaaaaaagataaactacaataatattaatagggtaataagtttatatttaattttttgatagtaaaattgttaatttatatttatggaatttcttttaagtaactaattatattaagtagtaatatgtaatatctacaacttaggtagtcaaaggtcacactttgaat

SEQ ID NO: 81042 - DNA, 2029 bp, Cannabis sativa
gtaattcctcgagaaacacatctaagaattctctcacaactctgacatcctcaagcccaaatgttttgggtctgctagggtcaatcaaaacttctaaaattctacacatccattatgtagtaaattcttagcctttaaaactaaaataattggaatttgagaactcaaaacggacctgaaagacacaaatggtacctcaccatctggctgaaaggttaccatcttttgttcgtaatcaatgctggctgaatacttggacaaaaaatttatcccaagtataatttcaaattcggttaagtccaactccactagattaaaacttaactctcttttctcaattctaattggcatagacctaacccaccttttggagataactaattctctactaggtagtagggtttcaaaccatatctcaataaaatcacagaacctgcccaatttattaattactcttgacaccacatatgaatgtgtagctctagagtcaaacagtacagaatattaggagtcattgacaggaagctgacctattactacggaagagctagctacagaatttgcttgcgtaatggcaaatacccaagctggaacaagtttcgcctcttgttactgttcttcctttttcaaatgtaggcaatctttcttaaagtgcccaaccagcaagtcacactggaaacacgctttccagttacattccctggcaagatacttcttataatgaggacactcatgataggaataagcctgacgtccacctctaccttggttcccacggaacctcttacaatgacccaagccacttgatgtcagaaaagtcttcctcttctgatcaattttggaatcaccaccatccctaaataaccaaaagtagggagggtgttggtcccaccagcacttggagtccctcggggctcttacagaaattccactgcaccttctgctcgaagagccttctcatttatctcagcatgggtcgttctatcatttgtagtaataaccaaatcatgtctgatcttggcattcaaatctgccaagtatatttccttcttattaaaatctataggtactatacctaaagctaacttggctagtcaatcaaacttagttgtatactatgtcagtgacatggtttctccctgaacagtgaactccttcatcttagtactatgatctgcttcattataatatttagcattaaacatgtcccaaaactctatgtcattgtagtgacatcctgagtgagggacaccatctaccaccacacgagaggatcttccaagaactgacacgtggcacatgtcacccagccatacttggtgacacccataaaattcaagatcctttcaatcactgttagccactacttggccttcaagacatcggaacctcctagaaagactagaggctcttgtttacagaatcgctcatacagaggctccatgcagttactagcaacaaattactttgttggcaccactggaactagatcggttggcatttggtaaggaggccttgcaggaggaccccgctgtctcagcctttgaatctcttcatcttgctgattgatttgggcttgcatttctgcaagcctttgctcccaatcatgtggagccagtggtggattttcttaaccactttcttggaaccttccatgacctcttctgtgtccacggggattttgaggattttaacctccccagccgcctctggtctcaaccccattaccctgaattcttatgttttgttgagtgttcatattataggaattggcttgcaaacctataagtcaggtaggtcagataacaatcacattaatccaattactgcatacatgtattttaggcaatatattaaacaactaacctgcttttctaatcaaataaatcacttaaacaagtaaaagtttactgtaccgcgagtcaatcttatctcaaaaaacgattgtacatatgttcacagtctttggtaaataaccttgcggctctgataccaaaattgtaacaccttaatgttgggttttatgccc

SEQ ID NO: 81043 - DNA, 900 bp, Cannabis sativa
tgtatacatggctcaacctcaaggatttgttagcaccgagtatccaaaccatgtatgtaaattgcaccaagcaatctatggtttaaaacaagcccatcgggcttggtttgacactctcaaagacaaattaattcattggcgttacaagaacagcaaagccgattccagcctcttcttcaccaccataaatggtaaattgatactcatcttagtttacgttgatgatattcttatcactggagctgatccctcacatatccaaggtttaatcactgatctcaacaaagcatttgctctcaaagaccttggccctgtgcaatacttccttggatttgaagtcaaaagaacagctactgcaatccatttaacacaacaaaaatatatccgagaccttctctccaagactcaactccttgattccaagccccaaccgacccccatgtgtgccactactaaactcactgctgcatcaggaacttctatgaccaatccaacagtttataggagtgtcataggtgctctccaatacctcaccatgacacggcctgacatagcctttgttgtcaatcgattgagccaatatatgcagtccccaacctcagaacattgggctgcttgcaagagagtactgagatacctcgctggaacaacagatgctggattactcttcaaaccagcaacagtttttgatctccaaggcttcacggatgcagattgggccgggtgtcatgatgaccgaaaatccacttctggctactgtatatttctaggaggaaatttgatcagctggtgttcgaaaaagcaaaccgtgttgctcgctcaagtacagaatctgaatatcgagctttagccttggccacatctgaactcatatggctgcagtcccttctcaccgaatta

SEQ ID NO: 81044 - DNA, 1845 bp, Cannabis sativa
  modified_base (65)..(68): a, c, t, g, unknown or other
  modified_base (924)..(928): a, c, t, g, unknown or other
  modified_base (964)..(964): a, c, t, g, unknown or other
acggcataaagacttagcaaatatttttggactgtaaattgcttgatccacgtgtccttgtctgnnnngtccacgtacattgggcaaaatcaggagcaacaagaacacattgccataagaatttgagagccaaactcaaatgacacatttcaagaacttcaacctcgccaaaagcccctttccaatgatggttaaaagctcaaaatcatcaacacatatattgtaccttttaagtcgtataattctatctccttccattctaaatctctaatcaagtttatttgtacgtcctggggcacatctaatgaagccaatttcctctctaacatccatcgtatgcaatacaaaaattatcacaaagtgtgaaaatcaacattaattgtagtactttaagtacaaataaacacaaatttcataagcaattatcttctcaaggtaactagttacctgctgattaaaagtttatttattggcacatatgtatagtatatatataaatatatatgatattataaagtgtgatacaaaattaaatgactgattatgttatatataggtataaaaaggattttaaattatcatagaaataatttgtagatatcataagttagtttgtaatttattgaggggccaaattataaataccaaaaactaattctgaaatcactctttaaataagtagtggtctctatgaaatactaggtttcttttattctcttcttccctatcagagaaaatactttaaagaaataatgtattcttagaagattataaccttgttagtaatcttcaacaatggcttcagattagtgattttgctcatctcgtattcattatatattatatttacatataagtatgtgtctatattatatatatatgtaatatatacatttacatatacacatatatatacatatatannnnnatatatatacacacatatatacttttacatacaatnatatatacacatatatacttttacatatatatacatatatacacatatttatacatatacacatatatatacatttacatatatatacatctacacatatataaactattatacacatacacatatatatacatatacacacaaatttataaaaatacacataaaactatataaatttacacaaatatatataaacttaaaaaattaaacacaattttatacacaaataaactaaaattactatatatacacaaataaaaaataaattaaataaaattaaaatagataaaatataggttaacttgacttaaatgatgaaaggtgaagaacaatcggcgactggcggctcaggcagcggttgccggaggtgcgggggtacgtcctcgtcggagtcccggtacaaatctttttttggaaaaaaaatgaaaaaaaaagaagaaaaagagagaaacagtgatttggtagagaaaataaggttttgggatggtaaaaatggaggttggtgggcaaaataggtggttgtcggcggtggagaacggagttgcagggagagagaaagagaaaagaggaaaatgggggagaagggttcgtcccaggttttatttaccctcgacttttgccagcaaaattaggtgtgccggcaaaagtccatgcttaataaaaacgcacgaaacgatgcgtttcatttaagttgggacttttgctggcgcaagtgcgccaacaaaagttttccacaattttcacgcacgttttcatttggacgggaagttgaccgccaaaaatttcatgcgccggcaaaagctaacccctgatgcaacgtgtccactggtcaaatggtttctacttttgccgtcgcaattatatgcgtctgtaaaagtccc

SEQ ID NO: 81045 - DNA, 1081 bp, Cannabis sativa
gcaggacagatacatttttcaatagcctcaattctacaatatctcaagtgaacagaagtagagatttgttaaaagtcctagtaaatggtaatgaatttcaagccactaaatctacttaccatacgtgagtttcgggtttacagtacgaagcttatggacaacttccaatacagtgttcaaaaaagaaactgaaccaatataacctgcaaagtataatttagcaagaattaaatagcatcaaattaatagagaactaattactttaccaataagaaaataataattaattaaatgaggtagagtcaaaagttatctacttagtttgtcttactacagcttttcctctgccacaagtgaggatttaataacataacggggttggtcggtctaagacaagcgacctctttatctttttcaaaaaataaaatcaataatatacaaatattatttcaaaacttatcatttaccaaccagtcaaccacatatccttggaattaatagatggaaaggctgtaaagagcaatccatattttcaagttaccacttttaaaaaaattaagattgcataatataattctgaaccactacaaaatgatattaaattgattgaaagtaaatgatcaacactagtatgggaagaataattaataaagtgatgtcacaagtacttttgaatataaggtaatggttctaattttttattgatgataaaaggtgatgtaaggcataatgtaaaatacgagcacaagttttgcatagactgtttttattttttattgtttcaaggttgtatagactgttgtggttcctttgataaataatcaaaatgtcataaacgggtttatttttatattgtgttgccatcaaatatttaatccatacataatatcgtgaaaaatggatacaaattttgggctactataaaccttttacatcaaaagtaaaagaattgcactatgagatctagaaacaagttcctttacatcaattgggttggttgcgcaaacataacgaagattctatgcagagaaagtttgtctcttatgctagacatatagttcatccaaactcataaatctaa

SEQ ID NO: 81046 - DNA, 1466 bp, Cannabis sativa
accaccacgatagggcggtcttctcctacctctagacccatttctgaacccaaattcatccccaacaaaccttcttctacttgacccaactgcaactgaatcagtcacagcatttcctaaccgagcaagagctgaggttctaccctcttgcccaagattgaaactttccggttccggcaaccgagatattcttttgaaactaccgttggaccactttgaagggagagagagaacgtttggaggtaagattccttgggagactaaatactctgctgcaagacgaccggcgtcgacgaagatgtcgggctttcgcggaggtggttgtggtggttgaaaagaattggaattgggacggagaagaggtcgattgaaggaacggtggtagtcgtcgggagagatccgggaagtgttgggcgttgttgatctgtacccatttccgggactacgatgacgagcgtgcatattcaactaactaacacccaattaagctcagctgatcaagtttaccagtagatcgatcgattgattgattgatcgatcaagccatgagagttgagaaagtttggatttttagctcaatccgaatagaaaaaaaaagttgagatttttattttaggaagaagaaaagaagaagaagaagaagaagaagaagagttgtgttgttgggtttggaggtgaaacaagaaaagagaatttcagatgagcttagaatttggatttggatttggactctttttattaaactcaaaacactactcaaactgttttctttgtttttcttttttattattataataataataatcaaaatatagattttttaatgtaaaaaaaataataaacaaagattatatagaaaatcacctaatatattatttgtttatttatttttctatttttattttttttttttggttttttttttcatgatttaaattgctcagttgattgcgatttgtgtgggttacaatatggattagagtttgaatttggttgtaatttgaattactctattgattggcccgtaaattgcacagtatatttcataaaaattttaaaaaaatacttacagtatgaagaaaactcatttttttcaatttatgaaagggtaattattctttttttttttgtttaaacaaaagaaataattccattataaaaagtagaaaactaaatagattttgcgaaaaattaaagtaagttgagcaaaagattcgaccaccaaaactcgagaattaagttgcttacaataaaagatagaaatatgagagaatcacttccaaatataataaaatagcattcaaaataatatcatactcattgtaaatttgtatcttattagataatgaatttgccaaacacaaacaactagagaacacacaaaaacgagaataccccaatctcttacaaagaaaaaaagcatgtaggaaggctgaagccttgccacatgaggttcaggcaagcca

SEQ ID NO: 81047 - DNA, 1069 bp, Cannabis sativa
tgacaaactggacactctatgcagctattatctgactgacttgatgaacttgctctacctgatatgctttcatgaggatcgagaaggacagagcagtttggaaatgggcagtaaattctatctgagtggttaacatttgcttcttcaagggctttctcaaaagactcataagaagtggaggtaaggaaagatttgcactcagcactagagatataatatttgcatttcaactgaggacatctgatgggaacttgagaggactgtacctttccatcagcatatgtcctcatacaatgagaacaaaatttatgagagcattttagagagatcattgtaaaacaaggtttgtcatcacaacatattgagcagttttcaagaaatatatctccctttgcaggaaaagagacaacccccattgccacttgagctagttccattggttgctcaacatctgcactaggaacacatttcagaacaaaagcttcaagcttactggcatgttctagaatccgctcccttagtgcaacaagaattggaatgtcaggttctttatcatttgttatctgccagaaacgtacattattagaacccagacaacacaaaggacgagggaaaatgataaccattaacagtcactagaagaatcatattattttaagaatttattaagcaaattcagaagcaaaatctttcatgaaggaaattaaataacaaaattatgtatattctgatgggagccgagcattaaaattagacattaatgtgagacataacattaggaagtgatcatgcattagttttcccgtgtttctgggattggcatgcaggatttgaaattcttatagctagttttctggtatagtgattcattcctagtacagttggagatagatttttatttgcttattaacatctaaagaccttggtggtgtgtcaaacattctcaggcttacttatgaaattgtcctacatcactgtattattctccaattttccttcaaaagaaatatatgtatattatatactcatagcatgtgaattaatagtaagtatatatggcaaaactaat

SEQ ID NO: 81048 - DNA, 1038 bp, Cannabis sativa
gatattggaaatatttatatgtggtgtgcaccttatttttttagaaaaaatttatttattataaactactatttttatttatttaatcaaaaatatatttacttaattagtaaataaatatattattttgtcttgattgtttttacgattatatgttctaacattctcataattaaaaatgtattttttctttattattttctgtacgttttttatataatgtatcagaatcaatagaaaaactatatatttttttcacaaaaaaaaattatataattatatacgattatattataatatatattccgaacaatactattttgtttagtgtagtattttgatataatttttatcgtgtaataaagctctaatatagtaatttaattaaattattttattctggaaacgataaaattaataatctatttgtaccaattttaaataatactgtaaatatcttaaaaaaataatttaatgtgtgatttaacttaaagtttaattaaataaattcgttctttattatttttttactgtatatatacgtgtgtatgagataattaaaagtttgcacgagtctttgtcgagataaatgaaccgcccctagcctcctataggtagtgccctgaaagaaaaataaatcaatggatgcaaacaaatgtaggctatatatatatatatatataatactgtttttttttttgctatgatgttaaataatgttaatattaatgcaaatatatatataaataaagttagtatgggtaggatctgaaattgttgacttgtagtccttcaaatttgtaaagagatatgatatgttatctatattaatctatatctacttttataaggttagtagaagtagaataacttgagctttaactcatgtggtcaagactagctatcaacgctattaatgggaaggtgatttattgggctcttcacaactatgtcttctattgtactaagtcttctccttatttcatattttataacttttcgaacattagtaggaacagtaactttgcggcccataat

SEQ ID NO: 81049 - DNA, 2138 bp, Cannabis sativa
tttttttttttttttaagaaatagattttaaagaacattgttttgggtttgtgattgtttagattttagatgtttttatgagattttaggattttgggtgtggatttgtgtttgtttttgtgagatttttggattttttttttgtgtgtgtttatttgagaccttagatggtggtggttatggttttttccgactgtgcttatcgttaggttatcgatggtttctctatgtgaaccgttttttgtacatttggtatttattgataggttatcgacacatatctatgggttagtgattgtttcaggtttgtttcaatttctatgattttttttcaatttggtatttatcgatagattatattgatatgttatcgatgtattatcgacaatttctggttcgcctaaattattttgtagattaggtatttattgatgtaatatcgatacacttatttatggtttatcgataatttctggtatgtcctacattttttttatcaattaatgactaattgtattattattgtttaatctaagttgattagttgttttgattctcttaaataaaggctcatatgattttgttattcctttcagcataaatttcgatagatgttgttagttatcatggtagagatggtagtggggatgacccattagatcctactagtgtacttgcttcgtgcgagacttttggtgaattgagaaaaagccgcgagaggaatgttttggctaacttggaagatagaaaaaaaatctgggacgccgttgccattagcatttgacaacgtctccaacaggattgtagggttggagagtaaagcctaccctcgtttggtagggagagaggttacattgcatgaacctggacaattttctagttgggcaaatatctcggagcagtacgaacacttcattttaaccaaacatcgagtaaattttttgaaatttatatctaaattaataaatgaaattattagtatgttattacaattttttttgtcaaatgcagtattattaccaaattgacagtgattcaaaattactagctatttcgttaactgaattggccaaaaaatacaatattagaaagaacattagactcgtacattttaattttttttttacaaaaaactagaagactatgaaattgtagtcaagaacccccccaatgaactcaatgaaaaacaatgacgactaatatgtcagttattcacatctcctgagtttattgctcgttctatgcaaaatgctctcaattggcagaagatgataattcccttcaacacaagggtcgatgactatggctgagacccttcatgaaaatgtaagttaatatatatactatttattttatgaagtttaatttaattgtaattttcttataatttatatttatcagcaaaacatgggtcacattgaaaactggaaggtttgtcaaacaaagaagggcacaaacaaatttgtcaacgagtatgtgaaaaatgaatatataacattatgtaaactaattacttttaaatatattcaaataattataagtttgtttagtttctaattacttattcttacaataggtacagatgtagacaaaatatgatcagtcaatctagtccttctgattgtacacaacacactgattgagatacttcgtgagatttttagagagaggcgtggtcatgagtgaggattgggtcacaaattaaaagggaaatcatcaagacgacgctcacaactgcagctactgaccaactcgacttaaggcaaaccgtaactcagatgcaaaggcaacttcaactgatgacttaaataatgacacaaatggaggcaatgatatgactgaggctactctaatgcaaccaataccttccacaatcgtctcactcttatatgcatggagatggatctggtccatcttctcagccaatgagtttttagcatcaacagttgcagcaggctccactttcattttagcaattgttacagcagctgttacaacaacctcagtaactccctgaacaaatgactcatcaattgtcacgcgtgcaacacattgcttgaattaacgtaattttcagcgtgttaaactttttcgaatttcttaaaattttgcaggaatttacatgaccatgagaaaaa

SEQ ID NO: 81050 - DNA, 1636 bp, Cannabis sativa
aagtgttcttgatttttaaaatttgttttgttgtgcagagctggctttaaccatgcgtgtgactgaaaagtgtgatgtatacagttttggagtggtagctttggaaattatgatgggaaagcacccacaagaacttttggaatctttatcatcagcatcaaagaatatgttattgaaagatgtgttagatcaacgactgttacctcctactgggagattatcagctgttgcagtgttagtgatgaacttggcattgtcatgtactagaagtagaccagattcacgacccactatgcattttgtggcgcaagaattatcgacaaggagtcgagcttccatgatctctgagccattgaggacgattacaattgagaaacttcttgcacttgaatatcaataataagaataaatatttgtttaattaaaactggtacttatgtacgaagttgattgaactcgttctatacatattactagtacttgtttaacaacatcatattgcaaactgcaatatttttgatagcttaaaataaataaaccaggggagttgatttttctgtccttaaatttgttggtgtatatcatttttgtcttaattattgattttgaattgttatcctattgtatttggtttggaatggatgtttcaagtatccatttctttgttgatgttgcaatcagttgggtttcgccttatgggggttgtgattttcctggattctactcgcaatgtcattgaaggcttgactgttaaatttaaggtttcttcccctcttgagtctcgaggcagaggccattgctctttgaagtgctgttatattgagtaatttggatttttaaattattgttttgttgttatttagattgctatagctcactaagaggttgaaattcctctccatcaaatactctaaatccttaggtataataccttattccaaactcctaaaaatctttacctaaatgtagctaagttttatctctcttaaattagcatttgtttattatattttttattttttgattttttttcttttaacttttttttttttagtatggatttttttctttaactttaattaatataaaatatactatttcaactatgtaaaagaaaatatagagaagttgatgtaggggacaatgtcaaaatttcaccagattacagtcataataaactctcttgtaagatctctttggaactcaagagtttgaaaaagttgcaagttctcagcctagagtccaacaaattgaatgggccaattccaactcaattgggaactcttaaacttttgtaccagcttaatcttagcaataatcatctaatggaagaaatccctacgagtctatcaaacttgagtgggctacaacatcttgatttgtcgacaaataatttagcaggcaagataccggattggcttggtagctttgaaaatttacttagcttaaaccttagtcacaatgttctatcaagtgaaatatcactagagcttggaaatttggcctctttgcattatgtattggatcttagcagcaatttacttgttggagaaataccctcaagcctttctaagcatacggttaattttatttttggcatctttaatgtgaaaaaaatattttataatttattatt

SEQ ID NO: 81051 - DNA, 1077 bp, Cannabis sativa
tcacaataaaaatattttaaagacctactctacaaggtcaagatgcagggtgcaactcttcttctcccatgacacatgagctgagactctcaacttatgggggagatcccattcatagtgtgctggaatacatgtttatagtaggagtcttacaagatcttactatgactagacctgaaatagtttttagtgtgaacaaagtatgccaatttatgcaaaattctcttgaatctcattgggttgttatgaaaaagaaattgaggtatgttagtgggattgtgacacatggattgcatctcaaaaaaccttcttttatggattttgttgtcttctgtgatgctaactgggcaattgatccaaatgatagaagttccactttagggtttgccatcttccttggtagaaacttagtcagatggcaatgtaaaaagcagtatattgtgtctcggtctagcattgagacagagtataagagtctagccattgtggtagttgcgctaacttggatgcacaatttgtttcatgagctaaatatcaccttgcctatagttctcacaatgtggagtgataataacttgagtattatcctgctcactttcaatctagttcttctttcaaggacaaaacacattaagttaggtctctattttgttagagaaaaagttcaacataagtttgtagaagtaaatcatgttcttgcagctgatcagatagttgatggtctaaccaaagctatctcaagttagagacttctttcatttcgtgacacttgcaattgaggatgcctcaattctaagtttgagaagaactattaagataactactaggagttagttaatattgttagtttaggatttctgttaagagccaattagttaagctcaagttagttgtctcaattgaattttgttatatattttcagttgtcatttgttatggatgtcttcctctctaacttgtatataatgataattgttgtatcacattcaataagatcattttttttttctcatatcttcgttctctttcttctaccatttctctcttttagcctttctttcctttcctttactgtgt

SEQ ID NO: 81052 - DNA, 982 bp, Cannabis sativa
aataccgtaaaaatatatatatatatatataaaagaataaattattttgaagtgtaaaaataaaaaaataaaaaaaaaccctataatttatatatgtaaaatgactaaaaggcttcaacattttacaaaatggtgatcacacttttataaatatggaaaaaacagcataaggtacttgttatctttttgtagcaagtggttacctctctgcttaccataaggtacatggttactttacttgattttattatttttttcaaattttcttcaattttcccataaaatcacttttttagaaagagaaaaaaaaggccatatttttacacaaaaagtataaaaaacttataaaatttataattttctcttatttttatctagtctttttattttcgaaaactttaaaaaatttgttagttttgtacactttaaaataaattctttattctttgtttaagtttgaataaaataaatggatacggtcttcattgtccatcttgattaactggatcatttctttgtacattctgacataaaacttattaactgccttttcggatattcctttatcatttcatcgaagaaggagagttcttctcgagtgcaaaagtagaagagagcttgaatgcaagacccacatgtcgagtagggacgaaagtcggccttagtgatccgacggtgctgagtgaaagggtcgtcgctcaacaaataaaagttactctaaggataacatgcaagaattatttcctgatctaaacgaaagaaaaagaaaactgatattaattagatatgaatcacaaaccaaaaaagagatatggtgaaattagtagacgctatgaacttaattagattaaacctaggtagggaaacctatcaagtgataactttcaaattcagaaatatccaagaattaaaaaaaaaaaaaaagagctaaaatttctttattaattagctcaaataatagataacacattcacgttatacc

SEQ ID NO: 81053 - DNA, 1189 bp, Cannabis sativa
agaatgccatgataaatatttgattagaatgcagtgttcaagtgagtgaaaattgttatatagactcaccccgggtgcttgatactttgatacaagtcacaactggtatagtacatatacattggcatatgtgaaagtcactgacttgggtctcaaaggaggaaagcccaagaagggtattaagctctccaacaaaggaacaagaattgggtggtgttctttacaggttgggattttactcaatttgtttatctctatattgcttggtatttagtgagggtttttttttttctttctgttttaagattattcttattaattccaatggccaaattttgtcaatgtgtaaagaaagaatttttggaatgcaaaatttctgtagtagttcattgtaacatttagctcgaagtaattcagagttgttcttagtgtatttctttagttataattataaataactgaaccaatttcagaaatgatggagtttggtgaacttgcttaatttggtctatttgcagttttgtatttagtgaaaccaataattatcaattacaggttcttgtgatactttggatatttgttgatttggaaaattcccaacttgattttttggtaaatttgtcaaaaacatgtacaaaattggaggaaagagtaattaacatctactaatttggagccctcaattcctttccaacatctattggaaatttgaatttgatgatgtttatttgggacttgtggtaattttttcttcaaaggaccacgatgagttttgttgttggttcaataaaatttttattagagtcgttatcttcaactatagtgagtttttttatccctttattcaacaacgatttaacactcactgttgcaggtttagaatttttgtaaatgagcttcttaggtcacaactatttacataaaatttggaagaagaaaaaaagcagaaggagaaatcattgggtggagcctcaatgaaagttggagaacgtgggggcaatttttttggagagaaaattgattttaatcatggagaaataattcaaaatgaaattgaaatgaaaaattaaaatgaaatttgaaaataaaatggaggacatgcatataaaatattggaaaatagttggagagttgtgtatgcaagaagtattttagtaaataaaataaaaagaagtataaaagttatata

SEQ ID NO: 81054 - DNA, 1686 bp, Cannabis sativa
ttgttgtcctaatatatgtcgatggcattattgtggctagcaacaatgaacttgccatcaaacacttcaaaaaaaaaattagacaagaaatttacacttaaagatataggctcccttcggttcttccttggcctagaaattggcagaacaaaacacgacatatccatctcctaaagacctttcactttgtaactacttgctgacacagattaccttggagcaaaacctacttcaactccaatggaacctaatcttaagctaagtaaggataaaggaaaaccacttccggatcctacaacttatagaagcctcatcggtaaactcatttacctcactataacaaggccgaacatctcttatgtcgtcaatcatctaagccaattcctcatatgtccaagagtacctcaccaacaagcaactcatcgtgtgcttcaatatctcaaacatacttcaggacaaggcttattctttccatctaacactactccacatgttttggcatgtgctgaaaccagcctatcaccatcaaatgttcaattatcattcttcgcagatgcagactggggaacatgccaagacacacgccgatccatatttgtctattgcgtgttccttggcaaagcccttgtctcttagaaataaaaaaacagcaagttgtttctcgctcctcagctgaagccgagtatcgtgctatggcaaatgccacatctaaagttacttggatcatcgcccttctcatggattttggaatatcactcaatcggcttgcgtctctatactgtgacaatactgcatcaattcacataagcaaaaatctagtctatcatgagcgcacaaagcacgtcgaaattgattgccatttcattcgggaaaaaaatccaacaagggtctctgaagttacttcacgtccaatctcaacaaaacttgactgacatcttcaccaaagccttacttccatcacctttcaccaacatcatgtccaagatgaatgtctccaacatctacacatcttgaagggggctatcaaaattaggatgttagttcagttagttgagtggattatagtttgttataacatgttaatttggtctcttgattccgttactgttattacttctgttagccttgtttggactaaacctactgctatatatacatagctcttttgtatcagacacattatagtaataagaatatacagagcaatatttagttgctcctttttctctcttctcgagtactctgtactctttttcctcatagatttaaatggttaactgagttaaaatagtgttaaaaataacaatattaaaagattcaaaactaagttatttctctaccacagataaattttgtgccaaataaaataattaaaaaaaatgaaagcttggacaagtttatgttttttttttttttgtttttttgagagagagattgaaagttaactttttgaagtaataaaaaacatttcattttcaataccataaacaaaagacaaaaagttatgaaattaggtggtgtagtgaactcatcaagatctatatatatatatatagagagagagagagatttatgatttattatatttgatttatgttttaatattttttagaaatttatttttattttctaatttttttaaaaatattttatatttttatagaaaattaaaataatagtaaaata

SEQ ID NO: 81055 - DNA, 1321 bp, Cannabis sativa
tctcggtaggaatgacagatgtgggagagacccatgtgtctccctttgatctaacgtccagaacttgaggctctgaagattgattcaagacatgatccagggctaacacagaaggctggcctagcctgttcagagctaacccatcatcatcatatccacccaaaccgcagttggagaggataacacaagtcctgtatctcttcctcctaattggcacagcctcctcaacctcaaacttagtgtcacaactcttagccccttgttaatcttaagcacctccacccggctgacctctggatctacatcatcataaggctatgacgcctcctctacaattctgactctgcccatcgttgcaacactagcaacatgaggatcatatggaggcaccctacaatacgattatttcattttggccatgcctattagtccagaatcacacaaaaggagcacagggacagactaaaatgttatttctcaaaagcaaagttgacaagacctatgatacagtagttgtcaccaccccaaatcaacactcaaaatcacctgcatagaagagacaaagggaggtgagcaacttgataaagctacagacaaagttccagttaattgtacccaagggtacttaccaagtaaattacactgtacaaggttgggtatcagggaagtaccgtcctaagtacatgtacttagacaaatagtgagtgctaagttgtgcacttgactataatggactcactaccaagtcttatacaaagttctcaaggtaaaccatgcataagactacagttgtacatacctcaaaggccatcacgagaccctagccgaggtcaaaagaagacaaaaggctggctcccacttccttagccttggccagccagggttctctagccttagagggtcgaccaagtcccatgacccagcctagggccggccaggagtttaacttccaggcataggctgactagttttaaagttatccccctatggtcagccagactccatggtgaacatccatggccagccaagtcttgaacaagactttcaaccagacaggatgtataaaggattcgaacatgttttttttaagaactcaaacacgttcttcatgttcttcgtgactcaaggagccaagaattgcaacgaaggtcagaataagatcttcttcatctagaaatcacacattacatatcctaagactaccgtgcagatcaaaatactaaaaggattataatctaacgtgggaatcaagaatattcaaagcaaagaaagcttcatgaaatcatggcaacattagataaatcaagtaaatagtgagaat

SEQ ID NO: 81056 - DNA, 584 bp, Cannabis sativa
ttcaaacaaccactttcaaaagacaaaatgtaaatattttcttgatagcaccacttgagagcagttgaaatcgtcgatggggctttggtgcaaatttacttgatctgttaagcatcgaccaacacgacccactcaaatagctatatataaagtcattttagttcaattctaataaaataataatctttatatgaataattttaatatatatttttttaatattagacaccctaaatacatttacagatcacataatatttaaaataatacaaaaacaacaaactttataaaaaaaaaaaaaaaaaaaacaacaacaaaatctaatggttagaccatttctaaaatattatgtaaattttgtgctaaatttagctcaaaaattatcattggcccaaattttacaatattacttcaatgcactacgagtaaaataaatttattttaataaattgagtgaaacatgttcatcatgttttcttctgagaaagatgtgttagaatttgggaataagatgaatgaggttcctgttagacatttatatatataaactgaaatgtatatgtttaagtattaagtgcggaatt

SEQ ID NO: 81057 - DNA, 751 bp, Cannabis sativa
aaatgaaaatgttgtttgtaagaaacagttttgggagtaagatgttgtgtgattctttttattattagtaatgcaattgtttggtttagttgtcctaacattcttggcctaattataacacaactatttatctattaaacaaaatttcagaagtctaaaattggtgttattgtttagatacaacttcacaaaaaccatctataataatgtgccctgtggttctaattattgcaatactattaaaaaaaaagttaaaaagaatagttgattgattaattttattttaacccaattctgctgcaaaagaataaaataaaacaaaatcccaattcacttcatgaaatcctattctttagtttttacactactgaaagggaaggggtttagattttatttttataattaaaaaactccagatcgaaatgacagagctttccaatgaaaacaggtaggcaagtcgagagtattttatttatttattttttttcttttttgaacaaggcaagtgatgagtattgatttctgataaaaatagaaaaaggagggttcttttactaataaattattattttactaaataccattgatctagaatagaaaggattctagggttagggcttgactctctgaatttgggagatctacatagccagagtcaacaagagatgtcgacgacagctttctccggtggctatggcaccatgcccaccaccaccaagaccggccacggccaagcatcatcatcatcatc

SEQ ID NO: 81058 - DNA, 1138 bp, Cannabis sativa
  modified_base (1066)..(1067): a, c, t, g, unknown or other
tttatccttaaaacgcttagcttcttataaacgatatttcagtaaattaatataattactgaaataagagttcttctatttatgtttgttagtgaagctctaaggaaactatcattttacttttaagtatttatagaagctatatattccatttctatgattagcgctatcactcaattatactattacgttcccaacatgtaaatagtatgcctatggctaagttgtaacaaataagtcaaagaatacgtgcaataaagttgagctaaaacctaaccaactcaagattaagatatttgatctaagataaactaagggatatttacttaaaaaatatatgacagtaagtttacgatatcttttatagtgtgaatatctttcttgtctgatgtattgctaatacattcgattctaattgactttactaattccatggaaaagatatatcacttatctaagtgtaagcaaaccccatcgctgattatcacgttagtgtaaatctagtacagtgataaatcatgtgattaaatgattgaagcatataattatgattatttttactgtatagacaacacaataatcatgattatccataacttcacgatttaataggctttatatattaaaactataattatgaacataccaagtaacataaaattgacttctatatcattcaatgatctgttaataagattatatcgagatgggttttatttagggcataacattctaacaaactcccacttgcaataatataaaataagagtttatctcaataaatctcaatcttgatatacgttgtaagtgtagtgtatgtctttatctttgttaataggcctagaagtttttgttcatcatgaaacttctctcttttcaaaacattcgtaatcttgctatttataaattttattcatcttgtggtttcaaattctatatattttggttattatatatgtgttaccttttgctgaatataatagatgttacaaaactagggcatcaccaaaatattatatttgaacctttataatttgattaacgcccaaaatgtgacttccactannggtggttgtagtatagatcgggcggtcaattccacaaggaggtgattatggacaaaaacgttagtagaaaa

SEQ ID NO: 81059 - DNA, 1289 bp, Cannabis sativa
aatttgaggggtattttgggtagaaatgagtaatagtggaattgttttgtacaaattaatagagggtataaattttgatatgaggtatcttattagggtcaaaatataaaattttccttttgtaaaatgaagtaaaaactatacattgcttttaatatatatataaatatatatatttatggaagctacattgcttttaataatataataaaagtggtgtaaaattaaataaaagagtagctaattaatgctaattcaaaatatgcatgaggcaatattttgtattaattttagtatgggttgagtttgacacgattaaaatcatattatcgtagtaatatatatatatatattatattttttaattgaagtttgttatattttaacattcatcactatatatgcgtttaaatttgatataatgtttttcttcatcaagaaataaattttcataatcaaactaagcaaattgtccctaactacaaaatgatccccacaacagacacaaatactgcttcaaacttaccagcaacagcacctacttcaactaaatttggcaggcctcttcagaaacctgcatatttgtaggactacagctgcaccatggccattcactccccaagcactcatcaccccctttcacactacctatcatacaacaaattgtcagcttcttttctagtagttgtccttgctactgcacatttcatcgaaccaaccacttttgcacaagcatgcaaatctaaagtgtaaaacaatgcaatggacaatgagatcgattttctagaagccaatgaaacttgaattgttgtcccattactcccaagacataccatttgtaacaaatgggtttacaagattaaatataactcagatgggtctattgaaaggtgcaaagctcgcttggctgcaaaaggttacactcagcaacaaggtatcgattactttgacacctatgcccttgtagcaaaatttaacaccctcaaactgctatttgcacttgctgcaatcaaacaatggcatctccaccatatgggtagaaataatgctttcttacatggtgacttaaatgaagttatctacatgaagtttccctaaggctacactcctaaagttgtcaaaccccctaatgttgtatgcaaattaaagaaaagtttgtacagattgaaacaagcatccaaacaatggtatgcaaaactcagtagcacacttcttcaacaagggttcaaacagtcaaaaaatgacaactcactcttcctcaaacaccaggcagggacattcatggcctt

SEQ ID NO: 81060 - DNA, 2402 bp, Cannabis sativa
agggtataaagcataaataactcatacaaatatatattgctcaaaaaataaaagaggctagaatataaaggaatgccaagaaaagagtatatatataaagagagagagccttgggaagaggccaaaaagtgtctaccctaatgtaaaagaaagctgcgggaacatgctaaataaaagtcttccaaaaataccaaaaaagttattaagtatagataaatggcagatcagtcacatttgggaggaaggcgaggacccaaggtctctacgagattggcttccaacttcttgttcttctctaaatgagccagaacagccgcgggattgggtaaaaagttgaacttaggcttataattgttggacctctaggtcatgaagatgtcgtgcttaaatcgcctcacacaattttcacaagtgattggagccaaaagagctttcttagcagctttagcagcctccagtttagccttctctcagaagtcacgaagctccttaagctccacacacacactggctgcggtctcgagatccttctgggggagttcctcaagtttctttaccttgtcctgaagctcccaaatctcctcctgagccatcttcaaggactctccaaccactcgttggtctcactcccgcaaagccttcaccaccaagacctcatccttgagagcttcctcatgcttgtctgcatacttgagcttccttagagcctcatcaatgccaccatattcattcaatgtaaaccctttatcaattaaggtcttggataggcgactaaattcagcagtaatctaaccaatttcacgcactaagattagcaaaaaaaaaaaggtgttagtggagaaataaatggaataaggatgattagggacttactaaggtcaaagtcgtgctcatgttctggaccttgtaaactgggttagagagagcatagacgacaaatctcttggttcgaagctgaaccaagtcgtaagcaaactaacccatcatctcagaagcaaaatgagccaagcagaccccaagaagcttgaaaaccagtttgtcattggatccatgttaaggtcatgaatttggccactataatccccccggagcgggccatcttggttctccatcaaccacttctgcaagacctccgcctcagtattccctttggttttttcatatgcaacataattgtgcttagcaatcctaagttgttgatgagcttcatccagatggacgtgagtaaggggaatgggcgagattcttgggaaagtatgagcttaggaagggattcctgagtccccaataccgtgggaaggcattttggttgccttgagtttctttaaagatgtagagtcaccatcctcactcttcctctttgctccaattggggtaactcatcctcatcatctacacatacaacctccaggtttgaagctcttgaagtcactacgactctttaaaaattagcaggagggatggtgttcccttatgaaggacttagagcatccatggaggcgaagatggtgtccattagtctagctgcaaaaagaaatgaaagaaatgtaaggacaatttataagagagtcataaagataagacaagtagaaagaaacctaatcctaccaaagtgacctaatttttccctagcaaactcataaataatgatgctggtatcgttgtctcctaagaaactatacaaaagaagaaaccaacttaagtgagataacatgagtggtccagaggtatcggtactgaagggtcagatcccatttaggacttacctaaaagatcccaaatgttggagaagtaccactctttttccctacaaccccatcggggatggggcatttgcaacctaagtaacctcctatcaaagccaactggcctggaatgagcataacttctgatagaaaaagcatgatgcaaagacacaggagacttacagacactagaggtactagctccaagagcaccagagttaggaaccgggaaaggaaatgaaggtctaggagccaccaacttcttgttttccttcttctctgtctttcgatctgctgcactctgggtgcgagcaaaaaggcccacctactctttcttccttcgataagcttaatacttggtgttaacctctggatatactcctcccagagcctcctctcgacctccttgttttgagcattcagacacgttaccttcgacaagttagtgtccttaacggatttatggccttgaatgagtccggttatccgtcagttagcagaggtaaccagatctcccacgttgagctcctccctggcaagagtctcaaaaacaaccgtgtggctcaagaagagtttggtgggagctattcaaagtagtggaggaatctgagtccactctgttaagtgatttggatgctccaaggctttaaaattaga

SEQ ID NO: 81061 - DNA, 1042 bp, Cannabis sativa
gaagatcaagggacaattaaaattaagaatgttggaaaccataactttttttttatttggtcaatagacgcaattaaagtctttggtggtggtccgtggcttataaaaaacaactgttggttttggaagttccaatgagtatcagcgactacactaaactcaatttcgatcgagttaaattatggattcagtttcatctgcaacccatatgttatatgacggaagatatggatagagaactaggcagtttaatcgagccagtaactgagattgatatcaattcttcgagtgattgtttagggaagtttctacgtagcattgatatcaccaaagcttttgaaagtggaatttatcaacggtgaaccaaaattgcaaatctcgttgaaatatgaaagtctcctattattattgtaaaattattagtgagactatcctttcttcctcctcctgttttacttttggaaaggagaagcagcgagtgaaaggaatgaaattgattttcattgattcaaggagttcagtatagtatgagctttatatacaattcagacaaccaaaactaacacaactctaactaacttcctaactaactaacaatatgcactacaccttataactaactaactttgatactcccccttaaggtggagtgtatatattgcaaattctcactttgtctttgagaatttggaattggttttgctggaagtatgaactattttaataactccttgttggaccttttctctcaccaagtgacaatcaatttttatgtgcttggtcctctcgtgaaagataggagtagcagctatttgctgggctgctttattgtcacagcgcaagatggctggtcctatatgatcgatgcttagttcctttaatagagatattagccataccaactcacaactagtatttgacatggctctgtacttggcttcagttgaggaccttgatacagtgtgctgctttttacatttccaagacaccaaagatctcccaaggaacacacaaaaccctgttgttgatcttctcgtgtcaa

SEQ ID NO: 81062 - DNA, 857 bp, Cannabis sativa
  modified_base (260)..(264): a, c, t, g, unknown or other
tctcttcttccctaactctcacctccataatatatcacattcaatttgaactttgcatgcatatttgataaagaactaaccctagaaactaggcaagaaaatctgatcaattttctttgttttattttggtaaagttaaatgctttaagtgaatgcattgtgtcaagatttggtgtgtgatacgtggacaatttatgtccacttgctgagctgttaaaggtcaagattgaccttgtgttttgtgtgtgtgagttgacttnnnnngggataagactgtaaaatcccaacattataaatgaagaaaacttatgggctgctgtgattattttatcaattatttctcttttttcatttttctttttatgctaatgtaaaattttttttactataattttttcttatttttttgtaagtgtttaattaattgtttgatttatttttaagaattcacataaaatataattaagtaatcaaataattataaatttttataaaaatatacatatagtttattagaataatagctaagatgtattagttatattattactttttttttcaaaaaaaaaaaaatcaactataatgtacaagatgttcaattatattaactaattatattcttttagaatttttttttgtctaaacatatggttagatttgatatgtttaaattgtatcatttttatttttccattatcaatttattgttgtgtttttatattattatatttaagtagaaaatgatgaaaattagttttaaaaaaatataattaaaatatattattctttttgattaaaaataataatcgatctttttttttttttgagtactcaataatctctctctctctctctct

SEQ ID NO: 81063 - DNA, 2883 bp, Cannabis sativa
ttatctatcaagtaaacttttaaacgaaccaaacaaaattttacaatttgaaaaaacaactagccagtagccatatatttcaaaccaataattaggctatgttgttttaaattgtttaaggacgaattatacaaatctcaaacactggaaataggcttcattagaatatactttttcctttgaggcaatcgtctatcaagtaaaatttttaagcaacaaaaacaaacttaattgtttgaaatgggaaccaactataaattccaaaagagtaattatgtttatttaaagaggaggcaactctctatttagtatatttttaaggtaacatagaccaacttaatcgtttgaaagaagagcaagcaacgaaattccaaaagagtaaacatgttttctaaaaaggagacaaactgtctatcaagtaaatttttcagtcatgaaaaattaattttaatatttcacaaagcaaccatccattccaaaaccattttatggacaaacaatacaaatctcacacatagtggcaaaaaagcaacattcaaatatctttaaatttttaaagcatctaagaaaaaagacgtctatcaagtaaacttctgagacaacaaacgttaattttaatttttaaaaaaacaaccagcaacaaatttccaaacaacaatattctttttcgtttgaatctttaagtacaaacaatacaaatataccaaacagtgacataagataacatatttgaatgtaaatttcacttttaaagatgaggcaaccgtctatcaagtaaatactttagacaacaaaagctaattttatttagaaaagcaaccagcacctaattctataattttaattatgtaacttttaaagaagaggcaaccgtctatcaaaaaaccttttaaggcgtaacatgtaaatgtcaatgcataatcgtaattatgtaacctttaaagacgaggcaaccgtctatcaagtaaacttttatggcgtcacatgtaaatttcaataaataatcgtgattatgtaacctttaaagaagaggcaaccgtctatcaagtaaattattaaggcgtcacattattaagataacacatttgaatgtaaattttacttttaaagatgagacaaccgtctatcaagtaaatattttagacaacaaaagctaattttattatttgaaaatgcaaccagcaactaattccataatcgtaattatgtaacctttaaagaagaggcaaccatctatcaaaaaaccttttaaggcgtcacatgtaaatttcaatacataatcgtaattatgtaaccttcaaagacgaggcaaccgtctatttagtaaacttttatggcatcacgtgtaaatttcaatacataatcgtaactaagaaacctttaaagaagaggcaaccatttatcaagtaaattattaaggcatcacattattaagataacacatttaaatgtaaattccatttttaagatgaggcaaccgtctatcaagtaaatattttagacaacaaaagctaattttattatttgaaaaggcaaccagcagctaatttcataatcgtaattatgcaacctttaaagaagaggcaaccgtctatcaaaacatcttttaaggcgtcacatgtaaatttcaatacataatcgtagttatgtaacctttaaacacgaggcaaccgtcatcaagtaaatttttatagcgtcatcaagtaaattattaaggggtcacactattaagataaaacatttgaatgtaaatttcacttttaaagatgagacaaccgtctatcaactaaatattttagacaacaaaagctaattttattatttgaaagggcaaccagcacctaattccataatcgtaattatgtaacctttaaagaagaggcaaccgtctatcaaaaaacattttaaggcgtcacatgtaaatttcaatacataatcgtaattatataacctttaaagacgagacaaccgtctatcaagtaaacttttatggcgtcacatgtaaatttcaatacataatcgtaattatgtaacctttaaagaagaggcaaccgtctatcaagtaaattattaacgcgtcacatgttactttcaatatataattgtaattatgtaacctttaaagaagaggcaactgtctatcaagtaacttttaagacgtcacatgtaaatttaaatatttcacaaggttgtttaagaacaaagatacaattctcacacttagtaccataaggcaacattcgaaggtattttttatttggtaacaatgcaaggaatcaacggtcaatcaagtaaactattaagacaatacaagtcaattttaatataataacagattgtgaaatagaaattatatattactatttgcaactttttaaggacatacaatacaaatctcacacctactaagcaaaatgcaagattcaaaacaaaagtactgttaacattctaaaaatatataaaaaaaaatataattgtctatcaagtaaattttaagccaacaaaacaaaacttcaatgtttgaaaaagcaactatctatatatttcaaaccaacagttaagctatgttttttgaaactgtttaaagacgtattatatgaatcccacaaacactagtaaaaagcttcattagaaggtactttatgatttgaaacaattgtcaatcaaataaatttttaaggtaacaataaccaacttaattgtttcaaatgggaaccaacagcaaattccaaaagagtaagtatgttttcttcaaagaggaggcaactgtctatctagtaaatttttaaggtaacaaaaaccaacttaattgtttaaaataggatctagcaacaaattccgaaagagtacttaaggtttctttaaagaggagacaactatcta

SEQ ID NO: 81064 - DNA, 1335 bp, Cannabis sativa
tgaagtttctatatcgataaataatgtaataataccctaaatatcgagaaaacataaaaattgaggtacccaagaattaccccaaacgggtaatcgtttactaggactctgcttggtgaaatggttcaccatttctgtgcataaatcacaaactcgaatttttcttcttcaattctaacccaaatcgattcctaaaaagaactctaaaaatcatgtgtagtttagttattatgtggttttcttttagttaaaatttaaaatcaagtattgaactgaaatgcaattaaaaaaaactgatctaatttagttattaattgaattagatcatataataattttttaaattgaattactaattggattaaattaaattacagcagaaatgctggattgaataggatagtcacccttatcttttagtatatcattcatcaaacaagaatctcttatctaatttcattgccattatttgtccaaccaataaaatgatgacaaataatttaggacaaaagaaaacatatgcttatttaactagaaaattatatattctctttcataaaaagtgggttgggtttaatttctaaatattaccatttttgttatataattaatattattacacaatttttttggagaattttaaaatactattttttatgttttatttaaaattttgcaacctaaaaccttatttacataaatactataattactaaaatacagttttctcagtaaaaataagaaaacaactaaaaaataacgaaaaattaacctcacgacaatcataaattaactataaataaactataaaacaactaaaaataatcaaaaatatagttttatgacaactataatgcaattataaataaactataaaatagaaaaaatggtttattatttttaaaaaatgtgtttttataaataaaaaaaattgaaaggataaaaataaatttttgtctatattcacgtatttttgtaatttttttttaaattttaatttattttttaaaaacttaattatttttctatgcaattactaacctctataaaattataaattcatacgtaattaccacttgtattatgcaaattacaagattccaaaatcgaaaaagctataaagaaaaatccaaatggaatttgtcacaacactcccctcctctccaaaatcatctcttcttcctcttcaaactaatcccaaaactaacacacaaataaattaattttttctctctcatttcttcagctgtcggcgtccctctcctctgtttatgaaggaatatatgtaatacaaatacaaataagaaaagattatttggtagtagttaattcaaa

SEQ ID NO: 81065 - DNA, 982 bp, Cannabis sativa
ggtgtaaatagaactccccttatttttattttgttattgtaaaaaaatttacaaatactcttaaataattataatgtatactattataaaaaattaaactaaaaattgttttgaataccaaatggacagtatactaggcaacccttttaggtagtaaaatgtacacgatattttaccttaattttcttttaagagttagggtcagatattttgaagtttgcactgaaaatttatccattattattgtggatcttgcagaacttttatgtggggtttgaaatgtctaatctcttttaatggattatatgtataatgtgaaaagagaaagattctaagtttaagagattggattaatacgaggcattttatatttacatatctgatgtcaacggtgtggtgtggattgtggactcctaataaggtggccttttgacaagtttaatattggaagagtttctgattggagtcttatgaaatgatgttttgtttcagacttttgaaattcattacaagggagaaacataaatgttccaataaataaggataaggatgcatatgtgtgtatatatttatacttatatgtaatacatgatagagactagaatgaaccacattgttctcccaacatgttggtaatgtgagatgaaataaaagactaaaatgccccttaaaaataagtctttttcatctactttattgggttgttaaagcccgatttacagtctagtttgtagtccacgtgtaaggttatgcaccaaagtcataccaggtccaagtctgaccaaccatgcacctattggaaatgggctggctggccttatgttgtccataagctggccgaccatagggccagccaagggtggccagccagtcccttgaggtgattggtatgtcactcgtcgtcccgtttgagtgtcgggacccctattgactagggtgctgacttgacatccttgttggtgagttgtactaccacgtgacg

SEQ ID NO: 81066 - DNA, 3171 bp, Cannabis sativa
aaggcgagctttgaacctttgaaatgagccatcagcatttaacttctcacgatacacccatttgtttccaataagattttgatcatcacttcgagggactagtatccatgttttgttcttctttaatgcgataatttcgctgttcatagcactgttccagccaggatgggcaagagcttcagcaaccgtaagtggttcagcagtgtgtggatgccaggcagctgttccagcaaaaacccgaggcttgaatatgccggccttggcacgagtgatcatgggatgaccagttgggacagttagagcaggtgaaaaaccagtagatgcttgagtttgagaagcagcaggtgaatttgggtcaggtagatcgaaaagaatgggacttcggggaagatggttatggcttccccgctcactacctgaaggataaatgggtgaggaatgaactgaggtaggagaagaagagaatacctgattgtttggtgattgttgcaaggaggagtcgacatcaagggcacttgaagatggctgctgtgaggacgatgctgcagatttttgtgaagaattctgtgaagacagaggcataataggagaaggtaaatatgaccatgaagagctttgaacaatgacaggtttctcatgttgataattgtttagaaaaccaagctgaaatggaaattcaagttcattaaaaacaacatttttggagatgtaaatcctacccgtgggactcaagcacttatatcctttgtgggattcactatagccaagattaacacatttaatggagtgaaattgaaatttgtgagtttgatatggtctaaggcaagggaaacatgcaactccaaaggtttttaagaaggtatactctggttgtttggaataaagcacttcaaaaggagctttattctcaaggacagcagtggggagcctattgattaagtacacagaggtactaaatgcttcccaccaatacttgagaggcatgtgtgcttgagctagaagagtaaggcccatttcgactatatgtcgatgttttctttccgctctcccgttttgtgaggatgtgtgtggacatgagtgatgaaaatctatgccattttgaacagcaagatcttgaaagacttgatactcacctccccaatcagttctaagccccttaattttcctctcaaattgtgtttcagcaaacactttgaattgcaaaaatgcattgtaggcctcatctttagtttttaatggataaatccatgtgaatcttgttgcatcatctaggaaatgaatatagaatctatatccatttgcggattggacgggggaaggcccccaaagatccgtatgtataagatcaaggatatttttggctttgctactcgataatttggaagggagagaatgcgacttgccatattgacatgcatcacaaaagtgacttaattcatttttgggaagttttacattgcaagagttcaagacttggcttaaaactttggaggaaggatggcctaatctcctatgccaaacctcacttttggaaatggaaatacgatcagttttgcactgatttacattgtttttagaagtaaaagctacagcagaaaaaggtaaaacactgtcagtcttgacttgattttgggaggcagtaaccgagttgctctgtggttgtgtgaggtgatataagccatctttaagcatcccttgaagtagaaccctccttgttgttatgtccttcaccaaaaaacaattagagtgaaattcaatgaggacattattgtctgctgtaagtctagatacacttaacaagtttttggttatttgaggaacaagaagcatatcatttagtaataaggatttatcagctttagtgggtaacaaaccagtaccaaaatgagatatatcaagtttgtctccattaccaatggtgactttttccttaccaacaaactcttgtttctggttcattgttgaaggatcggatgtgatatggttacttgctccgctgtccatgaaccaagcatcactgtttatcacttctggtgttgcaataagggctgtgtgatttggcttgttctgagtgttggcgtttggatctgaccccatatatccttcatcataccggttgtagcaaaccgcagctgagtgaccatatttaccacacacttgacaagttggtctaggtccatttgaccttcctcttcctctagttctgcctcctctgtttccagatctgccgccattgttctgctgaacttgattagaacctcttccacggcctccattgtttggcctgtgagcaaagttggcatgtgggtctgccattgctggaagtagtttgttgcttgagttgagaccttgcagcctctctaacttgctgtcgaaacttagcaagatttcttgaagttcttgccatgttgtgtgtggtctggactcgatctgaacaacaatggacaagtatcctgcatcaaggcctgaaagacagttagcaacaagttgagagataggataaggttctccagctagagccaaagaatcagcccagcttttcttttgcctgagatactccaccatgggagtgcttcctttcctggttgtttggatgagtgtgcgtgtgtcatccattttggatttggagtgcgcaccatataggtgttcaagagcacgccataagcctgctgcagtagatgaacccatgacttctgtggctatagtttcagacatcgaactatacagccaccccatcaacaattggtcatttatgatccaatgttcgtaggctgggttgatgatttttgcatcttcagaatcgatgctttccatgacagtatctgcatcaataaactcagagggacatacgttagtaccatttaaaaaaccatctaatcgatggcctctaactatggtggaaaccatagttttccacaggctgtagttgtgtcgatcaagcttcagtgagaaaggttggttaagggtactaaagtggtgagtgactggattttggagctgagaatttgtactggcaccagtcaaggttgatgctgcagcagcggctgtattttgggcagtggcttgggctccatctgctccagagttttggggtgtgttttgaccttcggctgacatggtgtcgatgaatggctctgataccaagaaaagaattataaaaggaaatgattt

SEQ ID NO: 81067 - DNA, 1087 bp, Cannabis sativa
acagagtccaattggtaatttttgtaaaacagagggtccaaaatggtatttactctaaattttaattaattatatttacttagaaaaaacaaaacgacacgtcgtagattatcaacgaactttaccaactgaattgtttggcgcccaacaatcaaagctttaagtttaaactctgtaaaagacatcttcttcgagtaaggcaaagaaagccaagaaccattctctctctcccactaccatggccaaatctctcttcttcttcttcattctttctatcttctcctcctctgctctcggctcttgcttgacccttttaaacgccgccgagattctctcaaactccggctacctctcaatgtccttgacccttaaaatcgcctctcagaccattaaacacgattcaccgaccgccaccgtctttgctccggcagaccaagctttcgtcaagtcaggccaaccttccctgtttctccttcgccgccacgtgtcccccgtaaaactctccctcgaaacactcaagactcttcctcgtggctcagtaatacccaccatggtccccgaccaccctctaatcgtcaccgcttctctctccggcgacggctacatctccataaacgacgtcaggatcaacgagaaagccgtttttggtgatgggttcgtagctctgtacggtatagacgagttcattgtgtggagagaccttacgttcccaggttctagcaagaatcgcttgaattaaaggtccaggtggcgctctagagcttcgtttatgggggcgaaaatggtgatattatgtttacccactgcctcttctaaggtctgtagactgtagcaaaagggctttctcgactaactcggccaactcagtataatgcgagtcgagaagcggaacaaagtaaacctccctcacttctctaactcttgctttttgtttggtttcccacaaaatataataaataaaaataatatttaagtagagaagaattccgcctcaatttttaattcaatccatttgactttttctttctgatagaaattattattgggttttatgccctaaataaaatccattacaatctgattagtt

SEQ ID NO: 81068 - DNA, 1024 bp, Cannabis sativa
aaaagcttaaggcgcgcatggataggagtattccatagaactttccattgccaaattgggtggttgatgacagtattcttcttaactaagtgataagccgatttgatcgtaaaaactccactctcctcacctagccaaaaccatgagtccttctagtgatgtgcaggaagaccaatattaatgatatgtttagcaacattcgcgccaaaccattgtctgatccaagtttcattccaagtgagattctcattaataaagtagtgtactaggtttgccccttgtgtagtgtccaatagagggcggggtttatggtcactcgtaggtacccaagagtcaaaccagattgacgtagatcttccattccatatctttctacagatgccttcattcagcagcaatctggacttcagcattgctttccaaagtctcaaatcagatgttttacattcaacgtcgaaaaaacttgctccctgcaaatattttgccttcatggtagcactccagatactgaaggaatcattgattagctttcagccccatttgagaatgaaagcactattgatgtctttgatatggcgaaagcctaatcccccattgtgtttaaacttacaaagagagctccaagcaatggtatggatcggttttcttttatcatgcacaccccaccagaaatttctaagatatttgtcaatctttgctgctatcccgcacgagataacctcagaagcagcaacgtatataggcaacgaagcttcaactgactggattaaacaggccctccccgccttagagagcagacgagccttccaaccatcaattctagcaagaactttcttcaccagaaattgcatttcatgaaaactactgccagaccgaaacagagggaggcccagataagtggcatctttcttcatcttatgttttcctttatataaatttatagattttagtggcttttttatttttacacttcaaaacaatacatttatatatatatatgtatatattttttttttttgtattt

SEQ ID NO: 81069 - DNA, 1210 bp, Cannabis sativa
ctcaacaatactaccttaaaatagaacaattaactctgtacaaaaacagagttgaatagagctagcactttcagtatttgataataaatcatttttttttttttttgaaaagaattcatttttcagataatagtttactattggagaatatccaagagaatatcaaagaaaataaaataaagatagaaaaatttagacatttgtttatacatacaattttaataatattgttgttgtatcttgtttatacatgcatcaaacaaagatacatacaattttcgattatagtttccaacataatttaaaataacagagtgaaatcaaaactctcttacgcagagcaataatgtatattaaagtacgtcaatatataaatcaatcaaaagtaaatccaagacaattttgtccaattggaagatgatgatgatccaaaatttgattttgggaaaatctacaaacctttaaatttcagaattgctagctagaactgagacaatcagtctgacagtctctacttctttcgttccggcgacgacggcggcactgacggaactgatgactctcttcactgcttaatgctattgggtaagcttgtgtcttctctcaatgatgtttgctttagtttgtttggtctcttctgtgatattcattcttatcttttttttgaaattggaaaaatctcaccaactccacaaaacattacataacaataaaagctcaaaccaataaaactaaattttacaaacaatattatcaaaacaaagcaaaatccttgaaatgaaagatatgttgacactgagcaatagcaagaaaattgagcaacaacttaaaactttggtcaatttgctacttcatttagaaagaaataaaataaaataatgggtcatctgatcattactcattagctgcttcagttgatacataaattaattaaataaataataataaaaaaaaggctgtattcattcagaacattatcctatttttgtgtgttagtaattttcatatcaattcaaaatattggatgcaataaaagaattgggaatacatgaaatgaaagaaaggaaacaagtaaatcaatgttgattgtggttctctggatgatgctgatgacaattgttaccagctttctccactccacagcttaaagaaatggcattttgcttctgaataatgtaagttaaggtcgtttgttatgtctcctatggcc

SEQ ID NO: 81070 - DNA, 2942 bp, Cannabis sativa
tcatccactaaagtaagaaaatatctatgattagaatgagaagtaacatgataaggtccccatatgtcacaatgtatgagatcaaaacaatgagtagcaaaacttttattacgaggaaagggaagctttctttgtttggctaaaggacaaatatagcaaggttcaacattatgtaaatttttagttttacaatgtaaagaatcactaagtaaatctaaacatttattagacaaatgtcctaatcttttatgccagatttcagcagaggcgattgcattgagagaaccggttgtggtgtccaaaaaatagagaccattagtcgtttttcctttgccaatcgtcttcttggtgtgtatttcctgtataagaaattcattagcaaagaatttgagggcaaaatcattgtcttgagttagacaactaacagaacaaatattatattgaaaagaaggaacataaagaacctgctttagaatgagattatgaccaatgtccacattacctcctttgtgaacccaaacatgattgttgtttggtaaaattaatttagttggattaataggatgaatgctttgaaaaagtttcagatccaaacatatatgtctagtggcacccgaatccactatccaagacttagttttaggtaacaaggtactattggacaagataatacctgaattgtttgttgagattccaggatcgacagtaggttgatttggtgtttgagcagcaagaagatttaggagctgctagtattggttcgatgtcagctgaggcagcaatgtgttgttgttgctggtactgatttcatcagaagtttggaattggttggcagccgcctctttggattttccattcttgttgtacccgggagggtaaccatgtattttgtagcacttctcgattgtgtgtccatgcatattgcaatgtgtacaaaagggccttccacgtttttgtccttgattcttggatgattctggttttcccgaattcttttctccttgaaaagcaaaagccatgttggagtttggatccatggtgacactttgtcctcctctttgattttcttcctatgtaactaaatgaaacaccctattaatctcaggtaagggatccataacaagtatattacctctcacttgtgagtacacatcggatagacccatgagaaatgacatgatgtattccatgttgtgatgttcttgcaatttcttcattcccccacatgtgcatccattacatgtgcaacttggcctgaaattagatacttgttcccacacagttttgagtttggtgaagtacatacttacagtttgagcttcttgcttgagattcatcaagatttttctgaggttgtaaatatgtgcaccatttctttgctggaatctaacacgaagatcgttccgaattgctgctgcagactcgtcgtacaagatgctagggggggatctcttttgaaaccgaattgatgatccaagagatgactatgttgttgttgcgaacccaagcattgtggagaatgtgatcagaaacaggaggttcgggtatggtgccattcaagaaacctaatttgtttttgacagagatggccaattccattgcacggctccaagcaatataattttcctgtccagtgagtaattgggaaacaagaacattcccagggttgtctccatgatgcaaataatagggatcagacgggtctttaataggatttctcgacctcattatctgtccattaattccgatttcagaagcttgaacttggttatcgccatggttaaactgagtaggtgcatcatcttcttgttgcgtttcttgattgttagacatggagctatcggaatggatggaaacagggacttaatagaaccttagaaggaagaaaagtagaacgggaatagaggtgtcgatggaagagatgaattcttcagatcttcgaaattgatcctcgccggagaagaaagactgaaacgcggcgaggaacgatcggaaaaatcaagaatgaaaggaagcatatcttccttgctctgataccatattgcggatgaagagagaaaaagattttattgatgtatgaaaagttagattacaattagaaaagaggctttaaataggaagccaagaaaggaaaaccaattccttaaaatcagggattgcatcccataaaaatagggactgcaataactaacaaaccaaaactaatttacaaaacagaatatgaaaacaaagtaaccgacacagtagaagtaagtagtagtattcttgttaaaatgcaataacatgaaggttaattatccaatatactaattttaaactttttttttaatttacgatttgggttgcttcaatagttactctggtaatttttgtgtggattgttatgtgaattttaattgcaatttaagttgctctgtgggccgggtaatacgtaaattttcataaaaaaaaaaactattttgatatgtaaaaataaaaagactcctaaaatgaattacatatgtatgccgcaaatattcttaaatatattaatattttttgcaaaaatatattaggcaaaaacgtggaataaaaagttttaggctggccgtggcctcatcccactaccattctttagctccgtcgttgttaattagtgatgcaaattagtattgggtagcaaatattttagtttttaagttaaaagtcaatatataccaaactgtatcataataccaatattaaagcaatattagatattttaatttaggagtctaatagcacgtgacatataacaagctgttatttaaagtaatttacagtataaatacttaagtttaattcttaattataaataaatacttaaatttcaattttaatagtaataatacttaaattgtatttctagaacttctataggtacataaccgttaaatgtcaaatcattatccacgtgtcatttt

SEQ ID NO: 81071 - DNA, 767 bp, Cannabis sativa
aggagaggaggaagttgaagaactatttggtgaagaaatagatgttggaagtgaaccagcagagttgatggatggagtgttagattgtgaagatgagtttgaggaagatggtggggaaatgatttgtggtggggatataggtggtgtagcaagggtatgagagaagtgtggaacaacaggagtagagacaacatcagatgtttgaaaaggaaatgcagtttcattgaataaaacatctctagacatgtaaattctaccatctttggcaatgcttttgtagcctttttgtgtaagggtataacctaaaaaggtacaaggagttgacctgtaattcattttatttctgttatatggccttaggttaggaaaacaaagacaaccaaaggttttgagaccagagtagtctggtttagtatgaaataaggtttcatggggtgtgaagttgtttaagactctggttggcattctgttgataagatacacagatgttctatatgcatcatcccaatacttaagaggcaatgaagaatgagctaagagagtaaaaccagattctactatgtgccttgctttctttccacaactccattttgttcatgggagtgtggacatgaaactctatgaatgatgccacaagactcaactagagaagtgaaagctctaaattctcctctccaatctgattggatggctttaatttgatgattgagttgtaactcaatctgtgttttgaatttaatgaaggttgggacagcctcgtccttagt

SEQ ID NO: 81072 - DNA, 706 bp, Cannabis sativa
gcttgtaacctcaagatatccttaattagagatatattcaagggttttttctttgaagctttcacgcattttaagaaaattatttagggatattatggttttttttttttttttttcttatcgactcttataaaaatttgaggatatctaattttattggatagccataaaaaaaataaaaatataaatctataaaaaaaataaattaacctgttggtaacttgttataataagtcactaattgccacatcattataattttttgtacccatcaataggcattatccattaaaatattccattattaatctatttaattaaaagataataataaaataaaagaatttaattgatttttgttaattagttatatgatatttaaatttgaatttgaatcaaattaaatattataaccttatatatatatatatgatatataccagtataacaaataaccctaagaataagagaatagattgatacttttagagagaaaatatgattgaattcttttcactcttactctctctctctctctctctactcgcatgcctctctctcttctacaaactcacacgccacacacgctgaagtgtggcgtgagttttttgaccatccttatcttatcacagtatctcatgagttgagattatatgtgattacataattgtactcatccaatagaatctaatagcccactttattc

SEQ ID NO: 81073 - DNA, 946 bp, Cannabis sativa
ttttttttttgtattttaacaatataagataataaaaatttactaaatatcttaaataactacaattaattttaaatatcgaaaaagaataaagcatcagtacatctcactgtaaattttgtaaaattcaaattgtgttttatctaatctaccgcagtaaaagtgagctcacaaagttatcatcacatttttaatatgtgcaagtgcaaccatatattctcacgcattcacactctatagcttgacttattattcctcatatatagattcttgggattggattgtgccacatttaaaaaaatcttcttacacttgaaaattctcttccacacattttgactgtttatctttcggctaatatctttaccctttctcttcccattttctactcttttactcaaaataagataagttctaaaaacagttctcttgataaacaattattggttgagaaatccatggcaatggcattatggaaaatcggccaagttttaagtgactagcttcttcatttattattattggaatcacgtgttgtgtggtggaattataagaatatttttattggtattcttacttacttgagttaagggttcgaatctcactgcatcttctcatggggattatatttaactctttgagaggttagcttcttgtgacagtgtcatttttaatggaataaaaattctcaaagtgtacgatgtgtttaagcacatggttcccaaaattatttaaaatatcgaaaggacaaaaaaagaatttgcaccacgtaatctcttttttaattatcaatctacataagtaaataagtaattatttcatcgtaactacaaacttaatattaaagcttttaaagagaattatattagttaaatgttgtaacaatgatatgttgtacattacatgttgtcctattattctctattaaatcatatatatatatata

SEQ ID NO: 81074 - DNA, 2379 bp, Cannabis sativa
attgccaatggttagtgcttcaaattgagtaatgagatcagtagacatccccttactctattcgacaaagggagtgtcttttagagagtgttcagatgtacaagacccctcttcctgacctccttgaccaaaggggttcactgattcctaaataggaattgtacgcatggtacgagctctcgatcgagttacaagtcctgtataggatgtaggcttaacatttgaagcgacccttgttggttggtatccctggaggaacatccagtcaccatgttcttttaggaacgggttagggtttgctttgggaactcttacgttgtcacttctagccttctttgagaaggcaaaaggcttcctacacccctcatctaatcttagacgtaataaaaggtgttctttgttcttaacagatgcaacctgttggccttaggggttgatagggattacgatcgtaggccagattggcacatcacttaccaattccctcattttaagaggatttggtgagagtgacatttttgttcccttcctgccttttgttgcctttctacctttcagagtttgagaagttggtgttgcctcaatttcctttgcagtgataaccatcactgaagcaatagtgggcaagaaagtagggatggaaccaatcaggatatgctcctggccccattccttttggataattatgggacaaccaatctttgttggcttcccttctaccttgacaacctttgcagtggaccttttaattgctcgagcttgcctctttttgaaaccttttgcagccttgcttctcaaggcttgcacagtgttatggacattcttcataccttttcctcttctagcctttttagttggtgtaagtttcttcacattctccaccagtttgggtaccctgcatgaaataggtgcctggttggcagaagaggttactagtaacttgtggaaatagattgatacttgtgttgcaattttttttttcttgaaaacagtaaacatgattagcacctaaaatttaaaggtaaagaatagtcatcatagttggagctgaaaaggagaatgggtctcattgggcgtgccaaaattatgttaagcaaaaatttcatatttagaatattaaaaataaatggaaaacataattttacttatgccaaatttatagcataagagtttattaatttaagtctgacacatctaagattataaatataatcacttaattacaatctttttgtttaatggaaacaccctttgattccaattatgattatattaagtaatttaggtatgcttagaaaaaattgaggtgaatttagagttgcagctgaacttagtaaacttaattaaccgagcttagagagcttaggtcaaagtggaccataaaaaatttataaaatcttagattaattttgagcagcataacaatattgattgtttctttttttttaatatttactatatcttccatggctatatctcactcttgaagatcttttatgactcaaaaagcctggatcaaagtgaaccatgaaaatataagaaatctattgaattaatttgagcagcataacagtatataaatgtgagattttccccctttaatttttggctatatctcacttttggagaccttttatggcttataaagcctaggccaaagtaaaccaaagataaagagagaaaatctattaaagtaaaaaaaaaaaaaaaaaagatttagagagaagagcaaaaatagggattaccaccctatcacttactgtgtagaaatctttgtagaagctcttgaagataaaaatcttgtacacaaagctttctttctctttttttctctcctatttcacttttacgtttaattcaaaactacccaaaaataaaaaatccatccccttctattcttctatctttcatttttatagagacacatttttttttcttttacttatattatttttattttttataaataccctcattttgactagtcctttctctttttttattatattattcttgttaaacaaatcattcctttatattttaagtagcttataaagaaaataatttatttacattaataataataacccttttttttcgttcaacaataaaaaatgaaaattcattatcttttttaatgttaaattttttttgatatatttcaatacacattaataaatataaaaaatctctaaaattatatatatttatcataacattagaaaatatcttttaataagtagtgataatccggtactctatgtttaattagatagagagataatattaagaggcacattaaatgaaaatggagaggaaagatattatactttgttgaagagagagagtgttaagatttttatcattatttgttaggag

SEQ ID NO: 81075 - DNA, 1080 bp, Cannabis sativa
ccaccactccatagaacctttatctagggccaccatagcacacccgtagttaccatccttgaaagaaccgtccaccatgataaaagtgttcgtgtatatcttcagcgagacatcccccttatgattgttcgacagactcagattggcctcaacatcatggcataactcagacactctgctggaaacttctcctctgaccaaattcacacaaggaatataatccacagaatggtacaccttattcctggttttccaaatgcaatccaaaatcaccccaatgcagttgagaagtttgggccgaagagaggagtcaaaagaactgcaaagattgcgaatgacctcctgcatattgtcacccgccaccctgtcgatcctgatgggcataggactagagaaccataaagcagtagcaaagctgcatttagcaaaaagatgaatagccgatttaggggccatatgacatacgagacatgtgtttgcttccaaggggagaaatttgtcacccgtaggcaacaaactcgaacacgctctccataacatctaactcatccgtggatgaaccttagagttccaaatccagctccataacacatctttatctccaaacctctcttgttggtcaatccaataagcccccttaacactgaaatttcccaccagagactccttccagataagaaagtcactggtagcatttacatcaatttggatgtcgccaatcttgttacccacatcacaaccgaaaaggtatcgtagatagcccatattccacttccttgtgcttctatacatcaaatcggccacagttctaagagtaggggctttgggacggatactatccattaattcacgaaattgatcatagtccaaccatggaatccacgactgccaccacacatcaacatcctcacccaaaacaaggactgtacaagcccccttgcaaatcttattcctagctcccaagatgcctcgccacaagaaactatcagaattcttttcttgaacactccagaaagagtctctaggaaagtactttcctttgagaatattacaccaaggtctatttactttgcaagccaa

SEQ ID NO: 81076 - DNA, 1672 bp, Cannabis sativa
aaatgaaccagctcagattataaagaaacaaatatgctcaataactcacctcgaaaattataaatggtagacatgtttaagtctctccttaaacatataagggcgagtcatgaataacaactactatttttataagactaacgagatgaacaactaatataaaaagtccatctcaagatacacaaagtaaataataatacaatagttaactagaaaggattgataatgagttctttaagagcttgtaactctttgacccacatactcgtgagtatgttgaaagactaagggatatacacaaaaggtgattcaccctagaataatcacaaatgacattggttgatagtgtctcgcataaatatattcattcagatctaataatgttagagaagaatgcaaggagcactttagaataatacctcagcatagaaactgtcttcaagatataaatatcagatcttcacttcaattgagaagatctaaagacgagccataataaatgaggtcccaatcgtccttcacaaagttacggaagtaacgacttgctcaggtactgaaaccagagcaggcctttgcccccgaaactcctgcctcatggggaaagggaaggatgggatctggaagttgcacctcagggtactcgggattgaaagcaactttgtgtggatcttgaaccatgtgttttcctttgtcttaaatcaaatcctcaacaaccttctttggggaagaatggatcttgatgacaggcactgtcttgatattgggtggaggaggaggaggagaagttattttagcaacagtcttcttttcttgatgaaccttgggcttattggaagaaccatctgtggaagaatttgctcgccttttcctctttttgcaagaatagttggactgttgagtgttgcatcacctagattgaagatgataattcagttgcaatttttaggtattcttcttgctgaatcatggttgtgttctctggccattcaatagtttctttgagcacccttagtaacttatgttgcgctagcaaatgatttgatcttccttttccatattgtgaatcatctgaaccatcaaatttatcaatgtcaattttaacacaactcatattaaaattatcaaaatttaaatcagggttggggttagaaatctcaggttcatcattcaggggcacatccaccaaatctccaagatcaaggccatattcttgatccaatctttcttgtgcttgaggatcaaattcctcatgatcttgaggatcgattgcttcatgttcttgattattaatttcttcatgacttacttgttaatttgtattttgtatcttgaattttgtagaaaaactagctctgatactaatattaggatctacacttctaacttcaagacaaacaaattaattcacaaaaaatatttatagtatttttgcaaatgaaagttatgtgtccataacttagttgggaaaaataaaaacacaaataaaatccaataggcctagtctggcccaacaagctaggtaacaaaactctaatgagagttaatcaattcagttttgattgagacgcaagtctcaaaccttcttctacttctttgagagaaaaccctggggtttcaagcacaaacacgatctaacagatcgcatatgaagcaaaaatcaaacacacacaca

SEQ ID NO: 81077 - DNA, 2587 bp, Cannabis sativa
aaaacaaaaatgcgttctgtaaccacttttgttttttaattttaaaaactataaacaaaagtgtgttctgtaatatttatttttattttacttttgtaattttataaacaaaaaactaattaaaaaagtattacctaacggcacctaaataattatcgataatacatatcaaatataccttttatctaatttattcagtagcgcaactcgtgaaaataaaagagaaaaaatcccacatcggtcgcttaaggttaaaactcattttcgcaaatggcgcttattttcggacctttccaaaccctagctccctttatatacaacaccatcgcttaagcaattcatcaaaaacctatgcggctcaacagcaccagccttctcttagccagaggttctttctaccctgttaacctatttatgtttcatttcaggccggtgatgttatatcattcatgtattgcctacattgtttgattatctattctgataaaatgcaatcacctgatttttctgaggccttttcaatgtcttgcctttttcccctgtgaagaaaccctaatgagttttcggctaacgattgagttgagatgaaccctcaattctcaattcgtcgtcttcaaggtttgggttctgtcaaatttgtcttatttttgttgctttctttaaattttgaaatcgcggtgatgactccataatattcaagctcaacagaccggaatgcaggcttctctttatagaggactttgcgtgtcgataatcccgctgaactgagcgatttcttttataaatctccattctttttatcttctttctaccaattttttatgctgtttttgatattttgagcttaatttttcaaatgggaaaatgttggttgcaatgaggatattaagctccctcttctgattaaagttgaggaaactcgctggcagaatcgaaccaataattacaattgccaccactgagtaaacctatcaaatcccatttgatttacttttaatttattttctttaagatagttaagagatttgcagtgatgactccataatattcaagctcaacagaccggaatgcaggctcctctgtttagaggattttgcgtgtcgataatcccgctgaactgagcattctctttctatatatgtttttacaacttgtttttcttttattttcttcaaatttttgtttagattgttcttatcgattttggttttcgagcttcgttttttctacatgggaaaattgtggttacgatgaggatattaagctccctcttctgattatggttgaggaaactcgctggcagaatcgaaccaaataataatattgccaccactgagttaacccttaatttcccatgaggtttctttttggtgtttttttttcaacttataattggttaatggttgattaggatgaagctcaatattatccaacacttgatctgagatactttagtatcgattgatgtcactcgatttgcttctgaatcatttaatcgtatttgctttatattttagtttttatcttcaatatagatctgagattttaatctcttgatttatgttatggatgaaaccttggtattgaacccatcaagtgatgaaatttggaataatcttaggacaccttcctacacagtttgccaaagctgtggatgagaacaaaaatccattctgatgttgatgttatgataattttagctttaatttattttttattgcaaattgattgaagctatatttttcttattttttatgtatcaaatgatgattatggatgtcaattctcacgacggtcgtctgagatttttcagtgatgataaacatccttttcttctgatgattctacattttttatgatgtttactttttgtttaggtatttaataatgttgagcatgatgatgattgttttattagtccgattatatatgaacggatctataacctcctactcattctgaatgctttcaacattatttctaccatcgaatttgtttcttgtttttcaacaatttgtaaaatgatattttttatttttaactgcaaaaatcacttcggacataaatattagttcgtcggacataaataataaactgaaacacatcttgagggtagctcaagtggccataagagggtgcgtgtgtgttggaggtcctggtgtggtggagaaactgaaacacatcttgctggatcatttgccttgtttagtagtggacaaagaaaagtgacatgaacaaaaggtttttattgataaattcaatttggcaaaataaagttggtgattaagatttgcacttgatattgtatgggttctaaagccacactatcattaagatttgcacgaggggaaaatgtgggctgcatggtaaccgtggttgacttgagaacaaatccagtaataaagactacaatgtgcttgtttagtagggcggaatacagccctaaagcttcaattgtggcatctgatttaactccaaaaatgttttaggcagtcaaaatttaattgtattatttcaaaattcccgggcctcggttttttgaatggcagactgcttaattgtattaagatgctttaggttggaggtg

SEQ ID NO: 81078 - DNA, 545 bp, Cannabis sativa
catgacacttcctcaattatattatttcaatgtagttttaggttcaatcacaagtgacaattacctcaagagatgacattttattattagtgcattctaatatgttgatttcacaaattttattctaaaaaaataatttaaaaaactaatatatgctgtgaggtgccacttatcataatcgtcttgagaaccttaaggtactaaatagtattagtgataaattaacataaataaaaatttaatcaatgcatgtaagttattttataatttagtaatataataaacactataattttcaacttctttttttctttattattatagatttactataaatgaaggatttatgttgatgacaatgtacacattataaatgttaaatggtccagcttccttcaacaaattacagaatatattccattatgggcagtcaaacgatacaagaaaaagcattgcaaaataagttataaggaaaaaaagaaaaaaagaaaaaggattggcttgttcataatagatattacgatcgatcaaggggcagaaactaa

SEQ ID NO: 81079 - DNA, 1023 bp, Cannabis sativa
tctcccctctctctaaagccactgcccatattctctgtttctcactctatatttttgaacaacttagtgttgtattactttttcacacagttctcttataacacataaattactgaagaagattgtgatgaaattagtactttgttttgagctctgtagagattttgattcaatgatacacaatactttgcaacaaaaaggaacaaaactttattcatagaacatgatgagtcatattccactctacaatatccattttaagtattctgatactcacacatataattccaatattttaaataacaaattatagaattttttatttatgttaaataataatttacatgaaaaataatatgatcttgtataaatatttggaacaagaagtactccaataattttgagaagattcccgtgacagctttcttaagtaatggccaagctcataacaacaacttgggtttgtgtgaagatgtgtgaggagcttcaacaacttggattttatggatttgaacggaacattcctgaaatccacgtattagtgccaatggaagaaccattgataaggccagagaaaaaggaacacctccaaccgatctcggcagcaaattcccaataagttgtgagacttgccatgcatggaggacgagctgaccttcaagattccactctcaaggaggtggaaaatataatcaatttttagaaattctactgaaacaactgcataattaaatataagaatgatactacttaatgtacttagaatgcatgggaaaaaatggagttatattaatatatagtttgtaattatgtgattaatttagaaaatatttattgtaattatttttttgattgaatttattgtaattatttagtgtgccatgtaatcacattagttagtgattattaatttaattatcaaaaaatgtgaaattatttaggcaaattggtggaaagtcacaatgggtaattacttaataatatcgcagtaagtactacatatactaatgagttatcagaaaa

SEQ ID NO: 81080 - DNA, 674 bp, Cannabis sativa
agtcggttgatcaaaggtttaggagttagttacaatttcggttgtaactaactactaaatcttgatccactagaggcgaagccacctaggattgaatcaacttattttatttcactttgtatgttgctgatgtggatatttatgtgtataagggactgggtataagtggaatttattcaacagaaacctagctccaactcattttatagacgaaatttgggaagtttctcattttttccgctgaacagtgaaactgatgcaattctaaaattttgctacgacgcctaataatattttaccataactattttgatatcattcagaattgaacgatttaagatgttttggaaagataaaagaatgatctagaacatttattcagaaagtttttcttgagagtaaatggatcatagtcaaaaactatcttgaaacttcagcctttactttcagtcacaaacggagcgtgttcagcatctaaaacttaaaatacttaaactactagtctaaaataaattatgagaatatatgtattttttaaataatatttgtttacttaattttgagtagattgttaattaaataagtaaattagtttagaaaatgaacacaatttcaaagaagatatttgtaattattttaatagttacgagtaaatttttacaacaagaaacaaa

SEQ ID NO: 81081 - DNA, 1597 bp, Cannabis sativa
  modified_base (1126)..(1140): a, c, t, g, unknown or other
tactattttaaaaaatactgggtccattttatcatttaacaaaacacagggtctaattgataacttttgtaaaacagaaggtccaaaatagtatttaccatattttttatttattaaaagagttttattgatcatgttcatggctgattgtggggctttttagactttattcgctgcaaatttcgattgatgaatcaaagatttggcaactcatgtatgaatatatatatatgacagctatatacatggtttatatattgcggctggggagcggttttgattcaaaaccagaatatattattgcaaatcaactaaatattcaacttttacatctttatgaattgatgaattactcttatctatttacaaattatttgtataaaaacgaaaaatgtaacttaaattttatatatatatatataatttttccaaaaagaaaattgagttgtgtaactatttttgctgcttattcctcgacctttcggctttcttttattcctattaattaatatttctttatttaattaattaatgtgatcaataactaatttaaaatctgcatagggatcttaaatttacgcaattaatgttgtgtccaccttctttcttatcaattttagagattttttgtcagtattctgaatggaatctgtcgttattttcttatcacatgatccattttgtcttcttcattaaatatattatactattcgtgttagtagaatgaggatttatgaggatattaactttctttttttcagtctttatgatctttggactccctattaaataagtagtgtacagcttttataagaagacatagttaagaagccagctgaataagatcacacatatatagatttataattttatatcacccaatatcaccaaagatccacatatcttctatattcagaatgcagttttcttgttttttttctgtttttgttagaatctaaaagtatatggttaaggtgtatattgttaagatgtatattttcattcattttatatatattataaggctaattagtaattttttaacctgaactttaatatatatcaaattatatcttttgaatttttttggccgttaaaaattcccatgaattattgagattgttannnnnnnnnnnnnnngtctaatttcattcaatttttctatttcagtgattgtttatgtattaaaaaatgctccccagactttgatatctactaaattatgcactcaaactttgatatgtactaaatcatgcctcctgaattttcatccatattaaatttttttttactaaaattagacaaaagtctataaatttaacaatcttaatagttcatgagaatttttaacggcaaaaaaaattcaagaggcatgatttactacatatcaaagttcgggagaaaaattaataattatgctatattataattagtgactttatcgaatatatatagtttttcaaaagatagaattaactgttattgtcagttaagatagatcgattcatgtaattctacaattattggctataataaattattatcgaatcctcatgagaatatgatctgagcaatatttgatatataaaaaggttaa

SEQ ID NO: 81082 - DNA, 508 bp, Cannabis sativa
aaccttcatagcagacaagcatgatttttcatagtttgaaagaccagttctgagtgagttttatttacttatatatataaatattagctacttgtgtttttccaacattataagtctctgtttcatcttaataatattattagcttcaaacataaatttgttctattagaactttcaacgtctcacatgtctgaattttctaactcatgactttttgacaaaaaatattataacaataattatgattttccatggttggaagttggcctgactaaactggtccaactactcagctccaccatagattagggctgaaacaaccccggttgaccaagaaaatttaaccgtcaaatttatcgtaaataaaaaagttaatatcattttaaactctgtgttttgcaaaaaataccgattcgactttctattttgttaaatgacaaactagatcatgtattttctaaaattgtacaaatataaccttagcttaattttcaatttttttttaata

SEQ ID NO: 81083 - DNA, 633 bp, Cannabis sativa
tatatatattgggtagggtaggattcaaattgttattgttgggagggtgagaagcttttttggtgaataataaaaaagggtttatctaatattagtggaaaaatcactgagccacaaatatttaaattatttaaatatatcatgtaataataatttaatttaaatatatcatgtacactgaaagcagtggttcagaatcatattcttttgtgggaaacattagttgttttctaaatctttcactcttgtctccacaaggatttcttatgtttgtttgtttctttttttaaaatatatatatatctaccaacttttttttctttacaaattaaaagttataatttataaacctacttgctaaatttatatatttaattatttttattcgacttacataattaaataagttactgcaaatcttgagaggaaattaaaatctagggattttctagctaatttttaactttggatctagtaatatttgcatgcaataataaagtttacattaaaatatttgaatattgaattactttccataatttcatatataataattttccaaataatagggtagtaatattggatttgaaaatataaaatacaaaacatgaaagaatataaatgggttgattt

SEQ ID NO: 81084 - DNA, 3363 bp, Cannabis sativa
cccatttcctgaagtcgagatctacttcccagcctcaggaaattcctcgatactaaaaagaggttggcgcaaagatcttctggcacaggtttgggtcttgagttggctgaattatctgataaaaaccacaccaacttccttcctagatccacctaaaaccatgcaaatcttcctctagaattcttcaccagtctgaggaggatctttgagatcgctcacaagatctataccctctaggatcacttgtaaaaatcggccatggtaggaaatggggctcccctggtttcgattggttggaagctcctcagccctggaatccatcgtttccggctccggttgaggctttaagtctataggaacgagaatggaaatcggtgcatctaggtattatgagtctgaaaggataaacttctgaactcaaaagagacatttttgtagcatatacaaaataaaatacatgagcgccactgcactaatttgtatgtgatagtttactgtcttacctagtaattcaagtatgtggagattctaaatccccaggtgtcctgagcaagcatcggtaatcctagtcacatattctcacgatttcacaaataggattaatcttaaattcattttcacatatatacataatttgaaatccaattatagatgaccacatagagctcaaaacaagattttgaacgataccaagaacgtccaaaatggagtttggaatcaaaagttatggcaaaaacaagaaaaatgcaaaaactgggaaaataggggccctcgccacggcggtcacaacctggtggagctcgccgcaatgagctatcatgtggtcacgaagacagccctagaaccccccaaaacacaatttttcatgtcttcgacttttacccaaactcataccaaaatttaacaaattagcatacatagctcaaaatttattctacacataatcaatctaaagttggaattaaaatgagcctaacaaaaagctcaaagaccaacccataaaacacaaattgcacatgttataagaaatcaagaatgcacacaatcaacaagctttgaaatccaggatatttaaagtaaaaacctaggaaattcaaggtaaaacctagaatttaaacatcaaaatctcaatccaaaggttaccaaaaccacaagggtgaatctagcatctaaattataacacaaccatacaataatcatcataattctcctaatctcatcaacacgcaataaaaataatcaagaactccaaaaataccattaataactcttaaatccagaaattcacacaagcaaaagagattaaaatagttacctaatgctctccaagttccaagtaagagaatccaccaaaattccacaccaaattcaagcttttcctccacaaattgagtttgaaattatcaactaaagagaaagaagagagataggcggtttggggtttcaaaacctagaaaatgaatttctctttgtttaaaacttacccggagtgtcccaaatgtaaaaagcaccatcaaggtgagtgccgagccaaaacgtatttccaatgcggtatggtgggccattttatcagagactgtccataatctaagaaacaagaaccaaagaagaacaacaattagaatctagggcgtttgttcaccatgactcaggctgacgttgatgctagtccatcagtggtgacaagtcagttgtctattaacgattgttcttattcagtattatatgattcgggactactcattcttatgtatcaagtagagtaatggttctttcaaaaaaaaaagtagagtaatggaaagttttcataaaccttttgatgtgtatggtaaaagggtttaggactctgcttccttcagtaaacctaattgtatctacttgatggattaggtctttatctttttggattgacagttatgaattaatcgctaacctaattgaattacatccatctgattttgatataatattgggaatggatttcttgtccaagcacggggcattgattgatggcacgtggaagatagtagtgtttgaacttgatagtgttaaccgaacagtgtttgtgggtaaggtacaaggatcacacatagccagaattacaatcctgaaagttagagacctaatgcgcatatgttgcataggattcgtagttacaacagtggatactagtcagcctatttcagctagacctaaaaatacgagattagtgtgtgaatttctagatgtattttttgaggatttacttagattaccaccttcctgagagataaatttgttatagaattagttgcaggagaagaattaatattaaaagcaccttatcgaatggctctagtggagttaagggaattaaagattcaagtttaggaattacttaacttgggatttaccagattgagtttttctccttagagtgcttcagtgttatttgtgaaaaagaaagatgggttgcttcgcatgtgtatcgattaccgagaactaaataagctcactatcgagaaaaaatatcctctacctagaattgatgatctgtttgaccagttgaagggtaagacaatcttttccaagattgaccttcgttctggttaccatcagtttagaatttgagaagaggatatctggaaaatggcatttcatacttggtattgacattatgagtttctagtgatttcttttggactcactaatgcctcggatgcattcatggatcttatgaactgagtattcaaggatttcttggacaagcatgtgatagctttcattgatgacattttagtatgttcagaattagaagaaaaacatgagctacatctcagattggtacttcagttactatgggatcacaagctttgataccatgattgtgatagatagtagtctcgtgatctgtaaggggaaatacctggtaagctgtgcaatcccgtaccttttggggaaggtcaagtgtgatgattctgagactgtgtaagtatgggactacattgttaaagagggcttaaatggattgattagtactacctatatcaacaaggtgcatctttttcttcggtagcccatcacaaaagaactccacagttaagcatgcttgacctagggtaatttcaggatgtgtgaccttttgggaagttttcctaggaagcatgcgagtgaatacaaagcatgctggaaacactcatgttgatctgtagggtcagttgtcatttcatggagaaaccaaagtgacatattcgtttataagagccatctttttgtgggtgtaagggcttaatggagacttgaagcgaggacgttaccaatggtatcagagccttgacccagccaaaagtgtggtcgacaaggacatcggaccccgtaaggggg

SEQ ID NO: 81085 - DNA, 2887 bp, Cannabis sativa
gcacaaatcgagaatatgactgtggcaagatgtatggtggacaatggagcctcctccaacattctttttaaatcaacatatgaaaagatgggtgttcaactcactaatttggaaccatgtagtcaagtgatgtatcaggtatatcaaaaaatccagccaccagaactctaatggcaaagttcattgtaatcaaggtttcctcggctttcaatgccatgataggttgaccagctctatacgacctgaaggcggtaatatccatctaccacctctgccttaaattcccaacaaggcatggggtaggatgtttaaggggagacaaaaaatctgcccgttattgttataacttggccctgtccaaagccaagaaagagaagatgcccaccgagagctttgaagaagagtctagaaaagggcaataaaatctagcccaaagtggggacgcaaacatagatcctcgctttggggatcctacaggaggcttcagacctgtagaagaattagaggaagtgaaggttgatcccacttctccgactagatgattgaagattgagaatgctagaaataaaatcattactgataatatttctaagggcaaacctggacctttttgcatggtcacatggagacatggtcggaatcaatccttccatgatgacccattctctcaacattgatccaaacattatacatgtataacaaaaaaagaggttgttggacaaataatgctcccaagttctcaaagatgaagtcgagaggctacgagcccatgacttcataatgaaagcattctatccactttggatatccaaccctgtgctggtacccaaacctaataaaaagtggagagtgtgcatcgactttaccaacctgaacaaagcatgtccaaaggactgctttctacttcatcgaattgaccaactagttgatgccactgttggccatgaaatcttcagtttcatagatccatattcaggttacaactagataaagatgcatccgccgaatcaggagcatacaagcttcaagacagacttaggtctgtacagtaacaaagtcatgccctttgggctaaaaatgtaggggccacttatcagaggcttctgaacaaaatgctcaaagatctcattggccgcaacatggaggtgtatgtggacgacatgcttgtcaagcccaaaaaggctgagggcatgtggacgatctagacaaattcttcaaaatcctccacaacagcaacatgaagcttaacccgctcaaatgttcttttggggtaggcttgggcaaattccttggcttcatagttaatgtcaagggaatagtagaaaacctagacaagatccaagccctttttgacatgaagttgcccacaatctttaaagaagtacatagcctgacaagacgtattgctgcacttagcagatttgtgccaagtctacaaacaagtgtgtacccttcttcaacattctcgtaagctacaaaaaaaatctagtggatagaggaatgtgaaaaagcattctaggagttgaagaaataattggctcaaccacctatgttgtcaaagcccctagacaatgaagagctatttgtgtacctaccagtcacaaaatatgatgtgagtgttgtcctaataagagaataagacgatgtataacacattgtatactacattaggaagagattaattaacagcaaaagtcggtacacattcatggaaaagctgacctacatcttgctcttggcctccaaaaagctaaggtcgtacttctaggcacactcaacaaaggtgtacaccggtcaaccattacagcaggcttcacataaacttgaagcattaggtcgactactcaagtgggccattgaacttggccaatttgatatcacatatcaaccaagaatggccatcaagggtcaaacccttccagacttcatggctgagtgcacaaactcatctcttgaaatctctaaaaattcagaagaaaagcaagagccagggaagcagcgagagcaagagcagtagaaaaaacctaaagagctagcatggaaactccatgttgatggaagcttcactaaccaattgttcggtgcaggcattatccttataacgcttagagggcaacaagtgcatggagtaatagaatttgacttcaaagcctcgaacaacgatgctaaatacgaagctctaaaagctggcctcaagctggcacatgaagtacatgatgaccacctagacataattagcgactcttaattaatcatgaatcaagtcctaggcgaatatacaactcgaggtgaaaaaatagttgcctacttgagcaagataaaagacttgctaagtcagctcaaaggctacataaccaggcagatccctagagaatagaatgctacagcagatgcacttgcctttctggcgagcagcaccacttctcataaggcaaacatggtgtcaatacagttcctaaaggaacccagcattaccatccctgaagaagtcaacatattagatgacagtccaacatggatgacacctattatagcttacctccaaacttgagccttgctaaaaagtaagaatgaggcaaaaaatataagaagaaaagcttctaggtatctaatcctagaaggtacaggtggagcttctcaatgtcgctcttaaggtgtgtcaccaaggctgaggtcgagcgactaatgatagaagtgcatgaaggctaatgcagcaactatgtcgtggggcaaagcctatccaaaattatactctaacaagggtacttttggccaataatgatcgtagactcaatggactacgtcaaaagatgtgataagtgccagagattctaaaaaattccaagagctccacccaatgagctcacgatgatgcagtctccttggc

SEQ ID NO: 81086 - DNA, 1364 bp, Cannabis sativa
ctcaaatatccaacgttatgaaattgtgcttagtgattatcaataaggtatccgcaatggatggatctgcttgaccttgtcacacactcattattatttctaatggcctgaatgttacaatcttttctacagcaagagactttgtcaagttacagatgctttgatcaacaacctgatcaggggagagtattagtgattattttagtaaaacaaataacaatgaaattactgtgatgaaaattaggggtattcaactgagttggttgatattgcacattcttaaggtataactaatccactcaggtgccaatgtcttatattatattcacttgttagcacagaatcagttaactaataaatatacctaaaaaaaactccaataaatgacttagatgaataacaatggcaaaactagcaataaatttaattgaaaactttttgatgtgaattagattcacatagcagttaataacagctcgtaataatcacaaattcaaacattaaaccaaaattaaaattttaaactagaaaatgaatgaaaacaaaggagcttatctggaaagcaatgacatcaaaatgattgaatcttcattgatattagtacattacagcaagagtttcaaacttaattacactcattaatggtaatggtgtacaacaccaattacaaaagatcttacactgagtggtataaaacactaattacaaaagatctcacactgagtggtttggattaaaaacaccaaaaaaattttacaaccctcctttcacaccttattcctctagagcaaaataacaattttctaagtgctgaagttggctgttaagtctatatgtattgacacttttagacagttagataaaaaaataactaacttaacttccaatgaaatatataaaaaataaacagaagtgctgaactgatgctgtagcatcctgttagtgactaatttagtaagctaattcccaacactttgaacagggagcaatggaacaaaataatatttatgcattaatgttgtttagcggagagctttgaaccccctccctttaagattcattatccttcttgtaatagggggttcatgtatttggattacaaatacaataatgcccctaacgttcattatgggaaaaactagagtaggattgatgtccactatcttaatttatagtagggttcaattattttgcatttccatttccattgtagtgtatgacgagttatactcattacgttgttattttaaattttatccatctaacgtgatatgtccacataagccaagacagagtacatgtggaatataaccttgtcaataacaagacaaggactccttacaaggtatggcaaaactgtcaag

SEQ ID NO: 81087 - DNA, 616 bp, Cannabis sativa
aattacataaaagccaatccttttagtttaatcattctagaaaggccagaagattggataacactgctttcatggggaaaacactagaagtttctctcagtcaataatatcttatatatattttccaatatttagaatgttacacactcacacatccttggtaataagaataaatacaaaactaatagggtcatcatcacatggcgatcttgttttaactctaattcacacgccacctaaaaaccaaactattgtttgttacgtggtttagttctattcccttttaattattttagtagctaataaaaaccgaatatataataaacaaatcatgaccgtcaaatagatcatcctggcgtatgtgtgacatgattttgatgaagctaaattgcatcatttgtagccccagacagagagacagagaggcccatttcaaaattttcttatttctttaatccactactttaaataatttcttttttggtaggacaatggtttcatttagcttgattaatttatgatatactagtgaaagttatacgtgctgcgcacgtggagcaaaatatttatgaccatataaatgttgagaaaaaaatactacttatactcaatatta

SEQ ID NO: 81088 - DNA, 2275 bp, Cannabis sativa
caactctgagaaaaaacaatgctaactaatttacatatgtgcacataacgataaaagcaaattaagtaatacaggtgtgaaaccaaccaattgggacacaagtaattaaagttactcattgaaaataaaatttcacaaagcattctagtgagatgaaatcaaacaatagagaatgctgtgacataaaggcactaaatacacaaacgctaagtcatccacacaatgaaacatggaaagacttggagaagataggtgaaaacaaactcaatatacaacccatcttagtggtaatgcgaaatgataccttcaactaataaggtctaacggaattcgcaagatatttagatgaattaatgcaatacaaaaacaaacttatacatttttgcaagcaaaagatactagagcgtctactcattctccatgaacctagcttcactttgaaacacatgacagataatgggagccataagttacacagaaattgatcaaaacaacaaaagaggggcacacatgacctttacatttcagcaaactactgaaaattgtgagcatacatggacgatcatgatgatgatattaacctaaatttaaccaaaatttgaactcaaacaagcataaaagactaggttaagacgttggagttcagttatacattgatacactatctaaatttaggttcaaaaaaaaaaaataaacttagagataattctaacaaaaaaggtaaagattcgtatttaaatccgaggttaatagatgacaacatgaagaggttaaatttaatacctaatgtgcctttgcctgataagaactcgagcatggtggattgacttagccataccggacttgaagacaagggtctgaagacgacgctccaaaaagttctcgacagttagagcaagaacgtaatcgagcttgttctggctctcatccaacaatccgtatctgttcatcctcctcagaagggcctctccctcaaaaatccgacgtgggtttttctcgtcgagggtcagaagcattctagcgttgttacggattcggctcagcacatactgaaccctccacaactctctcttacaccggagaccatactctccgacgagcttcaactcagcgtccaaacgctccttctcgtaaggacgtctaggcttcttgaaggttttaccatctatacagtaagacacaattcaaattaaggaaatcttcttctcatttaattttatcgatcaatgtagatcaaaacaagtaatgaaaatataacagcagaagactaagaagaagaaatacttacaattccggtaaaaattgacatgcaccatggttgttgacctgaggtgaggtgcccttctcggttctcaaccttcaatctcaggaggccgtctcagatggtttgggtaacctatataatcctaaaccctaatcccttgtgttctcttctatgaaaactatgatatctatccatcaatggaattggacttacgttcggcccaatgaataccacagcaagaactatagcccggcccaataagaactatagccctcacattagtaaaggaaacttacaaaaatactgaatttttagtaaatgtttacatttataatgttacacgttaaaaattacatttatactgtctttgctttttttttttcttttcttttatactgtagatgccaaaaatcacatatcaagcatctatcttccacactcacagataaaattactcagcaatacgagaacacttgaaaacaataattaattttggcaagatggaacaaaaatagagaaatcgacatcaaataaataattatggcaaaacaattgtaaaacaacactaaaacaaattaaaaaaaaaaaaaaaagaaaaaaaggattgaaaaaaagctaaccatcttctgcgcaacctattttaagatataatagcggctatatttgcaagtacagtcctagaaaatcataataaaaaaactattaaaataacacaaaaacaaatgtaattcaatgaagcagatataaccacttaaaaaaatataaaagaaccacactcctaaaaaaaaatttgtcaatgagcttgtcaaatgtatttatagaagaatcagaataaaaaaacacaaacacagtcatagagaaggaagaagaaatatatttatagcctcaatcttccacacacacgtataaaaccaccacatcaatacgagaacacttagaaaacaaccatcaattctggctagatggagcaagaacagtgaaattgatgtcaaataaataaatcatggcaaa

SEQ ID NO: 81089 - DNA, 2596 bp, Cannabis sativa
tgtaatatataaacgcttaaaacaaaaaaaaaaaaaaaataataaaataaaattgggtgtatttagattaggggtgtaaatataagcaccctttggaagaattaatacaaaagctaaccagggtaaactcaggttttataaccagggttaaatagcttacatacagcccactattatatgcaccatttccatgatgagtattctctatataagcccttcctcttccgaatcatttgtacaaacacaccttcacgccctttgtctgaactcctgaattacctcaccccttcactttctctcttctcatctttgtctcttgttttctcacgaaacaaacactgctacacaagaaaaggaaacagaaaaaaaaaatgtcgtgggaatcctgtttcctattcgttcctcaaaacgggttctcgtcgttgcttctcaacttaaacgttttgctctgttcttttctcttcgtcgccgttttcgctttctggctttcacccggtggaattgcttgggctctgtccaagtctcgagttggtcaccatggccatgctccaaccgctattcctggaccttcaggtcttcctttccttggtctggttttggctttctgtaatgggtctttgacccaccgggttctcgctaagctttcagaaagctttagagcgagatcgttaatggcattctcagtcggattcacccgttttgttgtttcgagccaaccagaaacggcgaaagagcttctgaacagctcagccttcgcagatcgacccgttaaggagtcggcttacgagcttctctttcaccgggccatgggtttcgctccttacggggagtactggaggaacctgaggagaatctctgcgacccacttgttcagcccgagacgaatagcctgtttcggcgagtttcgggcaaggatcggggtcgaaatggtggaagccatgagggtcttgatgcagatgaatggggaaattcaagtcaggaaactcttgcattacgggtctttgaacaatgtaatgatgagcgtttttggaagaagttatgagtttgttactgaactgggccaaagtcatcgtagtgattccggcgctggtaacgaggcggcggaactggaagggttggttagtgaagggtatgaattacttgggatttttaactggagtgaccattttcctcttttggggttattggatattcaaggagtgaaaaagaggtgtaagaaacttgtatctagagtgaatgttttcgttggaaaaatcattgaggagcatagggaaagaaggactcataatattaatgctactcatggaggatcgtgtccgatcaagggttccgatcaatctgaggatgaggatggccgtgattttgttgatgtactcctcgatttagaaaaggaaaatcgactcagtaactcggatatgattgcagtgttatgggtaaatattatattaattattaaattaattcatttttacatgtgacttttatttttgggtgatattaatctggatcttcatgtgacttttaaatgatgcgtctggttttatctgaacatggaaattaatcaatctatacacatatatatatatatatatatattgatgaagattgcatggtttggttttcttatatatatatatatactcacacatatacataaaataaggtacatattcagtacaaatacatacatactggtacgttatcctagttttctaatgtttcccatgcactacatatgatgctaaagtctataaatttgttttaattttatggaatctttttcttttactttttcccaggaaatgatatttagaggaacagacacagtagcaatcctcctggaatggattctagcaagaatgattctccacccagagatccaatcaaaggcacagtctgaaatagatgcggtgattggcggaaatcaccgtcaggtatctgattctgacctcccaaaacttgcttacatccaagccattgtgaaagaaaccctaaggctccatccacctgggcctctcctatcatgggccaggctctccatccacgacactaacataggccaacacttcatcccggctggcaccacagctgttgttaacatgtggagtataacccatgatgaacaggtctggcccgagcccaaccgcttcaaccccgataggtttatgatcaaacaagacctaggtgatgatcggagtgctgtgttttccataatgggttctgatcttaggttggctcctttcggttctggaagaagggtttgcccaggtaaagccatggggttagccacagttgagctatggctagctcagatgctccaaagcttcaaatgggttcctgctaataatgattctggggttgacttgtctgagactctgaaactttccttggagatgaagaactctttggtttgcaaggtcattcctagggtttactgatatagcatacccctagctcttataagccatgttgtcatgtgatatatattttatgttgtgctagttttatcatttgaaaagttgaaaaaacttgtttcatttccttttgggtttgtatcatcttttatgggaaagggtttcttttgggtgctaatatg

SEQ ID NO: 81090 - DNA, 3005 bp, Cannabis sativa
agctaaagacccaaaatggcaaaaagccatggacaccaaaactaatgctctcgaagccaacgacgcatggattgttgtcactattcttaacagacatcatgtcattggttacaaatgggtatacaaaacaaaatacaattctaatggcactgttgaaagactcaaagctcgtttagtagctaaaggctacaaccaaaaagaaggtattgattactttcacaccttcgcccccattggaaagtttaatacattaaaattactgcttgctattgcagtcattaacaattggtctttgtaccaacttgatatcaataacgctttttttcatggcgattgacatgaaactgtctacatgacactccttaagggatatacacctaaaggagacattcctccaaatgttgtctgtaaactaaacaaaagtctctatggcttgaaacaagactatagacaatggtttacaaaacttagcaattatcttttatccactagatttactcaatccctttcagatcccacattattcattaaaaatcacaaaggcatttttattgctcttataatatatgtggatgacacagtggctacctcaaataatgatgatgttgttctttcctttaaacaacaacttaattgtatgtttcgacttaaggatcttggtcctttacgttttttttttggcttggaaattggtcgatctccctctgggatttctgtatcccaaagacctttcaccttacaatttttaactgacgcatgttatttaggagcttctcctgcttctacaccaatggaacctaatattcggctctcatccgatattgggtaactattagaaaacccaaaaatatatcgcaacatcataggtaaactcatttacctaactattattcgacctgatattttttttttatatatatataaacaaactaagttaatttttatcaaattcaagagctccccatcttgatacagctcataaaattttacgatatctcaaaggcacttctggccaaggacttttctttcaatctgtctcctccattaaattgtatggttatgctaaaactaacatgtccaattcagactttcatcttaagattttttcagatgctgactaggcctcatgcagtgacactcgaaggtccacttctggctactgtgtctttcttggcaactccctaatctcttggaaattaaaaaagtagtctacaatctctcattcttccgctgaagcagaatactgagcaatggctaatgtatgccacttgtgagatcacctagctgttagctcttcttcgggacttcagcattcaccacaaagatcctgtcattttttatcgtgacaatacagccgccattcacatctctgagaatcctgtatttcatgaaagagcaaaacacaacgagattgactgccatgttgtccgagagaaggtccacgaaggcacattgaagctagtacatgtcaccaccaaaaatatcatacccgacatttttaccaaacttcttttttccacttattttcatacacttgtaacctagatgaacttaagaaacttattcagtttatcttgaaggggtatattagaatgctttattctcttggcccaataccagaccactgggcctttccttttactgtatatatatacactgtacattgtaattaaaccctacacatcatatttctcacagccataatttcggctacctataatgaaaataagagaagtattttctctctaaaacttaccaactcattaacatgtatataacatatttaatatgtttacaatcttgttatgacacattatgagcaatttaacatatttatgtcctatttataactaaaaagtataatttacatgtaatcaatataataaattataggctattatcctattattttcaagttaagcgtgttaatttgaaatgattcgtttaataaacaagttagccgtgttaacctaaaaataaccaaaacccattaaaggcaaacacaaccctgtttattttgtgtgagtttcgagtcatcgtatctggctcagatttctacccctaactttactggataattatgatttttagtctcaaaattttgatgtgtactaaattatattgtttaaactttttaagtcgttaaaaattcaataatttttgtcaaattttattctaatttactaatacgacattttatatctactaaattgtacctttaaactcgaaattgacatattcaagataaaacattattttgacatggcataaatttgacaaaattaatataattatgtatataaatataaatattactcataaaattcataatttaatttgttattattattttataaagataattagaaaaaaaaaagtttctgagaattttgaataaaaattgtattttatttcagatgatatcaaatatatatttaattgcttacatatatatatatatattataattatattattttttggttaagcatccacatattaaaaaaaaaattatttttaactataataaaatttataattaaaagtaaaaaaaattatgatttattgttataaaaagaaataacctaaatatataatttatgtgtagatctagtgtggagcaccgtacatggtaacatgacccctttgactgtattgatgatatcgtggcagaggtgacttttttgattgtacagctcagcttttggccacttattaaaataattattattttcttttccttggcgtaattaaaaaaaggagtttagagggagtggctcatatcatattcatatatccgtttcggtacgattttgtacaaaagattttaatttttttattcggtaaattgcggcataaatacttaatgttttagattttatatatttaaatatttaatatttatttttggaggtaaaagtacttaatgttagactttttatttgggcttacattaagttttattggttttattaaaacttgggttgattggatagttctttgct

SEQ ID NO: 81091 - DNA, 907 bp, Cannabis sativa
aacttgtaaacaaaagaaacatgtcaaagcaggagagagactacttattgagattacacaataggtagtttttgttggtcttggctaattttggctggtttgtaaggggtggtctttgttcttgagttgtgtgtggctttggtgcttgtgctagttgttgtatttagctctgttgattaatgaagctttttcttcttgatcaaaaaaatagaataataatttcaaaaaattagaagtttataaaatcggtatatgggatatgggagtgggaggagattgagacaactgaggtggtatagtcgactggtttgaggcagtgatgctgtcagtggaagtggctggagtattggtacgagttatggggactgtagtggggacttgaaaagtattagggtctatgactctaagagtatggtgtgcactgttgttgcatgctttggaaaacaattcttggaaagagaattcggtttcgttgaatgtgacacttcttgccacatagactctttcacttgggtgtaagcatctatagcctttggaggaaaggcaataccctatgaataggcatttggtggatcgaaatgaaactttgtggtgctcatatgatcttaacaaagggtaacaggagcatccaaagacttttaagagattgtaatcaagcttttgagagaataattttttatatggtgaaatgaggtttaggatgggggtagggagcctattaattaaataagctgcagaagtgaagacttcccaccagtattacaaggggatattagcctgagcaagaagtgtgagtcccatgtcaacacatgtctgtgttttctttcaagacgtaaagatttttactaaaatgcatgtaaaaccataagttggtgtgtttcttatatttatatttattttttacttt

SEQ ID NO: 81092 - DNA, 1680 bp, Cannabis sativa
ctaagtacctttaaatttttatttatagcaacatctacattaatttttaacccatttgtgctatgaaattgtttctggttgatgcagaacaaacccgttaactattccaggttccatgactggatctttttccttgaattttcatctcgcttgatggtacttctctaagtaattggctgcaaacaatgaagtttggccaccatcttgtttacttccaccatgaaacaccttgtttctctctgaccaaatagcccacatgtagcaaataatcaattccaagtcagatttggagtgtaatgaagaaagatgaatcaaataatctccattatacatattttggcatgccccataatcaatggaatttagtatgtttctaaactgatttggctctaggactactaaacaggcatgaccaattgattcccaagcatgagtgcacatggagcacgctgccgcatcaataatcttcttgtcaaaaagactagctgctgtggagagtgcattgtgtattaccttccaagcaaaaatcttgattttgggaggaaggtttaagctccaaaaacttttccacaagtccctttgattatatgagggagaggattcttgtgcctcatcaaaagttgctgcaaatggaatccagatttaacagtatatattcctgatgtttatgatgccatattagttggtctttagttggaaaagagcttaaagggattgtaactattcgatccacatcaataggttcggaatagttattcaagagctccaaattctattcctttttatctgtaataacatttgccactagtagcatctctggccccatataagttaacggtttgcattcggtgtgcccaagaatttatttgtctattccacattgaatatgaaaatcatttccaactttgtatcgaaggccttgtaacggtagttctcgaccctaatgtatactttatcgagtaagagacggagaatgcttaagccttgcatccaaaaaattattgttagagaaatacttgaattttaataagtggcttaacaaagagtttggcatctcaaagattcgccaaacttgctttgctagaagagctttgttaaaatgaatgaaagaacggaaacccattccacagtcaagcttgaatttacataggaatttctatttcttcgctagaagagctttaaaggtggaaaggcatttgttagttgtttgtttttattttttttctaatctttcttttctgattatggtttcaacatttagattccattgcccttttcttttttaataacatcatattttgtttacactgtgaagttgttttacaaactggttcagtcaacctcaacaattccaaaccacttctagttagagttatgagttatgtgattatagctaaatccacttgttttatatttaatcgacagttatgtgattatagctaaatccacttgttttatatttaatcgacaaaagtgatgtttttgcatctttaaatctcacatagatgcaaaaatgtcactcttggtccattttgccagtggatctctcaagcccaattattatcaggccttagcccactcgctatagaagaacacagtaacagaactcgttatattcgtttcaggcaagctgcaggctaggctagacaagtggaagtctgcttagccatgtcgattggc

SEQ ID NO: 81093 - DNA, 1847 bp, Cannabis sativa
tcgccataatccaaaatcgttctttcctgtaaatttctcaagatcgaactttgtgcttcccatttcttctcgtgtagttcactaggttcttattaatcaatccaagatccaacttcgaactcccgtgctctgataccataaaacactagggaaaaaggacaatagacaacgaatatcaaatatgagatcaaaaaaacatgataaatcactctttgtggaatttaaagcagtagagactctcaatgcatctgtttcaatatgcgtgattgatagttgtgattgtgatacccaattgagagcatggaagagagctttagcttccatttcatctgatcgaaaactaccttgaaccacttttgacaaagcagccacaaccattccatcatgactccgaataatagcaccgatacccagcttttgttgatcagaattggaggctgcatccacatttaatttgaagccattgatgttaggaggtgaccatggagtgtgctggtgcaaagtctgatgagtggaattttggtgtgtggaagaatgctcggcagcagcagcagcagcagatggattgctgaggtgcttggttcggctgtagtcacggtgaaatcccgtggtataggatatgattgaggaactcatatgagctttgccaccatgaaacactcggtttctatcagtccaaataccccacagcaaacaaataaaaagttcaaagtcctattgagtgtaaactgctgaaaggtaatgcaggtagtctccattgaacatagattgtgctttatggaaatctattatgaattttgactctttccaaatattcttagcatgtgaacaaccaaaaagggcatgtcctattgattcccaacttgagttgcaaagagaacatgctgcagaatcaatgacttttcgcttaaaaagagcagcagctacaggaagaatatgttgaattactttccaagcaaaattttggatttttggtggcaaagataaattccaaaagaacttccaccaatcccggttttcatctgaagaagaggattgcagctgatcttccaagtgagtagccaaatgaaatcccgacttaacattgtaagagcccgatgtagaatgatgccatattagcctatcctgagtagcaaagtaacttaaaggaatggttaatattttttccacatcaatttgttgaaaaaagtcattgagaagagtagaattccattctcgattgtcgtttattaatgcagaaaccggcagctgaggagggccacaataactgactggccgaaaagagtcatgactgggaatccatggatccttgctacaatcaatgtgagaaccattacccaccttaaatctcaaacctttgatgagtaattctcttccccaacatatactttgccaagtataagaaggagaatgaccaattttagcatccaaaaacgaggttgttgagaaatatctgtgtttgagtaaccggcttaacaatgaatctggcatgtcaaaaatcctccaagcttgtttagctaagagcgattggttgaaatgtacaaaagagcggaaacccatacctccttcatgtttggacttacataaagacttccatcttttccaatggatcttggtaacgttctgattagtaccccaccaaaaatttgccatcatactctccagttggttgcaaaatttctttgttagcttaaagcaactcatagcataagaaaaagttaaaatcacacttaataattatttattttaaaaaaaattcaaacattatcttatattaatttcaatacttatttttatattaaattaaaattatgtgccgtgtgagtattcttaattttctatgttta

SEQ ID NO: 81094 - DNA, 3409 bp, Cannabis sativa
gttgtcccgtttagacaagagtcaaggccattatatcttatgagcttctaccattgtttaatactttgtaaccctactcttagcagtcactattggggtgatcattactaagaataaaagacttacaataatacttatctttcgagattctacagtgttaaattgctaatgaataagcatctattagtgatgaatctcattaaaacaagaactatgtagaaccaacaatgaagatcgaataaccttaaattaaagctcattattttaaagagatgttccccatccccatgaagtcaatttctagtttgacctcaagatatgtagtaccactagaaggaacttcgaattccactaatagttgcaatttacaccattctttgatgaagaaaaggaacgaaattgtgagcggtacacccatgaatatttcttcacatcttccatcccatcaagatacatctcttttaaaaaagtggggccattcataaggccaacctgtttcttgacatgagatggagagtgaacaccatgctatatgagatttcttgaggagagtggaatgggaaagtgttgttcactaatgacaacttgttaattttatggtactaaataaagtatgcaataaaataattgttactgattattattgtaccatatgcccaagattaccatatgtattgttatacccatattttgagcaggcaatatggttatgacaagtataaagaagctaaaaaataagctagcttagattatgaaaaaataaatacattcaaataacttgcctcagaaagtacaattagtagaaatatttgaactatcctttcaaagataagggcgagatgtgaataacaactactgctttgtaagaccatcgagatgaaaagtcaacgcagaaagtctatctcgggataacacggaatatacaacagaatgacaataagttggaaagggtagataacgagttctttaagaacttacagcttattgacccacatacttattagtatgttgaaagacaaaggaaaatacacacaatataattcatctcggaattatcacattatgatagtgcctcgcgtttgcctctctcaacattacataaagacacgagaagtacttcccagattatacttaggcgtaacaagttatcttcaaagtaaagcatcctaagataataatttatgttgcgaggtgaagaagtatagtcagcataaccccttatagataaagacaagagcagttatatcggttatctatttttatctcatgtgttgtaaatatgaaacacgtggattacacgcatttcatgaacatttattgtgataagattccaagggaatagctgtcaccctaaaaaacctataaatagggacaaaacctaggaaaaaagagacgaccaatttcagaaatagagagaattatacaaatattatatcttgtattctgtaaacactttgtgaatcccataaataaaatggactcgtggagatgaagagttaactttaaaaccacattacaaaccttctttttatttatattttttattattcattattattctagggtttatttattacattaaggcttatgtattagttaaaaaaaaaattgcattaacagtttggtgctttcattgagaacattgtaaaaaaaaaaatcaaaaaaatacgccctgaaaaatatttaaactttccatccatggcagaagacacccctcaaaatgaaaatactcaaccgggagagacaactcagcgtctaggaaaagaacattcccataagacaaatgcgactgagactcctcgctcgagaagaggaaatggtgaaggaggatttgaacaaactgggggtgaaatcccaaaaaggcgtagtgaagacgcatacaatcccaaaagatatgtgccattggtggacttgaaaaatagacaactttgacagagattggcagaatcaaatcgaaggaatgctgagttggagcacgaggctatagctgcaagggttgcacgcagcgatgcaccccctagccaacaaaacacgtccactaggcaacctcagggaagacctagaggctcgaggaccaagagacatggggaaaatcctagaggtgataaccacgaaaatcccactaatcctagggtgatcaaccaaggaatacaagggatataccagtggacaaaggaggccccaaaaatccaagaaataacaacaatagggaaactcgacccaacaatcaaggaacctcctgtggtaacacgaattatgggactatgcaacctaacagcctagagttctctcacatgaatgcagatgccaggaaaacatgacctggggaccaggggttcactcagcatgatgtgagggatatagggggataacctggatcagggtgtccaccgagacactcatagagatcaaaccaaaatgacagagatagtacgtggatcaaggtcgaggacttgtggtcagagtagatcgaccaaaactcatgcacgtgaaggaaaacaccgaatacagaagatacatgttgccattatcatgatgaacatgatagcatgagtaactcccagagttatcgatttgaaagcttttctataacaaggtcgattagcaattacgaccaaaggaatgaaagatgacgcaaccccaatctttgtaaacacttaaaccatagacaacctgacttacacaagcatttgaatcataatactctagatctttgagatcaattaaatcaaaactcaactcgttaacaaaaagttgagcacccatccatggattctattcaaataagggtgattcagttagaagataagttcaggtgatatcaagatgaagaatatgagaaactatcagaatatgattttgatgaggagacaaaaccttttaaccctaacatactcaattcccaattccctcaaagattcaagaaacctcatgtcacaaaatatgacagagtaaccaacccagtgcacatctgaacaacttcaacaccttaatgcgagcaagtaatgtctccaacaacttgcgttgcatattattcccaacgtctctaactggggtagcgagtagttggtttgataaattcaccaaccactccattacctcatgcgagtagttatccaaagaatttaagaacaattccaggtcacaagagatagaaggccagaagcattcttcgtttggggtgttttgtttttcttaatattagttggctttggtgaaccacgaaccctttaaacttcagcttaagggtaagaattaattttttattcagttagttttatcaatctaatagctttgccacttcgatacgtgttagatggaagccaattggcattccttctccaattgatttcattgatgggttgttcactgtttgtggtgctagaagctcttttcttctccatgattt

SEQ ID NO: 81095 - DNA, 2062 bp, Cannabis sativa
tatttatcctaagtacgcttttctttaaaaataaataaatttaagaggtataatttaatatatctcaaagtttgatggacatgacttggtagatattaagtctgaagaacataatttagtacgtaaataattactgaattggtaaaattaaatgaaatcggacaaaagtacttaaatccaataatctcaataattcaaaagaaattttcaacggtcaaaaaaattcaagggcatgatttagtacatgtaaataaaattttaaaaactgtaaaaatatttaaaattccacactgcatttttctgattttgattaatttttttttttaaataatccccaatttatatgaagaagaaagaacatgagacaattaatttaattttccccaccaccaccaaaaaaattcaaaaaaaaaattaaaattaatttatcatataatattctgtttggctaataataacaccatccaaccaaacagggtcttaactcgttcccactataaataccaaactcgagactgaactcaactcaactcgactcactcatcgtcttcctctctcttcgatactctcaaatcccattttctctctctcaaatctccatagccaaagaaaatgaggtcatccatgttgagatccgtccgtacagccctaacttcaacctcctccttcaccagaggccaagtcctccgccgcggtttctcctccgaatccgtacctgagcgtaaagtcgtcgttctcggtgccgccggaggtataggtcaacctctctctctcctcatgaagcttaatcctctcgtctcgagcttatctctctacgatatcgccgctactcctggtgtcgccgctgatgtcagccatatcaacaccagatctgaggtttgtctctctcatttccttgaatttggattcgactagggttttctctgatctgattctgaaatttggagtttaggttaagggatatgtcggtgaggagaatctcggtgaagctttgaaagatgctgatgttgtgataatcccagctggagtaccaagaaagcctggtatgactcgtgatgatctgtttaacattaacgctgggattgtgaaatcgctttgtgctgcgattgctaagtactgtcctcatgtgagtataattgaattttgaagctttaataattaagttcatgcaaattgggagaataaagtttggttttttattgataattttttttgtgtgttcaggctgttgttaacatgattagtaaccctgttaactcgactgtgccaattgcggctgaggtttttaagaaagctggaacttatgatgagaagaagttgtttggtgttacaactcttgatgtggttcgtgctaggactttctatgctgggaaagctaatgtcccagttgctggtatgaaagatctctctttgttttatttctgaatttttccttaattttgcttgaaaattgaaattgatagataaatgtatgtttatttggttgctttgtaaaattcatttttgtttttgaaaaataacatttggtgtttgcactatttgttcattataattatgttctaaaagtaatgacttaaaatatgatattaagaacaaaagaagctttttagactttcctagttcttactatataattgttgaaatatttaaggtgtttatttgattgaatgcttggtaaaatagtgtttattttgcaaaatagcattttccatacttttatctgcaaagtgtctttgttctgtagatggctactttgtgaaaagttatcaaaagaaggctaagtagtatattaaatattttatcacttaattcttattttattaggttctaaaagtaatgactttaaatataatctttagaagaaaacgaaacttaatgacactattatgtttttcttgcaggggttaatgtacctgttgttggtggtcatgccggtgtaaccattctcccattgttctctcaagtatgttttatctttcagtttctttttgataataatatagtcctgttttggttagatgagtttgcattttgtgtctgtctaacttgtcggtgtttcttt

SEQ ID NO: 81096 - DNA, 1000 bp, Cannabis sativa
atatttaaaatgtaatttattttttttaagaatataaattagaaaaaaaaaatattataattaaaaatatatattttatataaaataaaaattataaaaataaagtgcacttaacaaattttcggtgcaaataaaattcattatcaaaatttgctgtctaaatttaaaacaataattaattatggaaattattagttaataataaaaaattatattttataattccaacattcccattagtagaaattatattatttactttctttttctgaaaaggatattatttactttcttttgagttagtgcttttacagattttgtccttttttttcacctgtactttttcattttttattaatacctaaaaaaagaattatttttgttaattacacttatttttatactgtaattctttctgccatatagaatattaattaaataaaaacacaacttttcacccaaaaatagtagttaatagtggaatgtgttttcaatgcatttatatttcttttcctaagttattcttggtaataagtagttattttagaaaatcaactaaaaaaaatagagctttttatgggttattcccatgtgaataaattaataatttaataaaatccacatcttttaactcaataaaaatgaatatgaaaaatacaactttcctaatatttgacatttttgagagaatttagttcttttcctagtattttcttcatagtttgtgataagagcatgatactaaaaagagtaaaaactttaacttgttgaaaaaaaaaaaggttcaactttatggaagaaaaaaaaatttatattctttttatggtcgttacataccattttagatcttgtatttcataacagttacttattatattaattttgctaaataacaaattaaacactatactttttaaaatagtacaaaatagtactcttaactaattttttatcaaaataaatttcaataataacccgatcacaaggtgttatacatttt

SEQ ID NO: 81097 - DNA, 945 bp, Cannabis sativa
attcaggaaaaaataagcaaatgaagaaacaatacgaacttgattacctgaaacgaaatcgatgttggagtgaattagaatccaagaacaaggattcgtacgatttcacagagctggaacaaagatgaggggaaattggagttgggtttttgagattttagatctgaaactctaaacgttttaattacaagatgaagacatgactattctcaggaccacactaaacaaaataataaattaaataaataaataaatttgtctgatccaaattaaatgggctaataggcccaagaccaggcccaatacaaagactatggacttctctttcatttttggggaatttttatggaggttcacaaaaatactgaattttagggtaaagtttatatttttactgccacatggcaaaatttacaaaaatattgccctggcctttttttgtcttttttactgtacacaccattaatcacatacgaggcctttatcttccacactcacagaataccagaacagatagaaaataactattaattctagtgacatgacgaagaaacattaaaatcaacgtcaaatgaacacccaacaacttcatcaagactagatatcaacaaatcaaacaagttagacacttagacacactcaaattcttttaaatgactcacgtactgaacttaaacaaggacatgcccaccaccaaatgacaaaagaaaaggttatttgatgaggttagatctgtagccttgaaagaagaagtgagcaagcttttggctagtaatttcattcgtgaagccttctatcatatatggatagcaaatcctatattggttccaaaactaaataagaagtggcgaacatgtattaacttcattgacttaaataagacattttccaaggattgctttccgcttccttgcattaatcaactagtagatgctacccctggcc

SEQ ID NO: 81098 - DNA, 902 bp, Cannabis sativa
attattcatgtcaacaaaaatataaagagctatatatatatagagagagaaattaataaacccttttttcatcaattcttaattaatttcacctttataaatatcatgctccacatacatccgaccatgacataacacaaccttgtattttgtgttgataatcattcaaaatatttataattttaacaatagacttccaccaaataataataataactaataattattattacatgcatatacatataatttatacataaaataatggattggaaattaacaaaaataataagagggtcatattaaaagtatgtatatatatagttcaatgaacttggaaaacaaagtgttgggttgataaatgacacttcttcatttcacgttatatcattttaattttaattttaattttttttatcattattattccttccacaattatatatatatataaatataaatagttgattaaggaccaaaatgtggagaatgccaagtaacctaatttttattttatttatttttcttttcaaataaaaaataaatattaaatgtcaaaaagctaattcttagacttgtgggaaagctaacgttgtttgtttctaagaagaactatgtttttggacggctagctagtgattattatttattattaatattaatgataatcctaattctcttttctaataatcaaaaaattagtatgcttttgaaaataaacaccgccccattttgaatgatatataattaaataaaaaatgttagaagatattattagtgtttaatatccttctcagtgttatactatcatttaattaagtattaatttttaaaaaatattaatgactaattataagacgtcacctataaatatattattaatagcttaattaaacatattg

SEQ ID NO: 81099 - DNA, 2319 bp, Cannabis sativa
  modified_base (27)..(27): a, c, t, g, unknown or other
actaatcagattgtaaagagttttatntagggcataaaacctaacagttccccggtgtactccatggctacctaccttttccctaaaagcctgtattataaaatggatcaggctgttcagaagttctagtggatgggtaacgagtctaaagataggttcctggctctttgcgattggaactctctatgcttacctctggatagaggtgggcttaattttaagaagtttggagatattaaccttgccctggttgcgaagcttggatggaaacttgcaaaggaggaggactccttatggtgtaaggtcttcaaggctaagtattgggggaatagggatcaggcttttcggacttcggatgtgccaaggaatgcttcttttggtgctaaaggtatcatggcgacgagagatttgattcgaaatgaagcttgttgcatccttgcggatgggagtaaggttgatctgtgggcttccccttagatgccttggctagactagaataagtctagagctgccttcaatccattgtgtgtgccaaatccaatcaaggtctttaccctgattggagcggatggtgagtggatagctagttagttcggttcaaagatggtttgttcctagtgtagctagctctctgcatctaattaagcggttgccaagttcacaggatgctctcctcgggtggaaagatgctactaatggtatgttttcccctagcatggcgtataagtccattatcaagaggcgctggggagagactgatcaattatggctccggatttggaagctccaaattactgagcggttgaaaatgttcctttggaaactctgtagagatatcattccgtttgggaatcggcttcaaaggatctttgaaaatagcactagatgtgtgatttgtggtgatgcggatgactcggcccaacacctattcttcaagtgtccgcttgctaaggccgtgtggtttgcaagtcgttgggatattaggagtgactcacttaactttggtgctcctagagacatggtggagtggctcttatcccctgaattcttacaaggtgctgatggagatgacttgggtgagtttttgagatttggcatttgcttgtttgatgctttgtggactgcccgcaacaaagcttttcatgatcagattaatccaacttggagaggcgtccttgccaaggtgattagtgctgctgcctgccttcgtacaacttgggagtctccaagtattgttggtggttcgcagaatagtcctactgcaatctactcaggtaaaccggtgttgctggtggatgcaacgttcaaagatcttcgtgatgcagctgggattatggtggctgtctcggagggcaatgtgtcggaggctatggcagtgtgctttgaggcaaaccagccgctggaggctgaatctttggccttggttaacgcggtgaagtggtgcaatcttaggggctggaagcagatggttattgcttcggattgtcaagcgctggtgcatggattacacactcggagggctccagattggcggctggctggcgtcttctggctgctggtggagctgctcgacgcactccctgaagtggagattgtgtggactccctgtgttggtgttcttgctgctcacaagcttgctaagtgagcgtttttcaactatttttctagtttttttatctgctgaggacttggcccctcttgtggccatgtgaaccttgtttttttctgattttgtttgcaatagagaatttctccagcaaaaaaaaaaaagacaaatattttaaaagccaataaacttgtaccgtgttcaaatccgtatcaaacttaaatcaatttattttttaaaataataataataattattattgttaaattattgagttttaaaatttatcatactttcgaatctattagtacaagtcatattgaagtttatattttttttttatcatgtcatattggtgatatcttttaaaagattgtactatgacaaacccaacattattttgtaaaaattatgtgtcacaaatacctatttttttcacctaatatttatgattgcagatgatatgtacattatattagtgttgacttaaaaaacttgtgtcactttgtaattggtccagctcaattttatttaaaaattaatttaatagaactggtctgaaaacaacataacatattataactttgtttgttagaattttgacttggtttatgtacaacaaactcaaaatcattgtaagaaagagtaaggtaacttgctaaagaagaaattacatttcatttcaatcttcaaatattataaatattctataa

SEQ ID NO: 81100 - DNA, 1402 bp, Cannabis sativa
  modified_base (1371)..(1376): a, c, t, g, unknown or other
ttttcattttatgatttatgtgaaacaatggactttaattaattctcagctatttgttgcattgacaacacatttcaaaaaagtagttatttcatagtaaaagttgtattaaatttatcacgtactaaaattaagccaatatttgacactcattatagcaataactccatcaacattaattactttattactattatttaatttactgttcttttaaataatatatttttttttaaaaaaaaatactaactttattaatcaaattgcttcaactattataatagaatgtaattcagcaagagcacaagatcagctacaagctacataatgcgcaatcttatatacaaaatgcttaataaaacaaatcttcacaaactttaaataagctaacaaaagcttccaatattgcaccaacaaatcaaaacatgacaacttatgaacatatgtaacgcctagacagttaccaaattatttgtcttaagtagaatatctacccaatgttttctttaaatctaacttaaagcctctttaatcttaaaactttcagccatcgcaactttcacacactcttattattttttttttttggaagaacacacacccctatttactaatagaaaaaacctctaaaagtaatttcccatactatctcgagccactctacctgtttcataccatccttctaaacaaaaattgcttgtattatcaacattcactttaatcttatttaaagtcggtttagtccattattcacatcaatcattcattcctagatgtaaaaaaacaaggacatgactcttttttttttattattttaagcaacttgccattaactaagtaacaaatttattattgattttaaatgttaggtttatgctaatactgtgttagattctctatttaatcaactattttcaattctatattatattttgtaatgatcaaataactttaagtttggttgagaggaatgaaaacataagagtgagaatgagaatgtgaatgagaatagtaatggaatagaatgaaataaaatttaaaataataataaaaaaaaaaagataaaaaaattattaaattttttatcatcatgtattagaatggtcttttcttccatttcaaaatgaaattgtcattctatcaaaatagtagaaagaccattctattggaatgacattccaacactttaatatacaaccaaacaaagaaataaaatggagattgttttatttcttttccattctatttcattaccttcaaccaaaaggtcaccttagttatgataaagagatatatattgtaaagcccgcttagttaatttggaaattaacagttgtttatgattcattatgaaattatttatagctattnnnnnnatttattatactgttatttatgttat

SEQ ID NO: 81101 - DNA, 939 bp, Cannabis sativa
  modified_base (796)..(800): a, c, t, g, unknown or other
ctatttttattttgtcaaagttgttcctgcgaggaagcagtattcggggggattttattatctctatatccacataaattatcacaggatcattgtgaggttaccaaacaagaacgagtgcaaggacgacttcttctagactactggtctttctcctatcaatacgattgcattttgcattatacgtaactattttctatctcaaaaacttggtttggagttctttttgtatttataactttgtggtcacttacgtattacacttattgtgttaacatcggttaccaaaagccaatcaccaccctcgagatggccgagtgccataaaattcaattaggtcttccattcagattttgatcagcaaatttccttttgaacaaggccaatcttatgactgtcaaccgccttggctcagacgagttaacgtgtgactacaaggttacgaaacactcttcgtgggagaaggtctcagtcccattcgatgaagaaagccaggattatgttgctcgcgtccactatctctaaaaagtaacccctcgggaagctgaagaagaagcatcccgaggtaatcaatgtggatggtcacccaccgtacttaggattgcacgtacctggctagtaacctttagggatagccaatataatttttatacatgagacaacttttttatagatcgcataacccataggtttgatagttggtagcctcgattccatgtttagcttagttgcactagatcatattacgagattgccgagcagtatggtactaacttggatagggcgagtcatctgnnnnngaattgggatttatctccaatatacccttatgatatgtaaatgatcacagggtctagagactttagtaattgttatagttcttcctcgtcatcttttgataattatggtaacttcctttaagtgagagtttattcccca

SEQ ID NO: 81102 - DNA, 1355 bp, Cannabis sativa
agctctaatttgctccaatgtggcgtcttccttgtcctgtaaacacgagaaacgttatgagaaccaaaacaaaataaaaacagccaaacaaatgcctcggcttggaccattcagagatgaagggaatatccaagagttaaattaattctaacctttttacttagatcagtctttttcttggggattttacttcccaggagtgcaccaaaagcccggttaggtttcttttgtgcttgcacagttacagcagaggcctggaaacaagaacagagtaacataacttaactttcaaaaacatcaagaattaaccaaaaaccgaaaaccatccaataaagcatcatcaagaatttacctttggtaaaactggtaaagaagtactggtatttctgtcttctcgctgcactgaaacggcaagaccctccttcagaaccccagagtttccattgcacaatagagtgctaggactattatccattacagtgccatcagaggtgctttccacagtggctattgcaatttcagatgcttcagggtcgtcgtcgactactacattttcttcagatgcctgcacaatttgacaaatgataaaaaaaaaccaaataattcttagaaaaaaaaaaacaaaacaaataatattttaactggtccattctcggaaatacatcaaaacattcaacaacaaggcattgttagctcatctgaagtggaaatcgttactactgcttaccaaagcagcacgcccctctttcagttgttcagcaacagcttcaaattcaggagcctttagcttgttagacctaacgacgttaacaacagcaccaagcttctgctcaatgaatgagtgctttgacttgaccaactgtcgtagcttactggtagtttcaggcatcttcttagctatatagcaacaaaaaacaaagatgcaaacatgttttagaccactatacccaaatataagaaactaatacagaaatatatagccagtactttcatcttctcatttaccaatttctataagagttttatttggcaatatatagccagtactttcatcttcagtacgcgccataagatctcgccacccacaaagtccctgcaaatcatgtttcgaggacataaaagaaaaattaaaaaacctcagcaaacaattttagaagacacaattcatcccattcatcagcgaaccattcttagcaagaagtcacatataacataccgaaacaactgctagctgctgagcatttaaaccagcctcttgcaacctgtattttaagccaataatagtttcattagactgatattatcatatacaaaaatagttgaaaagcaaaaaaacataaaatagaaactatacc

SEQ ID NO: 81103 - DNA, 791 bp, Cannabis sativa
ctatgttcttaccagcttggtgtttctggaatcgagttcaatctcttaacaagcgaagctacataaacaacaaattttttcgatcagtacacttttttcggttaaaatattcttcgagtttgagaatgaaaatgaacatgttaacccatagcaaggagtgtgggagaccaatcaataatggcagaagtatattggggcaaaatgattaggatgatgaaaatcaagacttgtggtgaagaaaaatagtatctttattttcaagttattttgctatagaagtaaaaagagagtaagtgaaagagagagagagataattaccaatgacaaaaccataatcaaattcaatggctctatggagagcattaccccaaatgctcactataataacatacaaaaattaagcactaaaagaagtattgcaacgtatttgattggcttattttccaccattttaattagaaaaaagagagaaagaaagaaaatgactagttgtgactgtgtgtgtgaatatgaattgaaagaggtattatattagagctttttaaagaaggttttttttttttttttttgttgggttctttgcttgctcattaggacacaaaacaaaagttttcttcattaacaagccaacccaacaaaattgattaattccaatttttaactcttttctttttaagctttttaccttatcttctttttctttttgacccttatcttcaaatgtggcctttaatccatatatactttgttagtgtgtttcaattgttcattaaaaaatacataaaaattta

SEQ ID NO: 81104 - DNA, 2122 bp, Cannabis sativa
gcaagccttgttgaggtctgtgaagtcaatgcccttaggcttggagaccaaaacagggtttgccaaccagacgagatatagagcttccaggaggaagtcatttatgggtcaacttaaccacttttgcttttatagcctctaccttccccaggtttaatggtcttcgcttttgacgaactaacattgcatccttgttgatgttcaaggcatggcaaatggtgttatgtcaattcctgtcatatcagaatggctccatgccaacacatcttgatttctcttgacagtatttataatgatttctttcaccgccggaggtaggtttcttcctaccctaatagttttggtagggttttcacagataccaacttcttccatgtcctccattggctcaatttctcttttcatccccatgcttgggtttagttcatcttcaaaatcttcttggacggtctcggcttctgctggagtttccactctaggagcaacaagtgtctcttcccgaaccatgaaaattgtccgaacagagacattgtaatagctccttgcactcttttgtgacacttctaactatcccaacactcccattgtcacaggggaatttcatacacgaaataatgtatggaagttactgctccaaaatccactaaaatagggcgtcctagtattgcgttgtaggtcgtggggtaatctactactacgaatatacaatgcttgaaggcactagcattgctttctccctttagggagactggtaactaaattttccccattggaatcaaggcgtccccatcaaagccttgcagccagatgggacagtgtgacagatctacttcagtaagcccgatcgcttgaaaagcaaattcaaacaggatgttcatggagctcccattatccaccaagattctagacaccctcttatttgctatcagggcttcattaaccaaagggtcactgtgggggaaatacacgtgttgggcatcctcttctgtgaaagtgacagtagactcattgtcaaaggatgttgggtaggttactgtactaaactgcatgttcccccttccatgtctagctctcttctgagagttcctggtactccgtacgagttgcggtccatttgagatcgttgctgcatgtccatcaaccagtggtggtgctaaccttggttgatataggttccctagtcccagagctatcaaagccactgcaactggacctagcggagcggggagtgccagaggatatgtttcgagagcttaagcgtgacctactccatgcggaggatttaagtaccccgctgtctgggaacaataatctatctgtgaatgaccccatgttcgagatatataatgggaatccaaatccattgtcccaaatgtcctactcttatgaacgtcccaatctcatcctttatgaggtcacattcgttcgttgtatgtcccacgtcttcgtgatattgacaatgcttctttgggtttctctgaaattttcctccttgaggcaatttgagaggcttcctataatgaaccatattacatgtttccttgtacacattttcttaagtatccacaagactagagcacttagtatattcaggtcgtactctttcctagatttcttcaaagcctctcctcaccccggaccttttccctctctctttttctgggagttactcaagtcttgctctggtacctccgcctttgatttcctgggagccacactacatccggcttgtgctactccatacctagagaaatgggtttgtgtaggcacaggcacaaatgcagaaggtccatagatcgtaagggtgtattgcgttccatgagcgggagtagatgaggtcagtgcaagaatagaggttaccagggctggtgccagagggaccccaaatgcttggtggtaagcatcttctaaaataatgaagccttatgccttggccatgaattcagagagggttttagctctccttttttgcatttctccccataacaaggagccagctaaaagtccgaattgcaatgttaggagctttatatcatctattactttagttttggccgctacttccatcattcgtagaataaagattttcaaggtttttcccgcttattgtttaatattggtg

SEQ ID NO: 81105 - DNA, 1039 bp, Cannabis sativa
aatgatcatgtaataaacatgttaaacatgtgagccaaataacacattacataagtaatataagtaatgaaagtaatgaaagtaatgaaataaataaatttgtttctttattgataaatgaatatagaagactatattgaaataagtatttagggcacaaaacccaacatgcctgcccactttgtgtcaactgagataaaaaagagttgaagtccaagttctttgtctgatctaccacgaagaagagacaactacccatgtgttaatcacatgtccaagggctaagaaggtttaggatcgggttggcatttgaacccaagaggcagatgcaattgagtgcaatttccttgactggtgtatcactgttttttctactgtagaataagaaaaaggaggctacttccgattatgtgttaggccatttggagtgctcgtaatgattttgtttggcaaaaaaaatttgtggatcgcagctgatggaataatagtgttggtaaaaggttaccttgattaatggacgagttctcaaaactctatgattgagtcgtcatggtcaggtcttcaaacgggtgatggagttgagcaatggctgttctaaatgaaaacaatatcaaggttaatgtggacgctgctatttttgaaggtggaaacaactatgggtttttgttagtgactagagatcatcaaggcatgttaattggaggcagaactaacttttttactggagtggtttcaccggagccggctgaagcgatgggagtacgagaagtcttgagttggataaaggcacataactggcagcaagttattcttgaaaccgattgtctaactgtcgttcaagctttgcgaagtttgattgatatgatatctttgtttggccaagttattcatgattataaacaactcttgttagagttgtggtttgtttctgttttgtttattaaacgatcaacaaatatggtagctcataattttgctagagcttctatattttttcctggttgtacggagactgttccaatcgacttgttaccgcata

SEQ ID NO: 81106 - DNA, 1007 bp, Cannabis sativa
gagttgaagaaaaagaagaagaagaaatatgatcatgatgagaagaataagaatatgactccaatgagctcatcaccacaatcactacaaaggtacataataacaacattaacacatttgtttttgataaagtactacatcttgtactcatcttcacatataataaaattaaaagagactttaatcaaataaaaaaattaaagaagagaaaaaggcaaaaataccaaaagtgatgagctctaggatgatctaaagagtttttagctatttcataatataaaatgagatgcagctaaatgggagagaccatatcttattatatatatagatttatatgtatatataatttcaaataaaaaaatatattttgtataattacttggtattgatcatcatggagagtcaaattcaaccatatatattggaaaatcttgtaagcatattactttaacaactcatggccattttttatttcttcaatttattagatatatataaatatatttatatttatattctctcattcgttgtacatatacaccaaaaaatgcacacctctttagttctcatcatcaatcaataataatggatttgataagctataattaattactcctacttttaattcaaataaaaaaaaaaatctttcttttttttagttttctagctagaagccaaataattctagttttaatttgcttgttaatgcaaatattactctaatttgtttctactataatattcacacttgtatttatataaaaaatatgtatatatatatatatatgttaagccattattaattaattaatttataatattataaattaatgggtttaagcattctctcgagaagaagaagaaaagagaaaagcttaatggattttgctgacacataggatcatatatacaatcatggacatgacctagctatgaggataatcatgaaagcaatacatatttaatatacattgtatatagtaacatagattagtagataaatatat

SEQ ID NO: 81107 - DNA, 1302 bp, Cannabis sativa
atatttaatttaatttgataaaatgatttaaataaatctagatattttaaaattagtttaattttgaattttgaaaagatattttaggattgagttatcttgctacaggttttgaaatatccttcggctgaataactacttgaggccagtaggtattgataaaaattaggattgagttaattaaaatgtacctgccaacaaacaaaaggtttcgggtgctccaagtgcaaattctaagcgtcattttctccaccatacacccacaatttaccttggtaataagttagttattgatcttcaaccctaaataattgaaaagtaagaaacattttttaaacctagtcattttagtcaatttaacccaagtctcatcttgcattgaggctccatatattggtgatttaccttatttgtttgcaataagaccagagctctctgagaatagttgaaaaattttcaacagctgaatcaaagtctcctttgctgaataataacatatcgtcagcgaaataaaagcgagtaaccctcaacccctcacatcttgggcaaaaactaaatttttagtgctcgatcactttgacaaagatccttgaaagatattccatcctaatgacgaaaagtggaggaaacattggatccccttgacgtaaacaccctcttgtaagcaagatatccagtaatggatccatttatcatgaaggagaactgaggagttgtcacacaagtcataattagctctataaacttgttggaaaaattaagcgctactaacatctcttgcatgaagtcccaatctagggtgttgccctctattattttaaaaaatcaaagtggttttattaacgggaggtttatagcacacacaacattaagatttgtcaaaatttatagtgaggtattatgatagatttccgtaatgattttcttagatgatttaaacaatattttgaagaatcatgcattttaaagaaaattaatcatcagtatatagtaaaatttcaataactaaagaaattttatatattatcctcattattacatagttttagtactacaataattaaataacatattttttacattttaattctctctcaataataacatttgaagtaagattttacataatatttattagaatagtttagtactcttatgccttttttgaaataaaataaaataatgtgtaaataatggtaagttcgttacatttttttttacttgtaatagaaggttaccaatagataaaatttctatttttagaattaattaattatgattaactattttttaagtaattaa

SEQ ID NO: 81108 - DNA, 1064 bp, Cannabis sativa
agtttataaataaagaaagtacgatgtagagtttattatgtattaatatttttagttttgaggaaaggaggggttgtttgccatcaaaattgactttactaaagcgtaggacaagctcagctagcaattggtggaccatgtgttgaggtgttgttgggtcctagagttattctgcaatttagtctcccagtgtataacaatgacttcttttaatgtttgcctgaatgggggccaagtgggtagaatttatccctcgtgcggtattcggcaaggtgatcccctatccccctacttgttcatttgggccgctgaaatcctctcaagacttatccatgatgcattgagaaatggtagtatcaaaggaatcaaactgagccgtggtggaccaaccatttctcgcatattttttgtggacgacctcatccttgcgggaagggctactgtaggggatgccggaagtatgtggaattgtctagagaaactggttggggcaacgtgtcaataagcttaaaatgactatcttcttcattaagaacccttcggagtccttgaaagtggaaattaaatcggctttaggcattaagggcccagtgggtgtccccaagtacttagggctaccccttttccattctaaaggtacggttgcagattttaacttcattgcggagaatctaacatccaagcttcacagatggaaagagaaaacactgtaaaaggcgggaacagcaacccttatcaaatctgtgggcttggcaatgcctgtctatgccatgcaatctaccaagcttactaaccgattatgctctagaattgatggtatcgtacaggatttctgttggggttttgaaaaaggtaatcatggagttcattgaagagcttgggacaagctgtgcctccctaaatcgcggggcgaccttgattttaggaaaactaaggagatgaatcaagcttttctggctaaatggggttagaagctgctgacaaggtgtcactccttatgctgtagaattcttgatgcaaaatatctcaggggtcaggatatcctaaaatgtaaagctaaaact

SEQ ID NO: 81109 - DNA, 966 bp, Cannabis sativa
ctctccataattcttgccactatcaattctctccacatcagcatcattactaccattatttccaaataaaactcctttattttttgctgaattcaaggtaatcgtatcctctccctgatcaccatcatcaatctccatgatttttggcccaatcgaatcagcagggatcacaccagatcgccgaacccctccaccaccgtcgactgctgtgttttgttcagaaccagtccggagccattgagctcctatcaaataattcttcttcttggtctgtgctcgcataccattcccataaggcttgactaatggatcataatcttcatcaaatcttcgaggacaaaaacgttcggagtggccaattattccacaaacaaaacaaaaagttggaatgtgttcatacttaaagttcgcccatatccaatcaccattgtctttgcataacttcattcgacgcttcaacggtttgtcaatgtcgactgttgcccgaactcgaaggtattccctccaaattccattaaaattcttagcatccgtcttgataaactttccaacatagtctcctgcctttcgaaccaccttctccaacatatatcccgttttcagatcatgaatctgaacccaaagatcaaggcagtgtaatcgaaccaacttcggatcctccccacgcttgagacgatgaaagatcaacggactcctattaaaagtccatgggctaccatcaatgacagcttgaacatcaatttcatgataaaattgaaagagatacctattcgtatctagttctctgatataaactcccttccccggttgccaaagagacgccatcatatgcctcatagcatcgaaatcaagcgttctacccgtcaagaatctacccacgaggcaccatcgatcatcaaaggctacctcttctccctcattatcatcaccaatcaagatcccttcctcctcctcctccaaatttat

SEQ ID NO: 81110 - DNA, 1440 bp, Cannabis sativa
gagacagcagttgaattggttagggtttcgaaagtattttggaggttgaaaatgcaagaggaaacacagctctacacattgcagccgcgcttggaaacttgattgtttgcacaaacatgattaagaaaaacccgaacctaatcgccattcgaaatcacaatggtgagactcctgttttcttggcagctcttaatggtaagaaagacacttttctttacctttattctaaagacaaagaagaatctcttgtgagaagaaataatggtgataccattcttcatgctgccatttctggtgaatatttcagtaagtaatattatttttgtgtgtcacaaattatcaactactaattaatagaaatttttagtcataaattttgttatgatttttttgtgtaggtttggcaatgtgtataatgaattctcatcctaatcttgctgatgctataaatgagaatggtttaactcctcttcacattcttgctagtaaacctaatgcatttcatagtagtactcgtcttggcctcttcgatcgaatcatataccatagtatgagtttctattttttaccaaatattttcatcatttctttcataaatacataaatgcattagttcatgaactattccactcattataatttttattttttatttttgaatgttatcatataacctaatacctaaaatgagtgctaagttaaaatatagtagaaatccaattcaattttagtgcttgaaaatctattctatttaacttttttatttttctacactctacaccttcatcttaaaatcgaacactttcatagtatcctaaccaaatagtgagccaaaataaattgttagagatgtagatcaaaattagtgttaaaaaatagccaccatattcaggaaaattttaaaattaaatatatttttatctcatttgtgttaccatacccttttaacttttttatttttcgatacactctacacctttattttaaaatcgaaaactttcatagtatcctagcccaatagctcaaactagtgcttggtttaaatcagatagtgagccgaaaaaaaacagttagagatctagagatcaaaattagtgctaaaaaataaccaccatcttgagaaacatatagaaatgttccacatcgaaatattaatttaattttcatttttatatttatgtgcaggcttggttgtggatgagcttaaggaggaatcacatgatgttgaagcatatattgcaaagaaaacaaaaagaagaatagaatctctaaattatcctgaaaattacaaggcttgcataaacttttttggattagtgttattggtgtttcaagttttatgtaggtgaattaattagaacatgactacataaatattttttcaaagattccactatacttttgcttttgttaattagaaaattggttttgtttcttttt

SEQ ID NO: 81111 - DNA, 931 bp, Cannabis sativa
  modified_base (870)..(874): a, c, t, g, unknown or other
ttttttttttttttgaaaagatatgtcatctccatttagttctttttagttagtgattagtaagacttttttagcttctttaagttttgttaaatgtatgttttacggaacaggctgcacattgtgttgttcatgactcttgtttattctcatatcgtatttttaggagtaatgctgtgacagtcagtaatttcgtgatctgtaaagaaaaatatcaggtaagttatgcaatctcacatcgtttagagaaaataaagtgtaatgattttaaaacggtatatgtataagacttcacaatttaatatgacttagataaattgatgggtattagctttatcaacaagttttatcttatttttttgatagttaagtgtacttaatcacaattgtaataaattaagagaatattagaaacattttaggagaattttcaatagataaaataagaatattatttatgaaaacataaattaaaattagtacggattttatcttaaaaaaaataaatttaattcacttttagaaacacgggatatattgtaaattatatttatattatatatttgaaaattaaaattaattattattctttacgtagtcaaatcttagaaaatagtgatcattttaatcgagagccacagacacaaatctgacacgtcaataaatctagattcaactaaaattttgaaaatatgaaataatgtcattggaatttttttttgtttgtttagtaaatgccatttgaaactcattaagttactaatttgttaccattgaagatgataacaagtacttgtgcaatttgccaaatatatataacactttttaatatgtattccttaatgattactaaataaatttaattataannnnnaattttaaaaatattaaaccatcaaattttgatctaataacgaataatgaaatcaca

SEQ ID NO: 81112 - DNA, 1070 bp, Cannabis sativa
aaatgttattcaatttaatataatagaagggaataactaatcccaccttttttttaatgtatcaacattaccctcctcaagggtatttacattaccaagggaatgacattttaaaattaaaccttccaaacaaacaagacaatgtttaacattaccactctcttgctaacattaatctattccaaacactcccttatataatttatactttaacattctacttgggccttggaagggcaactgtgatgattgaaaggccacgccaagccaagccttctctctccgttccatcagataaagacagaacggcggataaggcaaaactccattagagaacagaagaaaaagaaaagctctttcaatacaagagaaggttaccctttccctttcttttccagtactctatattcccgtacataatctttttatttatttattttttctttttgtattttcagagtattgggccttttttcttttttcttgttttgggtggtagaatagttggagaaaatggattcaatcgtttccataacgcgaaccccagatgggttttgctcatttcacaaaccagtttcggagaatggtagccatgtatgcaatggtactaagaaaaattactgtattggggtttcagtgtgctgcaaaactcgggttctagctctgtctcacaacgttgagtgtaagataaatgagggttatcgtaaacataggagaaaccctgttcttgctctctccaagattgaaactttaattagctccaatgctaataagttgccgaaagttaagaattctattaattttgaggaattcgatggtaacaatcagctccgtcgatttgttagacatgggaaattggatgcagggctaagtgttattgaggcaatggtcaatcgcggagatcatcctgatattatagcctgtacgagtttaattcgagggttttgtaagagtggaaagactagaaaggctactcagatcataaacatgttagagaattctggggctgttcttgatgttataacttacaatgttctgatcagtgggtattgcaaatctggagagattga

SEQ ID NO: 81113 - DNA, 2040 bp, Cannabis sativa
tcacgggtgcttcgtggtgcaggtaaggaagttagaagctgtgttcggccatgagtcagtggtctcccggcaatgtacatatcagccgtggggtcttgtcttctaggcagcaggatcgaattcctttctatgtttggaaatgtaatctattgtaaaaagatttttttttatttttttttttatttttataaacaggggatccctatattgcaatagtatttaaaatggaagtctttattttgaatttaattaaagatttaaattaaaccacacttttctaaaatttatagattagtgataataagtttataaaagcacacacacgtggcgtccctgagggttagggcgttacatgtcttgtgttaggagatgggagtgaattactttccacataaaaaattgtgttttggggctaccatacgacaccacacaaacttgtagtactccactctagatttgttagacaagaaatattcatatagtctgtttatcttgaacttgcccgagattcatgcttcacatatctttgactgggaaaaggtttcccttaatttcttgagcttcttctaataccaactgacatcgatttttcagctcatgaacccaaacatcatggccttttaagtaagtattattgatccattttacccacaacacatcttttttcatcgtgatagcttatagatatcttaccatagccgatttatttcattttatgccttctctgaaatcaagtccaccatatttctttggtttacacaccaaatcccatgaggctaagtgcatcctgctagaattcccattttcaccccataaaatttttttacataatttgtccacctcaagaattattttctaaggcaacaagaatgtactcatccaatagcttcggatgccaataagaatcgagtttatgagttgcaccctccctgcataagataggtgtctacttgcccaaatacttaacttgagtctgatcttctttatgatagtttcacaatctgaaaccttccatttggtgggtcttaaactcactcacaagtacttcaaaggaaacaaatcctcattgtacttcaacaaattcggtatcagctgcttctctgtgtgtgacagtcctgctaaaaagatgtttgacttggtgttattagccactaaaccagaatagttgctgaaagtttccaatgcaacaacaatacatttaccgaggcttctgaccctttgcgaaaaataattagatcatcagtgaagccttgttcactaatctcaaagatttacacaaaggatgaaatttgaattctttgttccgagagtggaagcttaaaagtctagtaagtattccatcaccaagacaaataaaagaggagatattgggtcaccttgccttagccccttagctcttttaagttgaccatgtattcttccattcaacactaaagaataagtagagcctcttatacacaccatgatcccatttaataatttgtgatggaaatttataggccttgagaagtgttgctctagaatgtcacattcagagtatcatatgccttactaatgtctatattcaagagacatggaggggagatgtttttttctccaaaatccttttaacagatctaagatgagagcatcatgagctaaatatctttccttaatgaaagtttcaggtagacttatattaatttgagtgtccaaaacaagaaaaagactaaatattttgagaaaaaaaaaattatatacatatatattgagggattttaataattacatcaaatatgtaaccatgatagttatatttatttttatctttggatcactattaaacagttgtcattaatttaaaaatttataaaaaataattaataaattatctataatatgatattaattttatttatttctttaaaataaaagaattataaatattaatttttgaaaaaattttattaaatgttttaatgaagtttataaaaaaattaatttaaatttaaaaataaaatttttacctattaatatgtcataaaacaaataattcattat

SEQ ID NO: 81114 - DNA, 2028 bp, Cannabis sativa
ataataataaatataataatattattttcacaataattattactaagtaccaaataattaattttatttggttaataaaattttgatttgaaaataatgtaataataataataatgactaaagcaagaaaaatttaatttaatatacatttttttaatttggaagtcacaatttcaaatcatggttggcttccattggaattgtgtgtgagtaatcttctcttcaccttttctcaatctaggtttgagaatgcttggctctgtgagcccatgtgtctccaagtggttcgtgatagttcagacctatgtgcggatgagcctatggttgaaaaaaattaaattttagggttaaaagttaagagtttggggccaggactatatgggtaacttcaagaaacagctagcaaattgtaagaaataaatcaagcgattgaagagactttgagatcccgattctattaatatgtgtaagaaggaagagaaacgattggtggaaatttataatcaaatagaggtttgttggaggacatgttgtaaacagatatgtctttgagaaggtgatcaaaataacaagtttttttttatgcaaaagctacttctagtgacagcataattcaattcaacaactttttgattcctcgggctgcttggtcaattgggaaactggtcttcgtgaggtaataactggttattttagtgaggtaatactggtcttccgcgagtagatggtattattccttctattacccctgatcaaaatattactttactttgtcgtattactaatgaagaggtggaaaaagtcttgtttcaagtgcattcagacaagttaccagggcctgatggttttgactccagatttttattagaagtgttttggagggggggtggattctgatgtagtggctctagtcaattttttttttttttttgattcatctactttgcctactaatttgaattggactaatattgttctcattccaaagaagaataatcagcttaatatggccaccttagacctatatctctctgtaatgtcctttataataaggtggtctctaaagtttaaaagttgttctaattccctaggtaatctcaaattattcgagtgcgtttatttcaggccagttgatatcttacaacattatagtttcatttgaaattatgcattatctcaaacgaaagcgtaagggtaaggaaggcttcatggcactcaagtttgatttaagtaagacttgtgatcatattgagtagagttttcttagggcaatgatgttttgaatgggctttgccacgttttgtggacctcattattttcactgttaattcggttcagtattttgttgttcatagtggatggcctttggggcctattgttcttttacatgggctcatgcaaggtgatctactctcactttatttgtcttattgtgtgttgaaggcttcgcttctttgattcaccattttgaaaatgtcatgatctgaaggaattaaagtggctaatggcgcacatgtagtttctcatatgttgtttgcagacgatagttacatttattatcgtgctaataataaagatgcaaatcatattatgcgcttgctgagtatttttgaggaagctttaggtcaaaaggctaactttgcaaagttatttgtattttggggattgctcctggtgatgctaatacgtatttaggtttgtcttgcattatgggtaagaataaatctactattttaggattccttaaagagaagatgcaaaagaaaatttagagttgggagggtcattttttatccaaggtcattaagattgtctattgtcttactcgtaactcttgtttttagtttaactgtattatcattgagagcaatattccctctgctttataatcttgctttatagtcttttataatagttgatttagctgtttaataaaagtatccattttcattaaaaaaacaagaaaaaataaataaaagaaaatatatcaatagatgaaaactaaagtaattaacttcatcaactatt

SEQ ID NO: 81115 - DNA, 1194 bp, Cannabis sativa
ggtttgctgttgtagttgtttgttctggctctgtttggcctggtttgtcccgactgtttgccgtttgtgttgttttcagatgtttccttaataaaaaaaaaaaaaacaaaaaactcaccatataaaccttcttcatttattattttaatatatttttctctttttctcattctctctcctatttagatatttctcacacaaaaaaaatatatagtattgatatatatataatattttattattaaaaaaattaaaagatataatatataaatgatataaaaaagttgatgtataatataatataaatgtatgagacaaagaaaaaaaattaaattttgatgaggtattttgaagaataaagtagaaacactgatgagattgctctatatcatttttctctctctatcgtttctttattcaacttcttcttctttatctttttttttttttgcaaatttaaaatagcaagtttgttcattcgctacatgcttgggagaccgcataaagctcggggtaaagttgcaaaagttgaaattgttgggatgtgaaaatatgagtagaggtttgatggcggctacaccacaattggagagggtgagatttaggtggaactgatggggacacaactttgtgaattgatctaggccatggtgacaagtgagatttgagatctatccctattttgctattttttttttcttttttttttccaatcatgttatcgatttctatagaacataatttatagatgtttctttataaaagattcggttgttgttgaaatattagaatatttatgagatttaattcaatattttatttctacgattagaaatgttgttatacttaaatggtgtttttgaggagttcattgtgttcatgagattgcaattttttttgtctacacaaatgataatctaattgcctttgttttgaaaaatttgattttgaaagaaatttgttctaataatgtgtcgaactgtgatgtaaatatattacattacaaaaagtgatccaaatttaaattacaattattaagaatatatctaattcacatatttttgactaatgatcaattagttggaaattagttttctccttttttagcaagtctcttagtggttgttaggttgttaataaataacaaaatttgctatattgcctaagagatttttcattagccattgattgtat

SEQ ID NO: 81116 - DNA, 894 bp, Cannabis sativa
agtaaaaaaattagtgttaataaaaattaaatatatcatatttattttaataattatacaataaaatagtaaaacgtttctacaaaataattataatatttatgtatagtaaatataaatatttttataacaattaagctcttataaattaaaaattctgggtccattactgtatgcagtcaatgtttaagtaaaaaaagtacgctataatttagtacttaagcaacaatttaaaatcgatatttaattttttttttatatcatacaaagccaatagataaaaatgaaaaagaaactttagaatcaacatagaatattcaaaagtagatcatgaagttgaatttttttgatctaataatctcatccttctttagggtttttttctaacatggattgaagattatttaaagactatataaatatttgtatatatatatatatattattaccattcgaaggacttgacaaaatcaacctcagaaaccaaagtctccattcctttgacaacttcatcaacttttacatcatttttgaacttgactatcaccaagtgtttaaactcacccatatttgtatatataaaaatagctttgatttttttttcttagagatgtttatatatgaaagagagaataatatttggtagtaaagaagttcacaagtaagtcccaacatttatagtagttgaaattagaatagaagtaggatatagtgtgttgcatgcctacctgtcttgctgtagtcatggccccacttgatcactcatttactcctttgtttagacagaatctataccactcaatattttggaaagaaaatgttaaaaagtactagtcatatttagtaatttttaagggtaaataccattttagactctgtgttttgcaaaagtta

SEQ ID NO: 81117 - DNA, 1930 bp, Cannabis sativa
ctctctctctctctctcgtctcttacgccgaccactctctctcgtctcttctcacaccgatgaccactctctctctctctcacacacacacacactctctctatctctctctctttctctctctctctctctctcgtattttctcacgttggactcagatgacacctccaccctcgtgagccccggctgacatgagccgccaaggaggaggtcaacagagttcaaaaactttcaatcaatttttgggcgtgattctgagaccatttcgtgtgaggagcagtatgatagagcttagaagctctaagagaaaaaaaccccttaaaagtttaggcattaagatcgtcagaatcatctattgaagtttgccgaaatccatggagttccgagatattcgactccgatctagtcccttctgaacctcatgttgaaaaataagctccaaacctatgttctccttggaatgggcttttcgatcccatggttcactgctcctttcattattatcaaacctgggcagcaccctacgtgtctccgacgatgacactagtgttgagtaagctctctctctctctctctcacccttgagattttctctttttctttaatctgaagtttttttccttgtggatttaatttggatttgtttatttttgtggaatcgaaattcgaatgtttaggtctctttgatgtgtttggatttgagatgtgaggttttgtttggatctgaaaaagaggtttcagtgatggttatggtgtgtagatgtggttttggtggtggtgggtagttcgattgtggtggatgatggtgatagtagtggtggtgatattttttaagaagaatgaacaaaaattgaaaaaagaaaatatgagatgagaaaaataaagatggtggaagaaaaaaagattaattatttttaattaaattaattatgtgggccaattaaattgtgtcatgtgttaactgtgtctatgtggataaattctatgtacgcggacaatctaacatggcagttaactgcataaaatggatgaaaatgactaaatactaacagaatgcgaattttgggggtttcaacgtcaaaatttaagttttaaaagttatatgcaagcaaaatgaaaattttggaagttttactacagttaaccctcatataattattattttagatattgataattgatcttgtggacttaactcattgtctgggatcttgaaggtcaagatttagattttagaaagatgtagtgaagtgagatcaaagatcatttaaacaagaattgatgctacgtaaattttgtgcttttcaaatcctactttatcattccgtgacaaatttattggtaacagaattttaattttctatctacatggctttacttttgttttgtataatttttgttgtgtgttagaaatttcatgttgttggtacatgtataataatattgtttgattatgttattcttcttgaatccttagagttttaccactatgagattgattttgttcgtttgtatttgttttcttttttattctctcaagaacaccagaatttatggcctcagaagtgtatgaagatgaatacaataaggatatgcatcttcgaaatgtttaccttcaataagctatgtattttttttttactgtaatagagtacgccttttggatgtgcttagttttatccttcggtcgggtataaaatggttttatctataattatgtcatttgaaatagaaatttgttttacagtggttacttttggtatacatatacttattcacctataattaagtttttctttatttatggttcttaatatgaagtgcgaaccaattgatccagatggcttacaaaagcagttaagagtacttaggtggcatttggttgggagaaataaaaatataagaatgagaattgaaatatgaatggaat

SEQ ID NO: 81118 - DNA, 1343 bp, Cannabis sativa
ataggagatgaactcctcaatgggataagcagtggaatgagtatggcaaacataatctttgagatggggtggtttgtgtatcatgcgaccagctttagatgtttgagctggggctgggtgtgtaatttctggtgtgatgccagaattactaccagtaatgggtgaagaacttggtgtgggagtgacaccaatggcttcaatatttggaggaacaacactaggtgagttgctgttgacatgagtgtcaggtgtgggaacaacatgagaggttgctgatgttgtgtttgtataatcatcagcagtgaattgactgtcaagatgtgttgctggtttgggaagtacaccagtgtgttgattttgtgtaatggctgctggtgtgtgaataacaccagtagtttttatattattttctagtgtggaagcaacacccgttttgatatgttatgttgtgtttgctggtgtaggaacaacaccaatattttttataatagtttctagtgtgggaacaacaccagtttgtgtatgtgtggcagtattttctggtgtaggaacaacaccaataggactggctgcattagaattgggcacaacattttgagaatcagcaggaggtgctgagtgttgacccgatgtagtggaagtgacttgtggtgtttccagtgttttgggagtgggattggttcgagtaatagagatgttagcaggtatgcaatgtggttggaagaacatattaatttcattgttggaaccttccccaaaaaagggaaacacattttcatggaagatgacatctcgtgaatgatagatttggtttgtttggatgtcaagaagggtgtaagccttcattccatgaggatagccaatgaaaacggatgcacgacttctaggagaaaatttatgcctagtgaaggtaagagtggatgcatatgctaggcagccaaaaacccgaagatgatcataatttggggttttggagtaacatttttcgtaagaagtactgccatgaagtagagccgaaggagttctattcattaagtatgttgcagtagcaatgagatatccccaataagcaaggggcaaatgagattgaaaacacaaagcacgtgcaatgttgagtatgtgttgatgtttgcgttcaacaacagagttttgttgtggacgttctacacaagaatggtaatgaactatccctttagaggcatagaaggcggacattgcaagttctttagcgttatcggatcgaattgctttaattggggtattgaattgtgtgcaaatgttgcgaaaattattaaatactacgcaagtgcacgcaatcaagtagtatactcacgcaagtgagg

SEQ ID NO: 81119 - DNA, 1500 bp, Cannabis sativa
tttactcagttgtcagaattgtgttcgtatttaagtctaaaaatctggtaaggctatcttttttatagtaggtaggtgaaggtgggcattgggcagtaactatttacaccaggaaagaagaaagagtggatttgattagagcaatgaaaagccatgggcagtactaacttttacatgttcttattccataaagacatatttggtttgggactaatgggtgtccttagaaagtgataatatttttgtttaaatgatagtagaatactgaagaatactttatggtcctgttactttttctcttttgttttatgtttaaatttacgttcttatttgatgatatgatgatatgccatatttattatatcttccatctgtatgggattgccatttgtatggtatagtatggcttttatgataatctgttcttggagtgggactagtactggagcactagttttattcctcgtaattgtatttagccacatgactatgtaactgtagagaaacatatattttggctattgtcttatgtctcaatgatataaataactataatacattatcatataaaaatttaaggttataatacaaccataagggttgtatcatataagcaccctaaaatttaagatattaaataaatagttattgcaccacaaccatgtcacgtcttctcccccaacaaaccccatctctctctctctctctctctctctctcttacattcactctctgtattctcttctgatcaatcattctccctttgtttctgatttcgatctgttgctggtaaggaccttactgtttattttcggtttgttttcgattagcattcgtaattggctctgaaatttatttgtagtcatatatttaaaatgattcattatagatcttgcgttctttcgcttcaattaggtttttaaccaaatttcaggttatatgtagttcactgatttgcaatatgtatgtattttaatcaatttagctttctttcgttgggatgaaaaatcgatggttcgtggattttttgttgtttaatatagtaatttatttgttcagtttatccaattatgatttattctcaagatgaatgctggtgaaatgttgctatagctgtttaaaatcaagttttttttttgttttttgctttaaaaaggtttttattgtattgaacatattttgaatataacatagaaaatagataattggtttaacaaaacttgtgaagaaataataagggaaaagaaaacaacaacaacataagcgattggagattggaatttttgaacgtaaaagtactccccagaaaataagaaaaccctcattagagtactttttttccccttaacaaacagcagctataataaagaaaagtagctgtgatttaattcaaactctcgaatctactatctatgaacatgttggcaataatttatggagctacaacgctagtagatatctaatatatatgaactttcaggaaattcaaatgaaaaggaa

SEQ ID NO: 81120 - DNA, 1618 bp, Cannabis sativa
tcaggcatgccgattggtcttcagtttattggtaggccatggtgtgaagcaacactaattcacatagcatttgcaatgcaggtaataatgaaatattctcatttatttgaacaaaatttatttaaatgattaaaattactatatacgcttagagcaaacataattttatcaagcctacttctcacatttcaaggggaaaaatgtagaatatgattgaatataaactgacatatattgatgtctattttattttcaggccctttgcattcaaagctatagaaagcctgaggttttctatgatctactcagctaaaattaagtactaaagagcaaggcatgtaacgaagcgttccaagttattaattaaaaccctaattatacaagtttgttacccatgataattgaaagaaaaattgatgaagaagaaatattggaaaggaggatgtggatgggggcatgggtatgataattagttttattttcttcataataaacaaacaaaagtgtagcaattgtcatttgctaatacattttcaacactagcatctttacatttttcactatttgtgaccatagattttctaaatcatgaactttttatgatttcattaattttatcatagtgtttaatataagagtgagaactcttacataccagctgatgtaaaacacatatatttatgaaaatagccaagtaagaatgtgaaataagagtaattaacaccaaaattttatggtagttgatcaccaccccttcagcagtaataggggctatatatgatcactttgatcttttattaatattcacttaagatcacaagaatgtgtgagttaagtgagtttcctaagtacttatagtaaatcgttacaaagaaaagacttaggatgcgtttcgttggcataaataaaaatataggaataaggatagaaatatatagaaatgaaaatgtaaatggaatataataaaattttaaaatgcaataaaaatttgataaaataattattaatttttttttttcatattgcatttgaatgacatttcctttcatttcaaaataataatcattctaccaaaatagtagaaaaattgttccattagaaagatattataatatattaaaatgtgacttaacaaagaataaaacttgatttctttccatttcattaccttcaatcaaagacaaccttaaaataattagtttaaagtcaataaaagttataaaattgagagcactaaattgagagcacttgttctctcagaaaaaaaaaaaaaaaagaaaaaagatataaatattgaattgtaaaagcctcctatttaaaggaaatataagaaaactttttacaattataataataataaaaaaatatttaaaagagcatattgtaggaatattctttcttattagagatattgatcattgaatttaaatgttagtatttaatcttgactaaagatgttcgaggctagatcttgttcggtgatcttgatttctattggacgaccaagatttgctaaacttggattaacaggtgtaatgtccccgcttcaagcctccattgggtccttccacccacggaataatggctcttatacacacgagtacgccactctggctgc

SEQ ID NO: 81121 - DNA, 2230 bp, Cannabis sativa
  modified_base (2163)..(2182): a, c, t, g, unknown or other
tatagagtttgagacttctagcttagagggaacctagacaacttaggtttacaactataggttaaggcctttatataggaggcctaaaccttaggtttacaattaaaatctcttgaaaatagctcaggtgatgacttggcctttcttttagtgagctgtacttccacgtagcacatgtttcgtccacgtaagcatgccacatcatgaggacaaaaattgagataatatagcccatgacactttaatacccaatgatccataattattaaaatgatcactttatttgggtcaaactttatataatcatacacaaaaatacatatgagcccacattagagattttaatccaacattctcccccttaggtaacgaagccttcaaagaatgtaacacttaaatatcatttattgtggcaaaaataccaacagttagctaatcgtaatattttggtatgataatttttttatgatgacaaaaattttttagctgaaaaatattcaaaatattaaaatattttatattcaccatctaataatttttataaattaataaaaatgtcttttaatttataaaaaaatttaaaattatggaataatgtaaaataaatcatctgcactaatacacaaattaaagaaatattttatgtaataaaaataatattttagatttaaaaaaggttaaaataaaactaaataactaaaaaactattcgaagagaaaataataattaataattttttttcatgtaataaaatatatttgcgtactatttttattttaaaacattattgtttaattttaggattaatctaggctattttatgtttttttttttacttttaatgacaaatatgttaaaatatatttttattaactttttcaaaattatttgggtattgaataagaaacattttaatttgagtgtttgaaagtattttttccactaaaaaaataggtattcaattgttatgattgcccaactcgtgttatttatgcaaaaagaaagaaaataagtttggtatttaagtcttacattctttaaacgttgattattttaccgcaatttattcataattaatttttgttaacgcagattttcgttaactaaataaatagtcttttttgctataaatacactacataatttaatgaaaataaagaacactagatattttatgtgattttgtagttaaaatctacatactccacgaatccttattattaggggtattttttggagttctgaatacaaatttccatatttgaaataatagaatttctctttattttttgtcatcccttttttcatagattctgcccctatttataggaatataggttgacagttaattttattgggattgattcatttataacttcggatgaaacatggacgttctccatgtttcatttatttaaacatgggataatatttaataattgcccaatcgctccttgttttaatcctttagacgattatgcagactaggaagattccgtctcgccaaatatgagatctcttttttatccatcttcataggaaaaaacacttagtgtagaagtaattcatcttgccacacccctttatttgtattgatgctgtgagatgactactttgttgtgtaaaacatgagccgattgagttttggggttcagaacgtcgaacatcattgagcatttaatgctctaaccgctcttattttgcaatgtttccatccgttggatcacatctcttttgatcgaatggtgaccactttttgggtataaaattgaaactgaaagcttattttgccatttttttttctgcaaaacttgcaattgcttcctttttaaaatttgcatgcctcgtcgtccttcactttcttcctgcgtgttacatcaaatcatgtctattgttccaaaaaccatcaggacccagcctttcaatcttcaagatttcaaccgcgaagttctaatttcttcagtaatctaagtcaagacagtgagtaatatactttctccatttattaatttttcttctctatatttgtaatttcttttccttgattgatgtttccttatttgcattattttattattttaggtatatttgattttgtttgtctaaataattctaacgcttggaaaaattttaagttgttcgtgttggatatattttaccagnnnnnnnnnnnnnnnnnnnntatgtttcattaacatcctaatacgaattctaaaacaatgaaataaac

SEQ ID NO: 81122 - DNA, 1755 bp, Cannabis sativa
aacttttgtaaaacacagggtccaattgtaaaacacagggtccaaaatggtatttaccctttaattatatgtgtatactatagttttacccatgccatttctagccgtttgatttttcaattttcacattatgatttccccaccccatttagaaaacaccatcatttttctatcgtacgataattaaaacgttggagttcttaataatccagaaacaattaataaaaaaaaaaattaaaaggtgtacggagttactacattaagaaaacgattaattggacataataaaatgcaatggaatagaaaaaagataattttattatttttatttgctcatattttaaagtataatattttagtggattgttcactagttcattttagaataatatgaaaaactattctaatgccagaaaaacaaaatattttgctcactcaactttatcatttatatgattgtgttctttgtaatattaaagttatcaaaaatatctccttaactttatcagttagcaaaatttaaaattttcttaaagaataaaattaaaatatcacttatgcgattttgtaatattagtattattaaaaatactcctttaactttatcaattagtaaaattaagacttctctcttaaattactaatatatactaaaaactctattttaacgtaaaaattatatttataaactaaactttctagaaaaacttgaaaatggaaacaaatttgattaccaaagtaaaaaagttcaaatatattatattaaagattaaatcaaaataaaatttgtaatttttttttttagattgcttaggtaagaaactaaattagataatattatataatattatgctgtatcgataagataattaagaaaattgaccgaatgtaatataatactataattgtttataattatctaaaatttaatgagtatatttaacaccctataagtaaaaagggcattatttttctagtgacagtttaaggggtaaaataattttttattttaaaaaaaaaaataattaataatttttttattaatttttgtaagcattttaaatttaatttgattctattgctattattattccggtgaccaaagtgttaatatgataggaggggaatgactcctagatataattatcggtgtaataaataattactcgatattcaattattaaactgtaattagaataagaataattaattaaaaaaataaatgagtttaaaatataaaataattaaaataatattttattatgctaaacatacagaattattttattttatttatataattaataaatataatcagaatgctaaatttaactaaattgtcattgttgaaaaatataattagattttatttataattttttgaaggatatatttttttattattttttaattaataaaataaaaaataaaaaaataagttaaaaaagggaaaatattccttataaatatggatggagaatattttcctttttttctttttaatttaagtagaccctactaatttcttctattataatatttagtaaccaattgaaagagaattaatatcatacaattaatttttattcccaagttaagatactaaagctaagttagtagggatggagggatgtcaaaaaagaataggttatgggccttcaagtggcggcttgtcgttctcttatggccgatttgccgttagtcacaattaatttttttaaatgttctgtaaacaaagctgcacattgtcttgct

SEQ ID NO: 81123 - DNA, 1423 bp, Cannabis sativa
tgtattctgataattgaaaacacagttttcttcttgatgattcatcttataacttgcggtttgcttttgacactttgcgtaggtcgttttcttgctgaggtgacaaaacaggtgttcactgatcttgaggcaagcaaatatcaggtagctcacttgctccatattatatttcctttacacaaatttaggccctgactagcatttattggttctagtttgtattctgagctaattggtaggagagtcttgagtagcaccaccttagagtgccttttatttctgtcagtaaaatgctttagtggcacgacaaattttaaaatttactatgaaaattggatggtgatcaatataacattgctgtggtggagttgaaattgtttttttggagtagtttttacggatgctaaatgtttaatatgctgttcagtcggatctcttatctttatgataagcctaattaagtatacttctaatatatattattgagtggctatcatattgtcaatatacagttgacgaccaaagcatcaagttctggagttgtgctattgagtcattgtataattcttttttaagcttttttaattttttttttctttttcgtgcagatggctgaataccggatatcgatatatggtaggaagcaaagtgagtgggaccaactagctagctggatagtcaacaatgaattgtacagtgagaatgttgtttggctaattcaggtatttacatgaaataatactatgaaacatctttagcaatttctcttgtaatagattatcaaatacttacacacatacaccgtcatttcatatttgtactattttaatttcagctcccaagattgtacaatatctacaaggacatgggaattgtcacctctttccagaatattcttgacaatatctttcttcctctatttgaggtcactgtggatccagaatcacatcctcagctgcatgtttttcttaaacaggttttttttccttgtatatttaatattaaaagaccaaagtttgctgcaatgttggaatcttatagaattgcttggtatatgctaatcagttatcagaggttgctttgatgtgaaagagttctctcttttttacaaatatacttacagatgtgccatgttatacttaaaaccaaaagtgtcttatactgaaatttttcgtcttgtatttatccttcgctctttatttatctccactctacagttgactactataatgttcaacttttaattggtttggaattttcaggttgttgggttggatttagtggatgatgaaagcaagcctgaaagacgccctacaaaacatatgcccaccccagatcagtggaccaatgccttcaatcctgccttttcttactatgtgtattactgctacgcaaatctctacacgttaaacaaggtatttca

SEQ ID NO: 81124 - DNA, 2814 bp, Cannabis sativa
ttcaacgagagggctcaggtgtttgttcgaaaggaagaagctcaaaaagagatgaacttgttgaaaacttgctcaggaggcaaacccagcattgtttcaacaagtactatctcaactaaagcggataactcaggggcctctggctcaaagaggaaagatgactttaaggggtctttttaagacaagaagaaacaaaagaagcacaacaagtaagtgccagtttattcaatttataccgagcttaaagaaactcgggaaaatatttacctcacacatgagcacaaggttgccttcagtaaacctgagcccatgagacacgcgacgcataaaagagatccaaccaggtactggaagtaccataaagacattgggcacacaacagacgagtgccattagttgaaagatgagatagaaagtctcatcgtgcgaggccacttcaagcaataggtgaagagatagagcaatggacataacaagcccaatccacccaacaatcgatgcaaccagggattacaacctcctcctattgaaggagaggctatcctggttatcttgggagggctgcatattgtgggagagagcaacaatgcccaaaagaggtacatgaaggaaataaaaaacgagcagtcagtatttgctccagaaccttccaagaacgtaaaattgaagaacctccaattatattttcgaaggaagatgagaagaacgagaggtaccctcatgtcgatccattggtaattaccacccaactcgccaataaaaggataaagagggtgctgatagataacgggagttcagtgaacatcctttacaaggaaacaataaagaagatgaggctcgaaaaggctaaattgaggccttgcatggtaaatctatgcgaattcactagcgacagtatcgtcagtcaaggtatgatcgagctcgcattgaccttaggtgaggcacctctatccgccacaattatgcaagactttctggttgtcgacttgtcgtcggcttacaatatattattgggtcgtccaacattgatcggactaggggcagttagttcgatcaagcacttatccctgaagtttcaaacaccggagggtgtgggtgtagtgcaaggcaatcagatgctggctcgcgattgctatctcatagagctgcaacatagaaaagtcgatcaccaattaatgacttaagtaccacattagtttctttccaagatagtcagtacaatttttacacctagaatccctttctcatagatcgcattgcacataggttcgatagttggtacccagaattccacgttcagattagctgtactaactcctactatgggataactgagcaatatgggactatgctggataggtcaggtcatattgatttgacctgggatttagaaccaattaattcctatgacatattcaggatcacaggatctagagaatttagtgaatactgtagtcctccttcttcgtcttcttatgattatggtaaatcccttaggtgggaaataatttcccatttccccctttacttgtttttaaacaaatattaacacatttttttgtcttgcagaaatggatttcgaggaccttcttcattcttcaagcaagaagggaaagaaaaggttaactgccttggaaacttcctcgaatgtcaacgtggggcccctcaaaaggcctagaaagacaactgccaataccaagcaagcctcgtagaccatagacctcgaggctcctgagaaacaggttcaaactcaccatcctaccctcgcacatactgaagagcccgttgccaaagcaaattaggttacagcctcttcgagccaagtgcttgagactctgcccatcgacgctgatagtgctggcttagagcattctacgtagtacgttgcggcctgttggcatcacctctgatcctttttttcctaatgactgggacttgatcaataatggcaacctgaacgagatgctcgagaggagtgtaacctttggcctctcgttaaatttctttatccttctcgttttgcttttccctttaacaaccctcaaatacacttgtgcattttttttttatttattgtcagcgaaccttcatctcctttgtcacccaacattggggtctggataggatgaagtaaatggagggtgagatctagaaggtgattggtcaatgcgaggccatttctagggagtggaacgaggcttagtcggagatctcttgcctaaacaaagaggccaaggaggtgaagagggccaataaagtttaacttgaagcagctcagaaggaggccaaggacaagtataaccagtgccagaaactccaagaagaactcaatgcagccactgcaaagctcgagggcccgaggccgacaccaaggagcgatgcaatgccattgacaaatgctccatctaccaagcctggatggcaaatgtagaaatggatttgagtttcttgggaaagggcctggaggatgtccttgcctactacgagcatgttaaaaaggtagaagaggaagcaaaggaagtgggagaagaagaagtagaagaagaagaaccatccaagtctcctactatgtaggcttggtttttaattatttactctttttttttattttaggaaaatcgtcacatggctgagacaatggtttgccctttgtggctcttttttgtaaagacaaatttgcatcgttggatgggcaactttgcttttattttatcttttatcgtacgacctcgtatttttacatttgaacttaatatatttgcttgcttgcatttttattcacaacttaaaaaattatattttgatcaaatttaa

SEQ ID NO: 81125 - DNA, 1441 bp, Cannabis sativa
aggaaaataacatcaaaacaactagtaataattataatgaagaaagatacaaaagcattatagtagggtggatatgcataaaatagatcaacttgataccgtgaggtcaattttgatcacatattttcaaacatgggaaatttatggcacatatattatatgtttttaattttatacacttacttaatgttgtattttagctcattctgttactactgctcagttaccttaaacaaaaaagacacgtgtatggctcagattagatctcatttattttttttaaaataaaaaaactattgttataaattaaaatggtacaacaataaagtttataggcaggagaatacaatccgaccaaaagcaagcttcatccacccttaaagcaaactttgtcaacccgtgagcagccatattagctgtacgtttgacatgagtgaattttggaaagaagatattacaaatgaaggtttgcataaagcatttgagacccgtagagcattcgtttccacttgagtaatagacaaatgaagttgaagtgtccaatttaagctatgaaacatcgctagtgcctccattttatgagactcaaaattaccaatgattggttttgaaagagcaactttaacattgtcgaaggagtcacgaactacaacccccacagcagtaactttgttggttgcatcaactgttgtatcgacatttactggttcaacaactaaagaagatgactgtgcaggtgctctgatttccgggcagtattatttggcttgtgcagatcaaaaattctacagataatttactgcgaaaatggctagttctttggctagtttagctttgtttccaagtatcacttggtttctctccgtccaaattgaccaaagagtgtaaaagatttgttccgtttcagcacgtgtgtaaattatagacaaatgaactagatagtctcccttgcacattgtcgacgaattggaccagtcaagaacttgatttgaatgttgccaaaccgctcgtgcgtacttgcagccaaaaagagtgtggccaatggattcccatgcttggttgtaaatagaacaagtagaatctataatgatttttttcctgaccaaagttgtagcaatatgaagtgcgtcattgtaggtacgccagacaaaaatcttgattttttgtggtaactgtagtgaccaaaagaacttccaccattgatttgccgaagaagagatcgagctattatcaatgtcttcatgagacactggaaaatgataacctatttgaacagaataaataccttatgtgtggtgattccagacgagggtatcatcgttcctaaaaaacttagaagtattgtcaaaatacgatcgatatctaaccgagaaaattattggttgagcaacgccacatcccattgtctctcgtgagttatgagattagaaacaacttcatc

SEQ ID NO: 81126 - DNA, 1708 bp, Cannabis sativa
gtatttttgtaaaaaaatggcaaaaattaatataccatgtaaatttttcaaacaaaatactaattaatcaagtattataccagcttcttgtagcctgctcaatagttttatcatccttcccatgcatactatatataattattttaagtgagaatacgagaatatagtgtagctatatcatttcttgtaatttcatattttaatatgagttcatttccatagtaataactacatgttatattaggattaattgtaatttaaggattgcaaccaaagattatttaacaatggtcattatcataatacattaaaattgaaaaaaaaaatattaataaatgtttttgtgtaactctccactttagtgggttaacactaaaaaatgtagaataaaaagtaaaaaaaaaaatgaaaaaaataaagaaaagataatattgaaactaagaatgtcatcttgcttagcaagaggattataaatatagaaaaattttatggtaagaactattgttttgtaagtatagtatagagataattttttgaccatagatatagtagacttttaatattatatattaattatagtgtacttgtgtgtattgtattaatactttgcttgtaaaaaaataaaaaaaaaatattaaagtgcattgatgttataaaaagctgataaaaagtaactgagatatatatttaaattagatccaatcgaatttggtggggattattttttgagattaattaatttgtaataatgaatgtattatgaaaaaaaaactacaacacatattattatgaattaattaatctccagttatgaaaaaaataaaaaataaaataatccccaccaaatttaatagaatctaatttgaatttataggatctaattaatccccaaaatgtgttgtagttttaatttttatttcatataaaaaaaaataatctcaaatatacgtttcacaacaaaatataattaaaaaaaggatattgtactctatgggttccaatataaattgtcaacaaaataaataaattttcaaaatttgcttccatgtagcaatgatattaaattgacatttggttcattaaaaatatctatagcggcactcataaaaaaaatagtaaaaatgtgttaattacaaccttctgatataactatttagttaatcttcgcgttcgaaaatatattattagaataattttttttcatagtagtattcgctattataatattatctctataaatttttgaaaaaatctgaataatttaccatttcgaaaataggtttaaaatttttgaacacgagtggtaaattaaaatatcgggaactataatattgatattgtaaattatttaaaattttttgaaaatttataaacttaatttgtaaatataacaatcaatgccatgaactattgtcaaaactctttacgaaattagtaaacacaaagaagttactaaaaaataataaaaactctaggttagatatatatatttcattatctatttctccttcttttaaaattgttaaaagaaaacttgaaaaaatagtggtggaaaaaaaaacaaaaaacaaaactccacagttgatatccttctgattattatagaaaataggttgtgtgcatacaaaaaacaattttaatatttatttatttttgtttagattgatctttattctgttagactatatatatagtgtatgtaatatag

SEQ ID NO: 81127 - DNA, 1336 bp, Cannabis sativa
ttaaaaatattctcactttactttttaactaggttagcttactaaaacaaaaaaaaaaaaaaataaaaaaaaaaataaaaaaataatagccaaaagctatatgtgtcttgtctatattgacatggtctaaagttgttgtttgttttgttttgatcgcttggataagaagagttgttctgtgttttattctgtacgtgatggcttcgtcaagcagaggtgtggaggagttggaggtacggtgggatgacttgcagattgatgaggaagaagaaagaggagtactgttcgataacattgcagatttggaggatgaggttgatgctagatggtgtctagtggggagattactcacagatcgtgcatccgattttgatactgttcggaatgtgatggcttcactttgccgtccagtaaaaggcatgtttgttaaagaattagaatttaatcgtttcttgtttcaatttttccatgaacttgacattaatagggtgctcgaaggtacaccatggacttttaataaaatacctctgattattcagaggttgaaaataggggaaaatcctagaatggtacctctaaacactatggaaatatgggtacaagtgtatgatctcagggtggggtttcagtcagacagggtgcttagggcctgtggtgcttatattgggaagtttatttcatcatgtcccaagaattacacaggaatttggagggagtacttgagagttcgggtattgataaatatcgagaagccattgaaaagacgaatgaagatctactataccaaagaagactacttctgggctaatttcaaatatgaaagagtgcccactttttgctttatttgtggtgtactcggacatggtgaacggttttgtccccggctatttgatgaaccagttgagaaggttgtgaagccctatggtctattcatgaaagctccagatcgacgttcccagaagcagataggtgcgagatggctccgagacaatatggcccgtccgttgcaatcggctggtggcagcagttcatcgacgacagcgagcagttccagggcagaaaaatctccgaaaaatcagggtgaggatatggaggatatggaagtttatgtgagtaataatgaggagagaataggcgtggatcatgggatcatgggaggggatcacggtggaaaagaaatctccacaaattcagggatattgatgaatgagggagcgggaaaggaaagtggctttgataaaggagggttcatttttacggatccaaaaagaaggagagttgatgagttttctgaagtgggccttgaacacactcaagctattgggccggcccaatg

SEQ ID NO: 81128 - DNA, 2402 bp, Cannabis sativa
tgttaagtaaattgtcacgtagcagtctctgattagttcaggttatgaacttttatatttttttaaaaaaaaataatttaaatataccaataaaaaaataacacgtggataatgacttgacacttaatggttaagtacctataaaagttctaaaaatataatttaagtattattgcaatgccgtaaaaaactaaacttaaatatttatctgcatccaagagttaaacccatatatttacgtcccaaattactcataactaaaatatgtattttaatttggggaattttcaaaaatactattttttttatgttttatttacaattttacgatttaagattgatatttacaaaaatatgcttgtaatattttgaaattgaaaaaatatacgttgttcagcaaaaagtaaaaaataactaaaaagacaacaataaatcaaccttaaattataaatcaactataaataagtttatacacacctaagaaagtaatatcatgacaactataaataaactataaaacaactaaacaaatggtgtattgttttttatgaagatgcatttttgtaaataaaaaaacagcgtaaaaaaatcagtattgatgtatttttgtaaaaaaaaaaaatcaatattttagtttattatgtaaatttttcttttaattttagtcattttattaaaaaaaaaatgcattttaaaatctttaatctttttattttttaaaaaattatgtaacatatgagaaaaaaattacttaaaaaatattatatagaatttttaccccgtactattacaaattacaactacaaaattaaatttcttaaacgtttttgttgattaaaaattttcattgaactattcataatgttgaaatacatattgttgaaatacatatgacttttgtaaggtttagtttcatatgtttaacaaaatatccatatgattgatgtgtaattagcatatttatactacatgtgccatttaaaatttagttcaagaggatattttcatgttttagttaaataaataaataaaaagagtgttactattaaatatcatgatgcttcacactacttaaagtgataccttataaatagttaacaattttttataattattactaaaataaaacatgtgggattcaatattgaattatatcattagtgttacaacacttaatagtagtgtacactactgtggagtgttaaatccaaccaaatgtacacttgaagtagcttgtaaacaatttttaggacatgtagatgtagtaagcaaaatgagggttgaagtcccttgaactgatgacttttaccacgttaaggtgacactctatcattaagttatatttctttctttgtccccattgaaaaatagacaattcaaaaaatcaacaaggaatgattgctttgagtaggtttaaactctatactaacacattaccactcttaaaaatatatttaagagcatttccaataataacattaagtttcaagactatccacatcatctaataatttattatttattttatatttcttccacattattttttacactcttatttttaaaagtacttcaataagtatgacacacatgatcatttaatatatcatttatttttaactcctggttacagatagatacctaaatttaatttttcgtattaataatatctaagttatatttctaatttttttgtgaatacctatcactaagtgtcaagttaatatccacatgttattttcttattcgtatacttcaataaatttttaaataaaaaataaaatttaatgacatggatcaatcaggctaccatgtggtcattaacttaacatttaatgtttaatggttaagtacttagttccataaatataattcatatattattaccataaaaagataaactaagtatttatttattactaaaattaaacttaaatatttacatgtacttattataattttatttacaaaataagtatgacatcaatgctaaattttagtaacatttcctatgattagcttcttcaaagcattctgtcacatcatcaagcactttgttcaagcataatgctctaatgtccaccacactatgaatgcccttaaagatcttgtagatatacacaaatgtgggactgttccttaaaattagaacatagatacctaattgataattaatatgtttgtcattaaggctgataattataacaaacttgattaatacatgcctataaaatagaataattatataaaatactattttttttataaattttttatatttgtatgtttaaagatttttttatttacatttttacagtattttctaaaacaaaaaaaaaagatttttttctttttacacttcaaaacagtttttttgtgtttttacgaaattctacatagaa

SEQ ID NO: 81129 - DNA, 1784 bp, Cannabis sativa
cggttatttccaaaaaaccgacgctataagtggtgtcaaaattccttccaaaaaatcccaatcatatgtcgtcggttctttaatatttgctgaaaaaagtgcctccaaagggttgatttgtagtagtgcacacaaatagtgtaaattataccccatagtccatgctgaaacttacaaattgtaactatactgcgaacagggacgaaggcaatcttgaacttttggggccaaagtgcaaaaaaaaatataaataaataaattaagagcgggcaattgtaaattttctaaaatataaccaataaaacttatcaaagaaatgcaccataatttggtaataaattaaaaatttaggaggggctcaaggaccttaactatgtagctaccaagtcataacctcatgatagaatttatttaataattaaataaatactattattttagtgtgattaaatctattaaaaaagttatgaaccaaaattacaattaaaataatacactatataataatatatatagttcgaatgcacataaaatttacatttatatcctaatgtagtacaatttttcattcatttaatttattttagttttaattttgactatatatttttaataaaaattacagccaaaatgtggtgttactctcgaatggtgtatatgcctatgtcatatttatatggaaaaagatttgtttgtccaatcacacctcttatttctcaattaagagtagaacttcatactcaaccttatgatgaaataaattggagaaaagttcgccatttttgtgccaaggtaacaataataaacaaattgtagattttacatgaggctaattaacatattaatttaaaataaaaataaattataatttaatttaaaaagtcattttgttaaattggtgtatatttcaggaggatctatattactcacatcatttactacaagatttactttgggatagtctttacatatttagtgagccttttcttactcgttggccctttaataaattgattagacaaaaagctcttcaagtaacaatgaatcacattcattacgaagatgagaatagtcgatatattacacttgggtgtatagagaaggtgatcgtttatatatataatattttttaaattaagaaatttaaaaaaattattttcttaattaatattaggcatatattgactcttcaaaatataggtgttgtgtatgcttgcttgttgggttgaaaatccaaatggagactacttcaaaaaacaccttgctaggatcccagatttcatgtgggttgctgaagatgggatgaaaatgcaggtaactttattataaattattgcttaatatttaatataaattgtaataattgtgtgtatatatatataatttgcatgggtatgtagctaataatattactacaaataaattttctattaattaataattaccatggatttttcagacatttggtagtcaatcgtgggacactagttttgccattcaggcattgctggatagtgatcttgttgatgaaattggaccaacacttgcaagaggtcatcacttcattaaaaattctcaggtacacatataaatacaatcaaaaattggtatataacacctttctacgtgtcaatattgttattagtcctattagagttagtctcgcattgtttaatgtttagaaataaattgtcatatataagataaatgagttactcccctcattgccaattaattttgagatgaaacctcattcttcggagttgtattatttactacaattt

SEQ ID NO: 81130 - DNA, 891 bp, Cannabis sativa
  modified_base (288)..(306): a, c, t, g, unknown or other
  modified_base (439)..(454): a, c, t, g, unknown or other
aagcatattttgttttttgaaaaacacacaattaccttcaaaatgaaagagatcattaaaaatatggcatattttgttttctaagtaaaattatatgaaagaaaccacgtgttggtagaaatttttttattaggctctttctttacttaggtcaagagttcgactctcaccctaccctttattgttagggatcactacaaaaaaaagtcatttttagtcaataaattttttgtaactaaatgtgatttttagtcacaacaaaagattacttgtgactaaaacatagtnnnnnnnnnnnnnnnnnnnctaatttaattttagtcacaacaggtattgtaactaaatacacatttagtaacaacaaattgtgatttttgtaaccaatattttaagccacggaccttttagtcataacgtaagaatgataatttataattannnnnnnnnnnnnnnnttttagtcacaagttttgttgtgactaaaagtatgattttttgtagtggatcatgcttggcccttgaaaactggcttactgtggtaggcaatctttgggataggaactctcatgatgtgtaaccgacgatccaattaaggcaagaagatgtatatgagtcctatagctagcacgtggtccctagaattgtcaaataagggttgggaaagaaatctgcaccgcgtgttttttttttctagcaaaaaaaattatgtgaaagaaaatctcacaagtgtaaacttctaagtcagaaaaagccataaaatataaaaccgttaaatggtggtagttttgcaaaattttagtataaaagttgtaaaaatgcaaactacccttttagacccaacacattaagatactattgggcctgaatctattctctgtgattcattgaaaaa

SEQ ID NO: 81131 - DNA, 937 bp, Cannabis sativa
  modified_base (785)..(786): a, c, t, g, unknown or other
ttttttaaatagaaaaagctatactcatttatcaactttaaaaggttctccttctcctcacacttttgatcagtttgacttagttctattaggtaacgatgtcaaaaatagtttgaccatgttattcatgaccattgactacagaagtatagcatttgtgtatcctgtatctttaagggagtacagctcggtgttcgcatggaccaccatttttttttttcaacttaaaagctaaacatcatggtcacgacaaaataagttcgtaggtatgggggagatatccaccatctcatagtagttttaagcaaatacttatctaattatgaacaacaaaattataggttcttacaactttaattagaaaacaccctactcctagtgtagttatcaatctctcatctagctctcactccattgagggcatctctcactccattgagtgcatcgacgactacactagaatcactttctacaatgataaacaaacagcctttattagtcattgtctttgttatatggaatttaaatcaataaaacttgaacgaattactgaaagaagattcttgctgagtcacggacaatgtcgcgaacaatgtcgcggacaatgttgctttcttttagatgttttgtggctttgcccgaagtgtgcacgacagtctagcaaccacggtgttccgaggataaaacaactgttgtaaagtttaaattattacaagttttattttcgttttgtttattacaaaatcttaaattctgtgctattttgattagtaatcccgtttagnngattagggtttcgtaaataactcgggtagcatgcctaattatttagggcgttacactaataatatgaacaagagtttacaattactcaggattcagaccgatctactattgatcatctgtatgatatgaattagatctttattgtgaacga

SEQ ID NO: 81132 - DNA, 1384 bp, Cannabis sativa
gagtattttgttaatgggttttatggacttacagttgaaaatgctggagctttttgttgatcattattttgtgttttgtgaatttttgattgattaggttggcagtaggttgacttggaccagaaactatgcagctaaagagattagatttggtgttgaagctcgagctttgatgcttaagggtgttgaagatcttgctgaagcagttaaagtgaccatgggtcctaaggtttttgatctgctctgtgctatttttgcttacttatcttcttttcacatgtttagttatcttcttttcacatgttcttttatgtttattcttattcatgttgaattgattggttgtaaaagggtcgtaatgtggtaattgagcaaagttttggtgctcctaaagtgaccaaagatggtgttacagtcgctaagagtattgagtttaaggataagatcaagaatattggtgctagcttggtgaaacaggttgcaaatgccacaaacgatgttgccggtgatggtaagccgcagaacttgtctttggtaattttaattgattgtcgaaattcgcaggtctattattttgtctgtattttggctcaaccactgagaatattttttgttgaatatgcagggacaacttgtgctacagttcttacccgtgccacatttttaccgaaaaggatgcaagtcggttttgctgctgggatgaatgccatggacctaagacgtggtattacaatggcagttgatgctgttgtgacaaacttgaagagcagagcacgaatgatcagcacatctgaagagatagctcaggtttgtttccaaagctaatacgttttggtcaccttttgctcaattggaatctttaggatcttgtaatactaacttaaatttaacaggttgggacaatatctgcaaatggagaaagagaaatcggtgaattgatcgcaaaggcaatggaaaaggttggcaaagagggagttatcacaattcaagtaagtttctttctatatcctttttatttcagaacaacttatatgtttttgaagcatcaacttgttagttgtgttacattgtttgtaatcttggcattgatagttcgaggtacttggactgtttgtgctcataataaggacttaccatttaatttctgtagtttccattgtcatcatttaaacgtatatttacatatttacattcatgatttattaaactatttcaaggcatcttatataaatatatatttaaactatatcaaggcatttctcccttagattccacattatggaaaactttttttactgtttttaggaattgtgttgtaattcatttattcagccacaattctgctaattttatgcaggacggaaaaaccttgtacaatgaattg

SEQ ID NO: 81133 - DNA, 763 bp, Cannabis sativa
ttttgacacgattgttaaacgggtcgtgttcgggtcgagcatgtacctgttatacatgagtctcgacacgacacgaacacgacctgcgaacacgaattgccacccctaactacaaggttgtctttttaaacacaacttttaactaaaataaaaagtgagtcttaaaaaaaaggtaaactatatataactatatatataaaaaaatataatagaaaatgaatgaagagttctgtacatttaagaatctcttaaccttttttaatagtgtattaataatactcacctttttattatgttattaaataagggtatatttaacaaatttaaattatgaaaataatcattcttaattaaagtagagatgataattggagcaatatatatagttctctatttcaatagtttaactattttagctaaaaataaattgtgtcattagagatgctttcttaggaatacttgaaggtgctaaatatcacaaatagaaatacatattgggtagggaatgctttcccgtcctcattccatttaagaactttaatatgcattcccgtttataccatattacggagcaaaatattattaagaaaataaaatattagacgggtctctatcagggcgggatgcgtcatctccgtctccgctttgacccatttaatatttggaaataaaaaattcttcatccttatccatttcctcatgtagatggggaattctcgctctattagaggcagtattttatgggaccctatccacattataa

SEQ ID NO: 81134 - DNA, 2275 bp, Cannabis sativa
gaaaaataccattttttttttctaaataagggcccaaaaaataatttttaccctatagcccactacatttcaaggccggccctgctcttaaggtcaataatattgactcgtgaactagagtctgttaatcattgaaccacgtaaaaatcttcatcttcttcattaatacattaattatttcttaagctcttaaatatttagtttttgaaaatctcaccaaacaaggatgaaggtgtaatcaccattattgtagagcactttatacacagagaaaaaaaaaacaaaagaagagtagagaaaatgggcaaatggaggttaaggacactgatcatgggttgagaaagtggggaagagaataacaaaccgaacaatcacggtttcaaaattgaaaactaaaaagaaaaaaagaaacgaaacaagagaggtgatgaatataagtctaacatagtacatagaagagtagaaaaatgggtgatagttgatgaaatcagtgtcccatcttttttgcacgagagaatagagttttcatagagaaaataatcgtatatgcttaaacataaatgttatattaaggagcattttggtaaataattttttttttctcatgtagaattttcttttttcaaaggatatttactagtaaaaactaaaataaaataagaaatgtgtatgtatttaattttagacactttatgtggtgtttggttggaggtaatgaaatagaatggaaatgaaacaatttttattggattcctttgtttggttgcatattaaagtattgcaatgtcagtgtaatggaatgtcctttctactattttggtggaatgactattcaattttgaaatgaaaggaaagaccattccaatgcatgatgagaaaaaatctaataattttttttatgcattttaaatttcattccatttcattcttatttttattcttattctcatttttatttttatgttttcattccttctaaccaaacgccaccttaattctatttttttatttagttgcattttaaaatattggaaggacagtattagaatgtcattccaatgaaatagttttttttttatatcattttaaattgaaataatgactatttcaatgcaagataaaaaaaattaatatttttatacattttaagtttaattccatgtcattcttatttctattcttattcctatttttattcttatattttgatagtaaattccacgcttctttaaaaattaagttgaaataagctggagtgatgctagtcaatcagctatctaacatgctttggagttgttaagatgtagctcactttaaatccaatagaccattgaaaaatgttaaaacacataaattaacaaactacccacctcataagaggctgaggggggaagattgtttggaattattaacataattattattggtttaccttttttggtattttaaatttaaaacaggtgagaagcacaaatagtctattccatattttaagaggaacacaagaattgtgttgatgttccttatggctttgaaactttacaaagtaacaaactaaactagtactatacttttaccatatttaaacctattcatccttcattgttttgtaccaattaacaaaactcaaacaagaagaaaaattagctaatataacttttatatcattgcacattctttgcacctcttttaggatcaactttttattaaagacactcaagttttcaggtcctttatagcttttatatataaacctcaaaagtaggtgatcttttttagtcattgcaggaaattttgatgatgaaagggttatttgaggagcaagagcaaccatctcctgacctgtcgaattatgcatcgacaagtggtgaatgtaaagatgatcaagaaatgggaactaatcatcatgcaatgtcaaaaagtgttgtgttgaatagccctacctttagctgcttatcaaggggaatggatgcaaatttcgcacgtgcggtaagaattaaagaactaatatataatagaatatgaccgttttgttagcttaaattaatggaaaaaaatcaactctccccatttttcttatcccactcttgtttctccaatgaagaattgacacctattttattttattcacttgatttatttatttattttgaaaaaattcacttagggctagtttgaaacgccgtattaggtcgtattgtgttgtattatgttgaattatattttatgtaatatttttatataaaactatatgtggtattaacttttataaaca

SEQ ID NO: 81135 - DNA, 673 bp, Cannabis sativa
accatattaatcaacaactcaaaatttattacagagtaatatcaatttggttgatatttataatataccgtcgattattttgttaaaagggatttcaacgatagcctatttgacagttttattaaggaagacatgaagatgtcaagcaccattggtataatttattaaggtaactaatagtaatgtttttttgtttttattttttttttgtgttttaaggttgtatttatcatttatgtatggacattcttcctaaactgctttcaattttgggacacccttcatcatgtcaggatatgctaattattatgttttttttaaaaaaaaacaactgtgtaacttcactaagaatacataatagacacctataatcatgactggatatgctacttattatgttgaaataagatctaattattaactcacacaaagggggttaaaagtcatgtgaaaaatttatactatacccttaaaatgttgtttcggtggtactttcttctgggttttgcatcttttgatcaccaatatttttaataggtacatatattttttataattgttgtagttttttagtaccgtttataattttttttctaaaaaaaattgaacagtttataaagttaaaaaataaaatttcaaataattatttatcatacatataaaaaaaaataat

SEQ ID NO: 81136 - DNA, 3842 bp, Cannabis sativa
ttagtataccagttgtggctaactgaaatattaagaagtttcagtttaatatgcttaatatttaaccaaatccttcttgttaattgttatgaaaaattatgaaatgcatgcacataatcaagtagtactcacacaggtgaggtcgatcccacaatgaaaaggaattgaactgaataccactaaatcagacttataattctatttggtaaccaataattttgatgaaaataagaataaagaataacaagaaaataaaattacgcaataaaagtatttaatcatggatgagaaattagggaaaagaatcgtgttgatttaattatccaattgttaattctaataactattctctttcttaaggtgaatgacagattataaaattaacctaactcttttcagatcttttaggccctaaatcacatgttatctaatcatctctgaaatagattaacatataatcaacattaaacaataatctcaatgtcactaaggatatgcaaatagtgtcgttttacatcaaaacctagtttatccaattttagcatttccaaaacttactattctgattttgaattgggatcattaaacatgcctaaggtgatcaatctcaaacataaaattaagcacaaatatagataaattcacaatcaaaaaaagagaaataacaattatcattaacttaaggaataatattaatcaatattcatcatctccccaaataggagtttagttcataaaatccacaatcaaattcataattaaatttaaaacagaaattaacatagaaattaagagtttaagaaagaactagttggtgatcgtgctcccagtcacaacaagtgcttcctctgcctccttcttcaactttagggtacaatttatgagtatctttcttctaaaatacgagccccttaaatagaaattaggatagctacctctgaatggcgaaattccaaaactacccaaaattcccttatttagcttatagttgcgactacataaagtctagtcgcgaccataggaaaaaattaaaaatcaagctttctgcctatgcctcgtagttgcgaccatagtcgcgaccatggataatggtggtcgtgactactgaagcatacttgtcaacttcagtagatttttctccagtttgccccgtcttttccacaattgatataatttgaactctaatacctcaagaatctgaaacaaagaaaatcaagcataaaactatgccaaaaaataacattaacaaagaaaacaactgtaaaatcgacccgaaacttaggctaaaaatagcctaacaaaattctctcaaactaaattcttactcaccctcgagtaagactaagacaaacactaaaactcgattaactaagctattagataattataatactactggctcatgtgaaatttccttccattaactaaactagaattttaattctaaaaactctagcaattaattaggattctcatcttatccaacaatgtacagatgcaaattaactttagtaatgaaataatatcataattatacagatggcatcatcgctaactccgttcaaattgaatgtttgacataactccatataattagacagatacatatttggatcttccgaggggagtccactaaactggactgaagattgtatcatttggagtatggcttactttatctcgaagttattggcctctacggcgggtggtcttatacaagactgaaaccctatcaatgttggaaggacatagtccctcagactacggtcaggtggattacgaccgtttgcctggtcttctactacaaccccattgtttccattgttgtcattattggcgttgtcagccatgactatttctggttcagccctcaatgtagctttgtctaacctcttgttttttctattctgtctacatgcactcttgaactagctccttgacgtcgcatataccaaaagcacctgagataggatagaaaaaaaaattaagacaaaatagttagcgagaagtaaagaagaaaaaccaaaacaaaatttagtctaatttttgtaatgtcaatttttgaacaactccccggtaacggctgccaaaaacttgttacgaaaaaaaatatgaacaactacgcaagtgcacgtaatcaagtagtactcacacatgtgaggtcgaacccacaggaaattgaactgaataccactaaatcagacttataattctatttggtaaccaataattttgatgaaaataaaaataaagaataacacgaaaataaaattacgcaataaaagtatttaatcaatgatgagaaattagggaaaagaatcatgttgatttaattatccaattgttaattctaattactattctctttcttaaggtgaaagacaaattataaattaacctaactcttttcagatcttttaggccctaaatcacatgttatttaattatctctgaaatagactaatgtataatcaacattaaacaataatctcaatgtcactaaggttgtgcaaatactgtcgtttcacatcaaaacttagtttatccaattttagcattcccaaaacttacttttcagattttgaattgggatcattaaacacgtctaaggtgatcaatctcaaacatggaattaagcacaaatatagataaattcacaatcaagaaaggagaaataacaattatcattaacttaagaattaaagtcaatcaatattcatcatctccccaaataggaatttagttcataaaatccataattaaatttaaaacaaaatgaacatagaaattaagagtttaagaaagaactagatggtgatcgtgctccgggtcgccacaagtgctttctctgcctccttcaaatttagggtacagtttctgagtatctttcttctacacacgagccccttaaatagaaattaggatgactatctctaaatggcaaaattccaaaactgcctaaaatctcgtgtttagcccatagtcgcgactatataaagtcttgtcgcgaccataggcaaaaattaaaaataaggctttctatctatgcctcgtagttgcgaccatagtcacaaccatgaaaaaaggtcgcggccatggataatggtggtcgcgacaactgaagcatacttgtcagcttcagcagatttttctccagtttatcccgtcttttccataattgataaaatttgaactctaatgcctcgtggatctaaaacaaaaggaaatcaagcgtaaaattattctaaaagataccattaacaaagaaaagaactgtaaaatcggcccaaaatttaggctaaaaatagcctaacattaatgttattcattcgtgttcttatatacttcattaaaaaaaggggtagctcaaatggttacacatttggtttgcttccacaaggtctaggacttagtgtacctacataataatagtttttggttccaaatattgtaagagcatctccacaaattgataatctattgctaaaatatagctcattttataaaatatattttataatggtgtgccaaaaattaattcaaattcggcgcagagcaaaagttgagtcaaatttaaattacaatatgacataatacaaaatttacatcacaataaatatatcacttttatatttacatttatctcatttttaatattttattattaaatatgatttcaaaaaaaaaattgaatgaacaatacccgaatggatgcatgcctagcacaactcgcgcacacatgtaggtgcatttgtcgagtgtcacgtatacaagcttgcataacacctcgagcacctacgcgcatctgatggcagccaaaggcaatccgtacacgtgcatct

SEQ ID NO: 81137 - DNA, 1027 bp, Cannabis sativa
aacagagtttctttctcgtttttctctgcaaaacctctcaaggtttatcaaatcctcatatggtatcagaagaaaaccttgcccaatcttcaatggcaaggccctccactcgctcgcaagatggtcttccgccgtctacagcagagcagaacacatcgaaatccaatcctgattccacttccgcaccaatcgccaatccgtccatggcttctcgtcgacctccatcttccagatctcgacctccccaagaagaagacaccattgacccagacctgtcgtcccctgctcaacccgctcctaacctcaatcgacctactgcctctactcgcagactcgatcaacaagctcatgaggacgtgtccagcccctattttcccagtacggcagaccacccaggacttgttcttgtctccactgtgctcaatggtgcgaattatcaatcttggaaacgaggtataacaatggcgttgacagcgaagaacaagtctgccttcatcgatggaacccttcctcagccgatttctagtaatcacttactcaattcttggaatagatgtaataacatggtaatgtcttggttgataaactctatgtctcctgagattgcacagagcattatgtactttgatctcgccaccgacatgtggcgtgatcttcaagaaagattcaatgaggccaatggccctagaatttttcagctgcaaactcaactcacccgtttgcagtaaggtgatcaatccgtcaccacatatttcacaaagctcaagtccatatgggatgagcttaaggaattccaaccgaacaccacatgttcttgtggtggaatgaaattgtttcttgattactacaattaaaatcaagtcctacaattcctaacgggtcttaatgagtcttactcctctgttcgggctcaaattttactcattgaacccattcccaatctctctcgggttttctccatgattgttcaagaagagagacaaagaacccttggttcctcatcctcggatttgtcctccatggctgc

SEQ ID NO: 81138 - DNA, 602 bp, Cannabis sativa
tgcgaacgaggtctcctaccccgcttttgaccaaaataagaagaatatccagagcaaaattttcatttgaggagcaaaaccacacgctctaggttgaatgtcaacctccgcgttggggccctattttggctccttaaaaatcttgtttgctccctgagatcacttatatcatcgttatttttagaaaaagaaaatatgtctcgaatttttttttggaaaaatgactggaaattgcccaggttgataaaatgtcaacttgggcgctaggcctagcgatagtgtcaacctgagcgccgccaccaaatgattccttttgattcccaaaaatacctgtatctcagttattggtgaaaacagagaatatgcctagaagacttttcgaaaaaactatttcagaatggcacatgttgacaaagtgtcaacctaggtgttagccccgcaccaggtcaaccttggcgttggtatcagttctggcttccaaatggctcttcttatttcctgaaagtacccaaatcttaattgttgacgaaaatggataatatgcccggaagactctatctgaactactattggaagtggcccatgttaaaaatatatcatcc

SEQ ID NO: 81139 - DNA, 702 bp, Cannabis sativa
aaaggattcgcagccacttcctttgggaaaccttttactcatcagagagaacgccacgtgtcgaatacggatctgacggatcgcttctggatccgcggtaaacaattcacagcccagctatagatattggagcgcactagaacattttcctcttacgtggcgtcctacgtggcaacctttattcgctccatttagaactttgtagggacaattctaatatcttttttctcatttatatcatatatccatcgcttccatttacctttccaaccttccttctttctctaccaataatttttcttttcaattatttttttttaaatataatttggaaaaaaaaaatggtacaaaactcactgagatttctcaaactctacagaaaaaaataaataattttttttaaaaaaaaaaaattaacttcataggaaaaaaaaaaagaaaaacctctggtttctaacttttgaactttattccaccattggcgattatcatccaagttcgaatgaagttttgagagagaggtattctcactttgtataaagtagcaacttgttgctcaatgttgattttcttttccctatttgtttcttcatcttttgtttggctgttaagaaaattttaaaggaacacaacgggaaaaatgttataatgaaggaacgagagtatttgatttttcacagtatagtgtttccgagtactact

SEQ ID NO: 81140 - DNA, 2146 bp, Cannabis sativa
cctcacttgcgtgagtatactacttgattgcgtgcacttgcgtagtaattaataattttcgcaacaattaccaatcgatctgtgacttggagttgactcaaattggtataatttaaaaattattcatagtagatttggctcgagcttctctgaggcagctcatcgagaaagtaacccaatctggggtgaacctcgtaaactaccagtatttgattttcttcttcctctcatctctttggtttgttgtttggtcttttgcatgtgttgatcttaatttatctttgttcttaactcgttttgtatacggttttgtggagactttgaagtattgctcatctttgcacttgaaattgacattagatacataattggtaaagtaaaattaagaacattcaagaaaagaaaacgcggcaaaatactgtgcattgaatttgataaaagtaaaggttaaaattgaccttgaatgttgatttgtgtgtgtgaattgtgtagggttaacatcgatactaaaattcctacaattcattctcctctctctcccttcttcttaagtgaagtgttcgagactgcaccattactgtcactctttctttctcgttctcgtcctattatccttgccctcgctttctccctgttattttcttgccctccccccacatatgtgtgtgcactaaagcattcattacaataatcatgctttttgaagtatggtagaaatgaggttttaaaaagtacgatgaatgttagtgtataacaaagtgtgtatgagatttcatttcaaaattaattgataataagaagaataatagtctatgaatctattaagtattctcacattatcaatgtgactctaataaaatagattgcttctataggcaacaaaatagtcaccatacatttaagtttaagttaccattttatttcatgagtaaaaaaagttaatgaacaactaatatctattggattttgtggtattgcttgtgttttcctatcatttaacacatgcaagtatttgtggttcaattttttttttttggaataataattatgatgaataattaatgttgatatatatatacatgatgtctttcagtatatattatgatgaattgggcacgtgataataataatgatatggtggagcgtttataaattaataatatttgaattcacttgttcagtacgtaaattagtataattattattataattaataattaaagtaacaaaaatctcatcatattaatacattttagggttaataatcttgaacaaattaacaagctatagatctttgcacccaaaattcgaaacaattattctacatgcgtattgttgctcataattatgtcattctatttcttttgaccaaaatatatttatatattatggttcaatattattaattattattagtataataatgatcatagagatgaacttttttcgtgtgtgtacgttcttctatatattaacaacacattttttttttctcttgtttgcagaaaacacgtgatgatcataaataataaaagtaaataaaaatcgtacatgataattattttcaccctaaaaaaagatatctatattttgcattgtcataaaaagcataaacataattatgctgttatgttttatataattagcacttggatactagctaatactatatacgatcatatttagtttgtttatttatataattcttttgagaaggaagaaaattgagtatgaggctattttaatttaatatgaattaaatcacccaaatttatgtaatttgtcatatgtttttcacatataagatttaatattattttgtaaatatttataaaatttgtaagaagatataagattgagtattattgaaattttgttttgtggcctaaaacattagacaattttggcaaagtttatatgctctctagttacttggataaaatatatattttttttttttgtttttcttccattaaattttcttagatttaataaattaaataatgaaaagaatatttataacttaaaagaagatgaactatatagtttttaataaaatacaaggtcaaatttaataataatactagtaatcctactaataataatgatattaaggtgaagagacaatggagaaaatacataatac

SEQ ID NO: 81141 - DNA, 1566 bp, Cannabis sativa
tcttgcgtgcgccaagtaatagaaacattcttactactagtactagtgccaatagtaagtattcacgtgaatacaaaagcatctttatcaatttatatatagaatattgtcgggttaaatgatttaaattttaaaatttttaatatttaaccacaattaagtgttacaataaactacctgaattacacatttgtatatgtagcaaatttttattgatcaacttaatattaattttaaaaaataaaaaaaaataattttaaaatttaaaatctcttcttttattctcttcttcatttgaaataccttaattgcttatcctaaccagagctattatcactgtcactaccacttttattaacaccaccacccttacactacaatcacaactattatcactgtcaccaccatttccacaccacaatcactaccattaccaccaccaggcccggtcctgggcatagacgtgctaggcctgtgcctagagcccacccagtccaggagcccaatttttttttctgttttaaaattatatatttttttttttactaattttgaaaaataccacattttttttaacataagagtccatttttttttttcctgtgacccactttgtttcaggcccgccctgaccaccactacaaacattttctccaaaccaccacaaccacaccgccgaaatcaccccaccaccatcatcaccgtagctactgcaataactactgccactattacgattttcaaatccatataaacacctataaaatgcaaaataaataaaatccaaaaaatagatctcaaatctggtttgtatccgtttgtatcccctaaaccctttgaacccagtcgaacactaaaggataaaaaaatttacttttgataaatcatcacagatctaattttatgtataaattatgagctatttgatttagtaaaaccaaagtaaaatttcaaaagaaaaaaattaggagtgaaagatatttaagaaaaaaaatgaaagagaatttgagagggatctgagatggagagggagagagactgaaacataaaatttttattatttttgagtatttttaaaataattcgcttatatatatgcctgtattatgtttaatttatttttctcattctattttaattaatttatttaattataattaccctatgaaaaatagataatcaaaataataatataatagtaataatagtatacaaagtaattacaatctaattcatcaagcgaaattgataaaaattatttactaaagtaaagtctgaaatgagtaaagtccttgacaccacgttttaccttaattatttaaataaaatttatttttgtgtacatttttataaaattaatttttggttaattaattttttttctccttcaattttgacatgtactaaatcatgctttttaaaattttttgaccgttaaaaatttctcctgaactattaagattgttagatttaaggactttgatctaatttagtaaaaaagttctaaaatggatgaaagtttaggagtatgatttaatacatatcaaagtttgaggggcatgattt

SEQ ID NO: 81142 - DNA, 1111 bp, Cannabis sativa
atgtgtatttggtttaggtaggagcacacactgaaatagaacttgaagatcgaaaactcagaattgaagatgcaaaaaatgccacatttgctgctatggatgaaggagtagtgcctggtggtggcgccacatatgtacatctttcagaactgattccttccattaaaattacatttgataattttgacgagcaaattggtgctgagatcattgaaaaggtattttctgttcaattattgagtaatcgttttatttacaggaagactctttattgtgtgcagctcaaaagattattcaaagagtagagtagaaactgtcattcagcatatgtgatgcatatttggactagtataaaaatcttggtgacatgcgtttgaaaaataacatttgcaagaatatttgtagggtactgttttcatgtcatcaaatgctgttcggaagcgttatgcaatgtttagggagttttttgtttatgctgtttttgaaatcttgcatcgtcagaaatgtgatttaaaattttcattgatgggatgacaggctcttctagcacctgcaaaatcaattgcgggtaatgcaggagttgatggagaagttgtcgtggagaagattcgtactagtgattggagaattgggtttaatgcaatgtctaatagatatgaagatcttccagatgctggcatcctagatccttgtcgagtttcaaggtgcgcccttgaaaatgcagtttctattgctggtttagttttaacaactcaagctataatggtagagaaaacgaagatgaaagagccacctgtccctcttcttccagggatatccccctgatatatttaacagaaatccctaggccatttgaaagctaaaaattcatttttgcaacttgtctgtttgccattggttgcgatatgctcggaagtttctcagataataaaatcaccttagttttggacatgagacaggtaaaacagacatttgaagatgtggataagtaaggattcgtttagagttcagatatggaagcatggatagattgttcattgttgatccaaagttctagcaatgcttattgaaatcacaatgatttcacccttgtaaaatagagcaatgaggg

SEQ ID NO: 81143 - DNA, 1982 bp, Cannabis sativa
  modified_base (742)..(754): a, c, t, g, unknown or other
agttgagggaagataatgtactattgtatttgtttgtttattttctcacaaaaatatatgtgtatatttaatttaattggggtatatatgtgtatgtaccttgggatgttgggtttccttaagttcattaaacaagcatggatacttactgcaaaataattccatcaaacaagatcattaataattaggcgcatatgtatagtttttaaatttaaaacttctaacattataaaattaattatttataataaataatatttatatatatgttctcttactggaatttattagaaagaaagtgcttaaatccatgaacaattttctgaacaggattgaagcaggattcaacagaatcatgccctggctgcactttatcaaaggtttcatcttcatcactttcactttcactttcagccttctcactattcaatcaattttagaatattagatatatatatatatatatataatattatgattaggtatataatgtatacatattataaacaaacatatataatatatgatctagtaaatatcaataaattacctgataatcactagatttttcttaatgccgcattcatagttggccaactcggaaaattgttcttcggccattatattcagtttgctagctagttttcctttctgcaaatttaagtaaattaatatcaacgaactattattattttcagcaaataaaaaatacaaaagaagaaactattattattattattannnnnnnnnnnnntattattattattattaagtattgtcatgatgatttcccacatatgtaaatactgaataatgtttcgtgtgccatacaacgacatgtttagttttatattatataagttatatatatattttttcaaatattacaataattaaaataaaatacaatatattaagatttataaaatactaacatcactttataaatattattattatttggacacaaatcaatttaccttttaatggtaaaaaataataaatttattaaagaacaaggaactccaaactatatttatttagttatgtataataaaatcgaattaaaatattgatattatataattcatatatatcgtaaaggcaaattcaaaaaatttaaataaaataaaattaatatttacatatttataaaataaatagtattatcaacatccgttaaatttaatgaaatatttttatatttttacattatattctgtttttttttttttttgaattaaattatattctgttaagcgaacaaaaatagttaaataaccactttttatatataaaaaaattatataacttttttaaaaataaattatttatctttctgagttaggcataaaagaggatcaattgaaatttgaaacaaattaattatagaaagtttaagaaaatataattcttggtaatataaataaaaatagatatactagcaacgtacgtagatttagacttatgcagttatagttacgttatatatacgtatacatatatttataaactaacccttttcgagaattgataatattcttctgctctaaaatatagatttgtagagtatagaaaaaaaatgatggaattgaagcaacaacaatagacgatatatatagttttgaagccaaatagaattaggtgagatacatattcgaggacgcataatctcttctatttataagcttagatgtctatatacatattttaattaaatatgcaaccacgttttgttttttaatcttttatttcttgattaaaaagaatatataattactatatatatatatagatgatattaatatatgcattattcatgtccaactcacataaagtttgcttttactccctttggccagctcaacattcaaattaattacataaaggtagtgtggatggttattgtatataattatatatttatgaccataagagtcaagagtcgactccttataattaaaataataattaatagtaaa

SEQ ID NO: 81144 - DNA, 779 bp, Cannabis sativa
acaaaaatgttaccaaacgccaccttattatataagtatgtatcaaatttgtgtgtaaatttcttttaaattattataataacctaatcggatccttctattcaaaagaactaatgtaatattttaagaaattgactcgtaactatttaataactcatatagtatgttattgtagaattgtgctccttaaattatttcaaatttattgaattacacctatactactaccacaactatttgtgccttcagaattttggatagagagacacgatttgataactataataattcgagtgaaatttgaagtaacttaaaaatttatagaatatggttttatagatcggagcaaaaattatatttattttaaactattttgaggtcatttatagttgaagcctcaaaagtggtctttaacttaaataaatgaaaatagtagtagtaatagtaaagagacatcaaatttagcagttagaagaatccttacattcaacgttatgacatcatttttggcaacatttttatttcaaagttcattggcccacaccatttaatgatatttaagtgcattttgaggatcttacctattcctactaaatgaaactaggttttgtagcctttatttctttcgaaaaataaaaaggtaaataccattttagatcttatatttaataaaagttattaattgaactatttattttgttaaattataacatgatcctatatttctaaaatggtaaaaataagaccctgagctcaattttcaacaatttaatttttta

SEQ ID NO: 81145 - DNA, 3012 bp, Cannabis sativa
tttcaaaaaataaaaaaacaacaacaaaaacaaaaatttgaatttgtaattttctaaccgttaccttctttataagttcaatgttttataattatttaattaaaactaaagaatcaaaacatattataaaaataaaaccttgcattatgcatgtagtcatacttatttaaataaattctacttccaccttttaaattaaagttaattaagtaaacactcaaaataatatatgtaatacttagccacataaataaattgttttaaaaagtcattaaaagttaaaatacatacatgtgacatttaggattttgtaaaagttactaattggactctctatattgtaaaataataataaaaaaatcttgtattttctaaaactgtaaaaataagaccccaagctcaatttttaacaattttttaatataatcaattccttatacgaacaaatacagaaaatgtaaccagttttgtcataacacctgtagatcatattattattaaattttattttgacaaaaaataagttcatggttctatttgtactattttagaaaatacatggtctattttgttatttaacaaaacagaacgtccaattaataacttttgcaaattcaaaattatatttacccttctagagttttttcattttcagttcaaagtattttatctttttgtattttcacagcaactcacatataaatcagtagaacaacctaaatagtaatcaaaattcacataacaactcaaataaaaataaccggagcaactcaaatcataaattaaaaaaaaaacaaaataatatataaaataattcacctactattactattaggctaattagaatttttacctcctgaattttaatatataccaaatcatacctcctaaacttttaaagtcgttaaaaatacccctaaactattaagattagtagatttaaaaacttttttttagtacatgtcaaacttcatgaaacaaaaaaacttaattagcgttattataagagaaatgctaaagggcaccagtggtggtgctaagcaccctcttatgtgtcaatatcgctattggtccaactaagtatcgggccccatataatttaatataatagcttttagggagtatcgctagccaatcacgcgatatgttaagaatatactagacactactggtgcctaatagcaatgctcttattataattattattggttagaaatgaaattaggaaaccctagccctaaatgaagtttaattacatggccccaagacatgacacctccaccacattgcttagctttataataatttatatatataaatacccaaacccaaccctcaaaaaagagtaaccttcaaaacctctttctctctcttagcttgtgattttgattttggctttctcttctttctctgtacttttctcggaaaatcaatcatcagtggctgctcagctcatcagagattaggtttttgtgaatggtggaaatcttaaggactaccaatttgatgcgctcgctttcccaatcgcgagcgagcgctcttcttctccctttctccgccgcttctgctttcgctttcggttcctgtaagcaaggctggtactaccgctgcctcggtctcgacccctgagctaccttccaccatccatcatttcttccttttctttcttttctcttttatcttctctttctctttttctttggattttggtcgcttgatcatttctagggatttgaatttgatttttttttttttcaatttttggggggtttttttgagtatttttcacgatgttgcactataagcagaagaagacccaaactagcaagggcaacaggctcttgattagcgtcactgtgcttggtagcgccggacctcttaggttcgttgttaatgaggaagaactcgttaatgctgtaattgatactgctttgaaatcgtatgcacgcgaaggccgtcttccgattttaggctccgatcttaatgattttcttctttactgtccaaatgctggatctgatggtaagcgatttcgaaactttgcttagttattgacactgttgaattattgctttggttattctgttgtgatagaattaggtcttaagtttgtaaaaatatgaaagaaaaaaaaaattaatcactttggtctcataaacagtgtaaattcaatgttgttattttataaattttacactttgatgattttagtttgggaaaattactcagtgttatactgaagaagaatcattggattatgacataattgggtttcgatttttgatttggttctgtgggtttttgtgtagttttgacactgtagaatcattggattattgctctggttattctattattacataattgggtctcaattttgaaaaaaaaaatatgaaaaatctaatagcaaaataacactgaagaatcattggattatgacataattgggtttcgatttttgatttggttttgtgggttttgtgtagctttgagtcctctggacacaattggatcacaagggactcgaaacttcatgctgtgtaagaagccaccaccacagccggtgatgaagaagttggatgagaatgatatcaagcttagtgtaaaggaaagtgttcctactgctgctcgcaaaggaaacggtacatggaaatcatggctcaataaatcccttaacttgaagatttcttctcattgatgaaatcaaacaaattgagaaacttttatatgtctctcttgatttcatgttcttttttttaggaggatatttgatcaaattgttgttggttcttatttgattttcataacaatgatgatgataagtttgttgttttgatttcttatttctctttgccaattgtgtttaagttggtttatttgaaacttaatgtttctttcttttcaagaaataaaattgatcaagttcttcatactcaaattgttgctctattcaaatttttagattgaagctttatgatcttgtatgtatcacaattcatttttattatgttc

SEQ ID NO: 81146 - DNA, 2232 bp, Cannabis sativa
aataaatcatgcgaaccatgcgacgtaaaattatttctgatcttttattcattagtaaatttgattatactgaaattaggacacaaaacccaacagttagttgttcgacttggtgactattacggatcccttttggtgcttgggaagggaaatttctgtgagtatttgttatggtagctactacattaggttcgaacaatcgttttgttggttgtaatttgagtttgatgaggctattttgaagaagaatctcaagcttgattcaacccaatattgactaagcatttctcaactctactcaccaattcactttcatttaattattttcttttatttgatttttatgtattgtgttggtggttgtaactattgttcttgttggtgttattactctttgttttttttttgtgttgagtagaaactgtacctctccaagtgtggggtgttgattccttagttatgatattaattgagtcacccatcccagtttttatttttgagtcatttgttgattttgtcatattttggtaggagtgaggaagtttcattgtcttagtgtgctcaatgattaatcataatttttttattaaaaaaaatcatccattctttttttattgccttttattgtgttattgactaattgtattcataagtgttcttgaagtgataaaagttgtgatgaaagtatttttcccaatatcatgtgcatagcttgatcaaatttattttgaattcttagaacgagttagattcttaggagagcttaagtctctagaattgcttaatgtttcctttgaggcaaaatcctagacaacacttaattgaggaaatgatttaggccattttcagaatgtttgagccttttgagccaaccgatatatatttctatccccttgtcaccccattgagcttaattgccttcttcattctttaacccatgataagcctccctacacattatttttcctatacctccttaaacaccttaatatatctaggatacgcattaatttgagagaaagtgtgaggagtgtgagattcgtaaagtctttggtgccaccatgtcatatattcatattcttagtgataacattgaggacaatgttgggtttaagtttgggagagagtgtatgttgtgtttcttgccacttttatatatgtatggattcattattaaaagagagagagagagagagagagagataaaggacaaaaagaaaaaaaaaatattaaaaaaagagtgctccccgtttaaaataaatgtagccaagttgtataaatagaatttgaaattaagtttggaggtatagtaaaataaataaaaaaaatttctctttctctttcttgttttgaaagtggcaagcgtggtattcaatgtttgtggggacattcttttggggaagtgattatgtgctcttattacttaatcctagaaagattgaggtgtttaaggtaatttgagccaaaaataatatcttttatcctaccttcaccttagcctaacaatacaagcttgataaagtcctattcatccttagttgagtctttgtctacattagtggagagggaagcattgagtcatcttatggaggcaaaatgttaggcttcaggattgaggtcgagcttgttctagaaaaaaaattgacaatgttttggaaaaaactatgcattagctattgggagagacacttgcattataattttatcacttcattaacacttgagtaaattagtcaaaagtattggaaagaggcataatcatcattatcatcttccatcctcatttttataagttttgagagcgtttatcattgttaagttgcttgctaagtaagcatttattctctttgtctcgattcttgtgtgtcatttattttcttttgtgtgagttgtgttttgagtcaatatttttttgtcatctgtcttttattcatctttgagtcatcactcaagaacgagaaatgtttcaagtttgggggtgtgataactcttgaataaagagttatttttcatgtttttgagcttaatttgtgtgtatattttacttatattttagttcttttccttccattttgtaagaatatgtgttattttgtatttttatgttcttttgagtaatttggagttgttagtggtaattattaagtgttagagtaatttgcggcgaaacccccttgtaattcaattttatacagttagcccccttatctttttctttggtggaaaaacccc

SEQ ID NO: 81147 - DNA, 1799 bp, Cannabis sativa
ttttgatgatttcctgcagtcgatcgctcagatggtcatactcggtcctagactgcctgtttctgttttttatgtaggtgtagtagttctggttttttcttagtctgtagctcgtttcatgctttttgcagattttagttgttttgctctggtgtagttggtagttggtgttgttggttgtttttttgccctgcctttcagggttcctttggctgtttggccgttgttgtttgtttccaatgaattccacaatcaaaaaaaaaaaaaacataactaactactttttttttggctataaatactaaattaattattatcataaatatttgattatattttagtttattagattaatttgcttttttatttttatgtattttctttattatattgatttagttttttattctcttaatcttatttaaaaaaatttattcacgttctcgttctctcttaatcttctttttctttttttcttttctattttatattatacataataagtttataatacattatcagtgtgaatctctattcaagataaataatttttttgttaaaattcttgaatcatatatatactcatctaactaaaataattttaataacttttttttttgtttttcttctttattatttatatatatattatatatgttcttattctcacatatcaattcttgaactcatatatatatgtgtattgtgtgtgtgcgttgaccttacttttagtcaagaacactgagtctttaaagtaatgagataatagataataattaatacaattacaataaaaatccaggattcatagaagtttggccctttgattacggtaatagcttactctccttttacttgtattacttcgaagaattatcaagatcacaaggagctgagcaagtgagtttctcaataatccttaagaaaagtttaaaattatttgacagcgtaatagctctctagaatatttgattctggatccccaaataatgaaacgactccactatttataaaaaaaaatacatgaattgagttttctaaaacaattaggaataaaaagaaaaactaaatcagtttcctataacctctctttaaacaagtgacattccaataaaaatagagattttattgagatgtaaatgcgaccataattatggtaaatatctctaaaaatttctttcttctgcgttatcctgcttagagaattcgacatcagtagatggtgaggactagctcgggtagtcatgtacaatgtaataccctaaggttaagaactcagattagcaaccctaactagtttgattatgactagtttgattatgtgttaatgtagaattattaatgtagaattatattattatataatttaatatgtgaaactatactgataaattacattttaagacctcgttggtgtaccaagggtattttcgtaattttgacccaagaagggttaaatcttaattttatgatatattgtgcttataggctatattattatatagtatatgtattctatctatctgcagatattttctgataagtcagtgtggtatagtcacaaccgggtattttggagtgaatcgggttcgggacctgaaatacatttttgagatttaattttggtattaatatgataaatgagaaatctaaaattatgagttatatatgcgtgtggtgaaataataaatttacccttgattttaaggatatgttcatatttggtcctaggggcattttggtcatttgactaactattacattttcaacaaaaatccaatttttgagaaaattgaaat

SEQ ID NO: 81148 - DNA, 1768 bp, Cannabis sativa
  modified_base (1135)..(1147): a, c, t, g, unknown or other
aagaaaatcattaaaagttcagaacataaagtaagtataaacagtgatacacatagtttgcttcactgatgtgaagaccaaactaagtaaccctctattactaaatctgaatgtacctctcttttccttctttgcctgaagaatttaacaatttcacacaagagattgaatatagcatcacttaaaaagaaaatctttgctaaatacattatctttgaccgttcaatactagttgttggccaagtaaagataacatctcatgaagtaaaatttatagaagacaaaccaaggaaagagcagaaataagcaaattcccagcattactcctctctcgaaaatcaatagcctgaaacaggaaccaaaacccagattacaaaatctatatactaaaaagaaaagaaaaaagcataaagattagaaattgggaaggtgtaaacagtaccagccaaagagaagggtaggaggccaaagtgcgataaatccatgggctgacgagcaaaagagaaacaagctccctctgaggcaatctggtgcttacgattctgaaaaccttaggcaccgtttctctgcaccaggtggtgagctcctctgcttcttctccttccatttcgactcacactgggattgttgcccagctcaagcctcaagtaagggaaaaccagtcttgggttggaattttgatgtaaacgacacgtcgttgttgcaccattagctgatcaaatacaatagtcaagcgactcaagcccatcgacccaacaatttcgggttaaccgactactagccgggaacataccctctgctgtgacgcgtgtcctcgagctaatttttcatttttggctaggaaactcgccctctcgttcactcgtaactcgtaagtcaaatgagatgttttagttcatccttaaaataaataaatgccattttaaatcgtgtattatgtaaaaattattaattagagttttattttgttaaattataaaataaatcttatattttttaaaatagtaacaataagactctgaacttaatttttaataattttattttttaatataattaactttaagataatttctaatacgaacagatatagaaaatataaccagttttgtcataacatctctagatcaaattnnnnnnnnnnnnnattttgacaaaaaattagttcagagtcttacttgtacaaatataaaaaatacaaaatctattttgtcatttaacaagaatgtcctaataatattttttacaaaatgtatctaaaataatatttactttaaaaaaaaaataagatgttttgaaaaaaattaagtcaaatgatatgtcctattcagtattcacaatacgccgctcccttttttcacagcattagatttttataattggggagtattgaggagatcaagatatattgtaatattatgaaaaaagaaaaaaaaacaagttatgttgtttgagaaatttgtcaataatataaattagtaaaatttacaaaatgatcacatttaatttactttatgcaactataataatggcataatataaatttatagtcaaaaaattattatagtgatcatttcatagtcgcacaatgtaatttataatccctcgtgcgaccatacataattattttacaaataaatttttttataaaattattttgctaataacattattataaatctatttttacaaaatacttatggtgttctaactttgtgaaagaaaaaaaaatgggattatttcacaaatacacaaaaaaattacaaaa

SEQ ID NO: 81149 - DNA, 1089 bp, Cannabis sativa
  modified_base (846)..(860): a, c, t, g, unknown or other
aataataataatatagagatagatcagatatagagattatgtcacctgggtttctgagagtccctttaacagtatagcctctttggagtaataggttcacaatccaagaggctatgaatccacctgctccagtcacacaaacagtttgacccaaacccgataaaccatgatcaataggcatttggagaatttgtagagtgatgagaagtagtacttgagagaatatatgtgtgggtttggtaaagaggagactcaaattattatgtctttaattttgaggaggatatatatttatataaagaagaagaggcactataactctataagcatttataaagagtatctctctctctatctttctactggttttacaaggaaggcccatgacatgaccccaccccaactcacctaccgcttcttttaactttttatacaatttatatttatttatttattatattattacaaaattttaagctacacttttacttttacacatctttgtttggcatctaaaaataaaataatttatttgtttttttacaattttttttttttgttttaaataaaaaagtaatagtattacaaaaataattttaactggccaaataaataacccaacgcaaccgaaacgaaaatctaaccagaaagagattcaccattaattctagtgatttcacctgagaaaataaccagaatcaatccaaataatgacggttttaaattcatgaaaaaaagtgcagaaaaactactatgaaactaaaattcaaccagaaatccagtttaattcgcataaaattaatgttctgacttcaattttcagatccatgaaatgcagatctcaannnnnnnnnnnnnnntccccaaacaatccaactcaagtataatccaaaaaaaattacaatattatactaaaatgtttatcctggtatattttcgttattttctacacttataatggtgaatttgttcatattaaatcacgaagagacataaagaaagagttacatgcgtagaaaacactgttataatttttaatgtttcttaacagttgcataaatattttgctaacagttatttctccagata

SEQ ID NO: 81150 - DNA, 1375 bp, Cannabis sativa
atttcgctgacacagtcctgaacacgccattcaactattagaatcatttatgataaaattataaaaatccaattccaatgaaattttatgaatgcgaagtgacactaattttttaaaaaaacaatagtgaaacagagaggtatcagcattactcaagtcagtcattagtccaaagcctaagagtaaggttgatatcaggatccaagagtagtggacaattgtccaaatcccaagtattgtccaatgcaccaaactagccctaccatctcttcatagctagtaatcgtagggaaattgcaatgtttacagcaaaacgagtatcatgattttggacaccaaaaaggcataagagtatgcagttgtacagaacaacacttggtactccacaaacaattcaatctaccaggtaaaatttataatgttgtgtgtgctctcttattgatagctgtgcctagtacttggtctaaaaacaaagaaaaaaagaaatatcagcatctcacaaaacaatgcatgcagtagaaagcgtttatgtaaccatattattctataaagtgtcctgcattgtttaaatgagatgattacaaaaactacaactcgtcaaagaaaaccagaaagaagataatcttcgattctacatccatctcatgaagtgattgtgtcaagaagaatgcttaccagaagaaagggatccctcccaagccctggaccaacaacaagacaatcaaatctttccatccacttatcaacttcagcaagaactttatccgaaatggattttttgtcttcatccctgaaaacattacttccaataatcagactaattgataatgaaggttatatgcagaaaattgggagggcgaagagataaagaatcacctgacactgtaagactcctctaaaattggatgcacaattatctcaggactgtagctttttataacaggggcagcatctttagtacagaaaacatgggacaaatccgctccctaatgaaaatagatgtttccatacaacaaaaaggtcatgtatagatcaaacaaaacatttctttgttttcctttcaatttcattttataagcgttgaaagagaaatgaaagcaatagtgaagaaaagggaaagagggagcactaacaattttcaatgcagtaatagcagcaaagtatggagcaccagtgtattcacgacaaccacctataacagctatctttcctgagaaacacagagaatcccacaacacattagcataatgaaccacctttacaattgacaagaacatattaaaaatcactgtatccccagtaagtagcattggttatacaagcatttttcttttcaattgctgtcttgacgacataatagcagtacagcaatata

SEQ ID NO: 81151 - DNA, 2303 bp, Cannabis sativa
cccaaccagcattaccggcagctaccataatcaaattgagttgttggtgctcctgaaactcccacaatgcctactgtgctagttcagaagtgccactctttattgtgtcttaccaaacaaaacataatttctatcataccatagccaacacaacatcattatcatcaactcaaactcatcccaagaaagttcaaaaaaatagagcaataagaatatccagttttgggtcattaacatacctacgaattgaagatagcagtccaacacttccccaaaccaaattgagtgtagaataaaaataataaggcatgattcagggtctcggattccttaccacatctcaaacaacgtagaggaactaaggaatggcataatgaaacagacgtcatacaaacaccttcacttttagagggacccttaaattccactacctcactagtcgagataagtcagcaacaccctcatcaaattgaagggaccatgccaaagaataatcgcttttaatcgagtaaatatcgtccctatcaaaatgccaacaccacttgtcaccatacactccactcgccaaaggaatggataagatagcatctgcatccattggaagaaatgtcatctgtgatttcccgacatcccactcaccatttggagcaataaactcactaaccaaacaagacttttaatacgccaaaaggtcacaggctgagagatccatggatcgccaaatacccttacttgtgagtcatcaccaatcacacatctcatgcccttctgaatcaactccaacctccacaaggctagtccaaagatatgaagacccaattctttctgtagcttccataattgagcaatggggaaagtgcttatgctttaacacacgagcaggtagtgaatcaaggaatcgtagtagccgccatacttgttttgctataagtgcctaattgagtagtcaaaaatcacagaatgtaaggccaccgaatgccttcagctcacacactattccacaaaatcttatttttatcaccattcatccctcgccaaaactctctcacaattgacttgagtttgtcactcgtatttgctggtaatttaaacacactcatcaagtaactcagaatagcttggagaattaatttaataagtacctcacaaccactagctagctgagaaaaagttgcacttctaaccccaaacatgctttcacactttctcacatattccctcaaaagtacacttcttatttctacctacaatagttggaagccaaagatacttatcgtggatagccacagacgtcaaccctaaagttcgaagaactccattctaattcacgcgagagacatttgaactaaatgtaattgttgatttctcatagttgatcttttggcctgatgccaactcatatgtttgcagaatgcattgaattgtttcagtatctctaacattcacccttccaaggatgagattatcgtcaacaaaatataaatgagacaccctcgatctagatctagaacaccttaatcccatcaactcgaattgagattcagcttgcgagataagagatgacagagcctcaacacaaaataaaatcaagtatggcgagacaggacatccttgttgtaatcccctagatggaatcaccctccctctcggtcgaccattgaccaagaatgcatattcaggagtcatgacacaacccataattagattgatccacctattcgcaaacccaaagcgttgtataataccatccgaaaaacctcactccaccatatcataagctttactcatatctaatttaagagtcatgaagcttttcttgccattattccttttaaacggtaagtgtagtagcttgaagcctaccataacgttatcacgaatccatcaacctggtacacaaagcactttgaaaagaggagatcaaaggaccaataacattcttcattcttaatgctagggcattggagataattttatacatgacattacacaaactaatggctcgatactctttaaccaacttgggtttttgcactttgggtatcaacactacgtctgacttattgaactactccacataccacccctcattcaaaatagccaaccaaacacatgtaacttgttgtccaaccacatcccaatatttttaaaagaagattgcatgaaaactatcaagactaggagctttggtgtccccaatagccttgaccgcttgtagaaaatcatcggaagtaaacatagcaataaaggcttcattatccatatttgatacccgagactgtactactgttgggttttatgcc

SEQ ID NO: 81152 - DNA, 1404 bp, Cannabis sativa
  modified_base (1371)..(1376): a, c, t, g, unknown or other
accgacctacgtacacccctattatcaccacattagtaaatttattctatgttttaatcatttttactttaggtacatgaacttatattgttaacattttaatcttttttatttttagatttgatatagtggagttgatgttgagaatttaaaaattaattgatcactaatgaccattagttagtggttagatatattgtaccacctttaaaccacacttataaatagtggtaattggtaaccaattacagagaaacattataatatttttttaatcttttattctattgtatttttggatctaatagactagtattaattggttattattaagaccttaaaaaaaagtcaaaccaaaattataatagtaacactttgatagattaccatcatcaataactagttacgattatagatataatagtgtggtagtaactagtaactactatcgactgattttcttttttccataatgtagtcgtatttactattatcgatatatattttgtgtcaaacttttactactataaattagttttatagttttcagtaataagttggtaactagttacaagtatcgaaataattttattatttttattgatgtgtttgtaactaattatccatagcaaaataactcatcactctaataataatcaaatttgaaaaactgaatattactaatagttgtgaacttagcatttaagttgagtgggcgtatttattttctacataatataataggggagtttataacattatactactataacaaactaactacaaatatgttatgaaaaaaacaatatacccaaattaattataatataattaattgattttaaattaaaaacaaatatctctatacccaaataactaattaatactgacaaattttttaatactcattaaaacaatgattaaatatataacatattttgttgacaaaataaatatgtgtataacatattctttattaatcactgtttagatggaaaaatcacaattatatgtactagtactatactataagtaaatatttagttttatatgttttataggacataattacattattaataagtggagtgtgatgttattgttctcaaataagcatgagacctttttatatgtgtattatataaatatcattttattagtagctaattatataagtttataataatatagtcgttttatatgggtaagatacttaatttttatattacattgtaaaatatactatttagtagctagctatatatcatgtaatatcatattaattactttagataccaattagtatcgaatcacattagttacaactaagtattaaatttttagagaaaattacactctataccctttttnnnnnntcctcttttatttttaccctctttttta

SEQ ID NO: 81153 - DNA, 1404 bp, Cannabis sativa
tcatctactttatattattttataacactttcttatttttttttatttttatttttttgattttgcaataaaaaagagtaccaatggatattaatcacaattaaagggagaaataataataattattttgaatagtattgccacatcactctcaaaatattatatcattattttgttagatacataaaccaatataattaagaaatattaaaagaaatttgtggtgctctcttaagtattaatatctctattaatttaattaagtatcgggtggtatatagtttaatataataatttttaagaaatatcagtagccaattgcaaagtgacatatttagaggtgcttagatatcactaatactattattctgtagcaatgctcaataaaattatacttttctataatgtgaatagtttgagaaattttttatcacaacttattgatgagcacaaaataaatcagtaataattctaaaatttatatatatatatatataatatttgttttattaataatcagaaaatatatattttttttttatttaagcgtttatatagtacaacatgtttttcaggaccaccaatactcacacactcacctatggccacttgagctagcctgaagtggttataatcagaaaatatttaacatatcataatatgtcactaaaaaaatatattaagagggaagaacgataagttagagttttctttaaagtgaggtatatggtaagatgtataagttttatttcaaaattaattagaatagtcaatgatcattatatatgtattaaattctaatgcattatcaatgaggacattcaaacaaaaatagagaagcgtttcagctgtgaaaccaatttcaagaactttaaaattggagcatttttttttttttttttgcatagtgtataatattaataagaatataaaaagagttattcaaaaaataagaatataaaaagagaatatttggtttagatttcacttaaattagttaataataaagaagcactttacccatatatctttttttgctggagcactttacccatatatcgaatcctagttaagcaccgacatggtgtcggtgaccgatggcattgttggcttggatctcttaaatgttgtagcaattatggtaagaaatgtaaagttctaccatcacaaccccaatcaatctcctagactaggcccatcgtacttagttcataaatcataatgtatgttcatcaactttttggttaactaaaataaaattatgacttcataaagttctcataaaatgataataaataaattaagggattttttcaaaactatacataaattataaaataattacaaaaataccttaatgaatctcatttacaataataccttgccacatcattaaaaaatacc

SEQ ID NO: 81154 - DNA, 568 bp, Cannabis sativa
tgttcttttatttattttacttgtacaaattcaaattaatttaggtgatagttgagtttatgttttgaaagattatatgtgcggagtaaactgtcaataaaactcaaaacatgtgtatctcacacattaatttttccattttcaatttattgaagtctctttattttttttttgaaagtcaatttattgaaatcttaactccaccatgttatgcccaagtttattttcaaatttacaatattagaaggattgacattgtttagtaggggccaagaaataaatttgaagagcattactattatgtataatggaacctggttagtgattttctagaatattaaattaaattatatgaaatatgatattaaattacattaatataatatctccttaatttctgtttcatagattaatctttcatttcgcatagttggtatctttgattgatagccattaataagtgtgattgtttatgtatcttttagttgaaggtgatattaatttttcttaattaaatacgggtaagttttttgacacgagccgagaagacacgaccacgattaggcat

SEQ ID NO: 81155 - DNA, 1122 bp, Cannabis sativa
gcatggcaaactcgattgctaggagtgttgatacctgtcaactcgagactaacagcaggggtagatgtgtctccagtcaaccccccattagagcgattcaagaattagaactaattcaaatctcttgggcatccatctatggacttatgattcttataagtgtactttgtctttattcgcatattttttgggaaaaactattctaataggacaccaaaaaaaaagatgcattttattagcatatttaatactcatcaatccacttgagacattagttatttaggtttatacatatgctcttagaattatcacacttgacttttctcaaataacgtgagattatacaatttacctgatattttccttgcggatcacataattcttactatcaaatatgtaatactaaccctgactctaccattcgaccatgatcatgactcctagttgtctcctaatccttacttgatgcaggagacggacttgaactccaaccctgatctagactcaaactcgaaactaaaaccaaacctagacctcgaaccttgactttaaccctacaccctgcacctcaaaccctgagactagatcccaaccctgacactgtaccccaacttcggacccaaactctaaacttggatctgtaattgaaactcaacagtgaccatagtgtaccctagacttaaaccttgaccttaaccctgacctgtgacccgaacatcgacctcgaccctctataccaagaccaaaacccaattccaaccttaattaacactgagacaccgaccttgaccgcaatcacaatttttctatgatacaaacctaagttcataaatatacttcaatacaaacgtatatagatcattaatttattatgcattgaataatagaatttgtattctattaaaatttatgaacacaataattaaacgatgccaaattcaatccaaatttagttaaatgattatttaatttaatatcctctttatatgtcatgtcaaagtaagtatataaaatagtatgactttcataaaactaaataaataaatatgagcaatggcaccacaattatattacaatgagaattgccacaatgaataacatctttttttttctttttctttt

SEQ ID NO: 81156 - DNA, 1004 bp, Cannabis sativa
tgtgttggtagaagaatgtggctgataaggatgttcatccacctcactcaccacactacataaaaaatgggagtttgaaattttttgctatgccattgtagtttacatttttactaatgcaatttataatttataattgtaattcaaaccacaatgtatcattatatattataaaaattaatgtttattttttcaatgaacaactcatatatttacaaaatccgaatcatacaattaattttttaaaaaaaaaaaaaaacatccgtataaattattcttattttttattaagataattacggtctccaaaaagtttattttgatacaaataaattcctgtttaccgaaatttttggaaactaagaggttgtttggctttacagtttaaaaactgtaatctgttttttaaaattcctgaaaacagtttttaaaaagttactttgtgtttctcttaaagaggaaagcttggagcaattttagtagagtttcagctatctatgttgtgatccccacttcgtatggaaatataagggtatttataggtagtgagacgggtatggacatgcccatgacccgcctagggtttctgctcaaagccaactaatagggtaaattacatgcaaaaagagctgactattggggcccttggaagaaattgggctcatgtgttgcagcagctggacaaaaggggaccattgtacgtagtggacacatgtcgccaaaaggtttcaccttgaaaagtaaaggtctggaataactgtctggcaaaaaggtgtatgcagtacgcactgccatgtctggacacaggggagaagatctgattatgtgtcagaaaaaatataaccgtcgctaggagttccgggtttgtgttcaagatagacatctgcgatagttttgggtgatcagcattcgcgataagccctttgagtacccatcttggtaccatgtgggcagtggcggacccagaatttaaagtgatggggggcgtattttttttttttttt

SEQ ID NO: 81157 - DNA, 559 bp, Cannabis sativa
  modified_base (27)..(48): a, c, t, g, unknown or other
gttaaaccaagaaatgccgttagatannnnnnnnnnnnnnnnnnnnnnatatatatatatatataatgaagctttgggaccgattatagatttaaaaaggaagatgttaggtcaaccccaatttatatattggggacaaaaggttttgttcaagataatgagtcaaatttgagatgttttgcagacatgtcaaatcacccaaataaaaaaaaaaattgtgctatgctagagtcttggtagagatcacaatgggtcaagattttcctgatgtgatttctttcacgaataaactagataaagaggtaaaagtcatagtgaaatacgagtgaaagtcgattttgtaggggtgagcaacggttggtttggtcggttttttatacacaaaaaatccaaattcggttttcggtttttatgattataattcgaaaaccgaccgactattatacaaatgtaaaaaaactgaccgttttaattcacggttaagaccaagccgaacttcttttttttttaaaaaaaaaaaaaacaaaataagtttttaaattttgggtaaatactattt

SEQ ID NO: 81158 - DNA, 846 bp, Cannabis sativa
tatatatatatgtcatatcatatcatatgtagttatattctcatcccaaaaaaccacacacattaatgaactgtttcttgttcagtatcaactgtccctttacctctctgtcaatattgcagattagaattattaatgatccatcatcatgttcatatgtatctaaactaaattgttatacatgtttttaaaacaaacaattgaaagtctattattccaaaactacagtcaataatccaaacaaatatatacgttaattgtaagagtagtactactgcatgcaatgaaatcaatttcaatttgtatatttatatatatgctaccattcttgttggggtgttttccaaaaaatatatgccatttgtttttaataactattttttttcttctttgaattgtaatatttgattaattccacaatcaatttagaatttttattttattttttatttttaaataaattaagtaatttcatctcctccatcggaattacgatcagaattagaattaaaaaaatgtatcaaataatcaacccgaattaatgtccataagctttagcggcctgatgatagttgggcgaattgggatacgagactcctggatgttatgatgaattatttcaggaaactttttgatccttctagtatcgaagccactgaggtccttaatgagattccttgttcactaaataatgtgcataacgaggttttgttgaagcctatttccgatgaagaggttaaagaggctcttttttagatgtatttagataagtctccaaatcctgaaggtatgacttctcgtttttataagtaatgttggcatgtagttggggttgatgtagtgaaa

SEQ ID NO: 81159 - DNA, 1274 bp, Cannabis sativa
gtaaaatttgagttttacaaatgcattaacttttttgctttggtccacaactgtggcaaatatttaacatcaacttttcaccgaagcaaaagagattagcttcaatttttcactgatgcaaaatgcaaaagataattttttaaattgtcacattttacctcggttatactttttgcgtcgaggtacaagctgacgctaattgttatttttttagcttcaggcatagtctgaagcataaaatctccccttaattttttgccttggtcaaccattttgatgagacgcgtttaccgacgcaaaagtactttttgtagtagtatccttgtggaattggcagtacttgttcgggtcattcttggccatttctttccttatgggtgatgctcatttgtcatgaaaatatgttcccaagagtaagtcaactctgtgtaatgggtgtattcacggtgttgtggctctgcttctctcttgaccttcttgctttaaacgtcttctttgtgcccaaatcctttttttcttgcacagttccttaccaagcattttctttggttgatcactctttcctacacccaagttctcatgcccatcctccactaggatgtacttgttggctctttcatagaagtcctccagatcatccaactctctcttgaccatgttgttccataacttactttttggtctaactccgccgactatagccatcttatgtttgtctttggacaatcttccaactttatttgcctcattgttaaaatgctggatatatatagcttttcaagatttcggtctctccttacttaatattggccaaactcgtccttggaatgatgtagttcgggaggcatggtgttgggccaaaaattcatcagtgaactgcctccatgaggtaattaagctgggggtcaaccttttaaaccatttgtatgtcgtgcccctcagagtacaacaaagcattgacatcttgcattgcttgtaactctctttatttatggtttcattgaaggcgtccaaatggtattttgggtcggcaattccttcataaggcagtatgttaggctctttaaaattgggaggtagttgtttagattgaatatctctagagaaaggtggctcatcatcaaaatcatcctcatcccaactaccttcctccgatgcggcagacactattcttcgtcgaaggtcttccgttttttgtcaatctcctacctccttctgttcaacttttcccgaaggtcaggaggagtgtgctttggctcatccttatggcaggg

SEQ ID NO: 81160 - DNA, 2373 bp, Cannabis sativa
ttaacaggaatatgattacatattaccctacacagtcaaacatagtttatacatttccctataatcatattctccttcataatattccctaaaattaaattattttgaacacctcgtactaaacaccccttattatacaactaatgtttttatccctaagatttgttgtttacaactttaaagggacggcaaattatatatatgtcgtgggttcttcaaggacacactattttgatgttaatagatatactaatatgatatttatatatatttatattattagatgtatttaagaaattaagaatttaattttgggaaattttacaatgtatttttttaaaagtgatgtattgatgtacttttatctgtttcagcactcagatctcttgtaaaattttatgaaattgaaaaaaaaaattaacacgccaaaaataatacctctttaaaagtagcgcactgatgtacttttacctgtgttgatattctagaaacttttttagtatattttttttataatcgtgtaaattattgttatttaagacatgcaaaatttcaaaaaaaaaaaattacagtattattatttttaaactaattattatgtttatttaaattattattgagatataataattgttgtgatattgaggtataataattgttgtgatattaattaattaatataatatattttactaattaaaaattaatataataataagaaatatatttttagtctaatttttgtattgtgattgaaacaggaatagtttttgacattaaatttaatgttactcttcgtgatgctagtagtgtggatggtgattatgtatgtgggagacaatgatgaagaaaggtcaatctctttttattgttattaattgaagatggaaaagaaaatgacttgcatattgattaaagtagtaagcaacgaaacaatattgattacaaaatattataaaactctaattaattcatctaacttaattagcacaatatttttattagagattctacccgaattaaataaaaggagtacgtgttagttggtaaaaaaaaatttatttatatatatatattttttttgtaaaataaataatttagtgtgattattaaaaaattagttaaatttatatttagatgataaatatattaagatatttctgtataaatgtcaattaaagtccattcacttgacaggctgacagttatagaatttaggtataattacctaagaagttaaactttgataaattttaaagataagttgtaaatatatatctcatttttaatattaattaaaatatttggagtttgaatttaaattaaaatattacaaataataaaataaaataatagtatgcaaaataataattatatattgaagattgaattattattataattattaaaaaattagttattaattataacttttttaaattataaaaactaaataaaaaattgagaaagaagaatgtaatattttttttttttgagaaatttgtactattattataaattaaagaccatttacaacaatagagaaaataggatgagaaatttctcccatccaaatgacatcttcatccaactctagaacgtactttgctaacccatggaccgcttgattaacatgcttacgaatatgcgtaacagcaacttaagggaaaaaaaaagagaaaagacaacgaacatcatctatcagatccgaaaaaacaagataaatctttacgtggcgaggccaaagcagaagaaactcataaagcatccgtttcaacttgtgctattgggatttgttgttgaaaagcccaattaagactatgaaaaagtacttttgcttctattttatcacttctaaaatgatcctgaacttgtttggataatgcagcaacaactttcccttcgtaatttcgaatcatctcttctagacccaatactttgtctatagtgttaacagccgcatctacattcattttaagacaattaacgtctggcggcttccacggtatcccattctgcagatttgtgttgggacctgcagcattatattttgaaatattttgctggtgttgcagatcacactgatttttggcaatgttgggaatgccctgcccctgaatgcaacacatttgtgttacaatattttgctagttttgcagatcatgctggttgtagcactgttgggacggtcctggatttaaacattgttgttggtttagtgcagcaggatctagtgcattggttagttgcagtataggttgttgtttctctctgcttcttggtttagctaaacggtatttatctagataggttatagcttgagttacaagagcagatgcagcacgacttgttccaccatgaagtacacaattt

SEQ ID NO: 81161 - DNA, 1312 bp, Cannabis sativa
attaaatgagatattaaattttgcatcatgatttataattatgcattggagcataatagtaaaagttgatgcaaaaatgtcacaaaatcatattttttgctaaatatagatcaatttttgtatttccggttagagatgatcttatattattagaaaaatataaaatatcaatggaagaataaaaatatgagattaagataattacaactctatgcaaaaaatttaaaggactaaaatgaattaaataaagtgttacaaatctaaaagctcaaaatacaaataaagagaataggaaaaagtagaagactgagttataactcaaaatattaacatacaaataactattatcctcgaacaatgacattgataaaatttttgctcacgaatcacttttttttttttggtaaataatttcccttaaatattggaagtaattgtaaacttgtttgtcccttcaattgtatttcctttatttttgtaaataatttttttgatgaaatagtgaccagagttaatctactgtaaattttttaatttacaattatttccattgttgtatgatgattttttttttttgcaaaaagttcaagaaacaaaaccatgcaattgcaagtgtcacagtttggggtactatttactctataaaatatttgatgtgttatcatctttttaattagagtgttcatccaatccaaatcatctttttaattagagagttcatccaatccaaatcacattatattttcatatttagtaggaaggaggaaaagtaggatagattaagagttgtgaaaggatggagagtaggaggaatggagaggatagttactctctttcctattatttggtatgagaaataaaattagaaggataaagagtaaaataaatattgaaagtactattttatcatttttagtataattatatattttatcttgaaagttagaaaaatcattttagatagtttttttttttttgtctttcttcaattccccaattttttgagggattagaaattgtatatttggagggaaatggtctcccccaccaatcctcttccttcctttctccctcttgccaaacaaggaaattcatcaatccctttatccccctccctacctcctcttctccactctatcaaacatagtgtaagtgcggagtttatattttggatctaatccaatccacacaaagctcaaatccaattcacaaaactgtggattagatttgttattttaaattgattatttttcaatattaaattatttaatatttatttaaaaatatatattttcacataactaacaacaaa

SEQ ID NO: 81162 - DNA, 1432 bp, Cannabis sativa
atcagatgattacttgaaaatggaaaaatgtattgttcaaggaaaaatccatgactctccaaatgggaaccttttagaaccaactatgtaatgaccaaagtctctagctgaaaaaaaacaagaagatacttacattgcagtcaaaagcatattttctggcaagcgtaatagctgcattcctatcccgttccgattcaaatgttaacatgaatgagagcccctttctcgcttgccaaaacaatgttcttgctgcagtattactttcacctctgtagccgcataacttaataccagaataaagaaatatgtgagattcagtgaaaacaatatcattacaccatgctacaaaagtatcactttaactgaatgggtaaaggcttgaaagtgaataatttctatctagtgatgaaatatcttaaaaaaaaggttcgagagaacagggtcaaagaaaaaagaataatacaatttccttgcatattcgccaattcactttctttggctcaactttgtgtgaatcactttaataactatacatggtatcagaatgcagaatgcagaatgccgaatgcactaagcgaccaagcacatcataaactagtttcaccattcccagtccaattatttgttgactaaatgttacaccttgacctcaaaatatacctgcattgttgcagaataaatttctctagcctttgtaatccaccctcttgaaagcttcattctcatctttccaacatgaaatacatgtacagaattcgatgaatagttttgcccattcatttgggaaatggtaacctacaaaaacaaatgtcgggttagacaaaaattgaatccttatgcatacacccagggttggccaaacatccatctctattttgtcaatacctgcatataattttctacgacaaatgaacagaattgtttttatgctagcattgtagatcatattcattgtttttctctttttcacaaagattacgctataaccctctatgttaccctcttccgcacaacctccaagcaacagctgataaattagcaatcacttgttgtaaacaaaccagtgaaaatcttgggctttcataatcaggttggaagattatttcatggaagcagaatgtagtgttctaatcgatgaaaggacatcaaaatctctgagtaaaattttgtctgtcaacacacttaatttgattattaatgattgttcagtcactttctccaaaagtttaatatcccactttagtttgtgtcgcgcttattcctgattaatgcatgtgaataatcactaagtatacatatagtgttaaagtgtggaccagcagagttacagcatactgttgtttagagttcaataaaatatgtactaaggacaatcagaaagacaatcttttcaaagtgattggagaacggttcagaatcaaaagcataatca

SEQ ID NO: 81163 - DNA, 1088 bp, Cannabis sativa
  modified_base (41)..(53): a, c, t, g, unknown or other
  modified_base (352)..(354): a, c, t, g, unknown or other
  modified_base (1049)..(1063): a, c, t, g, unknown or other
attttttggaaaaccgtaaaaatgtaaaaaaacattctttnnnnnnnnnnnnntaaatattttacaaaaaatgtaattattcctatcttttttccctcaccaaattgagtttgtcgtaaacggtgcacaatacaacaatagttattttatgagttatttttaaatttaacttattttaaattttatgttagattgtttaattataatttttttttattttaaaaataatttttaaatataatgtaacatttttattttgtcaagaaatttaaatttcatgttatgcttagttatattaatatatgatttttttctaaaaatttagtgtgataatatttataattaaaataannnatatattaaataataatgtgagagatcataattataacatttgtgaaatgtgctatattattggagtgtttttattagaagtaagagtacttaaaaaagtgaaagagaaataaaataaaatattatatttttagatgatgcgaagatatttaacacatttaaagaatgcgaccatttgagcatctcgaatgagagttgcttattgaagttgtcataacacatatataatatggttcaactttcaagacaagttttgagaatatagatgttgagtattgtgcaaaagagacaatatccatatcatttttctatttttttttttttaggaaaataaggtttttctaccaagaaaattcattaatttaataattaaaatgtgatatgtgggatcatagtgaacaatttacgaaattgtcaattatttgagtacaaaagtatatcaaatcttatataaatgaaagaaaataataaaataaatattttagaataatgtgttgccctttattggagatgctcctagaatgctcctagagcactctcaagtgatttataatagctaaaatctcaaaaaaaaaaaaaaaaaaaagaaataaaaatatttaaagacttaaaattgatctctgctctaaaattttagctattataacttattctaaactttaagtgcttctttggaacgtcgtattaggtcgtannnnnnnnnnnnnnnttgtattgtattatattaaattgta

SEQ ID NO: 81164 - DNA, 1692 bp, Cannabis sativa
taatacaaagtctagcaccaaaatagtccaatggcacttgactgccacgtcagctaccactgcctgccaagtaaggaagtttctttctctatatttcattctcttctctgtctgtacggactaataacgcctcctccttcttcttcttcaccatctttcttctttgcatttttctctctttctgaatccatggctgccattgttccttctcacctctcacttcaacaacccaaaacttcattctctttcaaaacccttcaaagccctactccagctttcctcccaacaccctcctctggtatgtctttcaacttttattgttctttaattgagttggcattttgatgcgaaaagatttgatttttctgtgcagaacttcgttttggggtgaaattaggaaatgggtttgcaccgaaagctccaatggctgtcgtggaatcgaacatcaggtccacggtttcggacaagaaaatcaacagtcccataattgtgattgacaattacgacagcttcacctacaacctctgccaggtaacctctttcttatgattctgtatctatgaagtttgtttgtgtttcgtttttctgtcttgtcaactttacagctgctctggtgtcatgaatgcttttttgtttttttgtttttacttgctgtttggctgctgggaaaatgtgataagaaaatttgagatctggaaaccattttacatgttggttttgatatttagggactttaattggtttaatgtgatagttcttatactgggcattgttgattgtgtgtgattgtggggatgattctccttgtattgtataatcatttatttcaatcatgtaaacttttacaattatactctgttagaagttcttgagagcttgggtgagtaggtattcatgctggtttcactcattaaaggattgaaagtaaaatcattcataagtggaggaagaagattaaaataaaatgtgtttgggaaattccaaatagtaagatgatgtcttgttttgccacaagagaattgtgttctggtattttgattgaagttgatcatagattagtggctttagttttaactttgttttacttcagatgcattctcctagcatattgtatgcacacaattcaagtttaatttatgcacaaatgttaagacaatatcaaagttcaaccctttgagtattatttagatgctttcaacttctccttagcaaaaaatgagatcgagattcgttaaatgtgattgatcataatgaaaatattggaaatggactaagtaggtgctacaaaatgagtttcttagcatctagtttagtcttaatatgtagacattattttcttccaagaatcatatttattgtgaatgaaagcattagctgagaagtatctaggaaacttttgaagattcataaatggctaccagccaaagaatgactaacgactttctgttaatacaatatttgagggggattcactcttcatttataaaagataagttgatatgagaattttggttttttgtacttgtgtcaagttccacgtgctctttattacgctgttagaaccctgtttttttcttttttgtcttgttcgtcgcctgttcaattcgctcctttgtcgtttatgataatagttcgtgcctcttggaaacttttttgtgtaacggttcttttgttggtcccatgaatccattt

SEQ ID NO: 81165 - DNA, 2186 bp, Cannabis sativa
agcgcaccgaaggaaactgcaaaaccctcgaagacgaaaccttcctccgtcttcttcctcccacgaagctcatcttcctccttttcttatttctctcgatctcgtctctctcatctctctctcactcgcactcaccattccttcctcctccttcttgttaggtatatatatacacaactaaaaataagctttagaggcagttttttaggattttcagcattaattttggcaaaatttactatcaacgctatttcaagtgatgtcgtagggaggagcattagccgacggtctaaggggagcctatgtcgccagttattatgcaataaccgacagcatagggggtcctattgtataatgcagcctctatgtcatcaactctttgctaataaacgacatcgtaatgttgtatggtgtcggttattagcaaataaccaatataaggggttctgcatatttgtatttttttttataaaaaattttctattttcacatatttattttcattaatttatttaaattaaatattaatttaatataactaaaaattaaattaaccatataactaaatgtatatatacataaataaatatatcacacaaatattttaaaattagtcagaattcttacaagttattatctaactaaacatagaaaaataagagaaatatttttacaaattatctaattaaacatagaaaaaaaaaagagaaaaaaatgcgtatacaattcaacatcattgcaagccttcgtgcatcactgtaagtttttgtgaatcaccgcaaataattattctatccactgtcgttgtaacactacgactcaatttttgcatcgtgtgtcttcttttccccaaactgtaagaagaaaaatatttttattaatatatagattatattatttattaataaaataaataagataattaaaacttacaacttttacttcggttaagtatctgtaaggatttgcatatatgacaatgtcactgttgtatttcaatacacaaaaaccacatttttagtttttaggttgttttgggtaatttgctactgatattcctaaatatgcctcaatgaatgcatttgacctccctaatgtctcctatgctctatttgtacaattatattaccaattcaattaattaacatatatacttaactaattaaacatcattttttggaagagcttacgagagttctctgggcatactggaccacaaaaacaactttaacaaggcacaccttactcatggatgcgaaggaatcattccagttaaaaacaccattccttcacacaaacgagaaacctatcacctaacctagaaccatgctctactccaagagtatttggacataatcgaggagctctgggaactgtctcaagtctacctaaaaatgtatcaagaaaagattaccaagaacttcaattccaaaattaagagtcaaacatttgaagttagagatctcatcttaagaaagatatttccaacttctcaaggaccaaaagtaggggtcttaggacaaaactaggaaggattttatgagattcaacataaagtgaataatagaacgtaccaattgcaaagactggatggactagagactccacgagcatggaatgcaaaccacctactttaatagtattagtgaattggggtgtttggatccaaacatctttctctattggctgtatttttgtatttttccttctttatgtatgcatgcaggcacaataaaaagagattagaagaaaaattcaaaaagaatgcactttatttttgttttcaagctgcattttaaataattgaccagcaatttagagacatctgaattctcaactcaattggtgggtaggatatacagctatgtacctctaaaaatatagaatacctttttatttttgtatttaaattttgccatttatttttattgtcaaaacttacggaatgtggaagtataaaattttgcctaaatttaacatttttagctattttctcaccatattttgagacgagtaaattcatcatgcatcattttgctttgttaattaaaaatatgggaacataaatctcgcttgaattttagaacatttttagtctttttcttatgagtttttaaattaacgaacctcggtgaaattgcaaattaatattaaatttagcgtgaaaaaataagttatgtctggaa

SEQ ID NO: 81166 - DNA, 2179 bp, Cannabis sativa
  modified_base (565)..(566): a, c, t, g, unknown or other
ttttccttttcttctacttcttcttttgaactgaaaaaaaaccctagctcatccatccaccccagccacctccccctcttaaatgaaaaaaaccctaacacccagccgcctctttttcctctcgagctcagtagctccctcgtcgttcacagtgcgagtctggcgagtaccactatcgggaccaccggtggtctagtattcattctcaaagtgggaatcgagatcatgaggtctctagctcttccctttcattttcatgaagaaaaaaaacagaaacacttaaaagggcgagagaaaaatcgaaggagagagagaagagggcagatcagggttgtgattttctgagtcgtggggttaaattctgtggcatgtctggcatggggtggttggagaaggctggtgttgtgcactgtgagagagagtgtgttagagggggtcgaagaaggttgggtcgtggggtaggcggctaggtgctaggatttttttagttaagaagaagaagaaaagaaaaagaaaaataaaaaggaaaaaaaaaagaaagaaaataaaaaaaatatattttttnnattttttttatttttataatttttcaattatttttttataatattttaataattaatattacgtgggccactaaaaatttgacatgtgtacatggtacatgtggtcagtacactgtggtacttaactgtgattttagacggaggagtacaaaacaaaacggaatgggagtttaggtagtttgacccctaaaaaattaaattttgtggttaagtgttaaaaaatataaagtttgggtgattttaccgccgatatcctaaaaaaaattatacagaccaaataccgaaattatcctttaaaaattacaaatatttatactaataagatactatactaattttaataaataactttctctccattttcctacctttactcctaataccaaacaatacaaggaagagttattatccatataagctaggtaatatagtcgtctttcatgcggtaattttaaatatttattttcgtgagttacttttgatattttattttttttttaattatttattaattatattttatattttttaagttattaattagtgaataaaatatttttaaaatctaaaatgataaaatagaaatctaaatttaaaattttaaaatatttattatgaaatcacttagataattttagttgatatttattatgaaattaaatttatacatcataaatatttttaatatatttcttaaatctagttaattgggataattttttgttttctttatgtatttataaaaacaaacacatcaaataaatcaaaacaaactatttatttagttgattgatacaataaaaataaacaaaaatatgattttaaaatttgtgtaaatatttaaattataaatgtttctaactaacaaaaaaaaaataaataataaagaaccacgattcttggatgtgatttatcaaaaatatgttgaactctacaaactacaaaatttgatgtcatatgaataaagaagttacaatacatttaaggcaaaaattatattttagctatgtaaattgaaacacaaaaagaagtttaagtcattgtcattaccgtagtatacttgtaaccgctacaatactcaaaattattattataatcgtatctcacttataaatcgttcaaatttattattattgtatctcacttgtaatcgacgctacatttaaaactattattatcaccagtattgaagactgaccaagtattattattaaaatcaatataagaaaaaaaaaatctatttcaactaaccatatataaaaatattataataaataagattttttaccccaaactataattagtgtacttctatcttctatcaaataaaaaaaaatacataaaactcatattaaaattgtttattaaaacatttatattattaatcttgacaaagaaaaaacatataaatgatattgatatatgaatatttcccgtcaaaaatatgtgtgtataaacaaagaaaaattgttagtaatttttttatgaggtactgtaatggattttgtaaacataccaacaaacttagaataaaatatttagaaattgagagatgtatggtattaaacttaagtaacaatagttcttattggctaaaaaaatataattgtata

SEQ ID NO: 81167 - DNA, 767 bp, Cannabis sativa
  modified_base (713)..(720): a, c, t, g, unknown or other
ggaaaacatcaatcgcttttatattttatgttatatgagctgtctccgaatcgtaaatgagcttacatatataataatgacacgcgtttttcatgagcactataattattaactaaatattagtgtagtataatgtcagttggtcatgcctggttaatcaatagctgtgtgtcgacatacatcaacatacatcaattaagcatatcttactttttttttttttttgaagaaatatcttactttttctttatctacaaaaattatgccataaatttttacattactttcttgttattttatttcagaaaaaaagttatgtcctggtagaaaaggttcattggtttataatacttagaagtttattttattgtagtgaattgtattaactgtataatactattttaatacaatactagtttaatatgtaatataaaattatactacacttctttcaaaaaaaaattacacttggtgtgcaatagcattgtatattttatatatattaattaaaaaaataatattttatacattactcaaaaaagtttcacgcccttaaacttcgtccctgccccttgaactctgtccctgcccttgaactccgtctcagacatgttgcgataatttgcacacacaagtgtacgtaccgtttcaagtagtagactcaccagcagtgaggtcgaccccacaggaagtgtagttaagtacgttaaaannnnnnnnttacttctatttggttaaataaaagaatagaaaagaatgaaaaataa

SEQ ID NO: 81168 - DNA, 3710 bp, Cannabis sativa
gtgcttctattcactgtttttggcacatgtaataattacactacaaaaaaattaagcatattcactgaattatgatttttgtaggattttgtgtcttttaattttttattgctgggaaaattttctaccgatgtatataaatcattacaaatatctgttttcacatattttgtttattttttttaaaataatttacttatagctataaattacatgtataattacagtaaaagaatttatttaataattttaagttaggtacctaaaatttaatttattaacattaaacatataaatattaattctaaaaatatatcatatatattttcataaacaattatttagactgctattttttttattaattttttgcttggactcttaaaaatttaacatcacgttaaattgcttacaaaaataaacatgtaacagcaggaagatatttatagtgatttttgtacagttcaaaaagaattttcgcagcaaaaaaaattcaggacaaaactaccctataaaaatcatagttcaagaagaaaattgtctttattcttataaataatatgtatacgttattattaaaattaaaagacaaaaaagtgggacgaaactacctaatcttttttcaccctattcctatagtctctcaagataagatttattagagtttcaaacttaatattttcaaaaaaaaaaaaaaaaatctaaaatgaaataataaaacattttgattggctcaaaatatttataatgggtagcccacgaaacaattgttactaggggtaagttgaaaaataccacttttattaatcaattgatcaaatttatctctaattttatatttaattgaagcatacttatttttatatgtattgtacccaaaatacactgacataagagagtcacatggagagtatcttatagtgacaggggcaaaatttgttcaatgtttaaaaaaagaggtaaaaatgatagattttaaaaaagaaagtaaaaataaaatataacaatataaaaagagtatagaatgtaatttcctcttgttttactatttgtgatgccctttgattggatattgcttgcctagtccaattactgacattaggcctaagttgtgtcaaagcccaatttatgaactttatgataaagtgggcttattgaagtcatctcccacttactgaagtcatctttaaacaatgataaaatagagatttttacaaaaatactggattttgagtaaaaatttacaatttaattgttacacgaatttttttaaaaaaatactatctttttatataacactgtaaaataacaaaatagaataattaaaacaacattggaacagctaaaaaacaaccgtgaaaacttaacacagtacgcagtataaaacttacataatatttttaaaaaaaagttctgcttcacagtagaaaagtaaataaaatagaaatttcaacgtgtagtgtaaaaaccccgataaattattcatttctggcagtggcttgaagatcgatgggttcaattttgggccacttgttctcttcacatcactctttgttgggaaggaacccctcttattctggctgttccaaatctgacccaatgtccccatttcaaaaacacatataactcaattggcttcaaaatattagaaagacaaccaaaattttaagcaagaaaaatatagatatgaaaatcagcatatatgttgaaatataacattcaatgagctatagtgtggcttaatttgatgccaaatgttagatttaagtaggcagatgttttttcttcattgaaagagagacatatacattgagagaataagttaagaacttgtaaccacccaccttaatttccattaattctttattggttatgaaactgatccaaattttttcatgctttttttattggtgaagcaaaagccatttcctacatgcattaccatggcccccaaaccatcaacaagaaatggaaaaaggagagtgatcatcgatgcacaagcacattaaatgtgtgggatctagccgcaagagcagggttggtcctgaaatttagtaggtcataagaaaaaaaatatttttaaacccttattaagaattttttttaataatttttaaaatttgtaaaaacgaatgtcatttttaaaagggaataatttttcgagcctctgggctaggtgggccctaagcataggcctagcccgcctatgctcaggactgggcctgcccaagagaattgttgagccttattaatatatatatatacattggacatttatttaaaaactctgtgatacttttaaaaattactaaaacatatgtgtatttttaaaaagattgttttagcgcctctcagttgagtgagtcctagatgcaagcgtggcacacgcactttagcccatggtcagttatgcagtacggtttccagttttgagtctaattcagaccacactgacaccatattatatatatactaggttaatattacgtggatccacgtatacttagttatattatgagttttttttagttatgtctatttttagttgtataattaattttttttatgtgtgtggatgttactaaataaataaaattaattttttttattaaaaagtgtttaatttaagtgttatttataaaaagaaaacattctaatatttaaaatttgttgttatatagaattatgtaaaaaaaaaaaatgtttagaagtgtaaaaataaaaaaagcccaaaaataaaagagatatgtacagtaaatttaaatttaaattttaattataatgttttaaaaaaataacatttttatcatataactacatttaatataacataataatactatatttaatacatttaattactaataaataaataaatttaaaaagaccatcataaaaccacatatagattgcaaccttgtgtttcttatggagttgcaattgaattccagttataaaccgcccataaaagttgacattttgttttgcttctttaatcattatatatgcatagaataagataatgtgatgaagtgcgactaggctgttaggtttaggagttgtgttagagttactctttaatataaaagaattacatcatattattttttaaattttatttttacagtttgagttgttatgttaatttaagttgcgatttaggtcaccgatggttgttatgtgggttcagggcatgtctttatggtgtgcaagttgggctactccataaggcctaaaaaaataaaggatctaatatatttttttaagagattattacacacacacaaaaattacaaaaatactattgtacggaattttaaatattttttacgatttttttgattttatttacagaaaatatagtctttttatgttgtacttttattaatttgttgttgattttttgttattgtatgttattttttgttgttgttttcatgttttttggatattattttcctgttacttttatctaattttcttgttattttagtgttgtttttatagaaaattataaaaatgtaaaagaaaaaaaattaaaacgtaaaaatgtaattttttttacaaagaattgtgttttatataattattctttttttttaatgctttttagggtttgtttttaataaattaaacttttcaaagggttaacaacttgtcatgattgaccattctattctaattcccaaaacctattttcaattctatta

SEQ ID NO: 81169 - DNA, 2113 bp, Cannabis sativa
ataacaatgtttcacatttgaatatgaaatatgaaacaaaaaacacaataaaaagtaaaaatatgtgtgaaaaaaaaaagaagaaaaaaatatcaatattaataatggttcctcaacagatcaagatcttcatcctcatgtaccttctactcatcaactcatctttttcaggtaattaaaacttaattaacaactctttaattaattgttttcctatattttgaaatatatatcatcacaaacattaaattaatttatttattaattatttgtaattaataggagcaaacaattccaagagtattattggtatggagctcactaattacacaccaaataatcaagatgaggtatatatatatatatagtctctaaacaattttattaatatttatacgtaataattattaggttattaattattaattaattaaattaatatatataggtgatgatgatgaagggaattaatagaaaactactgatgaaagttgatgcaatgttagattatcaagacccaggagcaaaccctattcatgatccacgtaaaggccactaatcatcattattattattaattagtggtcattaattattattaagtacgtttataattattatcaacttaatcaataatcatgatcagggaaaatgctccttttgatgtagcagtactactgatcaatatatatataaacatattattatgaacttataataattatatatatatatatatatatattagtgcaagtactatatatatataactatatatatatgtgtaattaattagtgagagagtgatgaattttccagtgtttggtgtggatctgattatgtataatgtatatatatatatataatgatatataaacacatgcatatttgtataattaatggagatgtgaaattaattatcatgtttttgcttatataaaaatatatatttaggcttatatttatctgcatttaattatttatagaaattatttgattttgtattagatctagatattaattattatatgatcatcataatataattctttttaaatttttcttattttattatttttttacggaaaaattatttttgattttttttaattgtaagattaatttttttttttcaatattcacaaaccctaaggcacaaaacaaaacacacaatgttataaaaaaaacacaaacacatgtgaataaattttatggtaaacttataatacactccttatataaaattatttaaaatacatattttatacgaattttagaaagatacaaaataatatgaattgatgtattgcaaagtcttataatgatcaagattatataaattatagtatgtctataatatatattattaattattaataaaacagcttatgataaactttattactaattaatcaactttttttcctttcaatttatattctaatccattaatttcatctatgtaatgtattacgagatgtttcgatattaatattctgcagggttaggaatattatgttgaataagaattagtatatattcacacacaactttattgtaaaaattaaacctaatttagaggaaattattatatatttatttatcttggaaaaaaaaaaagagaacaatgcatgtctttgataatgaagtaaaaccttcaataagccaaataattaaaataaccatataattagtattctattttatatacaagttatgaaatgaatatgaattttatatatttatgttgtattttttttatttttttttgaaatcttttggagaaaaatatacaagtaaaacatattaagatcgatcacttatataaatagataactgcaaattaatgtgtgccacgatggatagaatcaaattttgttttgtcattcttatccacattatgtaattatacatatatatatattaatataaagtatatgccttaatttgataatttctttcatggattaattgtaatgactaatattagaatttgagaaatgatgaatgaggttccattttaaaactaattagtaataggaggagtagtccattactcttatatattctattatctttccacacattgacaatgtgggactctctaacatcc

SEQ ID NO: 81170 - DNA, 569 bp, Cannabis sativa
tagtacgaacagtagtatgacattgaacagtttgtaactgatcactagctgaattacaattgaaccatctagactcagtgtgactagtaactgggaaagtagtgtttgagctagacaagagagaatagagcccatccttaagctgtccttccagaaggagctaacttgttgtctcatccttaataagataattattgacatgaaattcaacaaaaacatcattatcgacggtgagcttagaaatactaattaaactctttttaatattaggaacacaaagaacattatgaagattaacagttcttaggtgatgatgagaagatagagaagtagaaccagtatgagtaataggaataagctcaccattggctaccataaacttgtctgaaccatgatagtcattctgcagagtaagattgttgaaatcagttgtgatatgatatgtagctccgctatcagcataccaggcagggtcagctacagtttctggagaagcaaaaagagcagccttggtgctgctatcaccatttgtggactgagaaggaggaggttgaggagtgagaaccttg

SEQ ID NO: 81171 - DNA, 3183 bp, Cannabis sativa
tatagaggatcattgattattatgattatcacaatggataactgatagcgtatctctatcgtggaacatacagagcgttctatataagtgagagtaaaccatagattgaatccagctcatttcaacacgatcttttcttgtcaaacccaattcaggaaaattcttacgcataacatcaaggagtctaatagtgtctcaaagaaaaagagcttggtaagaagtggaaatagtcttttgagttgtgttcttgcctttattaaccgattgtataatcactcttatgaatagatatcaacaacttgttgccacctatgaagaagcttagctgctccttgctccaacgttttactaactgtagcaactgtcacgttggctgaaacttgtactagctttatcttccaccataatatgatgtcgaaactagctccaccaccacctcttatggcccaaaagaggtcttatcccatggcttttctatcaagtaatattccctttgccttaacaattttggcatcaacaacattatcaactcccaaaccaaattttctcatcatggagccataagcgccaccggttatgtggcctccaatgcctagagtggtgtagagtccagcaaggtagccatggactctcgtcttctgataaattctgtaataaaccttgttgatggtggcaccggcttgaatccatgccgccttattcttgatgtccacgtcgatttttctgaggtttgcaagttctagaaggaaaaaaggggtttcaatttgtgaaacgtaggagagaccctcgtaatcatggcctccacttcggactctgaggtataatttgagctgttttgagcaaataatagctgcttggacatgggaatcatgtaaaggagtgaagatgaactgaggttttgggagttgattagttaagtatctgaggttttttttttttgataagtaagaaacctttattcaaacacaccaacacagagtcaagtggaagccacaaagggggctacctccctaaacacacaactcatggtaactcccgcgattctggcatacctagccagggaatcaaaaaccgagttactcacacgagggataaaataaaccgaaactttatcaaaagtgttaagtaaacaacaacagtcatggaaagcagggaaagacccccaggcgtaaggaagttcacggctgtttaaagtcttgacagcaacttgggaatccgactccaccaacactgtcttgaagtccctttcccttgcccaagtcagcgcgctgagaatggcaagcaactcagcttcaagaacactcccgaccaaagtgtgctgcagtaagaccactgcattctcctctgcttccaccagatggatcacattagtgcctgcaatcccatccataaatgaggcatcaacccgcaaccacgcctcccacccttggaccaggccaacaccaacagcagggtcctctccaggtggttgttctttactcagcgcatcactgaactcttgaaacctgcgaaggagtgatcttctcgacatctccaaatttggaaccgtgcctttgaacagaaaattattcctgcaattccggatatgctcaactaaacaagcaccaaacaacataactgactcattctttgtgtcaacaagccacataaaccactcttcaaacgacagtctgctaaggttagaggtgaaaattccccaagggctggagaaccacaagctccgggcaaagtggcaatctctaaacaggtgagtatcggtttcattaccatcatggcacagcacacatagtttatcactctcctgcaagaaccccagccgacttttaagagggagacaaccactcagaattctccaaagaagatttttctgtctgttatgaatcttgagcttccatagtctcttccacaccctcttctcctcatgaaacctgaatttctgagcatgccaatacgcactcttgactgaaaactctccgttgctgctagccctccaaaacacaacaccatttttgcccaccaacggccgaatccgtaaaatgacctcagctacacccgaagagaagcattgtctaatcaagctttcattccacctgtgggttcctgggagaaaaagatcagcaactgaggtaaaggcatgggtcacgttgtcagagaaagagttgcaaacatcctgaggactaaaccccggaacccacagcctggaccaaatgtccacactgccttcacccacaagaatccccgctccactagaacagagggcacgggtggatagaattcccttccaaactctcgagtcatccgacttaacttggacattccaaaagtcttggacagaagaatactttgccttaagaatttgcacccaaggcttattgttttgctccccatctaacaattgccaagctagcttcgccaaaagagccatgttgaaatccttgaactttctgaaacccaaccctccgtgccgcttgggttggcaacaatctcctcaactcttcaaagctagataccgcttcccattatttgatgatcccgtccaccagaaccgagacacaaggctgtccatctcagaacatatagccacagggattttcatagttgacatagcataacaaggaatactactgagcaccgcactgatcaaggtttgtcttcccgcaaacgataactgtttcgctttccacccctccaaacggttcaggagcttctccttaatgtatttcaagtcatctcttctcctagccgagtagaaaaagggatttcccaaatacctttccttcttgtcaagtaaatgcaaatcaagaatctcctgaatgcttgatttatccccgcccagcactttcggggaaaacaccagcccagttttccttctactcactttttgtcccaaccattcttcatatgtttctaaacattggtcgagaatcctagcttcagccgcggtagccttacaaaagaaaatggcatcaccagcgtaaaataaatgagaaataggctgagctgccttacccactttaatagccgagatttgttttctattttccgctttgacaatcagctttgataacacctccctgcagaggataaacaggtaaggcgaaagagggtcgccctggcgcacacctcttttaggagtaaaaggtttcagcggcgccccattcaaaagaaccgagtaagacacag

SEQ ID NO: 81172 - DNA, 936 bp, Cannabis sativa
cgaatcgaccaggatctgcttcaactcttgcacgaggatcatcatcgactttgttctagtccgccctcttcaagcgacggacattttggttcacttttctcgtccaaccacaggatgatggctcgtaccaaacagacaatgcgtagagttgacgcgtctaaccctcatgtggcccagcatgccatcctgcccagcaccgaacaggatccacccacctaggaggaggggggcgctgaagtttagggaatagaggaattaggcaatgcccgtacttatagtctttccgaggaggagcctgcaccctaaaacttttggggatacaatgagcgtggggagccagttgacgcggatggcgacgtcctggtcgagggtgtggattacaacaatgaggaacttactgtcgcggttcctcacaggaggcaaggtgctttgggcgccaggtgggtgaccactccgtccaaggttactgaagcacgctaatgggatctcgcccagggcagctatctggtcgagttagactgttacattcgcgcctataacaatcgagccacaaactctaacagggggatgtgtgcctggtcgggtgctcatgctaaacagcgcacccgtactttaggaaggtggttgacttcttccgcctctgtccgattcaattcacccccaagggcatcaagtatttgtctgccctgttcattctctacgccatctagaagtgggatattccttctccccatgaggttagtcagttttttgatttgaagtccacccccaagcaaggtaaatcctccagctcctacctgcctagaagacccgtacaaggagcctaggactccagcagtctgaacacttatctttttatctttctttttttatatatgtcttgccataaagcctttaaactttgaattattttttatttttcagacaataggctga

SEQ ID NO: 81173 - DNA, 2878 bp, Cannabis sativa
tacaatggtgaaaggattggcttttaagtcctactgtcctagtgagtagacacatcatgcaaggcttattacttgcacgtcattcaaccagttcaatgaagggactcccaccccctaacccctcacattggtaaggtgaataaccctcatttgactcattttgccaggactacaagttgccaattggcatattattagtcaaattgagtgatatgcaaattctacaatcaaacagtcctaaaattctcctctataaaatgatgcacttttcttcccccttcctcgtctattgtatatatagaaaactttccactcaaggactctctaggcgatagagaagctcctccccatgtttcttattaattctttggttgcacttggttctgtccttgagatacttagccaaggtacctcttaaggtacatttaacgactcatcacacctaatgacttagcatttgccatctctaagactcaagcatagctaattgaccgatgaataatgaaagttttcaccaatatgtttgattttttaaatagatgaataaaaacaaattaaaaatagaagtgtactaaaagcaattatgaacctaaaaattatcaaagaaaacttcaaaaattagttatttaaattttaaataagtaccttgtaaatatatacacataaacgagtggagaattgctaaaagacgcacaagtgtctaacaccttccttgatgtcatattgttattggtgtaattaagtattgaaaaataatttttaagcaatatcgctaactaatcgtaaggcgccacttatggaagatgttgggcactactgatatctaataacaatgctcaaacgagtgtgtgtaaattagatttgtggaaaatatgagattctgattcaataaagaaaatgttaattaacaatatgttagagttagtgttttacaaaaattatttttgatggactttttattttgttaaatgacaaaaatgatcatatattttacaaaaaggtataaaacattaatatgaactcaatttttgttaatttttcttttaacataactaacttaaagctaatttttagcacgaacaaatacaaaaaaaatataattagtttggtcatacacacctcccgttcaatttattattaagttttattttaataatatttttttaaaaaaaaaatcataatcaaatttattatttaataaaataaagatccaatcaataacttgcaaaaccattctatacaaaatagcattattcaaaaagaaaaaaaaaaatagtaagtgacaccaatccatccgtgtaggtgtagtagagtagagaagagagggtgggttgataatgagagtatccattattgttcttaattattgtatgtcagtcagaccatataatccacaatgtttttggtttttgttcttacaatacaacactcactactcactaatacttaacaaaacgacacattcacattcacatcccatgcaaatgcatatgtttctttccgcttcttcctctactcgtttgctttctttcttccacacaattatgacaattttcatgtttttgatgtcatctcaattacctaaataatcaacctaaaaagaaacatttatcaaacattatatgatcataaagtccacaccattcaatgattttatatatatatatatataaagtattgttctcaattaacaacatagcacgatagtacttcatagttcttatttagttttattttattaatttaattttatgaaaattacacattttatgagtttttatacaatgtgtacaaaaataagacttttttttctcaaaaaaaattatttcttgggaagaaaaatagtataaggtaaatgattaccccgttacctaaactgttatttttaacccttttttttagtttttcccacaaaataattttttttggaaaataaaccatatttttgtaaactgccaaaaaaaacaataaaaatgaaaattcttaatttttgttttaataaatgtcaagagatgctccatttggagtaaagtaatgagctcttaaagggtggtgattatggcccatgtttcaacggaatcataggcccaatgaagtggcccaagtttcatatcttggatcggacattctgaatgagctctctcctcaaaatctttcctgcaggtgacttgggtacactgcttacaaatgttactctcctcaattttttgtatggtgcaacctgtaagcaaacaaaaaatatttctttttaacatagaatttatttttggctacacaataagattatttgattaattttttaaccttttttatttatttattttcaatctgaatgatattacagatgaaaaattaacataataagttaattgttatggtatggtagcaaaaatattctttgtgacacataacaaaaatatttatcattctatgcaagtaaaaaaaataaaataaataaacgttaactttaatattctatagtatatatatttatatttatattatgtacctgtttctcaataaatctttgaacatcttcttccgatagagaggaattgggtgagcgaacaacatatgcaattgggacctcaccagctttctcatcagggaatctgacagtggaatttttttcagtacttagaattattataagtgagagctaatattgttgttttgatagaattgaaatgaaactatagttttttcttcatataacttacggaatcaccacagcatctaatatttcagagtgagaaagtaacaaagcttcaagctcagccggagccacctatgaaaagaattagaaatgtttaaacactattttgaaagtatgtactagaatattttatatagagttaagtaattaagcgttgctctt

SEQ ID NO: 81174 - DNA, 1370 bp, Cannabis sativa
tagaatatgtttttgaaaaatatttttactttttcaattttaaaaatataaaaccgattaaaaaagtgttaccaaacgccacctaaactaaccaaccaacaatcgtagagcttaactaagacaaagcaaaccgactcaattttccaactaatcactaaacatactaacaataaaaaccgtcaataacagaacaactcagcggaaaaacttgtcaaaagatatttccttctgctatttaatgtatgatgactttaatttttatatataacagttattttttttaaaaaaaaaaaaaaatacatgtttaactaattgaatttataaaaattactcgattagttaatttttttcttcatttcgaagtgtaactaaattacgatactctgcaattgcccaaatggggaagatattcctatacgctgcgtaatgcaacatgcatgttttcatgaaaacacccacaagttcctgcaaataataataccagtggcagtcattagtttagtttcgagtttctgctaattataaagattagactaaatagagcgcactaacataaacgtactaatttattaattatatgaataaaatttgaatttgttctaatatatcatcagatacctttggcttctattaaacgaattatttgcacaaaataataattagttgaattaattctagtctgatcgaatacatattaacgtgcatttaaactaggccagtgcttccaaaaaaaaaataaataaaaaaggctaatgaagatttttgaaacttttaaggtccttaaaaatatcccttaactattgagattgttggatttaaagactgttcttcaattttagtaaaaatgtttaagatggatgaaaattcaaaggtacgaaaatctaacctaatttggtacatttagggaacaaaaatcctaattaaccaataaaaaaatagaaaaactagtccagaagtttcgaatgagctagtacaattgttggtattcttgattattctctccctcattttgttgcatattaatgtacttatataaaaattaagaacaattattttatagcgtacctgttgaggaaaatcaccatcctctaattgtgaattgatcaacactttggcagcacgatgaataggagtcggatctctttcagcctatatatgtaaattaataaaataaatcaatgtatttatattttttttgaagagaaaaaaattcttttcttaaaaacgctacttaattacaaacctgtctagcatgaatcaatgccatcaatgcaaaagaagtgtgcaccaaatgggagtgttctccttccaaaggagtatatacctgcaggagagtattattatattaagttcatgaggagatcaagatt

SEQ ID NO: 81175 - DNA, 1603 bp, Cannabis sativa
gtatttacataaattaaattaatgttagacatacattattatgtaattttttaagtggtgaactctaaatattgtcatttttttttagattaccaagattaatgttgataatttagattttgttgtttgaggatttttttttgggttggattttgtttttatgattttggttttatttttttttattttgtttgtttgtacctatgtgatatttttgagtgtttaacacagaacatttgttaatattaattaattattattttgctgatttttttccccttattttgttaatttttttctttctttggaacttgtttttcttttcttttgatacctcaaataactatatatgaactattttgagtaaatatcacctcataatgttgatgacttttttatgccaaaaaaaatgtgtcaatcaatgattgtaattaggaacatttttgtgtatttaataaggaaatagtgttattatattaactttttattataattttttaataaatttctacacctaataacacaaattcgatttttttttttaatttttttattgctctatttcttatattgtaaatattcgtaatttttaaaaaatttataaggatgatattgtaaatataataaatactgttataaaaaaaaattgaaaaacaaatattttgacatgtgatgttgggagtgaaggttgattaagagtttctagttagcactcttttaaataaggtccatatttatctaataaaataaaaataaggtccaaattttaatgtactttaattaatttttttaaaattataactaacacctgttaaatcaatttaattcacatatttttttttatagagcacgccaaacctcgaaggagggtactacgacgcaggagacaaccttaaactagggtttccaatggcatttacaataacaatgctatcatggagcacaatagaatactcaaacaaattaaaagcaaagaatgagtttcaaaatgcagtcacagctatcaaatggggtacagattacttgatcaaagctcatccaacagctgacattctctatggagaagtgggtcaatctgattctgatcatcaatgttggcaaagaccagaagacatgaccacactaagaacaacttatagaattgatgaccaaaatccaggctctgatcttgctgctgagactgctgccgcttttgcttctgcttctattgtttttagaaatattgatattaactattcttttcaacttctaaagcatgcacaacaggtatatataataatatataatatatacgagtaataatatgtgcacacataaattacatataaatttaatacacacttagctgcagggtcggctttaggtatgaacgacctaagctcgtgtctaggacgtacactttcagaatgcacaaaatataaaatgaaaggcgtcattaggcttgattgattcagggtgtaacactctttttcaatttttttttatatatttttaaaagcgagggtttcaaaatttaaatagttttagacttatatattatcaggccggccctctttagatgacaagtatttttggtaagtgtgacccgtcttaaataaagaga

SEQ ID NO: 81176 - DNA, 1340 bp, Cannabis sativa
tctccatttacattatttgccaaggaagtaccattatacgacatatgcaacttcaagaaagaagccataatgccacataagagatttcgaggaaaagagaactacccagttgtaatataaattcctaaaattgtggaatcttttttgatatgtatttattggcatttattaattattattatgtaatagaatgcataatttttagtgagatactccgacttgtggagagtcacaacctacccctaagcttatatataaatagttatagacttaggttatgagacctctttctaaattgcttcccctttctctcttcaagacacgagtccaccaaggattagatacaattctctatcttttgtttttcttttatcattgtttccaagaacattaatcactgacacaattattgtcaagtttatagattgttgtctcttgtgtcctttgtttataagctttgatttcaatgttgcctagtaatctcttttctgtattaatgtccgcacactcttaataacataactctggtgtgttggataaaatcaataaaatataaagtagatatagcctcattaccatcgcgatatgggagtaaactactacaaatcatggtgtctaatttacttttatacaattttattttgccaaagtctaatcagtgtagtcctctattctctacgatcgtcttagatcaactggcaaaaaactgcatcaataaataatttatactaatgtcaaatttttagggtcaattatagccatatcgaagttttacaaaaatatttaggaaattttatattgtattttaatattttaaataactaataagtcaaaaatgatataacatctactatttcaaataattaataaataggatatttttaatatcatttttcttaacttataattaaataataataaaatatgttaattttaatttgaacaattatggttagaatatttataaaaatatctagattaatttttaattttattagtttttaattagcataaaagataataaatatataatattttaattaaaaggataaaattactaattaattaaaatacatctaatattttgatatcttatcttataaaataaatgataaataaaattaataaactaattaatttcaaagtgaaagtataatacaaatgcacctaaaaaaataataaaattcaacttttaagtaaaattaatagggaaatttgatattatatgcttaaaataaatatatccactaaaatatgctagcatattttgcatgatgcaaaatatactcacactatttttctatccaattttacccttaaacaaataaaaaccaaacatc

SEQ ID NO: 81177 - DNA, 1114 bp, Cannabis sativa
attaaataaaaattaaaagtcacctacaaatttctcaaaaactaagaattttagttatataggcacactttatatagaatagacatatataaataattattcttgttctgatcgtcttgtgtattactgtttattattaatattaatatgataggtgtgaattgagtgaagtgcttttttcgctcctttaaaatatatgtataatattctcaaaatctgatcgatcacaatctacacaaatagtgttttgtgtcgttcaatctatttcatttagatccctcacatcacatggttataaagctatacatatatatctaataaaatcattcgatcggccacattatattcggaatatatatatacatataatacacagtaatgtatagtatagcatatattattatgcatgtgtttggattgaaaatagtttgctcatattttatatgccgatcgaatggaacatcattcatggaaaagaataatatatattattcagaatctgatcccaagcttagctagtttgattattgtttcacctacaaaatgctaacttaattaggtcttaccgacttggaattttcataaggcataaaaagtattcaatatttaaaagatgtagtgaaaaaaaatagaaaaatagatgtcgtgatggaagagtttaagaaaaaaaaattaagtaaaattttgttgctgtattttaaaaaatagagtagaaaattaattagtaaataaatgattattgattaaaaaattatctatatgcatatgctccaattaattaagatcagaaaaagatgaaagagtagatgaatctaatctcttattgtaattaaaaaaagaaaaactcccactctatgtgtgtgtgtttttttaataattaacaattttaattttattttaagaatttttttaattttacactttagtttttatatatatatatatatatatttttacaaaaatctaaaatctaccaaagcaaacaagggagaaagcctaatcgtaaatctaccaaagtaattctcttttattttaggttaattaataatttttttctctgaactttgacatgtactatatcatgctccttgaatttttttggccattaaaaatt

SEQ ID NO: 81178 - DNA, 594 bp, Cannabis sativa
aaatataaggtctattttatcattcaacaaaataaatagtctaatttataacttttataaaatataaaatctaaaatgatatttacctgcgcattattataaatagtatggttcgtctattttagttgataaccgatatcaccaaacttggtctgatttatctattaatacaaatttatatttttctctcttaacataaaaaagccaattaatttcttggctcactcaccacgataacttaaagcaaggggcaaacaaacacaatcacattttagaaaaataaaataaaagttgaagaaagctttcttaaatgcatgaaaaggacatctcggaataagcaagaagataaaagaaaatttaataataaatgtgaggaatatgattggaaaagatgattcaacaatcacaaaccaattgaatttaaataataaaagttcgaaaaatgattctagataattttgatttataaattgataaaaaaaaaggacacatattaataaattagaaagggaaaaaaataaggttaattttacaaatgcacaaaaacaacaaaaaaaataacaaaaatacagtttcacagaattttaaacattt

SEQ ID NO: 81179 - DNA, 1366 bp, Cannabis sativa
tcacttgtaaaagaaaaaattgtagtttatttaaaagaaacttaggttgatattgtttgttaataataaaaatataaaatatctttttaaaaacaaaataaaaagttagaaatttaaataatatttattttaaacattttttccttcaaaaaaaaatatttttttaatatataataaataattaaataaatttttttcgtaaaaaataacttattatagagtcttttaatcaaaacagtttttttttaaaagttaggttgtaccagctttagcttttaggtgtagctttttcataattcttcaataagctaattttaatagcttaccaaacacctttttgtcacaacatttttgaaaagtaacttttagcttttccaaaagctgtgccaaacagacccttattccttattccttcatcttctccattaagtctaccatactcaatcgacatcagtcctcaaaacaccattgatacacacttttccttacactttattggtttattgttcccaagaactttacaatcactaatttaaatcagatttatgaatatcaagtctcccatgaatctgatatttatgaatcttgattaagatttcacctagaaatctgttgctgtatttttatccagacactcttgagaacataactcttgtgtgttggatctaatcaataaaaataaaagtagatgtagcccgattaccatcgcgacatggaggtgaactactataaatctttggtgtccatttaatttatcgtggttttattagtcagattaattcaccgtgatcctatttattttttttttgatcttcttagatcggttgacgaaaaactacaccaacataacttttaggttccaattcatcaatttgattaagggtgaatctgatagatggtcaatccaattcttaatcattcagattacatgtgagtaaacacgccatatattataaatgagagggttaattaattaaatagagatttattaaaaaaagtcaattatcaattttaaaaataaacaataataattacttcctatgagtattttttttttagaaatcagaaagtatattgcatataactaatacagtagaacctctatccaagaataaacttaggaccaagtaaattatattctaattgagatattataactaaatagagttacacaagaaaaaaaaaattaaaatacaaaaaattatcaatgtaataataatgacaataaaaaatcattaatactatatcataatagaattattttagagtaaatagaatgtttatacaagtattatagtttggactaaaattattaattttacataaatgaatttacaaaatgtatgtatatattttattacgatgt

SEQ ID NO: 81180 - DNA, 976 bp, Cannabis sativa
acaaagccatgctggtaactcttttgtgaaaagaaaaacaaaatgtgtccactcacagaccttatttttgttaatttactgacaaaacaatttgggtcaaaagaatacagaacaaatttaaacttagataataattacaagaaataaataaaccagaattaggattagtattaccactgactctgactcagataagagttttatagagagtaattgtttggctttggtctctactttctctaagagatccttgtattgttctaagctacagcctttgttagagaatattgcaagtttgttatcaagttttcttgagatatctcaaattcatattcgacactcaatgctcataaattagttgtgatgttgagcatatacatatgaattatttttcatcttatttattggaactattaaactaattattttctatgaaatgttcattgatcaaaaaaagaaaacctaaatcaacaatcattacaaacctggataaagaatttgtcaatcccagcaaggtaggactaaatccagttccagcattgctcattttcgtttgttcctttagagcaatatcacgtaatctctgatacaaaataaagaaagaaaattacaataaaaagttaaaatgaacacaatacttttattcgaattcgatgattaggtttcagtttcggatacttacacaaagccaagcagaagcagaggatgcaaatgctgtcaaagtaggcggagaagatgaagatcccggctgtttctcaactttagcaaccacatttcccaccagttgcaagcaagttccggcatacataagttgatcgataagggcttcaacacttcttgtctgagcaacatatatttcactcttggcacgaaaacggttcccatcattgtcccaataaaacaaggaactagaaaacccttgtaacatttcaagtaaagctctcacctttcaaaagtaatttacagatataagaaa

SEQ ID NO: 81181 - DNA, 1159 bp, Cannabis sativa
actttgcattttaaaatatagtgtaattactatactatataattaccaccctagtaattatcctacttagtaattacacagttacttctaaacacaccctcagtatttctcaaaaaatatagtactatgttttatgactgagaatgataccactcaaaattaacattaaattatcacatttacttgacatgcatggaactcatctttgttaaaaacagttcacatgtgtcttgtcttagagtaattgtcttaaataaatctaaacttcctctaatgatttgtccacaaccgtttgtaatttatcttgcaaatttaatatttaaaagacaccaagtagtaaaatctttttagtcctatgtgtgctcattttctcccgaagtaagtcctaaaataatcttttctcgaagatatgtgctcacttcttcctgaaatgagactttaaaaaaatcttctcctaaagactgcgatttgttcaaagtttctctttaacattttctataaacagaaattagaataaataagagaagagactactctctaacttctatttatacacttataaaaatccttaataactactaaattataaaaactttatatatatttatacagttttttactataaaacctttcctaaaataaaataatcttggacttgatgctgattgattgccaaagtatttatttgaaaagaaaaaaaaaaagcagtcgttgatgtaaatatataaaaacaaaggtgaaatgtatatatattatgtgcacgagtgtgtagtgtgtgtaactagtttaataattaattcaaaatatcaatagcttaataactatatggggtagaagattagttcaatatttaaatagttagctcttgtcaagttgtgcgtaatttggtagttgagataatgagatgactaatgtgttgccatagctattatttacccaaattagaattttctttcccagctactgcccaagctatacagtccctagtccctactaacttgctccatatcaacttatacgtgataatatttctttgtcattatcatgcccatgattttatgattcacatcctttgtggtggatttggatgaagtgattgttcgtcttagttggacaatgtccacgcaatgagctcttttaaataaaaaattgaagtttt

SEQ ID NO: 81182 - DNA, 741 bp, Cannabis sativa
aaataaataattaagtctaattttttacaataataatacttaaattatattttttaaacttctgtaggtacctgttaagtgtcaagttaatggccacatagtagtttttgattagtccacgtcattaaatttttaatttttttttaaaaaaattatttaaatataccaataagaaaataatacgtggatattgacttgacagttaacgggtatgtacccagtgaagttccagacatatgacttaggtactattactatcaaaaattaaacatgtatttatctgcaaccaaaagttaaattaaaatatttatgatttatataaattccatttcgtctcttattctaaaaaaaaatagtttattaatgtaacgctaatttaccacaattgaagaaactatatataacaaataactttaactacatctacaagctaaaaattatattatcataacaaatttgattaatttgtgtataaattatagggatatgattttgtcccgtgatatactttcacggaatgtattccgtggtacattagatggatcttaaggtacattaaatgagtgttagggtacgtttctactttttaaccctaattacccatagatcaatctcaaccgtcagatcaaataactctctcagacgactgccgtacatcactgattacaatccgtgaaagtacaataacgcgacaaaatcatatccctaaattatagtttttttgttagcaatgtatgaaag

SEQ ID NO: 81183 - DNA, 1178 bp, Cannabis sativa
gcatttatcaattaaaattattttagagttatatttaattaatatgtaataaaaaggaatagttttcaacttatccccaaattttatatatgagattttattttcaaacattaccaatataaaaccaactctaataatttaatccatattataaaatataaaactaaaaaaaaattaacaaaacacacacaaactatcttagttaaacaatggtggtaatgttaaaaagtaatggctgcaattaaagtatccttctatttaaaatgttcctgattataattttttccctttattttaatatttggtgaatgtttttcacactaaaaaatctcaattttacattatagttaacaaaagtttattcttcctcttgacatattatatattccacccttacaaaaatttatatattatatcccaacatgtcatcatcaaagtttgtaaataaggtcgaaaattaaagtaagcaatattaattgagatagaaaatttcaaaatgttttattaagaatcataactaaataaacaacacaatacattttgtaaataaaacatcaaattacataataacaaaaaaaaaatactaataataattcacaatatatataatattggattaacattctaataatgttcaagtcattatttgattgagtaccatgaaaacgtgtaggctcagaataaatagagccatagaaggacttgaatagaagccacttgctgaatttgaaatattggagtttttagaacctgcaacacattatgttattataaactttattagtcaataaataataatacgtaagttaaaaattattatatacataggttaggttgagactataatttatgatataaataaacaatgtgtatataattttagatatacttaccattttgataatatagacatgaaagtgggttgacacgttgtccacattgagcaggtaactcttgagctatagtcaagttaataccagctttctcagcttgcatgctacctttggtgctcatcaaactacacaagcaatctggtctctttatcattgatttcaaaggatcacaacaacttttaggtggtcttccatttcctttcatctcattcatgtagtttaggcaagggactagctcacttaagcaatttccagtgttatctccttctgtaggagggggtgcaa

SEQ ID NO: 81184 - DNA, 865 bp, Cannabis sativa
ggttgcacatactctctttctcaactctccttcttcagtcacaatgatttttttagtttgtaacacttttttttttaaaataagcgtattcatatgctaatcaaataagcagttagacctcgcggtcattataaaatagattctcgataaaaaagaaatcgggatagaaccgtacaattggtggataaaaacccacttaatcacattatgaacaacattgttacaactcattctaatattaaaaaaattacaactaataaaataaggagatgacttcatacaaaaatagacataatttttaagaaaccaataaaactacctttcctttcctttgagcacattaccaataaaataaggatttggtcgtgttctttgagtcctgatagtctaatttacaaatttcaagaaaacaagattgaattctactttctatataaataaatatggagatattttgtgattataatgtacacttatcaaatttatatttgtacttaaacaatactcagttagttctcaactactccactagtataacttttaggttccactataaccaaagaaaagtataaaaccaactgtcacagttgtctgtatttcaaaaaaaaaaattatcaagaaacagagaaaaccaattcacttgtattccaaaaaaaattatcaagaaacagaggcatttttgtaaaaatattaaaaactgtaaatccggtatttttgtaaacattttgtcataattctgaaataatccaaaatcaaagggcacccaagcttctggcccattttcgatggcccaggcccatagtcagtagccatggcagatcagatggagtcacaggcgtgttcttagttcataccaaaatttcca

SEQ ID NO: 81185 - DNA, 1622 bp, Cannabis sativa
aataagtcaaataaaacaacctagttattttttctcctaatacttcatcacacccatccagccaacacatgaaaatgtcatgtacttgaattcttaaggaaagccaaattatgtttttgcatccttaaatgggcataaatatcgggatatttgtaactacaaaagttgtctagacgatgatgagcccttacgatatcccactaaaggaaagtgactaaagcaaaagctagaaaaagagcgacataaacatcgatccattaggccaaccatctagaaaatttaactatatagtcaaatactttgcaccaaagagctacaaaaaacctacaccagaacccaccaaatgagattcaaatgattcttcaataacttcacagccacaactagttttgcctagttacaaaaaacaagcaaaatggatgaagaagcatggagaaaatttccagcaccaactattcacccatcaatttgatcacttcttgacgcaaatatgataactcctaatacatccattgattattatatacatttccctcctctgaagaggtttagaaaaattgaagagcaacgtaccacttcccaccagccaaagatttaaaatccttctactagaaataccgatggaactctacaaaaggtcttcgcagcagaagaagtattgaattggaaaacataaaatatggtttcccaaaaccacatcttaaaacagatagaaaaacgaatcactcgcacagagtcaatggtcaaatagcaactttaggacacgatcactgaaaagttgacaaacaagattcaacaaacgcatgacgaattcatgaccattataaaatcaaattttgttcagacgtcattattcttggcaaaagaatttgaaataaaaatcctaaaaccccaatatgaatctttgaaaaagcaattttttcaaagagaaccatattctacaaggtctcaatcaacgctttttggaggaaatacaaccgttcttaacaatgccaaagacttctccgatatcacctttcttggtctcttcataagaagactcacttcttcgacttagacaaatgcttgatgaaaatcaacaacaacaacaacaacaacagcagcagcaacaacaacaacaacaacaataacaacaacaaaaccatgaagggaaagaaaaaaaaaacttagataattctcctccacaaccatcctctctattggaaaaagagcctaaacaatgtattgcccagggaactgtgactaatcctatttctgtcataatccatcaaacagatgaataactcaaaaataaaggaaatcagttatcttcctctgaccaagagacttttgaaacttggtcccatgatttagatattagtgaagagtctcaggatttagatactagtgaagatgacgtacccctcattttatggaccaatgtgcaaaagaatgatcatatttccaaattgagcctattgtcaaaagtgaagataaaagtgaagaagaagaagcagagctagaataaaaccagaatccaatctattggtcttatggtactaaattaggtacgcagcagaagaatttcgtattatctaataatcatcgtaccatagccacacaggatctccatatgtgtgtac

SEQ ID NO: 81186 - DNA, 1656 bp, Cannabis sativa
  modified_base (1597)..(1610): a, c, t, g, unknown or other
ttgtggtggtttggatcgtgaaatgaaaaagacaaagtgaggaggaagatgaaggaatttagggttatatataaccttatcttgtcggtcattagaaaaaccgacaacatagggcacatgcaggggtagagctacatgctaagttttagggctctggccccctcattaattctcaaaataattatttgttatatatatatatatatttatatattagtttataataatgatgagctaactaatttcataaatatatattaataatataagatgagccacataatttatggtcaaattacacacgaatcatagtagaaaaggggtgatgttgtggtggggttagcttattcagatattcagagatcatgtatatatataaaaaatttataatattttttaagataaaatataatgttctctcttaaatttaattaaatactatttatatatataaatgtaacgtagtatacaattagtataattttttcattaatattagtagagtaaatattagtactattaacctgagtccctaacaccttaaatcatcattttcaaattttctagtttcttatttaaaatatctataaaaattaaaaatcttcatattttctttaatttttgtatgcattgtttaattaattggcccccctactatctcatcttgactccgccttaatttgggcacacatgttagtataccgtcagttattttctaataatcgacgggatagggttaataaaccccattgcgatttccaaaccccaaaattgacattgtaggtatagttatactatatacttacatttttttaataaaataaccgcttctaaatgtcaatttttaattagcaggaatattaggaggctttaattagcttccctttttaatttatgttttgaataaaccgtctctatagggtatttttgtagtagttttcacactcaatggataccgctgctactactcaaacacactctccactgaactggaaccccgaccctttttcaattctctctctacttccctcactgtaaaattagatcaaaaaagtttcctggcatgtaaatctcaggtagttcacattcatcagacacgatcttgatgacactcttttcattggagttccccctcctcaagctcttgttactagagaaccaaatccttaatacctgcaatagaagaagagattagttacttctctcatggttacaatcctcaatgacagaagatgttcttgctttgattaccaactatattacttcttactcgtggggagagctcttgagcaaaaattcaccaatcaatcgcgagctagacttcttcaactcgaaggtaatttctctcacataaagaaaggctccatgtccatctatgattatgtggacaaattaagtctagacgttattgctggctctattaatagaaatcaagatgttatacttcagctgctcaatggactagttccagaatacgatccagtggtctcgagaataacttcaagaagtgatgctttgacacttgaagaagtctaggccatgctcatggctcatgagagccatcttgatcatcacaatcactacaaaaaatcttacnnnnnnnnnnnnnnaaacttgtgactaaaagtgaaaacattgtgactaattataaattat

SEQ ID NO: 81187 - DNA, 993 bp, Cannabis sativa
agaaaagtgatgggaatcacagggggattgccctccctttgatacaaaacagccatctcgctagaaattctagcttttttggctaaaccatccgccaaagagtttaaagaacgactaataaaataaaaattacaagcaatgaaatacttagaaacattaattatagaaaaataaacacttgaaagcctccaatcatgacaggtgcttgaagaagataatgcattgatcgccacctttgaatccgaaaggataaccacttctctccaaccttgatcaatcgcccaggacatggctagataaatggctctgaactcaccttcaagagctgactgagtctgcattcgttgagtcttgacaaaccaattcccaacagccatatccactgcaatagctacaatacctgtgtcccctcctatccatgaagcatccgtaaataggacatgtctcgcagaagagttgattgaagggtaagtctcttcactagccaagcctccctcggattgaattcccaactcctgacctcccttgttgatctgaggcaccatcttcatatccatgaaatccttttcagcctttgccaaggccatctcaggattgacagaaacatttttaatgtagaattcgttccgctgatgccaaattgcagagaaaacacaaccaatataattaagtaactcgactctattccctccatgtggtaagtcattacagtgaagcatcagattttccaagacttccgataatgattctcctaggatgtcccctatcctaatgtgcttactgcctccaaaccatatggacctagaaaagttacacctacaaaacaggtgcaaaggattctcaataccagcatcacacaagtcgcaaactttgtcaggcaagaagtgcagtcgacttttggttggaatagcatcatttagaatcctccaaagaagaacagagtttctaggatgaatgccatttccccaaatccacttccaaatttctttgaca

SEQ ID NO: 81188 - DNA, 1966 bp, Cannabis sativa
taaattgcaccaaacatctcttctatttctctccccttggcgcctccaacccccttgacaccaccatactttcttcttttctcctcttctctttctctctcattggtggttccaactcctgtggtgccaccaaccactttcatctattctcttctctttctctctctcctcgacgcctccaacccccttggcgccaccaaccactttcctctcttctcttctttttctctcttcttggcgcctctaacccccttagttccactgttatttgcattttcacaagcatgacacgtggaaattaatcaggaaaaggaatcattaagccgcctaagggccttgctccacgctccaggaggataaaggccccaacctcgtgaaattgaccttcgacggagaagtcttcccgaatacaggccacgaaagacatgtccacgagctagcgactctcttccttctagaagataggaccctttgctcctacaaagaatagggactttccactaagatgcactagtttggggtacgcctttgacccgtgaaaactcatcccacgcatgtcaggctacggacccaatggtggggctgttacatgtatgatgtcagaggttgtcgctcacgccatgctaccatgcaaagcacgcgtgtccttatgtactgtgccaaacaatccaacggctaggaataagggtaattcaaataagaacaaccctggaatgacacacatccaaagcaccactagtatagccagtacaatctaacatcggtaaagatcacatgaaaaatatgccacctaccaatctaacggtgggggttcattcctatgaagatccatccaaggtggtccatacaaagggatcggcctataaatacccctgaagacacacaaggcaggggacttcttttttcctccttttggctcttcgcatggaatttgaagactaattctttgaaaaacacattactataactccattattaacttcaaaatattcctactgagcttcctcttcttcaagaggaacacagtaaagaggagtaacaggtcattatttttgtatttgtataaacaatcaccgtccaaagaacctaataaaatagacctgtggcgccaccaactactttcctctcttctcttctctctttccctctccttggcgccatctaccctattcccttttctttttttatttttactattttctctctccttggcgccaaggagatctttggtgccaagaaggcttgaatccccttctcttcctttattttccaatgcaataagataacaaaatacaagtctcatgtcatgaaggggatggactaggtaccaagcagtaaagaagcaaggagcactaaaaggatcaacaaatatccttatgagcgtgctgtgtacccacctgacctctgcacccaacaagtagtagtgacgaagtaattgtacacaagaaccaactgctgggaccatcaagtaccccgacaattacacctttgcaatcacaactctaacatctgagggttaggaggtgtatcatgtgctgaccatcatcaatttgtaacacaagttcagtagagtctcattattaatacccttctcttccattgaagtgggagttgaaaaatcagtgtaatacgaagacttcttttgctgcattgttgttctaatcttcaagctttttaagttatattactctttaatttgatatcttaattttgattttctcacttttattttattagcgagaattagccgttaacaatactatttagatatattcttaaaataactaagttaatactaattgattatctaatagaaaccatacaaatattaaaacaaaactcatattttggtgtggcattatttttatttatttatttatttttgtataaatttccttaatagaaccgtaaataaatgattaaatatttaagtattatatatttatgcatggaaaacaaaaaataa

SEQ ID NO: 81189 - DNA, 1148 bp, Cannabis sativa
cgactcctacgattacgtcaacatgatattgctcaagaatgatcaattttgtgctatgaaatgtttaatttataaactgggcacccacaaccaccaccattaaaaattatgagtgggcttagttggatttccttgatttatttattgttttatggatttttcctattggagaaagttttgtaccattgaatttcaccagtgatcatcctaatcagtccactaattggatattatgtataatgcataatgattgttatgtggacactttgggggcatagaagaaaattaaaaaaaaatgatttatagttaattataaatttggaccattgccataatccaaaattatcagttgaatcattgcaattcttcttttctttccacccattaatatgaaaatattatattactatatttgacatgtaaaacttttacaaaagatttatacaataatttcaagttcaacccatgtgaaaaaatattagaagttttatttgcattctaaaaatttataaatatactatttttttaataatttttattttatataaaacttatactctaattatattaattttttttctttcaaatcatattcttaacatatataatcaattaaaaaaaaaattaaaaaaattaaaaagttataaaaataaaatttaaacatgtattgaaactaacataaaataatgtgaggatttttttaaaaaataatattaaaagtaatttttaaaaattattttaaactttcttaattttgagatgtacatataattactttgtgggggaggggggtttgtaaatagaattttttaaaatattttttatatatacaaatagagatatattatttatagggatcgtacttggttatgggtcccttaaattgttttagagtatggttaaatgttttgttgtatttatttggagtgtagttgaagaatgccaaaaacattttgttgcttggtcattccaatcaaatccaaataatatttgttgctttttcagagcaaagcacatggaaatttgtaaccatttggctacaaacaaacattcataagaccatctccaaggagctcatcaaatatggtgtcacactatcaccaaatttgatgttaaaaactatcttcactccaaccacaacaccaaaa

SEQ ID NO: 81190 - DNA, 1521 bp, Cannabis sativa
atctgcaaataagttggcttattgtttagcaagagactcttgtttctctacaggtcatgtacttcagttggaggatggttcctcaaaagtgcgttatattattttgaacgaatttattaattaatagatcttatgatttttattcaaataaaataaaataaaatataaagacaaaacattatctggtgggtaaacgcccactttaccacattatggacatcaaaattacagtttctactaatattagcgaaaacacaactaacaaaataaggagaggatctaatacaaaaggagacatagttctcaagctcccaatgagactccttcccattaagagcgctaataactacccttgaatcactctcaacaataataaacttagagcctcgatccttcgccacatccagagccttgcagcaagcttccgcttccccacaaagcgcatcaaaaaactccaatttagatgtatgaacgtagatcaccctgccaagatgatcctttgtaataataacaacacacatgatgtccaaccccactttaacattataattcagcttcacccaatcctaaggcgaggacaccaaacatccgccagactcggagacgagcaagggaacaaagaagcatggtgatctgcaaaagataaacgaatagagtcaatacacttttttttacatcaatcagataattattgtgtaccttatcattacggatccgctagatggtgtcccacattcgtataccagtaccacagataggaaaaataccccaaggagatgaactccacaagtaataagctacattaaaagataaaaataggtgttcaagagattctctctgccccacaaagggaacagctaacatcctcaatagaaaatcttttactaatctcagactgaatagagattactttagataggatacaccaccatagaatcttttgcatcttcaagatattactgttccacaacttttaaaattgcaagtgctcaatcaatagcaaatatagagaaaagtcaaaattgtattggaagtgaaattgcaagtgctcaattcaaatgcataaaaagggtatagtaactttctcgttaatgtcacgaaatttctcacaaacaaaaaattacaaaaacatatcaaaatcaagcataaaaaataataaagaagaaacacaaaaaaaaacacctaaaagaaagaaagaaaaaagtaaataattataaattaaaatatagaatcaagttctaatctggaaagaaccaaatatcatgtatataagcatacatacataaatattcctctgtaagccaaagccagagacaatattgacaaactaacttcacaaaaatgagcatcttctagtaacgggtcaaaatttaatcttcaggatgaaattcaatcgacgatgatttaaaaaaaaagttttaattggcaatggtggtggttcgattgaaacaaagattttttttctttttttttaataaagattgaaacaaaaatgagaagaagtagagaaagaaaaactta

SEQ ID NO: 81191 - DNA, 744 bp, Cannabis sativa
attattatgttcttataaataattcactattttacctatgttcttatatacgtgactcactattcttacatttgtttcatgtagaatattatactctaatatacttcttaaaatggtagagatattttgttcaccaatctcgaatcaagtgtcatatgcactatatggatctactgccgtttatttttggcacactatctatataagtgtgaatctaatccctacaaaagatatgactcataatgtttaagaagaattataaaattttatctcaaaattaatgggggatcagtaaagttatatttttttataaattgctcaatatttttatactccaataacctataatatttttcttcttctttctttttggttaatttaaccttttgaaaaaagagtatattaactaatagtaaagtcttgtttaaaaataataaataaataaatcaaaagttagaagccacaactagcttgtttttttctttttgaattgaaatgaatatttcagaaaaaggctataaaacacagaaaacattacaaactagaaactgaaagttacctaagacaaagttagcctttgtaattaataaatattttcttttgattagaagaaaagtattaaataataaaaatttgttttaattacaaactaaatatgtagaagagagcgtctaaattagtaataataagatagtctttgggggatttgtccccaaagatggaatttgagaacaaattaattac

SEQ ID NO: 81192 - DNA, 3611 bp, Cannabis sativa
ttcggaagactattttggcggcacgaacagaacacgatacaaataaatatgaatacatatgggtctgaatagatatacaaaatatattagcatatattagtacgacgtaagtacaaaatataaaatagaagcttgaattaaatccataaatacccatttatatttagtaattcatacatgtttccataaaaatagttcttatatattttcattttaatacaatttttataatctttactaatgcatatacattctagacttctagtatctttgtttttaattagtgaacatttgctattttattaagaaagcaaatttattaacaaaataacatgaagatgagtagggacaaacccccactgaaaagatgacttggaaaagaacaagtagcacgtatttatactgaccacaaaagtttcatatattttttttttgaaaaagagttgaatatgaaaaaaaaagacggtgattagaattagtaaaaaattatcattgtgagattctttatcatcataggaaagccaatgtggtggatgatgctctaagtaggaaagatttttagtgctatgatgatttctcctcaaatagcggttgacatagttaaggcggatattgagtttgtggttggaaaacttagtaatttgacattttaatctgatctattaaaaagaattataagtgcccaaatggaggatcttgagttggttaagtctcgagaagaagttttagctagttgagctaaagacttttcagtatcagacaatggaatgttgttttacaaaactcgagtttgtgtttcgagtggtggtgagctcagaaaagagatcttattagatgaagctcatgttggttttatagtactaaattaaaaacgcagtggaaggatttcgtattgctgattatcattgtattatatctcaatggatctccagatgtgtgtacattaaatcagaatataaaataataacaagtttagaatatacctattgaagactatcagggtatcctcgaaacttctcgtatgtatcatatccttaagtctagatgatgaggatgatggaattggactcacaccaatgtcttccaaatcgttccaccacatacaaggaataatgtagactattaggataaagtgtatatgtttgttcttgttgagtttgcaacacatgagcaagaaaaattgggagagattttttttttcttttcctcctattaatttcgaaaattatagaagctgtttggctgtgttttcagtttttagttttcagaattctgttttcaaaagtgagaacagaaaacaattttttatcattttaaaaatttaatgttgtttggcttaggatttttaaagctacttttagattttttttactaaaaaaaatcaatattctacaccataccatgacatgaatccatccaaccctagaacggacccaaaccacagaccctgggcccagaccttagactcggacctgaatccgaacccgttttggggttcgaggttcgggtctggggtccaggtccaggtccgggttcgggtctgggtctaagtctgggtctggatctgggtccgagtttgggttggggtctggggtttggatttgggtcaacgtctgggtcggggtccaggtcctgatccatgtgttgggttgggtcgggttcgggtccaggttcgggtctgggtctaggctttgggtttcggggttagggttcggagtctgaagtccaggatctaggattcgggttctatggtccgagtctaaggtttgagtctaggtctgggtgcgagttggggtctgggtccacgttcgggtcggggtccggatttgggtttgggtcaaggtctgagtctgtgttagggtacggggtctgggtttgggtcatggtccgagtctgagatccgagtccgggtcgagtttgggtctaggtccaggtcgggtttaggctaggtccatgtcaagtcgggttcgggtccaagttcaggtccgggttttgggttttagggtcggagtttgggtccgaggtctgggtctaggttcagatcgggttcgggtctgggttcgggttcgggttcgagtttcgagttcttgggttggggttcgacgttcgggatttggggtccgggttccatggtccgagtccagggttcgggtatgtgagtaaaaatataaaatataatatgttagacaaaaaaaattatttttgaaaattaaaaactacattttgatgttttctattttctagtttttaaaaatttggccaaacgactcctattagtatttaaaaattattttctaattttaaaagtcaaaaacaacttttaagttatgaagccaaacaaccccatagtgttcaggaattcagtctaatttctcaaatcaagcttctatttatataagttaaaaccctttaattaaatcacatttaattatttaaataaataaacatctataatcgaattcgattactgatatttatgagagaatctctcaactacttgagagaatatctcaacaactttaaaatatttgtaatcacttttcaaattagatattcatctaattgaattaattaattaacccaaaaaagaaaaaatctatagggacgcgcctacccttgtctatttaggacaatgatggtgtattttgtcttgacaacttttatctcaacaaaacttgtcttaacaaattatatcttaataatttttgtcttttccttatttaattaatttgaaaaaattatttatttattacaaaatcaaatatttactataattctttatccctacccttgacagtattttaaagtggcgattcatggaccatgaatctataattctaagctccaataaactagattatttattaagctcattaatcaaataatctttgtttattaattacatgattactccattaaaaatatagaattgaactcttagtaattataaaattatatttattgagttttattgcagtatccattgatataataaattctagtgattagccttccatgtgttggttcataattagtttcgatcaaattactgttttacccttttaattactttttttatcctttagtaccattaatttactagtggaagcataatttaaatcccatctaaatttgtacacaacattccagttctagattaacacttaaaaggaaccaacatttgatttgttaggaaagttaagattctataattgtaaatcatgttctcagtcatccacattattagctttccaaaaaaaaagttgtaagaatcatttctttgagaaacattaacgagtgaatcaaagaaactaataacatgaacaagagtttatgattacacaggatttagaccgatctactattgatcattgttatgatatgaattaggtttttatgataaacgatatgttaataaagataactttattcatatcagtacttatcatatatgatctctattatatacaacaccttcactttaatgtcatactacttccataatctgaaccaagacaacctgcactaaagaacgggcatcagtgaaccatactagcaaccgttgattaaaaattccataactttaatatgttgctgattattttattcat

SEQ ID NO: 81193 - DNA, 1387 bp, Cannabis sativa
attaataagtaaatcttattatataaaatgagttttatttaaggcataaaactcaacacgggcatccttctccgccttgaattcaacctcgttggccttcagtttcttcctgtgagcaatagcagagcccttagcccttgcatgggtgtggttaagcttcagcataacctgaaatcaaagaaaatgcatgttagaaatcgagctaccatggccagccaaggaaatctataggccagctagcgctaacaaacgaacacctcaagcaaaatcagataaacgacttacagattaaaggtctctgagggtgttggatatcaagtagtcaagagtctcagtgtctaactcttgaagcttctcaacaacatttggaaaaccactaagccccttgtccatgtattaagattagttgatggtgaaaacccgacaatggggttcatttatggtgctatggatgaggcaaaggaaaacataaccaagaacctagatggagacttgtcttcctattaggagatttgggatatcatcgatcaaaagtgggagtttcaattgcaccgtaacttgcatgcagctgcatactatttgaatcctcgatttagatggagtcctaatgtttctgagcatccagagattaaaatttgtttgtataagtgcatggatagactcattaaggatgagaaaatttatatgaaggttgatgcccaacttaataagtataaatacaagcgaggattatttggccttaaatcatctttggcatcatacacaacacgaccacctagtgtactatctttacctatttttcttacattaatattttatataaaataaatttttaagtttaactaattatttttattattatgttatttctaatgatagttgattggtgggagagttttggagatgaagttccagaactaagattatttgcaatgaaagttcttggtcttatttgttcagcatcagcttgtgaacgtaattggagcacattcaatcaagtgcacaccaagaaaagaaatcgcctaagcacatctaagatgaatagtttggtgtacattatgtacagcaaaaaatagagacacaaattttttaagaaacaatcccgaaaagaggaagatgatcatttgatcattgaaaatgtgccttcagatgatgagtagatagccaaccccgacccaaatgatgaagaagataatgataacatagaactgagactgaggatgaatatgaggggggaagttctatagcaccaaggaagaggaaaagaaaccaagcactgccaccaacaaagaaaggttacttttagaactcattgcatattgcaactacatttcatatttacattataaatagacttggcattttataaatttattatttacatatt

SEQ ID NO: 81194 - DNA, 1317 bp, Cannabis sativa
taagataatatataattaataattaattacatactcataataggatttattggtagttgaaatgattgaattagggtactaagatccattgggtgagagtctgatggatcataagctttgtaaattctattggctgtgattaaattagaagcctcagttggatgaaatgagtcccaaaacacatactctgtcctattctcacatggcttctccaatttcttacattgccctatctcattcaccgaacaacacccaacatcccaaactttgaaccctaaaaaaaacgaaatcgaaatcaaaatattagcgaaatgtagaaaaaaaaatcgtaaaaaaaataataaacaagtgtacatgtaaccctaaccgagtttcttaccagcttcagtgggatctccagaccccattccgtaagagttaatatagatgaatttcgcatcagccaaatcactgttgaatttatcaacgagcgtcacaagtttttggttgaagagctgaactgcgtcgttcatgtaatctacgcaggtagatccattacttgctccgtaagtttttatcgagttcggagtacaaccaatttgccctaatccatttagggctaccattcttgctccattattgtacaagctctagtaacaaagaacaaaaaaatgataagtaactatatacaaagcaatgcatgtataattattactacataattttaattaattaatgataattaccatgatttgatcactatatttttggatgagaaggttggcatattgattagggttataaagatttccataagggtaaatccaaggcatgaagtaattgttaatgtaatcattatttcccattgcaacccaatacaaacacttgtttaagtactctttggctaattttttgtcccctaatttctcaacaattcttgacaccacaatcttgtgattcttcatttgtttccccaaaccaatattgtcaccctgaaaattaatataaaataaaacaaaattaattccaatatactaaaattgataaaacatttcgatttataaatataaataagttaccattctaattttatcataaatgaatatgttaattatatagttacaataatttctcaacaccttttcatgaaaatctaaattattattagagagtgacaaaaatatgcttattttaaaaaccatattttgtgcatggtaatattaccgaaagtaatttttttttctgacattttaaattattcataatttcacgaaaacatataacgtattaatcagctaaattgaactaggcgtggacctagggcccactcatcctaaa

SEQ ID NO: 81195 - DNA, 1906 bp, Cannabis sativa
  modified_base (1859)..(1865): a, c, t, g, unknown or other
ttactagtagttaaattatatggctcaaaaggaactagatagatgctcaaaaacaaatgaaattggagctgaatgtgactataaagaccagataatattgatggcttgaacactaatatcacattgcttagaaaacagttacttagcatatatgttagtactctcttggtttgacaatgttgccttattgctaatttcatttctgactccttttctgcttgtaaacttacagtgatttgaagagaccagaattctcttgaacccatccaacttattcgttctggattggtatcttatgctccaattctggaaaaagagagctgataagatacatagcattattttgtatacttcaattccccaaatcaagcgtattgcagatatcgcctgttttagttacacggggccttttctttattcccctcataccaacatgacaaatttagtggctattaggctttctgttatgtgtagaggacaggtacaaattaactgtgaagatatatgtcagcagcagcatcatcaactcaatttgtacagaaagaggggcagtgatgcttggaaggaagatctccaacatgaaagcgtagcttctcatacatttttcaaccttaataattctatttctgaccaatattttacagttagaaagtagagctagttgcagtgtaatgatgaactgctttttctaagtaacttaaaattcatggatctttttggtgcaattttttccaataaaaatttgttctctcctttcatgtctataaaagtatctctaatagtagcattttggagaatgtttggcgaaatagaaagtttaggtagcaaaatgtagagatgttaaattatgggagataaaagaatattattcttgaaatttgtattgatgccacacaatgacattgatgctatgttttttttaaaaaaagataaaaaattaaagttgcaatatatatataatagtttaataaagaaaaagatatttatgtatatattaatgtgtgagattataattataatatttttaaaaggtgttatattattggagtgtttttagatgtaaaggtgctaaaaataatgtggaagaaagataaaataaaatatatttttagatgatgtagagatatataatatctttaaagaatgctaccattggagatgttttaatatgttatgttattttattattataattcttttttttaataattagttttgcctctaaaagctcggatctatcttttaaattattggtgatgttagaaattaccatggaactattcacattattaagtggcaataccatgcatacaataatttgtaaatttgtgattaaatttgtttttagtttcaatacgtgttgtactaaatttaaattaatgatacctcgaatctaaatattactaaaattcacaataaactttttaatgtaactaaatttttttttttttttttactggaaagaactttattaatcaacttcatttgggcatacccctttcaactcatatcattcctataagctcttgacaaactttaaagcgtccttatctaagctagatatttccttttcattaataaagaaaactctagttttaagactttcttcaactagaatatcaatacaatgaggagccacacactttagctcaaacacacacaagtttcgattcaactaatttctatacatagcattggccatagtcacacaaaacacatcgatcaaaaagctcttgggcttcctgctattcatctattgaatccattcctcttaatcacatggccatagtttactactgagccaattccctatgagttgcataacttgccaagagtaagtgttatagtgagatttctcnnnnnnngaaactcgagaccagacccctacttagaggacacgtatact

SEQ ID NO: 81196 - DNA, 682 bp, Cannabis sativa
gatgacattttcttcttcctttgtttttgtctttagtgcaggtcagctaagacaatcacttatgaatctttgaataacattgcaaggtttattaatggagtgtcagcacttctgttggcatttttacctggcaatggtacaatccttgaaggcattcatggctgggagcttagacccacttttcgcggaccccggcttccacgctggatggaaaagtaagcctcggtcattcctgcctttgttaaattgatacttcttaagcgtatctattgggaatgctggttatacttaatgcataagtggaatattattggttataaaatgatcttaagagcactattgattgctgaaacacatcccattcttgttctatcagtttttttagtggaaaacgtaaaaaggattgatccataactgaagggcatgtatttgattttattgttatgagtaaccgggataaaggaaatttcccggctagctacttcttctactcttttttagagtgaggatattcattctcttattagtgaaaacattacgtatgtataagaggattatcatgggatttacttgctttagtttgaatacagacctattttgaagattttcttggagaactgggaaactttttgatgtatcagaaagtgaactagtcatataaaattcagggaattgaggattg

SEQ ID NO: 81197 - DNA, 1241 bp, Cannabis sativa
ctctctctctctctctcacacgccattcctctctagtgcagcacttagtctatttctctcaattgttctaaatttgttttcaccattacaagatttaagcttgtaatatgcatattattatttccagaatcaatacaataaaaaagagagtaggtcattacccactaaacaataaatcattgtgtcactttattatttgctattacaatttccacgtggtcattattgataataaataaagctccattgtcagttgacccaaattcaaggacaacaaatttaattttcgattataaataaatacttaaatttaacatcaattataaataaatacttatatttaacttacacaattacactcaaataacttaaataaaaattaaattcaaatatttatctacaactaaaaattaaatttaattatttataccataaattaagcatacattatttcacttattaatacaaaaatttagtaacctaaaaaattataaccattataaaagacgcgaattagttgccttctaaattattaattgaactcccatagcttgcatggcatcagtgaactggcgaatctgctgagcaacacgtagactgctctgaatttatgccacgtgttcctccatgtaactctatcaaataaaatgtttatatataaatagttaattagtacttcaatatttcgcattcggttctctcaatttctagcgttactttcttcctagggcatccttcctctcaaaaaaaaaaaaaaaaaaaaaatctagtgctactaaaagcaaaaaaattctagtgtttgttgtttttttttgctagaaacttgttcatatacaaacgatgggagcagctggctatatctttattctaaatacgaccttatcgaaaacaaaagtgtccctaaccaggcccttaaccccatgtctctataatcccatcttcaaggtacttctaatgtcattaactatataaactgatatttaataactaataagccgcaacattatttggtcattgttgttgttgttgttgtttagaattagaaatcagtatatatcagtagctaaacaaatcagttctctgaacctagaatgagtttatgatatgtgacattgtttacgagccaaattgtagaatatgatcagtataccacagacgaacatataccgacaataactaaaaagtaccctttatagtgtgattaggagttaagtcgtttcttctgcatattatcttttaga

SEQ ID NO: 81198 - DNA, 2533 bp, Cannabis sativa
gatataacagactaaaaatccagatacgactagacattgaacagaacaaacactgtcacaaaataataacactaacagtaacgatgatgtaagcgacaactaagagatagaggtccctattgtagcttcaaaccttcctatattatcgtacaaaatacataagaaacaacaagtagaagaagaccccatagagagaattatcaaacacttgatactagtagtaattgctggttttatggtactaaattaggtatgcagcagaagaattcatataattgattatcattgtacctatagaggcatgttggaattttctcatttttgtataaatcaaagttattcttgcacaaactagtaagcttttcctcctgtgatgggttaaggatgtgagttagaccttggtctatccattattgtggaaactcaaaagggtttggagagtgactaattgttcttgctctatagcacgaaggttaattggtcaaatttggtagatttgacatattctttgacaatttttgggtttttcttgatgagggtttttatgtatctgataaaagggctttgtggtttggaaaaatcttgatatggatttattaagggaatgtcgaatagtaaaaattttccatcgtcgaaaagatatgaaacttcatcaaagcattgattttgctaacagaagatcgtcgcaatgttgggcttgttgcaaaaggcatggatacttatgtgtaatgtgttaagagttcgttgaaagatgcgataatattagagggcgttgtcagaagactaggatatcttaacaggagaaacaaagagaccgtgaggccctgataccattatatgataattaattaattaatttaatggtgttagctttaaccgtttaacttttaatgaaaaaacattaaactaataatttctgttagatagccacatttaacatagagaattgttaaaaggcaccactggtgcctaacaccctcctcggtgtcatactgttattgatgtaattaagtattaggtcccatataacttaagaaaataacttttaggcaatatcgctaattaatcgtgacacgccacctatggaaggtgctgggcaccactagtgcccaataacaatgctctttaatataaaagagatatatatatataaatatattatgcatttttgcccctaaacttttggcactacctgattttgttccctaaaatatacgacttgttaaaaattccctctaaaatattatagttacataattatgtcccttctgtttggctctgtttcttttaccgttaaaaattaacattttaccccctaaactttgaccaatacaaaattttaccccattttattaattttcttaaaaaagaaattataatatataattaattctaaaaaataataaaaattattaaaaaaaacccaataaaaatattaaattaattaaaaaatgttaattttactttaaaaaactaaattattcttaaaacaatatttttaaattttatttatacacgtgtatcttaaaaaattaaaccaaaattattgagaatccaataaataatttaaaaaaactaagattgtttaaggaaaaaattaaatttatttatatttataaactcataccttaacaaataaaaaataattaaaaatttaatgaaaagataaaattattttgaaaaaaattagaaattaaactaaaaaaatgttatgtttacttaaataaatctacattttttgagaaaaataaaaatagactcaagtttgttcccgtaaaatttagtttttaaaaaattaaatttttaattatatttttttaatatctaaataatttttttaataagaaataaatcattttttaagtcgcttaattagttttaaaattttaatttctttcttaattttttaatcattcaatataattttttttaagatataaattaattttttaagatttactaaaaaaaatattgaacctttatcatttttattttgagggtacgatttgatagttgtcaaaatttagggggcaaagttactaatttacaaaaatacgtcagtatttaaatgaaataatgaaacagaacctaacagaaggactaaatttctgtaaatgtaaaagttcaggggaaattcttaacaagtcgtatattttatggagcaaaattaatattgtcgaaagttcagggagaaaaattgcaaattttatacaaaattttaatttaactaataatttttttttaaaaaaaaaataatcaaataagaataatttaaaaataaataaataaattagcaatcaaacttttaaaaaggaaaaaaaaaaccaaaaaaatcaaagatgaaaactgaaaagtgaactcaaagttcaaacataaggatctaagcgggtagggcatgggcggagattgctcccccacccccgtacttgcttcctaaatttactctcatatccgccccaatactcgtttaaattaaagtgaggacggagcgaaaattacccagcagagaaaggattcccatcaagtacctatt

SEQ ID NO: 81199 - DNA, 1724 bp, Cannabis sativa
aagtttaccagcgcactttgcctagttttgccggcgcaaatttgtattgacaaaagctcactttcttatagttaaatttaacacagctcacagaaaaatacttatgagaggaaaggtgtcaaacgcttttcgcaattaaaagagacgaaacagtaccaccgccgaccatttagaggacgatatcaccattttgaggaacaaattaatacctatacatgaatataaacattactattaggtactaataatatttagaattatgataagatgacgacttataaatgattatcaatatattttgtaaaattcattaataatatacgacactttaggataagcatttctcaatatttatatgtctataatctacatttaacaatctatatatataatcaaccagatgtggttcttacttaaaaaagaagtatagatataatcatgaccattattgtcaaaaaagtgtagtatatatttatcttatcactttatatgaacaacctccgcagcccatataatttataacgtgatatattctataatcaatatatacatttctgtacggtatgtggaagataatgttacagtttgagttaatttggttaatttggttcatacacttgaaagagttgtgttgtgtgtgaaattagtcaataataatgacagccgtgaatactcgtagatagaaatatatatgtgggaccctatctacccacttattaattaataaatattgtggcacacttgtccgtgctacctcggccttgtgaaaacaacacaacagcactgagttgacagatgcatccatcagaatcggtactacatgaactgcattgcatgccttctcttactttctttctctctcatcaaatgaaacaactgaatgaaacaaaacagaaatcagaaagagagagagagagagagagagagcgagaaaggccaactcatcctatttaaacacatatttcagtccccaaatttgccaccactaaaccaccaaagaaaacacatcttcatgagtttctgcaccaatttcttcttcataataacataggcgtttccccttcttcatgcatttataaatgtagattgttctcttactttcacaaaagatcaaaatcgaaaaaccaccctaatgtgttgagtacagttttctagcactttctgcagttaaacctataaatctttccatttttatgcttcacaccaaaacctctccaaataaaaagatatacagttcaacatattataatacgtactagcaattatatatatatatagtcaaatggatgcctttgatccttcaatcaccctaccttttccttactcattcactacagctatcagcaacagaagtagtgaaacgagcagtagcgcaaattccaacagtgttctcaacattgttacttccacctggatggacggcaggatttggagcagactccctcagaggcttctcgaccgcgtgatagctttccttccagcacccgcatttttcagagctcgctgcgtctgcaagagatggtacgccctcttgttcaccccatcctttctcgaactctacctacaagtcttaccacgccgccattgtttcattttcttcaagaaaaaaaataccctcaataattatgtatacaaatcaaaccgtgacaataataacggagatcatccccaaaacgacaaaccatcatcccaaacagccgcctgcgagggttacctcttcgaac

SEQ ID NO: 81200 - DNA, 813 bp, Cannabis sativa
tattcatttaaatactaatctttgtattcattacaaatttttgtgatctgactaatttcatcaggtgtagaattctctttcatattttaaaatataagttttgttaacaatttcaagaatatttggttaatagttttcttttattcaaggtgatttatagaacatgttcttagtagttaattcttgatttttatatgtttgcaggagttttttgtaaagactgctgacagaattgagctcatgtcaatgctgggcctctttggtgccattatcagtgctatacaagtgtatccttaagtcatactttcaatgtgatttttttgctgcatctagagaattatgatccttttaatacagtaagattgtttattaattgttccaatggaggtgatagagaaatagggattttacagtaagagagaatgctataagttttaagagattccaagagggatagaaatacatcttcaattgttgaacatgaaaacggacatacatagttcatagataagctcttaccttgtaaaccctgatcaaatagattataggagataatcattttggttgttgatgatatctgtatgatctcctttgaccatggattgtgtcaacttcaaatcaaaaaccctatgaatccttgatgtcattagaaaaaatgcaatataaatattgtatctaatatgatatatgattctattatcaagtatagcccttaatgatttgcacagaagcatcttagagcgggacaatcttaaatctattcattggtcagctggggctgtaagtgagaaataaaacattgttctttgtatt

SEQ ID NO: 81201 - DNA, 2098 bp, Cannabis sativa
acaataaaaatgtaaccattgaaacctcttctaataatatatatatttgtgtgtatgtatatatgtgtatatgtgtggatataatattatctatttttaattaatatgtatatatatatttgtgataatgcatgtgattgttttgtattattcttgttatttataggttttaaaatttttgagattgtcctattacaatttttgagattgtcctaaaattttggtagaaataatatagtaagaaaaaagttaaattaaaactttataacacaaaaaaagttacttccaaaaaaaattagtttaaaaaatttaaaaattagaaatcaaattaaataaaaatttcgcaaataattaaaatttttttatgtattttgaaaatcaaagtgatttaataggaataatgatcaaaataataaattagtgtcttttaatagaaaaaattgcattatttattaaatagtaatgacaaattaggaatataaattaaattgataaattattaattaaatttaatacaatatattatttaaacttaaatatatactatttttaattataaattttgatataggtaattaatattttaaattcaataaaattaataactaattaacagtaaattaattatggataaattaaaataatagataaaataaaaatataaattaattatataatatgcaatatgtaatttaaaatttaataaaatgatattataaattttgaaaaataagttatttttactttaaataaaattaaattaatcataatatgtaatatgttatttaagataacgtaagatattgtaaaatagcataagatattataaactagcaaaacatattgtaaaattgtataaaacaaaattctttgattgatttgatctctttagttataaatcaaagatataatagaataattgtatttgtattatcacatagtggcaatctttttttttttacacatgcatgaaatatcttagatatgtttggagagactgagtcagaaacgtctcttaaatatgattctccaaattattcatgacttttttatccacatgaatagttttggcttgttttatacttatagtttgatctattacttatttgattgtttcattagtagggatttcggtacatcatccccttacacgttgtaagttggaaaaataactattagtttgcttacttttgagaactatagggaggtgctgccgaaatttttacaaaaatgaaataatcttaagagcgtagattgtactatatgtatattacaaatttgaatgagatattttctttacccttttagtaatggagcgaaaaggtggatatgactcttgcccatatttttgttatattttaaatttgctgtgaattactttatagaggaagatgccgaccgacagaagttggatgattgcgaacccgcactcagctgagatttgaagtggcatcaacaagtttgttgcggttgctaggaaccacgtaaatcctgtctgattatcttgatgaccttgcatgcggtgtttgaatatgaattttcacacacttgaaaaatataagggttcatttatttgttagcatgatccaaccttcgtagatcccttggtttttccatggggagtctttttcccagtctattgttcaacttttggaaaatgacgaagaagaaatggaacatgtgttaaaggatattgtaaagaccgcatatgattaataccttggattattaaataattaaggtttatgtaagagtttttgttattattaataaaaatacatattatgggaatttatttgagtttgtatatgtttattatgctatttatgtaaatttcttaatttctgtggttgtgttcagaagctgtggaaagcgacgttgggcctttagagagtcgtattttatataatttagaatattatcggggtatcattgtttgatattagaggcgttagaattttcgggctttggtaattgaccattttactcttggtttgttttaacctttgtttttttaaagaggggcatttaggtcttttatcattttggcttgtagtgagtttgagaagctgcgattacttagtttaattaggaaaaa

SEQ ID NO: 81202 - DNA, 1620 bp, Cannabis sativa
tgtgatttcattattcgttattagatcaaaattcgacggtttgatatttttaaaattaatatttattgttaaatttgtttagtaaccaataccatttataagtaatacccattaagaagtgttttatacatatacatccacatttaagtaattatcattaaaattagcttttctttatagtgactctttataaattttatcatttaagagacatttttgtaattatttaaaccacttgtatatttaagaaaatttcaaacaatatatattgtcaaaaataaaatttaaatgtacatattttttttaaaaaaaattatacatatacaataaaaaatttgaacctatatattttccccattatgaattgttgggaattttatgaaaattttatctagcaaattaacaacatgcatgtgtaaattaagtacaagaattaattgtcttttcatgttaaggtggcaactcgtaagtattaagaaaatggattaaaaaacaagcaaacattttacaattaagacttatgtcatgttatgcatgtgatacatatattattttcaatgatagtgatggcattttttttaacaaagatattcataacatgcaagtaaaacattaattggtttgagtatattatatactttacctcaaaaaaaaaaaagtatattatatacaaataatatttaaaaaaaaaagtacatataaaaataaatccaaatatctacaatctagcatttaggtttgtttatatgtttttattaccctatcttacatgtcttggattaaaaataataataaaaaaaaaatagcacaaattaagacaatatatatactagataaaaacaagtacatgtttgtttaattttattttaaaagtttattatttaataattatgacatttaaaatttaagattttttttcagttataaccaaaaaagacaataatcctataaaaaaatagtgggtcggccaaataaataattacacaattaatccaataaaaaattacacaaatatcttttacacacacctttaacccacacgattcccgcttcttgggattgaaatctccgtatgatgcaatgaggccgacaacgatggaaaagctctggtagacaaggaagcaccattaattttgatgacatcacttgagaagaagaataaactcaaatcgaaaagcaaccataatcgatagagaaaattttttgcagaaaaacttgtatcaaacaccctgatttagaattcatattccataaaactaatcctaaatttaatttacaaattcataaaatgtagatttgtaagaaataaattttaagttcccgatcaattcaaaaatcaggtataatgaccaaatattatgaccgttgcattaacattttttctagaattttaatactggatttattcaattatgatcgcattcatcattcatctcgcgccacagatctggaaatattattattttttttttatatagttgcattataattggttatcaatttaattaacactttgataataaacgtatcaataattacgaatggataatgctacaataattttagtcttatttgtagatattttatattgacaattcaacaaaagactttcataaaaaa

SEQ ID NO: 81203 - DNA, 1718 bp, Cannabis sativa
tttacaaaaatatggtatagttgaagttactcacctttcttcaaaccaaataacaaaatagagaacaaagaaagtcctttccaaagtttgtcatcggagctgcaagtggagccaccgacggagttcgttgtatgtcacgattgaaattcaccactacattagtcacgcagagtttgttgccggagttcgcttgactagaatcgtagcctaagagcactcacattaattcctttaaaatagctaattctctaaaatagagaagagaatggctgaaaatataccatacatcaagtaatgtattttacatattttttaaagtgcttctccacatgtagagaagcattattcatgctctaaatttattttattaatatttgttttttttatatatgtgtataaattaatattatatatttaaaataaataaatctatattttaatgatatagaaaaaaaaaaaaaagaaagaaattgattaatgtatgatgtaatgttaaagtttgaggtaaaataaagaaaataaaattttaataatgattttaaaagataaagtagaaaagatgagtgctctaattactgctgatttttatttaagtgtattttgatagtggtaacatagttactattatataactgttgttttttacctaggtaagtaactagttacccttacaatctagaacttgtatttttcaaatttatttatcttttattgatcaggtttcagatttgattattattagggtaatgatttattttgataatattgatattggtaactgtcatttcacacacgaaaaaataaagggaactggttaactgtcatatcaatgtttaaaataattattcgtcactggtaacttgttactaaagagaaaagataagaaaaaaaaaattgggattatcaaaatgtgaaaaaacaaatcccataaaaaagtgaaaagttaaaaaatatcatataaaatgcacaaccttttttttttagcaataaaatccaacaactttaaataccatatttatcatatttcttgaaaactttatatatttattgtaatttcttcttgaaataataaaattgaattgcatccttggaccctagaacgtctaggctgcaccttcttttattttttcaaaaaaaaaaaaaaattgatatatactatttcttattgtaaattcataccattagtgtaatggttcacttgtaaactagttatagtttattatttaatcataaaatatagttatgtggtttactagtaaatatttatagaaaatttacaattgtggatggaagcactagaaatttatgatgagaggctgagtgtggactgttttcctcagaagttggcagtgctccattgtctttgggtaatttgttctaagttgtctcggttgtaacagtcaatagtctcgtgatccgtaaaggaaaataccaaataagttgtgcaatcccaaatagcctgagaaaggtcaagtatgatgattctgaaattatataggtatgagactatatagttgaaaagagcttaagtgtattgattcatacaacctatatcaacaaggtacatctagttttctggtagcccatcgcaaaaaaacttcacaattaagcaggaatgttacatcggtggcttgggggaagcaagggaattggggctattttgttatctttcattctttgtttggtttatttattccagtttgttttattttgtcagt

SEQ ID NO: 81204 - DNA, 1384 bp, Cannabis sativa
actcatcaacatcactacttcactacattaccacaacaaaccattaaccacatatctacctattctaaatctaaaccaatacaaatttattatcaaaccatcatacacgatcatagattaaatggtcaaggtctaaagaaaaataataattttttataatttgacatcaagacacgaaaaaatagaaactaattaaatatataggatttttattcaattgagaggtgtcgaccatgcacttagtatatatgcctttaaattaagtcaagtgcatccattaacaataatggtttttgttttggttggaaacattatctaaaaattcggagaaatatacgcttaaacaaaaagaaaaatgggagaaatactaaaagggtgctaaaattattctgaaggccttattttgcagtggttttaaataatttcagtatctaataacaaaatagattaaaatttaaaaaaaaaaattataaaagtattgtcatgatcgatagctcgatcatgaagttcatgcacaaacaagacaaacaatgcaatgaatcaagtgattataaatcagatagttgacacatgaagaactgaaattaaactagagcaagaaatacgtggtgtaatatcacctgtttactcttccacgagaacagcctagtggctttatatttttattaagctaaaaagaatcgattagctagttgtacactaatgtgttctcaaacacaatctcttaataaagcttttgcttcaattacgtacataattatcttacttgcactggatgatcaaacacatcatcagtcattacaattcttttttctctcttcttttctttataaactatagctcactaattcttctaatcatctctcttaaaaactggtaccatgcatgatataaagggttggctattttccaaaacaatcactgtcataacagatatagttaaaacagttagaaactgttaaaagaaaacatccatgaccaatcacaacaattattcatcttaattattgagattaagatagagttatttcattaagatttgaagttgaactggtattgaatcctcatctagcacttgagggtgtttactaagtctttatctgaacttagctaactctcatacttcgtcatcttgtctgcttggacctcttatgaaatatagaatttctcatcaaatgtagcactttggttatcacagtgagctgctatgttttctgatttgaaccccaacttttttgtaaaacctttaagcctaacaacttcttttatggcctctgttgcagttatgtattcttgcctctgtaggtgataaagcaaccaccttttgtaggttggatttccaaccaacacatccacctaaaattgcaaaggcatgtctagtgat

SEQ ID NO: 81205 - DNA, 896 bp, Cannabis sativa
taagtatgggctagttttgcgggtaagctggtaatgaataagtcaaaaaattcatatagtgcaagtaacctagaacttaaccatctcaggattaagatcaattaacctaagatcaactaagtaacaccgacctagaaaagatacaacaacaagttaataatacattttccactatcaacattggtccagtccgatgtatagctaatacattcgatacaagtttacttcgccactacactgtaaaagacattccacttatccaagtttaaacaaaccatatcgttgattatctcacatatcagtgtaaatccagtcaactaataaatcatgagactaaatagtttgaagcataatatcatgattatttttcactgtgtagactacactataatcatgaataatgatatgtttgggatttaacaagatttgtatattaaaacatataatcattaaagtaacatgtgagctaagtaacataaaatgattttttattttttattgattagtaaataatgattctattgaactgggttttattctgggtataaaatcccaataaaaaggaaatgagatgaacaaaggaggatgagccttcgatctcaaaacgagcagagatcataccatttaaggtgactcgtgcatggttgggatgaacggaggcaacttcgatctctggatgaatgaagatctaaatggagctgatcgaaacagagatgagagggacggaggaggagagacgagcggagatcggatggagccttgggtctcgccatttgagatagaaacagagataagaatactttactgttttgagtgagagagagcgaatgatatctgaaatgttttgagcgaatgagccttaggtattcaaacttttttttttagagagagagaga

SEQ ID NO: 81206 - DNA, 694 bp, Cannabis sativa
ttatcccaaataagagtgtagttccatctggcctcattcaagctcttcaatatttaatctagtaccaactcttccaaattcttttatacaagtaaatatatttttaatcaaaaatcataacaattttttttaaaaaattgtgtttcattacctttaacttttacctttatagcgtatatagctttttcataaagtagctaaaagctcttagttatatagttgtatatagcattacataatatgttgttttcattcaccatatactaaagctttgttttagacttagttctcacactccaaaaacattaatgttgagaaaatttatcttcttctttttgttaaactcaagtgttaactgttaaagtttttggagaattcaacactaataaatagtctgcttataattttcgtggaccaaagtcaataaaccaatttactttttgaaaaaaaaaaactaataaagatatttatttcttgagatgtactaattatgttcttaaattttgtagtttgttaaaaatttcagtttgattattagatttaaagatttttattttttaaattaacagaattagacaaaagtcactgtctaacaatctctatccttaagggaaaatttttatgagtttaaaaagttcaagaacataatttagtaaatgttaattgaaggtagaaatgctaattagccaaaaaa

SEQ ID NO: 81207 - DNA, 1162 bp, Cannabis sativa
taaatggttccaagtattctccctgaagcttctattaggttttttatacatgcatgtcagtcgaaactcactcttacttggccacaaaaccatgcaatcaatatggttcttggaaaagttgttgatttgaacctcatccatattttgcctagtaacgtaagatctccactcctcccttgggccttaaccacaaaataaccctcaaaacccatggaccttgccaaccaattttccttagttgtgtcgcataaagtctcacaaagaaaaataatatctggcctctttagaacagcaagttctttaatgaactcagtagcccgtgggttcccaagtccatgacagttccaaccaataatactcaataattttggggtgatcagccccatcaccaaggtttgctgaattcatgtttttttgatggccattaattccctggcccaaacctaactccttttattcaagatcctctgttgctttccttcttttattattaataaccatcagaccacctttttgatttttgattaaattctccacaattccatggtcaaggacaccctcaatattagctagcttacatattttagagatcaaagaattatttggagccctaactctgaagttactactcgacacatgtcctacaatctctcctgaatcactatttaatttccccatattctcatcatcatcattgtcactttccatattcatcttctagttttgagaatccactactactattattagccatcaccccaagaactaagcctttcatacgcaaccatcgagctccaatattctgctttctttttcaaaattgagctcttgtgaaacttccataagacttgaaaattttctccaaaggcttgtcaaatagcttcgcatagtacctctcagagtgccctacaattctagatgaaataaaaagtgagagcacgctcaaaattaactcaaaaataagatctacctgtctttgttaacttcatctttcaatataagggtttattaatatcaatagtgactcttacacgaaggtaatcttgccaaactctaagggtgtgtttgaaaacaactgtgtaattactaccctagtaattacactgtatagtaattacattgtattttaaaatacaaggtgtgtttggatgtcaagtggtaa

SEQ ID NO: 81208 - DNA, 1816 bp, Cannabis sativa
tggaggcttgaagagaagttcatgacccgtaggccttttacctccacgcagcattgtttcgtcaggctttcgtctattgcagaaaattccccattgctgcctcccgtaagagtctgggccatttcacaccaaaaatattctcttaaacgtttttgtattctttttgtattttttctttaaaaacgagtaaataatacaattaagaaatttcgaaagcgtatttgatagaacttttagagcatacgatgattctttcgccatctgagacattaatttacctttatttatcttttggaaaggctaagttgtaatttgtttggtaagtgtataaccccgtatatacacatatttattcgtgacaaacaaaaatatatacatatttatcaatagctcattgtttaatataagaggataaaaataataattaatagacatatctattaaataaaaaactagctaatatttataataaaagctacaatgacgcaaagttgtcttgtttgaggccggccaaatttgttgacataaatattttatataaattatattgaacacaaaagatggtgtacaactatatgtgtcaatatagcctggtttccttataattacatcgtgctgcccaatcatgaaaacaatattagcattcaacatcatgactacattaatatatagtttatcttcatattcatattaaaaaatgaaatctatatatatacttattattaatatgcggcacttaccgtctctttcgacgtgctctccaggctatatatccactgatgacatttcaattatgaaagcattattcaatccaattcaattgagccgaacttatacaatctaatctaattacaaaaaattactactaataattacaattagattagattagatattatagttgaattctaattgaattggattagttattggatgtcaatcttaaaatccaatcaaaaatcgatctaatccaattatatttatatatgttaaaaaattatttatataataaaaaatatttaaaaatataatatatattaattatatttttattaaattttatttgcgtgttgaatttgtaatacttgattgttttgtgtatttattttcatgatgttttgttttattttattactaaaaatattgttgttttaattatttaaaagttttgactacattacacttgtaatgatagtatgatagtccttagattttttatttgttgctagagattataataatgtggctaatagtctgctaagtggagccgtttggctcaaaagtctgctatttggactgattgtttacctatttgtgctgctgctaagttactagcagataagcatagtgttgcttaataaagtttttctctttcaaaaaaaaaaagcaatacttagtttctacatatttttaaattaatattgaaatttaaatgtgtaattacatatctaattaaaaaaccgatccaatccaattagtaattgaattagattggattgaacttaaataaaaggcaatacttagtttctacatatttttaaattaatattgaaatttaaatgtgtaattggatatccaattaaaaaaaccgatccaattcaattaataattgaattagattggattggattttaatgtctaattggattggatcggatgataattttccaaatccaattactgattggattggatcggatgaaaaaaaatgactatttacataaatatactgtagtttacatatatatggcaaaaaaacttaacgccactaagggtgtgtttggaaagtcacgatgtaattaaatttgtgtgtaat

SEQ ID NO: 81209 - DNA, 2200 bp, Cannabis sativa
ttaggcacctattaagtgatgtgtattataggaagaatttgaagattgttgcaagacacaagctaatataatccacttactaatgttaatgggtttacgaagaatccttattgtaatttttttatttggtttaatagactataaatttcttttaaaacttaacctaaaaagatataattattatttatttaagtaaattaagtattttaatatataaacaaatataaaacccacaataatttataagctatgtgggatttttacaatagtttatagtaaaaagtcatatcagtaacatatataaaatacaaacaaattcactaatattctattttaatgaatagataaaagagaaatacgagatgacattaattaaaaaaatgtataaatattttataaaacaccgcatgtattataaaataaaaaatcttttttaaaacactcacaataacaatatctttaaactagttcaaaaggtaaaatatgaagaatatgtattaaaattgtgttctaagaaatgagctaaaatagcttaaaaagtaaaatatgtggagaagtattattcatttttcaaacaatattttaataatttctctctcttttctttttattttttcatttaatattttttaattttttttgtttatataagtaaaatataatatttaaatgatgtacggaaagaaataaaaaagctgatatatgatataatgcaaaagtgtgaggtaaaatacaaaaagtaagattttagtgaggtattttaaataatagattagagaagttgatgagagtgcacttacaatgtgagaaaattacactacataactcttttaaattgatgcttttaatttttaactcattttttaaaatctatattaccaaaaagtttccaaaaagtttattttgatgtagattagtccccaatattgagaaatagcgacaatagttttcaatgtcacgtttcttgtaagttcattagtcctttctttgacggatccgtttacttattcaaaaattctatttgtcgaaatattattggtccaaattataatttatttaataaaaattgaaaataaataaataatttaaaaatcataatttttttctcaggggtttctttttttttcgtcttcttcatcttccaacggttcattcaagcctccaccccaagccccgatccaaccagctaccaaaaacccaccacccaccctttcgatctctcctcagatctcactcattccctctccccctctctcttacatctagctgaacccaatcgtcagactcctctctcaccgtcacaatccagatgtggcgagccctctccaacatcacggtccagtcacagccaacctctccccatcgtcagttcaacaatcacaaatatagtataacttaacatagctgttcagatctcgtcaacggggagcataggtggtccgccttatttgggtagcaaagagcttgtctggccaaatctcgtcgatgatagaagaacattcccgctctgacgaggagaggaagaatgagaaagtgatttgggactttggtgttctcgggcattgggtaaacagagtagtggtctatttagggtgagggttgtcggagcacaaccgttcattgtgcgggttgggtgaggctgtcatgagggttgggggtggctgaacgaagaagatgaataacaaaaagaaaataagaaaaaaattaagactttttaaataatttatttatttatttatttttatattatttaaattaaaatataatttgtactaataatatttcgacacgtggtatttttgaataagtaaacgaatctgttaaaataataactaacagacttacaagaaatatagttttggaaactattgctgctatttctcaatatttaagatatataccaaagtgaattttttggaaaattttgccttaaatttctcttttgctaacaagagagttaatgaatctaaggtggagacaaaaacagaatactattttttttttcttttcagtagtagaatcaatgtatatatttgagtgaatttggaagggatttgattatttatgcatactaatgagggaaattaatccttaaacttatgtattttaaaattttaaaaataggtctactttacattaaacttaaaaatactcttctcatttttcaaactcccagttttctctacacctctctctctct

SEQ ID NO: 81210 - DNA, 910 bp, Cannabis sativa
  modified_base (879)..(884): a, c, t, g, unknown or other
ataattggattggatcggatgagtccaaatccattggatgtgatccaatgaacacccctatggtgagtggcacatatatcaataatccaactagatttaagattaaagaaaggtttaccagtaaagtgaaaagctaaaggaggatcactttgattccttgtagctccatcaataggcctttgagacaggattggcatgatttgttgatactgcatagacaatcaattgaccaagtcttgattgccatctttattttcctcatgtttcgtttccatattactggtagtattagcagctatggaaaaatggcaaagactccttggctgatgttaagctctacagaacaacgattgggaagcttcaatacttaaccattacaagaccagatatcaatttctagcaactcatagatcaacacatttagttgttgcacaaaggattttacagtatgtaaagtcctcaccaagggaaggattattcttttttgcaacgtcagtgcagctcaaaacttacactaattcggattgggcagcttgtattgatacaagaagatgcacaattggcttttgtatttaccttggagaatcgataatctactggaagagaaaaaagttacaaacagactctagatcatctgctgaagtagaatatagagccatggaaaacacagcctgtgtgagcttgtgtagctactctctttgctcaaagaattgaaagtggaacacaaggtaccagccatgatgtattgtgacaatcgtcgagctcaacacatagcttctaatcctggttttcatgagggaacgaagctgatggtttgagaataaatttctattggtttagatttggaataggtggatatgtggttaatggtttgttgtnnnnnngtagtgaagtagtgatgttgatgagt

SEQ ID NO: 81211 - DNA, 971 bp, Cannabis sativa
tgacatgtaccaaattatgtcccgaacttttaaggtcgttaaatattgagattgttagatttaagaacttttttccaattttagttaaaatgtctaacatggatgaaaattcacaacgcatgatttagtacatgtcaaagttcgagggttacaatttggtagacatcaaagtctggggagcatagtttagtacataaataacactaaaatagtaaaattgaatgaaatttgataaaagtccttaaatccaacgatcttaataattctgggggcatttttaacgaccttaaaaattcaaggaacatgatttggtacatgtcaaagtttctaatatataatgttaaactatatacgcggtatagatatttgtaactaatacataaaattatatatcaaacacatttaatgatgtatcaaatgaccataactatatatatatatataaattataaatttattaaatatcagatcttatttcaatagtggagatttttaattataattatgtatacaatttgttattttatatatatctttaagtattatctcctttgatgagagtggcatgccaacttggagcttgttcaccttttttgtgatacagtggatataattggttaggtatccatgcaataattagattcttattaatttgtgactaaattcacattgtttggtaaccaaaggactcccttggttagtttggtaaatttatatttgttatacttatttattaaactatttaataaacaaatctaatgtatattacgagacgcaaataataattttctcaataaatatattgttgaataggtagaataaactaaggatttaatttgtgagttcacctcatctaaataaaaagcacaagacttataaactaaagtatttcaatgttattgggatattattttgataaaaatattttattatttattagagcaatttgcggcgaaacccccttatgtttt

SEQ ID NO: 81212 - DNA, 1001 bp, Cannabis sativa
aaaccctagaaaatcatattccctattaccggtgttaaggtcagcctcggccgcctctctcagcctatcacacaggtaatgtctcctctctatttatataaattttgagatataaacacacattattatttttttaaaagcgatgtataaacacacatgatttgttagggtaagccgataaataaattaataacaaaataaatcttattacttgtatatgtttatgtgtatttgtgtagatttgtttatacattaggatgtctttattttatttttaattttttttaatgaagggatgagtttatgtttagtactaagaggaattacataataatgaaatttttttgtagtagactccctatgaggtttttggtaaaattttttatctgtatcgacatttaaaaaaaaatagtttaatttttttttttaataatcacatacattgtagctatttagaattactcgtaagttttaaaaaaaaattaaatagtttaatgtatcgaatattaaacttaaataattacatatgcgtagaaaaaaattgcgtaagctaaaaaatatataaattttatttttggtattaggaccacttataaatcttatttactatctgtctcttatataacaaaaataagttataagttctgtcaaaaatattaatttattatttgttttcttatgtgaatatttgtggtattttgacagttcctctcttctctctctctctcaccagtccctctctcttgtcattggacaacaaaagggtaagtgattttttggttagtgtaatggttaattaatttttaaaattatgtttgttaagattggtgtttgtgttaattcgtttttgtttgtttgtttatatttgtgatgtttgtgttagattgtgtatgtttaaatttgttatatttgcctgtaaatactcatcaaagtagaaattatatattgagtattaatatatgaagatttcaaagtaaaatgtttttaattatatatgtatt

SEQ ID NO: 81213 - DNA, 1031 bp, Cannabis sativa
tttctatggtttgtggttctcagtagtgcttctgcgatgaactttagataaacttaatattttgctcaatgggttgacaggagctactctaccggagtcttaattcttcagctgctgtaaaatttgttggaaacactgatgggtcctcaaagagttccttcttgggttgcctctccaaatttgttaaccaatctccagaagtatttgtatgtgttttcttctttctttgtatataacttaggcgtacttgtaattaaatattatttccaatataaatttataggtcttgtaactaaattaaacaggcttttgttatctttttatgttgttttcagtgatgtttctgctaactatgttttaatttttgtcttttaattcgatttcatgtaataagtcatggacattagcaaggaaaaataattatttaggtttaggatatacaaaactaggtggcaatgcttaatgccttttatgaggcttgcctttagaagaggtgattgtttttcagtattcactattcaggctttcgtctctggatgttttaccctgttgaggttatgtatacttaattctgtaggtggtgtaacacttaactcaaaaccactacaaaattgatgaaaaatagaaataattgtttgaaggctggtcattgacatattattagtactttttcattatgctgtttaatgttgtgccctttttcgggttattcattattgattattctatctatgtatgtgctattgatcattcaaggagcatgtataccatcctaaaagcatcaacattctctttgacatatacaactctatccttgtattttttcttggatgggtactttttatgtatagatttctaagaagtgaatacaaacagtctgatgtaattgaacctatacttcatgtcagccataaaacaagacaaaagaaactaaaattcttggacaacataaactgccggatatttagtttaaaaatcttatagtcagcctaacaatattatgtagttcattgagcagtttcattgactct

SEQ ID NO: 81214 - DNA, 1843 bp, Cannabis sativa
gtgtttggtttttgggttcggaaagtggtttttggacaaaacccaaatctagtttttgcgcgcttagacagaagagagagaaaaatgatttttttaattaatattctttggaattgggcatcctatttagatttttggttccaaatatttgaaaatatttgacccttttgggaaaattatttggtgcttttatatttctattttcaagtttttatattacgagggaaatgtaatgggcaatagagagtagagagttcacttttaacaccaaaaataataaaaagaaaattataaaatagattaaaaattttaaaaagattataaaaaaaaatacttaaaaaaaaaaaaaattatttttactctttgaaatttttttatttatagaaatatctcttcagtaaaaataataaattattttttggttgttttatagttatattatagttggcataaagttatttttttagttgtttcacattttatttgtggttaatttatagttgtcgtgaggttaatttctagttattttttagttggtttcttactttttgttgagaaaaatgtatttttgtaatttaaaaactttaaaagtgcatttttgtaaataaatattttaagtcttgtaaataaaatataaaaaaaaatggtatttttgaaaaaatttctcataaaaaatgtgtatggatacacccctatttcggtattcacgagaattttttagtaaatttttttatagacgtgtacgttatagttatttatgacatctgacaaaattttgaaaattttaaaatatactaaattactcaccttaatctatcaaacactaagacgatgtccatgggtttaacttcagaccattccagaactcgacctagaatagttttttgagtgataaaaaaataaagtaatttgcagcataagtacataagtttaactcctagttgcaattaaatacctaagattaatttttggcggtaataatacctgaattatatttctagaactctgtaggtacctgaacattaaatgtcaaatcattatccacgtgctatttttttattggtacatataaattattttttaaaaaaattaaaaatttatgacttgaaccaattagggattgtcacgtggcaatttacttaatatttaacaattaggtacctacagagttttagaaatataacttaagtattattgccgccaaaaattaaactcaggtatttatttgcaatgggaaataaaacttaagtatttatggcgtgaactgggtcaatgagttttagcctacagttttgaaagtaaaaagggtacgtaggaagaaagagagatggtcttctactttctctctctcgtctttgagtcgtccttctttcgtgtcatccttaagtctcctgtttcttgcttctgtgttggtaagctggcccttgcttagctccttttgttctttctctagttcgtgcttggtcagtgtatctctttggcttggtttgttttctttgtctctttgttttttgtttgtttgagtttgtcttgggtggggttgagtgtttttcttgtgtaaagtcctccttttttacagttatttggagttggtgagattcgggtaggtagtgtgtctttggggtccatttacttctctgtttgtgtgtatttatggagccaatcattgcctccatctcttcccttaaaggaaagaactttacgtgcatggaaacttctgtcaagctttctccgtgcccttcttcggttaaggctttagctttatcgtatttgtacgggaaagtgattgctcccatgattgtggatatccctattgttttggaatttgtggctaaaacttgga

SEQ ID NO: 81215 - DNA, 1228 bp, Cannabis sativa
  modified_base (41)..(47): a, c, t, g, unknown or other
aattcatattaggatgataatgaaacatacttgttagtaannnnnnntcctgataaaatatttccaacaaccatttcctcagaggttcaagaagcaacaacaagatggttaattcaggaagtttttggatgttttaaagcagctacatatcaacattcccttggtggaagctctagagcaaatgcccaactatgtgaaattcttaaaagatattttgacaaagaagaggaggcttgacgagtgttaaatagttgctttaacagaaggctgcagtgcaatgttgtaaagcaagattcctcctaaattgaaagatctgggtatctttacaattccttgctcaattggtggaaaagatttgggtagagctctatgtgatttaggagatagtattaaaataatgcctatgtcgattttcaaaaagctaggcattggagaagctagaccaaccactgtcacttttcaattggcagaccgttctatggctcatccggaaggcaagattgaagatgttttagtgcaagttgacaagttcatatttcggtccaaatttatcattcttcattatgaagcggatagagatgtaccaatcattttggggaggccatttcttgctatcgggaggacgttaattgatgtgcaaaatggagaacttactgtgagggtgaatgatcaacaagtgacttttaatattttcaaggccatgaagtttccaaatgacattgaagaatgctctagaataagtgtgattgaaacacttgtggctgaaactttccaagaagaattatgcagggctgatttaggtatgaatgactttgataatgttgaaaggagttgcaaagaagatgattctcaagtcacatggatagaatccaataaaccaaccatgaaatttagcaagccttttgagtctttaaatttgacggaagggaatttcaagcctccaaaaccctccttcaagaaccactaaagctagagttggaacctttgccaagtcattaaaaatatgcttatttgggggagaatgaaatgctgctagttattatttcagaattgttggaagctgaagctaaaggttcattgctataagtgttaaaagggcataggagagcaattgggtggactatggctatataaaaggcattagcccaaaaatttgcacacacaagatactcttggaagttggttgtagtaactgttgggttttgtgtcctaaataaaacccatttca

SEQ ID NO: 81216 - DNA, 1724 bp, Cannabis sativa
cttgtcaaagaactaataagattttatttgggttttgttatttcataatttattacttttattaatatattaattaatattttagcgtagttaactgaatcattttgtactgcacttaaatgcaatgtggtttgcggttaataccaaaaatattaaccacgtggttaagatttttacttaataagattactatattgttgggttaaattgtttacctttttttttttgattatttttctaaaaataaaaagtataattttcagtaataataataaataatttagttacaaataaataattatataaccctttctttttaatttcagataaatgaataatgagaaaattaaactaaaaaaaatgtatatatatgaaatgtgatcaatggtgtatcactgtctgtgaattcacttttttgaagtactaattttcacacttatttatataaatatttacaatattacttattaactattaactatatgacataaataaagaatatctctcctttaaataaataaatagcacatattttgtaaagttaactacataaaagtaaacattatttactacaataaaaaattatataatataaaaataacattctaaatatatattagcaatttaattattttatagtgacattgatatatgatgttaatcaaattttatatgtatgccgtttaagattagttttctcattattcactaagtaaaattaaaaataaataaataaataaaactatcaaaaataaaactatttatttatttatttgtgagtattatattattattgattttttttctaaaataatagtcgaaaattactataattacttgttaaattaaaaattatattctttcacattataattaattaaagtgttatggactatggagggaatatagaaaaagattaaaaaaaaaaaaaaaagtccataattctaattttactttatttttctaatatgtattagtgaccaatctcaccttcatacaatttgccgtgaaaatccatgactaattatgagcgatttgtatatatgattaatagtggttaaatatatcatataaaacttgttccacaatcaatagtactagctatacataaaagcaatatgatatgtgtattttttatacatttttattacataagtatattttcatattaaagattaattttagtgtatatatgttaaatacgataagaattaacaacagagaatatatatatatattattataataattctaggaaggtaggttttataggcatatataaggattaatttggacccacggattaaataaatgggtgtcactgaggtggacctaattgaaaactatacttaattttatcaaggagagtgtcacaacagtcacagtcacatataataattctcttccaatgttcgttatggccactttttgtaccaatcagaaatttcagagtgagaataataatagtgtctaacatcggatcatattatcttctacactaccttgatgtgatttttcctcttttaaattatatatcttcccaaacgatagatgaccggtaaaatttaagtttggtattaaattagcactaaaaatattattattttaatactaattttttttaattttaatcataacactaaattttatattatttattatgaactttttcatttttacacttcaaatcagtttttttttttacatttttatggaattttaca

SEQ ID NO: 81217 - DNA, 1761 bp, Cannabis sativa
tacacaaaataggaaaccatattaaacacataccagccgaaattaataggaaataataaaatatttttgtcaattaaatatgccaaaaatagaattaacaagtatccatgatactcttgatcttgagaagagaatcacacagcaaagactagattttagtgttccacagtataagttttgtattgatcgatcttagcacgattgagataagtataatattcttgaagattgatccaaatatgagttgcagaatcaaacatggatgagagaagccatgacataagaatgttgtcttgttgctctcaatcttcaaattatggacttaatttttttgctcgtcaatctttttctgtgagaaactgcagtggagtaaggttgggatcaaggaatttctacagtcgacttccctttaacggctgcaagaacttgatgcttccatgacaggtagttgaactcatcaagtcgaacaaagagtgagtgagagaaagagacaaaattagttttgggaagattagtagtgttgtgaggtaaacaagtttgttgagatgaacttggaggaatcgacaaacctccattgttgattgctcaggtctgctcctttaagaagacgatacaagctctgatacctaatgtcgaaagtaaaaaaataattgaaagaaaattttgtttccattacaaattaagaaaggaaatacaagattatatatacacttagaatgagctgaaaagactcagcaacaactaaataactaaaagttagtttacacgaaaaaaaaaatagaaaagcgaacagcttataactgtataactaattaaactaaagctaaactaagtacccttaacatgtctaatatctaacacatttctttgccgataatagaagcacaattattgtacctgccctcatcgcagatgagctaccagcatgattagccatgaaatcagactttttctcaacaagtagtgtcatgagactttggtattgttctgctgtgagagtgaatagtctgttggcatctgcatgattagccttagaggaagaattcttgcactctttttggtgatgtttattacctgcagagtttgtcttttgtagcttcctacaaacatcaacagtgtggcctttccaactacaatattcacaattgaggtatgctcaaggttcacatttcaaatgtgaactttgtggtgtgaaattcctctcagagttgcacgtgttgttcttcacagcaaaagtcgaagcttcagtcattgttgtgttatcctttgacatgcctcgttgtttttcatcttgaaggatgaaggagtaagctttattgatagcaggaagcagctctatgaggagaatctgacctcgagcggcagcgtaaatttcattaagacccatgagaaacttcaatgtcttttgagtttgttgaaattgtagattttccttcatagctccacatgtgcatgaggtgatacaatataatgcatcacgttcatcccagcgacctttaagcttggtatagtaagctccaatggtcatgttgtcctgtttacaaccataaatggattcttcgatatgaaagagatgaagactgttagtgtgagaaaagcgatctcttaaattagaccaaatttcataagcgcttttataatataatatgcttgctctaatatcttgagaaattgaattaaaaaaccaagtgcatgtttggcattataactaaaaaactgttttttatttttaaaaacagaaaattgtttttaaaaacaatt

SEQ ID NO: 81218 - DNA, 2074 bp, Cannabis sativa
ttaaaaatttcagtatgtggtgcaaaaatttctttaaaatagaaaatactaatttgatacaaatacaaatagtaaaataatttatatatttatatcctacactataataccacaaaagttttgggactcttcacaaagagttattaaagagttcaagatctataaaataaattaaaagagatataaaacttaagaaaaagataattagaagaagctcatacaaatggttgacctctttatatttcacaattttataaatatatagattataaatatatagataaatttatagttcacaattatatatgtattaataattttaaatatatttaaataagaataacaataataaaatctaaaaaaaataattttttatatgaatacttgacaaaaattacaaaatacaaaaattaattttgtagtcacttagaaaaattataacttatcgggcgtgattaagttcatcaatcacccacataaaaaacaaataatattaaagtgaaacaatattgatttatatgttcgatggaattagtacgcaggtatacgtaatcgaatcaagtaatataatgataaagtagaatatcgttcccacgaggattgactatcaattaccaattaattaattatttgtttctatttgatcaattaaaaaaatttagaaaaaataaataaaacaaagcaaataattaaaaatttgagaaataaacaatgagaaaaacaaagattattatgattcttaactatcttttattttacttcttaatgtagttactcaatttctcttcattttttcaagaaagtgacaacttttgaatttagcctgcgacttttgaagctgaaaaatgaactttgattttttttaagtaatgagaatcccaattaagcattacttcaaatcttgaagtttttttttcccttcagaattaactatttttatctcaaaaaagattgaagaacaccaaaataaacaaaaacagagatctcccaatatttcttttaaaaaatacacaaaaacaaataccaagcataaattcaaataataaagcgataaaatattaaaaaaaaacacacattaaaatagactctaaaaatacataaaaatagatctatcaaattctcccaaacttaacatttactcgcccttaagtaaagactaagttaaactaacgaaaaagaaacaacaacgaacacaagaagtaagccaccattaccatctatactacattgcctttttgaactttcaattgaaatttttaagagaatttcagctcaacttccttaaagttcaaccttaaagtttaataggaaaataaataacatgactcacaaatggtcccaatatttaggctacatcatatatgctcaacttataccaaacaattctactaactaatttttcaatatgcttgcatcatttaaccttctccacatatgtcaacaacaaatattttgaaatcaaaagaactttaacaggttataacgttaagcttaggtaattgtagataaaaatatcatttaggcttgactatacaataagctttttacatttaaagaacctcaattttattataaaactatctcgttccccacttaatacattacaagagagaatttttatatattatattttttttcttttactttgctttgcaaaatttatatgaagaattatttcctattcttttttttttttttaagattttgaagaaaaaggattgcaacatataaaaaatttctatctaattctttttaagcttttagctcctcaaaaatataatacccaattataatttctcccaaaattacttaaaaactaatggtacagctatgacagaagaaaataataaataggtcaatttctttttttctttttctttaggtcaaaaagtgtgtaataaaaaaaaatcgcaatcggtttaagactcaaaaagagtaaactagggataatcacaaaataggttagcttgaaagacacaaatgttctaaagaaattgcctaaattatttttcaaagcataagtcatcaagaatttcacctcaaaagccaaacaatgcaaattctatcaaattca

SEQ ID NO: 81219 - DNA, 1159 bp, Cannabis sativa
gtggtaagaagtaacttactcacaaatccctgaggttctggttacaaaggcacgaactttgtgggcttcagttggcatttttattaccataccgaataataagtatccatactctagaaatttttttgtaaaattatttactttgagttccttgagttctcagatccaaagacttggacttcaattgtttgttttcctaaaaattttccatttctcaattttttagaagcttaaatttcttttatcaacctgagctagctattgggttttttgatctatcgtggtgagaagtaacttactcccagatccttgaggctccgattccaaaggttaaaccttgagcttcattttgtgcttttactccagatcataacaagtaaatttttagaggtacataaatgtacataataacccccaagtgagcttaggacatgggtccttgatcatttgtagaaacatatacaaaatttaaaaagacttcacatattttccttttaatttcctctttttcatacattgtgtttgccctaacgcatgccttaaggctttcatttttttggaatgaaaaagaaagttaaaatatgcagaattaaaagagatctagccacccccacttattgatagtaccgatgcaggtggtccgcattttaagcttgtagaatttctcacccaagtcttttcaatcaatatgttccatcacaccttgtgctagattttatatggtacctccaagttaggtcctagaaaccccactcccagttcttgagatgcaaaaaataccattctcaagatgagatcgccaacttcaaacttctagcttttggcttttgagttaaagtgtcaagatactttgccttgataaatttttagttggactcataaatgctcttgaagcttttcaattaaatccagagattcttaaagtaaagcatggtttcaggtaggatcataggtctctcgtctgtaagatggtacaatgatttccacatgatgatagtttcacaaacatacaccataaaaaattggggtacgcctcattgaagttctttctattgtttagaatgcccagagaactctaggaagttcttctggccaatgcgctttgtaagcttccaacttcttcttcaacattgtttttaagatcttgttgacgtcttcc

SEQ ID NO: 81220 - DNA, 1395 bp, Cannabis sativa
ttgtagaagaaggagtgttctggtagcataaattttggaatcggttgagtttattagtgtgaggaatggcattagagcatcatgatgatccaaaatgaataacttgttctgctcaattgcctgtatacattaagaaaaattacatcacgggttcatttttcaggagttggaaaaggaaggaaggaacaagttaaaataattagtacttctgatacagtgaggccattcatgtaagcctctatgtgttcttctgttattgtactgtcttgcttcccatattgtgtagcatctagagtactgacagggggaaacacctgtagtttacaaaatcagtagattgttcatcaaaaaccaattcagatagtaaaagtagttgttttcttttatttacttcgagacgacgaatgatgacagggttcactcctgccagcatttcacgtccaaactcctcatctgttctccaagcactattatcctctggattcaacaatgaaaaaattcattacttgtaaccccaaaaaatcatttggtgttaatttttaggtttgaccatgaaaggttcttgctttaactatattacctctgatcacatcaggcatgggaagcttgcgaaaaccctcctcttgacgaagaatttccctgagtaactcacaaggtacgcattctcttattttacttagtgtatgcccttttggtttcttggcttgatcatcatacagttccagtacttgtttgaaggagtcaaactcgttaaaagttttgttagtcaaatattttaactccgggatcaatacttggaccagggatttcaatgcataagcgagaaaatcagaaaacttcacatgtccaaacctttcatctctaggaacatagatgtctagattcaaaagtggcaatcttgtctcaatttcaggatctgtttcattcatacaaacatatttcttagtaattcaaaagctcttttaactaaaaacacattcataagctgtgtgtcattagaaattcttacactttttgtacttttttcgaccagttcttcctcttcgagggtagggatgttcctctgatccaccaagaactgggcgtgcatactttggcttgttaggtttccctaaatcattgtagtagtcatagtcatatactctatcccactccttgagctcaccagttccattgcctcttagattttttagctcttcttctctgtagtggtgcaacaacggaggtgtcttacaaggtaggtaagtctggtacaaaatagtaagaaatttaagtccaaacatgtttcttcaacttgacacactaacatgttttatgtttgttgtaggttcagtcactcacaccattattgattgtgcaagaataattgaggaagctcctattgaagaaactaag

SEQ ID NO: 81221 - DNA, 1470 bp, Cannabis sativa
ttagcctcatctaacttattcaatccaaaccagcccctacatctaactattacaagtttaaacaacctcaaaaactaccctaaaatcatattccatcattaatatagtttacaaccccttgaaatttcaaaactctaaccaaaactaacttaaaaccataagaaatcaggggaaaacacaacaagaacttacctcaaacttttatgctgctctaaagagtgattcagcaagagagagcgctgaattacagtaaggtttctcccaaaattggctggcttcaaggcttgcacgagagagaaagagagggagtaggttgtttttggtgtggttacttggttcttaagttatgtagtaagaattttccttttatttctttcttttttaaaataaaaaatcagcccacaaagtaaataagtcaaaatttcaaaatataaaatgactaatctacctctcaaagaaacctagtcttaaattataacctaggggcattatgataattttactaatctatcctaccgacattctaaaattctaaactagtctggaataccttcaaaataattcatccattaattttgtgatatttctgaccacatcatcaagcttccacagtcgctgggcccgaaaaatatttttatttaaaaaatagtatcctcgatacccacatatctcaatataatcttcgtaattaataaattacgctttatataactatttaataaatcctcactaattaccctaagtaagatcataatcttacttcattactaaaataattacatacttaataaatttgtctaattacatatcattctatttttcgggatattaaactatccccccttatagaaattttgtcctcgaaatttacctaaaaagctcgggatactgctcctgcatctgcgactctagctcccaagtcgcttcttcaaccttgttgttctgccacatcactttaactagcagaatagtcttgttatgcaacaccttttccttcctgtctaaaatttgtactggttgttcttcatatgataagtcggtttgaagctcgatgtcttcataacttaagatatgagttgtattagatacatatttctcaatcatcaagacatgaaacacgttatgaaccccagataaagcaggaggtagagccaactgataagctacctgacctactttctcaagaatctcgaacagaccaataaacctgggactcaactttcccttcttctcgaaccttcaaatttcctttattagggatacccgaaggaagacaaaatccctaatctggaattcaacatctctacgctttggatcagcgtagcttttctgtttactctgtgaagcaagcatacgagcttcaatattttcaatagactcactcgttctttggatagctttaggtccaagatacctgcgttcaccagcttcatcccagtgaatgggtgaacgtgttgggttttatgccct

SEQ ID NO: 81222 - DNA, 2580 bp, Cannabis sativa
gaaagagccaccagcctgagactcccaaatgtattgctcgtcatcattgtgcttggttgtcacaatgactttctcagcaaccaggtaagccgagtaaaacccaacaccaaattgtccgatcatgctcacgtcagccccggcttgcaatgcctccatgaattctttagtcccagaccttgcaatagttcccaaattgttcaccaaatctgaaaagacaccaacagacatggttaaataacaatttacaaaaaaaaaaaaaaaaaaatccaataaatcgttccttaaaacagagagtgtggttacataccagctttcgtcatcccaataccactgtcaataatagaaagggtcttgtttgccttatcaggaacaagcctaatgaatagttcaggctgcgcatcaagcttgctcttatctgttaagccctcaaacctgatcttgtccaatgcctataaaatcaaaatgaacacttcaatatctgttcgagttatctaatccaaattacacagatagcttccatacacattatatgtaagtacatatatacacacatttacaaacttcagttctaattttaagcacaaatttctaattaaataacccaatctcagtcacagtttgttcatctgataaataactcacaatcatctaacatacaaacaaagctctaatttaaaatcaaacaattcacattttaaatacataagtgcatgtaaattagaatcaaagtcatatacataaatgtatatgcgagtgtgtgtgtgtgtgtgtgcgtgtgcgtgtgcgtgtgattatagataaacaaacaaatatcagagcatcagtaatagaaggagagagaagacgtacatcagaggagttgctaatgagctctctcaggaaaatctccttattgctgtagaaagtgttgatgataaggctgagaagttggttaatctcagcctggaatgcaaaggtctctacgtctcccatctgaacgtccgccattgattgattctgattaaccttcttgaaatcttaagtaaaacacagaaaatattggaaatggagaaaacgagaatcaaagcttagagagatgattgcttttcagttttgaaaattcttctgaatgtcagagaagggtgaagatgaggatttatatagtggaatgagagaggtgagttgatagagaaagaagttctagagtgttcgtctcatttctaggggaattctagaattaagtagttacgttcagatcaatttgtattttcccagtatttctgtttttcgcggttctagactcatcttctctcatgccacgctggcttgatcgccttttttttttttttaattagaaattattgaaaatatatattacatttagaatattataacttttttttaaaaaaaaataaaaattgaaaaagataatataaatattattggaaaattctacaatgcaccttcttaaaataaatacattgatgtacctttatctattttagcaccaaaaaaaaatttttagtcaaattttttctcatggtcatgtacgttaaagttatttaagacatcttgcaaaattttaaaaaatttgaaaaagtttaacacgccgaaaaatacgttcaaacagtgtgctgcacgcgtgactattttattttatacgcgtgtaaaatagattgtttgaacattgttttctatattgtaaatcattctgaatttctcaaaattttgtaggttatcttaaatagctataacatacatgaatatgaaaaaaaaaattacacaaaattttttctagatgtcgaaacaagccaaaggtgcattaatacatcccttttaagggagtatattgtagaatcacccaatattattaatgtaaacattttatatttaaaaaaaatgtagttagactttattaaatttcaaactcgggacattttcttttaatagtgtttgtgtaatttttttattttatttatttatttatattaagtaatatagtcactttttacgcagttaaataatatttttttaatattataataacaaaataatttaataatttaattaataatagtatacaaattattttaaaatataataacactacataataacatctaattatatattattttaataattttatttattatatattatcgatgatcatattaatttttattcatattgagagagtctcacattttataaactctaacttttatattctaagtatttgtatgaaattaagaatatatagagtttagtaagtaatagaaaaaaaatgtgagttatgatttttaaattatgtgatatttgaaaaaaaaaattagccaataaaaaaaatcgtgtggtttaacttttaagaaaaatagtgattttagaggtgatatttgggtttaaaaaaaagtaaaaaaaaaaaatgtgtgagttattgtagaggtaaaaatttgcttaatatttgtgatatttttgagaagttcaatatgcaagtaagacgagcccataaataatggatccaacaatattgggcccaataagacagtcagacggactcactagaccttgaaatagactaacgagtgagcctatgggcca

SEQ ID NO: 81223 - DNA, 1477 bp, Cannabis sativa
actaactatactttatattttctttttaaatttatttacgcccccctcactttaaattctgggtccgccagtggttccactaaatttagtgggcattatacaccaaatttttagtattaaataatataataatcaataatatactttttttttttagttttagtaattaaataatagttctattacaaagtttttttttgtctaacaaaaaaataatatattttttttttgtgtaatttttagtattgttgttgaaataaaaaaaaaaataatgttaactatatttttttgatgttaaacctgcactaaatatagattttaacattggagttaagaagaacatgaacaaaaaaggtggtcaaaattaaattaatatcaactagctagttgtggtctttttttagtgggcagcttcattaatattgcatattttcttagctctgagatatatgattttttttcttttgactgattcgtacatttttccaacttcgtagacgtcagattatttgtattttttcattaaatactatagtttttattctaatataatgtctacattgtttactttcagcaacaaaagcaaactttgataacttatattattattgtagtataatgttacttcaaatttcatgagaaaaaacttctattaaaattatttttaaaatagggagaaaagattgtatatcaaatttaattatagtgtgtctataaattaggatatatagaaatacatttactttaatatattttaagaattggcaaattatatgtccatactatatgtgtgagctagtacattgaccaactaagaataaaatgatgtatattgtttcacagatataattttggatctactcaaaaatattgtttaaattatgcgatcaaattataattaatcataattagtgtctagtgatactattttcttatatgtgaaaaaagtcccctattatataatatccttaactcaaaaataaaatcatgagtcataaaagtagtgctatgcatattagtgtgccatgatctatatcattcaatatatgtgtttggcttttttatatgataaggaaaaaaagtataagtcacataataatgtccctttgaataaaagagtacaaataataatatatagtatatgatatgtatatataaagtgaacagtttatttgtgactgtagtacccttttgccacccttattcgaccaagtcaatcctttatcattttctattttctaaacccaaccttgaatattgattgtctaatttgcctattcttattacaaaaaaaaaaaaaaaaaaaccaacgtccgtacttatataaatgttaaacttgataggaaattatgtcacatatatcacaaagacatatataacatatttgacactttaataaatatttcgtagttttggattgcatggggtctaaattttaatatttcaagctatatgcattgaataaaaagaaaaaata

SEQ ID NO: 81224 - DNA, 988 bp, Cannabis sativa
agaagaaacaacagacggctttgatttttttactttcttcattaagtacatacagaccaatataattcaaccaataaacatgacttacagagtaaaaccacctaaaactcaacactaaatttgacattattatcttcataaacatataagacactttttctccctcacaacctcacaacaacaggaggcaatagaccaacacaatcacaatcaaattgctacgaacaatgagaataaggtactgagtaccaggctgccagccacattggacacatacaaagaaattaatagaaaaagatttataaagaataaaaaaagtgaatcatcttctgccaatttcaccataaataggggctcacaaaacttctttcataatcatgtaagtatacaaatgaaagtaaagagcaaaaggaaacttcggccttattttgtagtaagaatgtctcacattagtaaacatgaccattatcacataaaattcgaaaatgcaagtccccgaagaggctacaatacaaagacggcaggacctatgtgcaacctgactagagttgcagcatgagaaaagatattgatttctaaaactaggttacactgcctaaccctacaatatttaaagagctatatcaattgttgtggctgtgcaatgtaggcgcaggaaaaactcgaatttcaaatcttgtgggaacaaattacatgtctacgcctgcccacaacagaatattgactatagccagtaaattccacagaccttgtagagtaaataataaaaagtaaaaacttcacaaaccaatctgggcataagttctctacttgaaacaggattttctaaatcgctaagctaaattcagcagtgacttccatttgcctatcttctttcctactcttattttaattctttttctgattctgcataatattttatgtccactatgagctaatttgtaatcatctccaacatgagaaccaaaaaagagaagcttttaacaat

SEQ ID NO: 81225 - DNA, 1878 bp, Cannabis sativa
caatgttagcaggttgataaaaatgcagcatatatttcatattactgtactttttattgaattaagctgatatggatatttgattacttgtacagctctcatgtacgtgctggtacctatgccttgcttattctttggtggtgggtcctctcaatttttgtttagcagggaaggaggggggtaagtcttcctagcttttattgcttgacttgaacaagtgtttatcacttgattttatgtcttagttttctttccccataatttttaaaatgacaccaaaaggcctgtgtcatgaccaggacttggcttatgacatttatttgtgactgaatggcattgttgaataatatgtaggtttatgttgcttgtagacattgttttcatttggtattgtaaatgagatctatattcttgtttacgcttgaaacatatttttgtctccttcaggggtttgccttgttgtttatgccctggtgttgggaatattttttttagttttatttatgggattctaccatttttgcaccctgttttttgtcttgaaaccaacttaatgctttgttgtttacaataccttgtatattgttaatgagaccgaaattgtaccttttcactaatttcggtaaatatttttacaaacaatagggtgatttaccatatacaaagtattaaaatggcattaagtgaacaatatggtactaagttggttccaaaacaaacaacgtactaaaatgacctattccctttatttactccagctgaattgctctgtcactaactagaacttgcctattcccaatcccaagtccttaaatcataaattgttaggcactataaaaattacacaagctatccatctatgaccttcttctattagtttgaataaatgtgctctatgttcatggctttaccgtgtttgtttatctcaattattcgtatattgcaggtggattggtgctgctaaatttttgaccggagcatccagtgtagggagcatagctattcccatcattcttaggcatgctcatttaatttctacaggagcaatgctcatcgagttcgtctcattcatcatcttcgtctgtactgtcttgtgttttcaccacgctagcctcgaagatgattggtaacaaactcgaacgaagtaagttcttattttggtttcccagcaccacaaaaagagaaatcttatagtggggaaacatgtgagatactctccaacattgtacatcagttatatgtatatgattttagaatgctgtttgataaacctgtcttactaaagataaggttcctgtttaacaagctaaacacggaaagattacatgttgataatcttatttggataatgaaggctgtgacaacaaaggctttgctcccatttctgggtttcgcagtcataatcttttcattcaattacgtttttcattttgcaaaatatttttgacaacaaaatgattgtttcattcatgtccaatctagatcaccctgaaccaatcttctaaattttagtacatgtagtattttacacattataatataattacaaatgattaatttgttaaagttgttgcaaataatatttagtacatgtagttgattgccataaaaaaatagtaataataaaaatatggtatattcttttctcttttttttttttttttttttttaaactaaaatatgattttattaataagacaaattgtctaataggaaagacataaattaattcaccgggaacatacctcccgctaaagaaaaaaacagaaagttgtagtaaaactatgagcaattctattagaagaataatgagtaaacaaaaatgaagcttcgttcaaacaattaaacaaatgcctacagtcattaataactaattca

SEQ ID NO: 81226 - DNA, 1537 bp, Cannabis sativa
ttaaaaaggaaggaatgaccatttaaatgtaacaagaaaaaaaatttaattatttttttatcaattatttttatgcattttaaattttattacattccattcctattcccattcccattacttctttgttctgttagtgcatggattgattgatagcatattaacttgaaattaaattatgcttcttctcatctttgtgaacattccattaccaccatatattatataattggcacttttcttaatattattaaagtagcagtaactattcagatttaactacttgatttttactattcagattctctttctcttctctattttactcttattatcttatggtctcactctcactttagtaatctaacatttttatgtttcttcttttcttatattatttgtttgagggcttgatttttaaaaacccaacttaaatttttaagcaaaagaaagaactaacagtgttttttcttttttgtgaggaaacttgcagtgttgttagctaggaccaaagagtttttcatgaaagaatcagagtaagaaaatatttactcaaaagtgaccaatatagctatgaatatgcaatataattaaaagctcaattaatatgtataattaaaataatttaaaattatagtttatattgtgtaattatttataattaagccttttagttttaatttttaaattttatttattttaaattaaacataattgataagattttaaattaaataaaaaaaataattacaaacttttcctggtgtattattgagatggcaaaagtcaaatatccatgtatcaaaagtgacttttgccagcgcgttaatgcactggtaaaagtaagatttttctcagtgcataattttgcaggtaaaaattaaattttcgccagcgctttaatgcgtaggtgaaagtaagatttttttttgcgcatgcgctaacaaaagtcattttagtcggcgctttttattttgcactggcaacaatttcaatactaatgcgaaattgtcaattctttttgctagcacaaaaatacattgacaaaaataaattttattttaccagcataatactcaatttttgtcagtacaaaaatacattagcaaaagtctcattttttgtcgaatataaattatgaaaaaatgaactcttatgattaaaaaaacaatgagttacaatctaaacaacaccttttaggcttaaaaaaaggttgctatttattttacttctctttacaaactatcaaaccattatttgtacaagtgaatcaatgtgtatatataagtttgtagtttcaaagaccttgatttctattccaccataactgaaaaactactgctgccattattgctgaaaatatcattgaaatttcaacagcttgcgctcctatttacccaccttagaatcggtttgagagagttgcttgttgttaggtgttacgtgcagtctacgatggcacgttacaagctaagtgatgcacacaagttggccaagtggtggtcaagtggtagcgcatgttgtggtgcatgcaggt

SEQ ID NO: 81227 - DNA, 675 bp, Cannabis sativa
agataaccttaacggagagttttttcttgagactgaacttgttagccagtgatttcttatggtaaatcgatgctaaccttctccacaatccaataacaatttcttcaatggatatctcttgaaacctcatctcctaagctcataaggattgcactatgagcctttgtctcaatgtccttttgatcttctcatatttcaattcatcgaataatttttcatcgattacttctgcaatcgcttaatgcaataacaatgcattcattttaattcttgaaagatagaagtcattaaagccattgaatttgcctgcttcaaacttttctaaagtcatctcaatcgagtgatcttggaagtgcggataataggttcttgaatcttggatcacaacctagagctcttgtaccaattgttgtgaattaatcaccatagttttaagagcataacttaatcaagactcaaacttaagaacaatatgacaaatagacaaattaaaatgcaacaaatttaaaagatgagaacttagtttttattcatcaacaataatctctacaagagagattgaatctttgagcaatacggaaatggaaattaacatcttacaaataaactcacactgagaagttcataatcaaacacacaagccttctatttacaacctctctctctctctctctc

SEQ ID NO: 81228 - DNA, 1073 bp, Cannabis sativa
gtgaaatggttgagaccggaggtgtcgcggtgatcaaaatccccgaaaccctcgtggacgcggcagaggtcgcggtcgatctcaaaggggtggccaagggaattaacctcaggatcctcttgaattggagcaaaggtttgcagagatgcaagcccgaatcagccaacaagaagatgaaatttagaggtttagacaacagagtcctcctgtagtgcctcctctgcaagcaccagctgttattgttccattgtttccagtagagtaacctaatgctggtagccatataaagcctttatatgaacgatttcgaaagcaagtacctcaaatctttttagggggtctcgatgttatgaagttgaataataattgacagtaattgaaagaattttgaattttataggagtcatcgaggttgatcgagcgatgtgtgctacgttttagttccaggaaaatccccttgtgtggtggaaaattgtgtccctcactcgatacgtcactgcaatgacctgagaagaattttaagatctgtttaatgcaaatactataataatgcagttcgtagtgccaaaaggaaaaattttactgacctggtgtagggttagaacatgtcaataatggagtatacaacaaaatttggccaattagccaagttagccactggaatagtacccacaaattttagtgaaaaggaaaagtgcttaacgggtttaaatgctaagatcaggcacgatctagttattacaaccaatgatacaacaaattatgcaaaaatggttctaaaggctctttgagccgaaggtgtaatggaattccttcaagagtctcgagggactccaagtgttggtgggactaccacccttcccacttttggttctagtaaggagggtggtgatcttagcattaactagaagaggaagactttttcgactataggatgtttaggtcagaataagaggttccgtgcaaaccaaggcgaaagaggacatcaagcttactcatatcctaagtttccacgctaaaagaaacatcaccctgggaattgtaacccaaaagccaacttccagtgtgggttg

SEQ ID NO: 81229 - DNA, 1259 bp, Cannabis sativa
tgtagttggagttcaaaattttgtcacattggtatttccgaatatttgttttaagttaagcaaaaaaaaatttaagcatatgttattattagtaacattattaaatttatataggtttcccgaaagatatatatgtaaaataggtcagtctattttcgtgggattcttttcctttttaaaattttgaataggggctttcacgtaaattcagttacaacattgagctataattgggaaacgaattaaatattattggcataattatcaggttaaatttaaatttatatataaataatgataaagaaaaaacttcatgagagagcagtgagtactaaggtatattattcactatttttttcgagatatgtttggcattgtcagtctagtttagagatatctattggatagagaaagttgtacacagaaaatgtgtataattaaaaattagttatggtgtttgaaactcaggagtcagaattaatctctctactctgacagtttcttcagtgtgactgattgttttggtactgggtatgttttttttttctttttggttattgctctaggtcaaacctactaaaacttgtccaaaaacctatttactttctacagttgtttgccaaatctcctatgtttcttagatgtagtttctggcctaatgaagactttgaggttaatttatttctatttctatgttgagagtggtttagtattttatttccattccttctgtatttcaaccttatgttctgttattacttgttgagtttcaaatatttttatgtcagatttgtaggctgtgaatctgcaataggaacttattcatcacagatttgttattatggctagattgtttgttagtgttgtttttattattatttatttaatttattttcatgatgtttttctgttttggggcagaagagaaagagaacctgttggctttatttgttttgagtctgcaactgttgtctttcaaaattgagtcactaaattctctcatttcttcttttttcattgtttgcagtccttgtataaatgatggattttccagagtctacaaagatactatacaatagaattcaggaactggaaccagaaaatgttacaaagattataggataccttcttttaaacgactatgatgaccagcagtttctatggttggcttctgctccagaacattttgttcatcaaatcataacaaaggctaaaactgaactccaactgttaggttctaagtcagtctcaaatcctat

SEQ ID NO: 81230 - DNA, 1182 bp, Cannabis sativa
aaatgaaaatcttgtgttatactattactatacagtcaatccttccttctatagtcacattttaaacatgtgaaatagaaaagtttggtaaataatttggggtacatttattgttattatacatagttttgaatctgaatggttaggagggggtttattgaaaaagatgtttcacgccatattaaaaggtcaactaaaattttaggttttccctttttttttgttgaacaatttcaaatgattgccttatctctaaatactaaaatgtggaatttcttaccaattttaaataataatgaaaaattattggcgaaaaaaaacttaaacgagattggttggttcaactaaaacaatttatttttcttaaataacaaatctttgatccccattatttttaatatattataaatgtaaaatatttttaccaccaaaattgacttgatatatatgtggtatgatttttttcttaaaatgaaaaaaatgtacaatagtgaaaatgcatgagtacccaaatatatatactgcttacaaattttaatatataattaatagactggtcagccatttcttttaaaaattaggccatgtatttttgtatttgaaaaaaaaaagtaggtgatatatggtcctcatgattattctttttcatgaatgactttattaaaaaaaacagagagaagatgaaagttgaagaagaaaatacgtctaataatatcaacaatattaataaatgatgaaaatatgcattaaaaaaatgcatttggcagagtagttttgaagttatcttttaaattttattttttctaaataaaaaaagggttttatttgtatagaaaacttgccattatgaacaaccatgaatatatttaaaagcatgggccattttctaataataagttacaactaatctagacatttttgttctttcggcttggcaatcgacctaggatttgaatttcaaaagttaaatatttttttttttaagaaaaatagttaactcataattggattttttttcccctttccatcattattacatttaatatatacatgtagaaagaaaccatattgtttttaaaatttagtataaaaaataattatatgaaatagaaatactttggttgagataaacattagcaatggtatggggtaattccctttttaggggctttttcattttta

SEQ ID NO: 81231 - DNA, 1850 bp, Cannabis sativa
  modified_base (56)..(68): a, c, t, g, unknown or other
aaacttcaaaaactattttttattctcatttctaaaaataattttttgaaaacaannnnnnnnnnnnnataccaaacatgctctaagatttctaaaaaaaaaaaataatgaacaatgcctttagagaagaacaaatatgagatgtctaattaaactgtataggaatggaagattaaaacttaaaagttttgtaaggaactaacaaaaaaaaataaaaatttataggaaacatatttctcttaatttaaaggtaatacaaaattaatagtagttaagccgaaaaataaaataccatctatcaataaaaattacaaagatgtgtatattcatatccaagtcaaataactaaattcaaacaaaagtattaaatagaataccatctacgaataaagtcacaaagatgtgtaattatatctaagtcaattaatcaaactaacaaaaaagtatatgtatggttgataataatatactatgagtaaaatcaaaatagaaacacttgaaaaatattataataccttgcatataataatatctatacatattagataatctcatcataatactaagattattacttatccaatatcaactataatgctttattgatttttgaaattgagaatgaaatgtgagtgttgagaatggaaacaatcaaagagatatagatactatatttataggtttttatacataataggatatatatatatactttttggtacacgactattttttgtttttttaattaatattttattttttaaaaaaaaaaatgagagaattaaaggaggaattgatagatgtatttgaaatgatttttcaattaatattttatataaaagaatgagagaattaaggatagaatagatgaaggtattaaaataattttagagcgctatgtaaccgcttcatacttctcctgtttatatatataaagatatatagattagaggtgttcatccaatctaatcggcactattttgctcatagtgcatctgatccgcactaagtgcggattttatattttagattcaatctaattcgcacaatagcttaaattcaatccaatccaatttgtaaaagtgcgaattagattggttattttttaatattaaattctttaatatttatgaaaaattatattttctttgacataactagcaataaaataaaataaattattgttatattatggctctaataacaaattaaaataaataaaataacaaataagaaattcaaaggaaaaaaaaattgtatgtataaaaaatgtttaattttattttaatttgtatgtacaaaagaaattatatataagaatggattataaatttgatttattaagttttgaaatatatgtgtattatatgtcttagatttttaaattactatttttattaaaattttaattgtatatataatttttaaattttttttacaaatatgtgtgaattgaattgaatcagttacttttatatgttaatcaatatctaatttacataagtgtaaattttaaattttttaatgcaattaaatctgtacaagtgtaaatatctatactttgcgaattaaattagattaaatagtgcgaaacgaattacatcggctattttataaacacttctatttataattaactaaagttgagtgtagacttatttttttaaaaaaaaaaaaaaaaaaattgagtgtggatgacttttctttctcttacctaaaaagaagaaagtgaggtgggcacgctaagaatgaccacgtgtcatgcagtctaaagtaaagcatgactcagaatgtgaatctaatgaagccaggtgaggcccactaggatccagtccctctcaaaccatagg

SEQ ID NO: 81232 - DNA, 1520 bp, Cannabis sativa
aagagggactttttaacttgcctggtccaatgtgttttagtttgaagttctcatctgcaaatttagcaccataaatggattctccacctcgtccatcgccaagagtaaaatcacctccctgaatcataaagctaggaataattctatggaatgagctccctttgtagtggagaggctttctgctcttcccagttcctttttctcctgaaatgagcggctcatcaaactcgaaattaaaaatgttgaacttgttagcttcccggccactaaagccagtaaataatcataagcacaagaggccttcaacataaaaaaattgaaaacagacaataaagatgaaagcatcaatttagttggcttccacttaccagtgcaaagagctcgaaaattttctgcatcaacatgtaaaattggttactatgttgcacagcaaagagcaattagaacccaacaatgttaagaaagatactactttcattgtattcagaagcctacccatggttttaggaactgtttttccaaaaaggcccatgattatgcgacctgatcaaacattaaaaagaagtgttgattatattaaatcacgcaagatccaaaattcttttcttcttaatgaatatgaaaccagatggtattgaattcaatttcaaacttaatgatctcattccatcaattttttcagaaccacaatcaataataaatcaaatacattcaaattattcgtaccaatgggcttcccctccatctctatatcaaaataaactttgtgagtcacttcttccaaatccaaacccatctcctgttaaatacccaaactaaaaataatgaaccattccagttttcatgtccaaaaaaagggtccaattacaactacaaaggcatagaaattacctgatggggctccttattaacgacagcttgtacagaggccactttatcgtcgcttaatctgctctgatatgatatgtcacccaaaaattaaagtgagaacaattatcatgattcataataaaaaggggatctttcacaaacccattacactctcaaaattaatatagctaacgaattaccagaataaaaaccaaggttatgaagaggaagagaatccataagagagctgccaaagctatcctccttttggttgccatagtaaactcttttctcttctcaactcaaaataccagaggctgtttccagtttctgatgcaaaactagttcgtttttttttttttttatgggttgcttcgttaaccggattcggtggacgattaagattaagatgcactagtttgtactatttggtcgttgtgagtagagaagtacaatataaagctaatattatttgataaaaaatttcattcaaaatttgttcaaaacatacatgtaaatcttgtccagggtgtttcgaaaaaaagaaaagaaaaaggaaaattttgtacagggaaataaataaaatttacaaagcaatttcccatattttttttaggtcacctcaatctcttataaaaaaaaaaaaaaaa

SEQ ID NO: 81233 - DNA, 847 bp, Cannabis sativa
ggtctggtctggtctggtctggatggagtagtggagtagtggtttggtgtggccgaagatttatgacgtcacaggctgctgcaacggtcgggtggtcccgccctatggagaccgtattacataatcataaataataataataataataataataatatgaatgaatgaatgaatgtgatattagtttgctttgctttgtcatcacaataataggctgactcaccactcacacacacatcacactctctcatccggcccctacggtccttcttcaaaagcttctacactattactctactattattattattttaaaggattaatttactgtataaatatttaaatttaaattttatttataaataaatatttaaatttaatttttataattttattttatttttaaaattttgtaaatacttgataattaattatttatgtgttattttttattggtatatttaaattaatttttttaaaaaaaaattaatgatttgtaccaatcaagagttgccacatagtaattttataatatatttttatattagaccatcaagtttctgtattttttaataagtattatatttttaaatactttattaattaaaataataaaaaaactaataaagagagaaacatgaaaaagaataaaaagtaataaaaaatatttaaaggatatctaatcttataaatatagagagtgagtagtataatttaagggatctctaaaataattatagagtttaaaaagcaattaaagggattaaaatgtttgattctataaaatttcgaagaatgagtgcatgagcataaaagaagtgttgagagtgctcttaaacctttggta

SEQ ID NO: 81234 - DNA, 720 bp, Cannabis sativa
tgtggtacttcttatactttgacgatgaatgatagattgcatggctcttttcaaggaaagaaaggtcttcgtcaaggaaaccccattttcctcatttttttgtgcttgttatggagtacttcacccgactactttctattgcctcaggaactaatggcttcgagtttcacccaatgtgtaagcagttgaagctcattaatctctattatactgatgatttggttatttttgcaagggtaatgcttctacacttaccatactaaatgaatcatttgttgagttccacaaagacacggggttagctgctaacagagctaaatcctccctatattttgggggcatttcgattgagcttgaaaagcgcctgttatatattgttgatatggaggagggatcattccctttaaagtaccttggggttcaactgtgtcctaccaaatggaaatatgatgagtgtgttagcataatttaaaaagttcaaaaacaccttcatggttggagtagtagacacctctcttttactggtagagtttagtttgttcattcagtattgttgggaatcagaaattattagatgagcttactcatcgttcctcaaaaagtcactaaggaagttaacaagctttgtagagatttttttttgaggtatctctggcagccgaagtaaattacaccttgcttcatgggagaaagtgtgtttgccaaaggattatggaggca

SEQ ID NO: 81235 - DNA, 1581 bp, Cannabis sativa
aaatcaggtgaaccatgcaacatagaatgcgatttctgatcttttgttaattagtaaatctgactatattgaaatgagttttatttagggcacaatatccaacagttttaacttcagtttgctgaggagcacgcttttcgcccataacctccactgagggattatcatcagatatcgcgagatcctcaaagttgtcttagagacgagctaacattttcttcattttttcagtaagtttttgctgctcaactaactttgcctgagtagtctctaactctttggataatcgaagcaggtttgggtcatggtcataataatagccatccttgtaatacccatctttcacatagcggtcgtcattgtcctcttccttgtcctcagagtttgggtcattgtcgatgccattaggcaagtcttcaatgttttttcctcgatttttaacatcaacggtatctccttctctcgcatcgtctagttggagattgggggcgaaggggtccatctccttcataatagcgtcaacatactacgagtgtcgcttttctaatcgagtgtggtgggcaactctactattcatcttattttctagctcctctatgattcagaaaggtctttcttgagtaggctaggggagaagccaacgatgctggctcggaggcagtaaaacaaacttggtggaactaaaggtggaaaagtcaaagtagctctctctaagtagttcctgtgggatttgtcgatcttgagtcaactggcactggctcgcgatagtagctgggtagtaatgtcccggagcccgactactgacccgaggtgtcgaacgagaaagtcataaggggacgttaaacataattctagaagggaattaccattaaaaaaaaatcgagtggcagttaaagtgaatgtttattagtgagtcgggtggatactgcaataagcctctctcgaccctccctttctcatacgtctttatgaaagcctctcgccttttaagatccggtccatcatcaactactcagtcaaatcttcttgtttgcttgccttgagatgaaatgaacctcccgctatagtaaagagatctaaagtgggggtcccctcgattacccttcccttgaactggaactggtcgagagagaatctctttagaaagaaaatcttttgtctcatggtatcttgctccggttcccttacgaaactttcattattgggttagccatacaattcacatgtttctagtgattcacatggcatcatcaaatgatacaagtcttggataagaatctacaacgcactagaatgcccttgttgacgatcctttactccgacaacatctagggtttcttaaacaatgtaatcgagactaaggtagagatattttgaatagagaaagaagaataagatgttgaagagagtgaagaagaatcaaccacgagtaatgtacgcaagagagggaaaaggaagaagaaaaacctgattcaagtaaatcgtggcaagggagacaagagagattcacctgacataactacatcaataagcagagtgcaaaatctactttatccccaattcttcgcctataaaggctta

SEQ ID NO: 81236 - DNA, 633 bp, Cannabis sativa
tttttaatttcttaagtaatttcttaacttagctttgctaaaattagatttactaatcaaaattgatataattgaaaaaatatacacaaaatgttttcgtaataactttcttgaattttcagtcactttttctatttctttttgaaaaaaacacaattttttcttcgattcaatcttaaacagagtcacttgttttcttcttcttcttacagaaaacacaatgatatatatatatatattgattatatatttatatatataacgtgaagttggagtatcgcgaaacttctgtacggaacctctaatttgtggctcggtgagaatgacacgtggaatttataattcaataaaaaaaattgctaaaaggtaccatgtatagtattatataattaagtatcaattttcatataaattaagaaaataacctattgttaagtaattgtgattaattaaaagtaacacatactacaggtaattaaatatcaattttcataaatttgtgttacttgcactttttataaatgtcgttacatgattaattagcgatattttttaaaatttatttttttaagggttaatttctcaaatgcacaaaaacaacaaaaataagatttcacagaattttaaatattt

SEQ ID NO: 81237 - DNA, 734 bp, Cannabis sativa
tattagccttcgaagatgaaccaattatgattctgtgtactgagacacagggtaaataaatagctaagccaatcagatcaaaccatctatttgattaaagatttgggctttgagcttaaaagcccatccggcccatattaatttttaggcccattagcttgatatccaaaaaaatccatccattatggtcttcgttctggtattttggctaaccaacgatgaaaatggcactctgctaaaaaaaatctctacttgcagaaaaggctgcacctttaagctatttatctccatttttccatgaaagtaatgatttttttttctcattcttatatgtttttccaagttataattttgttccatttaaaaataataaaataatcaactctggtgttgttctttattttttcttgtccttttgggtgaagtgtagctctttaattcttactttctgtttctgtaacagcttctgggcatgtgttgattctggattttgagaatgcaatgtggctcttgtagttcctcagttgctggtggtgctgctatggctttgtggtgtggtaaagggttggtttcaactcccaaaatgatgcctttaagggtttttctcagtgttaattcagagtctttgaagtttaatccatgccctggttttggttttcttcattctatgcaggtaggtatctctctttgaggtttttgtttttagtttttgaaaggatataactggttgtggg

SEQ ID NO: 81238 - DNA, 931 bp, Cannabis sativa
aaatcaacaacaaattaacaagagtacaacataaaaatactatattttttgtaagtaaaatttaaaaaaaaatcgtaaaaatgtttaaaattctgtgaaaccgtatttttgtaatttttttgttgtttatgtgtatttgtgaaataatccataatttatacctaaatttataagtcatatccttattacgtgtgttgaagactctcattttaataagttatgtggggtattatatttgatactttgattaaaaaagaaggtatttatcaattaaaattattttgcagttatgtttagttaatgtgtaataaaaaattgtagtttttaacttatcccgtgtaaaaattaatgttgttttaacactgttttgtatattgtaaattattataaatttttcaaaattttgtagaatgttacaaataactataatgaacacgtgtaaaaaaatttggactaaaaaattttcttaaatgccaaaatagtacgagatacatagatgtaccttttttaggttcctttttgtgctagaagcaccccataaatatatttatgcatatataataccaatgcaaaagttaagacttaataaaaatggtaaggggcaccttaaatacaaagttacatattattaattgatgcattttaatatcaggtcttacttaaataacatgaaaaatctatatatctaatataattgtgttgttggagtaggtgatgtggcgctttgatgtttcttctttgtatattatctattttttccatttttcaagttttttatttatttatgttctttttaacattaatttagagctcatgtaacagtcaaactttaataaaatatttatatatatgcacctagaaatagcaaaactgttatgaatttatgatattagtaataaattgccaactattatatatatggatattattt

SEQ ID NO: 81239 - DNA, 2725 bp, Cannabis sativa
  modified_base (2653)..(2659): a, c, t, g, unknown or other
aactatgcaacattaaatgttatttttgatctttattaataagtaaatctgattatgttgaaatgagttttatttagggcataaaacccaacagatttgtgtctaagtctacagaacccttcttcaacattctcagaggcaaaaaaaaaaaattagtggatagaggaatgtgaaaatgcattccaggagcttaagaaacaattagctcaaccacttgtgttgtccaaacccttagacaatgaagagctaggcgtgtacctagcagtgacagagcatgatgtgagtgctatcctcacaagagaagaagatggtgtacaacaccctgtatactacatcagtaagagactaatcacgctgaaagtcagtagccactcatggagaagctgacctgcagtttgctcttggcttctagaaagctaaggccctacttctaggcacaccccataaaagtgtacaccaaccatccattgcggtaggttttatagaaacatgatgcatcaggccgactatcaagtgggccattcagcttggctagttcgaaatcatgtatcaacaaagaacaaccataaagggtcaagcctttgcagacttcgtgcctgagtgcacaaactcatctcttcaaatctctcaagattcaggagaaggtcaagagccataaaagaagtgagagcaagagtagcagtaaaatcctgacgaaataacatggaaactccatgttgacagaagctgcactgacaaaggcattgcccttataacacataggggcagtagctacacggagcaatgaagtttgacttcaaagcctcaaacaatgaggctgaatacaaagccttaatagtcggcctcagctagcacatgaagtacgggttgaccacttaaagatattcatcgactctcaactggtcatgaattaagtcttgagtgagtatacaactcgaggtgaaaaaatggtggactacttgagaaaaatcaaggacttactaagtcaaatcaaaggctacataatcaggtacatccctagaaagcagaaagctacagcagatgcacttgccggtctggcaagtagcaccattgccaaaaaagcaaatctcatgccaatacagttcctagaggaacccatcattaccgtccaagaaaaagttgacatgttggatgacacctaatgcaacttaccttcaaactggagccttaccagaaggtaagaatgaagcaaaaaagattagaaggaaagctgctaggtatctaatcctagatagagtaatgtatagatggagcttcttcatgccgctcttaaggtgtgtcaccaaggctgaagctgaacgactaatgataaaagtgcatgaagccttctacgacaaccatacaggggggcaaagcctatccaagaagatacttcgacagggttacttttggccaacaatgatcaaaaactcgatggaccacgtcaaaagatgtgacaagtgccacagattcttaaaaattccaatagcttcatccaacgagttcacgatgatgtagtctccttggcccttcacaatatgggggatagacctgatcggtcatctcccaaagggaaaaggaggggtacagtttgttgtagtcgtagtagactatttcaccaagtaagtagaagttgaacccctagaaacaatcacctctaaaaaagtccttgactttattttcaagaacataatatgtcgattcagacttccccagaagattttgttaaacaatggaaagcagtttgacagtgaatgttcattgatttctgcaacaggcatgacatcatcaaaagcttttctgtcgtggtccttacttaagaaaataggcaggtaaaagctatcaataaaaccctcaaggacaccttaaagaagtgccttgaggaagcaaaaggaaactagcgtgaattactcctaaaggtcctatggtcgcacaggactaccaagaagacatggaacaccctaactaattaggaattttaatgtgattttaaacgtagtgtgcagctcgttgctaataaacaagattattgaaaaacgttattaattaaagattttcttatttaattaataaacttaaataatatgtatatatataaaattttggaattccgttacaaaatacaattacaaaagtttgctatttatatattaaagttttgtcgccaagcgactcattagcaaaagccttgatgtcccaaagattgtacgctccagacctaaccgccccaacatacaatcttcacctactcactctcacgactccccagctttagccttgcccttacctacacatgaaaatagcactgtgagtcgacatactcagtaaaaaaagcataacataaaacatactaatatcttgggttataagctagcgcccatacacccgatcacaaccctatccccgtgtcccacacggtactgagtctataacgttcattcgacaatactatcgaccataatgtctgcctatactcaatatgctagtcatactctagccatattgatgtgacaacatcgattagtattttacccaacaaacatttgtcagtaatcattacaactctaagtatactattactgctatcaatgtaatctaatagtcataaacaacatgtatgccaagcatgtatgtaaagaccgcttagctttannnnnnnaattagcagataattagggcttaactatggaaattatttatgaactttgaattattaatttatgat

SEQ ID NO: 81240 - DNA, 1495 bp, Cannabis sativa
tatacaaaaatgaagaagaaattgtaaaatatagagtgttggacataccgcaacagcaaggcgatcagagtattcagattgagtcgcgaagagccgcatcttgagaaaccaaacagaaaatttgaacttagtatcaagtgaattatgaattccatcaatgattgaaatgaaagctgatctaattttagaaattcataaatacctggatgtagataaaggcgcccgcggcaattaagaggaggaaccgaaaatcacagaaaaatttagccatttgagagatttggatcttaggaaactaagaaggaggggtatgtatcatatattcatatacaacaatgtctcagaaatgggatttacgtatggttttaggtcataggccgtcgtcttcgtcttcgtcttcgtcttcctcccgcgtttactactgacagcttctctctctatgttgaactcttctcagttgctaacttgcgccattttttcctttgagaaaatttagaccaaaaaaaaaattaacatcaaattatttttatagaattagtataaatagttaagtttaactattaattataaataaatatttaatttttgataataataatacttaaattataattttagaacttacttagtaataaatgttcagctattatctacttattatttttttattagtatatttaaattaaattttgaacaaatcgagctaagctacatatttgaacggcacttttcttttgcattttgaactttcttaattaattctatcctgattggtataaggagttattggatgagtgtattcatgctttcgcaaaaaatatataaagagattatcatatttgcagaagatgtatttgacttcgtgggactgtgtgtaagccgaaattgtttaggggtattggctttcgtgatggatccaaatgtaataaagcggttattgcaaaatatctttggacagtatttttaaagcaatattgtttatggttcaaatgggtacattgcaaaccacttaaggttagctcaagtgaccataggtggtgtgtgtgtcttggaggtcctgggttcgagttccaggtaaaacataattgtaatatataaacgcttaaatcaaaaaaaattggtacattgcatatacttgaaggatcaaaatgtgtagattcatgagcttaagcaagatgtgagttggtattgaaaaaagctcatgagtcttaggaagactttctcctagaatgaatgagatccaagccacttgtgttgggaacaaatccaaagtgtgtaaaatgcataaacacttcttacaaaatgatgatcgtgttgcttatgtgggtgtcgtgtggtgctctcattccgcccaaagcatcaattcattatttggcaagctttaaatagtcaccttttgaggaaagacaagctcattatgagacaaatgagaactgattcccctttttgtcttgtttgtgagttagaactcgagagttattctcatctcttcttc

SEQ ID NO: 81241 - DNA, 1155 bp, Cannabis sativa
tggggcattaatgagccttagtccacaagtctttattatttataagagtatttttttacagagaatgttcttggtgaatctctttcttctttactcccttaaattccttaattaatcgacccaccccttttttattctgtctatgggatatttatagtgttttttgagggaatccctataaaggctagatattttccatggggcacttatctcacggtccaactgggtaacaacccgagttttatatggcgtagcatctgggagactcaaagtgtggtgaacaatggagtgcattggaaaattggtgatggcaagtcggtatctgtgctaggggaccgttggcttcctaatgaggttaatccttgtgtaacttcatctcatcctactcttaacgacattatggttgaaaatttgcttaaagttgagggtgttggctaggaattggagatagtgaatgaccttttcaatgatagagacaaagctttaatttgtggcattttgattcaagctaatgcagggccggactccttctactggtttcctgaatgttcaggtgactacactatgaagagtgctttcaatttgttgcagaaattgaatggctcttggaaccatgtggaggcttcgaatttttggaataatctatggagattgaagattccccccaagtgcaagaacctggtttggagaggagcttcctattgcctccctactttggtaatgcttattaccaagcgagttactgttactagtctttgtccaatctgtgattcacatgatgaaaccattttacatgctcttgtcacgtgttctgtggcagcaacttgttgggaaaaggctggggtaaacacgactatcacggctggtatggatttcttggactggtgtgccaccactttcgattccgcctccaacgatactcaatgtttggttgctgttctttgttgggccatttggaaggctcaaaatgataaggtgtggaataataagcttcctaatgtttcttcgactgttgcttttgctattacttaccttgactaatggaagaccgctcaaactcctttggagtcatctcagttggctgctggggatggagccgagtggtggaggccccctggtacaaatggtgttaaggttaatgtcgatgctgcagtc

SEQ ID NO: 81242 - DNA, 1190 bp, Cannabis sativa
  modified_base (101)..(102): a, c, t, g, unknown or other
  modified_base (222)..(224): a, c, t, g, unknown or other
taggctaattaggatttttgctctataaattttaacgtaccaaatcatgtccctaaacttttaaggtcgttaaaaagtccctgaactattgagattgttanntttaaagacttttatctaattttattcaattttactatttcagtgattgtttatgtactaatccatgctctccagatattgatatctaccaaaattatgcccctcgaactttgacatgtnnnaaattatgccccctgaacttttatttatgttagactcttttactaaaattagaaaaagtccttaaattcaacaatctcaatagttcaataagtatttttaacgaccttaaaaattcaggagatatgatttggtagatatcaaagttcagagggcaaaaatcataattagcctatcttttattgtaaaataaatgtatttttagtttacatgtactagttgtctaaccaaagagactggaaaatgacaaaagaaacaaaaacagaccttaatcttgatagttataaattgaaatgaaacacaaatacacccaaaaggaattgtatagtagtagtagatatagatagatatatggccaaaagaaaggataaaataccctctttcttttcacttatttaatttgtaccctttagggagtgggttttctctatccaaattatgacaaaggaaaagagatagagaattatatatggccacatgtaatgttatacaacaagacagcattgcctttaattttgtggcgcaattatatatttttgaaaaattttataatgcaattaaaaggggttaaaaaattgtactatgtattagcattttaacaaattttttagtttaatttttttatggtaatttatgttatatagttatttaagttatattgagaaattcgaaaaaaatttagcacccaaaaatatagtacatacaatacagttacacttgcaataaaatgtttgaacttttttcggtatattatatttttctaaatagtttctcaaaaaatttacaagatacatcttaaataactacaaacaattttttgagataccaaagtagataaatgaattaagctctacttatagcccacccatctcaaagcctaaaaaaatacttttcctttaaaaatatatattagtatatatatatttttgtagttttcataaataatatatatatacaaatgtgcagta

SEQ ID NO: 81243 - DNA, 927 bp, Cannabis sativa
aaaaaaaaaaaaaaaaaccctagtcaagagattcgtaatattataataagttgtactagctactactatatatatagaccatgagttgtactcaaaaatatacttgccacattttctacaagcaaaaacaatagagagatatacatatatatatatatctctactcatatatttctcaagtatagttatttaaatggagtcaaaccgtaagagaaggagtttcatgaagagtaagctgatgccattctacagagccagctcaaagccttataataatagtagtagtagtaatacgttgcaatacaaggttatgaataagccaaatcagtcctctccttcggcagcctcagtagggtttttggtgcaccaagactatctcatcactcagccaaagccaaaagtgtcatttgttatgtcatcacatggtggcggtggaggtggcggtggcggccgtgactcctcggtggttcaacttgaaaagctctatggtggtgtggctgttgacgagggtgttgactcaaaggctgctaactatatatctatggttcaagaacgttttaagcttgaacgagtcaactcagaacgagtcaagtgccaagacaagagttgagatcatcataatataaattattattattattatgacataactacatttacttcaaagtaagattatatttttatatttggtacgtctagaataattatatatattatatcatatataataataataattagttcagtagatctagagagagaaagagagatcatgagaatgtgttagtacttttgctttcttctttttcttttttttaattgttatagttaattagtgcaaacccatcatcatcaagttgttaaaagagtttgattggagttatatgagaaatttgtactaattaattgattaatttttccttttat

SEQ ID NO: 81244 - DNA, 2081 bp, Cannabis sativa
attttgggtggtggtttaggtttttttgattttgggtggtggctgtagtgattttttgtttatttttatttttggttttgggcagaaggagaagaagaagaagatgatgaagaagaaagaagaaggaggaggaatggtggtctaaacaaagaataaataaaaaaagaaaaaaagaattttgcttttaattttgttttgtaatttattttattttttaaaattattttaaattatattttttataaaatttttatattatttaaaccattaatattacatggaccaataaaaatttaccatgtgtacactgtagcatgtccaccgtggcacttaacattgttttttagatggaaggggtaaatagctaacagaaaggagcttttggtagttttgccaccaaaatttcggtttttatggttaagtgttacaaaatataaaattcgtggttttgccgccaatatcccttttttatttagtaagttcatccattttgctttagtaccaattttttattttttggcatataaaaaaataattaataatgatttttttttttttaattttgacatgatttaaattatgtgtgaattttttagctattaaaaattctttcagaattattgagattgttagatttaagaattttttcctaattttattcaattttagtaattcagtgattgtttatgtacttaaatcatgcttttttttaacttttttttgacatagtgattaaaatcattcatgaatttacgatgcagatttctgcaaaccgcacaagactctcatcgaatcaggatagctcatcgtctaaccgaaatgcatgttttgtcaaaccatgaattaccaaagtaaacgagcaaagacatagggcaaaactgcccccaaaatttagacaataaagctataacgtcttccaacaaaccagaaaagttggaaatatagcttgtaacatggaataactacctgaaaagtctcaaaacaacaaccaaaaaataaattatattagaatgtctatctacaaagaaaacaaataattcaaaaaattaaattcttagattctaccacttgattcaatcaagtaaagcataagctaatgaagaaacttaaaaaataactagccaaatgtattatcctttgactagtaacaataagccaattaacaaaatagaaaaatatcacaataacatttttgaaaaaatgttaacttttattttatttgaaaggctttaattcatcataaaacatggaacatttaactattctattataaataattaggggcaaaccataaaaataggcgcaaaagccttaaaagacagcaagaccaacaaattgtggcacatcaaatcctcataaagtgtaatattttccataagacatgaaatagtctaatcttgggaaaaaactttcaataaccaagtaagtgatacaatagtagtactctttgaatagctagtaaaaagaaagaaatcaactcatgctcccttaattttgatatctatcaaattatactcttggaacattcatctatgttagactttccttactaaattggacaaaagtcattaaatctcaatagttcaagggagatttttaacgatattaaaagttcaggagacatcatttgttacatgttaaaatttgggagaagaaatcataattaacctaaataaattatatatattctaaaaaaaattatatatatttatatatataactatacataaaatacttaatctaatccaattcatttagtaatatataggtatccgcaaaagattaaattaagaaactaggatcaaatattgatttacatcacagtcaaccctaagttgattcggaccttaagaaaaataaatttttaggcccttattatatgaataaatagtatttttaaaaattcttaaaaaatatgtatatttattaaaatattttttttattttggcccctgggatgagtgggccctaggtgtggacctaacccgccttagtctaaagccagccttaatttacatgctaaagtagctgatcaaatctaatatacacctatttatatatatttaaaaaaattataaata

SEQ ID NO: 81245 - DNA, 929 bp, Cannabis sativa
actatatgtctatattttctctcagctctaccattttgttcatgtgtatgtggacaagggtgagagaatatgataccttgatcatacaagaaccttttgaaaggcttgtattcacctcccccatcaacttggacccttttataggtaatccaaactgtttctcaaccatggctttgaatttaaaaaacatgtcaagagcttgagatttgagagacaaagggtatatccaagtaaacttgttataatcatcaataaaatagatgtaatatttgaaaccatctttggattggatatgggagggtccccaaagatcagtgtgaactgattctaggggttgactagcacgggtttgagatatgggaaaaggtaaactatgacttttgccttgttgacatgcattacaaaattgtaatgtcttaagggatcctgtatggggtaattgtggtaacaatttgcttaatgtggacatggatggatgacctaacttgcaatgccatgtattaatatcattaaaacttgaagtaataaaggcagtaggcaaagaaaaagtggaacaatgttctttatttatagaatgttgagtacaagcatgtacattatttgtgacattacaagaattgaatgcagtatttattcaagaacattggacagactcgaaaccagtagtgaaaagacattgtagattggacttggacttgtttgaaccatatcactcaacatgtaaagtccatctctacgcctgcctttgaggagaagggcacctgtgtcactactacaatttagctttttggtggcatgatttagtgacacacacaaaaatgtgggtcactaaagagttaagagtgatttttagtgacatgcacaattcaactctaaatgtttagtgttagtctcctataatgtgagtcactataaatatagagtgtcac

SEQ ID NO: 81246 - DNA, 927 bp, Cannabis sativa
aagtatttattttcaatcaaagacttccaaaacttgttgacggtcttgcatttaagcagagaacgcacaggcaatctactcaatatatcactcatcaatgccttgttttgtgctaacatttctttattcgggttctccatcatttttctttgaactgatcaattgatgaaggatgatatcagtgtacgcagtaagaaaacaagaatactttcagtttatcatatatacaactccctaagaagagcatataccaagaagagaactcggttgaacgattatacacatacataattaaggaatcacgaacagttaatggtgtaaaataaatatcttgatggatatttcaattaaatcagctgtctgtacttaattttctttcttctttttttcttccgaataaacgtaatgaatagaaaaataatacactaataaattaagtaagattaaaattcatcaagaagcatattaaacacaagattttgagtcagcaagaaacaaactcagaagaagaagaagaaaaagaagtttgttaccttgaaccttggctctttgatcagtctgtttatgtttacaccggtatggaataatatgaatgaatgtcttaaatacttgtaaattgaagccaagcccaatttatttattttttgaaataaagcaattttgtatctttttccgctataactcaaatattatgttttcttcttacaatttacattgagcactattttctactggttttttttttttgaaaagtttacaataatatatattttttatatatttaatttataataataatgttattattatttggcctgctatgttagtttttttgtaatgaaatttcaacttttattagataaccatatcagtcaccaaaacaggtaacaaaacagttggaacagaatccaaactgaaattacaatc

SEQ ID NO: 81247 - DNA, 1192 bp, Cannabis sativa
ctccaaaatttccaaatgcaatttgtttttcagttcaaaaaactataaaactttccattctccatctaacctccttttttttacactattattttctgctcagtatatttttttggagtttgtgcattcaacatggtcgctaggtatttgtagtaattcgtaggaaatttgatcacaaataaatttagttcacaaattttttttcttgatctctgattgagacatcagaaacggtttttcccaaattgatctgagtgtcaagcccctaaacatttttgttaacgagtggaggcgcaattagtgccccgtaacttgaactctaatacaagaggtataatcctaaaccataacattaatatgaaccttgcgagattcaatttaagtgttgtgtgcgctttaggtgtttgataaaattcctgaatgttacttgtttagttcataataatcacctataaataatgaagtgatcttcggctttgggcaaaggttattttatttttggtcacgtgataatctacttctcacatctcttgagttgattcaccttctgtgatccatcttcttcttcttcttactgccgtcaacactccacatatccagtgtagcagcgggcagcaggcagtgggaggaatcagctttccatcttggcaaagaagagattttcttcatcttaataattatattatgtaaaacttttattgttctcaacatcgatattaagcaatatttatataggtggaattacattgcaggtaaggagtgaagaacaagtcaaaagagaaaatgaagaagctaattaggtgaatatgcttgatgtttactaatgaactagtttctttacaatagtaatgtaactaaagacatatatatatttttttgtttataataataatagtgtacaaggtcttttactaattaatatataatttctttctattttattttgcaaggtaagagcaacttatactgaaatgacgagatgaatcttctttgtggtcagtgaactgaatatgtccgaacacagggtgcgacaagggctattacgatgatcagttttaattattttttatgctttacactataaccaatactatcatataattaacaattaagtaaattagagtacatagtttgtatatatttcagaatctgttgattttcagtttatgtttatattttaccctaactaatt

SEQ ID NO: 81248 - DNA, 4181 bp, Cannabis sativa
  modified_base (322)..(324): a, c, t, g, unknown or other
ttattggatgttaatatcaaaatccaattaaaaatcgatccaatccaattacatttatatatgttaaaaaattatttatacaataaaaatatcaaaaagtataatataattaattatatttttattagattttttgtgttaaatttgtagcacttggttgttttgtgtatttattttcggtatgttgtgttctcttttattacttagatatgttgttgttttaattatttgaaacttttagttacattacacttgtaaacaatggtatgtttatggagtattaaactttaataaaggatgatatttaatttttacgtatttnnnttcatattttaagttaatattaaaatttaggtgtgtaaatagatacctatttaaaaatcgatccaatccaattagtaattattagattggattttgaggtctaattggattggatcggatgatgattttccaaatctaattacagactgtattggatcaaataaggagaaaaatgttagatttgatcggatgcccacccctaaggccaagtactcatgtaaaaaggcctaacatttgacgattgaaagaccattgtagcagttatgttaaccaaaacatccacataaaagaacttgacctggaagacatcatgtcaatggcgaacctcaaggaccgtctaaatgtgaaatgggaaagagtgaagggtgagaaaccaaggcctcaccgaggcgatttgataaacaatattaacgatagagtatgtggatgtgaattcccagatgatcatacgaggcaactagaggaccagatcaccgcattgacaaaactcatggactgattggcccgaaaaaacagtagtgtcatatttgactcaaaagatgaagatctgaagccatgtgtaaagagaatcattcagacacaactgctagaaaatttgtaaatgccgcaaatagaactatacgaaggtaaaatggatcccagagcccacctatcaaaatacaataggtggttgcaagtgccacatgtcagtgaagatggaaaatgtctatgtttctcatagcggtattcattatagttatagtatcatctctgtaaatttttgaataatttacaatggcaaaattagaggtcctaatattccagtttactacgctcattcaaaaaacttcaaacatatttttggcattgtaaactattcaaaaatgtacaaggatactgttgtaagtgtaacgaataccgccattaaaaaatttgaaaaaaatattctagcaggtgttttcaggcacggaggttgactaagatgttgtaataggaggttgatagcagcactcctatttttatgtgcaataaatgatttaaactttaattttaacacttgtaaataatttaaaattttctgaaaacaccccaacaatccaaaacaaaaaagtaggctggctcaagcatatggttgggtcattgctcaaggcttcctataccaatttggtgtggaatttacaataattttgtatccattaagaccatctctaatggttataccaatttggtgtggaatttacaataattttgtatagagtcttttgcttttggtgtcacaactccaatgattcatatcaaatattacactaaatatattaccaaataaatatattttacttaacaggtctcgcattttatattatttacattaataatctaaaatagttaatttataatataattacatcatgactactagtaagaatttaaaatcttaaaataatttagtaaaataaaatattttattttacaaatcaattaaacatacacacattttttattaaaaaaatatttaaattttatagctgagcttgggcttattcatacgcgactatttttgaaatgaataaacaaggattatgtagaaaaagagcttaccaacagtatcaaacatttcaaaaatattagattctcaaaaaatacttaagtccatataactaatgtttattttcatttatatttgttttttttagttttataattatgtctttttattttatttaatattagtattttttttattattatattgtatttttaaatatattagtgttttaaatcaattattttgtaataaattttaacttgaggattaaaatgtaagactataaaaataaaataaactaaggtttaaaatgtgaagaaaatcaaactcctatgttcctttcattacagtatttctgaacaagttcttggttttacaccaaataagtgtacattcaatatccaacaccattaatagtgtagaatttagtgcacaccaacttggtgaataatttggtatgtcattggagtgaaatcgtgtgaagattccacaccaatttggtgaaatagtgcaccattgaagatgctctaatcaaaaatatcctcagattatatttcattaaaatgtactcacttttgtgagtaggttgcccaatataccctcaccctccacttatgtctaacacatagtttacctatagggtataatggggataacatctataaaaatgggtatcttaaagaatatgaaaataaaagtaaaaattaaaataaataaattaacatgggtatataatgtaattttctcatttttaatcatctctttatacataatataataaatatttttttgataatatatatagagtatatataataaatgtttgtaagaacaaatatgcactttaaaaaatatgataaaatacgcataattttgaaattcttacctattttaattttatcattaaattctttttagaagtttaaccatggaaattttcaatttatgatcatcccatcccactcgatttttctactatgtttttattaatgtgaacacttagcctcactttgttattttaatgctctgggtcaaaagtcaaataaacaaactcctttgccctactccacaacttgtcagctgttttctcaactttgttactttcgaattaaatcaatttttagtaatacatgcatgcatgcatattttctttacttgtgaaatacccaattttattcatttatgtatatggatatatcatatttgccactataaggttttctttttcttcaatcatcattatctgaactagtactattattattaattattattgtttttcagcctaagccatgcttttagtttttttttttcaaggtcaacctctctagctagctctaattaatcgaccaccacttgtcccaacccagttgcttcatttatagatcattcaactgtttttttaaccattttttttaattattgaattttcgactttgaaaatgagggcaaaaaaaatgagagaggttaaaagtatattgacatttgtgctttaaaataaggagggtttactcaaaaaatattttgaaatttgaacgtattcatcaccgactgtttaaaataaattaataaaagtatacagagaaattaatttatgtatatatattttgctaggaagtttgaaaagaatcatcgtatatctattaataaaaaataatccttacttaatagaaatataatattacattatatcaacaccacttaattagtactaacacgctaatctaatagactataatagtaatgtcaaattaatattgttgagcattgagatagtagcatggcatggctttattgtacaacaatataagatagcacgatatagaatactgttagttatgatattaatttgtgctggtacgatgcatatcacacagtataattattataaatatgaatgagctgtcattattataatttatatatataccaatgtgttagacttataattaatacgatctaaatgtaaacgcaagatcaaaagatataataatagaaaatatttatgcatgcacaacaaacataattaatgctaataatgttggtcctgctccaatttgttgggctgcaagttcattttaggttttttgttttttaaatagccaaaatacatttgctattggagaacattgtgagcaaaaatagctattatcttgagggaagatattggaaaacattgtctcacatagattaaatgtaaaaatattcaactatatataagaacatgggatacgatccacttatcacaaattggttttgagatggaacctcataattctcaataggcccaaacctactgtacctacccctagaattggcccggccgaaaacc

SEQ ID NO: 81249 - DNA, 1623 bp, Cannabis sativa
  modified_base (27)..(32): a, c, t, g, unknown or other
  modified_base (222)..(224): a, c, t, g, unknown or other
  modified_base (312)..(312): a, c, t, g, unknown or other
  modified_base (631)..(638): a, c, t, g, unknown or other
taattataattattaaataaatagttnnnnnntttatatgattgaaattagaaaatatggtattattgaaagaaaaataagtgatagaataaagttgcaaaattacaactagagagagggccatgtatggtcagccactagtgtgcaattttgttcatcattttattcttttttaatccatataattcaatcctaagccctagttgaaatactataaaaggnnnatgatgctctcatctcatccaactgaattaactattcatttcaaccaaactaaatctacttttcattctctgacaactagtagatganagacaccttctatagtgatttcgaaccctccttcattagtcttcatactcgagccatagtgatagagtgtcatgcccacacatatcaagtcaagtactcaatcatagtgcggaagacggtggtaaccaacccaaaggagagaaggagatccaggcttagatcttgttattactctctgacaaaaagcaacaagggttagagatctgagcagaaggagtcatattattccgctgcgatcaatgtaaggtattctaaactcttatgtatttaatttcatcgtattagaaaattcatatttagaatgttaatgaaacatacnnnnnnnnaaatctagatcatggtaaaataaattccaacaactggcctcagagccataataatgatttacattcatgaaatatgaatttaaaacgatgaatttgttgatttggatgtgttcatgttagtttatgtgtgatttgatgattgaatgtgaattacaaaattttttccataaaaataattttattttcattctaaaaataatttttcggattctttgtgaaaaattaagcaattttggtttttacggaactcgattccgatgaaaattaaatatgatatgaaggtttgaaatccgggtgcacatggtgtcgagatggctcaatcgcacgcacatgagcacttggacaaggagatgctcgtgcgctgccttagacatttcctgtttgaagcggtgggtcagctcagttcagacacggtgaagctcgcacgtggatactgcaggtgccaaagaatcttgacctaaacaccctgcacgcttcaccctacgcgcgcgaaagactgcatgcaacctcttttgggcaaccaaggtattttcaccccaaaattgattttttgcgatattttctcacaaatttaaaaaaaaaaaatcaaaatcataaattagttattttgtgaaatatttaattgtttatgttatacctgaaattcaactatactccagaagctgacacgtgtctaacagagagaatatgaatcaactctaatgatataataatgttatatcattaaatgtaaattggataacttgttattattaaataaatatttgatagatgatattcaaaactcgttgactatatagtcttaagcgagataaagataataactattaagctgagattgacgagaaatatgtctacctcagaatatacagacaagaaggggatattcatccactcgagtagaataaatataataatatacaacagcctcgcgttacacataacaagacggtcacctcgcaatactgattcaaatgaagggatg

SEQ ID NO: 81250 - DNA, 854 bp, Cannabis sativa
taagtatattgggtagcgtgcctaattatttacggtgttacaaatggtcatgcaaaaagaattgtgatggaaagactagacagaggcctttgcaacaaggattggagccattcttttcctaaggctactattaaggttcttgattggagtaattctgatcatagagccttagtagtggactgtggtgtcaatgttaatggtaataattgtggtgagaggaagaggaactcgaggttccatttcgaggaagcctggtgtgaggatgatgagtataaaaatatagtgacaactacttagagctctgaaacttccgatggtttggctgaagatctgagaattaagcttagtagatgtggttacagcctccatagttcgaataaaaagaagaaaaaagaattgaagaaagagatgaataacgccagagagaagttgaagaagcttacaaagctaaatgatctgaatatgtggcaggatattaaaaaagaagagaagagactgaatggtctgcttgagaaggatgaaagatactgaaagcaaagaagtagagcagattggcttaagtggggggataagaatacaaaatattttcaacataaggcctcgaatagaagaaaaaaaatgagattttggggctgcaagacagtgtgggagtttggaaaaatgatgagacggtggtggagcgaattgtggaaaactattttaaaaacctcttctcctccaagaagccaagcatggacattatcgaggtagtgatagaggcgatatgtaaagaccgcatatgataaataccatgtattattaaataactaaggtttatgtatgagattaattaataattatgaaatgcatatttt

SEQ ID NO: 81251 - DNA, 593 bp, Cannabis sativa
aaaaaaaaaaaaaaaagtgtggtgaagcaattaatgtgatgatatttaggtttggtttagtccaactcaaacacatgatgttttcgtgaatagccataaaacctgtgtttttcttaaacttacgttacttttggtaaaaaaataaagtatatactaaatattatgtcatatgtatagaaattatggaaagaaacgacaaaatttgtgagagaataaaaagaaagaaagaaatctgtgctgtaatgacttgtaatatgtatgtacatgaacatgatgatgtatttttttttggaagaaaacatgatgatgtgattgtagccaaaaatggtgactgcataaatatgtattatatatgccaagtatgacattaacatatataaaagctaacctaatatcatacatttctctctaagggcaacatttaatccaatctaataaaatcaatctaattaccaaaaattagatattcaattataattagatttgattagatttggattagattttaaatgttaaaagttgaattctaattgaattagatcgattgttaaatgttaatttcaaaatccaattaaaaatcaatccaatctaat

SEQ ID NO: 81252 - DNA, 652 bp, Cannabis sativa
taactttactttcaccatactgcttggattttcttcctatttcaaccttaatgaaatttcctcttttaaagaaaaaaaaaaaaaactagttatctgcttatttaattaattatttatttttaactcatcttcttatatattaattattttagaatatcgtcaccaaaaaatcttagctcaactaaccataatcagggtcggtctttgtcaatattaaacttttcatcatacttatcgattgttatttgttaggtttggctaaccgtttatcatgttaatcttcaatactaaccaataattaacaaaatgtcaatcaattcaaacaaaaacaacgtcataattaataatataaattaattaagcttttattccttaaattatggaagtactaattaacttttttctataagtgaagtactaattaacttaccacaattaaaataagcaaattcatattaaattgtattaacagtaatattatatgttataagggtgctaggtacagtgttcttcagcatttttctttttgaattaattatagagcattaaagtgtctaacaccactataatttgccatcttataattagttagcagtgctctataatttttattaaattatattaatagtaatataagcgccttttatcattt

SEQ ID NO: 81253 - DNA, 940 bp, Cannabis sativa
aattgatctgtttcagggggcaaagttgaataatacaaatttgaggggtgcaaaccttcaacgagcttatttacgacaagtaaacttgagagatacggtaactatttatttaaacacaacttttcactgcataattattgttctgccctctctttccaagatgaaatttaagtgattgtgctctaaattattgtattctaaattgactaaaacacctaaccaacttcaatttttgatgttttgaaaatgttagtacttttttcttaaattttcatatctttgtacacttgcatcataagataaacaccatatgatctcatccattacaagtatataatcgagtaaatctcagtatgtaattcgatttttcatgtttcagaatttagaaggtgcaaagcttgatggtgcaaatttacttggggcaatcagataataacattaaagcattattaatatttgaatccctttgagtaagtaagttgtattacttgtgcattaattttacattatctgatatatgataccattttgatgccaaatgttaattgtttgcatgtttgatgagtattggtgtctctaatatattcttgttcatatacaaagacttgtaaataaagtattgaacccaagtttaaactataagttggtaagtgcatatccaaaatgtagtgctatatattattgaattgacataataaaaaaaaaataatatatttttttaaaacaaaaaataatgacaatgttgtaattacaatgtgatattttttaatcattaatgttaaatggtaatattgtaagtaaaaaaatatgttaatttttgtactaaatttggcatagtgatatactattatcctttgcaaatattaaatatgggtgatgaaaaagctgttaaataaattaacaattaacccaagatctatttgtatataacatagaacac

SEQ ID NO: 81254 - DNA, 2073 bp, Cannabis sativa
  modified_base (2017)..(2040): a, c, t, g, unknown or other
gctataaataattttcataaataaccatgattaactgctaatttctaaattaaactaagcgggctttacaataggcagttgagatgtccaatgcttttcgtaccatgtcacctattgagaatcaaggattgggtgaaaaccttttccctaaagatgctggagatgcaattgctgctgaagtcgtagatgatcccaatgttcctgctgcctaattttatcgaacttttcttttttaagcggtgcatgggtactcgcattttgtacttgacaatattttaagacaataattttgtttatgaacaatgtatcccttcgaggatactcctttatttggtaagaccaagaacttttatcgtataacttgatgtgcatttttttctcatgcaattatttttcacagcttggtgtggtcaaaattttctaagtacaatacatgcgaaaatataaatacttcaaaaatttcaaaagctgagaattcattagataatcaatagtacagtatatggttataccccctatactcaatatatttagaaagttcaaagacttcgaagccatggctaaaaagcaattaggtaaatcattaaagacactgatcatatcgtggtgacaaactgacaagtatttagattctaaattcaaagactacttgctggaagaggggatcttatcccaacttacaacacttgaaacacctcagcagaacagtgttgcagagagaaaaccagaacttgttagacatgttcagatcaatgattactttttactgccactaagcttctagggatacgcactttaagaggctacctacattttgaatatagtaccctcgaagagcataaccaagactccaatataattatagaatgggataaaatttagattgaaatatttccgtatttggggttgttctgctcatgtaaatttatgtatcacagtgtattcttaattcatgagatactgtaattgagataggattgatcacaatctcagaccacccttgatggtgttaggcatgtgagatgaggaaagagaaagtgtgtgtgtggcgtgcaagagagagagagagaggagtgaaaaaaacaattcatattttctctcttgttagcgtattattttctcttgtatctggttgttgtatttctctttttatttatgatactatatatcatatatatagtgttataaataaaatattttaattttttattataataaaaagaaaatatataatttgatttgaatttagagattcaaatataaatatctaataatcgataaacagaaatcagttaaattcttttattttattattatctttttaattaaataaattatccaataatatatttaattcattaatttaaagatctttaattaatttaatttaaattattttaataaataatcaaacaaaattaatatgggtctcgagccactaaattttgcaatccctttccaatgagacctacaaattgtatgcatttgcttcaatatatactctggaatcaccaatcttaacttagagcaaattagcttagtcgcgatttcataaagaacattgcaacatgatattggccgatagtcactggacatttactcttttgaacaagagtaattgaattacacttctttaataaattcactgtgtgcaagacatctaaaacaactttacaaacttcattccctactaaatcccaattatcttaaaaaaaatagctcccaaaaccaacaggtacagttttgggactttacatccatgaattacaaataccgcatgtttcacttcctcttttataaattccttcaacaacaactgtctatgctctgttgaataaccggtcctgtatgaatcaaccccaatatcaccttcctaatattctccatttttgtatccaataaattttgataataatgaagaattttcatcactcacatgttttggctaatcgatcatgccatctccctgcccatgtcaatctcaaaataaatgtgactaagtgcatgtttggcatcnnnnnnnnnnnnnnnnnnnnnnnntttaaaaacagaaaattatttttaaaaacaatt

SEQ ID NO: 81255 - DNA, 1274 bp, Cannabis sativa
  modified_base (366)..(375): a, c, t, g, unknown or other
aattaatatttaaaacttttatatattatatttaaatccttattcaattcttaataattataaataattatacattgaaactttaaatacaatactttattaatttaacaacaatttatcgtaagcttatatatttatataaatatatataaacttcaaccatacgaaaaataatttttataataaagaatagataaagacttctctaaatctctctatttttttgttaaattcttttaatactttaaaaaactcttacttttagtcacaacaaaatttgtgattaaaagttaaaaaaattgtgattagttataaattattattcttatgttgtgattaaaaggtccgtgactaaaagtattagtnnnnnnnnnnacaatttgttgtgactaaaactaaattagtgacaacttgtgtctaaatggtattttttagtcacaaataattttttgttgtaactaaaagtcagatttagtcacaaaatatttatgttgtgactaaaaagttgtcactaaaaatagtagtttttttgtagtataataatattttaatcaaaaatattattatacttttttattattttattcaattaatttatatttaacaaattctaataaaataatcaaacacttaactaaattagggagcatcattggaacaaaaataaaaaaaatggttccgtattttaattttttagttattttagctaaaatttgactaaaaatagagagtgtagttggagatgctctaaaactctatatatatcatctaaaaatataatattttattttatcacttttttttatattattttttacatttttacttctaaaaatattataatgatataacatcttttaaaaatgctattataaatatattatttattttcaaattgtacaattttatttcctataaatttttatttttttaaaaaaaataacatagtgttatcgtatgacattaatataaaattttagtaccttcatattttattaactattaactaagttgtttacttcaccaagcattctatttaaccattgtagatgcagtatgtactaagtgtaatataaattttaaaaatgattgaaataagatcaatgtaagaaaaatagtagatattaaattgggattataacatttaattctttactacttgtctagtattattaaaaggtggtgccctctgtgattgttggttaattatattttctaaaaaattattacattaaataattagatgtaattaaatatttaattgcattaataat

SEQ ID NO: 81256 - DNA, 1201 bp, Cannabis sativa
acacacacaactattactgctaacttaatgctaaaaatctataaatatagttttatcacttaatgcacagggttagcaaacaattaatctaaccttatttatctcttattaatctttagctcgactttctttatctcttattaattttgttttattttaattttcttttaattcggtttttaaatatttcgataaataattgtataaattgattattattaatttacttaaaatgttaaataaattaaaaaagaatgaaataaatggcctaatttattgaattctgtgttgaaaatgctatatctatttaaatataaatatttactagactaatgaccttaagaaaaaaaccgggagtattatgtcgtttcctagcgagtgcatgtggaaggagaatatcatcatcaattcttttgatgtgatttttataatgtaatctccccatagatttttcttgtttttagaatatattaataataaatatttccttaaaaaataaataataaatattggatatatagagaatattttatccacacaaatgattctatatactattaattacttaattatagcaaacatgccattaagttaaaaaagttgaaaaccgacaaaactttaggaatattattataaagaaagtgatttgggatgaaatggataggttttttttttcttcttttttggttcaatcaacccagccatcccaagtaagtagtggccattaacagaatatatccaattccatagttaatgtaaggcacgtagaaaagatcatatgtatatatttatagtaacatgaataaaaactttgaatagaaactgcacatatggtttgggtacgtacccataccatacttgtcaccaaaaaaattaggaaatctaaattgttgttcactctctctatatatatatatatatattaatttatttataatttttgttcagtgaacagggctggtttggatgaagacagagcttaattacttaactatatcaagcaattacaatcgtgctttaaataaaatattaatagaaagaaagaaaaggaaaaatagtttgttcatttgggatgaaataataatcccatcattaatgaacattgccttattatctaattatttggaagggaaattaaaagaaaaaaattgaaaatttacaaaaatattaaggcatggagattttatatatatatatatat

SEQ ID NO: 81257 - DNA, 933 bp, Cannabis sativa
  modified_base (360)..(375): a, c, t, g, unknown or other
ttaattaaataatcaaactgagaatattaaaatacggaatttcagtgatagtggctttgatgttgatctattcaaagtctagaaatgaatgaagataattgttgaggctactatcaaaattggcgctataaattgtattatatgcataaatatgttgttcatttgtgcctcttactaagttaaaaccatatgaaagttgaagtttttgagattgcatagtcttctgaaatatttcgtccgtattgtcattattgtctaatatgatgagaagatctaaatcaccattaatttagaccatttagtttcatattaaattgttgaatggtggactagagctcttcaataataataataataatnnnnnnnnnnnnnnnnataataataataataataaactactttcaaccaataagtttacattttcatcttctcatttttgataagttatagagtttcgatacaaatataaaatattccaacaagttcgaagttttcaatcaatatgaaaaacggaggacgaatgattcctaaagtgaattgttgtgtctattttattttgactgttgaagaagctgacacaatgatgtaatgttttgtaaacaaagaagagtttgatttagaattgtttagtattgaatgatttaaaagaaaaataagaagagcttgatttagtaatggaaattctacgtggacatatgtttttttatttattttatgatagtatttttactagttattataagtgtttctaaatttttatagtatattagtaattttttaaaatatttttattctatgtgggataatctcttatactttaaattattaacctagtctattattattattattattattattattaaattaactctgtttatttataatttttattattttttagataagtaaatcccatgggaaagagagatt

SEQ ID NO: 81258 - DNA, 794 bp, Cannabis sativa
tttgaaatcacttaaatctgtggtttaatacataccactcctatttaatttatgatagaataaatatttgttttcttccccattttccacaattgattggtgaagaaataatcatgaaataagaaccctatagctaggtaacgttaacaatagatgtgacataaaataaagataattaccttgtctttgtatggaacgacgagatacaactatgtaacctttttcataaattttaagtggctctgggtatcctatcatcacatcagagtttttcattttttgttgattttgggaaatacatattgattattattattatcattattatttttcctggaacatattaattactataggcattgtttgtccttatatccgtctgtctatttatattttatgaaaaacttataaaccaatagaatggttaacagtcagtctcacacttaattctattcaagaagaaagaaagaaaaaacaataaaaatatgtgacattattaatggttttttggggtttcttttacaaaaaagggaagtatatatggttttataaaagttgtataaaaactcatgtttaactttcagttggaaaaatcaatgatacacatctgatcaaatgtgttttcacaccattatttttttatttttatttttatatgtaggagagattgtttattttttttttggtaactatctatattatagttatttaaaattattttacattaaagtttttgttttggcaagggaatttttttttttttttcattatacactttaaaacagttttttttt

SEQ ID NO: 81259 - DNA, 1078 bp, Cannabis sativa
aaaaaaaaaatagtgaaatggggggtgattaacgaggtggttggcagagagtgtttagggtttctctagtttggaggtttctgagttggctgatcgaatgaggaagatgaagggctggggaggattataaaccctttaggcgtcggttatttggcaataaccggcgacataggggtacactctatggcgttggttatttccaaaaaatcgacgccataaggggtttacaacccctcggtagattaccaaccttgtgttgtcccttattttaatttccaacaaaaataagggcctctaaacctaaagcacattgttgtagtagtgggagcttgttaggccgtgggcctctaagtttctagtgtctttctaggtcgagaatagcccctctctgtcgggctccaggcaagtcgtgcctccacctccttctacaaagccacgttggcttcgaccttccaagggaatgatcaaagtcaataccaatgctccctcgatctttttcatggctcttgtggcttgggtatatgactcgagatttttaaggcgtggttacaacctcaactatatggaagttggagggaacttttcaaccagaaaatggtaaaagttcttgccttagaccatgttgttattcaatgcaactcataagcttgattgagaagattaatatctcttcgaagttagattcatctttgagtttagtcatctcgaatattaaagcttcttgcaatttttttaatttgtgagtttcaaattttgcctcagaactaaagaatgttgttgttgatactttggctaaattatttgctttttcaacgacaactaatacaatctaatggcttggacatccttctttcttgtatcataagcattattatggttgaggccatctattaaagatatatcttagctctattctcttttgaactactccttgctctttggtggtgtttattgaagctattttctcaaaataaataaataaataaaaatatatcaacaattcttaattgatatgacaaattttgttgaattgagtgtttttttatacaattgttcatacttattattattattatta

SEQ ID NO: 81260 - DNA, 834 bp, Cannabis sativa
tcttttctttgtttgagaggtataaaagttctttttctctttagttttcttattttgcctctttttttattattttttttctcttctaggatggtcattttccatattaaaggcaagaactctcaatgtcattgtaaggtgtttttattaattttattttttaaattgagttgtttagactaacttttttttttattattatttatgattataaataagaatttattgatgaatatgatatttatctttgttactattgtattttttttcttcttcgtatcaattgttattgtggtctaaaattttggtaaaaatatagatgtacaatattggcaatatataacaagtgaattttgatttctgtaatgtcggcattcaaaatgcacagcagtttgtgctcgccgagatagaacaataacggggggctacgcccgccattcttccctgaaaaaatgcccttggaagagcctttccagattactaaataagtatcaagatgagtgccaattcgaatagcacgaattttatagcccaaatccttttcggatagaaaaacaaggagaccatacatggttccaagatctcgaccttctatacatatgttaaaccgattcgccattgatgaacataaaagctaaacgaaagagaaagaaagagaagaaaggaaggaaaggtgtaatggagaagaaagaatctcaatgtttattactgaaccatagagtttatatacaagagagctaagcactaacaaagtaatgaaggactaacaactaacaacccaatctaactgaaaaacagaaatgacagaagttagttacaacaataactaactca

SEQ ID NO: 81261 - DNA, 1184 bp, Cannabis sativa
tttcttgtgtgacattgttcaggctgaggcctgattttaatgaaactttttattcaaaaaaaaaaaaaaagattgcaactattaatgcaaattagcttttaaaatagctttcaaaccaatagagacaatcccctactgaaaataccgatcaggacatgaatcagaaaaacgagctaaactaattaacaggttggttcccaaaccgtttaacaaataaactgaagtttaatataaaacaactaaatagtacaatctgaaaataaattaagtatagtctaaaccaccccaacacttatttttgtaagtaggtagtcaaaaaaatttacttgttacttttcataagatgagtgtagagagagatcgatccaggcatggcatggggccggtggtaaagcgtgaggcgcacgcatatatccgacgtgcgaatgatataattcattatgtcccgccaccaccaccaccacaaccataatctcttcttcattcaattttcaataataatttcttctattgcgcctctatggctaacctgcgcaccaacaaactactacgcaccaccaaccccataacaccacctccctcacccattcccaccggcaaaggctctcgctccgcttccaacgactccttcgcccgatttctacaccactctcttcgcgtccccggtctcttcttaccaccttctattcaaccactccccgatctcactcctcctcaggtcctccatctccgtgacgatgaccacgatcggattcgagattcggttaaggattttgggttggttcggatcggcggtcatgggatttctgtagatgagttacgatcgttgttgattcgtggtggcgagtggaatgggaatcgggaagaggagatgttgttgtgggtttcttgttctccgactgaatggacgggttcggttcgggttccgatcggggactccagcagatatcgggtactaaggtactctgctgtttcatctcttttgggctgggctagtggcccatataaggcccattacttaagtatagaaatagtttatattagaactactagaaatattttgaaaacatcagtatatagtcatataaaattattaagtgtgcgtttggaagtaattgtgtaattattaaatagggtaattactagggtggtaattacattagtgtagtaattacactatattt

SEQ ID NO: 81262 - DNA, 1221 bp, Cannabis sativa
ttaaatttaaatttaaaatacttattattaaatttatgatattattatatatatttaaaaataaaaattatgtggattttatataaaaaattaatttaaatttaaaatacttaaaatattatagatattttaactacatttttaattttgttggtttaactttaatttaaaataagaggcaattctgctcaatcaggcacataataattcaccacgataactattttattatacataaaaaatatgtatatatataatcacatctaaagtacacactaatatagtcacaatagcatctcaatataccgatctaatttaacttttgatatattgaacaatgacaatcatattatttttaaatcaacaaaatacattcataatcacaaataccaaagtattaaattgacatagttaataagtctagttgtgtggtaaggaattatgttgaatatgtgatcaattcaaaataacataatatcattatcaatcttcaactgatactgtgatgcttaataaataagccagtaaaattaattaatcatacactacttaataaataagtccgtgtcgctaaacatacttaaaaaatttagccaacaaaatatcattgtctttaagtaattaaatttaaaagacaatgatcataacaagaaatgaactacatgctttcaattcaatcattctcaagaatataacaaaacataatattgaaagcataaacatttaataataaaattattggtccaccaagtagtttataacatcaacaagaatatcatatataaatgtaatctctattcaaagagaaattactcccactaacctaaacgaacaaaagattataaaatatctattattatcccaacttttacttacatgacgtgaccaatatcagtgccacgtgatagtacagctcgccaacaagaaggttaagtcatctactcagtacttcaactaacgaggagtctgagcactcaagcaggacgacggaatgacgaaccaaccacctcaagggggctagctggcgctatggccagcatagccggacagcttctaaacatcccatggccagtcagcatgcatcctacaggtgcatggccgaccaacctttagcctgataggattttggtgcacaagttttgtaataccctagaattaagaaatggattagtaaaatcctaattagataattatgagtaattgagaaattatattattata

SEQ ID NO: 81263 - DNA, 1255 bp, Cannabis sativa
aattcatttctttctaactctgtatcttgtaaatgactgttttctattttaaacatatttaccagctttgtacattgaattttagttgaaagtgtggtagtgttggaacagtagtgtgttgtatgttgaatttaaatttgtagtgatttattttcaaaggagtatattttgtttttaacttgtgttttggtaacgatacttttagtttttgtatttcatggagaataaggtatgtcttctaatgaaggtttgaactctggttagctcttccgaaatgtgtaaagtcctctgcttgaatggataatgatatgtatatttaccttgtgattgatggtggaaacttaagagaaaaaaggagtagtactctcagttagatatgcttattttagtttcaatgtattacattagatgggtcctggtaatttgaaatttcacaatacattaagtgtatgagcaagtgttgttggcattatataatgttactggtcaaactcaagggttaatgtagaatgttggcaattgctggtaggcagtcgtttcaaggtttgaatccccttatactctaaaacttgttgccactggcacttgcaggtctcctggtcgaactgttaaagacaaatgaaaatgtggtcgaactcatatttttacttcttttttgtgattatagctcaaattgtagattgttaaatggaagttaatgtgctatattttgttaaaggaacacgcatttcttgttatgtttaatatgaactgaattttgttgtatttttccttcacaaatttctctgtatgcagaaaagggaagccccagctggtgagaagccagaaccagttagaactcacctccgtaacatgattattgtaccagagatgattggaagcatcattggtgtgtacaatggcaagaccttcaaccaggtcgagatcaagcctgagatgattggacactaccttgctgagttttctatctcatacaagcctgtcaagcacggtagaccaggtattggtgctacccattcatctaggttcattcctctcaagtgaaggctgccagtttgcatattcagtatttttgttttgaagacttacatgaatttttgtttcccatttctgttgtttaaaagattttgaataccattaagtttgctctttagactctgatcatggcctaaatattggaagtttccttttttaccctatacttttttttaatgaaaattaaattttacgttccgtagaatacagctgaagaatt

SEQ ID NO: 81264 - DNA, 2291 bp, Cannabis sativa
  modified_base (497)..(506): a, c, t, g, unknown or other
ttatgaaatattactatgttttaaatagtcaattatcatacgatattattttattgtgcaaattgataatgattttgtcagatataaaaataagaattcatataatttttaattaacatttaaacacaaatataattttttttaacagttaaacacaaatataattacattatttaggtagtgtttggtaacatttttattttttaattttaaaaataaaaaataaaaaatgtgttatatgaatttcattctcatcttttattattttattaaagtcgggtccgggtctgggttaggatttgagtcgggattcaggttccaaggtctaggttagggtaagtctaaaataatgagaaaaaaaaaagaaatttgttttaaaaaaaaattgaaagtgactttttttattttttaaaattttgattctcaattaaaatattaaaaagtaaaaatagttttatagattatgattttagaaaatatttttatttttttaattnnnnnnnnnnaaaaaaaattaatttaaaaaaatgttactaaacacaaatcaatttcatgcttattaatttttcattaaaaacatagatttgaacattaatgatgaagtttaactcttataaaaagtcagaataactatctaccacttgagttttctattggacaacaatttaattcacatagttgacatattacgattctctttagcgggcttaagtggatataattgaataaattccactaagaaaactcaactcaaggcctaaaagaaacgaaaaaaaaaaaaaagacaataaaaagttcttgctttgcttacatatgaatttgtcacaccaattgttggagctaattttaggaaataaaataatatattcttttaattgatgagtaattcaatttcttttattttaaaactcattattacatgtgtgactagtcagagttggagcactcacaacaagtgagttacaatagctaaaaggtaaaataaaatagttaagaattttaaattaagctccatcaaatactttaaactcttatactagctattatacatattttcaaactccaaaaaactattctctacatatagctcaatgaatagtgaagaggtaaacatattttatattttttctttctattttttgtttctttaattatttttttattcatttgtgtattgtttttttgtttttattaataaaatacatgtaaagatataatatttaaatgatatagagaaaaatataaagaaactgatgtatggtgtaatgtaaatgtgtgaggtaaaataaaaaaaaataaagttttagtgaggtattttaaagaataatatagagaagctgttgatagtgctaggtgaatgaggatgacaactaaaccagaaggaagatgccatttcttagaacccttccaataaaatatatcattctttaaaattttttttaaaaattatatacatcaagtaatgcatagctaaggaatttacctaaagactattcattctttcatatgattttatgattattattattatttttctctctaaactctttcatctttttgagtttaataaacatgttactatcctaatggagaagtagaactatgataatgacttagaacttttttttcttcaacaaacaaaatagggcatttctaatcttgattagcaaaaggtacgtaatcaaaccttttatttttgttaatatacactatattttacaaaagaagtttatacataacagactaattttttttttaaaaaaaaattacagaacaagttaacatataaattttcatttttacgctttaagtttttttatttacaaaaatacgtagtctggtaaaaataataaactaaaactatttattaattgtttttgttttatttttattatttatttatagttgtattataattgtcaataggttgtgttatagtttaataatagttatcgtgaggttaattacttattattttttagttgttttcttactttttgctaaaaagtgtatttttatgaataaaaaattttaggctgtaaaattgtaaataaaatataaaataaaaaaataatatttttgaaaatttttcataaaatggaatacaataatatgatgagtaacttcaagcaaaaaaaaaaaagataattacataaaatactaatttttaaaaatttgttatatttctactttcaaagttttttcccttacatatttacggtattctataaaaacacaagaaaacaataaaaaaaaaccatatgaaaataacatcaaaataacataaaaaa

SEQ ID NO: 81265 - DNA, 921 bp, Cannabis sativa
  modified_base (33)..(41): a, c, t, g, unknown or other
acatttagtcataaaaaaaattatgttgtgacnnnnnnnnngtcactaaaagtagcagttttttgcagtagatgcaaatataatttattgaaaaataactaaaaggtgtcttcttttgtttctattttttatttttttttttaataaatgctatcacattttttatcatcaaacaattttggaaggaaaaataataaatatgctattagttaaaaaaaatatccaattatgcatgagtctctaatactatcatgagttgcatcttgagaataattagtaatattaatttagtctctcttgtcgtcgagactatcaattcttggtggaagatgagcataagatttggtggttaccttcattgtattgcttgttttgtaatgcttcattttattcatcaatgatatctattaaagtcttacattatttggtaatatataataagattaggacaattttgccctaataagctaattttgttgaattaggtcaaataagttttctaatatggtataaaagtaacccaactttacaatattgggtgcccataatatcgatttgttaatagttatttgacatggtccatactacgcgtgagggggcatagtaaagtttcacattggttagtaatgatcttaataaagcgagaacaatctaacaagacgattttgttaagttgagttcggtgtcaaattttgagtggcactacataaatgtatatatatatatgtctttttacaaagaaattttgtagatttcctattctccaatgtcaaaagaaaatgcgttgattttaagaaaatattgtaagttatcttatttaatttgatggaagttttgatgataagcaaacattgtaaatgtgaaattaattatgtgactaaaaatatgaatgatgataaaaaaataacttaattttaggtt

SEQ ID NO: 81266 - DNA, 838 bp, Cannabis sativa
aatagtatattttttataagatttggcaaagaagaaactcagtgttatgggatcaaaagtaattaccagtgattcatgtaattgtaaggaatattagtcatacatgaataattaatttgttggctttgccttatagttgtatttgggttttattgtgaatataaagaatactaatttactcccccaaaaaaaatactatacatggaaacattagacacattaataataacaattaagtgatgtattattagtcatgttatatggtattaaatataagtatagtcagagagagagagagagagaatgaattacctgattccttgataaaccagtctgtcgagccaacagatgcttatctgcatcacttggatacctgagaaagagaccagggaaaatgacatcagtgtccttctctaaactctataaagaaaacctcaagctttttgtaccacacacactcaacacttttctcgtttttccttctttttaaacaataacaataactcatttacccacctacctaattaagcgtgaacatcaaaaaaaaaaaaaaagattattagcaatagtagggtctttcttttagccactataccataaagctaagcttaaaataatagaaataataatgaagatgagaggtgtaactctctctctctctctctttctctttctctctgtacgtaatgagttagaaaaagtggatcaactacaggacactactgatcagttttttttttttcccttacctttaactcaataatattattagaacttgttttttctcagaggcagagacagaaatgaaattatgtatagtttaattaatgtgatcagt

SEQ ID NO: 81267 - DNA, 1002 bp, Cannabis sativa
atagcaactcccataaaaactatcagataaaccactagagcaacccaaccgtcaatttgaaaaaaaaaatattaaaaaaataatatatgagataattctccaattagctattggaatattgtttaattattaataataaataaaagaataaatatttctctttgaattatgacctaccttaattttttcttcttgatttttatgtatctctattttacatatatttctataaagcactacttagaggaggtatcttgcgatcgatattttatatagttattatatagttattacattaaattatatctgactcgatacttaattatatcaataataatatgatatgtatatgttggagaatactaaatactctagtgtcttttaccattaatctttttacatattaatatgaagatgcatgtggagcatgtttttaaacctatctttatattttctttaattttttataggtacgggacatttagagattttattggatatgctctaagatgtagctcataagacatttaaaggttcctattttcaccaaaaataatgaattatgtttttgaccaaattaacaccctaatagttttttgattgtgggttcttcccttcgaaagttcataataaggttctcttttctcataatgatgcacccctgaaatcggatgagatagttttggaaagcacttcagcttttcctattatacatgatcaagattctaattttaaaactacaagaataactattagagaacaattgaacttcggttccttggcttcttctagtaaaaatattacaaattttctatacagatgtttttactgccacaagaagggacataaacaatctaagtacctagattcctagccccccaaaaaaaaagaaggtagtgctttggtatttaaattatgtgttttagagaacaaaaaatctatttggattgtcgattctctatttactaacaatatttacttttcattgcagctgcttgagac

SEQ ID NO: 81268 - DNA, 2165 bp, Cannabis sativa
agatctgtttggttaaattaataaaattgtattgattaaattttagggtactaaatatgtataatttgaaaatatgaggtaccaattaagtattattgaaaacacgaggtacaaaatatgtttttcacgaaaacacaaggtactaaatgagaacattccctacattttaaggtgggaatccttaagtattttgtgggacccactaacatattcatggtaaactcaacacattttcctactagagtttcattttcccttcaatccatactccctgcattcctttccaagccaaccccactaaccataacaaacagcccctaaatagtttgtgatgctttggaaattgggaagaaaaacatattcccaaaaataagtttggctggcgtgttttcttcttgatatgtttagtgctattttaaaatattcaaacaaaatatatgtttgattggtttattttatttatcattttctacaaataacataaaatctttatttatttattacaaactacaatcctaattttgaaacacatgaactacaaagttttaacagttgaacctaattggacaccaccagctaccatacccttgaaccaacatcattagcatcaatatccttcaatcccattccaaattcaaaagggtgtgagggtgtcaattttatagggtattgatatatctatatatacacacacactttcataacttgtaagcaatataatccttactacaaggtttttttgattcgttttttatttattacaaggattctcatatgtttgtacccttcgaaagacataaatgaaatataaatgccatgctcaagagtcaagagtcaagaccagacaattaacaccactaaaccatatttcacaaggcatcctagactattcatgtgagggtagaagaatttttgggcagcaaccatatctcacaacaaagcatcctccgaatcacttaaatcatatttccaccaccaagtctacatactaatacaagtctacaacaactatccttaataacttcaaatatcaaatagcacaaagagttaaaattcatgtaacaaacgtatcgtgtatacatagttaacagtccaaaacagataaaattacaagagcatttgacttctgctcctatcgggttgtaactatatactttaaaaatgattttattgccataatcaatttgtaatctgctttgctaatatcatttatcttattataaattaagagtagtatcaaaacaatacaaagcacattaccttcttgcagccttaggaatgtaaatgccacttgttctgtctttaatttgccaccacagctacacaaagaaagaaaaccaagcaatacatagccccaaattactttcaatgaccacattttttgccacactaataatgtacaataatcacaaaattatcaagaaaagatatacagtttcagataggaccttccgaaactcaacatcttaatcagaatattatactattcattgctccaatgtacaatagaaaaaagtcatcgaattggtcaatttttacaacccattgattgccaaaatccaattccaaaaaaattggaagaaaactaacggccactacaaaccaaaacaaaattcagacgagaatcaaacaaaagcgtcaaaatctaaagaagaaataaaaacaaacccatcatacaattcaaccgacaagaacaattgatacagcagaaacgaaacgcagttcagacgaaaaaaaaaacggagtaacttcacctgcgactcaatgcaaacgaaataatttgagaattgaagaagaacaattataatcgatgaaatattcagagaacaaaaccaaaaagattcatagaaacaaagcaacatatagaaaagtcaaataatcattatggcgattaaatgcgcgagctaaattttatagataaataggaaaaagtggcattgacgagatctgacctgctgcaatggtggttggcagaactaggagaataagagaaatattctggttttggcgaaggaaaggccaatccgaaaattggatccaaaaatgcgctgttgctccaaaaagaatagatgttttcgaaaacactagttgattaacgtgagtttcattgctgctaattttattaaggtcgtgtttggaagcgcacctaagaattggaattgaga

SEQ ID NO: 81269 - DNA, 1057 bp, Cannabis sativa
aagagatatttttaacgaccataaaaatgtatccatattatcaagcattcttcttatcataaccctcttctcttctaagattcgccaaatcctttaaaatctttcttgaattagtaaattgggtttgaaaaactaaaagatagtgaaacacaagagactagtttttttttttttttttgaaagacacaatagactaattgattggctaataatagtgacacataagaattaatagtcataaacgattaacattataattttgtttccatgcagaaattacatatttatatatgtatataaatatgtatagaacgtgtggctttggggtcatgcatttcctttccactaaacacgaccaaaacaccagaagatactctgactctctctctctctttttcacaactcttttctctttctctttttctctcttttatccaaaatcaaaccatggaaaacaatggaaatggagtcattgttggtaataatactaatattaatgccccaacaacaatcaccattaaaggcattcttggtttgttaatggaaaccattgatgatgctgtgagtaatgaaaaaagagttatttctcttggtatgggtgacccaactgcttattcttgctttcacacacctaatgttgctcaagattcagtttttaacactcttcaatctcttaactttaatgggtattcaccaactgttggtcttcctcaaactagaaggtaaattttatttatttcttttctgggtttttgtttgttttttaggttcttttcctcgtttttatcgaattgagttttacttatttgatttcagattctgggtttacttggaatttgtttagtttttgagttaaaagggttttttattttgaatcccaattgaataaaagttggaacttgttttttttttttttttgttctatgacaaaatatgacctttttggcactttatagcagaaaaataaaaaaaggtacttacttttgttgacccttttatttgaaaaagcttaaatcttttctggtgattcttttcatctatttatatatatatatat

SEQ ID NO: 81270 - DNA, 750 bp, Cannabis sativa
aaaaaaaacaatacaagaaaaagggatattttaataattttaatacatcaacattaatgaaatttttggcacaaagttttaacattttcacaatttctaaaaaacaaacaattcatactgatgccttgtgtttctaatatccaaaagctatatagtctatgacatctatcaatctatttagggtaaatataattttgaaccctgtattttgaaaacattaccaatcaagacactatttttcaaaattatacaaaataataccctgagctcaattttgtactattttgaaaatactaagtttcatttaccattttaacaaataaaatatctgattaataatttttgtaatatagaggatctaaaatagtatttattcatctagcatttacttttaatataaatggagagcacactgtagtttcataaaacaaggtttcggtttttgttttggcaaggaacattgtttctgttaaagaatagacttcaaccacatcaaaagtacaagaaattctacaataacatgtaacatggactgatggaagttgtacactttattaggtagtagaaagattcaacatgcttaatatatttataatgaaagaatggccttatttgaagatcagcatttcatattcattggatacatgccaattttgcataccaatactaaaaaaaacaattagacaaagataaaactattcaacaacttctctttaagcagctgattctataagatattattccaacagc

SEQ ID NO: 81271 - DNA, 772 bp, Cannabis sativa
aaaagatttttacaaacctgattgacagagaattgaaacgcttcaaactaatccttcgtttggattaatctccaataccaactactggtttgagtaggctggtagttccaccaatcttcatgttttaaatagactggaataaaacgaaaaattagactaaaaaacccttttgtataccgaaatattgtctattgaagcacgctgtagaaaaagtgtactatagtcatagatttatcatatattgtatattcataaaatatatataattatataattataggtctatcatactaaataaataagatagctttattaaaaataatgtatatacaaattaagtgttttttatattaattgacttatatatgatcattttcaaccattatacatttttttaacactattcatattgttaattttactataatcaaccactaactatctttaaatatgctctaccatcaatttaatcatttattttagacattaagatgatgtaaaaaatattttctagtcaatataggtcgataattaattacttttataagtattattaactattagattataatttgattcatgtattatattttattacataaaaatattttataaaattttaaattaatctaaataaaattatattagatcactcataaatagttagcactgtctaaaaaagaatgtcagtcattaaaattactatatatgaagccttatcatcatacatgctgctcgcgctattagcccccctacaattcaatcttggctc

SEQ ID NO: 81272 - DNA, 1161 bp, Cannabis sativa
tatttagttccgaaaatcttgacaaacattttggtgctttcattgagagctgaagaaagacccaaaaccatagtgtcactgtaaccatggtgtttacccaaaaaatagttcccaaaaagactcctccaggtggcctcgacgctttcatggaggatgtaaaccctttctctccagagcatgcccgaccaagccatgtgagggaaggggatgcatccaacactgacaaccaagaaggtgacctaaacaaccagcacgaccacattagcaaagatcgagatgctaaaaatgaggaggaagatgacgatggagaatatgttaaagacagatattacaaatatggctaccactacgagaggacccccaaagtagttcgagtgtctagagagttgctcaagactaaatagaagttggtccatcaagagattttcttaaaaattggaaagaatgatggctcgcctccaagctaagtttggagatttagatgagggagattcggatgatacccctcagtggaatgtgtcagaggaaataatagggaaaaccttgctaatactggaacctttgctcctgtataggataagggaaaagcaaaagtaggtgaccctcagaatccttcaactctcatacgtcctcaaaaaaaatgtgaatccaactaataggcacactcaggcgcagaaggccaccgatgcctccaggctcgaacgcccttcttctttgaaaggtcaagctacataaaaagagactggtacgcaagtacctaggcctaggggaaggaaaaattgccacagtgattctgtaaaccaggatagtgggaccagggaacaatattctaatgatagttggtccacagtagatctttgaatgcgttttgacggaaagtatgaaaaagcaaaaaatgaaaaggcgaggccacaagtgaatgacctcaaaaatcatttaattgacaaggttcgcggacaagatctcttggacagtgataccaaaaggctagaggagcaaatcactgccctgacaaacttggtctggaagcatagtggggccctcactgactctaggataagaacccgaagccatgtgttaggagaatcacaaaagctccgctctaggagaacttcaaaatgttgggttttatgccctaaagaaaactcatttcaatataat

SEQ ID NO: 81273 - DNA, 1106 bp, Cannabis sativa
acagcacatattttagtatatataatacaaggaaaaagccttattaattagtcaaccccaaaaataaaagaacaacttatgagtccatgtggcttttatcatatatccaagatttggtgaaagataatatattcatttactatataggaattagttttgtcacctcttaatatatattgaatatatatggagtagctagtaggcaagtgcaagtgtgtattttcattagcatgatcatcacttgatcaataaaccccagctaaaattaaacttcgaatcatgaccaaatattaatgtaattttttgtttttttctttgactcaattaagtattgaatctgaataataagtcctatattagtttttttaaaaccttatcagaacttcaaaaataaataacaacaattatacaatcaagataatatatataataaaccaccaaaaaattatgaactgagtcattaattacttaataatagatatttaataaagtaaatatattttctcccaataaatcagttttgttagaataaattagatttaatattttcctaataaaagtgacacttcattattatttctttgatgattaagagtatctcctatgggacttcaaaatactaaatatagtgcaattttacactatatttactcaaatgagtcactaaaactatacttataagtagctttatctacgctgtcccaccaaatttaatagagtacggtagaccatactatttttttaaaagttttttataattaaataatactttttaagaaaaaattaaataattatacatatttagtattaaaatattcttattatattaataaaataatagaataataaataatataaaatttggtgtaatttttagtgttgtgattagaatagaaaaaataattgatgttaaaatagtcaattttttatgtgaatttagcaccaaatttaagttttactatttgagatgtctaatgacaactcattttagtgcccgaaactgtaaatataacatatttggagtgctctaaatataaaattaaaatcctttcaaaaaaaaaatataaaattaaaatttacataattatatataaaaaaaaaaataa

SEQ ID NO: 81274 - DNA, 941 bp, Cannabis sativa
ttactgatactacacctctatttgatcccgagagaaaacttttcaattattatttgataatataatatataaattaaaatatgacactatattattatgtgaatactatatatttaagtgttagtacataaattatataacctatatgatttatttaacctatatattgtaccatagaaatgagttacgattatataacacatttataactctttttttggttcatcacaaattatgtgtaattaaaagagttgttgcacaaattcattatgcgattcagaactatcattatatagttgtttggaggccgttacgatactcatttaagtgattaaaacaagttggaaacgttcagaattgaaaaggagtcgaaaggagttgcaaaactctattttggagcatgctgaaactgtacgtctggcgatatgtcgcctggcactaggaaaaaaaaatccaaaacattttagttttaattgggtttatatctaaccttattctccatcgtctataatcccaattttactgattaatgtggtgataatatccatgaaatgtcatgaatattaaatgtaaagtgtaatcacttaaacattataaaatgagatttttggtgttcatttggatgacctaatttctatcaaaaaagtattttgctaaaaaactctaaaactttataattcttaaaactattttcatgagagttctcttagtgcttagtattaggagaaataaactttttagataaaagtgttatgtatattgttcaagttatgatcattttcactaatttatactcaaaattgtgagtaagtatttttttttattttttttatttatgatcatattatataatatatgtgtatagtgtgttatattgcacattgtaatctcttttcttttaccttttttttttttatatatataatatatagggtaaatag

SEQ ID NO: 81275 - DNA, 2422 bp, Cannabis sativa
gtaattagtggtaatttttttttaattttaatttttatacacttaattttaattttttttgtgataaaaaattatttttctttataaatttggagtgataaataaatatcacaattacataccaacttaataatcattctatatacttatttataaagtaaaacctcaaaataatctagttgatatataactagtgaaaataaatctaaagagattttgacgcctaaaagaaataaggggctaagtattattaatcataaatatgcaagctttgtgaaccataactctaatatttgaacatacgacacctacatgtatgtcgtttcatgtgatcttacttctttattctccaccacttctgcttttgacgtatgatcagtcctaccaagttcaactccaacgccggcaacatattccagggacttcttataatcttcactcattgtctccactcggaacttcttatagatatcaccctgataaaacttcctcgttctcgccactaaaatgagcgaaacgacagcaccaaaaaccgtaacgacagtaataatgataaacgacaatttaaagcactctcctcctaaacaattcaaggcctccccgggcttcctcacaactcccgaagctgccatttgtttccttgcttctttatcgtaataataacccgtgacccttacgttcaacaaataaagcccgattgggcttgtcataccaccaaaattgtacagagttgagaagtattttaatccaaaaagctccgatatgatggtgaaaatcaatggccaaaaagctccaaagcaaaacccaacaacaatggaagccacgtagagaccattcgggacgttgaaggcgactaaaagataaccaacagaagataataacaatagcatagttaagaacagggtacgaggaaatttgtactttgtgatcaagaattcggagagaatcccaactgttatttggccaaggtagttccaaatgcttgtgagagacacaaagtttgtgattttcttcaaagggtatccgaaagaagtaccaatttggcccaagttgtccatcatcgtcattgatccacctagaccacaaacagtggccaataatagagtgatcatttcaatgctgaaaagtgcttgtagtatggtgtagtcctctccaatttctggtggcttaaaagagtctttccaccaagaaacgacttcttttcgaggagtcaatcgtcgagggggtgaaacgacaaatgtatcgtcgtgttggggaaactagcttgctcttaaggatcttgtcttcttctctaaaaacgacaataattgggagaaagaggaggaacaacacacccgcggcgcttaagccgtactctgtcttgttgaaactgaatgttttttctaaaattattatgatgaacaagaacccagctagacacatcgataggtaaaggaatttatagaagactttggcttcgtttcgtggcctattcactgtcttgatgattcgaatggttcggataaaagcaaaggacagagcagttggaagccaagccacgaacagagtgaaaaacaacgtgtcatcaccgtacaaagcacggtacaattgagcgatccccgccgcacttatcccggtatacccattcaacagtcccaaaacgacgccgcgattctccgggaaattcttgacgcacgtgacaagagctccattgttggtgaaagtgtgtgaattggctcctatagcgatgtagaggcacatgtgccatactttgggctctggaatctttcgggacagggcgagccatatcatgaagtgtccaaagaagttaaggacggcgcctatggagaggacaacccatggaggagtgacttcgttgattaagccggagaggattcctatgttggctccaatgtccttggagaagctaacgaggttgagtgtcgtttggtcgtaaccaaggacggttttgatgtcgtttgaatagagggcgaacatgtagctggccccggcggttgccattaagaggatggaggcaaacgccatgagccatcgcccggtgatcacttggaccaccaaactcttcatgttgaactcagagttcacaccagtactactactgctactctgatctgaaatatcaagaagaaaaaagaatgatttgattaatattttttgttagttaaaatatatttaatattagtccacaatccacaatacaaccagagtaaattagccatttcactttcatttttatcctcaatttttttgaagtattaattatagggtgatttgattttttgtggcaaaatacaccatgcatgtttgcccatgtatgcaaatgcaacacttccgtataagattaggatttaggtagcttgtgtcatgtggtcatatatgatcgatcaatataaatgcagggtgtcacgggctcaccttttca

SEQ ID NO: 81276 - DNA, 583 bp, Cannabis sativa
  modified_base (395)..(397): a, c, t, g, unknown or other
ccataacactcttcttttaattatttttttatatatttttgagggccccaaaatttaattcgtcttgggcccatatattttcagggccggccctgagtatattacacactaacgctatgcaaatttgatacgaaatttcacattttagtgttgatataccaaagatgtgaatcatttttgtgttcataatttttcaatttttaatgggttagtaggattagaatttagaagtaatattcattcacattcacaataaaatcaattggtaatttgctctgttagatacattaatgttcaatagtatttttattttacaaataaaagtatgagtatttattataaatcttacaaatcagtcaccatataacacaaaagaataataataataataatannnataataataataataaattgtataaataataaatgcaaatattaattcattaatacttggatttataattcattattttcatggtgtttttttgcttaattctttcttcttttgggatgaagtaatattgataataattctcaccttatacggaattgttggtgaaacagaaacaccacacagtaa

SEQ ID NO: 81277 - DNA, 1450 bp, Cannabis sativa
ttataatctagtagcttctttaaaggaaaattaaactttgtcaaaaatattagaaaatgcattggaagatgttttgaaatggtgtttggaagaaggaaaatcaatcttgattatggaaccatttgggggaaaagatggaagagattttagaatttgaaaatccttttccatattgaggagggaattggtatgactcaatattcaatcctttgtcacatggaaagatgataagtcaacgaaaaaagaaaaaaaaatacacctcatgtgttaaccaatccaagagctactaattatgtaaattgcagagactgttttggtaatgaatgactataatggaacaatttactcaaaatctataacatggagtctcaagtatattttaaggacaattttagaacgttggctattgtgaagggagaattgaccttttcactttcttttcatttgaacaaagtgttatgaactaacaatcttagtttgcatataattaaaaccaacacatcatagaaaccagaattaaacacaacagagacgaaaaatagtaatgttgaagaaaaataagaacaaaaaataataagacacaagcaattttagaggagttcgaactttcctctacaatgagtagagagcttattccccttgaattccttctaaggaatcctttacactatgaataatggcatattacaagacttcgttcaagataacttaaactactacaattgtgatcttgtcccttgagcaatattcacaatgaagcttagaacacttagaaaacacccttgaagacctttgcttccctctagtttctcaattttgttcttctctcttcatctctatccttgttgcttcaagatacaaaaataaacctaaccatacattagtctctctatgtatctctcaacctaatatttctactgccattacaaatgagactatgcatccttttatagactaaggatccaagtttcaaaactgttacatagactttaactaactcaaactaagagaaagaaagtaacaaactttgagtgacaaatctgagctgcctttattcatgtcatgtcatcataatctttaagtggttggtttatttatgactgatataaccacacaaaaaatctctctgctattgaatgaagaagggatgagagaagttgagagacttaatcaaagtgtttgcttatgattgttatgtatcccatgtcttttgttttattttttcgatgtatttgtagcttcttaaatatcattttaatttgttaaatgaattggtattgactgcataaagtatttaccaacttagagcataaaacacatgtaaaacattttgattacatttacaaaatattcaatatgcataacaaatgaaaacaaaacagaatggacaaaaatcaagtaacatatatgtgctaaatactaaaatttagatacaagttagatgataaat

SEQ ID NO: 81278 - DNA, 504 bp, Cannabis sativa
taataatactaataataataatattaatagaaaaagctaataagatatgatatgtggtagaggctgtacctgatattccctgctcctttgacaatcctagtgtccaccaacttttattacttcgttataaagtcaaaatttcaaaataaaaagaaaaatgtaaaagctcagtaagtcacttttgattattgactaagtatgaggacttttacttcattcctatgcataatttcttaaaacgatttattctaattcacaaattaaaaagatgttctttaataatgatgggaaagctgtttgagaaattaccctatactatttttacgattttctttttctaatttcatttttataaatctatttatttatttattttggttaattgtgagtaaattatccaaacactaagaaaaataattttttttgagacttttattacaaaaatagaaaatatctgtaaaaatgaatatttaaaaaatatatgtatattttttaatttttttt

SEQ ID NO: 81279 - DNA, 1080 bp, Cannabis sativa
aataaataaataaaaaaaagaattcattcctagatagttttttgcaagtgatgaagtacgtaccttttcataaatatcattattctcacttttcgtagaacttacgcgagatttttctttgatcctcaattactcccacacatcacatacatgttcttgtttcaaatatgttttcacaaaattttgtattatcattatttgaaaaaatttctatcgaagtaattaatttttgtatttacttgcggatttgtaaaaaaaaaaaaaagaagagagatttataaaaataaaaaaacgataatgtaaaattgtaaaacaacaaaacaagccattttaaattcttattatataataattagataatataatcgttattcgcacggctaattgaattatttttagtattataataaaaatatgatctacgaagaaagaggtgcacaagaggcttttttttgcattgtattttaactttgccattaaaaaacttctaagtctcaatatttgtttttctttttaaataaaatatgaccataagtcttggttacaattttgattcagcaactttaaagaatttttagaaagagagggagaaaaagaagaaagaagtaacgagaataatgataatatttttgataaataattatgtattaaaaaaaataaaaaaataacattaatatgaatttaaaataaaacaataatacatattaaaaaattgatactacataaaatcatttttaatttgaagtattatccaataataagaagaagaataagaatttttatatttattccatctttagggattcttccaatccaatttcagttaccaaacaaaattaacttgaagatctccaatccataatccttttaatttattacttattttttcccgaaaaatggtataattcctattttttttttccttttgaacaatcataattcatgatccatatcattaaattatatggattttcttcaagcaaaaaaaaaagaaaaaatggatatcctttcttccaaagctaaaaacagtaaataaggatttttttctatcaaaaaaaaccaaaaacagtaaacaaggat

SEQ ID NO: 81280 - DNA, 1962 bp, Cannabis sativa
  modified_base (735)..(739): a, c, t, g, unknown or other
tacaaggcaccacctatcgtcaaaggtctgctcctcaccctcaccctccccctcgatcagaacaccttcttcttcatcatcaatctggaaattctcatattgatcagcaagattacccaacacatgactgctagaagccataacacccgcagcaaacaccactgggagtactcctcaacaatcttaaacgcagcaggaacaccacagcacacacatataaaatctgattcaaaacaaggacttttcaccacctcatacgtataacacactcaaaagagagagactttatgataaattatatattagttatatcagttcaattattaaatatctgaaaattcattattcatatggagaaggtataatcttgtaagggtgtacaagagaatcaagattatatgatatgaataaaataattcaatagtatattaaatttctagaaaatttttaatatgaaactggtaagtacagtttactagacacaatacttctagcatgtgtgattttgattcggatcacatatgtagatggacaagcaataaaagtactgtgtataattagattatgcatgactgaaccgatatgtaataaatatctttcattaacttttagtttaccataaaaagaatttatcatatcccaatgggtgatcattaatagttgaatcttgagtatatacatgaactcatgtttgtgttcattgagttctttatttcactcgttaaagtttctcannnnngatgattcttacaacttctgtttttggagctttataatatgagtacttgagaacatgttatacaatagtggaatcaaaacttttttaacagatcgaatattagtttcaatgtagtgttaattttaagaaaggtaacagttagatccaaatttataatgagttatggattaactattcacattgtattaatatgaatcaagagataattagaagggtaaaatgatacattaaccaaatctaattatgaaataataattgaaaggtgaactaatattgattattttaatagactacaagtaagaattctataaacataattttatattgtcaaatagtacaattctacatttatagtagagtaataattgaatcaacaaatgaaattattctattgatgagattgatagtaatcttagatttattggagcttcaaatattagtccatgatccccgagtcacctttatacaatagtgtatatgggaagattttatttgatgaatggattttaagtgagaattaatttctatgggaaataaattcttaagggcaaaataataatttgtgaaattattgttttaattaataatggctgaattgtatcattaatattatatcaactagttaaatataatattatataaaataatattaaatagagagatatattattttaaggaagataatatttattttaatctttgtgaaataagatattaatgagaattaatcaattattatttattagtagaataaataataactcttatttgtggcataattgagaaattaatttttgaccttaaaatatggcccaaacctgtaggcccattctacacgtgtagggtgacatataaaggcccatgattaatttattttaattagtttattaagttaaaatattttaaatcaaattaagttaattatcttttaattattaattaaatatattattagataattgcttaattaaaaggataattattattaacgcagattttcattaaccatatttcagcctcacgatgataattcaacacataaaaataaaagctatagaaaaataaaatatgaacactaggtttttttacgtggttttgtagttaaaattttgcataatccacgagtcaatcttattcagatttctgagtatttttgcagggcctcttccataagaattttttcgtcccttttttgagattgtttgccactatttataattgca

SEQ ID NO: 81281 - DNA, 1002 bp, Cannabis sativa
tcttacaagaagtttccaaaataaaaaatggacagttgaaaaataattatttcctttgagaaaaaagagcaataaagacactatatcaaggagaccaaatcagtttaattgcacaaaaaaatcacacaataaataaataaaatagtttgacacttaaattgccaaaaagactttacaattacattaagtattgtaatgatgattatatacaaaaaccaatgtaatccttattacaagtgcactccattacaaaagtaatatgatatgttaattttaaaaaaaaatatataataaaaaaaaagtcaaaagtattaagtacaacctattattacaatattttagtcaattttcgtacccaaaatcacatgtttgtatttttttttcaaatttcttttcataatggtattaattatagttacaatatcatcactataaatttttaaaaacttctgaatagtttacaatacggaaaataaagtttttagtattctaatttaccacgcatattcaaaaaacttcaaacataattttcgacactgtaaactattcgaaaaaatttaaaattttacaagcaagatgttgtaaatataacgaacatcgacatgaaaaaaaaaaatattctcacatgtatttcgggtacaaaaattgactaagaccttataataggatattgatggtatcagtccctcaaaatctattttactctttcttttgaatattttatgatgataaaaatagaaacaatatgtatattatggctagtacagtttttatttcattacattctcacactaaaccaaacacaataattccaattccaacgttcattacaacaacaaactaaaatttataatcaatttcaattataatttttattcctttacattaccattatcattccattatacaagggaatttttaaaaatactcttttttatgtttttaatcagtttggtaacactttttttaatcagttttctgtttttaaaattagaaaagtga

SEQ ID NO: 81282 - DNA, 1088 bp, Cannabis sativa
  modified_base (339)..(343): a, c, t, g, unknown or other
aatcccataacactctttttttaaatttttttgtatatattttttagggccccaaaatttaatttgtcttgggcccatatattttcagggccggccatgtgcctaggttgtgtacatgtgtcttcttattatgtcgtcaattaggtagttacactataaatttttttacttttagtcacaattaaacttgtaactaaagataaaaaagttgtggctaattataaattatcattattttgttgtgactaaaaaatccgtggctaaaagtattagtcacaaaaattacgatttgttgtgactaaatgtatttttagttacaatatttattgtgactaaaannnnnttagtgacaacttgtaactaaattctgttagaatattattagtggaggtattgagtctataaatacctattatcctttacatgattgggttttagaaatattaaacaattgaacattggagctttgaaaaggtatgtacgagacattgctcagaaaaaaaaaaaaaattgtgtgtgaaatagattaactcggtgtaaattaaaaattgaaagaagagaattggtatttatacagaaacttggaagaacaatttaatagcatacaactcccaccaaaagaggaaggaaaaattgaaagattgaggaatttccaattttgtttttggatacaattgggattgtaaacaaggattgattgccattcatagtctattttttttacatgtaacttcaagtgaagatttgggaggtgaagaatggtttggttagaatcattattacatgagagatcaaagccagggtagccacaatggggtggttgccttcctttgagtctgaaagggaatcttattgttggctcattttcaccacatctaccttctatgcactcatcaattatttggctatgaactagtgttatcataaacaagcaataatatatatatgaaatgatcatcatcattacttttactaaacacatattcatatctcctatatatgatgtatatatatatatatataggtttagaaaattgtgtatagaaattaatttttttcttctatacaatttgtaattaattattaat

SEQ ID NO: 81283 - DNA, 806 bp, Cannabis sativa
ttgctctacgatatataaatgcatctctaaactgctttgttctagacttgccaaggtgctccctaagcttatcaatcaaaatcagggggcgtttattcaaggaagatcgattgctcataatgtcatgatccttcaagatctcttgaagaattataatcgaaaaaatatttctcctagatgcacgattaaaatagatataagcaaagcttatgacaatgttagttgggacttcctggagaaccttctggccgccttcaggtttccccagagatttatcagttcgatgatggagtgccttagggctacttcctactcaattgtaatgaatggtaggattcaaggcaaattcaaaggagagaaagggttaagacaaggggacccaatctcccctctgctatttgttctcattatggaatatctaatgagaatgctccttttggctgctgataattccccatttagataccattcgatgtgcaagaacttgaagattattaacctttgttttgctgacgatctcattttatttagcaaaggttcaagagcctcgattatggttatcaaacacattctggatgagtttggtttgagttcaggtttacacttaaacaccaacaaatctcttgtttattttggtgggatgaattcagaggataagcaggctgttcttatggacttccatctagttgaaggatgttttcctctcaaatacctcggtgtccctttaaggccaaccaaatggagagcggaggattgtgggatcattattaagaagataaaacaaaggttgcacacttggtcaagtc

SEQ ID NO: 81284 - DNA, 1792 bp, Cannabis sativa
tttagttattgtattaaattataatttttttacattatttttattcttttacacaataaattaataataaaattattgataaagttatagtttttatatttttgataaaaaaacattaattaaatattaaagcttaattttaaaaaagtattaaattttgtaatttctaaacatggatttccttggtacttttcaacacttaagtgagaggtaatttgtaattttcttgtgttattgtatcgttacttaaagtggtagccaaagtaagttaacaacattcttattgtagtaaacattagctagttagacgtaaaaaagatgcaatatgcgtttccttcttgtataggaattttgtgttgtttcattgaatcttattatggattaaattaagtagtatttttgttaatctattttatttcattttgtaatttatttttggaatttttaattaaaatttgagtaactgaaattgagattagtaattgcttaaaaaattgatgaaggtaaccacaattgcaaggtaaattgatttggtggtacattaattttttcaataaatgtattgatttgtttaatatgatgctaattgtggattgaaactataatttgtggtagcatttgatggttttttattaaatgcgttgtaaattctataatatggaaggttgtactgattggttgattttgttgtagtttctgttagtcgggtttgatatctttaaatatatgtagttttgttggttatataacgtattgtggggtaaaatgtaagtcttattagtgtaaatgtaattatcggtggtcttatttgtgtttgatctctcttcagtatacctaattgtgttggttatgtaacataattttgattattgattaacgtaaagttgatagttttgtaacgtaatggtagtgtaaaagtgatttaagatgtacactagtatttgttatgaaagttttttcaaacaattactgttgatggtagttgtttattgtttatattgactcaagcggtgaattgaataaataattgtttaatactatatacatattcagtggcagtaattttagatttgataatgaaactaaagtaaaaataaattatgatagttgattctgcatattaaaatttaatccgtaaaataaaaattaaaatgtacaagaacccgataaatatgtaggctagtgtgacataaattaattttagagtgggtgccacattgagaggtggttagatgaggaaattaatatttgttattggttgcatgaaattttggatgatctagttgagtcgtgtcgatggtgcggatgtgttgtattggtggtagtaagacgtctaaaatcatacttgtgtactctatgttagagtgatggtaaactaaatgtctagattggttaagtgctaagactttgacaccaattgaccatacttcatgtatccttatttatgattctatttcttttgtagattcttgtagcgtgtatgttgtcattatactcttgggttgttttatgtttatatcaatgatcttgtcatggtgggggtaatatacggattcagactttgttcgtacacccaacaacgatagagagttttgattgagtacggtgctatacactttatgaatttggttttgtaagttaacaatattgatggttggactttgcaaatcgagaaaacacactatgctatcaatacagtacattattaagttttgtgctctaaataaaatccatttcaatatagtcaaatttactaattaataaagatcaaaaactgcattttatgttgcat

SEQ ID NO: 81285 - DNA, 636 bp, Cannabis sativa
gtttatattaatttatctaacatcatataccatacatacacataaataacacttctatatccttaatatggtattgaagtcaaataaaaactttaataagtataaaagagtcacttgtaatttaaaaataatgaaaaaaaaaaaattcacttatcatctagctctccaaaactaaaatatgagaacttaatatattagatgtattaattactatactcattaccaattactttttaaattgaacaacattgttcttatcatacacatcatcacaccacatactaacataaaccaataagattaagacacattaagaaaagctgaaaaatcaacttcataggtccacctaatgtttcttacaaatttgaattatacaccaatgtaatgtaactaatcaaattttagcttataaaacaattttacgaaaaatattaatctatgctcaaaacatgtagcttgtagatcttatcacaatattaatatacatatatatacctctctttttatatatgatatgaggacaaaggatgaaccatactttttttttttttttttgacaaaggatgaaccatactttataccaacataaaactaacaaattaaactctaccgtatatatactaagaaaaaattatt

SEQ ID NO: 81286 - DNA, 1614 bp, Cannabis sativa
ttggtaatacttttattctcaattctttaatttaattgatgagtattacataaggaaaatttgactttctatgcatttattggattaaaattatttttctaaacttttttttttaatgaatttccctaaacttaatttaatccatgaacgactttcgtgattagctctgataccataaaaaataaaaatttatctatacaaagtcttaataggacaaaatttcaaaaaaaaaatcttaaagactttgtaaaagttatttcaagtctcgagataaacttatatttatagagtctgatacaaagaaaaaataaactgaaataatagctctaaaacagaaaatacaagttgatacaactaactaacaaactaattaacaacaaacaaacaattacagaacagaactaactattggttatcatttcgctatgtaaaatctattaaatacatctgcatgtccattgtgaaatcatacctttattatttacattcaaaagacaagaatgtgaattaaaatgaaagacattaagtagattagctagtaaagaattttacacattattacatagcatatataatagtacagtacatctcaaatacttaaaatgatgtaaagttaagcatacctagcacaaattctacatattatgaagacatgtatagatatttacaaagtttattctaaagagcacgtacgtggaaactcagttctattatttgagaagtctttgatcaatagtcacgaagctagtctcgaatatgacatgaacttttttagagaagaaacactgcattttgaagacaataaaatttgattaatgtaatttttcttttaacatacaaaatatatatggtttgtttccaagaccaagtcaaaagttaatctgatagtctacatagaaacttttaatattactatggttgttgttgttgttgttgtttaaacatgccaacaccaattgctccagcatcaaacgcaagtgcactaggtcagctcttttcaatatgtagttgacataaagtggttaatagatttacccaatggaaaagatgccagcatcaaagtaataagggacaaattaagaactgcccacctttatatgagtagttaactaaaactagacacaatactataaaagtatatattgggatattagtagtcaaatatttttaatatttataattattacacatataattttatttaaaaaaaataacactaaaaatattttattttaccattttattgcaatcgtactatttctttttactttgtattttatattatttctctctccatttttttttatcttttgaaaatgacaagagtagttttttttttcttttccatttagttaccaaaaaataatcaaatatttagggaggattaaaatatactttattattcatatttaaaaattattatataataataaattaatttctatactaaactaagattaccaaaatatatcttaactaatattaagatatcataataaactttaaaataactaatttgtcattagtttagatgtctaaaaaaatttataatatgttatgtgtttattttactttattgtaacatattaatttcttaagattgaaggtaacata

SEQ ID NO: 81287 - DNA, 1466 bp, Cannabis sativa
ttgcatattattatattgtaaaaacaaaataaataaatatattaaattattaaatatatacaacaatatttgatatatcgtattattaaaaattaatatactttagtcataaaattatataccacaaaaaattaataatactaaattaatactcaaaaatatatatcatgctacaaaattatatataccactatttaaatatgcatacataccaaaatatatatataataaaatagaaactaaatatcatattaaataaattatatactatagacaacaaaaattatatcccatacaacaaaatatatatacatacaataaaaaaataaaacaaaataatataaaataaaacttatataccatataacaaaaaatatataccttacaatcaaaatatatataataacaaattataaatatagaaatatgtaggatgctaataaaattatatatcatgtcaacaaaaatataatagaaaatagaacttatatattatttaaaaaaataatttttgtgagcaaggatggaatttttgtagacccgataaagattgaggcaaatcaagatcgacctttcccgctcttctctctctttcgatgtctcactggaactatggcaaaaccggcgaaaaatggacgagaaagggaaatccaagggaaaaaaataggtccatcttcttcggatagggtcatcaagaccaggtccatggatgatgttctcagagttcaggaattggagattgcagatgacattgagccaatggaatagtacaatgaaccaatggaatagtactcggaaaaaaaatcgcctgaagacggagtctatcttcatgagacgaagtgaaatccagtaggacttttctgactggcttaccgtggcaaagaattaaatacggatagctatcacatcatttaagcatctcaaaatatgcctaaatcccaagaaactaaattttgggcgcccaggttgacgtttatgccaacctgcgtgcccaaaagttaggttgatctcacacttaactattttcaaataagacaatctatttacaaattctcaaataagacaatctattttcgaattctaattgacttattaaatcaattaatttagtctacaagatattatctcagataatatggggaccgtgggcctatgtaatcaagctcctaataagcagatcttgaaatttaccgagtaaatttcttaacttgttaattcatcttgattctagtatagatttaaaattgcactattgattacatagaatactttatacaccaaatatagatacagtataatttatctattttttcaatcacaacaatcattgattctctatagacagtttacattgagtaaggaaaaaattattattttaaccttcaatgtatttatccttaaaacacttagttacttgtaaatgatattttaaaatactaatataattactgaaatgagcgctctat

SEQ ID NO: 81288 - DNA, 565 bp, Cannabis sativa
tgtgctttgtgacagtttttttctttaatggtttttttagttattttccctttgtttcttcatcagtttcagtcagttattctttgttactagttttctgcaacttcatttcttatttctatggatcctcgacttgattggataaaatttgttgtatctttaacagaaacaaagcgctccgtggttgccatcgctgatggtggtgcccctaactcgaatgagcagcttgaacttgtcttggttgttcgtattctatctacacggaaagttttgctatcaactttacaaagacaaatggcttaatattgggatcgtcgtttcaaggccatcatttctaagcatcattctgagttgttcctggtaacttttggatgcattggtgataaaaataagagctatggagaaagaatcttgacacttccaaaatcatcatattgctcttcacccttcaaactgttttgcagaatatcacaccggacacaatggttttttctcttttttgggttcaaccctatagactcccattcttgagtaagtctcgttcactggctaagacttcaggaaa

SEQ ID NO: 81289 - DNA, 1480 bp, Cannabis sativa
  modified_base (963)..(965): a, c, t, g, unknown or other
acatatgcatgcctcagaatatactgacaagaaaggaacattcatccatccgagcgaagtgagtatatcaacataagatgcctcgcatttcacatagtgagaagatcacctcactttgtaaaagccaataagagaagaatatgacaagaagatgaacaactatttcccaacacttagcattttttcttaaggtggacaaggaggaaaactcatattaagcgagatataaccttccacgtcagcaataaccatctaaaggataaaaccaaagagcagttggaaagttataagatattatctcacatgtgattaaatgaaacgtggggattgtccacgtttcatgagcagttatatttaaatccatcccaaaaggaataactctcaacctatactcctataaataggggcagattccatggaaaaatggacagtaataaattgagagaaaatactattattcaaattctgatattggattttgtactcaataaatatccctaataataaggactcgtggagtatgtatgtagattttaactacaacaccaaccacgtaaaaatatctagtgtcatcatatctctgtttacttaataattttttgtagaaagtttattactgaaaggctatttttttagttaacgaaaatctgcgttaataatttggtacattcattgagagccttagtgataaaaactcagaaaaatccctccttacaaacaaaaaatctatctacattcaatggctcataacaattaaaacgatgtaaatcgccctgaagaaactacacgtcgccctagaagagaaccaatgggatttcagagaccccgtaccactgaacatctcattcaagaaggaatgatggcggtggtgatcaaaattcagaaagaaagtatgaagatactaataattctgccagatacgtgcctagaattgagggtgcttatgacccaactaggtatgtnnnattagtggaattagaaaatagacaactccgacaatgcttacccgaatctaactgacaaaacgttgagttgaaaagagaggctgcagcggccaaggtgacacgaggaaccaatcctcagaatcaacataaatctacggtacgaagaccacgaggcaagcctcaaggttctagaaccaagagacgggaagcaaactagggaaatccttaaaacacccaagaagagcaacttgggagtacaatggatgttctaatggataatcaggcaaataatcaagaacaacagtgagacgttcctcaaggatcccaaggatttatgaaccaaaggaatgaacgaaatgatgtaccaaaagcttcacacaggaatgaggacacgagacagcctcgacctgggaagcaagggatcccttgtggcaacgatagaaaccctggaaacaaatccaggacaagtgggctacctccaagacaccctgaacgtccttctagatcaaagagagaggatgtatactcgtatctaa

SEQ ID NO: 81290 - DNA, 2418 bp, Cannabis sativa
  modified_base (1904)..(1908): a, c, t, g, unknown or other
  modified_base (2093)..(2099): a, c, t, g, unknown or other
cctagctcgaggctcactcctgtttagccttcgcctttcctttacctacacatgaaagtagcatctgtgagtcaacagactcagtttgaaaagcatacaacaaatcataaaatcacgacttatgtctaggcgcccatacacctatccacaaggcttaccagatgacttaagaacattcttaacaattggtgctattgaccatgatatcatccactataagtcatatggttgcactgcatgaccgacactatgtttgtgccgctatgatagcatcaatagcacccaaaagtataattagccatgatatcactcttaaccagtatgatgcatatacttttgaatcaacacaatggttgtgtcgctatgatagcaccaattaatactttctagggtgaatatcactcttaaccaatataatgtccttactgctgaatcgatacaatggttgtgtcgctatgatattacccaaacatatatatcataaacacaacatgcatatatatatatcacacatgcatacattcgcatatatataatatgttctatgctattcttaccttattttcgaattcaaatgagttggccgacctgaacggaatacctcgtgctggatggatgccctagtcacattcacgtatacgggtaaatgacacgtaaaaccctaatctgggaaacccaaacccctaactaagggttctgtgattaactactaataccatagtaccccaattaacaaggatttaaccgaccaaggctctgaaaatagcccgaattgatgaatccaacaattaagggaacctacacctgttctggctaaccggttttataggaccaatcaaactggttaatcagtttgcaccaggtaaccctagcaagtttgaaacttactcaattcgtgcccaaaattctccatactctccagaacacctatgataacctcaaacaatatattccaattggtacaagctacatacaacccacgaatcgaattctaccattaataagccaagtatgagctcacaagctcaaacttgctcattccacaaataaaccagcaaaaccaacaacaaatagttaattcaaacttaaaacaacctctggaaacatcctagagtaaaacctaacctaaacagccactatatcacaaagttgcataaccaagtcaaaattaaagctttaaactgcacaaagatttaaagctccaaggttacctttgattgagctaaagaattccagttgaaatcttgttgaatatgcagaactcaacaacaattcctagggtccttcttggttttgagagaaagaagaagaagaagagtagtattatctatttcttatttttttctttgattttcctatgttaaatcaaacctaattaattaattccccaagaaaatagttaatctaggctgaacataatagtagctaggtgtcacacaactaactagccacctatcacttaatgccaaattaccaaaatatccttttacttctacttaagccaaataaagcctaagggtaaaatggtcagaagccataaccctgctgaaacccgaattttatttgtcacaaatatttttccctctaagaaaaaggttctcgacttatctaagtgactcaaacgactatccatctcattttccgttatcgccgaacaaaatcataaaaattacataatgcatatataacttaaatagtacccctagagtttaataaaatctctaaaattgagaaattataactctaattctcatttctaaaaatgggacccaactcataataaaatcatgcataattataaaaataccaataataaatgcttattgcctttactaatccatattctaatatgcagtcattacactaattgtatgataatttctaaatgtgtatgaatttatatnnnnncatgttgttttctgttattaatgttgtagtataattttgaatcttcattattggtctaacttaccttgttgttttaatgggacaaatcccaaaggattgccatccattagacaaacataatagtgttagatctcaatagataagtatttgtaaatgaaacatctagttgtacatccaaagatgannnnnnngactagtgtttacaatatgaaacagtgaagaaataataatataagaataacttcaagaaaccactcatcaaaagaatcttgttgaagacaatgcggtggatcaagcaactcagaattgaaagggtgtagacctttcaaatactttgtttcgccaatcttaacagattttctagacgaatcaccaaagtcaattataataacaccttgcaaatccacacttggagtatcagcactacccaaatcaataactttgaatttttcctaaaataatatgaaaaactcataacaaaatgtcaaaacaaattaataataattaaaa

SEQ ID NO: 81291 - DNA, 1009 bp, Cannabis sativa
aaatatgcaagtgaataataaacttacgcagcacaatatgccatagttgcaactgccagtaggaggctgcagatcacaacaaaagcagggtcgtcacgtgcccattgattcttagtttctgtgaacaaatcaacatgtaaatatgtacatatataaaaaatataaatggcatctaacaacaataggaaagccacatacatgattaattgataagtccatatgcattaaagccataaatataaaatttgtaataacacaatgaaattagctggtcaaaaatgattgcacacttagcagtaacatagaattacaaaagaaaacatcaaacttccactataatttcaaatttttgcagcgttaatcttctaagtaactagtgaatacaacaaagtttgcagagtcctgacaataagaaatggaaaaacttacgcttgtgatacttggtgtgctgataacttcacatgcaagatcaaaagttgagccagaaagaaaagcataaaaagttagattcatggtaaaaacatgaaaaagatttataagtgatcctccacaaaatatcaggttcctcatccaataatgaacttacacaacttttggtgatgtacatagatgaaacatttgccaaaatgtatattccacatccatttgttgccactgaaattaatcaacaaaaagcaaaaataaaaagaagtgcaagaccaacacactaaaacagcttttaaattattcaattaaaaggtacttccaaaagaaactataggtctataaagaattcaatgaaaccgagtagagtagcacaggtgacaggcatagaagagaaacatacgtaaacttaacaaaaaaaaacatttgtacagaggttaacacctataaactccacagggatacaggaacaggaatcatgtgtcatccatattccaattaaatattcatttatgtatatatacatatagtgcccaggaactgagtgcacctggataacaaacatttacttgttggagaattggaa

SEQ ID NO: 81292 - DNA, 2687 bp, Cannabis sativa
taaataagagcagattatatagaaaaaaagtgggggaggacctttgagagaaagaaattataaactgtaatcatgtatccaaaaatatcttgaataagatagactcgtggactttgcagagttaacttcaaaactacgtaaaaaatttggtgtcattgttattattttacctattaatttccttatatctgtgtttgattgattacaaaataggctcataaattattaacgaaaatctacgttaatagtttggtgctttcaatgagagcctacgtgataaagactcaaaaaaaaaatccctcctaaccaaccaagaatttcctccatggctgatcgcgatcaaaatgataatagtcgtcctgagagactaatcgttgtcttggaaaagaaccaatgggttcacggaggccacccacttcaagaacaacattttcaacacgaccaacacgttcaagaagaagccaatgtgatcatgatcaaaacccaaaaactgggaatgaggaaaccaatgccgacaccgattatgtgcctagaagtgaggatgcctatgatcccactaggtacgtaccattagttgaactggaaaattgccaactctagcaacgtctggctgagtctaaccaaataaacactgagttggaaagagaggcggccgctactagggcgactcaagaaaacaacacacagaaccaacctgaacctggagtaagaaggcaacaaggtagacctcgaggtttgagaaccagtagactggagaaaaatcgagaaaatccccaaaacgcccaggaggagtaacctgggaaactagggatgttcctgaaagcgagcaacagagcgatcaggcccctcgtcgagaaatgtctcgaagaccccagggatttacggattaggggaatgataacaatgacttaccggagtcttctcgtagaaaagagaacataaggcaacccagatttagggaatatgagatctctcatggtaacaagagaaataatgggactcaacctacgacaagtgggttaccactgagacaccgtcaacgaccttctcgcactgatagggaggaggcatatgcataccccagcgggggtgtgtatctaacctttcccaaagaagaagacctgtgagtgacgaggcaaattctagtttgggacattcaagatctcgagaacatagtctatcagaaagaaacatgcgcggaggggatagaccttgccgtggtgatgatcgagaaagtatgagcacaactaggagccatcaatatgagagttacttaggtacaaggtccacagcaactatgatcaaagatagccagatcttcgtgaacgattgaatcggagacaacccaatttacgcgagcgcttaaagcaaaatgcacctgatttacgccaataactcaatgctaatcgaaagcaagaggatccaatccaattgtgaatcaatgagttggaagataagttcaagagatactaagatggggaatatgtgaaactgcaaggttatgactcggacgaggaacctgagcctttccatccagagattatgaaattcaaatttccccaagggttcaaaaaaccccacgtctcgccatacgatgggacctcagatccagttgctcacctcaaggatttcaataccataatgcgagtcagcaatgtctcaaataatttatgctgtattttattccccacctcactgactgtggcaacaagtatttggttcaacaagtttacccatcactcaattacttcttgggaacaattgtttaaggatttcaagaaacaattacaggcagcgagagataggcgacctaaagtgtcgtcccgcgagtcacttaaggcttacctgactcgctttagtactgccactactaaagttagaaacttaaacgacagtatccaacttactgctcttcaagaaaggatcactactgacctctatatagctagggtaagctatgggacgatttgcaaggtcgcctagtgaggaacatcaacgaatttaataaaggagctcaggtattcgtacagaaagaagaagcaaggaacgagataaaattgctaaagactagctcgggaaataaacccaactctgttatagcaagcactgtctcgacaaaggctgacaatgcaggtggctccaacaccaagagaaaagatgactctaaggatttagccaaaaataagaagaaacaaaaaaagcacaacaagtatgtgccaatttacactatttataccgagcttaatgaaactcgggaaaatatttttctcgtaaatgagaatagagttgcattttgcaagcctgagccagtgagacatgcgagacacaaaagggacgcaacaaagttttgtagatttcacaaggacataggacatacaatggaagagtgttgtcagttgaaagacgagatagaaagttttatctcgcgtggctattttcaaaagtatgtgagacgacaaggtaatggacaaaaccagccaaatccgcccaataacccaggtaaccaaagattacaacctcctcccgtagaaggagatgacatattggtcatcttgggaggactgcatctcgctatagaaagcagtaatgcccagaaaagatatgtcaaggaaataaaaatgagcaatcaatctttgctccagaatcatctaagaaagccaagactgaagaacctctaattgtatttt

SEQ ID NO: 81293 - DNA, 745 bp, Cannabis sativa
gagccagtcgctcggctgataagctccgtcctcgagcggcggctcgttctcgtttgtgagcgttttggtggccgccgagagcttgagaagtgtagaacttgcgaggacagtattggcaatagaagagacggtgagatgagcctcctccgccgcctccgttacccatttgagcttgggaccttctgatgggtttagaaggagaaggggaggaggaagagggcggtggctggttgaggaaatcgtagatggctgggtccgccattgttggagtataggaggagctcaagagtgtaaaactgacccagaaagttatctctctctctctgtatgtgtattatatatatatatatatatatattagtagtgaggtttaaataggttttttttttttttgttgtcataaccctaaaacaaactttatctactatgtgattggttgtggggtcaaattacggatctgcccctaacagatattttttaaaagctgtacagctatatgtgtgtatatagtaggagctgtaaaaatatcacactttcgcttgcatttgctcttaatcagttttttgcttgcattacaagtataagtatgttatattattaatattaatgatgcattttaataattactaggtttcaaacatttgaccaattggcatgtctagaaataattttattaggccaactctaataaaatactaaaatatcaaatttgttaagaatatacggaggcgtttggttgggagga

SEQ ID NO: 81294 - DNA, 2542 bp, Cannabis sativa
  modified_base (2438)..(2476): a, c, t, g, unknown or other
actagagcggtcattacaaggtaagtatgatcgtatctagaataatcttcaataaaagtgacaaagtattcataacctccttgagcttgaatattaataggtccgcatacattaaagtgtataaattcaagttgttctttagcgatctatttccttttgtagaaaaagatctttttgccatcttgccttctagataagactcgcataccggaagagttctaacttttagttctctcaaaggaccatcctttgttaaccggtttatcttgtctaggccaatatggcctaagcatagatgccatagatacacttcatcatcatcagaaaccttttgcctcttatttgattgaggcaatgctactttaaacaattcgttatttaaaattaattgctcacctggcttgagcacgtaaagtctgttactctattttacagaacaaataggcataccattcttagaaataataacctgattattaataaaaccaatgtcaaaaaattgttcatgaaaaaaaagataaataaataatattcctggtacatttacgaatgaaataaacattgttcaataacaaaaatttattatcgaatttcagacagactctgtcaacacccttggcagacacttgtgctccattacccacgcgcatagtcactttcccatcggctagttcccttgacaattcaagtatctgtatcgaagaacaaatatgattagtggcaccaaaatcaacaatccataaggatttataatcttctactaagttagcttcaagaatgaataaagtatatttacctttcttaagctcggagagatacttgttacagtttttcttctaatgtcccattacgccataatggaaacactcgcctttacccttcttgtctttggacttaggggtagctttgttcttcttggccttgggtgactccttgactttgggcttgacattactgttgtccttactgccccacttcattttcttactagaagaagaaagagagttgggttttgcttcaacgatgttaaattcaccttccttggacttatccttgttaaggttctcaaacacggttaactcgttcaataattgagtcatgttgaaatctagtttgttcatcacatagtttgtgatgaaagccttgaatcaaggagatagcgactcaagcatgatagtcacttgagtcatttcgtcaatgatatccccttgtgtctctgcctcatgcattagctcaatcatgtgtaatacatgagatcgtacagggacacctttcttcatcttacaattcatgtagctacaagtagcatcatgtcttctttgattagactgctgccaaacatggcctatagagaattcactatttgagatgcattctccatgttctcatgcgtcttatgcatgcatacaaacatgaaacattttgccttattgttggattgaatccaagtatcacatctgtcccgaattttttttggagcattggcagcgggctccttagggaagcttatcagttaggataaatttatgattcttacaaaccaacattatatgcagattcaattttcatttataaaaattatcaccattcagtttttatgtaacaagcttgggcttccgagaaggaaggttgtagttgtataaaaatttaagcttaaacttcacttgaaaagatcaatgggaaagcatcacaaggggtaggatagacttcaagcagtctttccattccaggaaggaggattgaatacgtaccatacccccagtgatctttcttgcataaacgtgcatgagagagtcatgttgaatttttatgtaacaagcttcggctttcgggaaggaaggctgaagttgtataagaattcaagcttagactttgcttgaaaagatcaatgggaaagcatcacgaggggtaggatagactttaagtagtccttccatttcgggaaggagggttgaagacgtaccatatccgcagtgatctttcttgcacaaacgtgcattcgagagtcatgttgaatttttatgtaacaagcttcggcttccaggaaggaaggctgaagttgtataaaaattcaagcttagacttcgcttgaaaggatcaatgggaaagcatcacaaggagtaagatagacttcaagcagtccttccattctggaaaggagggttgaagacgtaccgtacccacagtgatcttccttgcacaaacgtgcatgcgagagtcgtgttgaaattttatgtaacaagcttcgactcccaggaaggaaggctaaatttgtatagaaattcaagcttagactttgcttgaaaagatcaatgggaaagcatcacgaggggtaggatagacttcaagcagtttttctatttcgggaaggagggttgaagacgtaccgtacccctgtgatctttcttacacaaatgtgtgttggaaattattttacnnnnnnnnnnnnnnnnnnnnnnnnnnnnnnnnnnnnnnncctaaatatgaacttctaaaccgatgaaataaacacatataaagtttagtaaaccttacattgtgt

SEQ ID NO: 81295 - DNA, 989 bp, Cannabis sativa
tatatctaaaagtagtaataaatattaggagttgcattttagacaactgatcgagattgttcaatggcaaactcctcgaatctctttctcaaattctcaatccatgatggaattttggtttaatgtttttattcctttatcttctagccacattcttcttgttttccatatagtatcttgtgtggccccttcgatggacgatgatatacctttggtcatgtggggatgggcgacattaagatccaggttttgtgagaatgaaacttaatagaatcgatctccataatcgcttcattgccgataaaattgttccagaagctcctgaatcgacctctctccttctcctcctctgctgaatttcagtccaatggatttgtccccaggaagatcagagaagacatagccaagatctgttcactagttttctggaatcagctacatgatcatcctttctctgtgtgtttacaaatttgaggtgtttatatatgatcaggcttattctcaacaaatataaaatatttaactcaataaaattaaattaaataacgtgtactttaatcttttttgtttggatcaaataatataataacaataacatgtatatttcattaacagaggtgaggtcattcatatatggtgaggtcattcatatataaataaatatatatatatatatatatattattcctctctccaaacacagattttttttttgaaagcaaactccaaacacagattaattttcttataacaaaaatttatttgttcaatggccacaacagccattcctccgatcaaattaaccaaagaaaaaaagttcaatagttcaaggttgatttctcttgcaggaatttaaataattatttacaatttttttcttaaaattatgaagtgatcacttaataacattgtgacatgtgactacaataaattctctgaatcatttcataaaaccttaggcattattttttaatttaattattactata

SEQ ID NO: 81296 - DNA, 572 bp, Cannabis sativa
ctacacttataaattaaggggcatcatattatagtgtcataagtacagggactaaaaaagctaattattcaaaataatattttagcatgattatttatttatttctattattaatcgtaataatgataaaataattaataactaattaaaagctatcgaacggtaaagaaaatatagataatttacaaaatgaaaattacacaaagattttctgcatttagtaatttttttgtaaaatatcatgttaaagttaattacacaaaaaaattctgttcacatatatgtataaatattttacaccctagatatataaattgtgaaataataaaaaaaaaaaggtttatcttggaaaaggcatatcccaaaccaaattacatgtgattaaatcaaccaagctcttaaaaccgttatgagtacataaatatatatataattgtgcaattaattttccccactaaaaaatattacaaacccctcaaattaattaaacatgttgctagttttgtggtatatatgtatatgaatatttgagctgcagaataccttttgaattgttcgttgaagagtacata

SEQ ID NO: 81297 - DNA, 1418 bp, Cannabis sativa
tgttaagtgattaattgttgtggttaattagttaaatgacatggccttttttaattggtttgacagaaaattagacagcaaattttgaccggggatccaagtccgtgataaaataagaaaattaccttgtgattttgtcttctcaatttactacttttatatttttttaaattatatattaggtggactaataaaattatactacgtatacacatggataatctaacatgatagttaatggttacaattaaataagagtggtaagattttaccttaaaaaaaaaacaatatttaaaagttagttgcaagtatagtgacactttaaaaataattttgccacaatttagtcaatataataatatatcttggtgcaccaactgtgatcctatatgagaaggtagtccccattaatatcaatgattactattttttaaataaataatatgcttgagttgcttttagctacaaatactatagttttaatcgagtgtcatgtttccctaaaagactgtccccaaattattgacctaattatctttattacaattgctatatacatggcataattaatggaacatactttttattttatatttttagtggactctgcatgactggaacgatgaagaggttgtgattatattaaagaaatgccgagaagctatttggagcaaagataaaggagggaaagtgatagtgatagatatggttattgatgatgatgaggagccaaagtcatcatcagttgagactcaactctgctttgatatgttaatgatggtcaacctcactggcaaagaacgtaatgaaaaggaatgggaaaacctcttcttggctgctggatttagtcactacaagataaatccaattgttggatttagatctctcattgaggttttcccttaaaataatactactttattgtattggatttgggtgtcattaatattacgtgagtattattacaactttattattgggtttgggtatcgaattaggatgcaaccacatgtatcacaaaaaatatataataaggtgtgtttgttgttttgctaatacttgataatatatattagtgtgtgtttgtggttttaaatatactttttgatccattagaaaaaaaaaaaaaaaaaaaaacccttctttgttaattttacgaaataatgtgtcattcggacagtctgacactccaagtctccaatctcagcagtccgcatgtgttatatgtgaggttgttttacaagaaaccacatttttgccacaaaattttagctaccaaatatagttggtagttaattaatattagttactaaattttcgtagcaaaatgattttgtagcaaattctaataaaaaattattatatgagttttctaccaaatattttagtagtaaatttatatttctagctactaatta

SEQ ID NO: 81298 - DNA, 1168 bp, Cannabis sativa
gtttaatggtagaatcaataggaatgtccaaggctttttcacaaaatcgttcagagtggcccatgattccacacagaaaacaaaacgttggaaccttttcatatttgaacatagcccaaaaaatcttggtactatcttttttttcgaattttcatacgtcgttttaacggaactcccagtgatagagtagctctcaccctgaggtaatccttccaaacacccgtaaagttatttggatctatttccacaaagcctccaagatagacacccgcagcacgcactaccgcctccatcatacaccctggttgtaagtcatgaatctgtacccacatatacatcttctccagtttcatagctctcgaattgtcaccttccttcaaacgttcaagaattaaatgtttacgatcgaaagtccatggactacctattataactctatgtatatccatctcatgataaaattgaaacagaaaaagatttgggcttaactccttcacatacatgcccctcactggcttccataagtcagccataatatgttggaaaatctgaaaatctgagacccttcctgttagaagacgccccacgagataccatctcgtatctataatcggttccccctccgctggcccttcgaaaataaattcctccccatcttcttcatccaaccgaatccctgtccaagcatcctccaaatcccttatcgtactactgctcgacaccataatcaaaacagaaaaaaataaagacacgaccaaacaaaactctctaagaaggagagactacaaacatatcagaggacacgacaagtcgagagaactaatatagtttatgtaataaaataagatattttttttttaaacttattacaatcattataactttccttaaataaatttactcgtaaattttttatatgttattattatagatttttccttttgtatattacaaaaggcagggagaaaaataataattttagatactatttaataatttttttaacattaatcatacttttatttttattatgctttattgaaatccaatatttttttttcactcaattattacattacatacaattaattttaattttaattgcttacagatatttttttaagcataatatacatataatatttatacctttactactaactagtat

SEQ ID NO: 81299 - DNA, 1418 bp, Cannabis sativa
accatttcatctgtaaatcgcatccaaaagcgagccaaagctctttcataagcgtccttgggcaagagaggagtttgaggccaagtgtcctcgatgtactcaagaatgaccagagactcacaaatgggtttgcctccatgaacaagcacaggtaccttcttgtgaattggattgtactgaagaaacaattcactcttattgtaaatatcttcttctatgtaatcatactcaactcccttcagtttcagtgcccatatcactctcggaggcattgggcttgcccaatatcccaccagctttacttcttcatccattattatcgattacaagttttgaaatatcaccaaaatacttttacagatacaaatgagtatcagctatttattatatatgttgggtgagaatttcttgtttgactaagaagataaccattgagatttatattcattcaatgttaatataaaaaaactagaaacataaactggacattgtgttcaaacaataaatgaatataaatctcaattatctgcttggtcaaacaaggaattattttacaaatacaaatgaatatcagctatatcttatatgttaagtgaggttttcctgctgttcgtttgaccaagtagataatccttgtttaattcacattatttataaaaaagatacgaaacataaattggcattttcaaacaagaaactcgttcttatctttttaatgagtcattaacttactttattcatctcaattctcaaagtctcgaagtaagtgatcgctttcatattttatgatgaaagtaaccaattttaagaattataaaatgtttagttttctttagaatcatagtccagttttatgtaaaaagacaaagctcctctttctctctctctctagaatcttagtccatttatatatatttaaatgaagagcgaactcttcactcatctttattgaccaactaaataaaatctagtttccatttacattgaaatggaactaaacataccaacaagaaaactaatatccatagtcaacgacgtaccaccaagcaaactaaacaggaaactattgccacccttgtttactctcgtggaatggaactcgtattatctatctaatcttcccatttaaacaaaacaacatacacaacaacacaacgatcaaagctgactgaaatatgaacttgtgacattttcattcacttggatgacatcatcatcttctccctaactgatttcatatggattaagagtctgtcataatcaggaacgctctccttgatgatgggatgttgcttgaaatctcgagcccaagtatggagccgaggcattgttttggggtctaagagtttgagtcctacaagttgttctgtacattcaaaccaatgaggtaaccatgatatgtccaccatgtttatagt

SEQ ID NO: 81300 - DNA, 932 bp, Cannabis sativa
tataccggactagtttagagttttgggttgtcagtttggcggattagctagaattattaaaatgcccttagattttaaatggtttaagtttttattaagaagggcaatatggtcatttcttaggttaatttattttgtcttttagtgttaattaggctgggttttatttgtttatgttagataatgctgaacctatttgagaataataactttttaatttagaaactaagaaacaacaaaggcttcatctccctttccctctctttctcaagcagcttgaaccagccaagactaggggaaattctacaccttttttctttgaatttgagcaaaatttgtaccgaagttcaacctagaagcattggaggtaagttccttactttgaggattaagaattttcaagttttaagttgattttaggttaggattttgtgatttcgtggctataggattaaactggttaggggttgtatttttagacctgttttaaagtgtgttgaagtttgaattgaatgatttttactggttgtttagtttggattgagttaaatgaaataaaatgagtttcttcacttgagtatgcaatttttcgacttaagggttgaattgttgtaattggtgcttgggatgcattatatttatgatattgtactgctcatgaaagtttgaataggtttggaaggagtttggctcaattttggggaagaaaacccaaggttttttggtctgctagaaaccggtcgactggttgtcctacaaggggaattcccggggttttcttcgagttctgttttggctcggggtggtacctagtacttgttttaggttatttatgtgttgtgtagcatattttaggattgttggaagttaggttatgtccggttttagatttggggttttgtttcaagatttcagtttaaggcatattttgg

SEQ ID NO: 81301 - DNA, 1583 bp, Cannabis sativa
tatccttgcatgttagtgttatattgttggatatgaaagtaaaaaaatgtgttaattttcataccttttggacagttgcacatatgaaaagagcatgctctagggtcttgctttgattgggacaacaacagcagtcggatgtgggaagggtctgcttcttgtgcaaatttaggcttgttggtagtatgttataataggctctccaaataaagtggttgatttttgggagaatagattgtgtccacaaagatttccaccagttttgattaatcatggtgtttgagggtgtgggatcatctttgtaatttaagctgtgagctttgtggtaactagaattgactgtgtaatgtccatgtgatgtgtagggccaataaaaggtatcaggataggggataggtataaggggtatagatttaatggcttggctaatgtcggtggggaaaatggtttcaatgcgcgtggcatcccaatggtgaaacgaggttataagatctgatacttttgaactcccgtctgacaggtatttgagataatttattttaccataacctgggatccaagcatcattataaatcgaagtagtagtaccatcaccgatcgatttcctgagccccgatattggaagttccttaccccaagagatactgatccaaactagcgaaggtcggcatcctttgctagcatcaagaaaggtggtgtggggaaaataacgggccttaagtatggttgcaacaagggaagaaggtgcctgaagtaagcgccaagcttgtttggccaacattgcttggttaaaggccttcattgagcgaaaaccaaggcctccatggaatttagagagactgatagaagaccactttttccaatggattttccgactatgttcagttcctccccaccaaaagcaggccatcatggattcaaacttagaaagaaaaaaggctggcaacttgaagcaggccatagtatatgaaggaattgcctgaaccacagacttcaagagaacttccttctccccttttgagaaatgttttgaatttacaaagattggattttatacattcggagggagaacgtatctttctatctttcctcatcctcctttcctccctaccaaacatatgatttattttctccttctatccctctccttccatccaaaaattcttctggccaaacatagtgtaaaaaatagggattatttctataatagatattttagccccaaattttaaatttttagtttggtaagaaaaattaaacaaaaaaagaaatttaaagttattattttcaaaaatatggactgaacagtctgcatcttcttgctcaaattaacactagcaataacaacactgcaataacaaactatataatatctagaaaagaataattaagttgttttcatgtcattgtgaatcttcttttgtgttgtttttgcaatatcttatttcaaattaaaataaaatcaagttattttcgtgttgctgtaaagtttgttacgaattatttatacactacactggttgttccataattaaaaaatatatatttttacatgttacaataaaaatttatcttatctctta

SEQ ID NO: 81302 - DNA, 1823 bp, Cannabis sativa
ggattattttattacggattatattatgctttgcgtaccaagtgggaaacaaacccaattgttggggtgatgcaattatttttgttttattctcaatcaatctttattttatagtaaatatgtttagaactttgctatgcattcaatttaaggtcaaaacacaaaaaagtggtgtatccatgtggtcaataatatagtgacttataactcaatttacccaataaaaataatagtaatcacactctcgcatcacttggtcatcctcatgcaaaaataagaatatctaggtatgcaatgcaaaaattataagtaaagcggttttcatttttcacaataattataatggaaaattctacaatagaaatatttcatttgtcccaatagaataataatatttattaaccattgattatgttgactttttttttttttttaatgaatcaagtatttgtattgctcattaacctattttgtacaaataaatagcatcctcacaagagaggacctataaaaatctgtgaagtaatatgcatgcaattatatacatctaatcaatccttctatatcttataaattcgaaaaccaatcattgtcttccttattgatctttttcagccaaaacaccattactcttgtcttgactgtctcctttgttttctgcataatcttttgcgatctaactatttttttatttcatatgtgatcatttcttgccctccaaatgttgtaaatcaaacatgctaccgtggttgaatacacttttttcttgaacttggacaacttggctcttccaatccatctcaccagctgcttcaaggttgtgcaatgagctctccattggagccaccttttagtctccagtaaacactcagcagaaacagagcactcaaagaacagatgctcgttcgtttcctgctgtaatttacagagtacacacgtatcttcctgcactatgttgcataatttcagccttgctttcgttctcaatcgattctgaattgccaaccagaatataaagctatgcttaggcatattaatccttccccatacctccttatcccaatttaccttttgttgtattggacaaagaaattttatactcatctgcaatggcatactttgtcatagcaaaggcctgaacatccattttgcttttaatttgatccttggcagccactacctgcttccagtaccagctgccattttgtgggagtttgtattcccaccaatcactgcttaagataaacattgtgcacccatcgtacccacaaattatcctctttatttgctattgcccacacatatttgaagagagcagcatgattccattcaagtatctttttaaaaccaactcccccttccttttttgacaaacacacaaaatcccatgctataggaccggccccttgcatcatactttgacccttccataggaagactctacatattgcttccaacttagtaattactttctttggcagcttcatgatttgactccagtaggtgtgtatagaaagcaacactgagttgattagaacagatctccctgcaaaagagatgtttcttgaactccatatcttgattctggctgccattttttcagctagtagcacacattcctttctcgagatcctcttggaacaaattggtatgccaaaatatttgaatggaagatgttgtctgctataaccagttgcatccatgattctctgaacttcaacttcatgcataccactacaattaattacagactttgttggatttggttgaagccctgatgtgatagaaaaaagctttaagccttgcttcatgaggtatacact

SEQ ID NO: 81303 - DNA, 1106 bp, Cannabis sativa
tttatgttaatacttttgtttttatgggtctagtgttttgctgatagtttgattgtaattggagcaggcattagattccccaagtgaaatgaacagtggttctagttattttgtccctcttctaaatgggctttctcaaggtaataaggatgttgatgttagtgattaattggttggatgcgttattgttctgataatgttattgcttgcaatatacttctactattagtcttggtttttttgttcccccaaattctattcaattaaacttgttgacttttagtttcttgttattgttacacttatatgttgctttctggactaagaggaattcaaactaattcttctttttttggctcgggtcattgtttcgtgttcaaattaagatttgttgctgtctttttgtttttcactagttcaacttatttatcattttgcactagatggtatgaattaactttgaagagaagatgccaaaactactacacttattgtcatctgctttgtgtttggacatgcatgatcctggaaagttaatgaaaatattcttcttctgtttcagttcttatatccattcagaagcggcactttgaacaactaaaaacggcaatccccattgttgtcaaagttttaatggccgtgtcttcagagtttgacaatgactgtacagaactgaaagatctttatgatggagctttgagtatagcgaattcagtacattcagtttgcataaaacaggtctgttagtgtttaaaggatttattcactgatttttctcctaaatactataaaggtttgattgtgttttggtccatttgcaggagggcagtgtaaatgagaagattcgtgctctacttggcctatatgtcctgcaaattatggttgacattgctgcatctagctgaagttccctttctgctgtttgttgttttgatatattaagtagtgaaagaatttcccgttttggctttttttatattcacatcttttatattcccattgattatagattaagtacttaaggttactacacttttgatataatacatgagtaacaagttttatgattattgttatcttttgcatatattattagtttatattta

SEQ ID NO: 81304 - DNA, 1269 bp, Cannabis sativa
ccggcgaagcgcgggttgtttactagtgtatatatatatatatagttatgacatttttagtatatgaagcatataatgtaataacaattgttgtagattatatgaagcatatatatatttatgacatttttagtatatgaatgaagcatatagtatataaatgaaaaattgaaaaaaaaaaaaaagaaaaagaaaaagcacaaacctggtacatcttggattgaaacaaccggctcatcatcattgtagctcattttgccaaatagattaatacgaattaagcaatctcttgcacaaaagaattatgaaacatgatgtcaatatattcaaggtaattttatatatatacataaattattggtttcagctatttttatatgttatatatacactcatcatgttcttaattgattggaaaagatcatacatattagaaaataagtaaatatagttgtataattacttaaaattttgaacttgtaagtagtataaatataataatttttttagtagtataagtagtacgttaatgttaatcaacttctgttagtactatgaacgtagttcgttcctatcgtaaaaagaaaacttatgctatatatttttgttcagacccaatctaataatttaaaatctaaaatcttatatgtattttgaataagatattaaaaagtttgtattaatgaaactaaacaaaaacttcagttatactaaatatgttaataaaacaaattataattacaaaacataaacaatcctatcttttggataaatgagattaattagaaaaaaaaaatgtcatatatatgatatgtgtaatttttgtagtacataatttaggtatattacattaatttatatatattatcttataccaaactattacatatatgtatatatattatattaagtaagaaaaccttcaaatatagacacaatatgaactcaatcataataagaaatgtgcacgtgaaagctcaaatggccagccatcatatatatatatataaatttatatataaataaatatatagagttcatcttcttgaaaagttagctatagagctagagcatgcatgcatatatatataaatatatatatttatatttaaattatcttactacaaagtttatagtatatataatatatatgatttaacaaagccttaaattgaagaatcaaagaagttttaggtatgaaaatatgtccttacattggatgttgtaatgtatagatggagccttacgattctctttctccttcttctc

SEQ ID NO: 81305 - DNA, 1230 bp, Cannabis sativa
actaactttagccgttggagccagacaagccgcgcccaccatgcagctaaaaagggtaaaaggaaatcgcatgcgagtctgtgcacaataatacagtaaggtctaggaagtgattggttaagccgacaatttgaccatctcttgggcccgctttctctctagtgaggagttatggtccaattagatgctgatctgggtagagttttgtgggacccattcttggagaaagtgagaacattagtcacgagaggcggtgagagattacttactgtggggtccaccacaggtaagtcctgactgtcaaccatttagttgtgtcctctacttctactaccacagtcagagagagagctcaggcctcacaggtagccaccgaggcgcgtgtaatttcgtaatcagaacttgcgaatgtagtttgtggagaagcaagttgcaccaacttgttcttcttttctattaaataaggtttttttttttttttttaagaaaaaaataagattatttctaaagtaataaaattaagattatttttgttaaaagaaaaacaaataaaatctttttttttaataaaagtttaaacttttattaaactgaaaattcatctattataatagtacaagaaacaaatattgctcttaaaaatatgactttataaaaaagaaaagttacgcactaaataatggacaactttatttgtagatcgttcaacaatataaataattacgttactcaaagaaaataaaataacattgcactcatcacatttgatcatgaatgacgctgaatctaacttaaaacctctttaatacctattatttttgcaatttctattaaataaggttaatttttttttttttgaagaaaaatataagattatttctaaagtaataaaaaataagattatttttgttaaaaaaaaacaaataagatcttttttttttaataaatgtttaaacatttattaaactgaaaatttatctattataatagggtaaatactattatggacctgtgtttcgcaaaagttactgattggactcctgttttataaaatgacaaaatagacccctttatttttcaaaatggtaaaaacaggactctaagcttaattttttatcactttttttttaatataaccaacttgaagacaattcctaacacgaatgaatataaaaaatgtaaacagttttgtcataacacttttagattatattattattaaattttatt

SEQ ID NO: 81306 - DNA, 1317 bp, Cannabis sativa
ttttttttttttttcttctttttagtaaatatttcatcacactgaattaagaaaaaacccatcaacctactagcttccaaattcttttgtgcaagtccctatttcggttatttcttttttagattgtgtttttaagaagtcataatatatgaaaatggggttgtcaaaaaaaaaaaatatatgaaaatggggattttcggtttgaaactgaaatagttgaagttataattaaaaaaaagtagcagcaatataagttgcagagaagcggaaatgcaataaatcaacggaaaagggagagaaaatgctgtgcatgaatacagccttactgactacttatccttcgaagctcagagtatggaattcatcagagttatcaattccagaaagaagaactcattttcataacaactcttactcagaaaataatcacggcgaagtctcactggtgggttcgaaaattccattgcctgctcacgtcaaatccattaccagcacttcaaacccttttgtgaagcactgtctcaagctccgcctcagctcctcttatcgacatacttatggttctgttctcgtcgttggtgccacccctatcaggtttctttgctatgccttctgaaatttctctggcaaaaatattcttctatctgttttttttccccaacttgtttgatttctgagaaaggatggagtttcgatagaatacaaagtctcagtgagctttattttgattctttggagtgtaattattggcaatgtagcaattttattttttgttgtctaatagttatattgtttttttttttattattagtatatatgatgaaattggcaaccattttcatggcaaaaaaagaaacaattcttgcgaatagttaattaactaatgagaattaattgtttgcttggcggcttgaactattgaacctaaatctaatatgcaatacagaaaaactctagccaaaaccttgtgggattgaccacttgattgttgaattgaatagatatatagtacaataattagaaactttaaaatgccagctgatgaaatggtagcaaaaagtttagttctttgggatactggcataggattagggactgattggtttagcaagttttagatatctaaattatcgggaatattgaatgaaatcttatagaataacttcactagtgtagtgttaactgttatatactcgtttcatcaaatttctgttatatacttttttctagattccatttagaacttagaattccacataatccaatgtcagcaataacaacttatctacactgtggtaaaattctgacataggcatg

SEQ ID NO: 81307 - DNA, 1369 bp, Cannabis sativa
tctaagttcctggtaaaataacttgcaacataactgtacctcccccaactattgaattggacacgtcagtctctgtaatcataagaacacttgtaacttgtcttgtaaccaccttgcctgaacgagcaagagcaccaccttgagtagtggcagaattgaaatctacaccagaaaaatcatgaactgttttaggccattcatccccaatagtatgattacgatgatgaggattgactctcatccatgcaccatacggattctcaacaagttccacaggattatcaaaaaactttttgcaatacctctcgccatgtcccaagataccacctatgaaacaaaataatggcacatggtcatatttaaaattagcataaaactcttcagtatcatccttacttaccttccctctacgttttagaggcttactgacatcaattctaaccccttacacgcagataatctatccacaaactaagaaatttttttgggtttgactcaacaaaagtgcctatataatcagtcatgtccttagcaaccctaacagacatgaaaccaggtctaaggtcatgtatctgaacccacatatccacttagttcatttgaactacacgaggatcctcaccttgtttcaaccttgtgaacactagtaggttattattagaggtctaaggacttatttccatcacattttggatatctaattcatggtagaattgaaatagatatttattagtatccaactttttaacaaacattcctttaactgattaccataaggaagccatcaagtgctgcatcgcatcgaagtcaatagatcgatctgtgaggaatcaacaaactagatacaatagggctttcagtagtaatctcccttccatacaccaatatctcactatcttcctcctttaatgaatacttgcacactgttcctctaaggtcggcattcctcgaccagtagaagccataccaacaccactaaaaagagccaaaagagacaatccaacgagatcaagactgaggaaaaacactagattgaaacacaccaatcaccacgaaaaaaccataaccatgtcacaagacaagactcgagaaaagtctactcctagcacaatcatattattcactattaatagagtaatagaagcttattattatttcattcttaatcattatttactttgaattctctaataaaagcatataaccaaaaagtataataattagtgaaataataatcaatccttgtgggttcgataacttttttgagttaaaacttttctacaacaacattgtacacctgcagtaaaaattgtgtatcaccaccttgttggatttattctcgggttagggttcgaagtgcattaccatt

SEQ ID NO: 81308 - DNA, 1826 bp, Cannabis sativa
  modified_base (1430)..(1434): a, c, t, g, unknown or other
aatgacggaaacgactaattaaaggtactcagaattgtagttcacggttgaagagttgagttagggtttaatttatattttaggagctttattttataaagtttcttaaagaaatagttagagaaatatgtggctaagatgatttttttttaatttaaaaaaagattgtttaattttttttggtttaattatttaacagaatattcttttatttttaaggtatattctgttaaaccaagaaatgccgttaaatagacacttttaatatataaagatatatataaaattgtatataaatattttcttgggggctatctcgacctccacccagtccagttctcacctcaaaatcctccggtgactgactatatgttggttttggacctgaagaaaatgagtgggtcaatgtaaaaaatgacgtgagacaccattcttttccttgtgaatcctcagaaagggttgcagatcattccttgagatcttatactctgctttcagaagaatctcatttacaattctcaaaaatcataatttaacaaataatctataaagaagttaccactcttcttatttaattgaacaagatgtgaatgcttttatagaatggtaaggagcaagctcattatttttgacatgttcatgatgcgcaaagatgaaagataagaggctatcagtgtaaatataggaaaatttcatataatatatgtttcatcattattcttatcttattattttcatttaccatacatacaaagtgttggaacataaacttagaaataacttatatatatataatttgaaaatagtatttgatctaactttctggccaatgatggatccggcaacgatgagccacataatttgcccatctgaggtgagcgcaggacggccatgacagaaaatgggaaagggggtgcgaccgggactgtaagttgaggtattttaccgagggggttgggcgatcgggctgggctacgatagggactggatgggggcagtgggagttggagtcttgacagagggggaggggagcgagaaataatttgtattttttttaaaaaataattataatttttattaagtaaatataatttgaatttataataagcattaatattataacagggttagtttaggaatattaaaattttaaatggactaaaggtaccaaagtgggtaatttttgcaaacatagggtaccaattaataattatacaaaataaaaggtaccaaatgtgtattttaataaaatacaaggtaccaaataagtatttaccctattttattttttaaattatttaattaatttttattttaaaatgaccttatttgaaatttaaaataagattattttaattaagaaattttaaattgtaacaagatattttgctaattttcaaattttgttatttttaatttaaattaaattnnnnnattagataaatgatatttatttatcattttatttttattgaatatttaattttattttaataacatgaaatttgaaaagttgttagcaaatttttgaaatagatatctaggtttgttgaaaacttaatttttcaaatttataggtttaatttttgaaattaattatttaatttaatttgaaattttcgaaaattatattttattatttaatttgtttcgaaattaattaatttaaattaaataaatcccatatccaactatccaatgtgttgcatgtgggtgtgttatattgtttattattaaaaaaagttttataaaacctattattgtttgatctaaattgccatagttaacttgttgacaaatcaaatgatctgattttaaccaatggt

SEQ ID NO: 81309 - DNA, 2111 bp, Cannabis sativa
gatccaataggaccacaggatcgtgttgccttggcaaagttacttctcgttgggatcactgctccaacaaaaggtattgagatggatagatggtgttcccaaaagtggtgatggtctaggaggagatccatcatcgcttaagtgtaagtcttatttgtcttggggttttgatttggttgtgatatttgttttaagttttgtttgtggttttaggttttaattttatttgtgatattagattcagggtggtgttttaggttttatttttttgattttggggggtggctgtagtattttttttatttctgattttagaattcaagaagtgtttgtggtggtggtggtggtgattatgttggtgttgtgctccatggagatctggttttgggaaaaagaagaagacgaagagggaggaggaggaggaggaggaatggggtttcgatgcttccagagaagaagggaaaaaaagaaaaagaaaaagaaaaaaaaaaaagaagaagaagaagaagaattttgtttttaatttttttttttgtaatttattttattttttaaaattattttctaaattttaaatattttttacaaaagtttacaatatttaaacaattaatattatgtggactactaaaatgtgtcatatgtatatttgtgtacacgtgggtagtccaatgtgacatgagatttttagatagaagtataaagagcaaaacgaaacttgagttcattaggttttaccctcaaaattttagtttttatggttaagtattaaaaaatataaagtttaaataattttaccgtcaatattcttattttttttttatcaaatttcccttttttaagctgccaactcacagaaaaagtttggcagggttagatctttcttatatgtattttttgaaatatttgtagcttccttagtatgttagttcaatccaataagccctcaaaatatttagattttaccaaagactaaataataggactgccaaatgtaccaccataaatgtgtagaaattttattagtatataaactatctgaacttctgttttggtttttgctatttcattcactttggtatgttaagtgacaaggtaaactgctactacagtttttattagtccacataatattaattatttaaatattataaatataataaaaaaataaaaaataattatataaatttgtattatctatttgttaaattttttattaaattattttataatatttgcactaataacaatacatttatgtatttaaagatctctattctatatttatataaatttgatttcaaatatatatataaaaaaaattatacaatatataggaaatttttttgtttttaatttatagaaaaattataaatttatatgatggtgtacattatgattatatattcatactatgaatcttgtttgttttcgaaaaattctaaataatttacattgtcaataaataagattcaaacatttagttatctacctatttattttacccacgtgcaacatactttgtacattttgaattttatttttgatatcacaaattgtattcataatttttcaaaaaggaacaagatgtctattacaactacaatatataacatcatataaaataaattgggataaaattttaaaaaatagaaaatgcacttatgataagaacaaaagtgatgtctcagctaaaaaaaactccctatatataaatgttaatctaataattaaattaattataggatgatgtacgtacctgctggtaagaatgaaagcagatacccgatagaagtaatctcaagcatagctctttaatgttcaatccttgatttgcctaaaaaggggattatatatattgaagttataaatatatatatatatatatgtacatataaatatatgggtggagaagtaatgatagtattaataatatattatagttacagctgattgcagatatgaaggactaaatttcactccttcaataagaatggccgagggtgttaacatcaaaaatgaaatgatggttatcactgagaacagattgatattgtccaaagtttcctacacatgatcaaatattgatatgaaaataaattatcagaata

SEQ ID NO: 81310 - DNA, 2420 bp, Cannabis sativa
gttacctaaaatcatcataatgaacatttttcatgaagaaaccttaatctaattcgcaacagaattcacgttatcacaatcaagtcaagtttgagttctttgaactcaaacttgcataacttttactacaaccacccaaaacacttcaaactaattctaaacaatcttaaataaccttaaaaattatttcctaacctacttgaacttcctaggatcacctagcagctccctagcaaaatagtcactaaaaactgaacttaacccttgaaaaaccataaaatgagctagggtttatgttagttgccttgggaggatgaaagagttgattcctttgggttattcttcacttggatgatattcaaaagggtggattacctcctagtttttgagtgctcgtgagtgagaagaagagaacgatgaaatgatggtgataaatcttttgatttttgactttttcttttaattgattattggctaagcaaacccttcccaaagggttttctcctactatccacctcacacacaagtcactagccacctaaccactaaaggtgactaagcttctttttggaaaaattactattttacccattacttgactcttaagtaagcttttaactatgagggtaaaattgtctaaatctattacctcgctaaaccctaatattttaaagggagattatatttacactccaaaaacatttaactacaccctattactaaatttatcccaattaaatattatttttcatagccacacctcactttatgtatcaaaagaatatgtctctagtacaatctgaatgttaataacttagatttgtgttgcactatttttcttttcaatatatataattataattgggcttgattcatattacaattaaatttctttaataattaaaaattgagaatgatgttgaaacgataaattacaatgtaaagatcaaattaacacaatatataataacaataacaataaatatcaaatacatatataataaatttaatattgttattgagtgatctctgttgataaaattttacttcattaaatgaatttagggtttcaaatcttataatgaacaatttttttacttaatgtatttatattaaattgaagtggtagagtatacttaattattaaaaaataaattaataaataaaataaaaaataaagatatttatttaggtcatttcataaaaggttaaatatgtaattatatttttagggtgtagttataatttggtggggtgtaaatataactaccctattctaaattgttcaacaatattgccccgtaaaatacttgatacaactttgtatttgtgtgactaaaattaccatccgacccatttctactattactcaatataaaaatatcaaaaatcgtaaaattcatatatatcatctatgatacacctagaatccaattcaagaattgataaattatgaatcaaatgcatacctcttgaaaatagtgttagaattattattgtggactaatataatcataagcttaatgccataaacacaatcattaaatatgtgtccaatatttatcaacagccataatgggatggttaataattatttattatgttagaggcacatgagagcaccctcataactataatcgactaattaaattatagtataccagtattaaaccacttaagcccaattagtaactagcctattagggttagaggggtgtgacaatatatatgtgtcttaagtgaaaaggattaatggtaatatgaagagaataggggatagctccacattgtgctcttctccaatcttgaatttgtgttgttttattagtgattcttggattcgaatggctcacatggatggcttaatgggaggtatgtgtatattattttggatgttctaaataaattattgatgttagatttaatggttatgagcaatgatgattaatgtttaatgtgtgtatggatagttcataatctatgtgatagtttaacaattggtatcagagctagtatatttaatttaagaactgaactaacccattttgttttcaaatatgaaattcattatttttttcttttttggattaatatgtttattgttttgtaaatatgagatatactattttaaatgggtttatatatgttatggatagttatttttaatttccatcattgtggagatattcatcagtggtgaaatctatttttggatttatgttttatgggtaatgtttttttttgtgaaaatggatgaatggatgttgaaaattgacaaaggattgaaactggaacaaaacccttcaaacgacatcggaattggtagacaaagatggtatatccgattgagtcacgaagcgggtgcaccgatctgaatagcaaacccgcagacctgcgagttgggttttttaggtgacaag

SEQ ID NO: 81311 - DNA, 1286 bp, Cannabis sativa
ttttagttaaattttttctcataatcatgtaaattatagttatttaagacatcatgcaaaattttaaaaaattcgaaaaaatttaacccgcaaaaaatattattacacgcgtaattttattttaaacgcgtataaaatagctatttaaatattattttttatatggtaaattattttgaatttctttaaactttgtaggatatcttaaataactataatatatatgaaaaaaaaattaaactaaaaaaattttcaaaacaaataaaaagtacatcaatacattagaagtgtagtgtagaaccacccaataaaattaatctttagattatatatatgatcatgatacaattaaaatttatttgtgactaaaacataatatttgaatgcaagttattattaatttagtttgtgactaaaaaccacatttaatcgcaataaatttaatttttataactaatatatttagccactaattatttaataataatataagaatgataatttataattagttataatttttttatttttatagtgactattctacattaaatgataggaagaaatataggtatgtatatagatagcaaacaaaacatttttttttcattcacatgttatatatgattagatatatgaccaatttgatctagaaactcttgcaaaattatttggttaggtgttgaattaattttccctacataatttcttttttgaataattttccctacataaattgttcaatcaaatttctcaattttatttaataaattcctacagtttggttgggttccatgatctcgtttcgaatatatagttagaacactactagctaggaaaaaaacaaagcaaacataataataatgataataataataacattttcttttgacaacaattaatataataacatgactgttttgtatagtcttttgaaaattacaagaagtaaattgttttgagtagataggaaataaagcaaggatatatataataataaaactaagttttttttgacaacaactaatataataacatgattgtgttttatagtctttttgaaaattacaagtaaattgttttgagtaatttgatatattggattagttaattatagcaagggacatttactctcttattttttccatttataatctttttcccatacggaatttttacaaaaatattgtctttatgtaaaataaccgtacaaaatagaacaattaaaacaacagtgaaataattaaaaacaatcgtggaagcaccgtaaaaacttaacacagtac

SEQ ID NO: 81312 - DNA, 552 bp, Cannabis sativa
gtgtacaatgacatgtggttgatgctcctgattgctactctgattgaactccctcaatttctcagcttttgtttgcttggtagatatttatttaaatttatcttttcatattgtgatatatttttttattatttttttgaaatcaagtctacatatttgattttgttagagaagtaaaaaattaaagtcgagacttcataagaataaaccataaaactaattactcaatccaaaaagtagtggtcacctctactaatggtagaacaattagaatagttaaacaacaactttgctcttttaacaatcatgtcaattctgtaaagaattgcatggtctttatttgtgactgaactttttattttttctatactaatataaatttgttcttttaaataaattttttcatgtttgataatggcccaaaaatgaattctggcatatgtaaatactactctattgacgaagcaattgaagatggtgttgaaccaattttgattagttttgataaaactattgatgttctatgcactattgaagatggtgttagatgta

SEQ ID NO: 81313 - DNA, 2009 bp, Cannabis sativa
  modified_base (1112)..(1112): a, c, t, g, unknown or other
ctcactcgcacacttcctgggaaaacttctcaggaggtcacccatcctaaaattacactaggttaagcacgcttaactgtggagttctttcatgatgacctactaaaaaatgttaagtcattatatatccacgtgtttttttattgatatatttaaattattttttaaaaaataataaaaatttaatgactttgaccaattagaaattgccacatggcaatttacttaactcttaatagcaaggtgcttacaaaagtttcagaattatagcttaagtattattaccgttaaaaattaaacttaggtattttgtggtatagttcctccaaaaataaaaagttctccgcattcgtcagtttactcgtggtcccagaaggagtcttgtggaatgatagtcgagtccggaagggagtttctggatgactattatgtccactccggatcaagtatttattaggatagctagcccttccttggaaaggagttctagctggatagttatccttcctgaattggtagttctggatagtcgactagacttcagtagacttatatcctatccagaatcatcttcagctagggttcgtggtcctcgagcccaaaagctcattcatgttcctaaaggccctagtgcttatgctgacgtggaaactttgctaaattaagagttggttaagttaattatttctaactaacttaacaacctcatttctatatcaatcaccgactttaggatcttgattctaagactataaataccacattgactctatatttgaagatgaaaaattgagatatattagtttgagtactctctgttcagatgagattgagagttagagagagaaaagattgagaggttgagagagaggtacaaagaaaagatagaaattggatttgagtttgtaagaagaattttctgtatatgaagaagattcttaagtgtaaagtgtgaaagttgaaacaaatatttgtaaaaactcatccgagaatctcgtctcgactgtactgtatattcttactcaatcaataaaaaaggattacgatggtgtttcagaattggagtagagtcatagatcacatcgatctatcaaacttgaaccagtatatancttggtgttgatttctttattttcaatatttagtgtttttcggttttaacactttatttgcccctgtttttatttctgattattgttagtgttgttaatcttgtcattgctaattatactgtttaaagtttcattgctttgattctacatcacttaattttatcatatatttatttgcaactaaagttaaacttaaatatttatatcgcaaattactggtatatatttatatatcaccatcttaaaaaggaaaacaaaaatagtactatatatggtacatatagatatatatatatatatacatgcatccgtgatcgtccgtgaattcaaattttcactgtggactttgatattctttcgatctagagatgtatataatatatatatatatatatatatagatcctgatatatttcttacaattaatttgaagctatagctagtacgtatagaaagagacatgacacatatatatatttaatgtatatgtatatgtgtgagctcgtaaaagatatcaacaattattagggttactatttggtatatatataatagaaatattttgatcaattgaacctttttcaactgtttactgaataaaactctttcagaaaacgttgaactaataataaattaattatcccacctagctatatatatatatatatatatcattagtgatttatatataattcgatatatatattgaaaattagacaaatcttagtggcccaaagttggattgtttaactaattaatcattggagtatatattataatgcaaaaattaatattaattagtaaaaaaacattgtatatatcatggcatttatatgtattttaattacttttttttaagaatattttaattacttttaaacaactgtccaaacccaa

SEQ ID NO: 81314 - DNA, 1249 bp, Cannabis sativa
tttttttatttaatttaaagtattttgtaatttaaaattttaaaacatttaatatgttgaaaataaatttcaaacaatatattacacacgtattttttattttaaatgagtgtgaaatagattatttaagcatcaattttttattataaataattttaaattcttcaaaattttaaataataacttaaataattataatatatgattaagaaaaattagattactttttttcaaaatgccaaatagtataaagtacatcgtgcactatttttttaaggggagcaccaccatagaagctcctatagtttttatttctttgttttcataattatatgtataaaaataataaataaatagaaaatagtgaaaacttgatcgtagctgattttggatatggcttatcgaacaaataaatccaaaagaaatgtacacattataatttaaatgataaaaagagaaatgctaaagagtttttatagtatgagctagtataatattgttattagtgtaatttaatattgagtctcacttattttaatttaataaaaattataaaaaattactagctaattataaaacatatgttatagagatattaaacactttggtatcccatattaatgctctcataaaaaagagtaaatcattgttattgaatacttatagtgtctaacacgttctataagtggtatcttacgaatgattagtaatatttcttaattttttttttttaagttatatgaaatttaatactaaattacactaataaaaatatgatacttgagaaaaatattagacatcaataatgtattttagcatttctcaaaagagtaagacattcaactccttctaaaccaataaaaacatagtggctaagctagctgttcggtaattaagagtgggatagaaaatgtcgactctcacgttatatatattatatagtgatataattataagttcattgatcttatcttactagctacacctatagcttgatggagtcgaaatcaactttagtaatatataatttctttttttttttttaaaaaaaaaatgataaaagatatcacgtgttaatattattatagtacaattaagtatcgagtcttaaataattatttttaaaaaatatcactaatcaattataaaataacatgtctagaaactattagtcactactaatatctaataacaatactctttaaaaatatatataatttcatacataggactcgtttggaacgccgta

SEQ ID NO: 81315 - DNA, 897 bp, Cannabis sativa
  modified_base (206)..(207): a, c, t, g, unknown or other
atacgtacacatgtacagctggactctcgaaccttggagtagtcctatatacctagctagtactttattattgtaccatctttaatttatttaattatattaaaaatacatgcaactgtatagggatcgagacgcgaaggtgcatataactatatgtatatatgtcgtaattagctaattaattaacatcataataataataatannaataataataataataatagaggaagtagtactagaaggtctgtatcaggattcaaagtaatccaaaataataataataacaattaaattaaattaaaaaaatagtgatagttttgtgaggaaggaagaaggaggttccaagatggatcatttatatatatatatatatataaattatatatatacacatgcaagtgtaggctagggttatatatatgttgtattgaatgagttggaaacattagaaaaaaatgaacaagtgggtgttattgttaattattggtttaattttactagctaggtaggcacaagttggaggtgagggagaatataaaatataatgtgattgcttgcttgcatgcatgattcaatgaatgaatatctattaatttcttctgctattaagaataataatattgatttcaagcgtgcccctcttccttgtttctatattaatcacctttttgtttatctaagctatcatattaatttttaattagtataatttgaatgttatatatattataaaaaatttactcatttcaaatactatatatatatatatctatttaaaagaaagaagaaaacatgagaatattaaactaattaaaattgtttggagtgtggtcatgaatattaaaatgataatatgatttttttttaacgtactttgtaaattatgaagaaaat

SEQ ID NO: 81316 - DNA, 1105 bp, Cannabis sativa
ttcaataagttccctctccacaggcaaacttttcacatctttgctcaatttgaatggccagtgaataatgtacatgtcaacatactccaattcaagctttcttaacatcatacaaataagttattatcataaaatgtaattttgtgaaacttaaatttagtgttaaatcaacactaaaagaatactatttatttagtgtacctaagactcatcttgattgctggcaccacaagatctcgatgggcaaaggtggcgaaaagcttggtagtgatgaagagctcatctctagatttgatcaagcctaggcttaaagcttccgcaatggctttggccaagtgctcctctgagccgtaaacaaaggccgtgtcaaagtggcggtaccccactttgatggcttcaacaatggcgcttttcgccttttccatgttggtaggaggataagaggacgttcccatccccaccaaaggcatggccttgatctcattgttgcaattactactaatactactcctcaattctatttcaggaataataatagccatatagtatagtgcttatgtatataagtcttaactttgtgttgccttaatataccctaaagtgtgttgtgtatgaattaataatagatacacatgtaatttatacacttacatgtgtataaaaatgcacaaaataatgtcaactatataattgttttctagttttgtctatatttgaagtatattataaacggttaatatatgatatggtggttggtttttagtgtttgattccattttgaatccattaattgtttgacttagggcacttggccggctgatttacagattaattaagttagaattagacaaaaattaaagaaatattaaattaattttttattgcaatctctttaggatgaaagaaataattataatttacagtgttacagatttatttttgtttttttttaatttacttttttttacgaaaaacaactaaaaacaatattagttttaaatacgcgtgttgtgatgtgttagtccgaaatacaagttgtgtcgtgttgaactataaaaaaatatgagtcgtgtcgtgtaacaattttatgttggaaattatttta

SEQ ID NO: 81317 - DNA, 1397 bp, Cannabis sativa
aaatgtgtgataattatttcctttaaatttttattaaatttaaaatatattaataaaattaaaattaaaaaaatgataaaaaaaaatctcacttgtataggattatttatctcaccctgttagatgagataaattattctagacaaatgacgatagataaattagttatccagatttctaacataaccaaacgctgaattgaacaaattaacctgtttaatcaaaatcagtcctgcgtattaaacgaactataatttaaagacttacgttacaaataagtcataaataaaattagacaagcatcccaatcattataccacaccactttaatttaatagttaagtagctatatcattatcattaattttcaaagatggcgtgacaccatccttaataaattcataaagtaattcacatttaacaatatattaaagttaagtctaagtctttcttcttccaagttcatgcatatcatagtaactatttttatttttatttttggcattttcacaaagaacatataatacttcaaactgacgttcacgttggcccaccaattcactatgtggtattactattaattaattgttggttttgctaaaatataataatggagatattttgtattaaaggtaagaaatctaatcgtaattcagtcattttcattgttgttgaggtgttatttgaacaccaattacaacttaatttcaaataactaaaaataaataaaccaaattctaattaataatatcttccattctcaattgattatcaagagataaataaaagtaaaactagtcatgcgtcatgatagatggatacattttaaattttacactacattttaacatatatatttattaatttccttggatcgaaagtgatcgataaaactaataatatatatatatttttttgataaaacataatattaaacttgtaagatttatatttattaagcctggtttctcacgcataattagattaaatagtttgtccaatgtaatatttgtacatattaaaaatctgaataattaatattcagttaaaaaaatagtccaacttattcaaaaactatatacaagattactttatgcccacaatttacaaaaaaaaaggaaaaaaattactttatactaatgtatagatttatcagcttttaactgaattcggatttaaaacttctattacatcaaaattgtagtgtgataatcaagcaggtcttcaattgcctcaaatcccgcgttccacgagtgacctaagcacaatgagattcattgtcattttgttcgtgagaaaattcaacaaggtctgatctccactggatatgtgaagatcggagaacaattaaaaggtatttttacaaaggcttcgaatggggtgtgtgttgtttatct

SEQ ID NO: 81318 - DNA, 1330 bp, Cannabis sativa
agctttggaaaaccaccttcctcaaagtgtagttcctctccttcatatgaatgatcatacaatcgaagccacattagattgggcaagtctttcagatatttaagtggattcactgtcaattttgaactacataaaatgaacgactctaaattagtgagatctaaaacccaatgcgggaacttgtttaatcgaccagacaattcaattgactccaacaaaagaggaggagatgatgaaattggttccaaatctagaaacccatcagcatctttagtatacaaatacaaatattcaaggtgactcaacttcttcgctacaacagcacaaatagctttagaagattctttagtcacattagtcacacccaaattcttcaacttgctcaaattctccaattccctttgtgaaaccaactatgtcatcttgcaattcaacaaattctagcatttctagattctccaaattaccaaatccttcttgtatcttcaccccaaacaaatcacctggcctctcaggtaagtccttcatacgacaaacaaaaagattatgaagattgcaaagcttatttatctccattggcagctcatgcacgagggtattccagagattcaaagtacgtagatactgaagcttaccgatggatttcggaagcttatctatttgggtacccttgagattcaagcattgtagattatgtagcttaccaatggactctggaagaactttaatttttgaaaagctcaaatccaacaacctcaggtggaacaatttttctatttccttgggaagataatcaagagttgcatcgtcaatgaccaacactttcagaagctttagattttgaaacaaagccatcaaaaaatacttaccattccactgctcatcgtcattgaagttcttaagaaagatcgagcgaacggttgtgcattgttgaattgtttttataacagtttttggtatgcttctgtggattgacaagcggcgaggtttgttttcctcaaattccaatttgtttttgttcaaaatttgacaaaaacataaatcctttacctttaataggatgaactcatgcatcaaatcatgaactttgcaccctttccctcttccacgcctcatctcaatcgaaactaaacttctctcggcaagctcattcaagtatctttcagcttcttcttttaatgattttccttctcttactttaacaaaaccctcagaaatccataggtgacataatcttcctttcggaagtgaataatcttctggaaaagttccaaaatacaataagcaagatttgaggtggaaaggcaaatcaacatagctgagagagaga

SEQ ID NO: 81319 - DNA, 1141 bp, Cannabis sativa
ctttaaagattaaaattaaaataataaattaagtaattaatcgcctaattcttaaatcgtttaataaaaaatttaaaataaaattatatgaaaaagattattgcagcgaattttaaacttatattttgtttcatccaccgttcaaaagatacaacagtagaaactgttgcagcaggttcaaccgcatagcttaagcactcaactattgtacaaggtacgtaactgcactactaacaactcattcaatcgcaaaaaaaatattattgtgtaaagtacgtagttgcactgctcacatttagtcacaaaaaaaatattatttccaaccattgacaataatttaatagcagccattgaagaataaagaaaaatcaacaatgaaataaaacataacagaactatatgcgtcacataaaaaagattaaatcactccaaatcatctcacataaacaagactaaaacatttaaaattatgatacacagacaaaactaaaatatatactcaaaatcatatcataaaaacaaaagataaaactaataacaataacaaaacataaccctaactaaaccgcacctcttatttttaatataaaaattaggctataaaataataggacaagttgaatgattttgcatagtttgatattaggccaaatatattaggcaatttcgtgtttgtagtgttcttttgatattttagtacatgtagttttctaacttttattcctagagtcttcaaaaaaaaaaaaaaaacttttatactctttaagaaaaaaaaaaggagttattcgaacaaaaaagaataagactattattgaaacaaaggacacatattataatcacataatctgtttttttcaaaatggacaagtagatgggtcactatcttcccaaaaaaaaaaataataaataaatatttatttattgataaatagtatggtgtggcactataataaaatttcactttataattgttttttattgaagtattgtcttataattagttaatgatttttatattatttattaaattaaaataataaactctactattaaattgtattaatagtgatattatatctcataaatatattcaacatttcttattattaaaagaggaattactctataatctatatactgt

SEQ ID NO: 81320 - DNA, 808 bp, Cannabis sativa
aaataaaaatcattatctttaattaatgacatttaattagggaatatgtagagaaaatattcttttttaccccttactaaaccaattgacacatacatgtcccatttctcattttaattaacaatagaattaaaattattaccatatttacgatttgtttgtaagtaatttaacattcctattaaatacttgtagtttctaatattgtcaccttgcaatacttgatatgtagttaactattttttataataattattaaattaaaataaataaaaattaatacttaatcatcataattaaaatataacaatcatctctaaggattgcaccatttttttcctaatttagtacattatttactatttttggttcaacatcttcaatcgtttatcactaaatatgacacaaaataaaataattttacttaaaatatctcatattttatattatttacggtaataattaatttataatacagtcatatatattatcaataaataatttatgattatttaaatttaaaaaaaaaaaaagaattagaatgaaaaatacactgatatagtgtacattaaaaatccaacatcaatttagtgaaattaatagaatggaacactcttagtgggtgtgtttggttaaaggtaataaaataaaatagaatagaaagaaaataatttttatttcattattttgtttattttgtttagttgcatttttaagtattagaatattattccaataaaatgtctttttttatcatttttgtagaatgactactccattttaaaatggaaggaaagaccattctaat

SEQ ID NO: 81321 - DNA, 1893 bp, Cannabis sativa
atgatagacattcctcagcatgaactttgtaaatccaggaccccacaccatcaccctgaacccatttatatccaaaatcctatggacccagcccaatcacccaaacccccctctaaatggtttcattctgataagggagtggagtgctctgtgtgggaagaagaggaaggcggctggaagtgtagcccctgttttaattgctcaaaaagaatcaatccttgtagctgattccacaagtaaggctttcgaggaaactgagaaattggcctttgctattggaagctctgagagttctgataaaacaaggaagggcattcgactaatgcaaagaagaattcttctagatcaagccagagacacaagaagaaagtccgagcggaatcgggtaattctatccctttatcttttgaaaatgaaaattctgaaatctctgagttgggaaacatggtcattgagattaaacttgatcaaaattttcaagtgggcgaggaggcggcccttaccaagcccccccaatccccatgaggtctctttcttggaattgctggggtctggggagacccgcggcaatccaagctctgggagcttgggtgaggaagtttaaaattgactgggtttttcttatggaaacgaagctgggatcggctcaaatggagaaggtgggaaaggatcttaattttcaattcggagaatacatagctgctgaggggttagcagggggttctgtcttttttggaatctctctgctggtgttaaggcggttaaggtgtggaacatgggtttcgaatgcttgatttttgaggaaacaaagaatgctttatggacgttgtatgctatttatgggcctccttatgatgagttgaagtctgagttttgggaggatgtggcaaggcacataaacagtaatgataacgcttgggctgtgcttggggatctaaatctcctacataccagtgaagacaaatcagggggtagacattttgctccgagggatgggcgaattatgaatgaatttctttttgatgttggtggtgtggacattggcttttcgggatgtaagtttacttggcgtaacaagcgggagaatggggggctcatcagagaacgactcgatcgagctattgctaatcctgaaaggctgtccttttttcctcgtggtcaggtccgtaatcttcctatgatcgcttctgaccatggtcccctttttttttcgataccaacccttattccatcagaggagcttgcccctttcggttttatgaagcatggttcaatgataagtctagtttccgtgtgattggaaatgcttggaatgatgttgttttgggtgatagagggcctgctctgttttctaaattgcagaacacccgcaaagcattacaaatttggaaaaaggaagtcttcagcgattgtgacacgaagctgaaactgttggagacccaacttcaagccatccagtcaagagaggtcgaaagcataattcctggggaagaaaagaagttagagatggaaatatttgaattatggaaacgaaaggagagtatgttgaagcagagatctagagagctatggctatctaagggagatcgcaactcctcttttttccacgctgcgttggtggttaggcgtcggagaaattatatccatgcccttttggatgaaaacaacagtttgagatactctgagaaagaaaaaggccttgttttaaataagtttttctctaagcttttcacagctggtaatgtctcggttccggatgatcttgaaggtttaatttctcatttcgtgtctgcccaggaaaattcgatgttgatggctgttcctttgatggaggagatcaggaaacaagtctttcttatgcatcctttgaaggctcctgggccagatggattt

SEQ ID NO: 81322 - DNA, 2101 bp, Cannabis sativa
  modified_base (1553)..(1560): a, c, t, g, unknown or other
atttttatctatttattttgtaagtttgctctaattgataatttaaaccagatgctatttttggatggtgttattttatctaaatttttaagataatttaatcttatttaagtctcattattttgtagcgattcatattctaattttaaatataccttttaactaaacaatttattggtttgtgagctagaattccctttgcatcgacgtttgtcttattatatttagatcactctagaaatgataaaaacctaagatatattgctaaccaagttgacaaacgaatatatctaaattattattgaagtaataataagttgaatctattaatagttacctcataaaaatgatatacctatgataccaattcggtcatctctaatagaacggcaaaacttcaaaaatagtaaaattttgatacaaaaatagtttaactttaaacatcatcctatatataagggagtttacagtagagtaggtaaatgttttttttttaagttgactagctagcaatatatatcttagtgcaatcttaaattttttgttcattgaatctttataaagttagggtatatatattctcaaattttttttggaattatcaaaacaaatataaaaagaaaatacatagatagaaacatgcaaagacaaaaagatcattctcattctcattctttaatttgtcttttaattaattattccttcatatatatattgattaaagagaaaagtgatgagtgaattgttaattaagcattttttgacaaaatcgataagcttggatattactctgtcgtacgatgttcttgcttgaattatattattattatttactcccaattgtatggcatgacatggcttatacaaaccgaccagtactgtacacacaaaaaaaacacacacacacattaatacttattatttaagagaaaaatttgtcgattaaactatcttaattttttaagtttaaattttaatggtaaagtgttttaaattataaaactgttttagtaaatttaaagtgttattaactataccgacataaattgtgtttatgtgtatactcttatacacgtagtatatttatattagtagtacacgtaatattgttattttaaaattcaataaaattataaaaataaaaaaatattaaaaaataaaaaatattataaattttaaaatattcttttacaattttcaaataataatattagatgtattaatatacacatactacgtgtataaaagtgtatatataagaaatttatgttggcagttaactatgaaaaataaatattgtgactttaaatttatcagtagtttaataatttagagggttttactactaaaatttgagtttgaaaatttaaatggaagttaaatgatagttaaaagagttgtagtcgtaaaaaactcttaaaaaaaaagaaaaagtaagaaaacaagaggagtattactgaaaagagaaatgttaaagggtatcagtggtgtttagcattctatgtgtcaatataactattggtctaactaagtattgagtctcatataatttnnnnnnnnaatttttaaagaatatcgttaaccgattgtaacgtgacatgtcgtgaaggtgctaggcaccactagtgccgcacggttgatgatgggtggggaatgaaatagtgagatgagattgatgatttgacagcatcacgtgtggggttgcctcaacatgcacacatgacttgttcctttctcttcttccttattggtggctcccactttccaatacacactattttgttttatagagccccttttctttttagttttaggtcttaacatccccacacgtggaatcatcattgcttcctttgcttcatccaaaataaataaataataataataagagtgtactgaaattttttggtatactctctcaaaaaaaaaaaaaaaaaaatattggtatactaaaaccttagtgatgattcgaatgggagataataaatagttatttgtttaatttaatattgtattttatattttttaatttaataaataatataaaaaaatttaaatcacttactatttgttatattgtatagtattgtacactttaaat

SEQ ID NO: 81323 - DNA, 3648 bp, Cannabis sativa
gctgcagaccaaaatgtcgagactaatgatttttccgtgcatgaacaaagacgagaacgggttgatctccaactatgtcgaccctcctactcctatggactctgtgtgattttaatttcctctttattattttttttcatatgtcgggtcggggtggctcttttttagtaacaatatgactgatcaaatggcttttaactttgattttattttattttgttattttgaaaaaatatccggaactttatatgtcattttgcttgtgaaaaaactacaatttatgcactctcactttagtctttaaaaaattcttgaaatatttctatgtactttttagtgttattttaactgtttatttggtcaatgttatactagatggtggtgttaaggtttctgtcctgaaaagtttgtgaaattttttttgtttataaataagaagttgaatatttttatatgtggttgactgttaaattattgatacttaatattgaataatttatatataaatatcaaaaaaaaatttattcacacataaagttgtgacttgtattgtacggagaattaagaccacttagccatgaataaaatactcaacaacatattaaagttatggaatctttaatcaacgattgctagcgtggttcattgatgcccgttattcgctgcaagtaatctcgattcagattgatgatgtagtatgatatctaagagaaggtatcgtatataatagagattatatatgaaaagcatcgatatgtaattaaactgtctttatcaaacatgtcatttactataaagacctaattcatatgataaggaactcttatttatgttattagtttctttgatttacttgttaaaatttcttaaagaagactcttggtcacttgctatttgactagagtataccattgtagtttgttcaacctcttatagaattttagctccaaaataatatttgagaagatttagcttcatttggaattttctcaaaatttcaaaacatttgctcaggtcctctatatgccctagacccttttggacttgacggacatgtcatctacatgcacatccatattatggtcgatttaatctctgttgaccatgcataacagtataatccaacttatgttcagaagctggtatgctcctagttggatggatacattttgatttgattatagtcgaagtaaatatctaaacacctttgcacttattactaagttggtcactgtcaaattggttttggctcttgctgcaatgaaaggttggcatttacatcaactcgatgtaaacaatgctttcctacatggtgatctaaatgaagaagtatatatgtctctacctcaagggtatagacctaagggggagttgccaccaaacccaattttctagttacaaaaatcactatatggactgaagcaagcttcaagacagtggtttgccaagttctctagtgttctaattgatgaaggcttccatcattttgctatagatcattttttgttcatcaagcattttgatggaggtttcatctttcttggtgtatgtgaatgatgtcatactagctggcaacaacttgcaaaaacttaaagccttgaaaattagattgaatgtcagattcaagttgaaagacttcagaaaattcaagtattttctaggcttagaagttgctagatcaaacaagggatctttgtctctcaaagaccttatgcattacagaccttggatttctaggcagcagagtacactaataagtggtaatctaaaacttggacaagatgaaaaagagaaattggctgaccccacttcatagagaaagattgctggaaaattgcagcatctaacaattactagacctgatatttcctactctgttaacaaactaaaccaattcttatctacacctcgggtatctcatctaaatgctgctcaaagagtacttcagtatgttaaaaacaatccaggacaaggacttttgtagctgatacaaaggtcatgatacatgcctacacaaactctggttggacagcttgccctgatataagaagatcaactacaggattttgtatcttcattggttcttcaatcatttcatggagaagcaagaaacaacatactgtttctagatcttcagcagaggctcaatatagagtcatagccaatacaacatgtgaagaggtgtgactcttctctattttaaaagaacttaaaattgaacacaagaccctgcgctactctgctatgacaacaagtcggctaatatgtagctgcaaatcttattttttatgagagaaccaagcatatcgaaatagattgtcacttggtaaaggagaaggtgcaacagggaatcttcaaaacactacatgtttcaacaaagaatcaactagcagacactctaactaaatcattattttctaaccaattcaattctttcaaaaacaagataggcttgaatgatatatatagcccatcttgagggggaagtatcaagttagtatttggttaggaaaatacagttaggagttagttggctcgatgtgtgagttagcattagtgttagttaaagttagttgtcattgtaactaactagagctactataagtagctgcattcatgtactcttacatttgatcaatgaaaatagcctttgattcatcttcctctttttctctctatttttcattcatggctttcacactgttaaaattagtgacaacgtgtgtctaaatatcatgttttactcataagtaattttttattgtgactaaaagtcacatttagtctaaaaaaaattatgttgcgactaaaaaaattataattaaggtagctgttttcttttgtagtgaatgcctcattgcttactcactgaatggttgcccaaaacccttttagttataaggcttattctttatgtctacaagtaatgtaggacgagtataatatacactcttatataattatataaacaatcagaattaaaactatctagtagaaagaaaaaaatcaagctatggaggggatgaaaaaatttccaaccaaaaaaaggacaagtgtttcttatttcttactaaatttcagtcttatacaaatcaatgaacagagaaataatggggtacgtagcacaaataaaattttcctctcctaaaaaaaatgaaaagaagaacccactaagcttagctcatcacaaacttaaaatgaaaaatgattacatcatgaagtcataataaaagggttaaataaaatgaaacaaaggaataatagaagaggaaaagcaaaacaagccaatacaaccataatactaagaagaaaacattcctcatatatgtgtatgtgataaaagtcttaattagtttaatcatagactagctatataggacatggtttgaatcaatatcatggacgtcgacaatgagctttgcacatgtactgacagtcgtagaagcaaggtccaccacagtgaagtgggcaatctagtctcattcctctgcaacgccctcgtctcatgcattgtgcaaactctcccattatgtattcatccttcttcattcctctgttccttttcccatgcttattattattatgtcttccacacccccatttccaccacccacttcctcctcctcctcctccccatccccatccacc

SEQ ID NO: 81324 - DNA, 948 bp, Cannabis sativa
gcatagcaacgaatatgattaattaaacaagttaaccagcaatatctctaccagacataatgttgaattttctgattatgataaatgggacgagccttgccctgcccttatgaataaagctgaaatggtagagagacttcgtccttgggttagaatgacatggctccatttctggctatctgttggatcaaagtgataccacaaattgcagggtcgaagttgacaggtttgccatgatggcgaatagggatccaatctatgtaggagatgctatgaggacccagtccaatgctataagtttgactttcacttaacttaggtaagcaatatgcctctcttagtagcttaattcatttgcactttttcatccacaagtgaacttaatggcagagaggaatactccctggtcacctagctagcttatgagctcgcgaagcgtaccaatgctgaacaaaggagagaggaggctaccaaagctttagctgaggctaacatcaggatggaggctatcattaaatagagggtgactgaatctttggataaagtcgtagcatgcaaaaagaagactaccaagacagagagggagcgtagagataagtataaggatctacactccaacaccctcactaagatcaaagacctggaagctaacttgaagcaagcaaagtgacgtccaagagaaacaacaaaagcttacaattctttctcaagagtatgacaaacaagttgaaatcatcaatgaaaccattcttgagaaaagggtgaagcaccatatggagttgtagcagaaggcagaggaagctgaacaaaaggttgtccaatacgttgaggaggctgaggctaagttggatgcattcaagaaagctcatgaaaagtcccgtaagaaaatcaccaatttgaaaggagaaaactcaggactaaagggataacttcagcaagtagtccagg

SEQ ID NO: 81325 - DNA, 1563 bp, Cannabis sativa
  modified_base (1309)..(1310): a, c, t, g, unknown or other
acttagccgattatttcaaatcttcacattcacagtttttcagtttagtgagagaaacaactagagagagaaacacacagagagagagaagctacaatggcggtctcagtccccatcttggccatagtcgtctcactacacctcatagcttttgttttcgctgttggagcagaacgacgccgtagcacggtaagtatttttgagctgaatctctctatactgtgttttttagctcaaaacaaactcacttttttgttttttttaggctaaggtggtgcctgatcagtacgatgagtacacattctgccgttatgattcggatgcttcgacggtgtacggattatcggcgtttggtttgcttctcttgagccaaacggtacttaacggcgttactcggtgtctttgttttggaagaggcttagttactggtagaaccactacttgtacagtcttcttcttcatcgtttcttggtaattttcattgattcacttctttcttttgattttgatataatttgtttagtttaaatttgatgatctgaactgataattaattaattacttgttttgttattctatttctgctaagtttgaataatggttatttgaatttgaaacctaattgatttcactttgggatttttaagacatggttaaaaatgtttacaagttaaaaagcaaaaatagaaagaataaagtagcattgttgatgatgattagataatttaataatttaacttatttgggattactctggaatctgagaaagaaaagtgggtcagtcatgattttattttaaatgtattatgaacactagtagtgttatgctagctttactttactttaactttttatctgtattttaatttggtaaaccaggtggaggggtatagggttgatccaatctatactttgaacaagctgttcttatgttatttgtgcactttagtcaaacttatcatgacttttgtttgcattattttttgtctttttacacaatactgaaatagacccttcattctgtttttcaaatgaatagtttcactttcacatttgtgtctttttctttagtaaaagaccaccccttttttcaattaacagatagtatttgtttgattaactctggttgattgtttttcctatgagtgagatgtagaatatccttaaaaaaatatataaaatttcgatacacatctaaattagaaaaatacttgaaaattcaaaaattttcggaattcaggaataagaaataagattaggtgatggaataagaagaatatatctagagatctatcggtagcgagaaggnngatcacacttcttttttgagcagtaaggaatatgtctaatgatactttatgaaggtgggagaaaagagaaaactgattaaattattgactaaattagtaagcaaaattcacgtttatactctcataacctctttcttttggttaactctagaaaaaaaaaatgccttggtatcatgttcatacagtcgtattaaatgaacctcgcagttttattttctgtccatataatgcttacaactttggttgctggttg

SEQ ID NO: 81326 - DNA, 1801 bp, Cannabis sativa
atttatatatgcatctctaaattttctacttacataacaattaatactactgctagatgatgattttcaaatttatttttctactgatttaaaaattattacttagatcgatctatcgtatgcattaattttgggattttatagtttctagatacagattcatttattaatttacattttaataaaacaaatgaacatttatcaaagttttacatgtattaattgatccaacttagctttttattaatagttgaaaaagagtgagagaagtagttttgaaaagagaaatgttgaaagatatatattattgatgttacaatcctatttattagaattaatgtaattaaatattaaatctcatctaattttaaaaaaaataacttttaacatatattgttaaccaatcaaaaatacgttacaacttttaacatatatggttaactaatcagatactcttttcaaaacggtgttagagaaaattgaaaatcatctagataagggtgtttttttcttcatttattttgctctgtttaatttatggattggttatttatcaaaaagaaaacatgggttggtttgggtacaataaatacagcattctctataattgaagcatgaaaacaactattgtactgtgttatgtcagtttcacttctctcataataaattctcatatcccctaccccaactttataataatcacaaaagtaaaagagtacttgtttatttattatcatcatttaattatctctgttgtgtacatatattttacacagtactattatttgacacaagtatattgtatacatatagtaattcattatttaaattagaaaaataaataactagtgcatgctaagaataaaatacctgtaatatgcttatgtctattactaaaattatttattaattaatatgaacaacggctttgagtcgatatattcatggccaaattattataaaggaaagttttagaagagtagtagatatgaatgatatagtgcatgtcatgcagatctttgatcacgtgacaatctagttgttttgcgctgtacttctattagttgataatgacttgataaaatgtcattttcaatttcctataaattaattttttaatattttacgacaacattattcttctctatcacttcttgactaaaatccctgaacaaagggcattcatgtcattaaatccacatgtcagtcttggggatttgcatcatcatatcctgccctcttttttttattattaatattcatgtgctgctgctaggttgttgaatagcaataaagttttagggttatttagaatggtcccactaaagaaaaatatagccaaatgcttaaacaaaggcatccacctaattaacaccattagaaatatattattaatgtaatttaaaatctaaattcatataatataatttaatttaggagtttttttatttttatatttcaaaataatatatttttttttgtatttttatagaattttacataaaaaattttattacaacggtcaactagcactgcaacttaataaattgcaacaaaaaatcgtatagaaactcctattgcaattagcgttgcaaccactttagaaactcaaaccgtaaatttaaaaaaaaattaaaaaaaataatatgaagtaatttttcttttatttaataaatattattattaattatttgctcggtgccacttataaagagtattattacgaaataccaaaatatttaatattttataattagttttaatttttattaaattagtaaaataaataaaattgttattt

SEQ ID NO: 81327 - DNA, 1015 bp, Cannabis sativa
tttctttgtcttagttattttgttgcttgcatttatctcgtcttagtgaaggaatggaatttggagttatgtagattatctgaccttaatccgatattcaataggttttgccatcaagaacaagcccgatgtttgtatcatggaaaggtggagcggtaagtcaatattcaacagtgttctaattcattctttcttgtgaattggttctttagctgtgttgtactgttacttgtctcctagattctgcctctgaatttgttactcccattagaacacaatcatatcctcatgaaacttcttgttgtcagattcttggaattcttgattttggtcgggatgcatggttacacagggaggattggatcaagaatggcattcacattggaagtggaagaaagtacaaggactcatattttcttcaagcacaagcaatgtgttatatcaattcgtgaaaagaacatgactagtagaagtagagtagatgtggtatttaatttaactgtgatcattattgtagtctttaagaattgagtagcaatagcatagtcccacatcgaggagaagtggaaaaacacattgaacatggaatataaatagaaggggtggtgctaatgataaaatttaaaagggtcagttggctaaatatgccacgctcacccttgttttggtgagtgctgtatggctatcaagacatatggctgacataatttgtgtaaacttatagggttggctcgctttggccgaccctcccactattttcaaaactttgtctacctttctctatatatattattagagaaatttctctatattaaaaagaaaataatataatattagtatttttattatccaaacactgtaaaacttaattagtatttttattattcaaacttatgacttgtttatctaattcgagttattttttaatattaaattatttaatatttataaaaaaaatatttttttttttcatataacaacaaattaaaataaatctaacaacacattaaataaa

SEQ ID NO: 81328 - DNA, 509 bp, Cannabis sativa
ttattatttaatcacttaataaaaacaaaaagttggcataaagtaggtgaattccacagtcggcgccggaatctttaccttaagtttttatttttatttttatttttcttttaaatatatttttttaattatttaatttaaatatatattttttaatcaaaaccagttgcttgtgtggattgtgtacatgtgtttttcccaaagccacccaatattattgagcccttttataaaaaaaaaaggcaaaattaaatgtttattatattatactaaacattgttaaatgaaaaaaaaaataagagaaattttatttatatttcacaagataaaagatatattttaatatttacaaaaattaaacttaaaataaattttaaaaattatttttatttttaatgtttttctcatattattttgtgttaatttaatacttactttaattttattttcatatatattttttaaagtcatgtatattttttttcaataaaatttcacataattttttg

SEQ ID NO: 81329 - DNA, 886 bp, Cannabis sativa
tattattattattattgaaaattcatattctttattagcttcttgtttaagcaatctataggggtgtgaaactatggaggctgaagtagtgaggcaacaatttcctttttacaatgaagttcaagcgattttctcggcgcgaatacagatgagatcgatgtgggcagagccagaattaggatcagttggaggaggtggtggtggattgaagaagcaaaaaggggtaatgataatgtcatcggatgatgaattagaagatattaataacaataacattattgttcatgataatattgatcatgttattagtgaagaaggagaacaaaagggtaacattaataatagtagtggaacaattttgaggagtaataataagaagatgaagagtagtaataaggttatgattagtgatcatgttggtagtagtggtagtagtagtagtggtattgttaataatgtgagagagatattggaggattttatgaagcaacaaatggcaatggagacacaatggagagaagcttttgaggcaagagaagaggaaaggagattgaaggagttggagtggagacaaacaatggaggctttggagaatgagaggttgttaatggagagaagatggagagagagagaggaacagagaaggattagagaagaagctagggctgacaagagagatgctcttatcactgctcttttgaataagcttacacgagatcatgatctttaatatcatgtctagttactagttactactactactactctctctttctaattgttattattaactctttgatcatttttgattagataatatggtttttatatattcggattatgatgataatgtaggccaaaccatgtactactactactactacta

SEQ ID NO: 81330 - DNA, 2279 bp, Cannabis sativa
  modified_base (2238)..(2250): a, c, t, g, unknown or other
ttcaaaactttagatacttatgccgctatttactcttaactttatatgtaaaatatttgtttgcgaaattccataatgttgataatttgttattacaattcatttcttgttgttaagtttgattaaaataacatatgtcatcaccattagcttaaaacaagttttaatcaatgattattagaaaataaattaaaatatattttacatattaaatattaaatatttcaaaattatatagtaaaattaaaatttaagaaaaaagaaattatactttttaatcttgaaatcaagaaaaaaaataattagtaaagaaaattaaatcaatcttaattttaagaataaattaagattgggggttggggtggtggactccatgcgtgagttggggtttggttagggggtttcgatcttgacagtctagtatggcgattgtggagtttgggtcgagtttctaggcatagggcagtagagatgaacatatggtctgtggtggctaatgggtgggactttgtttgggtcggggtggagggtttttgtgttggttgtaatgtcctacaagcttagacgtgttactgtatttttaattttagtaactatcctgagtggaaattttgtaattaagagattaaaaagattagtgatataagcattagtgatataattttctaattacctaaattttattgaattctaggtgtgctatatatgttatatataaaatttgacattttaatgttttatgccctataacagtagaaattcgacaatcttgccaatagtgtcactatgatatggtttaatatcttaaaattagcaagaaaagatttataaatagatagaatattaaagttatgtagagtatttagttatgaccattttatccttaaatttgaagataacttagaagttaagtatgggcatttttataatttacctaagtttattttagtaattatccttagtaatttttttttttaattaagagttataatgctggatattaattttataaaccaaaaattagaattaataaaaaaaaaaccaaaacaactctctctctctctcggcctagccaaagcccaagggaactcaagaaattttcaagactttgtaacaaaaaattcaactaaggaattagaggatttggagcttaattcaatgtaaagctctaatcatctttcttcctctttgaatttgttgaaaaacatagtattttgtatgactttggaaaattcttttctgtatgagtttgtatgagttagaaactccttttaagcttgaattaagtttgttgttgttagtttttaagagtagtagcagttgtagcaagctttgggtgagtttgagttttagaactcaaacttagctcaatattagtgaatttgatttttaatgtaattgttgtgtttgagttatggaatatgtttattatgttgtatattgatgtcctgaaagggtttgtagcatttaggtaagattaaagctagtttaggaaaagttgagaatttttgaggtggtttttcccttaaatcgaacgatcggttggtacaggctataccaactggaggtccgaatggacagtaccgggaaaggtcaattttatattttggcataatttttttttcggtgtatattttagacgttctatataccattttaaagcttgtgaaaagatcaacaatatggtatataatttagagccaaaatatgtatttcattttagggtattttcaccatttaattcggtagaaatcctaaattctatacgggtaaagtgtcctagaatagacacttaccagttttacgttacaatgacttagggcctctgatcgtcaagcaatttttccactcatgttgattgacatacctaattccaaattaaggaaagattaatataataatatatgcacgtattttaaatatacatgttttataataccgtttacctggtgtactagagacagcagtatggatgtacattgagttgtatttagatattgataactagtgatactagtgggtatcagataataaatattgccaatcaaattaacatataagggcatggtgtcatagagctacattgagatacatacatatatatatatatatgttctgcaatacaaaaaataaagaattgaacctaccacataagtaccactaaagtgctgagtataagttgctattatggtcaattagacttatagtatggattgatgtgttgggttttatgccctnnnnnnnnnnnnnttcaatataatcagatttacttcttaata

SEQ ID NO: 81331 - DNA, 2020 bp, Cannabis sativa
ggagatttcgggtgaagatggcggtgccgccgccgagaatactgccggagggactgtttccatgtcaaggcaggaaagtactcagagggaaaaggaccaagtgtctgcgtgagattatgataataatgaattaataatacaagtaatattttaatatattttgtgtcaattaataatgttataactctttattataatttcaatacgtactttgttatattttaatttgattattagctggatttgatatcctctatatatatatattgtagttgacgaagagtgtgtgtgcttgaagtgtatgaactaataaataaataagtaatcaataatttgttactttaattaaatatattaatatgtatattttgtttttttagggaaaatactaagctatcataaattaatagtgtatgtcattcacaatagttgagtaattcgatggaggaaaattctccattcaagagcaagtttcattcaactctagaacatatcgagtcaaacaatgacgagtcatattgattgaatatttgacatgagtaacatgactctagagaaaaatgataaaaggttaaaaatatatacaattaaaattgcaaaatgatgtgcatttaaagcgttaaaaaccaatcaatccatcgatctcgacatgggcaattggttgctgcaattgcaaaacctaaattggactgtggaaaatagttttagtctcccagagcaagtggatgccatggaacagatgcttgaactggcagaggagatcttgaaacagagctatcattctggtgatatttagcttgagcatcctgaaaattttgcaagtaatttgcagcaaattaaagagacatggtgcttgttggttttgcagtacccctatgtacaacattatttctctcagaccatatagatcacatagtacaaattatagattctatatcagttttggtgtaacgggttgaaaagtgcatcaagtagtcacctctatgcataaagttggcaagtcttaagtcaaacaccaaatctgaatgtcgtcaaatggaacgtgcatatttacatccaaacaggacatgtcctatgaattcccaatttaagaacaaagagagcaggtcgagtcagtaattactttttgtcttaccaaatagatggcgacaaggagtgcatcgtggactgactttttgtggaaactgcaaagaccgaaaaaacatacaccaagatgcatgcaaagttggagggagaaaatttagttgcaacttcaatagatgcaactaaattgtagcccgaacacctgtttgatcatgatgccgaatcagtgagatcactacagctagtaaaaaatacttaaagtaatgtcaaaatcctctcaacatccaaaagtgagaagaattgttccagtagctatctatcccattgacattcttcatttattaacactacaagaattatggcttttaatgagaacacatttcgtcagtaaaaggtgggtatttcgtcagtattgaatatcaatggcgacatttcgtcagtaaaatgtcgttggtaatacttcgtcgatgaaaggtattattattgacgaaattcaaagtcgttggtgataaaaataattatcaacgactttgtcgttgacaaaaagaattattttttttctaaaaaaaattcgtaagcctatcaatgacgacttttttcgtcattgataatattatcaatgacgaaaaagttaccattggtttaattattttattaaaaaaaataatattataaataaaaaataatttttattaaatattaattttttcactaatcaattttattaaatatttttttaattaaataatatatcaaataattaaattaaaagtgaagcataacactaaactaaatatttttatatcacatatcaaatgttaaatatagcaatatccttcaataaaaataatactcgctaaagtgaatattcataaaccataaataaacattaaagtaatagttcatataactaagataaaaatactaaaagaaattt

SEQ ID NO: 81332 - DNA, 1034 bp, Cannabis sativa
tccctcgtcatcttctaaagattatggtaaccttcttaaatgggagttttttcctatttttacttatttattttgtttaagtgttaatgaactcctcttggctcacagatatggatatagatttggagaatgtgtttaagagtcctccctcggtcgacaagaagtctaagaagagagttactcaaactggtgaggcctcaggttctaccaaagaacctaagaggaccaaaactactgcgaacaagaagaagtcctcaaactcgcttacaatcgagccagccaagtcccaggagttcatgtatactcgtgattcaggctgatttagtgtccaaaatagtatttattctataaataaatatttagattgattgattataaataatttagaaatatacgtggaaaaaaaacgcataaaaacatatatatgtaaaagatggcactgaaaaagcttaagaaaaaaaattacatttatcaaagacgttttaaaaataccaaatctagtgtttagatattatagactcatcgattgattttaaataattttaaaatatatgtagaaaagaaaacctataaaaatataattaacagatgggactggaaaacttttaagaaaaaaaaaaaataataattacatttatcaaagatgttttaaaaataccatattttttgggtattttattttttacaaatgccatttttctacttatgggtatattgggcttatatttggagatgggatataagagaaccattaggtttagggtttagcttactcaaaccatcaaaacggcttcctgagactgaaggttgagaacccagaagggcacctcacctcaggccaacaaccatggtgcatgtcaatttttaccggaattgtaagtatttcttcttcttctgcgattatagtttttctctgattcatttgatttggatttaatttattggtttgatctacattgatcgataaaattataggagaagaagatttccttaatttgatttgtgttgtgtagatggtaaaaccttcaagaagc

SEQ ID NO: 81333 - DNA, 1113 bp, Cannabis sativa
acggagatgtacccttgatttgaggggaactccgaaatcaatctctattgtgttcttctttatttttccttgttgtgttttcgggtctctcttctataatcaacaaagatcattttagatctttgttgttactgtttgtagttgattgtttgtgtgtagggtcggccatagaatagcttggagaaagaaggcttggctgcaatattttgcaccaagaagaaaggaggaaaagaagaaaggggctgctgcattattcgaaggttgaagggctgctagggttttaaagcaaagaagaagagaggctgaagggttattttcggctgctaggttttgaagaaaagaaaggctttatactaccattaaagtggagtagggttttgagggaaataccttgttatccgcacaaggggaaaggtcagatttgaccttgtttttgtggctttatggtgttggtgtaggggtattttcggaatgctttaatttccttcaattactctatactttatacctcaatacaaaccctaactcagtcaagatccaaactttggcctcaaacgctgacccctattaagtcccagagcaacacccagacctagattcaaactcgggcggtcttagaccttggccccgacctcgtacttgagaaaaagtgatgtgataatatgatgagaaaaaaagtaatgggaaagaaaatgtaaaataaaaaatattgacaaaaaaaatatttcaaaatagaacacaatattctgatattttttaattttttaacttagttttcaaaaaatatggcctaaacactcttattgttttttaaaatgtaattttctgcttttaaaaagtaaaaataatttcgaaattataaagccaaacaccctgttagattttcagagactgtgaacatattatattttgtacttttatatcaaaataactctttctatgctatactatatgttttccaatagtattattatgattctcaatgatgtagcaaatgtaaatgtaatacacacttaacaaacaaaaagaatcctaattctgttattatgtttaaatcaattgttgaagagattaattttcttttagctattgttggtggtagttcttgtcgtg

SEQ ID NO: 81334 - DNA, 1930 bp, Cannabis sativa
aaaaaattatttcgaatgctaaaatagataggggtgcatcaatatatccattttagggggttcattgtagaattttcctataatgtatatattacggtaaattgcccaatttaatatgctgaaaaatagctagagcatccatcccatccattttaagggtgtctcctttatatatttttttttttaaaagaaacaaaattaaaaaaaaaaaaaaaaaatcggagaaaagctgcctcaaagaaacctgatttttccatattactaatctttttcttcttcctcctaaaccctacgccaagtttctccattttcttcactatcttcagaagaaaacacagagagaagcttatctgataataatgtcgggcttagcatgtaacgcttgcaacaaagaattcaacgacgattctgagcaaaagttccattacaagtctgaatggcaccgctacaatctcaagcgcaaggttcgtatgttcaaagagtttcccttaaaccatacatacttacccttttccttattttcatcaaattttgttaattttctagggttttaaattgtactcttacagaattagcatttctttcctgttatttgggtttccgattcgtcaataattatttacatgaaaccataccctgtacctatttgaaccgatgctggtggtgattctcacatctaaaacatattaaattttgaacttagtttttagtttaaagattctttcttttgcccatttcataatttttgttttagcagattatggattttatggattttattatgtaaagaaagagtttggctttgaacatagttctacattttggttctcatccttttctagttccattttcattcttgtgtattgtgattctacgtttcactttataaacaaaatgagtgtgattataatagataaatctatcatttatcgaatttaattgttatcaaatcacacattgtaatctcatgaaagatctaagaaactattaaaacttatgattagcacggaaaaaccatataaaacaaaatggaacccttactgtatcgtaatatattttcttaggattagttattgaaatatttataatctgtttgattaatattttatttaaaaagtctaaaacttgagctaccatattgtttgaaggctatctcttgtgtttcttggcaattaccatcaatgaatataaattcgttcattctccaaaataaataaaaaaagaagtttcaactttgaactctaattacaaaccaattacgtaatttggagtaatttgtttattctaggagtgagtttggaaattcccatgtaattataattgagttcatttgctttgagctttttcggttgcttttcaatgtgatgttctcaatgaactacataatgttgtttataactagttatgtttttggctactaaacctgtatcagatagctggggtccctggggttacagaagtattatttatggctagacaagctgctctggctcaggagaaaaacaagttaagcgaacccccaatgctctacagctgtggtctttgtggcaaagggtatagaagttccaaggctcatgctgagcatctcaaatcacgaaatcacatcctgaaggcttcttctcaagggttcaatagtcaagaggaggacatggcgatcatcaagccgttgccacgtcgtgctgtgaataaggctcctctgcaaaatgatgctcctaatgaagaaagtgaagatgagagtgaaggtgagtgggaggaggttgatcctgaggaagaattgattggtgaagctgcaaagtctttgactggcttgaatgttgatgagcatggtcctgatgaagacatggacgaaaaggatgatgatgaagactttgatgagttggatccgtcttgttgctttatgtgtgacttagagcatgataacctagagagc

SEQ ID NO: 81335 - DNA, 1496 bp, Cannabis sativa
atgatttgtttgtctaacatttggttgaggtttgttgtttaaactcaacaaattggtatcagagctataaacttcttgtactcaacctggtgcaacaaatcaagagaatcaaaggtccaagaaacaagttcagcaagtgctcgatctgttgcttctgtcatctactcgaagaaaaaatcaagaactgatcgcaggtgattaagaaatatgacaacaaataagatggacatagaaaaattcaatggcaagaataatttctttctttggagagaaaaaatgaaagctcatcttggaaacatggggttggatgaagctctcaaaggggaagacaaaatgtctgcaacattggagaaatccaagaatgaagaaattctaaaaaggaaagaaataccattgtgctaagccttgaatatgaaattttgaggaaggttgttttagaagaaacagctgcaaccatgtagaataaacttgaaacaaatttcatgatgaaaacactacctagcagggtttatctaaagtaaaagttctatggttttagaatagatgaaggtaaatctattgataaaaatttaaatgaatttactaaacttttgtctgatcttcgcagcttgaatgtgacaatcgaagaataagaccaagccatttatcttctcatttcattaccacaagagtatgatcaattcagagataccatcttgtatgcaaaagacactttggtgctggacgaaattattagtgccatctactccaaagaattgtcattaaagaatagtggaaagttatcaagaacaaatggagaagtatactacaccagaggaagacaaccacaaaggactaatcatcaccattacaagagcaaatagtaactccaagaataggagatcaaactcaaaagactcaaacaaagatggaaaaggatgttatacatgtggaaaagtagggcactataaaaggaattgttacttcaacgagaacaataaatcaaagtcagaaatacaagaaaaactactcaaatcagtccaataatagatcggaatcacaagactcagccaactatggtgatgactatgatttagggaaagtcctacttgctgcagcatcagctccaaatgaacattggatcttggattcaggctgtacatttctcatgaactacaacgaagaattgctaaggaaattcagaactacacatggtgggaaagtaattcttggtgacagcaacacatgtgcagtagaaggcttaggagatatccatttcagaatgtttgatgaagctattagaattctaaagaatgtcaggtatctacctaacctaactaaaaacttaatttctgttggtacacttgatgatgtagggtattcaaacaagattgagaatggagttatgaagattaccaaaggttcaatggtgatgataaaaggagagaaaagaaatggtctacactatttgattggagagactgtgacaggtgaagtgtaatatcccgataagtcta

SEQ ID NO: 81336 - DNA, 2127 bp, Cannabis sativa
ttgattagtaatcctgtttaggggattagggtttcataagtattttaggtagtgtgcctaattatttagggtgttacataccaggtgtaattcaataaaaaaaataaccagatcttatcaaaaaaataaaagaaaaaaataataaccaaatcaataacaataacaataaccatatattatactcattaaaataatgccaacaacaacaataacaataggctgagttggagagaaaaatagaaagaaaaaaaattaaaaaaatagtgagaaccatcgtcgattggccagcgggctttgcatctattgagctagagagagggagttagatagatttaaggagagatcgattgtcaagaggctgagatggagagaaaaccaaaaaaaaaaaaaattagagagagagatgggtatatagaaaaaaaggagagaggagaggagagggatgcaccagagggagttgaggtcggtggtcatccctatatgtgtgacttggctgccgagacagaaagaaatcagggagggggctgggaatgcttagaggcgggggcctaaaagtgaaatggatgtgttttagtttaggttttcttgtggggtttgagtaagaaaagtaaaaaaaaaaaacatatatataaatatatatatttattatgggttattaatgggttttaggcaagtacggcagttctaaaaatctattattttccaaacctgaatccagcctgaatagtgcccaggtttcacctgaacttgcccattattttttaaaacccattttcttgtggttttctgggtttgggtcgactgggtttcccaagtgggtgggttttttgggtacaaatgtctaccctactttttatatctgttcaaacaaaatttcatcatatatgagtttttgtaaggaaactaattaatgaattctcttttaagaccttttgagctcagttttgagtgtcatttatccctataaatattacctgacctatagcagaaggttaaactctttcacttcttaatttcttatatttttagaagagtattttttgtaaaggatagttgttctgctattcctatgtgagtgtgtgtctatgtgattacttttatgtgaagtaatttccaaagtgtagaacaaccttcaggaaaaagttcatctaagtcttgcatcgagaggaagcaagcactgctatcttcaggagaagatttctataagtcttgcatcgggaggaagcaagcactgttaccttcgaaaaaaaatttctacaggttttgcatcaggaggaagcaagcactcatcaagtaatttgaagagagttcaaaccttggtgtcttaaggagattcactcaacaaataggagtacatcaagcttgcgataaaattattagagggggtctaagttttgtttaagtcaattactttgtacttgttgaaatttgactaatgaatcttatttctaggcgtggcctgtggattagatgcaatctgtaaagattattgataacgcatataaaatagcgtgtgtcattttaatttctacaatattattcttatctattaggttcagtttctaatagaatatactttgatttagttcaaacaattttacaaggatttcattaattaaattatttgttaatttcacttggtaatcataaaacaaaatttcagtatatatagtgatttaatggccattatgttagaacattaaattgctcatttgtaggagtgttcatataatttgtaatctgtgattctaaactccaaccaatctggaccaaactattagagaccgaaccaaatgaatccgttgtgaatggtttggtcaatctggaccgtttacaattctctgattcaatcacgattttagaattatcagtagcgtttcaaatcaaatcaatctgtgtaattattttatatatacttaatatatttttttttaatggaatgttgatatttgggagcaatttttggtagaatattgatattgacttaatattattctgagaatattttttatattattttatttatgtattataaacttattaaaaataaaaaaattactaaaaaatgaatagttactatataataaatatagaacaattacaaaatacaaaccatgattttgaact

SEQ ID NO: 81337 - DNA, 1536 bp, Cannabis sativa
caagcttccacaaccagatgaagatcatgaggattacgacagctggtggaggtgcaacaacacagtgatttcatggattcttcatgctatttctcaggaggagatgagcagaagccagaaggttctaatggagaaaaagaattggttgctggtttgtcaagttcacagtgtcagaaattgatggcaatgctggctcaaaaggttgctgacaatgctgctacaccagaaccttcatcagatcagccaattgtttctcacttttctggtatgaaatctgttactccttcttctaattggattatagatactggagctacacatcatgcatgtttcaatctttctttatttcagaatgttcataccaattccaatctgaaaactgttcttttacctactggtgtgcatgttaaagtggatagcataggagcagtccttttagggcctgacttagtccttaaaaatgttctttatgttcccactttcagatgcaatttattatctattaatgctttaacagccactactaattgcacattctttttttctcatggaaaatgtataattcaggacacgtactatgaagagcaaggtgattgggatgggtaaaaagtgtggtgatctttatttggtgagttgtaatctgttgaataatgagcagtcaagttttgtatcttcttctatatctgattctaccatttctaatgtatggcactacaggttaggccatctatcatgtgtaaaaattcatcctttgaataaagtcttgaactttcattctcattctaattcttcttttcattggtctatttgccactatgctaaacaaaaaaggtttccttttgtatccaatcataacattgctgagaattgttttgatctcattcatgttgatatatggggaccttttaacactttgacaactgagggttttaaatatttcattactattgttgatgattgttcaagatatacttggatacatctcatcaaacagaaatctgaagctcaagttgttattcctcaatttattaggctggttcaaaatcagtttaataagaccataaaaggggtaaggtctgataatgcaaaagaactacggttcaaaactttgtttggtgagcttgggattatgcattatcatcttgtgttcaaagacctcaacaaaattcagttgttgaaagaaaacatcagcatttactcaatgtggctagagctcttctttttcaatcctatgttcctttagtttattggggggagtgtgtgtcaactgctgcataccttattaataggacaccaacacccaatctaaagaacaaatcaccttttcacatacttcattccaaatcacctgcttatgagcatttaaaagcctttggttgtttagcttatgcctctactttgagtcaatctaggtctaaatttactcctagatcagctccatgtatttttcttggataccctattggtatgaaggcatataagcttcttgatttgaacacaaaccaggtttttgtctcaagggatgtttgtttttat

SEQ ID NO: 81338 - DNA, 1229 bp, Cannabis sativa
  modified_base (30)..(49): a, c, t, g, unknown or other
gcgacaacagaaaatgcaatggatggctannnnnnnnnnnnnnnnnnnnctagaaccttatttcttagtgggtcgtgtattagaggaaataaaataccagattttagcggggttatggtttttgaccattttacccctagacattattttacttatgttgtaagtaaaggggcaatttagtaatttggtatttgggggaaataagtggcagccttgaggagtgacacctagcaaccaaaattttagcaagagattaatgtgattaatctcttttcactttaggaaattagagaaaaaatcaagaaaataaggactctctccctctttttcttctctctcttcgaaccagccaaagacatggggaattgctgttgattcttggtgtttttaggaaggaatttagagaaaatcaagctaaggtaaccctagaaccatcgttttgtacttttgaagcttttaagtttggtttgagtatgtgatttttagttttaggggctagtaggtttaaaggttgtgtaatttgttttctaagctgattttgagttgattctaagtcatggatattggttttgctgtgttgtgatgaaattgagcaagtttgagttttgaaactcaaacttaggtctctaatggcatgttgtgattcagtgtgtttttttgagtgttattggttgagatatgttgtatataccctgtttaggtactttggaaggtttggtagcatttggttgagttttaagctggatttaagttttttggggaagactggtacaaactggttaaccaatttaccagtacctgtaaaactggttaaccagttttggcaggttccccgaacaacccattttctcaattctggttcatttcagtgccttagttgggtgtttccctgtttcgtaagatagtatagtccctagtgattataattgaaccttgggttgcaggttcgggttttccagattagggttttggacatgtgatttacccagttttattatgtgattaggacatccatccagcatgagacttttggttcaggtcggccaacacatttgaatctagaaaggagataagaactgtgtataatgtgtaatatgaatatgcaaatgtatgtatatgttaagtgtatatgcatgcttatatttttgtaacactaccaacacttctacagttatggtacagagtgcattggtatagtgtatattgttaaggagtacattacggtgata

SEQ ID NO: 81339 - DNA, 1502 bp, Cannabis sativa
  modified_base (721)..(725): a, c, t, g, unknown or other
tatttacaacaaaacacccactcaactaaaaataaatcataattagttttattaattaggtcattaattaatattaattagtctaattcaaatgatattagcattacgtgacaattgactactactccctttcattgttacacgtgatgttgtactatatatgtaacatttataaatagagaattaagactaaaaaaaacaccttttatcttgttattgatataattaaatattaaatcttatataattttaaaaaataactttttattacaaaagtaattacatttagtgataattttttagtctaattataaaaattttatcattaaatatgactttttaccaccacaaaaaattaattgtgactataaaaattatcacaatatagttttagtcacaacaaatcgtaatttttattactaatacttttagatacgaaccttttagttacaacataagaataataatttataattagtaacaatattataacttttagttatagattttgttgtgactaggcacaaattttattgtgactaaaaatataatttattataatattaaaaaaatattgctaactaattataaagcacttataaaaaaaaaaaaaaacatcatttatacttaatagaaatgctcaaatacttgtagtatgtaatttcatgtaattaatcacatattggttttttaaatggcaattattattattattattatnnnnnttattattattattttatatataaagggtcaagaagtgagagtctagtgtatggtgtttgatttaactcatttaaaatttggataggcttttgtagtttgtaccatccttataggttatgtcaatagaagatattcatggccaaaatataattaatgaacatgattacccatgccacacatatatatgccactccaccaatccaaaataaatgatattgtagtgacagagtttttgacattgatataatttaatatccaatatttgcatatttaaataaaatttatgaaaagaaaaatcataaaaaaaaaatgtataaggttctattaagtgatgttgtaataattttagacccaattttaaatgataacttaattattgagttaaattaataatgtttagtgtcccattattttttttaaaatttatgggttttacactcatcatttgtgaaaatatggacaagattgatatacctttccaaatttgtatggaatttttttaaaaaaaaatatgggaaaaataatttaattgagagtaaaattatggataaattaacccatctttgtacaaaaatatagaaaagcaaaattataaaattaaaaattctacagaaaaagccatatttttgcgaactaattattaaacaaatctcccataacaatactaaaatttaaaaagatattcctatctaattataccaactcacaataaaaagcaaatagtgtttttcatttaacctatatataataatataataaaagttaattatattttc

SEQ ID NO: 81340 - DNA, 1545 bp, Cannabis sativa
  modified_base (547)..(557): a, c, t, g, unknown or other
gatctggaggcatggttgtgaggatttgagaattgagattcagaggtttgggggaaggatttcaatggcggaattttgagaattttggtgcttcgtttttatttttggtatttagaaactgattttgttttcctttatttatttatttttgaataattatttattttagggaatatacttctttcttttggatcctttggtaatcatattaatttaaataataataataataaaaagtaaataccatcttagaatatgtatttttcaaaatgttataagtaggatttgaattaattttttgtcaaaataaaatttaataataattttatctaaagggattatgacaaaattatttatattttctgtatctgttcgtgctaggaattgtctttaaattgattatattaaaaaaaaattgtcaaaaattaagctagtgtattttatcatttaacaaaacagagaattcaattggtaacttggttgttaaatattaagtaaatggtcacatgccactctttggtcaaagtcattaaattttttatttttnnnnnnnnnnnaaatagtttaaatataccaataaaaaaatgacataataacttaacatttaacgatcaagtatgaataattgctttgtgatagttagcattatttttaatttcctactctagttttatttttgcattttaaattattattattttttattttacgatttacaaaaatttacatatcaatttacataaatataatttctccttattttttttgtacaagtgatttttacgtaaacgtgatgattatatctatcatttttttaaatagcttatataatagaaatttcatccgtatattgataacatatagaacaataattatgaacacgcataaatatccataaatatatttatatattttatttatttataataaaaattatgcatataaaatctcaaatcgaaataattttcttttaattcatttttaattaaaataattaatatttatggtaacttagatataatttgcaaacactcattaaatatataattaccaaaaaaatctgtataacaaattatacataaactaataattatataattaaaccaaaaaccgacaaaaaaaaatcccttatataacttaaaagataaatctggtaactgataaattacaatataaaaaatctcatacaaaacctaatacgaaagtgatttatttttagttaaaaatgttatataaacctaatcctaataggtttattcgaactttttaccattaaaccctagtataaaattatatatgtatatacgtatacgtcaaaaaaaaaatatttaaatttaaatggtaggtttcctcttctacttaggatagtggtctaactatatatataaacttatgaacttattactgtagctgataagaagaaaaaataataacgtcagtgttctgtaaacagtgttctgtaaacagtaaattatagaaaatgattatgaagaagagaggaagagaagaagaagaaaagagttcgttaggaaagaaacaaagaag

SEQ ID NO: 81341 - DNA, 1115 bp, Cannabis sativa
cggacaatgaagtcggtccagatggctttcaaacatcctcaatcacccaacgtgaacgcctcccgaaatcccatcgaagggtggcgacgatggatgattataaacatttaaaatcaactaacgtaaccacctagttgaaaaagaaccgatcaatagtgagaaaactagagagatttcaatagacgagggcgttgctggtgaggtgagggaatagttagagagatttaagtctgggtattttttcatacaagcagagagatgctcatctttttttttttcttcttcttttagagtatgaatgttttagtaggtaggcaaggtagaagatgaagaagaaagcaaaatcatttttctaattttaaattaattttttttaatttttttttattttatattatttttattaaaattataatttggaccaataaaaaattaacatgtgacattttattagcatctaacgaatcaattagaaaaataactaatatacttataaaaaaaaataatcttgaaaactattatcgtcaatttacaaggttagatacttatctgaatcaaacataaattttttgacatttaagctacaatttttgtttcacagcaagtgaagttaggatgaaagttttaatgcaatgatttcttaggatttcacaatatagtgattttttatcagcaagtgttgaaagttttaaattattttatcactatatatataatttaaataaaagaggtgttctgcaacaacacaaatactgtaaatagaaataaaattttagtctcttttgttgaagctaaaaggcacaccaaacaattgagaattgacaatgctaaaacaagtcttgattgaggaacaccatgggaaagaacaagaaagcactaatattcttaattaggtcttatatattatcttatacataattaacaagtactttgtctaagtcctatagctaattaaagcacttacagcagcagggttgattcgccgagaaatggtagcatttagcaaagtgttatctgtatcggtttctttggtaaccaattcaaagagacaagaatctcccggctgcaaatggttctcctttacaaatttaggccatccaccacaaaaaaacagt

SEQ ID NO: 81342 - DNA, 1100 bp, Cannabis sativa
tagggcacaaaacccaacatccccaacatgccattaatttttcatcttttcaaatcctatcgtcgttcacttcccacgagaagcgcgcttgagcataacgtgtaggctccatgactccactaaatggacaccacgtttcagccaaatgagtgcagtaccacataacatatcaacccatcagttatttgaagtaatacagaagacttctcccacatttcaacacatgactggcatgtcaggatagtgaattaagcatctggaaggaagctgcaagctctaaacacttgtgagtcctgagactttaggggtaaatgttattcgtattctcaaatgtctcttatgtagcaatcacagaaaggtgccacatcaggttatttacaattaatattcatcttcagcttattaacttaatagaagaagttatattctaggactaagtcgaaggttctccatattggcaagggcgcaaaggattctaggactcccactacgcatccgctactaagaaagatcagagtcccctgaagtcatgacgatccctgaagggtgttaggttagtgcgatttgggaaagatatgtgacctaatgattctagaacatatttggttgtttcttatccaaagctcaaggcaacatttactatcttctaacacagaatttgatcttgtccccaacgccagaccattgtagtgcgcgtacgtgtgtctgaagccttctttttgtccaaccacttgtccagacaataactttgcaaggtgaaacctttgggcaacacttgtcctcattctcacgaaatgccttacagtagtcgtacaccacccaatgagaaatcttccaaccagccaatggttagatcaccatgttgtatgttagtccttgtggcgcgatgagtacaaaattcctaggtaagtgaagggtatgtccttacccacctgtgtgcctataaatacgctgactttttacgtacaaatggtgaacaattttcatacttacaaaacctctactaaaattcttactagctttcgtctttttcaataaaaacgatgagaatgcaaagctagggtttatattaaataagcttgtaatatccaaacaatcga

SEQ ID NO: 81343 - DNA, 550 bp, Cannabis sativa
caatagctttcgccctcgcctccagtaagtatgtgctttctcacagtacataaaatctgcagaccagcccaagcatcataaacaacattatagagaagtatcaaatcaataactcatgcatgtgttgcatcttcattttttcaaccaatcgctttggccctcacctccatttcgtcatgagttgcatctttgacagataaaatgtcatagtgagtcttcttgatgttgttggttctgctctggtcaaataacataattgttgcttatttttttcaacttttaatagaaaatgcacatagtaatgaaccatttagaaaaaaatacagaaattcacaaaaaggtgcagatgctaacaatgattaatcaatatcgaaaaaaaaaaaaagaattatggaaacaaatataacatcaaacccaatccccagtagagtttgaggatgaagaaagttagttattttttcatcactatgttaggactgtaaggccctaagataagtatggtgtgctagaatataataaatagaaaagtatatgagtctttaggagggta

SEQ ID NO: 81344 - DNA, 1883 bp, Cannabis sativa
tgctaaggtgaaaatgcaggttggggcgtgggtgtcgcacgcaaacctcatggtggtatcactagacgatttcgagatgattctaggcatataatttttgagtgcagccaaggcaatggttccaccgcacctgcgtggtgtgatgatctgtgacgaagagtgtccgtgcttcgtggaggcactaccttctgtccagagtcatggaaaagacgttgagttggcgacagcaaaacagttcgggaactccataagaaagaaggggaatcaatcttatgtggcaacgctagtggaaataaagccaggcgagatggtagaggtgcccgatccatttgctgagttgctgagggaatttgccgacacaatgcctgatgaattaccgaaagaactccctcccaggagggtgattgatcacagaatcgagttggaaccaggggcggttttgccggctaaagctccatacaagatgggatcacgtgagttagaggaactcaggaggcaattaaacgagatggtggatagtgggtttattcagccatccaaagccccctacgatgccccagttttattccaaaagaaggcagatggttctttgcggatgtgtgtggactatcgcgcattgaacaaggtgacggtcaagaacaaatacccagttccaaatgctgcggatttgttcgataggcttacgaaggcgtcctacttcactaagttggatctccggttaggatattggcaggttcgcatagcagtgtgggacgaatctgagacaacttgtgtgacaaggtacgtgtcttttgaattccttgtgatgccttttggtctaactaatgcaccggctacattttgcaatcttatgaatgaagtcttgtacgagtatttggatcgattcgttgttgtatatctggatgatatcgtgatatatagtaattcattggaagagcactcgctacatctgagggaggtgttagccaagttgcgaaaagagaagctgtacatcaagaaggaaaaatgcgagttctgtagacaagaagtaaaattcttgggccattgggttggtcaaggcaaactgagaatggatgaaggcaaagttaaggcgatcatggagtggcccgttccaaagaaggtggctgagttgcagtcgttccttgggctggctaactactatagaaagttcatcaaggggtactctaaggatgtgagtgcattgacggacttactcaagaaggaccagaaatcaaactccgccaaatactctggccaatgagcctgctttggagttaactttttctgagacttgaaataagtattggcaatattgtcggtcaccaccgtaaatttcgtacccagcaaatagtgcctccaaacatccaaacaatgcaccacaacgaccatctccttctcgtgggccgagtaactttgctgagcgtccttcaactttcgactctcgaaagcaattggatgcccatcttgcactagtactcccccgagtgcacggtcacttgtcttcatgaaatttcttcaggaaactcatatgaaaagtttgatgtaccttgaagtgctctggcagcttcaatttgtatgcgaccgcaccaattttctgaacaatctcgaagggaccatcacacttctggactagccctttgtggtagcgtttgtcagtgattttcttccaaatctggggtgtaagcttcagcatcactttgtccccaactgacatttctaagtctcgcaatgcactcactttcttagggtaccccttgatgaactttctatagtagttagccagcccaaggaacgaccgcaactcagccaccttctttggaacgggccactccataatcgccttaactttgccttcatcaattctcagtttgccttgaccaacc

SEQ ID NO: 81345 - DNA, 1669 bp, Cannabis sativa
tctcctaagactaagaaaataaaatttttcgtataaaatgatacaaaattatcattgaaataatttgaaaagttagaagtcataacttttttttgttcattgtaataaaatgattataacttatattacaattttgttgcaatcgtaccctttttttgttgttaaatgtcaattaagttcgttaagtaccagctcaaaaatacatgatatatttctttaacttattgaatatataatccaataatatgtcgtcacgtgtttctgaaatgacactaatatttgtattggtactttggctagccttcacttgaattctcttactataaaaaagaaaaaaaaatactcaattttgatcaaagcatccttcaattcaattggatttggtatcaactagaacacaaatatatgtaaccatacattcaaataaatttcaaataattaaagtatgatctaagcactttgttatttatttattcgtataaagaggagaacatgtagatctttttggttactttagttaaaacacaatatgatatagcttatggtattttgaaaaggaaaagaataagtaaatatcccatggacatgaatgattagagcactcacaataatattttcaaaatagcttaaaaggtaaaatatgaagaatatgtgttaaaattatactccatcaagtgagctaaaatagctcaaaattttatattatgaacactgttgtatatatgggcgtgactttttgacacaacacaaaacttacacaagtccagaaagcacgagcatgattaggcacgaaaaaatatgggtttaggtacgacatgatacgatgctataaattggcatgacacaacatgaaaaatatatctttaaacacgacacgaaaaatacgaaggcacgacaggtaagcacaaataaactaacccaaaaagtacaatacgcgataagcctaaaaagcatgtcacgatatattaacaaatcatataatttattattattaataataataagatacaaatttattaattaaaaataataataaaacttaaatataataatgaatataattctataattaaaattattaagatatgaataattaagattatatattaatttatttatagagtgtgctattaaaatttgagtatttataagtaaatatttaaattctaatattaataatttttttatataatgatttagtaaaatattgttcaaaatttatataaatataagtaaagttataaaatctatatatacttcaataattgtacaaaaaaaatgaaaaaaattaaagtatgaatttaagtccagatatgaaatgggctagtctgttttaaaaatatgggctggcacgagcaaagcacgacacgaaaatatcggtcttataggctgtgtcgttcctaccctttaaaatattggtacgatacgacacaattcatgtggcacggcacgacacttcttattttttgaaaagtacgaataaatatgaattgtgtcagtacgacacgctcgaacttacaatactaattacgaatagtgattctctacatatagacaactactattaattcttcaaataatattttaaaaacctctttctattttctttttatttttgtcatttaatattttttatatatgagtaaaatatattataaacataatattt

SEQ ID NO: 81346 - DNA, 1136 bp, Cannabis sativa
tgaaatgatgttttttcttgaaatactgaaccgccaaaatgaagcatgcattttctatcaaaaggaaaaatacgattgtaccctccattaattaaaagtacttttcaattttaaaaatcactttcaaggggataattattatacccatatttcgagcaagaaatatggttattacatgtatgaagaggctggaaaataaaccagcttgaattataaagaaataaatacgttcaataaactagcctcgaaaaataaaattggtagaaatatttgaactcatcctttcaaagataaggatgagccgtgaataacatttaccatttcgtaagactagcaatatgaacaattaaagtcaatctcgagatacacagagtatactacagaactacaattagttggaaagggtagataatgagttttttaagagcttacaacttattgacccacatattcgtgagtatgttgaaagattaagggatatacgcacaatgtaactcatcttgcatatgatgacagtacctcgcatagatatattttctccctcaacatcacagaagaacgtgagaagcacttcctaattttatacttaggcataaaaaccaacttcaaagtaaagctttagaagatggtcatttgtactgcgaggtgaagaggcgtagtcagcataaaccacttatagataaagacaagagtagttatagcgattatttatttttatcccatgtgttataaatatgaaaggcgatgattatacacgtttcatgaacgattattaggataagattcccagggaataactgtcaccctaaaactcctataaataaggacagaacctaggggaaaaaggacaaccaaattcagaaatagagagaataattcaaaaattatatcctgtattctgtaaatattttgtgaaatctcagaaataagatggactcgtagagtatgacgagttaacttcaaaactacgttaaaaaccttcttgttatttatatacattatcattattatctattattattctagaggttatttattatattaaaagatgttagttcatatcgatctaatcatgcataatcaaattatatacaatacctttactaatgttgatctacatatgtgatctgaatcaa

SEQ ID NO: 81347 - DNA, 790 bp, Cannabis sativa
actttaaattttaaaaaagaaaagaatactattgtgttgaagatcattaaaaggtcataccattaccaactatcaatatcatcattagatgtcaccataaatttccaaccttttgagttttatttgagtcagctgttactatctcttggtgggattattgaaacttgtaaagctactgtaacccttaaagcattttgctttctaccaagctaatcagtgtgctgatggttaatttatagggggtttgttaaaactttgaccatttatattaatggataaaatcaaaatgtttgtcattcgatgttgtattggtagtttttcattctgcaaaattgaaggaataatctatagactatagtatttactaaattaaacatgtggaactaaaataaaccactcacattttctttaagacttactttgtttcacaaatacaaatcactaagtagtatcaaaacaatatcacaaaatcacggaagttaatgggaattggccgctatgttacttcattaaatggttcatgatgactcataagcaataataattaatatgcaatggctgagttggcttatagaaaaagtgggaacaaggtgtgtcacaacggctatggtcagtatcaaaaataaaaaagaaagatctgataggtggaactaattggacagcttgatcatccacagaattaagaaaggaatcccaactggttgataaaataaaccctgtcatatataaatatttttttttaacaaaaaaaaaaacctatgtacttatacaactggagattaaaataaat

SEQ ID NO: 81348 - DNA, 1665 bp, Cannabis sativa
aaaagaacaaaaaatctttatccttatgctaaaaaaaatcaacatacttaggcccctcctaagactaagggctggttccgccactgcataccactttatttttatcactttctgaaataaatacataattattctacaaacatttcaggtatgcaacgtgacaaagcatgactaacactatttatatatacataggtacctgaattctatatataactacggtaacatgaattgtcaggtgttgcaaacgtattaggtaagatgcttaaggccacgtcaagggcttctgaaattgaatagtgatgctggtttgaacaaattcactcaacggtcttgcatgggaattattattctgcgatatactgatggtaacgtcaaggttttttgaaagttgtggttgagtctgatagctctaatgttgttaatcctgttaattattaagatgataactcttatcttggctgtatgataagtgatattattattttctgtacgtccgttgttctctcattctctcattgtcctaaaattactaatcgtacatgctagctctttttttagatgatcataatgtatggtggccacttggctactctcattgtattcttccgtctttttgcaagcgaacgatcatgatcaatatataaatttataatttgacattcttttcccatttcaggataaggtgttaaaaataatttgattaattggaataataaattaaataataagattattttataattggtttggttatgtataagaatattagttagttagttattattaatcaaattacattgttaatttggttgaacacatgaatatgacaaatattgtaaaaaattatataaaaatataaatatattaaatctatgatattaaggttgaaggcaatatttggaacccataatttttttaaaaaagtttttaagattttgaaagtatttaaattacctcataaaaggttaatcttttcatagtaatagataaataaggttccatctcaaaattaattggctataagaggagtagcttattcatcttatatatcacaatttatttctacttattaacaaatgtgggactaactcttaatactatcctctaaatagaaaaaactgacaaacatgagaatataaaatattgctattcgtattaaaagactacctaccaaacagccctcccaggtttttatggcattttttcatttagtcgaagatctagtgtttatgatactcgtccacacataacataaaaaaatatagatatatatatatataaaaaaaaaaaaaacaatactgtattttttctatgcaagaaacaatatagtattaacattagatatttatcaatattatactctgctctattgattaccaaaatgttcagctagataatcagaagatcaatattaagttgaagaaaaaaacagtaggccatatgattaaattgaatacgagatcattcagataaacaaaacgagtgaggttttagtgaaaatgatgatcaaattgctcaccataatattttgagtagtacgccatatgaaagtatatcgaacgagagcttcagtacgtaatatgctaattaagctacaacagtcacagggcaactctcctttggcaagtatatatatgtgattatatatgaccctaatgatat

SEQ ID NO: 81349 - DNA, 1999 bp, Cannabis sativa
cgtgaatgaatgtaacacttgcatagacatataatgccaaaataataacaacaacaataataataataaggctttcccagttggatctccaactagccctatcaagatttttcttttggaaggaacctatatatatttgaagattcaaaaagcacaaaaaaccaaactatgtactatttgtacattcgagcttttgatgatcacaccaactaattaggctatcaatgtttttttttaatgcaaaatctcactttttgttaaaggatttgtgttcgtgtgtcaactatttttatgtacaccatgattttatatccaacattttgttagggtgttttttttggtttctagcaaaattttgtttattattttttttaggggaagaaatttattcaagcaaatagagagccactgcaactgaatagaaaagtccaattcaaaaaaaaaaagtattaacaaaagggagaatcccattgcagacagctgaagctttgatatccaaaccaaatttagttaaactaatgagccaagtaattacgttttctaaaatgaaaacaaaaatcctaattaaaaagtctgagttgtgtatgactcaaggaacaaatataacaaaatatataacaccatcaaaatagagcagtcccagaatttttccctaaaattacactgcctgatggaaacgtcctggtgaaaactcttccagatgaattaatggccataaaaaatggtctattgcatgcaaagcagctcgagctctcaaattttgttaggttgtgcatagtgatttccaaatatgtaatttgaggctagtactattaaaaacactattagccgggtttggttagaaaaatgaaaacataacaataaaaattaataactgagagtagaaataaaaatagaatagaattaaatttagaatgtatagaaaaattaataaaaaattgttaaaatttttatcatctttcattaaaatagtgattcttttcatttcaaaataaaataataattttactaaaataataaaaaaaataaaatcattttaatattttaaaatttaaccaaaaaaaataaaaaaatattttattttcattatatttcatttcattacttccaactaaactaaaatgatgattttaatatattttattatttcattatatttgattttaatattttgcttttgctagagttgctatattccaccctgatcgtcgttttaatttagacaatatttttattagaattgttactttgttgataactgatttaatcgtttaataaaatgatggttttatttaaaaaaaaataaaatcaaatcacctaaattcttaccaccattataatttatattacacatctggctgagattcagaggatcacaaatagacaaaaagggtttgtgtgcgtataaaccgggatccattggtcccataagatttagtaaaagaatttatttatttttattatattggtaataatatttttgcaatgaggtttattatttttgtacaataagcaatatgggtgaattggaaaagccaaagggcgtatgacaagtggagtgtccaagtcatggcagacgtggcgtccttatctgattaccctctcaaacatgtcacattctcacccttctctcttcaacttgcggtctaaactacaaacaaaatttatggctttttctttattattatttttaaaaataataaatgaaaaaaatgaaagtgagcttggaaagaagaagaagagagagaagagagagagagagaagagagagagagctagaaattgacttggctctgttcctcatccacggggagtcattttcagtagcattaaatttatgagacatttgtaatttcacggaactttgaagatgagtaataataataatattaataaagcttagtaggaaaattatcattctaaatagaaaaaaatagggtacttttatagtgtaatccttatagatgagtgtagaccgactcaagcggtttgagtaggg

SEQ ID NO: 81350 - DNA, 589 bp, Cannabis sativa
gtacacgggaaaagaagatcccctcgtacacttgaaatgctctgagatctaaacagatttccaacaaatatttagagatgtgtgatggaaataatttcggtaactctggccgaaatatcccaacagtagtatttcaagctggccccaagaagattcaattcttgggaagaattctcctaagagttttatatccagttctccatctcaagactactatcttcgagattggaggatcttatcgagataaagtaaagacaagacaaaccttggaaagactatatttaaaggttcgtggctgagccaccaaggtcaaaagcctaatagaagaaggccgatatacaaccacactcgaaggcatcttactgttgagtaaattctggaaagatattaaaaggatctcaacgagcaacatgaaggagttccttgagcgagctgatggcttcataaaattagaagatgctttccggcaagaccagacaagagggtaagtcaatgtcaaacaaacacagggcatcatagggccctaagtactattcgacatgctaactagtgcagacgatctctgttaattgtccaacaatgagagtat

SEQ ID NO: 81351 - DNA, 1519 bp, Cannabis sativa
tttggacatccacataattaataatatttataacaatgataggtttatatgatgcgttttatactgcttaattggcttttttttttttaattaaaaaactttagacgtggcttcacttgggcattcttccacagggactccattcaacaaaaaaagaaaaagaaaagactcatctactgctggcattggcgttttatagctagatttacaagaacatcaaactaatggcttaaaacaaataacaaaaaaaaaataataattaatgaataaaaaaataaataggaaacaaagtataggattgatggattaattgagcccacactatgctctcatggaaggtgtcgaatgtcgattgagctcacacttgcaaattcactgtcaacaaattgagccttgctttttcccaacaatatgaatgaatttagttacacaagcttcaacagaaactggtccgatttctttggtttccaagctgaaaataacccaaccacctgcctatgataaccttccaagatcaataaagcataaaaatctgtaatgggtctgtatagcaactattttcatagaccgcaagatattatccctaacccaaaaaagccagattggttggtaaataagaattagtaatagaaattttcttattatcagttacgccacccatcactgggcacttaaagatttacaaaaacgttagagataatctatcacttacaacattcttaacaaatatggacccatctcttcttcctcttacccgagtcgtaaatctttcctccaccttttccactttgcttattcgcagagagatggtatacaagacttggatggtggcagttgcatgtggaaaatttattacgccatgcaacattattgtaatgcaataaggtctggtcatgtacctacttttgattattttgtgttgatgaagcaccacgtttcctcagcttgttcaagatgcacgccatagcaactttagcgctcaaactaggatgaccacaagacaggcagattacccccccaataagcagcaagccatttgctaccattttctttgatggtctcgttaataatttcttttgctcgacagcacttgatccacaaacagcatttgatgctgcagttacttctgaggacacactaacatcatctctatcttctactccaggtggaacctaattacaagaaagcaacaggaaagtaaacaaaagaaagataatatgttaatatctaaaacactaaacaggcatgagtagggaggatatagaagatggggaagagcagactaaatcagacataaattatgcattctattatttagtttatgatcttttgttattgaattagttaggttaagcatacttgggctttggtatacattttctaattacattaatggtcctcatggttgaaatttcatatcattccgtgattgccttgtacagaccccatatcagatcgacttcagtctaccctcttgtaatctccctatacttgctctattctttctttcaccattcct

SEQ ID NO: 81352 - DNA, 2107 bp, Cannabis sativa
atatatatatatatgtaagtatcatatacagtatacgataataatagtgatgaagatgaaagagatgtgtttatgcttttgagaataaagagattttagaattactttttcattaatgatcattatcccattttatcacatgaaaaagtgaactatgagagttacacttttttttttttttgcttatcttgtcataacaaagagcaaataaattaaagtggaattaaaattatgaaatgagtaacaaaattggaagagcatttttggactaataaaacttgagaagctataaataaaataaattaaatattagtactttgacatgcttggtgtcaaagttagtgaaaatttatttcaagaaagaaataaaatataaagagttagagacaaatatttattttcacatagatgtgtgaaagagtgggggtgatatccgaaaaattatcaagtcaatttggtaaaagaatgaattatatgtgtattttaaaggcatgcttggtacttaaaacttgagtataacttagatatatttggtgtctaaaattagtgcataattttcatatgctttgtatcaaaatttgtgagaaattgatcagattgtgtgaaaaataatcttctataatttaattttcaaatcttaagtacacttaatgagaaaagttgtcactctaaaagttgacactaacttttagttagcaaaatatgcatgtggttataacaaattgcttaatctccgtacaaaattgaagcataaaaattcgagggatgagacctaaactttcttagagttgtactattaagttaaatttataggtaataacaagtcaatatagtgaaaaaatagtactcaacttgtcccatctatgaacgagtactagtgggaaattttggagggttaaaaccgaaaagttttttaatggaaagatgtgtctaaaaagagaagttgtgagacattaaactccatatatatgaactagaggtggtgcttcctcttatgagaattgagagttattctttagatagtccatgaagtggatgttgcacatgagcattaatggtgcacaagcaagatatattgaggtctcaagtgaattctagcaaatgtgtgtattattactagtttgtattaaatgaataatattttaatgctactaaaatcaaaattttaacaaactttgttaaacactaaggttaaattcaatagttgaaagatattttactttatacatcaaagtaaggtctctataaatataaagtgtttgatttattcaattaaagtgaaggtatatgtgagatatttgattgattaaataatgttactgtgataaatttttatctagttattatttaatataatataatattgattaaaatagtgtatgtggagatatatatgtgtatatactattttatggttaatatatatgatatatttgataattatagtttaatcatgaaaaaaaaaataacataaaagggctacaaatctaaaataaaatctgtaactcataaacgtgattaattgtgtaaatatatgagttattacacaaagatattaattatgggattgataatggtgataatatagttgttataaacgttcataattcatttatataattaaaccgagtgtttgaaacattttttgaggaattggcgtgaagaagagttacaaaacacattaaaaatgtgtgctggaaaaccaccaggcgacatgtcgcccaatgagtgacgatatatcgcttgaacatgcaaatggggaaatcacgaagcaacgttacgagttttcgaaactgggatgcagaaatcatcccaggcaacatgttttctggaatacttttttctgaaatacattgcaaaacgttcacctctttatcttgtctactgcctttatttcggctggtaacatcttttggatgtgagtttcaaatgtggtttacttatactatataatggattcattttatgatatactagagtttctattaaaaagagaactttgttagaaatttatagacttgataaatctaaaaaattatttctatttttcttttttaagtgcttgtggtaagtagaaataaaattttagacaaagtgtaaaatcttg

SEQ ID NO: 81353 - DNA, 1745 bp, Cannabis sativa
ttgccacaaaaagagtttgcatgtcgttgttgaatctcttagtaattatatatataataaaaacatataacataaacgacaaaatatgtgatcttattaatctttttttcttaatttaatgtcaagtaagctatttttttaattctctcaaaattcattaaaattagtttttgtataaagccttaatcattgtctactttctaagcactagagtttttttttttttttttgaaggaacaaatgttcattaactaacaactaaaagtgggaaccacaggggggtttccctccccttgacaaaaactggcatctaggctagaaattctagcacttcttgccaaaacatccactgcagttaaaagttcacgcttaacaaaccagaaattacaagagctaaaagttttaacaatatctaaaattgcataagaaagatgagtagtacgccaatccgggatacaaacattttttgcaaaagctgaaattgccacttgacaatccgagaacaggacaatgtctttccaattcagcttggaggcccacgataaaccatatagaatggcttgggtttccgcatcaagagccgacgacgatgtcacacattgagaagagtagaaccaggtattatcttcatgtttgactaaaataaccgcaatccctgccttaccattacaccatgaggcatcagtaaacactgaaaatcttgagcatgtaaggctagtgcagggaaaggactttttggaggaaggaatgctggtgcaaggcctgattatatctgaatattctttgaacatagcactcacacgagaggaagaaataagcccatcaggaattgtaagtttgatccttgatttattcctttgcctccaaatttcccacgaacatgaggcttatggatagggagattagacactaagttttcaataaattgaatgatagagttacccggtatcacctcaactcggatcggaaattcccccagaagccagacaaccttagcaaacggacaatctctgaataagtgaagagatgactcatcgtttcctccacagaaacagcaagctttatccgagatgaaagggagtctgcctttgaaagggaaagcctcattcagaactctccacaaccaggtagcaatgcgaggatgtatactggggtgccaaatccatttccacagcctacacacaggttgaaatcggtctaattgatcaacaatatacgcatttttgacagagaatttaccgttttgcgtgttcttccaaataatctggtcttcatgtgcctgtggtagtctaggaattgagattattttctttcccatctcttcaccgaatatctgcaggacagtttgctgattccactccctgccttcagatacatctgccactgttttcgcagtgtagccccttcctttaatgctccccatgagatctttaaactcattataatttaaccagggaatccaaggaaggtgccaaaaatccacagaacacccagttcccaaaattgtggaaactcctttcaagattgtgcttcttccctggacaatacttttccaaatggccgaatcacagtcctttgattgaactgtccagaagttttgagatgaacaatatttctttgtgagacattcaacccaaattttattttcctgagttgcaataccccatgacagcttggacagaatggcattgttggtgtcttcaaatcgccgtaggccaagtcccccactctcctttggttgacaa

SEQ ID NO: 81354 - DNA, 1792 bp, Cannabis sativa
cctcacttgcgtgagctactacttgactgcgtatacttgcgtagtgtttataattttcgtaacatctattccttaacagatgtgtataactaaaaaaataattaacaggtgcatgaattgggtatcaactaatttcacccttaattatatcttctttgactacatttatttgaaaatttcacataatagataaaaaaaatttgaaaaaaaattataaaaatacatctaaaaaaaattatttttatttttaattttttttatttataaaaatacatctctagtaaaaataataaacattttttttttattgttttataatttatttgtagttgtcatgagattattttttttattttttcttatagttgatttatagtcaaggggcgtacatggttgtttatagtggtcatggcccccctagcatatatgtaattatttatatgtaattctaagttttaaactttagtatatcgtaattggcctccttagcatatatgtaattatatatataattttaagtcttaaaatttagtatattgtaatttaacttttttaataattattacatggtggctccattcaaaaaattaaagtaaaatttgaagaaaataaaatacattttgtctacagtagcactaacaagattatatacaattgttactttggtttattaaaagaatattatataagtgttttaataatatttatttagtttatttgttagttagaccattaccacttcagaatgtttttcaaaaaaattgtttaaaaaaagtggaaatcttgttgattttactattttagcaactattttttatttatttatgtgagtagttagtaaaaattaaaaaaagcaaaaacatttaaatttatgtataaaatagtaacttttattctacacatctagtttctaaagttactacatatcaatctttttctgctatgctatgactatagtgaagattacactttgcaacaaaataaaatatatttttaagtgattatttgttagtgtatatagaaaagaaaaaaaattgctaaaaaaattagcataaattaacttatatataactttcatgatatttaagagagacgtattgtattttaattttaattataatattaataatagattttgaattatttttcacttaatttataatttagtttggctcccgttgaattttgactctggctcctcccctctttatagtctttgtgaagctgattttttgttgttttttagttgtattttttctttttattttttgctaaacaaagtatatttttgtaattaaaaattttaagacgtaaaattataaataacacataaaaaaaagagtattttaaaaaaaatcattttatttaaaaaaatgtcagaaatttacggtaaaaaatgttttgttcttctatagtggcctcaatgtaagagaatgaccagcaaactcatccatgttgcgagcagttctcttggagatggtaagagaatgaccagcaaactcatccatgttgatatcttgcactttcattccaacaggcaatttccactcaaagctgtataagagatttgcaaggccaagctcaaccattgtggttccgatatgaatggcaggacacgcccttcgccctgaaccaaatggcagcatctcgaaatgttgacctttcaaattaatggagttgtccaaaaacctctcagggataaactcttcaagatccttccagcttctggggtcttgtccaattgcccaaacattcacttggagcattgttttggcttaatctcatatccatt

SEQ ID NO: 81355 - DNA, 620 bp, Cannabis sativa
  modified_base (526)..(531): a, c, t, g, unknown or other
ttgaatcaaaccttaagaagaagatagagaaaataaagaatgaaaaaggaatatggcgttaagtttggggttttgagagagagaaaaaaaataattaattggaagaggtaataataaattagcaatctatttaaataattattatttaattcaagaatattataaaaaaaaataattttataaataatgtaatatattttatacattaaccatttataaatacactcatcaatttattagcattatattaaatatttatggctataaaaatatgcctatcataacaataaaattaaggtacttacaataaacatgtcatgtatatttattaaagtttaaagtcatttagacattaattggagtttttttactttaactaaggacagtaaatgactttaatagatagagagttctctaagtataagtataaggagtttattacttttttactaaatatttttaatagtattttaataaaaatacaataattttttcactgttttataaaatatatatatttatatannnnnnaggtgattgttacgtgccaagccacgtagtgttagttttatttaatattttagttttttattttaattaataattaaaatagtataatt

SEQ ID NO: 81356 - DNA, 811 bp, Cannabis sativa
ggtggtattagtattaagatgtaataagatacaaaatagtttattttttttagtcttactccaatcatgcgtattattgtttttttttaaaaaaataaataattaggattgttcatcaaaattgtagtgtggttaatggttttgaattctattccaaactataattattttagtttcatatgttgctattattattacatataattttttttatccaaaaactaatatttattgttagaatttggtattagatgaatgaggttctatctttttgtgttatcaatcttcaacctcaaagtcacttcttaatcacagttcagaaatgatgagtatagtggtatttatagatatgtgatatggatcccaaagtcggtgtctgcaacaactaagttgttacgtcagttgcgacttaacaaacttaacgaactctttgtaacaatatctccacgtcagctcaagataaagctcctccgaatgagaggcatgcttcctgaataaaggaccaaaacatacgctgaagaaacttccgggataagaacaatgacagctgaaggaacaagttgacttgatgatgttgctcatgtttgggattcttttactactattttcttacctcattgtaaaaggtctaaaatctttgtttctcattctttagttaagagggctcttggtttagatgcatttcgtgtttggtggctagacttccctatggatttagttgtttaatttttgtcgcttccttgtatttgagtcttttttaactttgtgctttttaatagtattattatgttcttttttttttttaaaaaaa

SEQ ID NO: 81357 - DNA, 1647 bp, Cannabis sativa
aaaaaaaaaaaaattgaatgaggctggtaaattgactagaacgaggatataaatgatgtgtgaacatatccatcgaatgaatgatcgctttaagttttcttctacacaatactacctataatttaactctttcgggtcaagtttcgaataatatagggatacgattttgtcaagtgatgtaattttacggaaagtattccgtgatgtacggcagacgttagataggaaagttatttgatatgagagttgaagttgatctaagagtaattagggttaaaaaatggtaacgtatcctgagactcatctaatgtaccacggaatacattccgtgaaagtacagacaaaatcgtgtatatatataatattaggtaatttataaagtgcctaatattatagtgatgtgtcgtgttgtgagaagttagtgatttttaatattatttattttaattaaaatatataaaacttaatattaaattatactattcttttcgtaattaattaaagtactgagtgttatttttctcaaaacatactattttaactaaataatatttggactgttttgtaaaaataatttattagatcttttattttgtgaaatgataatttagatactgtattttttaaaataataaaaaatagtactctgaactcgttcatcgaattaaaacttaataataatttaatttagaagtgttatatataactaaactgattataatttttacatctgttgatgttgatgctagaagctagtttcaaattaattatattaaaaaaaattgacaaaaatgaatgaactcaagatactattttgtattatattttaaaaagtacgatttaccaatatttaataaaatatcatcatacaatgagtaacttttaccgatctcacaaaattcaaaatagtactattctagatagatctatactttattaacattcataactagattatatcatcaatcactaacgattttttttttttttaaaaaaaaaacaattataattaataactgtgtattaatgtaatgaatttaaagtttttttaataggattaagttatcgtacataatgagattaagtttatttattttggaaaataagcaaatggattacttctcaaaagagaattacaccctcaacaaatttgcacacagccacacactcatttccctttacaaatatatcccacccaattaataattagaatattattacaacagtatacacttgttatatgtatttttcgtgacattcccgattcaaaattaattatctaagacctaataaaaaaccctaacaaaataagagacctagtatgtacgaaaggatgtcttagccccaagatatttacattcaagagcaaatctctctgaatccggaagggcatctgtaggaattttactattttaacctacaccaacaaaacaattttgctatcagtattcaaggtcaaaattgacctttccttagtctaaatgaacttagaccaaaaacggcagtgctttgatcaacacgacaacaatcgatcctactgttgtttaacttagctagggttagaaagacttttcaagaaaagtctagaacccccaaactcagcaaacacaaccactacaaaaattgctacttttagtgataattttt

SEQ ID NO: 81358 - DNA, 747 bp, Cannabis sativa
acaagagagtgttataacatgtccctcatgatagccacaagaccccacgagtccatggccatagttgtatgttacgaggaggcccaccagcaaagtgacggggcggacttggacccaacgatgaaggaggaggtccgtgtagaacctaacgaagaaattgtagaagtggtgatatccgaacacccgcagaaagtgcttaaaattgagagaggactctacaaggccctcaaacgtgagttaaaacaatatctcaaagggacagcagatgtcttcgcttgggaacatgaaggcatagtggggataagtcccacagtaatgtctcaccacttgaacatagatccacgggcgagacctataaggtagaaaaggtgggtcgttgactcggtggaatatacaacattgaaggaagaggtagacaaactcgacctacattgcttcatactggaagccttctaccctaccaggtgcaaagtttagagagaacgcagaatgaggaggtgttggtaggattcttagacctgttagaagagaagagagaagaagcgcaaatgagggtcgcagtataccaacaaagagtgacctgatactacatcttgagggtgtggatacgtgccttccgagttggggacttagtgttgaggaaagtcctcccgaacactagggatctcgcgacaagagtgctgggggcaaactgcgaggggtcttaccgtatcgcataagtagtccctcctggaacgtacaagttgg

SEQ ID NO: 81359 - DNA, 1728 bp, Cannabis sativa
tggaattatccattacatatattcgatttccaaatcacttgtaaaatgtctgtgagtcacaaaaattatattttaattattttaacactaaataaacatttttagtcagtgcaaacaatttataattataactaaaatattatattttttttagtgataatattgatataaaaattatttgacaaaatttcactagaaaatagtaaatatatatttgagttatgactaattaattaggtcaaacacaaaattaatgaacaccgaattaatacgttaatcagtactttagaaaaataatattgatataataataatatcttaatattttaatattgtttgcatatatattttttctgaattaatggaccttatctaaattcatgtaaattggaaaagaagggtcagcatccaaaataaaaaaaaggaataattttggatgaaaagtgtttaatagatgacccttctttatatggcaaaacttttgtcactatattgaaaaagtagattcaaagttcacataatttaaatgaaagaataatataattttttttatatattatttttacaaacgaataataattaatttcaattgaaaaataataattgttatacttgatgatgcacatatccaactctatataaagggctaacaatggtaaccaattccaccaccaaaaaatttcaatagctcaaagttattaataaacctttcttctttcccaaaagaaaatcatcaccatggcctcaatgcaatgctacaagccaaccaatgagacttgtcagcaaaagtgccttgacaactgttatggccacaataagcacaacgatagtactggatcttactactctggtcattctatgactggacatggccaaggccacaatgcttcccacggtcagggttactaccctggtagccacaccatgaacaaacccaacacatactccacctatggccaagggtatggccaccaacagggccatcacatgatgactgagcagtatggtcactctatgactaagccggccccaggccagtcttatggcatgggtccaacaatgtctcatggtatgggctcaacactgtctcatggcatagacatgatgactcacgctgctcatggcaatacaggccatgctcatggcagtacgggccatgctcatggtcaaagccaccagggctactctgagcatcaatcttacggttcacatggtatgatgatgggggccaatggttgcaagggaaagaagaaagataggagtcacaaaatgatgatgaagcgtcgggactgcaaccgcagtggtgacagtagcgacagtggcagtgacagtgactgcaactaaaggtatatatatttgaaaatacataaaaaagaacatattacatatggatatatgacaccaataaaaacatctcaacataataaattacattctctttcaattagttttagataaaatctcataattattaaatttggttattctaactaatattatttaatttctatatgatttttcttaatttttcagagcttggagatcaaaggatcgatgcgcagtacaagagtttggaaaatatatctaatatgaaataaaaataatcaatgacattatatatatatgtataagtctatttttcatgttagaataaacacttctacgtactgtgcctgtaaagtcgatcatgaataagatatttataatttctagctctatatatgactt

SEQ ID NO: 81360 - DNA, 2820 bp, Cannabis sativa
  modified_base (1902)..(1915): a, c, t, g, unknown or other
  modified_base (2324)..(2333): a, c, t, g, unknown or other
ttgctgttgattttttgttatctgtatcttattttttgttgttttgattttatttagatgttacttttatatagtttttttgttatttttgtgttgttactatgaaaatgtaaaaatataaaaagaaaaacgtaaaatgtaatttttttacgaaaaaaaatatcttatgtaattattccttaaaaaaaatatgtcataaaaaaagtaaagtctttaatttttcctatatgacacttttaatgcttaaaaactttgagtgtttcagtgaataataaaaaagtactaattatgcaaaacatatactttgttatggcaaacaagaaaggcctaaagttattttgtttcaatttgacaaagtgggcaaactctagttaattgtttagaggcccaaaatttattgggtgacaatgaagaagcccatcaaacagtttagtacccataaacccatccaaaaagaaaaaataaaataaaattgaataaaacagagaatctaaagttcatcaaggagttgccataggttcagttcaaagcactagaaaattagaatcaagtagttagtgataatgactgtcataaaaaaaaagagttgatagtgatttgaacaaaaattaacaccatatcattgatctagtgtatatatatgtcccctacatttccggaccttaataggtagtggacaacacaatgataaatagagtgatttttcttaaaaaaaaaatactgaattttaaataaaaatttacaattttactgttacatgaaatttttttttataaaaatactgtctttttataaaacaatcataaaataagaaaacaaaacaattaaaataacagtggacagctaagaaataactgtggaacaacactgaaaacttaacacaatacatagtataaaaaaatacataatatttttgcaaaaaatactttttggaaaaaaaaaaaaaaaatctactccacagtaaaacaggaaaaaaaaaaattcaatatttagtgtgaaaaagcgtgcaaattttccattaggcttccatatttcagcctggtccacataatgaccctttttgttttcttttcgtaatgaattgggctgagctttttaggaccccaatgccactagttcttaaagggtttgggctctatttatttagcattactcagaaaaaaaatgatgctcactcttcaaaactctaccacttgatcaacactactttgttgcccatgttttgaacacaaaatcctgcatgtttttgccaaggaacaatcactatagcagttaaaaaaaaaagaaaaaatctcacttgaatttactatcagccataaattacatgaacgaatatgatattatattatatcatgtcatgactttgctttttgttttttgttttttcatggaatgttaacgagtggtgtgtaaagaatatcgttctgcgctcaataatagagggagaaacttttggctgaggctcttttatataccaactatatgagttttacatggaaaaaaaacaatacgagttttacaacaattttggaggccactcaaatttatgattactcatgactaccattaccatatattatattgggaaatttcatttattatttttaaataaaaaattacaaaaaatacttccctatttataccattctattctaataatatctcactttacctaaaaaaatccttcttatttattttatttcaaaaattaataatacctaaaaaaaacattttctctacatttccctccaccctccagtccaaccctccccccttacttctctctagctccctctctcgtctacccaaaggagtcgctctcgtcctatcattacaaaaatttttactttttgtcacaacaaaatttatgactaaagataaaaaagttgtggctaattatannnnnnnnnnnnnntgttgtgactaaaaagtccgtagttaaaagtattagtcataaaaattacaattgttgtgactaaatgtattttttagaggtgttcgcggtgcgggtggtgcaattttcgaccatttttttaaaccaactcgcacatgcgattttttcaatttctcaaaccgcacccgcatcacgaaactaaaaaaccgcagaaatcgcaccgcaaaaaatagtgcactgcggtgcggttttagcagtttctacggtttagattattaccaaataattaaactatcacaaatacaacaaagcttgagcaacacttgtcaaaaataccataaggattgaaaataaatatgaaaaaaacttttaagtttcaataatacaataattagtgggctttggcttggacattcacatattggacctnnnnnnnnnnaaaaattagtatttttataatatgtagtgcggtgcggtttgaactgtatattaaaaattcaaaaccaaaccgcaccgcaccgcgcggtttagaaaaaatttaaaccgcgaccgcaccgcaaagaaattcaaaccgtatttttggtgtggtgcggtgaggttgtttgatgaacacccctagtatttttagtcacaaaatttgttgtgacaaaaactaaattagtcacaacttgtagctaaatgtcccaaggttagagacgatctttctcaacagttttttgataggttctcgattatttgtcgaaatggtaaatgattttgcgtttgcaaccattcttgacatcttatctacgtgttctccatcgtttgtcaataattttttgatggtgtgtatagttgtctttttaaacttccttgcccatgttatcggtgatttctcaattaattatcgattgtttctcgatgattgattgtctatttttttcaac

SEQ ID NO: 81361 - DNA, 1189 bp, Cannabis sativa
aggggaggtcgagctttttgggaccttgtggtctacaacggttgagatccagaggaagcaccgaaaggcctccaacagtgttagtcgtctttgctcggttgtttttgctatttttggccctttgccttttcttttaaagctcagagatgggttgagatggagggatggttgggtttcacattccctccggcgcagagagcttgttggtggtgggttgactctttctcccctgttggtgtggtatttatggtcctgtttttatattttgttgttgttttatcttagatctatttttagatttaatgttttatgttgttgttttgatttagtttattagtccagtaatgaattttttcttgttagagtagatctgagggtttgtattcttgttttagttctttaccttccatcaatagtagtatggtacttgaaaatgagtatgactacgatggacgtttgtgcctcgattgatcggtctattagccttgttgccatttactcgctcttattggtattgatttgcttttgtttatcattgaactttataatagactttgtcctttgattctttgttgaatgaaaaacttaaattattttgtaaaaaatacttaaaaataataaagtaacattacaaccaaataaatttttaaaaattaatttcacataaatttaatttttgcttcaaattcacttttttcaaaaacaaaatttctgaatcacaaacaaaattgaacctaaataattgtattttatttttttgaaaaaagaaaaaaaatcaaccctgtacaggattagcaaaacagaccagacgcgataatatgactcgaagctcgcacgaagtggctttaggtttgtcttaaatgaattcggactgtgttcgagttgaatcgtttaacccatttaataaacaggttgaatcgtgtttggggttgacacggttaatacaaaactaacccgttaatgacctatttagcagtcataaatgaatcataagcgtgttgatatgtcataacgtgttattagttatcatgtttatataaacaggttacacggatcgtgtcgtgtcaacttgttataaatcgtgttcggtaattattttttggcatgatttttttttttttttaaaaaatgcgtttatttttaggcatgattaataaacatatggaatatatatgggtctcaacataac

SEQ ID NO: 81362 - DNA, 2459 bp, Cannabis sativa
ttcgattgtaattgtaataaatacataatagttagaactatttataataaataattgatatatattatatatgactatatatttaataaaagaaatttacaattgcgtgtgaggttttttattggataaatttaaaaattttatgttatgtttcaactttagaaaatgtttttatatttttatatgtataaaccaattaccgaaaaataaaattaaaaaaaacttaataaaaatagtacaatttattaaaaaaaaaataattataaactctgattaaatagtagtttcgaactaatatttaaaaaaccgttatactaatttaattcaaaaaaatataaaaaaccgaaccaaaccaatctgtcaacacctcttacccctcacccctatactttgctagaaaagctgtgtaattgtgtcatttgccactactactagagagcacgcatctactgagtcgactagccccacactcccaccatacaaatgtgctgttgagcataaatttctagaattttctgttgttaatgcatccaaacacataaatgtcatagtaatggagctaaagggtgtctgtcctatcttcattcatggttcattttcattcttaggaaccaaaactcaaaagcttcattaatggcttctaacaccatttaatacttaattagattcaaaaagaaaaaagaaacgaatatacttcatttccccacattcagtttctaaaaacccaatacaatcatttattcttcaagtacctccaatccacatcataacatagaaacaaagcatcaaaagactctcatttacaaatacttttttcaaaaagtattaacacagctttaccacactaaaatgataaagaaattttattcaaaggcattaccactagcatggttttataagtctgaagcataatgagttttaatggtgtccatgcttgaccacagtaactgggcatgagccattgttcaccacatagttactaacactcccaaggacaaccctgttcaaaacaaacaccaccaaattcaattaatctgaaaaagagagcacctactagactacttatatgatgaaaaaaagtaggaatatatataggtgaacagaactatagttaagaaagtctaaaaaggtatcacatcattgttcaaataaaagcaaattagcacttgattacgtatattatagtcaagtcaactaaaaccacaggctaataaaaagaaaggccacaaaagtacaaagagaatacaaatatgattagttagcgataatctttcatagttactacattaaattatgtaagactcgatacttagatggaccgatagtaataaaaaagtacaaccgtcaacttccgtgtccaaaaacacatgccgaaatatttttttttataaaagtgttcgttatgcttacaacatcattcctctaaaattttgaaaaatttcgaataatttacagtacaaaaaatacttttgaaattttctaaacacacggtaaattggaatatcaaaaactcaattgttatatacaaaatttttcaaaaatttaatttttacatgtaattttagacatagaaatttactacaagattgtaatagaaagtgtaattaacacacttcataaagatattaacacataaaaagtattaagctggtattttttagcatttcttagtttaaaatacggagtgattagtgtaaacttttccaaattattataccttttgagtttgccaaggcctctgttaccaataacaaggcagctcaaaggaatattatcaatagcttcacaaatcttctcacgggcatcaccccaatagatcttcattaacaccacaacctgctccaaatccaactcaaaactctcaacatcacacattcaacatattccaataattaaagggattttcattacctctttctgcctagcaatggtgctaacaatgtcaagtgttgcagggtcaggagttactccatactttttcatggtgtgagcatcacagaactcactcaaaggaattaaagctacaacaaaacactcaaaattttaaatacccattaaacataattccccaaatcaaaccatatagtcccgatctgaattaaaccatcatatacagattatatagattatacatacgtgaaccagtggttgcccaaagctgcatctctccatcttcataattaccctctggacgaacactgatcagaataaggtgatccccatctcggataacgttattgatagtccatttcagggcttctcggctacactcagagaaatccacagccaccccaactcttctgtctccttccatagctttcttcttcttcttcttcttcttccccttttcctttctgggttttgatctaaatcgtctgtaagcaccaaagaagactcaaaaaaacaacgaagacccgtgctcagagctgctgacaatgatcgcacaagagagagagaga

SEQ ID NO: 81363 - DNA, 1432 bp, Cannabis sativa
aaacacaccccgaggtgtctaaaacacatgcatggttgacttgcaccataatgaggtggcacaacttgtaatgacatggcagaagccgaatttggagatgaaaaatggttacatcccttcagtaaaaatgggcataactcactcaattttatctcatggtcatagcccaattctgatattatcagttcaatttgtattgaaaagatattttcaagggagatataagtttatctcaaggtgatagcttaattatgatattatcgagctcaaaattggctcacaagataagctggaaaattttacacaagaatttgtagttctaatatgtgagggccttatggagttatgtgggagctatgtaacatcacttgtggccatataatccttagtattgagatgtgccattccatatggtcactctctccatttacattatttgccaagtaagtaccattataccacatgtacaacttcaagaaagaagccataatgccacataagcgatttcgaggaaaagagaactacccagttttaatataaattcctaaaattgtggaatatttttttatatgtatttattggcatttattaattattattattatgtaatagaatgcataattgttagtgagagactcccacttgtggagagtcacaatctaaccttaagcttatatataaatagttatagacttaggttatgagataataacctagattaatttgaacaattatggttagaatatttataaaaatatctagattaatttttaattttattagtttttaattggcataaaagataataaatatataatattttaataaaaatgataaaattactaattaattaaaatgcatctaatattttgatatcttatcttataaaataaatgataaataaaattaataaactaattaatttcaaattcaaagtataatacaaatgcacctaaaaaataataaaattcaacttttaagtaaaattaatatctaaaataagatattaataataataaaattcaacttctaaatattattaatttagaagtgatatatcagttcaaaattgaaaaatataattttatacaaaattttgaaagttttaggcaattaatcaattaaaaattctttttctaataaaaaatcactttatttttggaatagtgactaactcgcaaccaaggggactgtttaccagccatcttgttcaaaatcaagcctcacgagtagcaccatgcatccagaaaggcctgcaaagtgggaggatctcacacacggaagcacctgatggaccaagaaattttgggctctggagtcattggtcaaagacatgcatgagcttctcggctagatttctagtgcacgcccataccacagccaacaagcctaaaattgatttttgttccaaatttaattccataaatttcat

SEQ ID NO: 81364 - DNA, 1171 bp, Cannabis sativa
ctgtgagattagagaggtggtctttaaattacatcccttgaagttgcctggaccgaatggattatcaggtattttctttagaaaatactagggtattgttggagagcaagtcagtaaaatggggaagaacttcttctccttaggggttctaaacaagcagctaaatcatacatttatttgattaattcccaaagttcttaatgcggatcagtttgagcaattctgtcgtataagtctatataattttgggtataagatcaaatctcgtattttgacggatcggttaaaaagggtgattgatcagttggtttctccttttcaatcggcctttattctggtgcgttggattgcagaatgttctcttatggaccatgaggtgcttcattttatgaaaaataagaaaggaaaagttggggctatggtagttaagacaaacatgaacaaggcttatgaccgattagaatggggattttgtttgtgagtacttcaagcaaatggatttagcattcaagtttttcagctgattatacaatgtgtgttttcaattagcttctcaaatttactcaatggcaccccattggctctcttcaatcctaatcgaggtcttcggcaaggagatccactcttgtcgttcctttttcatcctttatagcgatgtgctttctaaacttattttgagagctgaaagggaatgagatctagttggtgtgcatatttcgaggaatgctagtccaattactcattaactctatgttgatgactctattttcttttgtcaagcctcgacaaggaatgctaaaactctaatgaagtatttacaaaagtacgaacattggtcgggtcaagttgttagcagtagaaatgtggagtggtgctttcccccaacactactcggaggtgccgtgaaaaaattaaggggttacttggtattagttgtattgatccaaaggagaagtaccttagtaaaccattcttctttactgctaagaaaagggaagattatcattttttgaaggaaaaaattctgagcaggttggagggttggaaggccaaacatttgccttaagctggaagaactacctttataagttatgtccttcaaagcattccaaactattttatgtctattgctcaagttcctagcacattatgtgaggaattagattgcttg

SEQ ID NO: 81365 - DNA, 2288 bp, Cannabis sativa
gcaaacccaagcaacagaacacaataattcaaccaaaatcccaatctactattagagctccaactaaagctcttgacactaattctatccaaacactaaaataatcaaccaattgagcttgaataacttagataatcaccagacaacttcagaatataaccttatacaacaaacatcaccacagttccaaatttcataaattcaagcctaaaaaccttatatccacaaaataaaacacaaagaggaaaagtgagagatgctaccttagattgaagcacttcaattcctttgaatttcacaagattaagctgagaaaacccacaccccagctgatcccttggtggttcgaaagaaaggaaagaaggagagaaaggttgagaaaaaatggtaaagttctaggattttctagtcattttcagcaaaagaaaatggttatatctaacctattatcattatatttaattaataggctgagtataactaatggacaaaaagggaataaaagattaattatttttcaagataaataccaatagttttaagaaaaggttttcaagggtgttttggtcatgacaatttatttcaaccaattcctgacactaacgaaacctcactataacaccccaacattaaatccattatataccacagaaaatgcaactctactggcccaacgtctctttccactgcttccaaacacattacagagctacgaggatatcataaataacatttttaacacattgaaattaattaattttcaccaacttacaatatatatatatgaaaatcaaatctcatgcataaaatctaattaaataataattcaaaatattaattttaggcggtctttacaaccatgttctccagactttgatatctaccaaatcatgccctttgaactttgatatgtactaaattatgcccctgaactttcatccatgttagacttttttactaagattagaaaaaagtccttaaatccaataatctcaatagttcatggacattttcaatgaccttaaaagtttaggggacatgatttggtatatgtcaaagttcaggaggcaaaaattctaattagcctattaaaaatgcctctggtcaagggatgtcaatgatgggtgttggcgggtgtctccatttgcgtacagttctctcaaatcagttctctcaaatcatttacttataataacttcatactatagttgctgaaatattaaaagcaaaaatgttaataccactattataacttgggacatctatattactctccaaaatggatattttgatactcttctaattgttttggtattgaggagaattttcgaaaatttgaaggcgattttaaataactccaatatataagattaaggaaaaaaataaaaaaaaaattctcctagagccgatatagtgttttgatacacccaagggtgttttagtataaaaagaattctatagattattcatacatatttatagggacgtgattttttcccgtgatgtacttttacggaatgtatttcttggtacattatatgagtctcatggtacattagatgggtctcagagtacgttattatattttaaccctaattagtcctaaatcaaccccagccctcagatcaaataactctctcatttaacgactgtcgtacatcacagaatacattccgtgaaagtacatcacatgacaaaatcatatccctatatttatatatcgggagcttctaatgtgaacaaattattttgtccttcggatggaaattttgattcgtttatgtacttgtactaaataaaatttgtcaatttaattgtttataaagatttacaattaacactattaattttacttaaaaataatgaatactatatgtgatagcaagaatattgaattagaaaatggaaatgaaattttagacctagtctaatagtattacattttttttcaagaggctaattatgtgagtaggaagggtggttatctagagagatataatgttaatctatatagtcagaatcaattttaatacttttttgagtaatttgcggcataaatacttaagttttatgccgagtagcagataaatacgtaagtcatatttttggcggtaaaaataccttccgtcactagtgtggaacttccgtaagtacctggccgttatgtgccaatttagtgtccacgtgtctttctttgattagcccacgtcatttaattttaaatttttatttgtaaatcaatttaaaaattaaaaataaaacaaaaatagttttaaaataaaataaaa

SEQ ID NO: 81366 - DNA, 2196 bp, Cannabis sativa
tataaatatcatatttatttaaaagtaatattattataatatagtattaaaatttatttatttttattgttattacattgatattttttttttggtattttgacttttttagtgcaaatctatttattttttgattcctattatattcttaaataaaagttctctattttcatcctctataacatattttactaaatcatgacactgttttactctaaaccttggttagcactttttttatggaactatttgtttattggatacaaaaacctattccccttaaatagttagagtttgttgtagatttagtgggggaattttgtgacgtcgtaaatagaataagtatgtgcactataaatttacatttttttacatacatttttgagtaagtacttatttagaatatttccaataatgatcatttgatatttctttaatttgaaattatattttacaaatctatttttgctcatatgtaatacgtaattaaatttgaattttaaaaatcagcattattaaaaatataccgctaaatattaaataatgtgacgacccacttattataatgttcacagttttttttcttgatggaacataagttgggcaagaaaaaaaatggggttaggaaacacctataatggttcatggaattagaaataagcttatgccctctaggaaggttagtttagtataggcaatttgttacgcatccaacattgtcatgggcatatcccaaaataagaaaacacgtaaaagaatatacaattgaattgagttttgatgaaataaaagattttacaagagaaaaaaaccacgaactgcaaagattttaaaaacataattttatgcaacaatgttatttgcctacaactgtgtgatgtgtattatcattttcagcaaggtctcattaattaaaagataaaaatgaagtacttcgtcagcgaaaacaaatttggtcttttaaccttccaaagctttatcttaatcttattctcgtttatataagtgtatgatattgcagatctagaactaatggtaaactaaaatgaaagaaatttagcaactgattgagagacagaatcagaagctttaatcaaacttggatgttcgaactgcaaaactgagggtgagtctataaaaattctctgatacaaacttcaacaaaattcaagcagcaaaattactttccaaaaccataatgaaaaatgtaaagcataaaatccttaattgagatgaaaactaaacagaattatcctaattgaactataatttaaagacaataatctgtaattgctaccgtgaaaatcaagcagtagcagcagcttgggctgccaatctcttcttagcttcttcaaggatagtcaacttgatacccttgcccttgggaagagagatccaaggctttgttcccttaccaatggtaaacacattaccaagacgggtagcaaactcatggccaagagcatcctgaacgtggatggtctcaaaggtacccttatgtttttctcggttcttaataacaccaacacgccctctgttacggccaccagtcaccatgacaacattacccacatcaaacttaatgaaatcagtgatcttgttggcctccaaatccaacttgatggtgtcattagccttgattagagggtcagggtagcggatggttcgtccatcataggtgttaaggtaggggattcccttctgtccaaactgaactgacctcaccttgcagagcttgaactgcaattatataaaaaaaaatcagtctgataagagcacataatagtagtcctaaaatgccaacatcaaatacgaacagaaaattgtataatgactcaataatgcagcacaatataaacttcataaaccccaagaaacaaaaataaatactcaattgtataatagtgcttaatatatggaacaataaaatggcttagtataatgaatttaaatctcaatcacatattacatacgcaggctgcctaattttataaagattccttaaatatcacaaacagtataaaggtaagataacactaacgtacgctgcataacagtaaatatctaatgcaacccatacaatttggtgaaactaaccttagcctcgtcgtccctgactgagtgaaggcgaaaccgacccttggtgtcgtaaagaagacggaagttctcattggtttttgggatggaaacaacatc

SEQ ID NO: 81367 - DNA, 772 bp, Cannabis sativa
caatgctcataatattattattatatatagattgatgaccataggcaaccaaccatgcatattaaactcacaatcaatgtgtgaaaagaatgtcaggcatgggaaaatcctatgttattaatatgctcttaatattattagtactgcttattaatcttgccaccagtttgccccttcatgcacataaaagatttccatcacccccaccttcaccaaaaccaaatctgtggtacagccattatcccttgaagcccatcaacccgcccctccgatttccgaagcaaaagaagccgatgacaagatcatactcagctttatcaccaatatcagtattaaagcccaaggcgcggccaacgccaccgccgtactcagcttcatcaccatccaatgtgctgccaacgctaccaggcccaccgctcaatatgctgtcaccgccaccgccactgcttaagaagtcgatgacaagatcatactcagcttcatcaccaccggcgccctcctagatatatatattatggttttttgttttctttaataaataattcaataattagtaattttgcttctgaattttcaataatattgattttggtccttttctcgtaggttccatctaactattccgtttaaacgattatatgtctttatcaattagcaactttaacccctaaacttttacaactatcaaatcgtacctgctcaaaataaaaataaaaaggttcaacatttttttttagtaaattttaaaaatttaatttagatcttaagaaaa

SEQ ID NO: 81368 - DNA, 990 bp, Cannabis sativa
ttttcatttacctaacttgttttgcgtgtgaaggctaagatcctataaggcatctacttaggatcgagcaagttcttgtgaagaacttactctgctagggtttcaaggagttcaacttcagtgtgtgttgtgtttgattcttagggtttctagacttttcttgaaaagtctaattagctgcaggttaaacgacacaagaatagttgtcgtgttgtttaagtgctgtcgtttagtctattttcacttagactaaggaaaggtcaaaagtgaccttaatactgataacaaattgttttcgttggtgtaggctaatatagtaaattcctacagacttcataaatcaaacatcagacaccttcacaaaattattacttgtctcaccttttatttttttgagaaacaagttgacacttggtgtccagtcgtatcacttgagggggtatattgtaacactagatcaaaactaagaaaataactaagtgagacaaagtttgttaaggtagttagttagagtaacatctgtgttaattctattataactttcagtattgtaagatcccagaccatttttaacagatataactaagaaggtctaatctcaactcagttagttgagcaatccattctactttctattttctctttctttttttctccatcgtttttgctctctttgttttttggtttagtcaaaaattatgttatgttaagttcttataatgggtaatactcattaaaagtgcactcatatatgtatatatatatatatatataaaaaaaaaattgatacttgaaactttaataatgcatctatactcctgattttgccatgatgagttctccttaacccctttcaatgaaaaaaaaaaaggctaattaagatttttgccctctgaactttgacatgcacaaaatcatgcctactgaacttttaaggtcgttaaaaatgccccctgaattattgagattattggatttaaagactttttt

SEQ ID NO: 81369 - DNA, 1933 bp, Cannabis sativa
attgtaacgccatgaccccaagtgaatgaacttatcaatgtaaacttaatagagtgatgaatacaacaaattcaagagtctacaaaagttgcagacaaatgagagagagacctttatttatagtagagagattacaagaggcaagaaaagaaagatagctggaaacagttatcagttacaaccgaaaatagaaaatagaataacctgacaaaagaaacagaattaactaactaacagttttgatctgtattacacatgtgtgcttttacaaatttattttaacttaatgtacttgcttaaaaaaagtgcagtttaatttaaatttttaattaaaataaacataactgttattaaagataaaacaccactaaatacgaagatcccctaaataaaactttacattctattctaaaattcgttttacaaaataagagattacatttcaaaatactatcaaaagggtggatcctatccactagaagctgaggcaccgcggtagatatgtacactgctggaaagcctttgactcatggttggtccactttacccttccctttacctgcaccacgaagcacccgtgaatcacagagacttagtaagaaaaactatttaatcacaagtaatgtgtaatgcaagtaaacacaacatattctatattctttattcaacacataatcaacaatgcataatcaattaaaaacgtctataagacgagtcaatttcagtgcctcataaagcacccttaccactcgttgtctacgagctacatatgctactatcgttgcccgataaagcaaacgataagtaagaaacctatctgcagtttcaagttcataacggtaatgactgtatctatccctcgatcttaatcgagacactataataataatcactacctcgatcatagtcgaggcaccaacgattataattgtttcttgtccaacatacttagtagtgcataaagcttttcttacctcaatccaataatcaggtgtgtgggccgacctgagtagacctacgctcgacgatcccgagttctatgtcacgacaacaaaactcgataaataacttagccgaatttcgaaaacaaaccataatcccataatcggacatttctaacttcccacactagttcggaataactcaaacatcactaaaataccttgatctaaactttgaaaaaataccctgagcaaaaccgattttgaagccaaaactagagtttccccctactggtaaaactggttgaccgatttcactatacctatgaaaccagttaaccggtttccctcgaggaaacgagaaattttggttttgcaagaatccaaccaaattgcctccaaaccggctcagacttcccgtaacagctcaataccataaatacaatttatttagagcaccaattcacaacaattcatccaattgaacaaatagcataatcaattgaaataaaactcaataaactttatgtaaaccaatttaaatcaaacaaccactatctctagccaattcaagcttaaacaaactttaaatcaagcctaaaaacacattataaactcaccttaacatctcagccctgaaatctgaaaaccctaacccaaaactcaatgtaaacttcaaaaatcaagtggggaaggatagaacttaccacacacaacttagggaacttctatccttgatcaaacctcctagaaactggttgaaattgaaggagaaaagtgcttgattcctgctgctcctagggcttcaaagggtagagggagaaggaactttgctatttttctaagctttaattatcttttaatttcctaaataatatatatctaaaataagtaattaaaaactaagctattaatcaacccacaccctctagaaaaaatcataaaagacaaattagggccggtaaactggccattttacccctccctctaaa

SEQ ID NO: 81370 - DNA, 727 bp, Cannabis sativa
atctttctatttatcattaaagattaagtgaaaggtattagatagataatccagattttaatttattgtatgtattatttgcatgtagatttactattgctctttacttgtagggcctaattctgtttacaactttgttgtagggtctggttctggctctttcgatagcttgctatgctaaatttgttgttctattgatatcttgaactatgtctaaaattacattttatttttttgcagctgctcttgttttctatcttgtaatcccttcagttgtaggttcttgtgatgtcattaatttggttagtttacggttactcagttcatacctaaggcaaaaaggaaaacatacaaccaaatattggaaaagatcagtggagcagagcatgctttccttctaagggtggtttatagaattgggaatgagattttgaagacgtggaacaatactatataacaattgaagttatggtctgcagaagtaaagagtgtattgcactttgtacatattttttattttatagttggtgatgttgaaatttaaattgattataaattattttgtaagcctaaacaagtaaactaatgttgtaattatatttgagtacttaatatatttttatttatgctttgagttgtttaatgattatgattataatatgtataaaaaaataaaaaataaaaaaagaaaaattactccatacactatttttttaacttttttttt

SEQ ID NO: 81371 - DNA, 820 bp, Cannabis sativa
tattggagaatattgtcccacatggattaaatgtgaaagtattgagccatatataagaacatgagctactccactcatagccaattggttttgagttgaaaccctatgattctcaacagtatttgatatcttataacagaataagaaaatggctatgccagagtctatatagaagagaaaatgatttcaattaataatccattcaaagaaaagaaatgcaataatagcatccattaatttgtatcattcttgaaaacattagtttgtcattcaactgagaaataagatggaaggaaagagatcgaagtgaatgctactcaattatgtttctataaaatcagtgtcgttggtgtgttggatggtgtctagtaacaagtatagtccttgaacaagcacatgctattgtctttctaataacctaataggaggctaacaaataaatcaaagtgcatttatatacataagctagttcattatccatgtgttacaatggtttttctttgttgaaaatcttattgcacaagtgggctctattgttgttttttccttttctcaatggttagaaggatcacatgtataaacgtatcaaactctaatatatgacttggaagacaaagccatgtgaacttcaaatgcatatgtctcttgcaaatttgtcaaagcttcccaaacttattcagaaccactcatttataggtgccttagatatgtatgcgttgtctatataaaggtacataaccacacaactaagtcatcgcgtcctcacattctctactacaaaatatttttgtgacctctctaatatttcttctaaagaaaa

SEQ ID NO: 81372 - DNA, 1529 bp, Cannabis sativa
ttataaatttttcgtgtaataggtcgtgttcaggttagcaatttttcaattaattttagacatcaacacaaaaaaaaaaacattaggtgccaacacaaattgccacagtgattatttctaataaaagaaattgtttttttttctttttttaattttgttaattaaaaattgtataaatatataaaataaagaaagtttaggggatatatatatatatagagagagaaataaggataaaacaacaaaaatatcttatttgagttgaaaatcttatcactctccaaactcacttcttcttcttcttcttcagcttaagcttcttccttatcctaacaatgagacttgttatacaacaactccattaactaccaaacatggccttaaacgccaccaaattctccgaattacccctccgaaattcactccctttcactttctctactccaaaaccgtcatttcacatcatcaaacccttctcttctctcaaaaccactgaccaaacccctaacccaaaccctagaaccaccagatcaaaatcatcatcatcttcttcttcttctccgtggctcaacaagtggcctcccccgccgggccggaaacttcccgactctacagctcgggaacggtccggtttgaaaacggagtatttggatagggatagaggacagaatgctattgagagaattgttcttcggttgaggaacttagggttgggttcggacgatgaggatgaggatgaggacgatgatgtgggattggagggtgaggatgcaatgccggtggcgactggaggagagaagcttggtgatttgttgcagagggagtggattagacctgattttgttttggctgaggaagagggaggagaggatgaggagatggtttttccatgggagagagaagaggagaggagtggtgaagaagagagaggggttaggggtttggataataagaggaggatgagagctccgactttggctgagttgactattgaggatgaggaactgaagaggttgaggagaatgggaatgtttcttagggagaggattagtgtgcctaaagctgggcttactcaggctgttcttgagaaaattcatgataagtggaggaaggaggaattggttaggcttaagtttcatgaagttcttgctactgatatgaaaactgcccatgagattgttgaggttggttgaacttgaattttataactttatttatcatgatagaattgttgattgacacttttgattagtaatgtgatatcttagagtttcatgaagttattgctactgatatgaaaactgcccgtgagattgttgaggttggttgaacttgaattttatcactttgatcataattgaattgttgattgacacttgattagtaatgtgatatcttagtgttgatgttttcattttcttttatctaattgtgttagagtttcatgaagttcttgctactgatatgaaatctgcccatgagattgttggggttgattgaacttgaattttatcactttgatcataatt

SEQ ID NO: 81373 - DNA, 1640 bp, Cannabis sativa
tcagtccgtggggtctcagaactgatactctttctgtggatagctttgaagagttttttctgtggctttgtagttctgatgacgactggcttgtagaagtcagtgcgtgtgtgcttgaagccatatggagatgtagaaacgaattagtttttcaggggaagaatccttctacggcattaattttaaagaatattgcctcacgagctgctgaattctcgcaaatccttagttcttttggggatgcagcccagttgggtggtgaaaatcggttatctgaaccggtgcaggactttcaggacaacctcttcgatgcttgtttctatgtcgacgcttcagttgtggataatgcagcagggattggggtggttctttatcgatctgagactcaggaagcaattgctctgcagtctctctgtactgtttctagtgtcctcgaagccgaattgactgcaatccttactgctttggagcgagcgtgggcagacaattaccagactatcttgattaagtccgactctaaagttgctattgaggccttacgcttgggggaacttcctcttgcttggggttcgtttccggtttttaaggcttgtttgaagtttgtttctatgttttctgtttcttttcagtttattaagcgtgatttaaactctttggcggattacctagcttctcaggctagagtgaaccatgttagccaaatgagttacctgttagggagtcaacccccttctgtggttgatatgtgattttctttgtttgcaatgaaggtttttccaaatcaaaaaaaaaaaaatcttgacattgtttgtgtcagtaaatgacagcaaataaagttgtacacatggccttttaacattaactttttttttttttgtaagttaatgagattaactaaagtgggacacgtgatccctcaacattaatttctttttttaaaacacaagtaagtgagaaggatgacattgaaacttatctatatagagagagagatatgctaggcatgtggacaacatgcccaagacacataactcttgttaaaacatgtaagttataatcatacattttatttttattaattattattaaacaattgttgaaaaaacttatatttaaacaagaagatatcattgctaaaaattaatgcaaatatattacaagtcaattttttattaatatagtacaatttttacatatctcatcaaagatgttcttgcaaacttatatataataataacaaaaaataaaattcaaattaaaattaataaatgtatgtacatattaataatgaaaatgttaaaggacacattaacatccgatgagaggttctcttctctctatatttgaatttcttttttcaaactaaaatttatatgtaatcaagagtatacttttggtttttttcttttttatttgtgcaattctaatatatttttggtatcgttggtcttgaaggattgataaaattcaagtggaaattttacaagagaaaaaacatgtatgaatcttaaattttataatagcaagaattaattgggtatttggtatgaagtgttcaaaataatttgattataaagaatatgattatagagaaatgtgtaaactatgtttggctatgtagagtaatatgtaatcatatt

SEQ ID NO: 81374 - DNA, 2662 bp, Cannabis sativa
gataggagagagggaagggagtagtacggagagaagaggagggaatctgatgcggacatgacgcgtccgaaatcagaggaaagacccaataattgctccccacgctgcccgacactcatcattctgtcgccattgtctcaccaacctcttccttcccttccctctctccccatacgtccctttcaactctctcttcttcttctttcttttcttttcactctttgtttcttattttgtttatttatttatatcaaaactatatacatatttttggtatgaagagaagaagggaagaatcccaaaaagaaaaaattaaaaagaaaaaatgtttttgacataaaataagcatacaaaaatgtcaaaaaaatgaagttttataattttttttatatttttacgtattttaattttttttagtaaaaatgcggaatgctggttttttattatgagaaagtaacataatttttttttacaacaatataaaatgttggtgttacgagaaagtttcaaaaaaaacatgtaaagaaaatagaattggtgaaagtgttgatacaaaaaaataaccctaaaaaaataaatgcgtttcaattttatgtgtaatatataaatttctaatattctaaattttgttgggagactaatagtacgaaaatataaacaatataagtattttaaaaataaattacaaaataatataattggttttcttttaatatattttacttttataatgtgtttgaaaagtcatattgaaactaaatttgggtgtagtttgaagtaaatataaatttaacacatttgtcttagtatgtaattacacaatagtaatatgactaagaattttagttacattctcaaatattcataaccctcctataataattaagtataactatattgtgtaattattaaaaatttctttttttaaactcaatccaaacctataaattaattatcgacccaattttttgtcaattgacgtgaagtcacatatacaatgtaaaaactgataataagtaagcgatagcaaagacgaaaataatagtgacaccagattgttatagaagtttggccccaacttgagtggtcatagaatactttctttttagttgtactaatttttaatttaacactcaagatcacaagaatagcttagttaagtttcttgagatcggagaaattttacaaatatgtctatagagtttatgctttcaagaaaattgtgaacatttttctagttgatggaaaacttatatttatagagaaaggggaatctatcaacatttattacctgaattcgcaccctaatcagcatttattatgcaaatccataccccaatcaacataggtgtatgccgcctaggggacctgtgcagctgtgctcccgatacatcattgtgttatcttatttccttcttgagaggcatgtcttgactctagagtaaagcctacgcacaagggttgcttcgcaggattacaagtagtgtagcttggaaaagccattcatctgtaccctgactatgtgtatgccctccaagtttacctccaccgagatgttgcatgccaaccaggtgggaggggatatcttcatgttattgaaacacttagtccaattagtatgcttaatcttctttcggagggtctcaaattgtcgggtgtagaaaataacttgatatcgggaaaccacacctcaaaaaccactagggaaacaccatcatgccacccatgtggtagatgcatactacctaggtggcacattgcatgctgctcaggtgtgtgctccacatttaggcacttcaaattttgttttatccttcccgcaagacatatttgataagtccgtatttatcttataaatatggtcatttactcgtgttattattattattatttttattctttgagctgttagttaatgtgactttattttgttaggagaattgacggctaatcatatgtttagagatttttgatgcagttttaacacattatggtagtaaatggtggaggttggagagcttaatttgactaagtaaagtgtaattacaacttttgataactctaaaagtagacttggacttggagctcaacaagattttagatctcgttttcagatttttagaacatcttgaatcgtccaattcgaagtcatgttgaagaagttatgaccaaaatacttatctaagcacacgacataaaactcaggaaatagcgcccaagcgccacttaaactccacctatgcggttgtgttcgtacgatatatgtacgaattacaaaaaaaaaaaacaaattttgaatttaaattaagtttatttttagggttacataaatagcacttttagagattagttcagcaagtttttcattatgttttttatggagagaactgaagaaaagaggaaaatctacatctacatttaatttttcttcgtaaactcttttaattttcatctataattatacttatgattatgtttgagattatgtagtagtccgcttttaggttcactacaacaattgaactcattagcggcggagtttttagtggggtctcgccgctaatgctccgtcgctattaatagtattagcggcggactccttttttggctgttaatactattaatagcggccaagcattagcggcggaccaatagcggccga

SEQ ID NO: 81375 - DNA, 1896 bp, Cannabis sativa
gataagtctttaccaatataccaaaacacaatctttatataaattaactactatgattttatttaaatattagaagaaatatataaagaaattagtattgtatatttcattatagtagaattaatatataagtagtatatttttattttagaagacttagctataataattagacataataatttagttttgatacaatagtgacatactgaggaaaaaagcttccaagataagttttttcttgttaaaataataattgagttttatccttaatttaaaatttacaaaatctattagtgttgtatagtgtgctaattcacattctatatctatttattttgtagatagttttcgtccaattggttgtttattttggatgcctctagaaggtggtcttacattgttttgtttaaatttttaagataataactttatcttatataagtcgttttgtttgtagtgactcatattctgactttacatattgttaactagacaattagcttgttgactagaagtttctcatcgaagattgtcatagtgtgattcttataactctttcaaacaaacaaaaaaacaattgttcagagaaagaacgtgttaaagattgatgaaatatcagttgggtattaattatataggtctctaatgtggaaatattgtgtatatgtgcagcagcctcttcaagtggtggcgatagtaaattaattgactatgaactcttctagacatgaaacaaagtcaaggttaatttcttccccatagttcaagtaaactagctaagctaaatccaagagatatccatatccaatgataaatagataacattttaatttctaaagttgttatgttcttttgcaaaagaaactagctagcttattacttaatcacctagaatggaaaaatggcttgtttgaactgtacaattgacatttgataagtcgcaaaaggtggggtggtaacctagcacaacactagtaagaagaggacaacaagtggtgcgcataggagtgtttttaaaattaagagtgtcaaaaatgatgtgaaagagaaataaaataaaataatatatttttagatgatgtggagatttttagaacctttaaaaaaaatactaccgttggagttgctctaaggaagctctggcgggtgctttacgtccacccaagtcaggacccaaataactaatatatatgaaacactttttaataaattttaatctaaaagaaaattttaaatttctatacttaatttaactaattaattgagcaaatatatataaatattatctttttttatactatatcaaaaatatatatgtttatatacaaaataattaaatcaaactcaaccttttttaatctttttttgaccaattattttttactttttttaagtcgatggaacaaccacaatccatacagtgtaaaaaatgagagatttttctaattagatcgaaaatttaaccataaaaatttaaattttcttaatactacccattcatgggtaatatgcattaagagtgtacctatatataaatatgttttatatatagatgcacttttaatgagtattataagaaagatttaggtttctatacttgattttgctatctaattaaattataaaatcttatttttatattatatggattgagttgttctgtcagttgaataaaattaaaaaaaaaaaaattgtttaaccaaaaattagataaaaaagcaaggttgagtttgagttatatttttttttatatatatagaaaacttttcaatgagtaatatttattggtaatcactaaacaaatttaactataaatattaatactaaaaatattaatctattaaattcaatggaaaataataaaagaggaaattgaatttctatgcttaattt

SEQ ID NO: 81376 - DNA, 2844 bp, Cannabis sativa
  modified_base (191)..(192): a, c, t, g, unknown or other
atatatactccatacatttgatactagtatactttaccaatatcctagaaagaacatactatttattcaagtgtaagtactttattgattatcacataagtgtaaatctagtgctcgataaatcatgagacttaaactgaagcatataatcacaattgctttccactatgatgacatcactgtaattgtgnntaactatatgttctggatttatcagaaattgtatgttaaaacataatcatgaaaataacatgtaaacttaaatgacttctaatctctattgatagcaaataagattatattgaaatgatttttatttagggcataaaatctcaacactatgaacactgaattcaaggctcttatttcatagggaacttggacccttgttccttatgaaccacacatgcatttaattagaaataaatgggttcatagagttaagctcaatgataatggtacccttgacaggttgaaatcaaggctagtagcttaagggtatcttcaaaagccaagaatcgattttgaagatacttttagacctttttgttaagcctgtcacagtaagattttgttcttactcttgccatctcatcttagtgggaaattaggcaacttgatgtgcctaatgcctttttaaatggaactcttcaagagacagtatacatgagtcaaccactacccatgtttgcaaacttcataaggctctatatggtccgaaacagacccctagagcatggaatgacaaactaaaatctactttatttgactggggctttattgcatccaaggcagacacttccttcttttttttatggcactggtttcaacttagtcattctcttggtttatgtggatgacatccttgtcacaggcccaaataatcttttaatccaaaagttgatttctgatctgaacattcaattttctcttaaaaatttcggccaagttcattattttttaggcgttgagattcacagaaactctgaaggtctttacttgtctcaaaccaagtatattgctaacctattgcttaaggttcacttggaaggagctaaaagttgtgctagcccaacttatacttctcacaaactatcactccatgaaggatctccttttgagaatattatcttgtacagaagtactttgggagcactttagcacttgaccttaaccaggtcagatgtttcatacattatcaatatgtaatctcagtttattcatgcccccactcatgttcactaggaagcttgcaaaaggctcattcaatacttaaaaggcaccatctctgatggaattcagttcgtaggatgtctcttgcagcttactcaaatgttaactgggccagctgcattgatgatcgaaggtctattggaggctatgcaatttttcttggtcctaatttgatctcttggtcagctaagaagcagcaagtggttactcgttcgtccactgagtctgagtttagtgctatagccaatactgctgctaaaatcaagtggcttcgttcattacttactgaattacaagtcaagttagtggatgtgcctatcatttgggttgacaaccaaggtgcagcatccttagttgctaatcccatcttccatgcacgatgtaaacacattgaaatttatcaacattttatttgtgactagctattgaataaagaacttgatgtgcggtatgtccctactattgaccaagttgcagatatctttaccaagttccttcccaaagaatgttttcaatatctcaaaactaaactaaaagtggtatttacccgttttcatttcaaggggatgataaccaaggtctagtttagttagttggtttagttaagttagtcttggttttcagttagtgtgattaattacaatactcattaactaattctgtttgtaacagttttgaacacatatgcttgtaaagctttgtttgagttatatatactaatgaaacacctcgaatgaggtcaaatttttgtcatagttttctaattttcgatctctctgtttttccctatttctttcctttcatgtaagaagctaataccatatataggttataatctcttttttaacatttagaattaaaaaattcattcttaaactgtttggataaaaaattagaaagatattttttaatttaaaaatatttttgggagaagttacaaaactattttttaaattcaaataatttacctaatttataatttacttacaaacatatttctaatttttattaatatccaaacacttcaaaacaatatatatatattttttaaaaaagtctttcacataatagttatccaagtcgtaaataaattaaaatgtatatttattttatacttatagccataagcaaaagtctaaactttgccaaacaggacataagatgcataaactacctctgttactaattagagcactaacatcaacttctctactctattctttaaaatactaccaaaactctattttttttttttattttacctcaaacttttacattatatcatacatcagtttttctatctttctttacatcactaagatattagagaaatgctaaagggcacccatggtgcctaacacccttgtgaggtgtaatatcgttattggtacaatttaatatcaagtctcacttattttactttaataaatattataaaaactaactaaccaattataaggcaaaacttcatcgtggtgctataacaaacaaaaatactaataaaataaattagagcaatgaataacatttactattcattgattaaaaaataaatgtaaaatagctcaaccataataattatataataataaatctataaatatatgtata

SEQ ID NO: 81377 - DNA, 2222 bp, Cannabis sativa
tttgatgaagaatgagttatggagcttcctattgaattgaagacagtaaaatcagttgagcaataatgatttttgttcagtccattttcagacaatttaatgggcattttttaagatgtgtgagagtgagactctctatgatatgctaaaactattccttcctactactactattgggtaggtgtagacaaaatcctagtaaatattttcatgacttgtcattttttggggttttaaattattttatgtccaatagcaatatatctgcactctgaaatggtttctttttttagttaggtaattaataataattattaaaaagtgggagcacatgacatttaaaagccattggtcagccttttttgagtggaagtaagtaataagtaaattaatgaaagaaatttgaaattgtagaatatggcctaccatacccaccactccctctatttggagggtacccctaaatgaaaagttgaattttaactagatttttcttaccaaaacaataatgcccatacacatgaaatgaaacaaactagagggagtttttttaattaaatatataaattttaattttaagtcccatgaccatatccaagtacaatcaatagtactctttagtctttacatagaaaatcatactatgttatgtttggtagggagtctatatgggaggatatggagagtagtggaggaaagaagatagaaaataataagaataatttaccacataaatacttaagtttaatttttgattgtaaataaaaaactaatttaattttttccagtaataatatctaagttatatttttgaaaccccgtaagtacccgtgttttttttattggcatatttaaactattatttttaaataaaaatttaatgacttggaccaattagatattgtaacgtaacagttaacttaacacttaatattcaagtagttacagaagttctagaatcataacttaagtattattatcgctaaaaattaaacttaggcatttataccataaattactcaaataataaaataacaattattattaatattatattttttaatatttaaaaaattattttaaataccaaacaacataaataaatatttatatttatttttatggaaaaaaataataaagaaaattattacctccatacatgcttggcctcatttctaccaaacatatgtttaaattcacatatctcctttacttttaatatctagtgtataatatttttgtattcatgtttcctagtgataaatgggctacctaactataattatttgtatatataaccttcaactcaattaaaaagagtacattggcctctcatcaattttatttaagtctctacaaattttatacttaagaatagtcttatacatcaatgattgatgccaaacaaaatctgtaatatatcacataatgatatggtgtgattttaatgctatttttatgtataatttagtgtatattttctagctttacaacttagatatacctccttcaaaattcatataaattaatttatagaataatgaaatacaaatttaagattttataattgtgtatgagttattttcctaattttttataggactttttatcttttaattattattgtgatgagcaaatatatcagatttttaggttcgagtgttttgagtttcgggtttaaaattagataccaaatctaatatgttatacttttttgatttaccacttttcagatttcgagtttggttctaattacaaatatttttcactttgatcatgtttttaagcctaaaattttatgaaagacttttttttttaatatataaatataattttaaagtattaaaaaattaattatatgaatgtgtcaatattttttatcaattatctatatatgaataaatttacataaaaaactggtaaaattgccaccaaaatccaatctaaagtagattcaaaattttcaagtatttaacacgtttactaaactataatcgaaatcagaataatcaatgaaaaaaataaattaacttaaaatataaaataatcataagcaatatattattatgttgtttattaaattatttgaagaaaaaaaatcaaaattattttattttgtttacataacttggaaaagtaattcaaatattttaattggacaaaattgtcattattagaacagataattttttgggaaaaaaacaaaaaaatacaaaaaagga

SEQ ID NO: 81378 - DNA, 1374 bp, Cannabis sativa
taataaatatgcatgcatgcatggtagatatatgtacggacacgtgaaattgctctccctctcactctctcgcgcgtacgtagccatgggacttaatgatgatcagaaatatttatattttatgactggaaaaatatatatacctaactcatttgatgaattaatgctgaatataataatcactaattaaaaaggattaaaagtaaacaagaagaacaccagcaattatagaagttggccccctaagcatggtctctagacttgtatttaagacagataacaaaactaacgaaagaactgatttataaacaataacagactcagaatttttgtggaggcttattattattattaaaaaaatatttatacatatattataatcactctaataaatttatttaattttgtgtgaacttttactattttgttctataattattaaattaaaaaattacattaaattttttaaaatgtaatttttttttgttagtgagagctagctatgcccccagtacatgattactggtgggttgtccttgcctgtaaactattgaaattataatgtaagcaaaattacttacaaataatggtaacactattaacacactaataaaaagtctagctacccataattattgtaaacatatccgataacaactaaataagaatataaaaaaaatagagaaaaagaagaactcttcgaaaaataaatgttgaaagtctttagagccgcttctcgcttctaattttcgtcctccttaattgtgtgttctaaagtgttgaaaaaaatagacctttatatagctaaaaaaagataaaaaaaaaaacctaatttttttcatagtttaaaataggcaggtgctcaatttttggcagcgagcttcctcgtgagacgcctgataatattttggccataactctttcaatattattcagaattgaacgattcaagatgttttcgaaagctgaaagagatatctaaattttttattctcaatatttttcctcaaagtgaatgtatcatagtcaaaaatttacttgaagttatggtaatgacattattattttatagtattgatatgattatgttatgagtatgatattaaagttataatttatatatatatatgtataatgtaaacagatagtatggacctatatgataaaagtttccatgtgtagcattatttagttatggttacaaaataaggtgtatgatattgctaaaacttaattaatacattaattaataatgatatatgtgatattatatggtacttacaaaatactgacttttggcccaatctttacaaaaatactgccacaaggcagaaattacttttatattgtcttggccaatttttttcttttata

SEQ ID NO: 81379 - DNA, 806 bp, Cannabis sativa
tatatatatatatatattaaacatttcttttctattagaacaacaataaggtttattctaaaaatatgtaattttcttacagcaaaaatattatataatatattgggagcttttatgacacacttaaaaaaaaaaaaaatgtactaatacatcttcactattttggtatttaaaactatatttttatttatttttttaattgtatacgttgtaattattaaaaatatttttaaaaaatttaaaatatttaatacatgtataaaatatagtaagcaagtgtgcaacaaattttttaaaccttatattctttgaattaaattttttaaaattttacaaatattttaaataaatacaacatatatcacaaaacaaatatagataaaattttagagaaaattacgctctataccctttttatattgttctcttttatttttaccttcttttttaaagtctatcatttttactttttttttaaacattgtaccaattttgtccctctcactttaagatactcactatgtgactctcttatgtcagagtattttggatacaatacatataaaaagatgtatatttcaattaaatataaatttagagataataagtttgattaattgattaataaaagtggtatttttcaacttacccaaaattttactcaaatgcaaaaacaaatatgggtatatgggtgcatagaatttcctatattaatattttgatgtgtgtggaaaaatttacgtccacataattaacttatcctttctacacacgccctttctccacttataaatatccaaagatct

SEQ ID NO: 81380 - DNA, 1356 bp, Cannabis sativa
tcatgcccctcgaattttgacatgaactaaatcatgacctctggactttcatccatgttagacttttttactaaaattggaaaaaaatccttaaatccaacaatctcaatagttcaaggggtataatttggtacatgtcaaagtttaggggcaaaaatcctaattagccttaaaaattacttctcaactattgagattgttgaattgaagaatttttatctaatttcattcaattttgctcttatggcaaatgtccatatactaaaactatgccttcgaactttgatatttacaaaattatacccccttaactttatacatgtaccgaattgtgttcctaaatattcatccgcatccgaatttttttagtaaaattagacaaaagtttttaaatctaacaatctcaataattcgaggggaatttttaacgagcaaaaaagttaaagaggcatgatttaatacatgtcaaaattcagggggcaaaaatctaaattagacttttatttaattacttttctaaaaatgttgtatgattttatttatttgggaaatttgagtaactgatactcgtgatttttttttttaataaatcatgcaattttattaatagcaattaattaaaaaaaaatagtctacattttaatcgggacatttctcctgttgagatatgactctcatatcgttttacaaaaaactaaaataaaatcaaatgaaaaagattgcagcatcatagttgaccttaagaacacgtatattcagcttcatctaccgctcagaagacacaatagtcgaaattgttgcagcaaaactcgtagcttgagcactcaactattgtgcaaggtgtgtatctacactactaacaaccccttcagtcgcatagaacttgttattcccaatcactaacagtgatttggtggcgagccatcgaagaagaataaagaagaaccaacaacgaaacagaacaaaactatttcatacagacaagactaaaacacttcaaaacaatatcacagagataagactaatcacagtagtaaaaattaaatcagaatagcataacacaattccgaccaagccgcacgtatgcccaaggtaacctggctggctggcgaaaaaaaaacctcatgtagctataaatttaggaacgaaaaacctcataaaaatataattttaggttatttagagttcatactcatgacttttttattttacaaaaaaaaaaaaaaacaaaaaacttaaatctcaagtttcataggttataggaaaattcaacaccattgagcaaaagaacactcacaacaacttctctaaaatagagaagctttaaaaaaattaaaaaaccatactaaaaacacg

SEQ ID NO: 81381 - DNA, 788 bp, Cannabis sativa
  modified_base (755)..(762): a, c, t, g, unknown or other
gttaatcatgtgtgactctgttcatcacgtcacgtcaaaaaaaaaaaaaaaaaggaatgaaattgttcattctccttcaatatctattatatttcataaatttgtaattaaaggtcttctttcttttttgaacaatgttaattttcgttttgtgaaacgatttgccaatcgtattgctcatgcttttgctagagattcatggttatttgctaatcgtagttactcgggtagttctataccaagtaacattcttgatgtaattgtacaagaagtgctttaataaaattcatcttttattcaaaaaaaatgtgtttgtaattaaatcactactacagaaaaaagtaatcgtgatggttttaaaaatatattttttaaactgtcactaataaatttaaataactattttaaactgttgagaaaaattgaatattctcaacgatttagaacactcattatagaaattcgcgacagttataagttaaaacacgattttttagttagggttatacctgacggtttaaaacatcaagtatattcccgactaaatataattctcgtcacttctttttttcctcatttcagctaccctatctctctctcaaaccctagcagcgcacctaaactctgaaacccacccattcaatctccatctctctcgtctctctcgcctccacccacccacaaaacccacttactgttgatgtccctctctttctcgtctctcttgcctccacccagggccggccctaggcatnnnnnnnntaggcccgtgcctagggcccacactt

SEQ ID NO: 81382 - DNA, 939 bp, Cannabis sativa
gaagttacatgagggtgaacaaaagataacaaagggaccaacatgttggctttcttctctaagaaaatattatgtcacacctcatgcacagacctgagtagatgtctaattcgtggagccaccgataccattgctctgcaccacttgagtggtcgtattctgcactggatcctttgaggtatacggacgagctgactccatattctccacagacccgccgaccccagaagcatttaatcccatagatggcttcatgaaagttcctcccatcataggtactaagggtgcacgttgcattggcatggaaattccttgaccaggcagcccaaacacctgaaggttaggacctgtcatcccatgcatgccagcagagtgcccaggaataggtgggccaggataatgtgctgcgtgcatagggggaacttgaatcataggatagccagatgatcctccattcatgtcgggcatactcactccgtaacccatgcccatactcattcccattccaatactcattggagagaaatgtgccatatgggatgcatgcatatgttgcattcctggtggtaacatcattggtggcatacacaaacctgctcccattgacataatctgcataaaattcaaaaatagtaccataatataaatcaacatacaaattaaagagttaattctcaaatctgaatctattagagttagaggaagtctacctgtacttgaagttgaagtgtctttagatactcaatagcttcatcaagcattgaagctttgtctacctaattatgacattgttaaacaagaacatcagccaaaacatataaaagaaatatatatacacatatatgtgtgtgtgtgtgtaagaatgaaatattagcctaaatttaagaaagtgagacttctcaagttctatgattattaggattatctccactgtgtaac

SEQ ID NO: 81383 - DNA, 1596 bp, Cannabis sativa
attaaggagagaaaagaaaaatagttttggattgattttagaatgtcatgtcaccgtctcatacttctcatttatatatattgattatttttaccaattataaattataactcatttttattttttatttttgcataaaattttaaataatttattatgtcaaaattaaagtttaaatatttagttacacacgtgtttatttttaatatatgcacaattgaatattttatttaaaatatgttatcgagattggttaattgtaataataaaagttaagcacattgtggtgctatatatttttactactttgagtatgtgagcttaaatatagtaaaatataataattaattatatttttgaatttaaaatgacctaatgaaatgtataaagttactcaagaagtcgttttgagatgttggggaagacatttacacaattactgtgtacccacaagacatattgccctggccaggcaacatgcctcctggaacacactcatgggaaatgcatttatgtagctaggaatatgtcaaattgctccaagcgacatgtcgcctactagctagtgggtgacatgtcgattaggagctaagacggaattccaaaataaataaataaataaaacaccgtcaaagtgctccatgcgacatatcgtccataaaagctggttttttagcatttcattttataacgtttttggctcaaattttaattcactattacaaaaatctcattccatgtccattaaagttggacatgataagtctttcccgttgtggtagttcctccaaataaaaaggtctttgcaaatatcatttatgggaagttgttctctcgatgtttaccaatcccagaaggagtcttgaggaatgattgtcgagtctgaaagggagttcccaaataactatcatgtccattatgggttcagtcttcagcatagctagcccttccttagaaaggagttccagctggctaattattcctcctagaatggtagatcctgatagttgactacagcagactttatcatatctggaagcgtcttcagcgagtacccttagtccatgagtctggacgctcgttcatgttcccgaagggcctagtacttaagctgatgtggagacttcgctcgaagaggagttggttaagttagttacttctaacataaaatttaatatctcaaatagataaaaaaatttaagtgcaagtaaagtaaaagtattaaaagttatgtcacaattaactctagtaataatgacactttatagtattaatattgaggggaagcatgaccacttgaggctagctcaagtggctataggaaagtgcatcttgggttcgagttccaaatttaatattgtataatatatacacgcttaaataaaaaaaaaaattgaggggaactgggaaagccctctcctcgcccctatcttatcaatatatcaatcaatatatatatataaaggaaagcacaaagggagtttatgtggcaacctattattttcttcttattttttctattttatcacacattctcttattttatttgagaaatacactatacatataaactaaaagtcccacatcatttaaaaa

SEQ ID NO: 81384 - DNA, 763 bp, Cannabis sativa
tatcaaaacccagttcaataggaaggtcactgattacttggcatttctacaaacagtatcaaaacaaaaaataaataaatatgaacaactgaaagattgaactgaagacatggaaaatataaaataaaaaatcaagctttttgattttttgagattaccagaggaagaggtgaaggaggggccaaagcaatttgttgggccaactccaaatcattttccaatcgttgctgttcatggtcatcaagaaaatgattgttggcatgcctgaaaatgcatatgtacaaccaccattacatgcataatatataaaaggaattttactttaatatatataaatatatacataaataccgttcgagttctgaagatggaaaacgaagatggcagaaagggcatgggaggagatccattgcttcttcttttacagcttcatcgcatttattgttatacaatttcagttaaagattgaaccttttgattatgatgatgaagatgaagatgactgttgagaatcaaatattcagacacagcgcttcaaaaaaaaaaaaaaaaaaaatcgtttgctttagaagaagatataaaacgacataatatgataaaaacgacataatccgagaaaaacgacaagatctgataaaaacgacatgaatcgagaaaatcgacaatactttctgaaaatgaaatgctagaacagaaagaacgaacaaacgacaaatatgacataacgacgacactaaattagtaaaacgacaataaaaaacag

SEQ ID NO: 81385 - DNA, 973 bp, Cannabis sativa
tcttcattacttcagcatagcttgttggttgttgcatcacaacattagtagcaatgttaaaatcataagcaattaaataaacataatcatacctgtctggtggcttcatttctctccttgatcataccctagcaagattgtaatcgtccatgttagattgctcatcaacatctttaggatcactacttccaagatcaataggtttatttgtctcatttctggtgtgtaactccaccgtaagctcatttttcttgagctttatacatttcttgattagtacgtattagcttttgtttcaatagatttctcaatgaatcccatggctacttcattgaaagtaacatctattcttattatggactttctcatcctaggttccaaacaacatagtttgtagccctttactccttctagatacctaagaaaaatgaattttatagctctagcttcaagcttgtcttgtctaacatgtccatagcacatacaacaccttgagatggtcatagcaagatggctttacaaaccaaacatcatttggtgttttaaaatccagtgttgtaaaaggacatttgttgatcaaatatgctgcagtattcacatcttcggcctaaaataacttaggcaatccaacactcaatagcatgcagctaactctctccaattacaagtccattctattgaggagcctttgtaacagttttgtgcttggctataccatgattcttacacaacatgccaaaattatctgaacaatattctaggccattattagtcctaagtcttttaattttcttaccaatgttatttttatccttattttccaatatgtcaatttatctaatactttagttttatttttcaaaataataacccgttgttttctagagaaatcaccaataattgatagaaaataccttcctcttgagtgtgatgcaattcttgaaggctcccataaatcactatgtatataatc

SEQ ID NO: 81386 - DNA, 3437 bp, Cannabis sativa
  modified_base (1265)..(1271): a, c, t, g, unknown or other
gtgaaacaaaaataaaaattttggaggttttgttgccatttactctacataattttgtaagtttaattgtttttagttattttttatttttgtcttatttatattgtcgataattaattatatttattagtaactttttttatataaatttatttagtttatttttgtttatgatatatatgtataggatatattattttttagtattaaatgttgaataaaatatattattctcttgaaataaattaagcaatttaattatttagagaattacacgttagattttttttcaaaattataagtaattttatatagtaaaatttatataagattctgtatgataatacttgagtataataatattttttttataaatattttatgtttatttttttatttaatgtaaattttttttatgtatatatgtatattacttttatgcatatttatatattatttgaaaatattttaaaaactgaagaagaaatataatttttttaaaataagtattgtgcataaaaatgttttattatttaaattatgataactctaaattttatatttatttttttacagtccttgttcttttttatattttctcaaacttaataagattatcttagtaatttattatttattttttttttaccgtatttggagttatgtgtttttttttttagttttaccaattattaatatttatcctttttctgtctctttttttaatctctcaacttttttttttctttttcttaaaaaatctcttatttttcactccatttgctttttttaaataccatttttcaaatctacatttttacgatttttttctcttagattttttaaatgaattttacttacttatttttttcaagtttttcttctttgtttattagtaaatatataatagtgtaaaaattatatgagcatacatatggtattaatctttttcgtgttattattcttcctttttttcataattgtttgttagttattattttgcttttcttctaaactttgcttattagtagataataacggagaaaattagatgagcttatatttagatagaatgacttgtaacttttccttcaacaaacaaacttataccacacttatgttcttatttagatagatgaacttatttgtatttaaatataattaatgaaattaaaaaatataattataacccacatatattgacgggtattacgtgcctttagcacgtactcccttactagtataaatatatatatttatatatnnnnnnntatatatatatatatatttgaactcatttttattattctttccctcctcgcattttaaaataaaatagtatatattttaaataaatatactttgaatattggaacaaaacattaaaagaaggaaatatatgaaatattattagcataaaaatataagtcaatatatattattttctaaaaacatatatgaaaacatgattagaaagatattattgaaattaacataaaaaaaatgtgcaagaattttttaaatagctaatgtaagatgattttgttttttgtttttgttttttgtttttttttttttgaaagcaatgtaagatgattttgttttaatattagagcgcacgtatcaatttttgagtttgaatttgtacgcagaaaattataaatccccaatcaatatatatactagtttaggtagaggtgcccgtgcctgtggcacctcctagtatttttttattttacaaataaaaataattaataaaaaaaatgttacatgattataattaataaaaaaaatattacatgattataatattatacatattatttatagttaattcaaccaactataaataatgaaattgttagtatgtaattttttttcttttgctaatcaaagaagtaaaatttcactatatatttatattttatattttaatgtattataatgcatttttataatagtattttttttaaacacgattgttaatgtattctttcgtatttacagtagtacttgtataattataatatcatatcatagtgtatattgtagctatacataatttgttaattttaaaacttttcaataatttataatgtctaaatatgagttcaaaatgtttgtttcactcttgaactaaaatacactttattgttaacatagcaaataattcaaataaaaaaaggtgttaaaatggctactataaccatataaagactatcatataaaaatattaaaattataattatccaaatatgatcataaggggtgcaccactaatatctttgttagggagacaacaaccataaaattttactatattataatgtaattatgatcactttttaaattcatgattgatgaagtgaaaaagtattgtttaagataatagggatttttacactacatactgaaacttttagctttttttcttttttactgtggggcaaattttttttcaaaaatactgtgtactgcgttaagtttttactgtcgttcaacggttattttttagttgttctactgttgttttaattgttctgttttgttgttttacggtacatatttttgtaaaaaattccatatggcagtaaaattgtaaatttttatccaaaatctagcatttttgtaaaaacccctataaattacacttacacttaattcatgaagtaaaaagtattattaaacgtaatttgtggtattgatattatatttagtagctaccaaactttttttcacaagtttaagtaattggattataatgttatgtgatttatcaaaaaataataatataaattctagttatgaataatatctttaaaaagcaatagaagaaaaataaaatcacatagatgttaataaattattacaaataaacattaatactttaataatgtattttaaaacagcttccacattagttaagaaaaaattataaaaaagtaagtacatattaattaataataataaacaaacactaataatattagataaatgtaaaactacaacaataaaaattagacttctaagcccaatgataattattttgtaaaaagaaataaaaaaggcccaatgacaattggaaattgttaacatattttaattaaaataagaatgcagggaaagatagtgtaaactggttttttgtatggcaagtaacgacaaagcactaagaaatctaattagaatataccattatctaagtagctattattttatttgtcatttttgaataaataaagattgcaaatttggttgagatttcaatattatgtgtttgtccgtgtatttgtatatggatgggtttcaatggtcagacaaacaatactcccattacacatatcttctaagtatttttttttttttttaaattacaattcaaatttaaactcattacacatatcttctaagtatttttttttttttaaattacaatt

SEQ ID NO: 81387 - DNA, 658 bp, Cannabis sativa
atatatatatatgtatgatattgtgatgaatgaggtccctatcatggaagtccattttcagaaattaatattttgttttaggcttgacttttaggaactggcatcctttcaatgttttcgttttaatttatttgttgggacattaatattgggttagttagatggatcatttcattataattcacttcatttttctgattggcattattgtaaaaccaagctaataagcttgactttgtatatctttattgaacatatagactttatccaaccacgtctatataattgaataccaaataaatataatactccaatttaatgggaaagaccttttcttacatcatattttaggtggaacgtggtgaggttatcaatttgtcacatttttattagaagatatttagactatagttactaataagtgtaatttgtaacatttttatttaagttagaaatctagtacactcaaattatgcttcacttaacaatttattggtctttagaaacagttatggaatgagaaaatgtgaataaggaatgagatttgttatcttatttacttttttaattttgttatggaatgagaatgaaatatgtgagtcctataataatttggaataaggaataagattgataatggtatgaggttggtgggact

SEQ ID NO: 81388 - DNA, 1079 bp, Cannabis sativa
gagagagagaaagagagagattaaaactaatatgataaaagtagccttcaacactagttgatttctttattgaatctccaaagagtttttacaattcgaaataaaagagcttagcttagaatttacaattcagctaacttgaaatgcataatcaatcacacatattgttccacaatcctccaagtctctcacattacaactagaaattcagttctccatgacaggcatggcgaaaagatccatttatttggattgggtcagagatctgatctgacaaaccattactgatccgaaactttcaaataattatcagattttgaatcaaatcccctttgccctgcctaatttttttaaggatcagatctaacccaacccatttttaatatattaaaaaaatattgaatcccttatccttaatcaattcttaaatggaccaaatcccaatcaaattttccctttcctactaatcttgttgagataatccaaaccataaaatctcacaaattcaacccagtgtgactaggccttgagttcttgaggtatcgctatgtgatttgatagaatcaaaacaaattcaacccaatacaagtgcgaccaagccttaagttctcaatctcagtgttgagaactcaaccaccactatcgccgagatcgacacagataaattatacagactcgacgagagtagtgatgacgttgcgaaggctggggataatgatgttggtagtgggaatgctggaagagatagagtaaaagggacttcgtctcctaaagaggacaccattttgagtaaaagggcctttgtctagactagtcggtaagtttggggctaataattggagcctcatcacccgaggaatctttggccaatctggcaatttttgctgcctttgatggtgcaatcagctcgatccaactgttaagtgcaagcccttttttggtacaattctcccttcaactttgcataccacttttttaatgtctttaattttagggttttttgtaatttgatataaatgttttcactttgaaaattttactattgattctaatagcaaactttgatatgataatgcaca

SEQ ID NO: 81389 - DNA, 3886 bp, Cannabis sativa
  modified_base (3567)..(3578): a, c, t, g, unknown or other
taacctaattaaaattgaattagtaaaataattgattttgaaataaatgaaattaatttttcattagattattttaaaattaatttagagaaacaaacttaggggtgaggaaaaaacaactctgctcctgaagtgctctactatggttccatgactccaatcttcgaatcggtggctatggcaggtcaagggcgtccaaggaaggcatcacaggggtcgggcaagtcagggaaggagatgaagatggctgctaagaaaccgaagaaaagaggtccatcctcaacagttgatatacagaaaatgaagtccatggatgaggtgttggggttagagccgattgcatttactgatgatgaagacgaaatggaggaggagatgatacagggtgctaattttttagaggacatatttccaaaacctctctctccaaatgcgtcgctgcaagccattcagaggcaggaatacattagagcagattttaccttctttcttaattatgctaatcagcaatgttctatgaacatctcacaaggtaaatctacttctcctccagtcttaagatctagttctgtagtaagaaatttggcaaagtctttcaagaattctgaagcggagcaaaaagttaagataacattagaagatatagaagaagaagtagaattttggcagccctcaattgtatgtactaggtgccaatccaccattgtcaattcttgaaggctttattagaagagtctggaaagacaaagttgaaagagtgggtatgctgtcatatgagatttatttggttagattttgctccataaaaaatagagatgagattatcaatagtggctatgtcttttttaataatagacctgatattatgtaagtttgggaccccaatgttaatttcaaaaaagaagacattagaacagtgctaatttggatacaactcaaagatttagacttgaaatattgggaggagaagtccttattcaaaattgttgggcaattggggaatccattgcaagtggatgcgattactaaggaaaggcacaagctgaattttcccaaaattcttattgaagttagtctcaatcaaagcctccctgaaataatctgatttgaggatgaatttgggtgtgacacatctgtaatggtctcatatgaatggaaacctatcatatgtggtcattgtaaaggtaaagggaactctactgatgattgccaaaagaagaaagcaaaacaacaatgggtgattaagacatatgggtgaaatgcagtatcaaacaaaccaaaagagccaattactgatgcagatggttttcaacaagtgagcaaggggagaaaagggaaagataaggttgtgatggaggagaccccaataagcaattactttcaggccttgtctcggccagggcaagatgaaggtaaaccctctaaaatgcagtaggtttctaacatgacagagaaggtcaattcggtgcttccactagcagaacaagaatcaagcctgtcgtcgttaattgataacacaagaggagggggagatcctcctctaagcaatggataaagtactaagttagaacgtatgagggatcaaggacaagcagaaacaaagtattgtcaggcagttgatttatacacaaaaagttgggcttgttggtctgctcgagacgagagtaaaggctcagaaacttagggatttgtatgtaaatatgtttaatggatggtgtttcacatctaacattgcttggcatgttggagggcgaatactagttgtatggaatccacatagctttacagtgagcatcttgaagtgcactagtcaacttgtacacttgcaagtgtcaactgtagacggtaaaaataatttttatgctacctttgtgtatgcgttgaatgatacagagggggggaaagagctttggagggatcttcaaagaatttgaaccaaagaagcatggatagtcttgggagactttaatgagatagtgttgaaagaagagcgaattggcaagagaatcaactatagaccagcagctgagtttatagattgtgtcgagacatgccaactggaagatattaaatatagtggaagctttttcacatggagtaacaagcaacaaggaattgatagagtctattcaaaaattgatggagttcttgccaaccaacaatggctgcttaaatttactaatgctgaagtaattttcttgtctggaggattattcgatcacacgcctgccttctcacagttcatcctgaaatgaaaagtggtagaaaaccattcaagtactttaggatgtggtcctctcatcctaagtatgcagatcttgtgagctcgacttggcagcaaccaattaatggaacaaaaatgttccaaattgtggcaaaactgaaggcacttaaaggcgtcctcaaagaccttaataaacagggtttttttaacattcaaatagctgaggagcaagcaaaaactcacttatttgaatgttaggagaatctctaagaagaccccctcaatcttgaatgacatgataaagagttggcaaccataactaaatatgtcgaattgcacaaagctctaatatctttcttgcaacaaaaagccaaattgtgttgggtgaaagacggagatgacaacacggcaatgtttcatagcagcattagagcaagaagaatgcaaaacaatatcttatctattgtaaattggaatggcatcaaagtggatgaaccagcacaagtacaagaagctttcctatcctattataaaagcttacttggtgataaaatggccagcaggaaatttgttttaaaaggtgttatccaacaaggctctttggtaaccgaaaacaaaagatatatttgtagtagggacaggagttcatgattattcaggattcagcctgatctaccaattgattatcgttgtgatatgtattagttctttatagtaaacaacatatttgataaaacaacttaattacacatcaaccaatgtcatataatctctgttatatataacactttcactaagatgtcttcttgcatcaacaatctaaattaagattatttgcatcgaataacgagcatcaataaaccgtactagcaatcgttgattaaagattctataaatttaatatgttgcttactattttattcatgattagtaattttaattcttcttataatacaatctacgacctcatatatgaatttttttttatatatttatttataaattattaaatataaaatattaataatttaacattcaagcatatatcaaaatgttcaactataacaattattatttataatcaaaatttttttacaaatttttcagagcataaactaacattcacagatgaatttgataatacataaaaaaaaatattaaaaaagaaaagaaaaatctcatagcaatatgcttaaagctttttgttgacttgataattttacatgtgcatttttttaggaagcggtcaacattaacttttataaggtgtattaatttagatggcgtttggtaacacgtttttaatcagttttttgtttttaaaattgaaaaagtgaaaatannnnnnnnnnnnatgttctataaaactattttcactttttcaattttttaattagaaaacaaaattttaaaaacaaaaaaaaaaattactttcaatattttttaaacagtttttttcttaatcaatattttggattttgactagactcggatccaaatcccctcgctggcgctgaacctagcttctgacgcgaacccgaatccgaccccggacccagatccgacttaagtaaaatcaaaaaataaaaatgaaaatgaactttacagaacacactttgttttctgtttttaaaattgaaaaacaaaagtggttgtagaacg

SEQ ID NO: 81390 - DNA, 1881 bp, Cannabis sativa
tttttgcgttttttttttttttttttgaatggagatttttgcagttttaattgacagagcttgaaaataaatatatatatatacatatgaaaataaattttaatatatatttttcaaaaatatatatttatgtctctttttatattaaatataattgtttaatgaaattattagtttaacattttattttttatttttatgttaaaattaaattatttataatatctaaacttatttacttattttatagtttaataaaaaaatatgtacaaaatatataaaaaccaacttttataacacaaatagtacttcacacacggtgttataaatttttatatattttttaatatatgatttctcaaaatactttttgcctttttgggcacatcatgtgtgcaattgtgatgttactcttaaaccatcttactccattctctcttttttttttctttttttttcaattctaattttgaactgaatacacacgtaattcaatcttatttttacagtgtaatatgtaaatgtcaactatgctgatatatatttatgtatcgaatataatctttcaaaatgtattacatttaaaaaaaaaaaaattgactgaattaaattcagaaacttataatcttaaataattataaaatatatgattaaaaaataaaatcaaaactaaaaatttgttcagaatgtaaaatgagatatggtggtattgctaatatttaagcaataagattagaggtagattagtttgtgcagtgaagcctattgtgtactgtaactacataaataatattatataaattgaggaacaaagtagtggaaacattattgtatagtattgatgatggtggtgtacaataagagccacccaaaagaaaggaagtgacgatcaaaatcagttgttatatatataataaatgaaaatgtaccctctctttctcttatgtaacgacaacattaatagcatcacggaagcagtacaaggtagcaattcgggtacaacaaattagtagggaaggaaaaaaaataaaatgaaagaaaagaaaagaaagtggggtttattattgattgaatgtttagatatgtagcaccgacaacagtaaaattaggacaaaattgtacaatgggtcattgggttggtgtcacatatcaaaccatggctaccatcatatttatatttttgtgtgtagatactctttgttggccatatatgtaatcataatatcccacacaccactttctaatgacgtgatcaaatttttattataatatatactatataactaataaaatttgtctttcactatcacttatttttcatttatgggtgtgttttgggcacggtttgcaaatcaaagtgagcgaattcaatacacaagaaaatttttttatatatacttatataaagttaggtaaaacatctacgccactttctgttttttctgttttatatgattttgttatcccaacaaacaatattgaaaagagtgagctgtagtgcctcaatgaaaaattgtttgatgaataggttgctttcgtgttagaaaactagaggagaaaccataatttcgattgctatacattgcttatctaatatatttgctaaacatggttaattacagttaacaaaaggaaaaaaggttaattaaagtagttgaaaattgttatttaggacattttgcaatctttttttttcttatttatttttttatgaaaaaaaaaaaaaaaaccaaagtaacagtgtagtcaaacttcaagctagcccttgggagagggatgggcatggcagaccatactatcaagtgggtttcaagaaaattttgccttttttccacttctcatgtgtaaaaaggaataagcagtgtgcactcaaaatgggtt

SEQ ID NO: 81391 - DNA, 652 bp, Cannabis sativa
aaaattcctttgactaataattcatagtaagatttggtcaggaatagagcatatataattgttgacaaaacatatttttctagctctgctgtgtagtatatgcaaaataattgagaggagaaaagttagctataatttttatccaactccttttttttttttaatttcattatcacataaatgtatgtaactatatgagttgttagccaattagctgagaaaattgtcatttataaatatatattattggtatgtatacttttcttttgtgaaagtaaatgtgaatgagactaaatctagaatcacgtggttgtgatatttttacttagttgcgctagctagaaatataaaaaatttcttgcattgcttagtgatttttccatagaaagcaatagtttttttagactcctactataatgatatatagtatttttaaaatttattacaaaaaatatgtatattttttataagtatttttttttttatttgggtccttaaaataagtgagccttaagcctagctcgctatgcctaaggccggcagtgcatagaacttaggggtgtacagaaagtcatccgatccaattacaactgaccaattcaatcccaaccgatccaatagaatcggatatccaattataattggatcggat

SEQ ID NO: 81392 - DNA, 854 bp, Cannabis sativa
tgggtgggtaaaaaccaaggtttaaatcatgggcttgggtttgatgggcctgatgggcctggcccaattgattatgaactagatcaggaagcctagaattgatgatgatttttgatgatgatgaagatgaggatggtgatgatcttttgttcttccttgaaccaccacccactggaatgcttctgagggacccaccttcagtccaataccttctacatgtcttgcaaaagtaccttggttgagttaagctgtagttgttgtagtaacaaaattttgtgttggttgaattgcaccttgggcaatttagggcttgttgatgatgatctttattttgtgatgatggcttcatcatgcttgtttttgatattgatgatgatctcatatccaccaaattattattattattattattattattattattaattatattattattattaatcttaccaccttgtgataatgatgatgaagcttgaatattattggtatgaggctttgggcatgagtttgtgattatttcttctattggcttcaccacaatttcctatattaatttcatcacacaaaaaagtaaaattttattaattaacaaattattaagaattgaataattagggcaaacaaaaacaacacaaaacaaaagatatttagttgttttttttccttaataataacagaaaagacaatggaaaagagaaaagaaaagaaaagaaattgaaaaaggagatttactctttgttttttaaacactacataagcaaaagataaagataaagttttttttttttttttgaaaaactgataaaaactaaatccaaattcaaggtggggacttaatttcttccactata

SEQ ID NO: 81393 - DNA, 3879 bp, Cannabis sativa
taattttgcataaattatgcaatttttagcacgacaatatttcgcaggtaatgttgcatattacttatagtgtgcatataaatatccaaatcctatatataataatgatattatataggattttgttatagagcctatctaaattataaagtagaattttgttaatatcgtttgtcccttcaaaagtcattgagaataatcagttttgtttttctgaaagcagaataatgagctttttaatacttgtttgtgagtacaaagtacgtataaaatcatgttaggagagaaaacaatatgtccttcacaaaattagtattttaatccatgatttaatttaatacagcttaacataagagttccaaggccgtgttgaagaaagaaaaatcaaacaaaaatgaaaaactaatcttagtcttaaacccaagtgacttctttttaaacttcctatcgtccctcatactattttttgttgaaaatatttactaaaaattgatttttgtttttttctcttattttgcagcaagagttggtgttgtacttgaagaagaacctcaaattttgattgtgatttttcaaaaggaaaaaattcatcattaatatacttttcccatcaaagtaggtgcatagagtagtatttcatatgagtattaattgggaaaatcttcatcttggaaggcaaggcaatgggagtcttgtcaccataattaccttattcttgatcaaaagataagaatgggcttctcaaaagatggatgggatatttgacagctttggccaacttcaacattcacacaaatttggaattaatcatatcatgacttggaaaaagtaataaattcacttggaacgacaaaggacatagccaggccaaatgagtatatataatagtaaaaagtgtcaaccttttgcttgtgtgaaaagtttcgtgtgtattgatagataagatttaagattgtaagcttcatttaaatgagaaaataattcatttacttcaaaaatcaaaatggctaatatgaaattgccaaatcattttttttttgtggggcttgttttattataacgaatcacccatttctttctttatcaatactgaataatagatatcagtttcttactagatgatggaaagtatttttggactcttaaaaatgccttcaaaaatcaaatattttatttagaaagccttttatcatgctctttcagctgctttaaatctttaaaatcgaaatattatttttagtactctttgctctttttgttttgtaaacattgaatctgtttcctataccatcttagaatgttccaaaacattacatgaatagagaggcactacttttaggaactttcatgccctaaataagagttgtgatattaaaaaaatacttgcttagggttttgaaagtttctcaaaggatgagttatgtttgtttttggatataatttggaaaatatagaacaagcgtaacaaagttttgttcaaaaaaggaaattacttcaattctgccattgaatttcaagtctcttctttgctacatgaatatgtcaaagctgaggatcaccaaattaaaactctaagtgaaacgatcaatcaagatttaattgaagtggttcacggtaacggtgagttatttagaaatttacctaaaccaagcttctttaaattgaatgtagatgctacgtactattgatgatcacaattcgaacattgggattggaaaatttgtgaagaatgatggagggaaaattgtagctggcttgtctacctcttttgatggtaaattgtccctcttctagttgaagcaaaaggtttagtttgggctctcaactcgtgtgtatttgtagaattttctttagaactgattgaatctgattgtaaagttttggtgaatcaaactcaagcatatgtccatacacgctcttctaaactagtaacagatgttgtcagtgtgtaggcatcgttattcgcagatcgcgaagtggcattacaagttccaccacccacaacagccattaaaaattaatatctaagagaatagaatgaataacaacatttgaatgtggattattaacccaaccaacaactatagtagaatcactattaataataaagatattgaagccaaattgatgcgcaaaagtcaacaacagtataatagaaagcagctctaccacattaacagaaaactcccccaacacactagttgcccatgacagccaaaccacctttgcttcatcttaaataaccccacccagcctaacaaccactaaagcatcggtcgccagttcaaaggaccaaggtggtggcagtctccactgtgaaagtcgttgggtgaccgggttcggagacgaagaccccaaaaggagttcccgccaaacgtgatcttttaattcaaataggtggttttgtgctacttttggaaccgcttctattctcgactatatatcaccaaacaacactgagtttctatcataccacaacaaccaaatagttaccatcgtcaactcaaaactctcacgagatagctttttgaagaggaaaagaaaattttctggaattcgaccattgacacattgacaaagcaatggccagacccaaaacggtgccacatcaaaattaggctagaacaaaagaataaagcatgttctaaagtttcaaattcctccccacatcgtaaacaacaaagaggtacttgaactttttaagaccgaagttgtgtagctactagtatcatcaaatggaacatacgccggacaaaaactttcatgtttggtggcatctcaaggttccataaaccattccaccatctgaccatttgagatgaatttgttactccctcatcaaactaaagtgaccatgccaatgaatatctactctaaatattataaattccatcctgatcatagtgccaacaccaactatcccctactactcgcctcgctatggaatagatagaattatctcaacatccacgcgtaaaaataactattggagcttcccaacatcccacctaccagatggaagaataaattcactcaccggcactcatcattcacccttctcatgaatggcttgaaagaccttggtctcaggatccacaggtcgttgaacgacagtacttacattccatctccaatggaccgctaaagactactcttaagaacttccaacaccaaatagaactaagatgagacgatccatcctttttagtagcttctaaaataaagtatcttggaaaatacttatgttttaaaattcttataagtaacgaatcgaggtcaagtagcaatctccgcacttgtgtagccactagagctcgattaaaaagttgaaaatcttaaaaccaaagatttcccattaccttaggctgacacactgtctcccactttacccaagggattttcattttacccccattcgagccccaccgaaatttcctcacaatggatttccataagaagcttaatgaaactcatcttataagttagaatatcttgaaggatagatttaattacatctcttctaccagcagaaaagaaactacgcttccatccccaaacacgcttcttgaccttctcacaaatcccctcaaatgttcgactgtaggcaatccaagatacttgtcatgagtagctacagatgtcagacccaatagtcgtagaacctcatctctatcacttgttgcacgttcatactaaaagtgatagaagactttttgaaattaatcttttgactagatgcaacctaataagttagcaggatacgcttagtagttttaatatcacctctactagcccataatattgtcatgtatggagtgccttgatacaaatgcactttgaaaagaagagatgagtgggccaagagtattcttcatcctt

SEQ ID NO: 81394 - DNA, 1120 bp, Cannabis sativa
aggtgagcttactgaccattcacacaaaaagaacaactgatccgtatgtgactggctaattggctaccaacactttcttatacccacatagaaattacatataaaaacatagcatgaaagcaattataacaaacgaaacaagagatgacatattattaaccgtctgctcaaagcatgtttcaggagaaagttctatgaagagcaaccataacaacaacaggcatgaaccagaaacttcaagcaggcagaaagtcattaatcatatagatttctcaaataaaatctacattattatataaacaagtaggaataaaacaaacatattttcaatgatatcaaaactcgaatcagatcatgtatacgatcaaaatttcaaaaaccaatatgtttcttaaagtacaaatttaatgtaagtagtagtagccccatagtgaagcgtgaagaaattcttcattaccagaggctacaaacacaggcattgctataggtgagcttactgaccattcacataggaaaataacagctggtgagctggtatgtgactggctaattagccaccaaaaacacacaaacattaaactacacatcaacatatacatcgttaatgaaggaacaagatcaagattgaaatgaggtaagaagaggggacgaaccagttgagcaacgacgaaatcgaatccagcaccgcaaatatggttcgacaaaagttgaggcatgtcatggctgaaattggtctcgacgccacaatagcgagactcgcttttgtcgcccgggcgttcgcctagaggcatttcgtccgagctaagggtttcgccgaaatgaataaggaagaaggaagaaagagggaggaggagagagagactagggttttgtgagggtttaatggaaactattttgtatttatataagccggaagagctttactttgtaagaagagagatactaagagcatctccagctagcgtgtcacaaatttagtatcaaaaactattttcattagaaccacaacaccaaaaattacactaaaacaatattcattattattaaattaattttttaataaaataaaaataatgatggtttcacatttaaatttacacacaataaattaaaaggtgct

SEQ ID NO: 81395 - DNA, 897 bp, Cannabis sativa
tcggccatttcaactcttttgtttagataacattaattaatgataatatacaatatttgttgatttgaacaatgaacattttctcaatctaattcgagtttaatataacaatgaaaaaaatgggaaattattagtcaaagtagttcaccaaacaatttttaataaatgtgtgactattaatcctacaatgaacatgaaaagagatgtttcgagaaattggataataaactaggatttaagaacgtggataaatcgatttaattctattacaaacagtcaattcaatcacaatctaccgttaaatattaaatatctaattggattggttctgatgttagataaagtgtttttcatttagaagaatttctaattgatgtgtgactattaatcatacatcaaacatgaataagagcttcacaaaaattggataacaaactagtaatatgttctaacaaaaattctaatttattgcataagtgagatctcttagataataagaaaatcaaactaaacagtcatgaatcaagagagttaataagtagtgtaaccattacaagataacaaaacttgtaaattacaatttaaaccatctaaaattttctcaaagttgtctagtactacaatatacaaagtcatataacaaaaaaaataatctacctaaaaatcttaatagtaaagaaaagataatcacaaaacttcacctaagcttattagtacaaaaattttattttaaacttcacccataatgtcatagaaccctaagaaatgtgtcaaaataagtccctccctcattcgagctttcattagccgatctttctaagtgtattcacgtacgtatagctagaaaatgcgacgaagagcttgcgaaacctacaaaaataaagtcacattttcgag

SEQ ID NO: 81396 - DNA, 2428 bp, Cannabis sativa
  modified_base (97)..(107): a, c, t, g, unknown or other
aattaccacctcatatccaaatacaccttacattttaaaatatggtgtaattactaaactgtgtaattattaacctagtaattaccctacctagtannnnnnnnnnnacttccaaacacaccctaaaaataattcatcacttcaatctctctcccttttttatttttatttgttatctcaataattggtattaatacggaaaaatctgactaattttgccaagatattttagaaaaaaaaaagcaaagaagagtaagggagtgaagtgaaagatgatagttaataaaagaaaaaatcaaagatgccatgatttttcccaaatactagaaccctaaattaattgacttgaagtgatctgacaaaagaaagctcctcctttccttataatacttcgagtgactctctttattgttctttctcaaattagttttatagtgagttgagtaccagcccactctatttaaggtggtatacttagatttttgtggataactgtgtaatttatacattttcgtatcacgactcgagccttaagctgtcacagatatgtaatatccatagtttgagtagtcaaaggccacactttgacccgtgtagaaagataatgcttataaattatccttttatttatatcacaaatacttatttaaaaataatagatagctcctatatcgataagaaaatattagtaacaaaatcaagatcactcatcaatataaaagaacaataatatccccacagttttgtagtcaccgaatagatagatttaataagtcaataaaatacaaaaataatgtctagcatacatcattcctcatttctaactagtacatagttaatttaagtcatccaggccatattttcaagcttaaatacaaaatcagtttcattataaaatttgataaatagaattagactaaagtaataacgactttcttcctcaacagtacaatcctcatccactagcgtcaaacttagttcctagaatgggagaaaatagggggtgaccttataaagcccagtaggaaaataactaatatctaagaacccttggtttaataaaaattcctacatcgttagcttttaaaaataaaacatcttatcaccattgtcaagatgtataaacaaaatagaaagaccacaaataatcacaaagtcaagcttcaaatgcatatcacaccgtccaatagactcctaactctcaataccaatcatataaaataacatccaaaaatcaggtagttacacctgataaccaccaaaatactaggactcagattcaattcattccctgtacctattctaggtcttacacctataggtgagtgcacacctgatctacctataatgacacagagactaagtcgtgaaacaaaaatatgcataaatcatgatcaacatgactcttatcagtataaccaaaagcagacaaaaaataagaataacaaaagaacatattccattttattttctagaaaatctggcagcataacgactgtattttgaataaacccaaaaaatcataacctgcataaatatttgtacaaaaatatatttgacactcagtgccccataatagtccaataaaatatgcagattaagttttcaattttcaaaaaaattgacaatcatacaaattagaatatatttaatgttattcaacacatataaaattaattccaataatcaagttgagtccctacctctcctaagtagttaaactttgtccaaaaatatgattctaagctctcaagtctcgagctctaattatttagtccaatcatagatatcgctctcatctataccatcaaatggttcaatcattatcatcattatattctacattcaaaattgagtccaacgacatataatatgattacatttatagtttggggttccgaaacctcacctaagcggtgcacgttaactatcgatagtggtagaaattagtataccagaaacaccgtacaaaataagggtaatatatatcaaaatgaccacctcaatgagtagaatacatccatgccaagtatttgtcaaaacagtatacgatattgctagaaagtcgccggaaataggcagagctataaaaagtcaccaaaaaaagtagcgggctgggcgaaatggcttagtgtagattattctccttgatgagctgagtctagtggtgaagacgactcatcaaaaagacactagaggtggctgaaaaattcgttcaaagtttaaacctccaaactttaacttgcgatcccgagctaatggtggtgaaagaggcggtgccgcttggggttaaggtcatcgacgattggggatttgaatggttcagcgtgtgggatcggacggtaaccagagagtggtcactgaagttacgctggtgattgggtttgtgggtttttcttttgtggtatgaagagagagagagagagag

SEQ ID NO: 81397 - DNA, 1223 bp, Cannabis sativa
ttggattataaaaatcaaggtcacctttttaaccccacatggtagtgggaggctcataactaagggatcatcagcattaagaacacacacatctcctggcttagcctccaccaaaatctctcctttggccattgctatctcctccaagctcccaaagttcaccaaatgcgaatttccaacattcagaatgacccttacacttggcctggccatccttgccaactccaatatctctccctttgaatccattcccatttccaaaaccacgagcccagcattccccggaatcccaatcagtgacagagcaactccaatctcattattccaattcccaaagttctcataaaccttcttctcacaacctccaagagccaaagctatcatagactttgtagtagtctttcccgtactcccagtcactcctaccacttcaccactgaacctactcctcgcataacttcccatcctcatcaacgaaactaaggaatcgctatctgtactcacaaagcctttgttccaattctcagaaacccgattcccgattaccccaatacagcctttttcagacagtttcggggtaatgaaatcgtgggcgtcgaacgtttcgccggaaatggcgaagaaccactggttgggcacgagagttcttgtgtccgtggaaatggttccgggaggaccacattgcacaattctgccattgacggcttgggctatctccgtggcagtccatataggaggaagaagaagaagaatgggttttgcttcttcacccgaggaacgagaatggagactgatggagctgagtaatggtggtttaggacggcgcgttgtttttatgaatgagggcgcgtgagaaaataaagggtttaggattgaatacatggcgagtccagggaagactgtgacgactctgtaaacagtgccagtattgattgttacgccattgtgggttgtgagggtggtggttagttagaactgtacgttcttagacacaccatagcaccagtactggtggcacgagcacgaaactaggcttggcccaccccacaccaagaaatattggcttgaataggacacaataaaattggggtgttcatatgaaatagtcgattcaatttaatcagtatgatttaatttaattcaatcagtaaagtgtaaatatttgaacttgtacgaactgaattgaattagaaaattcaaaattcacacgtgtgatatataaa

SEQ ID NO: 81398 - DNA, 1636 bp, Cannabis sativa
ttagaaactcaaaaagtcgcataaatctcacacaattcaaattattagatttgatcataataatttatcataaatatcatacagttccccaaccaaagacaatcatgtattcatatagtatataaatagtataatataatagatggcatcaatattataaatagtataaagacaatcatggtatcttatgattaattgatgatattttttaaaattattatcttaagttatatgatgagactgatactttttttttttttaaacagtatgagaccgatacttaattgcatcaatattaatatgacaccaaacaaaatataagtactatgcctttagcatatatcaatatatatatgtatattatataatacatattagagtgtcttttgaacctatagcatataatataatataaatattatataacagtaagtatacttactacacatacaggttgaaatcatcgacaatagtagacgtcgttacctattgcagttaacctgtcagtaaattgtgacgtcgttacttattgctgttaccaaaaaaattatctttcaaattataaaattaaaagtattacagttaaactaaaattataattaacaataaattttaaatattattatgttttctttttataattagcacttaaattaaatattttataataaatatgatgttgtttattgaataaggtcatctaaaacaattaattacacaattaaaaatataaataacaaaaataaaaattaaaaatataattaaatatacatatattacacataataataacctatatatacacattactgttagagtttgtagtcatctagtattttgtattttatctatacaaatttagtattttatatttttaataatattaattttgtactttgtattttgaaatcacacaaatgtgtatcatgaaattagattttatcaataaaaatttaccaatataatcaaattatcttgaaatgtgagttccaaattaaaatttatttattagttacatataattgagaaatttagttaaattgattaaatttcactttaaattattaaatatgtacaatttcaaaatataaaatactaaataagtattatgtaaaacatgcacaaagtaccaaacatgttctttgagccaaataagtatagtatgtctatatatatagtgcacctcttaaaggagtatttttagcctaatttttttgtgactatgtacggtatagttatttaaaattatttgtaattttttagaaaattccaagtagtttataatactgaaaataaagtttaaatattttgttacacgagcgactaattttttttatacgtgtgatagataactgtttaaaccttatttttaacactgtaaattattctaatttttttaaaaatttacaataaattctaaataactacaacatactaattataaaaaaaattagactaaatttttttctaccgaaatagataaaaaaatctactaaatcaatcctttcgtgtactacataaatttctgtaagtatatttcctacattttattggtcattctctagtattataccattaatacttaaagattattcaaaaataaaaataataataataaaggacagaaaaagaatag

SEQ ID NO: 81399 - DNA, 809 bp, Cannabis sativa
gaagcattgagatgaatccgagcacagataagcctggtgcaaacgaagacgatgaacaagatgctcacggcgaatcctatgaccgtcatcaccaggtttattcctgaagatatcatcttctctttttatctttcttccgaaaaataaaaaatttataaattccgcttaaacccaaataaaaaattcctccaaaaacgatttctcaaggaaaaaaaagagagagagagagaaaaaagaaaagaaaaaagtgtctcagttgatcatcttcacagtagcgaatccccttctaaagtcgatcaaaaatgtgacaaaccctaaagagagttgaagtaattagggtgcagggtatgagccacttgtcgcgaagaggccagaaagtgagagaaagctagtgttttatccgtgaatccaaacagcacattttgattttgtcttagtttaggtgttagcgtgtggagaaggcgagtgtcgtattgttgaagaaagaatggaaaccttggagagaatggatgccatagaaggttgggcagagctacagtaagactgtaaaagagtaatgagagaaagaatcggcgaaatggaagggatgagagagagagagagaaagagatattaatctgagtctaagctcagagtcagatccatccaagtgaataataaccaaacacccccaaattatctcacatacacagaaacacaatctctcctaacttatatttacgaaatattatataatattttaaaatatttataaatattattatattgcatatttcttttctttttctctctcgaaattaagtataatt

SEQ ID NO: 81400 - DNA, 1754 bp, Cannabis sativa
gatggtataagccttaaggatatttgtagaattctcaggaaaactcattctaggaattgaatcttcttagggcaagcttgaaataccataggagctgtttccgacaaagttaccaggaatatgcaacaccgcacatcaccaataattttcttgagatgaagttgcatctcattatttgatgtgtgccagtggatcttctcacacggtatacatcttccataccgcatcttgaacttgggcaagggcaaggcatttatgtataccgagaatggttatcttcttgacttgtcaagttcaaggtctgaaggttttgggcctgttaagccctttatcatatcccttatttgatccaactgtgcttgcatacaaggatccgttgctgtaggggcttggctgactggccctccttggaggggctgtagacccgaatgtgctagggtttggccgaccatacattgggagagtgtatggtcgaggcaggccagctgtgagcttgggtgttggccttggccagctattcccaggtagggagattggtcctggccagccaagcttatgttgggcagttgctcatggccagccagccctgtgttgggtagggactgaccccccgtgccccctggttggctggtgcagtcggtgtgttaattgagggtagattgcaccagtttctagagttgggtggattcagatatttgaagtgattagactcacttcttaagttattattttggatgtttccacccattctcgaacctaactggttaaatattggcctttgggttactcgctatcggatgcctcgagaagggagctcacttccctggctagccaaaggtgcaccaccagagggctgggcagccaagggttggctaatgggagagttgttgagcctaagatccctgtctggcccctaaccgctggttgctaggattgcattgttcttgctgccagacttttgatgcatcgcctgttctccttcaggtaggggaaggtctgtcttggttcctaaagaacctgattggatagtttctcggtagaccctccccgatctgtcgactagtcttcgttagagtggatctctgatgagatcctagcctctccaagcagttctttcaatgaaccgccttattaggtcgcttacttctcagttgcggtgatccagctctgcctggtgagatcagaggatgtactttttgtcatccatccacctcaagaactcatatctctgttgaacgaatacatcacaattaacagtgcatggttcttcaatttggccagcatggcagacgacctctctaagtttggctacctcgagaaattctcccatgtctacatagggctcgccaataactggcttgtcgattcttggccttgtttctccagcatagtattggggcgaggtccagttgttgttcctgggggctgctccacgtgggttcttccttcagtgtgaggcgccagtggagggtcttcccttggaggcaggggctgattgttcaaatccaccgagatgtttgtgtcaacctggctagctgtagtggccagctttgtggtgcctgtcgacatgacaggattaaccacatctgcagtgttcatggaaattccagtcgtgactcaaacatggacattaggatctagaatcaaagggtcttgagggagacccgatgaggcagaggttgtatcggagttcttatcatgttaaccattgcatttgatcaaattacttgagttcgtctctctctctctctctc

SEQ ID NO: 81401 - DNA, 1558 bp, Cannabis sativa
tttttttttcgatatttattttcagagggcagtcaaccctcctcgcttttatgtgagtctacccctgtcgacaaggacggggatgggtttcgtgtggggttcaacaaggttgggtttcgcgtgggtcgacaaggatgggtttgtgtgagtcaacagggatgcgttcgtggttgaggacgatagaggagggttgtttcaacggtggagagctcaggttttaggcgtgggtgcgagatgctaacctagaaagaaatagagagaaagagagttagagagatatatagagaatcttttgaaatgccaagagtaaaattggaacaaagataaaagattagcatagatttctattctttattatgatgggaactatattgttattggaactagttttaagcattcaatttcaaatttccattgatatataccactcccttagaaaaagtaagagaatattataattaaagaaaaacttatttctaaaatattcatttagtctaaacaaataaatatggtgttgtacacttactaaattggactcattatagccgtgcgtgtgagtaatgatgaattgatacagataacattattaccaaacaccacacacttttgcaacttttagagacaaagcttgcgtataaactattgtgagattcttttataattattccactaagattgcgctaatgagtaccaaaattttctttgacatttgctattatttgtctagcctatatatcagttaaaaaattattgaacaaaacctttcttagataaaacattgtgtcaaaggcaatctccattcaaatatcaaatttatttaattttcaccatagatagttttaagtagggacaatatatcattttactttattttatttattttgtaatcaaaaaaaggattttactgctcaaaagtattacaataaccaatcaattaaaagttttgtctcatgtgttccgcaaaaataacactgcggctcatggtttggctaaacatgcccttaggctagacaataagttatgctggtatgaagaggttccagcaccaattgttaaaatcttctcggaattgtcctaatgtgatcctgatcacgtttttcaaaaaaaaaaaacaaaaaaaacaaattgagctttaatacggctgaaccagatttgatcagttcttatttaaaatgggaagatctatttatctatcatcaagaaaaacaaaaagaaaaatctattggtaactatacatttggtcgtgtttacaattctatctgtatatataaattacattttttttttttgtgcaaagagtatcatttcttgctacccatatgttgtaaataatagcattaattactgcaacataaacttcttttttgaatttagaagctttgtatcttctagtccaatttagcatgcctttaagagtgaattgaattaaatctattttaattaaggctaaagatcgggtgagttgattgggttctagaaagaaaaaaaacaaccgtacatgctcgtgtatgttagaatttattggggtcacaattgtatatataaaatgtgtgttggg

SEQ ID NO: 81402 - DNA, 1982 bp, Cannabis sativa
  modified_base (264)..(275): a, c, t, g, unknown or other
  modified_base (1922)..(1947): a, c, t, g, unknown or other
cagtgattagcccacactaatttagcccaattccttcagcccaattcttttaggtgaattgggaatgggcttgagaaattcttaatttgttttagatagtttataaaaatacctgattttatacctttttcttggatttgtacatcatactttttgtgcaaaaaaaatgatcgtagtttctttaattgaatacggttttattttatcattatttcctaactttagtttcatttataataatagtaaacatatatatatatatannnnnnnnnnnntatatatttatatatatcaaaccaaaaaaaaaaaaaacccttgaaattaaaaagcaaatgtaagaataaggaaattacaaattttatgagtttttatatttttttttttgtgtaaaaatatagttttttttttcaaaaaggttattttatgggaaaattgaagaaaaaattagaaaaatatagaaaaatcaagtaaggataaacatgtacccttatagtaaccagaagggtaaccaattaccacaagggggtaactaggtaccttatgctgttgtttctccatatttttttaaaaaatttctcataaaataacttttttgtgaaaaagccatacttttgtaaacttatactttaaaaaccataaaaataaaaattttcccgaaagatattgaataatttttggggattattttacaaatacagaaaaataacaaaaagaattacaaaattacagttgtacagaattttaaatatttttacaaatttttatgattttatttacagaagatacggtctttgatgtagtttatgttgtactcttattaatttgttgttattgttttgatattattttcgtgttacttttatgtaattttcttgttatttttataaaaactcgtaaaaatataaaaaaaaaataaacttaaaaatataaaaaaatttatagaaaatagtgttttgtataattatccctatttttttttcaacaaaattattctatccaatttttgggcctatataaacaatatacagttaataaacatcataagtggtttttggatctgttggttcaaaaataggagtggaaacccaaaaaaataaaatgctccaaagccactgtcacaacacattttttaagggataaattcataaatacacacacaaaaaataaaaaaaaaatatggttgtatgaaatgttaaatattattatagtttttaagatttcatttacagaaaatacggtcttttgatgtattttaattttatactcttgttattttattgttattttgatattgtttttgttgttgttttgaatggtgaggtagttttcctgttactttcatgtaacttcatgtaacttcttgatagttttaaattttatctaacaaaaaatttaccaaaaataacaatttatgcaattttcttttttttttttaattagttgacaaatttaaaatatctttttcaacgggattttgattattaggtaagcactatattataaatccaaaacaaaaaactcttgagaaataaagataaaaaaataacaaagataataacatgtgaaaattttaataagcaggggctcaatacataacataatatttttgtatgaaattgtaattttttttttccaaaacagaaaatgtggctttaagaaaaattgatgttttcctaaaattttgatctcttttcactttgattgttagacataatcagtctaaatagtctatacctaaggctagtattgtaaatgtaggtcgaaccaatcgacacgatactataaattggtacgaatttaagggacatgaacataacacaatatgaaaaaatatggattcagttcgaggttgacatacaatacataagtacgaatagacaagttcaatgttaaaagtgtaataacaataacaataataatannnnnnnnnnnnnnnnnnnnnnnnnnaataataataataattatatttaattttaacataa

SEQ ID NO: 81403 - DNA, 989 bp, Cannabis sativa
agtttttcagatctgactattgacgttgtgttttgtggtacttcatgttctttttggttgaatgccaaatcatagttgccatttgtttatttttcttatttatgatctaaataatataattgttatatcctaatttttattggaagtcattggaagatatccattggtaggtgaatttcatcaaatattcatttagtttgaagacttaatattcttcacataatgttttatgtttgattgatggtgacttattggatccttagttgagattgatgttaaaattttcttctagattattgtaaacggcttggtatgtctattattgttgattttgttctatgagccatatcttcatgtaatggactttctttgatttttcataaaaattcccattttctctccccaccccccaaaaacaagaattaatatatcttttctttataaatcattataattaagaataaattatagcataacaccaaatattttcacttcactagcaattaactcacaaaattcaaattttatcgataaaacccctcgaaacccacattcagttagcatttagtcagttccatctatttttgacatttaactatcatcttggttgtctatatatacatagagtattgtctacgtgaacacaatgaacatatgacacaatattattagctcacgtaaataaatatttaaaaataaaattaaagattaaaaataaattaatttaaaacaaaattataaattattttaaaatataaaaacattttgttttcttattttgttttctttttttaattttccctttttctttcttctttctttttgaaacccttaacttaatgaccaccattccaccactgaaacaaccccaccattacacaaccaccattataccaccaacactgaaaccaccctcaccgcaaccacaccaccaccatcccaaccactgcaacaaccactactactgttataattttttaaatccaaat

SEQ ID NO: 81404 - DNA, 2402 bp, Cannabis sativa
ttaatacataattgaactagttagggttgctaatccggtttcataatccctagggtattacaataactatgtcagtgtcactctgaccaccatgttctgggcattcctaaggtgtttttctcattttgttttggtagatttcgattctcaaaattattttaaggtgtttggtgaagtttgataattttctgaatttatttaaaattattataaattatttagtttattttagataataattataataaatagttagattgctcagataattatatattaattttatatgtctcactatggactataaaatattgtagaattgttaaatttagttttttttttttaacatttttataattttcatgaatttatttagctaatatataaattaaatatgaaaaatacttaggtgatgctaaaacaataaaacgtattttttaatactattaactatttatgctatgaaatagggtttataatttattgattgatgtaggtatttattttaattatttgtgactaattaactaattaatttagtttcaattagaataaatagtaaaatagtgttcattgtttgaaaactgttaatatgatattacaacataaatctagtgtctagaattaattttagaccaatttgagatattttattatttttagttaattaatttatattttgtacaatttacagtgtaattttgaacataaatatgaataatatattatacatatttttttaagtagattgaatatattttatgatctatataaatagtaaagaaatatgatagtttatgagtttgatagtaaataattatatatttgattattattgtgtatgtaaagtaataaatactaaaaattaaatgatgatggaaagaaaataaatttctttctaagtttatcaaaataaataaactttctagctagattaaatatttaatatgtaattattgaatttatttgctattttgcacggaaatggtattttaataaaatttcaagtaaaagtgtttgtatgaactaatatttacattaaaaatgtttgtaccagtacatgtaatgtgttgatgtcaatcaaagtgataaattgttatgtttggtgtgccatgcaagtaaaattgactttcgtgttacgtagtttgacgtaaaatttcattattaatattgggctttatgcttgaatatgctttaagtgttattgtgttattgggtatttaggatcttgttctcaataaagaaactcgacgagaggtttgagggagagaaaaaagatatacttagcaactgaggtaagaagagtgggcatctatgaacagggtgtatgttgaaacatgcgattttattgtgagtttgttgtttatgtgcttatgagattttgtattatggattgtttatgttgatattattagcatgagatagagataaggtttttgattgcttgtgtgagaataacacttgtaggataagtttttctgctacttgtgtgagcatagcacttgtaagatatattttttgttgcttgtatgactttactagcatgttctcttatcatgggtaagtacaacttgtgataacggattttcccattggatgcaagtgtgggaacagcacaaggcagggcaggttacacttcatgtctaatcaacatgagtgagagtagattattatatgtgaagataatatacgataagatactgtgtgataagtgtgtgagtagcatgtattaagtttatactatgatatgatatatcatatgtaggaataatgtgtgatacgatatgttgatatagtgtgtattgatttgatgttaagatattgttatattgtattctattgatgattatgttatctagttgggagagttatgtcatatatagttcttcttactgagctttagctcacgggtactctatgtgtaggtaaaggaaaaaccaaatagcgaggatgcgagctcaaaggtttgagtcaaaggccaagtatccatttaggtcaaggtcttggtacaggatccaagtccaaacccatcaggatccgagtccaaggttagggtccaggtccgaggtttgagcccaagtccatggtcatggtatgggactgggataaaaatcgaccctaaaccctttgtgaatattataatactagctaatacatgtcatttgttatgtattaaataatacgactcacattatattaaaatttataatcgtaataattaaaacaatacaatattttatctaaacagtattactatttaatacaatacgacccttatatggtctgccaaacgagccctaagttcattaactaagaaaaaaagatggaactagtagggatgtcaattcgtgttcacagatcgtattcgtattcatatcaagactcatgtattacaggtatat

SEQ ID NO: 81405 - DNA, 1485 bp, Cannabis sativa
ccccagattatcttgtttgctcctcgatattacttgattgaagaataatcatactataaatatatattatttactagttcttgcattattaatataaataatataatcaaagtaaataattaatttaatatgacagaatcatgaaattcttaaattaattaaaatcttaaattttttttttttttgaaatcaaaaatttgtattgcatcaaaacttttacaacttgttcagcacttaataaaagcctgaaattgttcctatgtaatatttacaaatgtgcaaaccaatctttatctgaatctttcatcttccttggtcgtattgcttcaatcctcatctttacttccctttggattcgcattgttactactgatattctgcttatttttttgcaccacagaacttcatttctgcttctccaaacatggtaaatcacagcagctataccagtagcaaatacctgctgttgcctttagcagctggggaaaagtggttgctgcagtcttccaaccaagccaccttgttgttacttcaaggcatttcttgctgaagtaacagccaaaaaaaaagatggcaatgattctcactctcttgttcacatgtcatacatttgttatccattacaatattaaagcggatcaatctatccttagtttgtaacctgttaaggatagctaaccgagcaaagaagcgatgcttagggatgatgaatctcccccaaacttctccatgccaactctgcttctcgaaactaggagttaaatattgataaccttgctggatggaatagtctctcataccaaactattgcaacccgattcttcttttaaaaacttgcacaatttgcctccaataccaactgttttgattggaatttgtatagtcccatcaattgtttccttttatatagacgctatatgtacccatttcacccacagattatcttgttttgatgcaactgcccaaacatatttgcctagtgccgccttgttccataacatcacatttcgaaatcctaatcctccttcttttcgagtcttacagagatcttcccaagctatataactcagtccatgatactcaaatgtacccttccataagaagcctctgcaaacagcaacaatttctttcaatactcctttcggaagtagcataatttgcccccaataaaatcttaaattaaatttaaataaagaaagaaaataaaagaaaaaaaatattttaaaaaaaatgaaatcatgacattttaattgttttaacatattaattattgtaaaaactattataagttgaatatgtttgtaactttctataagtataattattgttttaaaaataaagttaattaaaatatgattttatgtaaattcaaaattaaaaaatatataattaaaatcttaaatggacataaaataaaagtaattgttatacctattgtttaaactatttaatgaaaatatcgaattgacacgtggcataaataat

SEQ ID NO: 81406 - DNA, 827 bp, Cannabis sativa
caaacgcaagaaagacaaaataagaatcattccccgaaaaagtaacattaagaaaaaccaagaagacttataggtgccgacggaaatttgatagaaaaataaaagagggtttaaagcctattgccttggactgacggaggaagaccaaacgatggatagattcgaaagagactcaaagaggatcttctatctaactcaccgacggaaaactcgcttcctaagaagtattcgacgacatagaatagaaacatcttagaatacgacaaacaaatacctccgtcggaaagaggcaccaaaataaaggttgacattgagattcctccattcaacacgagtagtaaaaaggagtttcgacggaagagaggccacggcccaaaaaggcaagacaaacaacccgaagaaaatatacaatacagtcggaccaaaatggacaaaaaatagcagccactacctaacaattagatgcgtggcaaaccagggtaagcagagagaaaggacacgcgtcaagagaagaataggtcaagtacagatcatccatgcaatcaaaggacgtaccatataaataagaaatagactacgtaaaaaaggggagaattagaaactgaaaaagaaaggactcacacgaaaaattacgactgtttttggctaaaataatgtctacttgaattaaactttaagggtcacaatttgatagatgtgaaagtggggcatgtttttgtaaatatcaaaattatggacatgatttggtagatggataatcactgcgtcagtaaaattgaacaaaattagatataaatttaaaagaatttttaacgatttgaaaattt

SEQ ID NO: 81407 - DNA, 852 bp, Cannabis sativa
acaatcataaatacatacatgattgaagtgtgtctattccactcctaagctccttcagataacggcgagcttggtgccctctaaaacagctttgaacacgcagaacaccatgtagggtacggtttcttgtgtcctctagcaccccaatctgcattgaatatgcgcaccatttaaagtcactaaaatttacgcattttaagaatatgaaatatttactcagaacataaaaatgtgcaaaaaataaaagttcacggcattcaataattagcaaaatatttatcaacatttgtaaattatatttaaactgtcacataaaaaatgctttctgctgagaatttctcttcttaatagtttaatctcttaactgtacattacacacataaaaaggttgattgacacagcataattacggcttcaataagatcctctctttccctcccatttttttccaaagatacttctttgtgttaataatgagaaatatacaaagtcaagagaccaactttgacctctaagtatctgaatacattctttccctcccattttaaatgtagaaaacacatgagctaaaattgatgcaatataaagttaaattacaatttccaatttcacagctcaaatataaggatcctacattaactaagtgagtttaacaagattcatacattaaaaactttatattcctcaccaacattcgtacctgtccagttcggaaaaacaattttgtgtagccaacttgaaacatctcaggcagaatgtcgaactgatgaagaattgcaacagaaacactaagtggatcctgtgatgcaacattctccgacagaagaaaaccatatctaacatgattcaata

SEQ ID NO: 81408 - DNA, 2266 bp, Cannabis sativa
atgggtacaactaaaattattgaccatcaaatcacattactactcgccgataaggcaaatttggccaacaaatgaacaacaacattataagatctcacataatagataaaattatcaatttgaaacctactacaattactaataatgtcacccaacagaagcccccaaataagtaataatagatagattatattgtttttaatttttcaaataattagattcaacgataatgttgtcatatctaaaaaagaaggcattaaaccaaagcattgtgaatagccaaacttccgccacttcaagttcaaaacgactctccaccctataacttgtcgaggcacgagcaacactcaactcgaatcactaagccactacaattgcctaccaagttaatagcagtattaatctttagacaacctagcaaagaaagtatccatttatgcaccaacagaattgagtgaggcctcaacgaaggcctagaagaaagagaagccaccgtcagccttgaagaagatggaacttctattatttgtttcatgttgtgaaaagctctaaggtaatcacaggtccaatgaacactaagaactgggcacaaatcaaaattttatcatagtttatgtttgatgcatgaatagaaaataacaccataccaagatgagtggagtagtccgctaactctttgataggtgtggattgaaagcccgctagggatatgactctcatgccatgttgataattatgggattttatttcaaaaccaattggtgatgagtgcaatagcccatgttcttatatatggctcaatacttttacatctaattcatgtgggacaatattgtccaatactcatttaggataatagtgtttccattaattgatttatatatatggtatggatatggtcatatacatacttgatgcttcatacccgcagtaagtttgaaattagtcttatacacctttagcatctttcttgccaaatatatcaaccaccttgttgagacagagttgaaattcttttcacatgcttttttgaatatccactccaagaattcttttacaattcgtaaaattttcatgtcaaatttagatttttattgggtacttctttatcttcttcaaacccttaaaacctatgagcatgtaatccacgcaagtgagtagataaatagtattttaggttagcaaactatgatgggatctttcttcatatatcatttaaattatggcatatgtagttatgtactactataataacaatattacattaatataattaatatttacattatgtatcacaaaaataatgtaagataaaaaaattatttaagattttttcaaaagtataaataaaaaagtgatatttgttgttgtgtaaaatttgtcttattctatatttgtcctaagctatattttgtattaaatttgatacaatttttggtatgtgttaaatttagaccatgtaacacaataacaaacactagcaactaagtgaacgctcgcccttctcacgctcactaaccctagactagtgttctaaatacaagttggatttcttgacatgatacgaaactgacacaagcccgaaaggtatgagcacgactaagcacgaaaaaaattacaggtttggacacaacacgatacaaacaatatattcttaagcacgacacgacacgagaagcacgaaatgcacgacacgtaagcatgaatagactagcccaaaaaatacgacacacgacaagcctgaaaaatacgacacgacatattataaaactttataatttattatcattaataataagatattaatttattaattataaataagttaaaataataaaacttaaatataatactaaatattataactttataattaaaattaaaaaatataaaaaattaaaattataaattaatttatttatagggtgtgatataaaaatttgagtatttataatcaaatatttaaattcaatttttttttatacatgattataaaatttataatcatatttgagtatttataaatatttataatatttaaatttaaattttaataattttttgatatgattatttgtaaattattactaaaaaattatataaatataattaaaattttaaaatatacaaataatttactaattgtaatatatatatgaaaaaataaaatatgaatttaagtaagatatgataataaatttacatgtttaagaaatacggaccgacacaagcaaaatttaacatgaaattattgggcataaacgta

SEQ ID NO: 81409 - DNA, 1169 bp, Cannabis sativa
atcatccgcaaataagagatgagaaagtttttgctccattgacccaaatcgtaagccatgaattcttccagcccgttcagcttcaaaaattaagcaagaaaggccttcagaacataaaaggaaaaggaagggcgaaagtggatcaccttgtcgtaagcctctttcgggaacaaagtgacctttggttgatccatttataagaacggagaaggagaccgaccgaacgcaattcattatctttgtagtccacatcttatcgtaacccaaacacatcatcatagcttccaagaaatcccattcaactctatcatacgcctttgacatgtctagtttcaccgccattttttttccatttccaaagcgccctttgcgcatacaatgaagactctcaaacccaatgatggcattatcttgaataatccgtcctccgataaatgcactttggttggctgaaattactgaatttatgctttgcttcatcctattcgctaaacattttgagatagctttgtagataacattacaaaggctgatagggcggaattcagacatcacagtaggcttttggacctttggaataaggcagatcagagtttcgttcagtatactacagtcggcattattgttaagtacatcaaggcaggccgaggtgacttcattgcccactatactccagtttttttggaagaaaagccccgggagaccatcttttcctggtgctttgagagggttgatctgaaatatggctgcctttacttcctcacaagtgaatggttccagcaaagaatcattttcagcattacttaggcgatgaggaacacatctgtggagtgaatttaacagatccgaacctctattagctttggtaaaaagttgctgaaaataattaatggcaatggattcgacctctttctcatttgttctccagtggtgagcatcatcaaatagccccaaaatggtgtttttctttcttctatgagaagccttgtaatggaaatactttgtgttgcggtctccatgttgaagccaaagagcacgacttcgttgcttccaatagatttctcttttttcctccacacaatttaaatccatttcaagtttatgtttaataacccaatcattcccactagttgagtttgctagactctcaatcttttctttgagttctt

SEQ ID NO: 81410 - DNA, 2067 bp, Cannabis sativa
gggcatggaccacacaactttcctgatttcctcctccgtaggactagcacacaatctcgcattttcagagtccgaaatgcttctaggaatcagattcccaaaatctacatccaaactcgggtttgaggaagtaaagatactttgaaaattggcacgaaaatactccgcaatgttatctctaccatccacccaagtcccatcatccaaggagatattccaaatgaaatttctttttcgccgaacttcaacagaggtatgaaagaatttggaatttctatccccctccttaagccaagcttctctagatttttgtttccaaatggattcgagactaagttccgcatcctctaattccagcattatcgttccctcgagctccaaattttcgtttgaaggaggtctcgattggacttcaataagaagtttttccaaagcttggatttttgtttgacaatgcccaaaaacttgcacattccattccctcagagctttggccaataatgtccttatttatttattttcaaatgagaacaattccatgagaacaactcaaataaaccaaagaatcaaacaatacacgtgcttttagaagggatgagaccctaaattccattgtgaccaaaaaaaaactaacatcgtactatcaaatatagatgataaatcatccacataaagaagtggactaactaaactcttaacaataagacttttattgaaaacataaaaatgacccaaaaaaaacaacaaataaataataataataaaatatgtgaaaaattaatttatgagacaaaaataaatgtgtgggttgaatacgataaaattatatacaaatggtctaaaggaccctacaactgctttgtctctgagactctaccttgaagatgggaattggaatcttaatttttttcggattaatggctggagcagatagctccaatggtgtggaagatttggttaatttgactaatagacttgcggtggagcaagaagaggattgggagttaatgaagaagcatcgacggattttggtaaaagatcattaatgggtaggattgtggctaagaaaggaatcactggaaatttattccaaagcatgttcacaagaatatggaggaatgtttttaattggaaggtgaaagtgctcgaagggtctacagatgcaaatttgatagggcctccgtttcaatcatcacaagacgctaaatgggttttggataaacaacccatgctattcaatggagggtttcttattcttgaataatggccaatgacggggaattggcaagacgcaaagcttgaccaagttttctcttgggtcaaaatacaaggatttctattaaatgtcttcacattgaacaatgttaagaggattagtgcgatggcgggagaagtgtcggatatcaaatggaatagcacccaacagatttttttgaataattatgtgcgggttcgcatcggatttccattgcaccgaagcatctttgtggggagattcattccatcaaatggtaataaagtttgggtccaattcaaattcgagaagcttctgttgctatgctttaaatgtggcatttggggacatgaacaacttgattgtgagaaagaggaagccactgagacagacgtgaatgggactgttgtacccaaatatggttcttcgtttaaggatgaagagccaaatagtcaagggccgagtgataatgatgctccaggggtggatgatcaacgaccgacagtggtcgaacaaccggaatctcctccggtagtggttgccaaaagcatagatacaccgatgatcgtggaatatggggagggtagttactagaatggcgaaaaaatttgggatcgtggggagtattactcggattggtggacatgatgaaaggagtgatgtgtcacgaaatgggccaactgttgggcccaatttgaactcttccaatgtcgtgatgggccgattaagtgaaggggacaaagttgtaaagaatgaggaagtggggtcgggtcttaaagggcttgggcttccaaatatcaatcagattgatatggcatgcctagggtcttctt

SEQ ID NO: 81411 - DNA, 923 bp, Cannabis sativa
ctctctctctctctcttttagttcaaggaaaaccagaagaaaaccaaccctttcatcaattattctctctaattcttgccaattaattatgcataggagctgagcaagattgggggtaaactttctttactttctttgtgattttaaggcttaaaagttaggttttggtgaattctggtctgagaacttttagttggtttagaattggttttttttttggttgtttagcttagaattaaggttttattgctagttgtgctgaggcttagagcttgagtttttgaaactcaaagctgagctttaatgatgaatttgagcattatgtgtaattttgagtttagagttgttgggtaagttttatttgagtgattgaactattctagaagtattgatgttgtttggtttgggtatggggcaaaattgagtttgaaaactcgaagttttgtctactggtgcgatttgatggaccagatgggagccgattaatcggaacctatagattcggtgaactggatggggtttcaaaggactggttaggaccatatttgtgtgcccaatttttgtattctctcaatatttagagtatttccacgctttttatcaatagaggaactttcggttttaattttatgcctataacaaattaaaatgaattatttactagtttaccactgttgtgacatagggcccaaatcgtcgagtaattttcacttaggttgattggcacgcttgaattatgacttgagataagaaaagtacaattgtaccacatagcatgtccatatatgattccatcattaccgttcataagatagagttattactctattttgaaattgttgttagatttcttacatattgattgtcttattaggcaacgctattgacattggttgtcatattaggcaacggtataatagaga

SEQ ID NO: 81412 - DNA, 1346 bp, Cannabis sativa
aacatccaatcaaattaattagtatttttatttagtttggataagtaattagattttgtattgttatacgtaaaatctatgtgtatatatgaaaattaacattaaaattgaactattttttcttggattggatggatccagtcaaatccaatacatactggatctaaaattttggatgaatccgatccgattcaaaaaatactaggtctaatatattgggtaaactcaaattaaactaataaatacatatgaaatatattcaatggatagagccgatccaatccaacatattggatgactgaaattaattggatcagatcgaatgttaaaatctaacatcctataattggatcagatctggataagcctaaaaatattagatgtgattcaatgaactccccaccactagtattagagcatctccaaactccaatagaaatgctttaggttatgattggaagttgactttttgcgatgaaagaaaaaggcagagaaaatataggaaaaataatgaaaagaaaatataataaattcttatatttggtatataataaaaaaattgtatataaaacacttcattcagccaaattttatcaaatttaaaaaattaatttttttttgttctccacacttttttttcctatatttttcttatttactaaaatctaacttttaaacatagctttgaagaatgcttaatgacataaacatatttttttacatcttttaatggatgtttatcattgaagtaaagaaaaataggtaaaaataatattcttacttttcttttaaataagaaagaaaaaaaattaattatttaatatatattaaataatattttaataatttttaaaaatacctattgaaatattttagaatgaaaattactaaaaataatataaaagaaaaataaaataaattattatattattaggtaatacaaaaaggtgcatttttgttttcacatattagtttttttttttgggtaaaattttcacttattagttattaatacataatttcccgccacatcttccataaaagagtgccaatttcccgcccccgcctcaccaaaacgacgtcgttacgtccacacgaattgacccattcctgcactctgcatttacttaaaaactttctaaaaatgacaccgttcaaaccaaaaatcaatcttccacaactacccttttcgaaatccaaatctgacaacaaaagcacacaccacaaagcgtaattttctccaactcgaatgtcctttttcgacccttgtgaaaaatcaaggcatccctaataaaatcttctagagcctcaaaatcaaattcttcagtctctcccccccccccccc

SEQ ID NO: 81413 - DNA, 866 bp, Cannabis sativa
caatttttgagtcctaataaaagtgttatacttattttaccatgttttttaatttatgtcttaattgtaactttgtcatcatgatgttcttctactcttgttaaaaatctcattgaaagaaaaaaaaatgtatatcttggatatttataccacacaataattgattgtttcttttgctagtgcaaatctgtttttttttttgacctactttcctaattaaagatgttatgaggagtacctaataataaaccaattattgaattttatttatctgaagtttgtgtgttggaattcttctccatttttgcaataattctttgatcaaatttggtataaaaattcataattaaaaataataataataaagaaatcgtctttctaataagttgatatttaaatcacatgccaaaataaagttatggtcattctttgtcttgctatttcttttttctgatgacaaaagggaatgaaaaataagaattattttggagaatttttatgaatgaaagatatgtaaataatttctacacattaaagaataaaatcaattaagtctttatatagttattatattttttcagttcaatgaagtttgagccctcattaatcataatataccgtcgttttcagctggtggcaaatatattgagtcatttacaagaaaaaacgacataatttacacattattattcatcatgaacgacaacaaataataacacttttgttttttatctacttatataatctcatctcacgttatgaaaaaattggctactttacaagaacaattcgttttcagttaaaaaaaagaagaagaaagaaaaagccctaaagaaaatgcgtgtcgtttgtaaaatattaataag

SEQ ID NO: 81414 - DNA, 2599 bp, Cannabis sativa
atgagtcttataagttggaatgcttgaggtttggggagtaccgggtgttctgaaatcttttccttctaattaaacaacatcaacctcaaattctttttgtgatggagactaagcttgttgctaattctagtactaaatttaaacctaaactgtcttttgatattgtctttgaggtccctaagaatggtttaggggagatttatttctttttagaatgacattattaatgttaatcttttgtcttactccatgtatcatattgattgctattaatgataatatcaactatcacctttcttgctattatagttctccttatcaggataacaaaagtgattcctagcttttgttgaatcgtttgtataatgcggctcatttgtctccctagttgattattggtgatttcaatgattatttaagtttgaataatcgtaacaatcatagtaatcccccttcttatgccatgcataattttcaaacttttgttaataagtatgatttgtctcccttaccctttaatggtaataggttcacttgaaaatatagaagtcttttgaaaatacttgattggtgttttgctaataaaaattagctcgaccttttccctcacgaatctttacttcatcttccttttttttgagtcgaatcatagagctttaaaagctacccttaatgataataacaataaaggctctcatcataataggtttttttttagaattattagcttacgtacccatgactttatagtttgattaaaaataaatagtatattaatactaattatactaatagtgaccaccttgtttcttttcttaatatgcaatctaattgcattaaaatgttgaagattggagtaggaataataatgattttaaatgtaagttaggcctttacaaaatgctttagataatattttctcgtcttctcttattacccaaactgatgttaccaaggctaaagagatccaatcttctttggatgtcgtgctttataaggaagagttatattgaaagcaaaggtctaggactgtttgccttaaggctaaggatatgaacaccaaatttattcacaataaggcttcagttagaaaaaaaatattttattagttctattactttagataatgattttactattaatgatttcaatgatatttgtgataactttgttcgtttctacacaaatcttttctctttttaaggttcgaatgtcaatcctattgataatattcttatgggtattactagtagaattagcagccaacaacttaaatttcttgccaaaccttttgctgctgatgagttgaagaaagctttgtttcagttttatggggacaaagctcctggccttgatggtttgaatccttatttctatcaaaagaattgggttattattggtaataatttttgcaatgctgttttggatgctctgaataatcatgctgatatgtttttgattaatgaaactattttagttctaattcctaagaaaaataaagccattagaattagtgagtataggcctattagtctatgttctactatttataaagtggttgctaaagctattgctagtagacttaaatctgccttcaatgatcttatttcccataaccaaggtacttttctctatgataaaattatttttgataatcttttttttattgataatgaagttattaatgctatcaataattaaaaaagtagaaaaataggatgggccgctcttagcttgacaaggagaatgcttttgataaagttgaatagagcttcattgggtatattcttcataaatttggttttcctgctagttttgtttctattagttttaaatgcatttctactgtctcttttaagttatgtattaatagaaattgtcttttgtcttccttccttcaagggggtattagataaggtgatcctctgtcaccctatcttttcctccttgttgttgaagccctttatgttgctattacaattaaaatgcaagctaatcagtttaatggtatctttgtttgtcgttctgcctcttctatctctcatcttctatttgctgatggtagtctgttttttactactgttaattcccataattgtagagctatcaaggacattcttaatacctacaataaatctactggtcaatttgtgaattttgctaagtcttctgtcctattttcccctaacactagttctcaggatagagtttttttcaataaatttttgggtctgtaggataaatcttttactattaaatatcttggtgttcttcaatattttagtagatctgagaaagccccttttcattaccttctccagaaggctagtagcaaattaagtgtttggaacaacaaactattttccagagcgggcaaagagattctccttaaagctcatccaagcaattccttcatatgtaatgtcttgttttaggcttcttttacctacttgtaaaatttttgaaaagcttatggctgacttttggtggggttctatgggcaatcacagaaaaattcattggaaaaaatggtctcttctttgtgactctaagtttttttgggggtcttggtttttgtgctattgttcaccattatcaa

SEQ ID NO: 81415 - DNA, 691 bp, Cannabis sativa
atgccaaaactaaacttaaatagatattcaaaaacagaggaaggacggcaaaggatgcataaacaacaagaaaataaaaaatggctgcaagaatgtaaatcagaaataacagaccacctaaagatgaacaaacttacatataggaccagttattaacacattataaggggttgattaaatgtgttttgcgggttctcctcttgatcccaactcatattactgtctaaattctggtttcagcttattgtttcttaggtatttagttattgaaacaaagaattaagttctcgattaaatctggtagagtaggtgatttgttgtgcatcccatagtagtctacaaaaaggtcatttatttattttttgttctttcctatggcagaccagctgcccctatttcctttatgttgtcatgtattctgcactgaattcattcagaaataaagcatatatcatttcctaataatctttatagtcaattaatctggttatacatggctgagaaaaatatataaactatcaatgccgtttgctttgtactctagttaaataatacctgccattgatacagtttagaaattcctttctttctgtatatgctgcatatttcagatggcagccaactgtttaagtctagccaatctttccttggcataatacttgaaggagtatcttgcccacattcagaatta

SEQ ID NO: 81416 - DNA, 4767 bp, Cannabis sativa
  modified_base (4724)..(4725): a, c, t, g, unknown or other
catgaggtatattacttactattacactatcattgttagacatttatatgtatgatatgatcatgtataaaatgcagaattaatcaaacatatatgcactatgaataaaggatcgaaacacgttgggcttccaaactctctttactttctttaaatggatttactgtgtttgaatattggtatcgggaatcaagaccctatatttatataagtgagaccttctatcaaaatctaatatcaaccaattaattttatccgaattcaaataattcatatattttaaaatagaaattattctaatactactcactagttctattcattagttatgttgttgataataaaagacttttgaattgttgctgcagatattgactctgtggtacagagctcctgaagtccttctgggggctactcattactcaactggagtagatatgtggtctgttggttgcatatttggttaggaatctaatctcttctgttcccttctctccacattttgtgtctttaaactcatctctcctctatgtacattgtagctgagctagtcaccacaaaagcactcttcccaggagattcagagcttcagcaactcctacacatattcaggttcgttgtactctctcttctctttgattcttggcttttctttacacttgcttgtcttttgatttgatttttatacaggttattaggaactcccaacgaggaaatgtggccaggagtaagcaagttaatgaattggcatgaatatccccagtggagtgctcaaagtttgaccaaggctgttcctaacttggacaaccatggattggatctgttgtgggtaagttatgttatgaaatgagatcacattcacattataaagatattgttaattgttaataccataatgacaagtttctcaaatttgattaaaaatattatccaacttctgcagcaaatgttgcagtatgaaccctcaaagcgtatctcagcaaagaaagctatggaccacccttactttgatggtctcgacaaggatgttctataactaaacaaaaccacaagagtgggattgagttggagacagggattgttgctatttgattttgcttttctcaagcattgttatgtttctattctagtttacgtaatagtattagaacttggtagtactgtactggtatgtaacaacttgataaacttgtagtattatgcaaattttaattcccttatgaaatatgtgcacccaccaaatagtagtacctttgttcatagcaggtggtactacaaattggagaagaagaacaaactggtacaatggttcccgctgcaccaaaccgaaatgaactgcccaccttaacatcttaaatgtagtttgcttctgtggtatcttataacctctaagcagagtttgagagaaaagcttagatggttaataacattatatactatatagattagatatccaatatatttttttaactttgtggaaaaacatagtttctttctaccccaacaatacaacagaaaatgtgtgttaagagttgagagagtcaataactaaaagtaaatgctaaaaaaaatacagaacaaaattttgttgactaactgctccaacaatagttgaaggggccaacaatgccttgagatttaattctctaaatagtttaatcaaaggttgttttgtccctgaagtttctgaattctccacctgcatgcaattcagatgaagactcatcatcgtctccggtctttggcaatactttttcacctgcaacttcccctgaggaaggaagtactagtggttcttctaatcaacctcgtgtctgctaaaagtgattccctcgaaatttattacctcaaactaaatacagcctttgagttttgtattctatacattttaaatttagcgtttggttagaagaaataaaaaaataagaataggattggaatgcaaatttattatctttttgttgttttatagttgttttcatgttgtttgttaagttgtttttttattttactgaaacacagtatttttataattttgaaactttaatacagtatttttaaaatcttagtacaataaaaatataaaaagaagagtgtgacagtaaatatataaaaataacaaaaaaaaaaaatggtattttgtgtaaaattctctttttttatatagttctatataatttagaactagttagggatcctagtgacaaaattatttaattagcacattttgtaacacttaatttttttatgctgttaaaattattgaatcaaaattatttttttgaataaattggacattttttttatataaaattattacagaatttaaaatattattagttagtcatgttttgtcaaattaacaaaattgttaaaagaactcttaataatttatctattttatcatttaaaatatatcattaattttttttaatagaaggtgaattttattaacttataatagccaaaataagccataatagaataatgtacaacactatgaacattgctgacattaaaagtgtgatcagcctaataacaagaaccgcgtgcaagacaatggtggttttgttagcagatcgcgaaacaaaagaaacagacacatcaattaaacagtttaacaaacgtctacactcagaaatcaacaaactaaaaactgaaggcatagaaaacgagctagaaatagcttaatctgtcacaagtgaatcagtttcaataacaacattagaccaatttttagccttgatccaactcaaagcttccttaataccaaaagcttcatcagaggctggttgaacattaccaaatctcagtgcagtaagagcttctatcaaatgactgttactattacgagccaccactccaataccataagaaccaatgctttgaaaaattacaccatccacgttcaccttgattttattggcttctggtttggaccaatgctcctcattttttgcttataccatacacatcagtttttttaaaaaaaatttattacctaaacctcactttttttaaaaaaaaattaatatattttatttatttttaatttaaatactgatatatactcatatccccgtacaaaaataattattaaaatctaaaacaatttataaaatatatttaaagcaatgaatattctataaatgtataacatgaatagtaaattttaaaaaaaaattaaaatgaagaaaaaatttagactatctcctgtagcgtatttaatacaatttttttaaagttttcctttttaaaaaaaattgttgtgagtgtaaaattttgctgttttgtgaaaataaaaataaaatgttgaataaattctgtggctatattacattattgcaacatattgactatatattggttggatattccaattttgaaaattcaaaaaaaaaataaataaataaaaaataaagtaattattatttgtgtcatcgcctctgttagctttttcttttttttaaccttatcttctaatgtttaaaattgtcagttattactcatgtcttgtcgtatgacatgttggtaaaagttctctcaagtttttaaggtttttcttttgtctcttgattttcatggcttctagtagtcaacatgattttgatttgaacgagcaatacacttagataagcttggatgatgaggaggaaggagtcttgattgggggggatgatgaggctgaggatgttttattcaatgaccggtggtgtttggttgggaggtttcttacgggaaggccggtggactttgatgcgatgaggcacttgatggcctcactttggcaaccgggcaagggtgttttcatcaaagaattgggcccaaatagatatctatttcaattctttcatgaacttgatgttcaaactgtcatcgatggcagcccttggacgtttaatcgatgccctcttgtgttccatagactgaaaaaaggtgaagatctgaaggtagtgccgttacacaagattgatttttgggttcaaatacatgatttaaaatcgggtttcatgctagagaaagtggttcgtagtgctggcggctacgtgggtacatatatcaaatccgatccgaaaaatttcaatggcatttggcgtgaatatttacgtgttcgtacaacgattgatattgctaagcctctaaagagaagaatgaagctttgcaaggagaatggagaatggatttgggcaaactttaaatatgaacatctccctactttttgctttgtgtgtggaatcattggacactcggagcgttcatgcccgaaaagattcgaacaatctgtggagcaaatggtgaagctgtatggggctgcgatgcgtgcggatatgaggagaaaaaattaccgggtgggctctcaatggcttcggactgagttggatggtggcgtggtggctggcggccgtgccgatcgacgggctggtgagaatcctgaggtaaatgcttctcctaagatcatggatgttgattgtgttgaccatagtggtgatcatgatcccatgatcttagggagacaaaagaagaaagaaatatgtatggaaagtgggcaaaagaagaaagaaatatgtatggaaagtttggcttctgatgaggagagtaatgatgatgaagatttggttgttttgttggatagtaagaggcgacgtacaggaaggatgggtgtagtgcatggtgacgtggcaatgcatggtgagggggcagcttcggctaagagtgtaagtggnnatgatgggcttgttgggacaaaaaacgattcacaggtgggcc

SEQ ID NO: 81417 - DNA, 1122 bp, Cannabis sativa
cgtccattacttcccatgcaaggagaaaaaccaaaaaagtttcttttttcagataaatatggtgtgttaaaggtgaaatccaagaaccccaaaaaagtttttaaacaggatttaatggatgaatgcttgttgggaaaagttgattcttctggtttacatgaggttcaagttgacgtagttaaagatgtgagtgacgttcttgtgggtaaggtaatgtcttctcttttacttgctatggtttggagagatgttgtggtcagtgtagattcggtggaccctgagaatcagggccaccgagcattatgaattgcttggcttggaatgttcagggtcttgggaatgaccggacgttccaaattcttagatcttatgtcaaagagttttcgacaaacattgtttttttgtcggaaacacttatgactcactcggttcttaaggtgatgcgggttagattgggctttgttggaaagttagtggttgagaaagtcggtagaagtgggaggttatgtctattctggagtagtaatgttactgtggtgcttatgggttattctcgtagccatattgatgttatggtgtgctcgcatggtaatttatggtggcgttgtactgggttctatggaacccggaggcgcaccttaggtcccagttttggtgtcttcttggcggttggctgatgggtattctggaccctggtttgggggtggttattttaatgagattcttttctcttatgagaaaagtggtggtttagtccgtgctcaaagtcttatggatggtttttgtaacgctttggcaaaatgtggtcttgctgatatgggttatgaagcagctcgtttcacgtggtgtaataagcatacgaatggctctttcttgcaagaacgtctgaatcgcatggtgtgttttggtagctggcattcaatgattctaaattcttatgtctcgcacctgaagctctgggggtcggaccgtagacctatcttgacctgtatcctccgtgcttgtgaatctaggagatgccctaagcaaaaaggccgatttcacttttaaatggcttgggcgaatgatcctggttgctgggaaattattgctgatcaatgggggtcatctgagtcgactgat

SEQ ID NO: 81418 - DNA, 1793 bp, Cannabis sativa
  modified_base (27)..(65): a, c, t, g, unknown or other
  modified_base (841)..(851): a, c, t, g, unknown or other
aacattaaatgttatttctaatctatnnnnnnnnnnnnnnnnnnnnnnnnnnnnnnnnnnnnnnnttagggcataaaacccaacacgcagtcaggagagattttaactaatggcatgatgatattatttgtgccaggtttatcttgttgacttcatttaatgaagagataagagaacggtatgactacttagtctatgcctatgacatctggaaggtagtacacaataagtacggtgtcgctcatgatcaattggcctatgagagaaatgttcatcctaataagatagacattttgacagagttaagaagctggagaggaagataaatatgatttagtttttcttcttgttttaataaattatggtggattgaattgttctaaaccactgacattgtttctctcttgcttgtagattttatgaacataagacgaagatgattcgaagaagtgagacttctacaaagttcgtgatggaggaggattttagaagagtaatgaagaagtcaactttagtttaaaattttaaagaaaattattcacttttattgtttttaaattttagttgcatatttaaagtttattttatttaaggaaatttgcggcaaaagtccccaaaaagttcagtttgatacagataagtccccaacctccaaaaataacggcaatagtcctcaaggtcatgttttttatttgtccgttggtctccaagttaacagatccgttaaactcaattcaaatgccacgtgtcgaaatattattggtgggtgttattattttaattttaaataaataaataaataaataattttaaaataatttatttttttctttttcttttnnnnnnnnnnnttctttcttttcttcttcgtcttcttcgttttcttcttcttcaacttaaccccaaccagccatgaccggagcaccaccacgacctcgaccacaaccacatcccgattgctaactccggccagccctaaccccactccagccctgaccccacgaccccaaccgcgataaattaacggccagttttggctcctgccacgagattctcctgagaatttcggacggagctagggctatggcattggctaggagaatgatgatgagagacggtttttaatttctccgaagaagagattttgatcgaggatgatgttcggttggaggaggcagcgctttgcttggtgctaacaaacgtcgtgcaggtgcatgataataagactgcgcgtactcttggagttgctttgtacggtcagaatttcagttggatcaaccatagttgttctcccaatacttgttactgaattttgttgccttccaagatcgaaacgttgccgttttcccctgtggagactccgttgagaatttccccttactgtttcgccgaagaagaagaagaaactcaagtagtcagagtgagactctaaatttttaacttcttttcttctattgttgacattgataactaataaagttcacatttttttttcttttacagatgaagagtagtgtttgtagcagtgatttcttgaataaaggtgtcaatttttgctgttattattaggtatattgttgaaaaattagttatagatgtgtatgtctatatgtatatgtttaatttgatgcatgaaaatgaagagtttcaggtttgttatggaccaagaatgatagttagaagcatcaagagggtaaagaaaggagaggaagtgactgtggcttacactgacttgttacaacccaaggtatatatgttggtatttgatgtttgatttatgaactatgaaatga

SEQ ID NO: 81419 - DNA, 952 bp, Cannabis sativa
ttacttgattaactcataatataaatataaaccttaattatttaccattagacttatcgggatattacagaatttatcttgcaaaattctaagtgatagaacgcatgaagcgagaatttttggtagaacgggtacccacatgtgaacttttttgcgctaactaattatttggataaaataattattgatttatgtgtttgaatataatatttttagaatgtgataattgttttaattgtcacacattttcattaaaaaaaatatatatgatatagatttggaaggaatttatatgtgattcttaaaggtatttgagcaagaaactaggaaataagttaaaaataaactaggagtgaagtcctcctagggggccagccaaactttgaagaaaaagccatctggttttttatatttttggtgttatttgagagaaaacaagcgcatgaacaagcatttccacttacacacacaactcttctcttctgaatgaaaacccacttgcacacaatctctttttctcttatcttttcactcaacaccatcccatcacatggcagctaaaagcacttccttttccgttctaattttttcagccgtccctccctcttcaccactctcctttgttttaccaaaatccttccatggatgtgttacgaaaaatataaataatacgcaagtgcacgtaatcaagtagtactcacacaggtgaggtcgatcccacaagaaattaaactgaatactactagtctagacttgtgtttttatttggcaaaccaataatttttgtgattgaaataaaaataaagattaacaagaaaataaaattcaacaataacaagatttaatcaaattgagatggtaaattagggaaaagaatcttgttgatttaattacccaattgttaatgctaattactactctctttcttaatgtgaatgacatattataaaaa

SEQ ID NO: 81420 - DNA, 2431 bp, Cannabis sativa
ttttttttttttacagaaattcaaatatcaaccaaccaagtaacttaaattgttattaaaatttattcaaaaacacaataaaaactatcggaacaacccaaaatgtaaattaaaaaatagtaattttcttatattttttctcctttttcctttttttgtcatttgtcaaaaaaaaaaaacaaaaacaaaaaatcaacattttgattggttgttttatagtaacggcccacttttgttctctctctttttttttccacaattggaggtgatctaataattttttaaaaaaaattaactacttattgctatttagagactatagtgattattattaatattatttaatatcaagtcacatatacatattgctatttaattactttattaataataatttgacataggtgtaaggtgttttatagcaatacttaattaaaattattaatattgaaatatactttatatttataatatgctacatcattttataattttatatgtatttattattattagtttaatttaatattaaatctcatttattttatatttaaattaaatttatataaaatttgatactaaatggcattagctacattcatgaacatggtatgactattgagcaccatagtgttttgaacattgctatggcctatctaacactagaatatatcttgatgatgtaattaagtaatgaatttcacatcttttactttaattaacaaagtaaataatttgatactaaattgtatcaataataatgtttacttaaagttgtgttaaagtacctttaacagttctctacttactatcttatagcaatattgattattgttttacattctacaatcaagtatacaagttcataatataaataattattgctaattttatactggtgtataaaccaagctttagagccctcagattgataacgtaaaatagagattgtttaaaatatttaaataatcaaacaaaaaatacactacattagacactttaaactgcttattcaaagttttcttaaattttttattcatgcaatatatttatagaatattattcactactaacttttttttatgtgtagaaatatgtatatattaatattacatatttgaaataaataaaatatatttaaaaatttacaaaaagtgatgtttcagtgatgtattttaaaataattaatgaatataaaaatttgaggtaaatatagaaaaaaaaataattaatcatacattttgagagatagagtagagaaattatgagagtggtcactacaaaaaggaagaatcattgatataatcataaaggtaattttatcctattgtcaaaaaattataatataatttttgaaataataatttattaactaatatatccataaaaaaaaggttattactctataatttaaaagagcattgttattacgcaccagtagtatttaatatttctagatatgtcaccttacaattagttagcaatacttcctaaaaattattacacattaaactatatgagacctgatatttagtttaatcaataacgatattgatacataagagagtgttgagcaccaagtcaattttagtatttctcataatttaaggaccatcttattacaatcaatgcaaatatttattatttcccaaattcttatgagttctttctcaaacagattcactaacttgacccattccaaatccaaactatctacttccatattgccaattgccataccagcttgcacatgtgaaattttggacagtttccattattagattggaccaccacatttcccattcttttttcctctcttgtacagtatacactatacaccctgttctgtcaaactcaattcctaatttcaaaatgtctttaattagtacttatgataatctctgcaatcataatatgttttcctctgaaatttttgaaaaggacagtggttaaaatttaggtaggttaggtaaaattttataatttactaattgaaaatgtcataaaggagagtgagtatctaccaccatatatataactggaaaccatttattttttgtagtaattatcactcttttcactaatttatccctaatttttcatttgctactagtatctatacatttgagggtagcttggttctgaagttggataaacatctctatcatctttctgttcatcagatttatttatttataattttttgggtagaaaacattacaactctcttctacaagtttcttggagtgaaatgacttttgggtttgttttagaaaaaaaaaaaagggaagatataccatagcatagaactattgagaaattgacaactcaacaaagaaaatatcattcttagctgaaattaagacaagtaatgtcaaaagttgattcccacccaagtataggcttccactatttttttcttttttttttt

SEQ ID NO: 81421 - DNA, 2046 bp, Cannabis sativa
  modified_base (1996)..(2006): a, c, t, g, unknown or other
aatttttatttttttcaatttcaaaccataatttcaaaataaaatatttaaacttaaatatcaatttttaatattatccgggttattgggctgattaggctcatttccctttgttctcacgtatttcctaaagtatcctcgcgagatcagacttttaatttcattttttaattgacgacattcctcggtggtatgcctaatatctttatggaaacagtagtacttagttgaatttcgcttatttctcgcatgcctcattagttctagtctacgaaatgcaaccttattttcattggcgaggtagatattctcacgagtttcatttaattcagtatacattgaatagatgggtacatacttctcatgcttcttttgtttctttttatccttggatgaatctcttgattcatcctttctcttggtatttgattcattgggattttccacctttgttgtcatggtgctcattgttgcaatgctagttctaggtttatctcccgagccagtctttaacaacttcatctcattccgtgcttcttctttacgcacaaaaatttgtgctctttcttaaattcattcatattccttacagaacaccctcgtaaatcatcccataactctcccccaatggataaatcaattgtaattccatcttgaagggctgttaattgaatgttatcattcaaatttctgaatttcgctgtagctgtactgaagcgactcaagtacgctttaagggactcccctgattattgcttgatgttagtcaatgacgatacctctggtcaacgatctcttacagcttgaaactgctttttgaaatcattcgacaattgttcccaggatgttatggaatggttggtgattttgtcaaatcaactactcgtagatcctgtcaaggaagttaaaaacaatatgcaacacaagttgtttgaaatgttgcatgctcgcattatggtgttaaaattatttaagtgggggactagatcagtcgttccatcatattgcgagacatgcagattcttaaatccctgaggaaatcgtgaatttagaatgtcagggaggaatggttcagtttcttcatctgagtcatatcctgacagtttgccatattttctatcttgatattttctaaatttgtcctttaattgtattactcacaattgaataggatccacatgttattgatttgcattttgattaagttgattacgcaaatcaggtgcatttcgattcaagtgcccgcgaaggtctggttgcctttgatttaatctctcacggagatcagtttcacgctacctttgctcacaattactcactgatctattcactgagtaactttcagactggtaactgcgcaagttacttatactttcttgataagtgaaataactttgagatctgctcccgtctcgcatttgcctatttgttccaatcgacctattgtgcccgtaggatcgtgattctcctgtactcaaacttactacacgcatctcatcttgcattggccttcttcttctaaagagattagacatacatcccctactcaggtaagtgtgcatattctcattgtctgtgcgagaaggcctttgtggatgctttgaggggcaaccaccagacctaggttggtttccaggatttcttccatcattacgagggatttcctagtttcctggtcacggatgtcttgcctctgcgttcatgcgagatgactcgggtatatcagtctgctcattcccttggtttgcaaatccatgggaagttcttagggcatcgcgtcgatgttcctgatttcttgtattacttgggttgggttggatttctctatcaattgggacatccctcgcattcccaggttgttcttcttgaatatttatgggattcccttggctattctcctccctcctggtcttggatcctcgaggtcttcctcggggtctccttacatttagattaggttgttttgaggaactgttcctgttggaattattttacnnnnnnnnnnnatttactaacaagtatgttatttaacatcctgaatatgaa

SEQ ID NO: 81422 - DNA, 1019 bp, Cannabis sativa
attattcgttattagatcaaaattagatagtttgatattttaaaaattaatatttatagttaaatttgtttagtaaccttttatgggtaatactaattaaaaagtgttccatataagtatatagagcataacaaaattatacatattaaacaaattaattcaaccggataaaaaaaatcatgaaagaaaagaacatatgtaaaataaacatttaaattttcatgtaatatacatataataatggtagcccaaagtgtaattcacttttttcaagcacattttttttaagtaaagttatgatattgcgttggcatacatagcataataaaaaaagatgaatttattttaagaagttattttagttaagaggataaaagagtagaatacattataaatcaagaaacttatacaattaatttttaagattataaatataggtatatcaccttcacatgtggtcgatatgcgtttaggaaactagaaggagaacatcatcaataattcatcgactctatatgaccattaatcacagtcaacttagtcttaacctcttactttgccactcaatgtcgaccccatacaccactgatcctacaagaattcaagcaaacatatagagagagttagctcaagcctctatactcacattacaaaaatacaaatcaatacataaattaatgtgcataaaaaatattcaattttttaatgttaatatgcataaacaaaatacaaaattaatactaacgaaagtaattttttttttcaaaaaaaaagatattagctgctacaccacttgaagtttaaatttattaacacttgactacaaaaaatgaatttttggaggcaaaactacctaaactcccattccgtttttctctataattctccgtccaaaaatcacatttaagtgccacagtggatgacccacatgtacacacttgtacacgtggcaaatttttagtggcccacgttatattaattattaaaatattataaaaaataattaaaaattataaaaa

SEQ ID NO: 81423 - DNA, 1515 bp, Cannabis sativa
ttaagtaaaatttaagtgtaatataaataacaaatatttatagcttagttggttgaggtggaggacataatgtccaagatcattggttcaaatcccatgacactctttttatatatactctgtttaatattattgaaagaatattactataagcaaaatggcctaataaacttaaatattattatgtatatatgactttctaataatgaatatatgtaatactacattaattatattacttaaaatccaacaattaattgatatatttttcctcttatcatggggatgactcgtggttgagatatctcactcacttgggtgatgatatatattcccatattgaaggtcaacaattttttttttttgatatttttttcttagttcttcccaattattattaaaaaaaatatttaattaattagtacttagcactacccatgtgttatttattattaatatctccaatatctataattaaattattaattttgataattattggtgatctacaaagagatatcatatcgaaagtacgacattaattatttcagctatatatatatatacatatatattccattttctgtattttttttctctttcattttttgtatgtatatataattaattttcagttacatacaatgtagttgtagtgatcatgatatagtatttaatcaatagtaatgggtattctcacattcacatgagattcctttattaaggtcatcactcataatcatgaatgtatattatatagctatacaaaattatataaatatatatagatattaatgtcaatataaaatcccattttcacacctaaaaatgtgtaacatatgattgtgtaaactcatatatattaaatttgtattgagtctccctagcttctgaaaataaataactaattggtgtacattttcactatattatatgcatgcatttatatatgtatataatattatataggaagcatcatacaattaagggtagaagacctaccaattgccatgtgagacatgtcccaaaaggagacaaagatgtaagattttggacctattcacatgcctatttaattatacatgatatatattcaaaattgacatgcttactatatatgtatataattatatgtatatatatacatgatccctttgtatttaggtctttacctaattataaaaggtttaatgcatgtacgccccaactctctccaaccatcttcaagtttgtctatcttaattttttcaatttttactattttagaaaagaaaatagtccttgacttgtgcatggtatatatactcctcttatctaagtactaaaattgagttaaatcacaaaaggatcataattatatagaaagtaatttaggtatgtacgtaaatacttaagtttaactttctgttataaataagtgggtaaatagcggcataaatacccaaagtttcaagtttgtaagtggcataatcccaatatttatttttagcagtataagtacccaatgtttataaa

SEQ ID NO: 81424 - DNA, 1497 bp, Cannabis sativa
tatagaatagataaactattttatttttaatataaataaaaagttacctgtgaatttcttataaactaagaattcgattatataggcatactttatatagaatagctactcagtacatgaacttcattaattgttttttggggtgtaaaattgtattgttcatcatctattctcttatcattttcaacgcattaattataacgttcataactagtttaatcaattacaattgattgttacttataattttgtgtattataccccataaaattataaataccccaatattaagaaaaaaaagcttaaattaacttttaaaaaaatcaatcttaaatttttctaaattttctttttaacattattttgtgtttatttcaataattatttaatttttttcatataatttttttaaatcgtgtatgattttttttaataaaattttacataattttttactttaatttcttaatatttaaaatatattttatatgtatattttttaagagtataataaggaagaatttttttttaaaaaaaaaaatagtataaatgaaaattattaaaattgggtatttatacattattccatgttttttttagtttaacattttttatttattttttaaagatttagttatttgactattagtaaaaaaaatctcatagtttagaaaatttatttttatatatatatatagaataattagtaatttcgcctgatagcttttgacaatacttctgattctgtccttagaatatacggcttgttaaaaaaaattcctgaactgttacatttacagaaatttagtcattctgttaagtttcatctcattattccgttcaaatgctgacatcaaggacggagggacttatgcctatatgtaggcttaagccctcactcaaatacatcaaatttttcacatatagatatatacatatgttaattcacttcactcaatttattaaagcccaatccacaaaagtcctcactcaatatcttaattataattcataaatctaccctcattctaatcaagcccattttaaaagtagcccaatacaaataataaaacaaaataacacttaattaaaaaaataaaataatattattgacaatgttttattttattttgttgaagatgaaaatttaaaaggatacatttatcagttacttttatgagctttgacttaatatttatttaagccctcactcaaccaaatttctggcttcgtcactggctgacatatatttataacttagtaactttgtcctttaaactttgacatagggctgagcatcggtcagtttggtcagtttttttctatataaaaatctcaaaattaagttttcgatctggattggtacaatctgaatactgaccgaccaatccagaacttatcttaaaaccgaccgttttgaacctcggtttggtcgatttaaaccgcccaaactgaactttttttaaaaaaaagtgatccaatttattctataaatac

SEQ ID NO: 81425 - DNA, 1566 bp, Cannabis sativa
ttgtgtcaggtccgtaaaagaccatcattcaaaagctagataaatccacatatatgtagataaaaggttttacttctaggccaggccctttcctaaaagtccaactttacacagcacagcttagaaagctgttgaaagagcaagcagctttttttgagtgcatcataaagaaaagaagaaccaaaatctaagtgcggaaaccctcaattataaaagtgcagcatgatacagagcttttatcaagctggtaaaagatcaatctttgagttcagaaaccacttttctatttctctttttggattttagtcattagctgtgagcatcttccaaaactgggaatatattcttgtgctttatacttcataattaatgtctctgcactcaaatcatgtctgttaagattattacactattatgaaggactatttggttaagaaactttcttccttactacactagcaaacccaagcccatttacatacctcacgaggaaaagtgtggaagtaagtacttttattttgaataaataacacatttttctttccaagacttttgtaggattttgttaatgaacttttttctttctgatattttctttgaaaaaattccaccaaactattacaatagtttcaaatgtccccatatcgaaaattcatacaaaaagtagccataactccatttattctatgtttggtgtgattaaatcttcaaaaaaaaaaaaattacaaaaaaaaaactgtgggtgttttatcctgtgttttgtcctacattgctaatattttatgaaatttatattatgctatatttgagtggcatcaaatctatccaaaaaaaaaaaaaaaaaaaactgtttcacattgctcatcattttgttgatgtttggtgtgattaaaaaaaaaaatcctatttattcatttttttcctataataatcataataaaactctggttcaaaaaaaaaaaaaaagagaatcataataaattaagataaatagcactaatttttattagataaattagtacaaaaacggtaataatgcttatcaccaaggttttgaggtagtgacaagttctctttcaaaaaaatagagtagtgacaagttgacattgaatatgtggggtccacgaccacgtccacaccaatgaagtaaataaaacctgcaaaacttggccaaaactccatgtggatataacaatatgagttaggcacatttgcacgtgtaaactagaaggtggtgaactatatagctttctcaaagaatatttatgtctctaaactaaaccctaataaattacatataagtatagttggattggaagtgttcaaggccacgtattgaacacaatgaatggacttttgttggtccaattaatagaatagaaaagttaaattaagtaaactttggcagtagccaactcaagtttgaacccaacaaagtactcatcttcttcctctagacatgtctaccacatctaattatatttagaataactcactttctaagatgtcatcattagaaaaaaaccgatgtatattatacttttttagtcaaatttaaagagaaat

SEQ ID NO: 81426 - DNA, 1604 bp, Cannabis sativa
  modified_base (851)..(868): a, c, t, g, unknown or other
  modified_base (916)..(918): a, c, t, g, unknown or other
  modified_base (1030)..(1031): a, c, t, g, unknown or other
tccagcgccggtggcggacgtctgggtcgtaaattcaattcatgagtgattttaatcactttgtaaaaaaaaaaaagaaaaagaaaatattgttttttttttcaccctaaaattaagatttcaaaatgagcaaagtataattgaaattcaagttggaatccaaagaaaccttgattatctcctccaattgcgacccttaaaagattattattattattattattttaactaaacaacaattatagtttgttaccaaacgtacaagggtagctgtcatgatttaatatcatatatcaaaatcttgatggcatggcaactagttttttttagatagtgactctgtactagaattgcttttcgaatagttacttttctagccatcttccaaacattaaacaagtaaagccaagttcccaaatttttcccttatatgcatgacatgatcatggtatgtaggctatcactcgagaaagcaaaatagcaagaaaggaaaaaatatatattgaatcacagcacatgggactatggagaggggaccattttaatggctggtttgatataaaaattgaaaagaaaagagatgtgacacattcctccccacataggtgttatagtagtagttgagaagcataaaagacttgagccctctagcattgaaatcatatgggcctcaataatggcccacaaaccatcttataatggcccacaaaccctcttatagaactacaaataaaaatgggataattagataagatactattttttgtaaaaaaaattataattttacgtttaaagaatttatttttttatatttttacaaatttttttagaaacaacacgaaaacaacaannnnnnnnnnnnnnnnnnacatgaaaataacatcaaaacaacgacaaaaaataacatacaaataannnaaaatcaacaataaattaacaagactacaacataaaaagaccgtatcttttgtaaataaaaaaaaatcgtaaaaatatttaaaatttcatgaaaccgtatttttataatttnnttattatttttgtgtatttgtgaattaatcctaataaaaattggaaaactttcaaaatgagtcatagatcacttttgcttgaggttttttttatttttaaattcatagtatcaaaaataaattttaaaataatttaattacatatgtataaaataaaattagcacgctccctacttactatttgaatcatatatttagtatagtaaattattcaattttttttaaactgacagaacgcctactataattacaatgcatactatggtataaaaaaattagtttatagttttttatatattgaaaacaaaaaataccatgctatgacaagagtaatgcttataccaaataattccaacttataaaatgtaagtagaatgacgatggatcatgatattaaattttctattgagaaaatagacagtctactagaactataatacacatactattatattaaaaaaatagtttataattttaatatatctaaagtagaaaatactctatggtatgacaagtgtaatgcttctactaaataattttccaacttataaaatatataggtgccgtttggta

SEQ ID NO: 81427 - DNA, 1537 bp, Cannabis sativa
attcactcgttaaaatttttcggaaaagatgattcttacaacttctattttgggaatctaataatgtggatggctaagaacatgatctacaattatggaatcctcactttcctaacgggttgaatgctggttccctttaagtattaaatctagaaatgaaaagttgtgcacaaatttagatggaatctaaattatacttccactagtgaattaatggtactaaaacataaaaaaaaaaaattagaagggtaaatagtaatttgaataaaactaattacaaaccaacacatggaggtaaacctattcactaagtagcatgatatcttgacaacttctcccaaaaactatctttcgagaccaactccagttaggatgggtctaaccctttttatgagggttctattcattctctacaaggtcattttgttgaggagtctttagagctatatgatgccttgatattccttctttgacacaatattctttgaacatcccagaacagtactcaagacgattgtctgttctaagtttcttgatctccatctcaatttgattttcaattagtttcttccactttacaaaggtctcaaaggcttcatccttgcttttgagcaagaagatccaattctatcttgagtaatcatcaataatactcaagaagtagcttgctctaccaagtgtctttactcttaatggccctcataggtcagagtaggtataatccaaaggttgttttgatgtgtgcacaccagttggaaatttcattctgcaaattttagatagtttaccttttagaatcccttgcttctcaagttcagtgaatcttctctcaatcacatgcccaaaccattaatatgccaaagtctgatttgatcagtcaattttttcctattagtttcattctcagaacaggtggttggtgtgggaacacccgtaacactttctccaacaaaatagtacaaaccatgtttgtattctcccttaattaccattagagatccttttaaaaccttgacacaattctcatcaattttgactgtacaacctttagcagcaaaagaaccaatagaagttaaatttctcttcatatcaggaacatacctgacattagttaatgttctttgaacattgtcatgtattttgatgatgatagtaccagtactctttaagaaacaggcattgttgtctccaagaagtacattttcactatttttttcttcaagagagctgaataaagttttgtctggacacatatgaaaggtacatccagagtataaaatccaatcttttcttgactatgtttctgtagcaacaagaacatgtgcataatcataaccatcagtagttagactagcctcactcttgctacctttcacattcttgtctttgttcttatccctaaaagtgtaacattcatccttgagatgaccttctttcttacattaattgcaaaactttcctactttgaatttgaattattaaaaccattttccttgttattgcgattcctttgttgatttccacttgaactgtttct

SEQ ID NO: 81428 - DNA, 1086 bp, Cannabis sativa
  modified_base (28)..(36): a, c, t, g, unknown or other
acattaaataataaaatatttttgtcannnnnnnnngccaaaaatggaattaacatatttattcattttctggattcaaatgaaatataatgtgcttaatgtaattttattaactaatggtagaatgtgttatgcagctcttaaacttgatattagtaacgcttttgatagagtttttttttgataaatcaagaagttgtattgctcaaatcaaatttttacacactaaaagtactccaaaatcggagcctcaagttaatctatacattttcttttcctcttcttttctaactaagtatgtatattcttataatgcaagaaaccaatctctatctacacatgcaattttctttggtaaaaacaaggagattctgactttgagcttccatttgagatcttcaagtaatctggtggcagctaactgccctccattccaaaagatattatttcgagcctcccaaatgctgtaaactagagaagccactgctgcagcaagcacttgcttcctaaacttactaatctttgctttacctatccaccttacaagctgagggagcttattggaccttgcattccaagacaaccacttcttaacctcctgaagacattgatcagcaaaattacaatcaaagaatagatgttgactattctccttttgcactgtacagaggctgcaattctcagtcagttgcaagccaaacttaaccggtcgatccttagtttttaacttgttaagcattgccaaccatagtataacactatgctttagaatattcaatctttcccatacttcatgactccaatataacatatttcgacgagggcaaatcaacttgtacactgctgcaatattatatacctgtgcctgaaaacttgtaagatcatatagtgatttaatatgctcttttaaagctactagcctcttccaataccaactggaatggacagaagcagagtagctccaccagtccttcctgttaatgtacacactatggacccatctcatccacaaactctcttgcctgtttgcaatggcccatatgtatttacacattacaaccttgttccacacttcaagctttttaa

SEQ ID NO: 81429 - DNA, 2141 bp, Cannabis sativa
aaagtacatcacgggacaaaatcatatcccaataaaaataataagcacaatctaatatttaaaaaataataattttaaaataattttataaaattactctaaatagcttataatacactccattaaaataggtgtactaatacaacccctaactgcttcggtatctacaagaattttttaatctaattttttataatcgtgtactttagttatttaagacatcctgcaaaattttaaaaaatttggaataatttataatatagaaatcaatgtttaaaccgtttattttacacgcgtataaaataaaaaagtcacgcgtgcaacaagctctttgaacactgttttcgacgtattaaactttttcgaattttttaaaatttgtcagatgtctaaactataatgtatatgatcataaaaaaaaaaaaaaaagactaagtattttttagataccaaaatatataagagtgcatcgatataccaattttaagagatgtattgtagaattttcttatttttttttacattattttatattgattttaatgttttttttttatattgggataggggattcaaatttgggactttctcaagaagtagtgtgaatctattaggctatatcaatggccacttttataattttttttaaatcatgtgtaatttttttttttattttttttataaaattttatataatttttttaaattttttgttattatatttaaaatataattattttcacttaataagtatactttttttttgaaggataataagtatactttttaaaaatatcaattcgaagaaaaaatttttttttaaaaaaaaactaatataattaagtatataatttatgtatatagtttaaaataagtatatgaagtgattcttaaataaaaattattgaaaatatattgtatttataaatatttaaaatgtaaataaaactcttatgttgaactgtacacgtggaggaaagtaaataattgccgacaaaggccggtttctaatatctgattaatatattaataataacaaaaaagtatagttatctttatataattattttattaataatagtgcaataaatttgatattatctgtatgtgtcgttttatcaacgccattgccaagtcagcaaatactctataaattttaaatcctctatttaaaaataaaatgctataaataaaatataataataatttttgggggcagtttgttgctcgtttactttaatagtttatggtttgacaagcatgtccttcggttagacgattaactatcttagttcaaggagattcgtacgcagtttgcagatatctgcatcgtaaattcatgagtgattctaatcactatgtcaaaaatatatataataacaaatacaaatacgagtattattattggggattattttatatattttattttatttttaaatttatagtttaggttgctatggtatttttatgtaggttactatatagattttagttgtgatttattgctttgttggttgctatgtgaactttaataaaaatatataaaaaatattttaaagtgtaaaaatgaaaagaaagaaaaactcttaaaattaatgaataataagtggagtagtctataatttttatatatagatccattgaaaaaacgtacggctaaaggtatttatttttaaaaaaaaaaaaaaactcctacttcacaaaattatccaaaattatcatacaaattaagttcatatatgtgtataatatttttgggccttgagtttgggtgggttttaagcacggactaactcgtcttaatccagggttggacatatatatgaccaatatttttatattttactaaaaagaattgatcctcattcatttatttattaaattttagaatgaaaaaaactagtgagatccacacaaattaagaaaaaaataaaaggaaagattattctcccattttcataagaaatacatttcttttttccttaacttactttatattaattatatttttattaattaaatataaaaaagatatatatgtccttcaaaatatataaataaaaaataattacattattaacaataacaatttagtcaaactaaaacattctaattacctttcctaattatatatatac

SEQ ID NO: 81430 - DNA, 1230 bp, Cannabis sativa
aatacagggtccattttgttatttaacaaaacagagggtttaattggtaacttttgcaaaacagagggtccaaaatggtatttacccatcaaaaaaagtgacagcaaattttacgattttgttacaattatgctactttttagttattaagtgccaattaagtcagttaagtaccgactcaaaaatataaattaacataattctttaatttatttaatatatagtctaataatatatcgtaatgactaaaaaataatatgaatgtaataatattataagataaattatttttgctgttatttttttttttattaaaattatatgtgtaacagttgtaaatatgagagagtttggcctcatatatcctataaattataataaactcaaacacatacatggtggtgacacgtgactttgcatttcttggtccaatatttgggcccttgcctcttggtaaagcccaatgtattgagggcataccagccccccttttctttttttaaatgccctatgaccctttcagaacatactaattaattataagtgcctatttttgttggttaatatatatattcaagaaagtccagactaggtatttgaaaagctatgtagccatgaggaagagagagagaccctgtaagtagagatccacttttttaattgggtgactaattacaagtagaattactgaattagttatcatgagcttctgctatgcacatgtaatgcacgattatacatctgaaaataaccaaatgaacatgaaaattaaatattattcacacttatttactttatttaaagttagggatcttgaattattgtaaataattaattagtgaggtttttattgaattattacttattcctgcacccgtataattttagagaatatccaaacatctttagctggcttttagaagaagtatatatacagtgacttgctaccaacttttcattccttttgttcagaattttttaatttttttatatgatttatattaagtttaatagttttggccttacatatccaatattattatctttttcttattaatcataattaattatgcaatattgcagcacatataggagaataattaaataaataaattatatcataattaattattgtaatatatataactagttgatagctataatcaaattttcttttctacattattatttttaattcattatttgttttttttttgaatatttaataaa

SEQ ID NO: 81431 - DNA, 741 bp, Cannabis sativa
cctggttataatgctcctcccaatacagtttgcaaactcaataagagcatctatggcctcaaacaagcatcccgacaatggtatgccaaattaagctccacattgatctaggatggctttacccaatctctatccgataattcattgttcatcaagaaaacaaaatctatattcattgccattctcatctatgtcgatgatatgatcatagcaagcaacaaaaatgttgcaatctcacagtttactcaaaaacttgatgccaagttcaaactcaaagacttaggcaagctccgattttttcttggccttgaagttggtagaacttccaaaggtatctccatttcccaaaggccatttactcttcaacttctcaaagatataggatacctaggcgccaaaccggcctctacacccatggaactcaaccttaaatttagcaaagacaaagggcaaattctccctgacccatccgtttatagaagtttgataggcaaactcatctatcttaccattactagaccggacattacttatgttgttaatcatctcagccaattcctctcttgtcctcggcttccccatatgcaggccactaatagaattttacaatacttaaagcaaacacctggacaggggctctttttcccttccgatacagcaccacatctgcaagcatatacggaaactagtctatcccgagacaatgtccaagtctcgttctttgctgatgcagattggggc

SEQ ID NO: 81432 - DNA, 1479 bp, Cannabis sativa
tatatatatatattatttttttaagtttacgttactagctaatatctctttttatttgtacgatagtcttttgagtttttaattaaatacaaattctccatgttgactccatttcctctagtggttatatgtctcggaatgggaccaaccacagtccaatgtttttgacttgatcttcatcaacactttgactttacttcagtgacggaatgcagcttaccaccgtccaaatttcatagacttattaacacttctacctttgtctggtgtggagtgcagcaaactagaatctcattgctacctgtatttacgtattccttctacaatatgaatatagctcatccacctgagtctcaccattttgtggcgcgtacttaaagaggtcgacgaagacccatgagctcttgatgaaagggaaagattaaacctcatgcgtagcttatgcaattgattgaagaatttgcatggctgtgaatttcaaactaatataattaatttcaagaggtaaattattacattgcatggctttaaggctgctagaagttgaaaaactttaacgacaaataactatattattctcctatatgtatgtatgaactatatccactcatacagctagctagctcaaattaaaaaaaaaaaaataattgtgtatggtcaaatatatatatatatatatatgtatgtatggtattgatttcaaacttacataagtattattatatggaagtacatgaatttacaaggtatatacacatgtattgtattttggagaataacccagtataatttcgtaactttttattggggagatttaagtgtttcctatatgcatacatatattgacactacaagaaaaatagtttttatgatgagagtatttgtagccacatgaagtaatgtttagggcttacaagacttttatgttgctaataaatagattcttaaatggttattgtatgagaaatggttgttgtaagagttgctaaactatatagttgttttaatggtaattatacaagataggttgttatattatagttgctataagggttgctaaaatagttattgtatatgattgaattattaaagagttgctcaaattgttagtgtataaaattgggttgttgtaagagtttctaaaatcatttttgtaagggttgataaaatggtctatgtatgatttttgtacgtaaaagattgagtaattattaattgctaaaagggtttttgtatgatattgggttgttttaagggttgttaaaattgttattgtgaaggttgctaaaatagttgtcgtacgggattgcggattgcgatgttgtaagagttgctaaaataattttttgtaactcaatctcatacaacaaattatgttaacaacacttagagcaactcaatctcatacaccaattattttgacgacccttatagcaatccaatctcatacgacaattttagcaacccttattataactc

SEQ ID NO: 81433 - DNA, 834 bp, Cannabis sativa
caaagtttcctaatgtgaaaaaaaagtccattagaatccaatccgtgtggaaaattcagattgagattactcaagtagtgttgggtttcgttcttttaccttgtcgaaccgctatctcaccttgactcccacattagtatgatattgtccgctttgagtctagccctcacaattttgttaatgataatctattgaaataattaagttagttttttgaataataagtatatagttaaatattaaatttattatattatatattcctaagaaaatatataatacttgaagatttttatcaaataattaaatataaaattgcaatttgcaacatagaattcacactacattagatttctaaatggaggatatgccatttttacttgggaaagaaatctttatactttattcgtcatggaagagtactcactttaatgtgattttatcaaatttagaataaaaatttatttgttatatgttcgatggtttctaataaaagaaaatattgttacggtggatttatttattttaattaaatatataatttagggacataactttgcaataaattaagctaacaaaatgagttattttttgtggtttcctccattaataataataataatgctagtcattataccaaacttaggaattaggaaatgtaaattgaaactcaaataaatctcaacatcaacaaaaaaaaaaaaaaaatatatgagaatctgttaaaagggcccctgagtgaggttcgaggacgatgagctatcctggttcgaggaggttccagcgccggtggcggacgtgggcgtcgtaaattcatgagtgattttaatcact

SEQ ID NO: 81434 - DNA, 1710 bp, Cannabis sativa
gtaaaaatataaaaaaaattgagtgtaaaaatgaaaaaaatccttttttttctcttactttcttttgtcgtgtgtcttgtgtgcctcttttactaccctattttggttcttttgttttaacctgtggatcttcattgtctctcctttttgtttcctgagtagttgggtttgttacttttttacttgtccattcttttggtttggctattccttttagtcgtatctttgttgtgtctgtctttattgttggtatgtggggttggtgggtgttatgtttcttttcacgtgttttgggtatggtcttcgtttggtggttgttttttcatgatgaaggtagttaatgtgcaaccaattgttaataggggcagatgcatttctttgagtgaggcttctatctcactagtccttagagcttcaactacccaagtcttatctaaattctactttattggtaaggtgttgttttccaaacttattgaggaaagagaggtggaaagcttttgtgcgaatctacggaagactcaagtgaaggttgacactctattttttggatgagccttttctaacatctttcattttggcttcataaaggtggccgacaggaaatgggttcttgataatggaccttgctgcatcaatcaaaggagaaatcttagtgcttctagcttggccttcttcctttggtactaaggagctttcctttaatactatttgtttttggattcaaatacattacctgctgcttgttttcttccccagagttaattctaatttgttaggagctcaagtgggtaaggtgatttttattgagttggatgagtctaaactggttacttggaataattggatcagagtcgaactagatattaatgtgaataatcttttgtgttgtggatgcttttgttgaacagtgaagacagatgggttcaaatcaaatacgaaaaactaggaaacttttgctacctttacagatgtttgggtcagagaggtgattgctctttagtgttgacggtcaccatttaggacgctcggggtatcggtaccctctctttggtccttggctcaactctacttctacttacctaagttgtttctcagggaaattagatgtctccagtaattgggccaaggataaaaagggtaacaagggtgtgcgtaaggagtcaaagatggatgggctttcttctttggaaccattgggagggattttgagttttaataaagtggcttcaggcattcatgctcacggattgagaaagggacccatgttgaaagctaccaattgttcatgctatagggcaagcaaggtgtgggttcccaagcccttatttactgtgctgagtaggttctctaatggtgttcatggtttgggtaactactctagaaagccttcactgcattgtggaaagggttctgaagccttgccatttttggttgagaattcaaattttaaatagggtgatgccaactgtgtggaagtgaatgacaaggataaggttgaaaagtctcagccgaaccctaattgtatggttactaggcctaatttaaatttaggtcacgtgggggattttaatcttaacttggctcacatcccaggatagcctcttatctcgggtaaggataatgggccatctacaggtgttttttcaaatgggccgacacttaaaaatcaattaaggatgggcctgagtgctacagtggacgttgctc

SEQ ID NO: 81435 - DNA, 645 bp, Cannabis sativa
tatatatatatatttggttggattacttcatttatttccattatgactattttgttgcatgcatatgaagttgtaaaaacattaggacaagaggtaaaagttaaaaagtaacataaatagatttccttttacacttgagtgctattgtaaagtcttcaacagtgagttttctgccactccattaaatctattactgttcttctgttaatatatccaacaggttggagttggaggagtaattgaatttgtctgctgacatttactgatgaaaaaactgttgtgtttattgttcatttcatcacacctttgttttgttgttacaacattgcccccccagaaggtttggagacaatcttagtctaaaattttgatgaattttaaattgggatctttccaaaaattactaaaagatgactaatccagaaatttttaacatattaatacaaatagttactgttgaggtgatccaatttaagtaaaattatagaaataaaaatataaatcatactagtattcatcttagttttacattaactcatattattttttattttattttatttttgtaagaaataatgtgattgttagtgagattgaaagagaaccaaagtacaaataaggatgaattagttaccaatatttata

SEQ ID NO: 81436 - DNA, 2115 bp, Cannabis sativa
catgattagtgggtataaaatgaacagactcatcttcatcatcaaaatgttattggaataagccatatggtattggtaataatatacttaatataatttgataagtatatatataattgtagttgctatgaatgtatggtttagatgatgatataaagattagtgtgtggtttagaatgatatatgtgtgtgtatttataaagaggtttggtgttgttgtttgattagggttgaaggaatgtatatatatatgtttgcctaattggtttgagtgcatgtatattatctcatctcattttccaattgaataaattaagcttatcataataatagtttattatctatatattaattataattgttaacttgctaatgcgatatatatgtacattaattggctgcgttacataattaaatattttcttctttgcatatatatgttttcaacatagatattgttgaataatagtgctagctatatacagagtgctttgagggattgctttactttttgttaaatgaaaattatatatatttatatatatgatacaattaatcagtatataggtgattaattaattcatgtatatatattgtttgcttaattaatattgagttaattattgtgttaacattatccacttattattatttgaccgaaccgaacataatattgcacatattataattataccatgcatatatattttaacaagttttcaaaaagtttggaataatatatatgggaccgatcaaatagagtttgaaataattaatattttttgtaacattaattgtaaattattatttcagaattgttctggtggaataatatgcatactattatcataatatatatcctcgtatataaaaagtttgatttataattatatattatgaagacaaaaataatgtctgaccatatatatataaataatatatgtgttgtaacataaaaactataaaatataatttggtacatacaatatataactatatttattttatttaccaatatttccaatctgtgccgaaatcttcttttttacgcaatcgtgtccattttaatcgttataataaaatatttgtttttctaagtatatatgagctatagtactatatatatagctatatctatatagctagagattattaattaattaacatatatatagattgatcagtattagtaaattaatagctaactttgaagaaagataatccttcttagtccttaattatatatatctttatgcattttttattttataagcaatttgtcaatttgcacgcgattggacacaaatgaagattttggtacataataaaataaaattaaaaaaagactaatttataattaagctaaattaatgtattcaattcttctgtgtttacatgatttaagatcgtataattgtctgcatgagccttataattcatttaggaagtattttattatagggtgatatgtgctaattaatgcacactcttaaaaatagatgcactacacattttacttattttggcatctaaaaaaatctaattcatttttattttcatatttgtgtaaggtatagttataagatatcttacaaaatttttaaaaattcagaatataatacagaaagtaatgtttaaatagtttatttcatacgcgtataaaataaaagaatcacgcgtacaacatatactttgaaccttattttcaacgtattaaattttttaaatttcttaaaattttatcatatacatgaccataaaaaaattggtctaaacatacttcttggatatatggcgaatatataataataatcaaaacactaactgtgtgccaagaattatttcgcggcaaataaaaatggcagcaagtcttccactactataacaatatacaatctaagtatcagaagttttgatttctagagaaagaaactagagagaagttttgaccgtgtgcgtagttttctgaatgtgtaaaatgagctaagggagctctccttgtgaataaggctcacaaaaataagagaaaaataataattagatgttttttaccgtagatgatgatctaatggtaaatattagcttctcatagtgatagtcatttttcagagcccg

SEQ ID NO: 81437 - DNA, 2777 bp, Cannabis sativa
aggaaaatcacacacttcttgacatggtacgttgtatgttgattcattctacttgccagaatttttatggggtgaggcattaaagaatgctgcttatatcttgaatcaagtgcctagcaagtatgtcccaaagacaccatacgagttgcggacaggcaagaaatcaagtttgtgtcattttcatgtatggggatgtaaagctgaagttggcaaagtgtcaacctgggcgctaggcgctgggtccccattttggcctccaggtcgatctttttctctcccgaaagtacttgtttccttattttggatgtagaagaagaaaatactcaggataattctttagtatggtggttggaagtgccccaagttgacatagtgctgagtgcatagggcacctggtgctcaaaattgaaagtgctccgaagctgattctaatgcctcaaaaatgtttatgacatgtcttattcacatcttagtacaaagattgactcatttgcactaagacggtccctaaaactaaaaccttagttggaatgtcaacatgggcgttgggtgaaaaccctaggcgtccgggttgacctcccaggtgttgtttcatgtattttcagctttcgggcattggacttggattcttcatgtattcatagtacaaaataatgaaagatagtaagttggaaacaacttggcatgatccaaacacccatttcgtagttcctaaagtcaacctaagcgtagggctagggacctctcccaggtcgactgctatgactcaggactactcaactctgagatattttttttcttgtcacgtgtcaaatatttattccacatcaccagggtcagtttttgagtaaacacaaactttccagaacacctatatacaacataataagcatattccacaccttaaatacaacaatcacacaaagaatcaaatttcaccattggagctcaagcttgaagctccaacacaaccagcagcataaccacatcaattacacctcaattctaagctaaacaatcaacataattaacccccaaacacaactacaaaccccatacccgaagtccccaaaaattcccataaaaactcaattttaaactctcaatttaccaagaaaacaaagaagacttaccccaatccttgaacaactcctaaggttgattaattggtagtaaaatgagcaaattttggtacgaaaatctaattgtttttgctggttcttcttgagtcgaaggtgaaagagaaagacaaggcaaaataacttacttttggtaccacttaacattactaaaatttctttattttctaacttatccattaattctaaatcaataataataataacaacaagataacttaaataaagataataacaaactaataacacttaattaaacctttgcaattaccaattttgcctaccacacaagtatccacttaaacataattgtaagggtaaaatggttatttataaataacctgcttaatctaaaaattcccaaacatcataaaaaatctctcggtgccactacaatattcactaataccgtcgcgatatttatggtcaaccgatcaagtttctactgttgctaaacttgaaaaatattttatttcatgtattttacccacaacatagcccaataaactatccgtaattaataaattacatctaatttgctcatttcataaaataagcctactttctcatattaacctagtaagatcataatttttctcaatttattctcctaatattcatattactttatatttcataaaatatgctttaattaattataattaatttatgggatattacattttttcactgtcaatatcggtctagtctaatgtaaatcctatgcatttgatacaactaatgtcttagaaaagacatcccacttgcctaaatgtaagtaaaccacattgtcgattatcacgttagtgtaaatctggtgtactaataaatcacaagattaaataaatttgaagcatacactcacaattattttacaccgtgatgacatcactataatcataaataattatatgtttaagatttaatagaacttatatattaaacatataattatgaaataaacatgtgaataaagcatatgacaaggttaaaatatgatttctgaattttattgataataaataagattacattaaaattgaattttatttaaggcataaaaccttaacagtggttacctcgataaagttgtatcttgaacaatggaagaatacctaaatgaatgatgaatatacaccattatctagtggtgtggcacaagatggtgctaaagttttggtaaagtttgaagagaatcaaatcaagataagtattgacgatgcattattcactgtgaatcatcagtttagaatcagcatgtaactcaagataatttgggcggtcttgttgaagcccaaaccatctgtcttggtggggatgtagaacttgagttggctgaaattattggcatcagagagactttcaattggatcaaagataaagattgacacgtggttgtagttgagaaggattatttagtgacagttgagaccattgttaaaatctctttttagattaattgttaataattaaagatatttgattaattatttgagcaaagttatttattttttttttgttatttattattgtggtgacttatagttttatgggaaattatagtaaatggccccaaatcataggagtatgttagtttatgtcatcatttcaaaaaaaatatagcaaatgaccctaaat

SEQ ID NO: 81438 - DNA, 1556 bp, Cannabis sativa
gcggtctcctctattattaccggcgggtggctccgccggtaatatcaaaatttgttgtagtgtttgtgatatcgattaaaaataaaaaagctgtgactaattataaattatcattcatacgttgtgactaaaaagtctatgactaaaagtattgaggcaagctgagtatgttgagtttggagtatgaaaatacaaaaataggaatgaaaggaagtagaaataaaaataacaatggaaatagaaatagagtgaaatagaataaataaaattgaaaattgaaaaaaaaaatatattaattttttttcatcttaacatgttcttccttttttaattcaaaattaaaaagaaaaaaaaaatcactcaatcatgcacaatggtggaaatcgttagattgaagtacattttaatattttaaatgcaacaatataagggaaattaattctttccgtttctgttattctttttcatttccaattcatgcaacaataaattatagatttagaataattagtatgattgaatcatgaatctcttgagtaataatgaatagagttttgtgattagttcgagtaactgatcatctttttataactaatatatagagtttacacatctttccatgtcaagtgaaattcttggattgtatttttttgataaataaagtgaccaaagataattctccttgatcaagaattaatgaaaattttgataaatggatcttgatcatcgatataatcacacaaaacttgttcttttgaactttcttcacttaccactgacatctactgtccttcctttaattttccattttactcaagaaatgcaaactacctaagaaaataattaatataggagggtactaatattcccttgatcatatattatataatttcaaagatatatgtgtagctagatttaaatttattatttcagtacatgcatgaaacaattgcacacgtacttaattaatttttattgttttgccaacattaatgactagctgtttacaagcatgatgcaccacttttctttattgttttagggaaagaaatagaagaagaatatggcctctactcagagttcttgatctcagtattttgatcatatatatatatatggttgtttttctcatttcaaatatatatgtacatatatagtgatccagtactcatatcaagttgatgtttaatttataaacctcttataattaactagctagtatacatattaaccctatgataatattaatgatatatatatatttatatataggacaataacattacttttgtctctagattttttatatgatgatgatgtataacttataattatagcatgcatctcttttagaaattagatgcattaattattactagggtatatattctattcaaaagtggtaatttaaactttattaatttgatcttttatttttttttttttaaaaaaaaaatgatttcttttttctttacttttttaataagatgaattcttgacccttctgcaggagggagaagtggatttagtagaataagtttattaagattaaaaat

SEQ ID NO: 81439 - DNA, 2130 bp, Cannabis sativa
aacccaacactagtatggtagcggtacagagtacattagtacagtatatgatgtttaaagggtacgatccaatgttaccaacactagtacgaaacgagtacgtagtgcatgtgatacaacactcaatggtactcaaggtatgattcagccctaccaacactagtacgggacgagtacttagtgcatgtggtacaaaggtcatacttcttttaagaacgttcttgatcatctattaagccttgtaaataggtgtatgggtgtctaaatacaattcggtaatatgttatatgttatatgcttttcttactgagtctgtagactcagagttattgtttgcatgtgtaggtaaaggaaatgctaaggctgagcaccaatgagtccaaagctcgaaggtgattgtacatatcaggatggttagacctggagagtttggtctcaggacgacgtgggcctttattttgtagtcattgtgcgacatgtttataaagtatattttgaatatgattgtaaattttaaagacaagatcccaacttttatgttctaatataaatatttacaaaagtttaaagtttaataaaaaaaatttaaatttgacacgatttttgagaaatcttttgattagcaaaagtgtgcatagtaagtagaaaattactataacgtgcctaagcaatagggcgttacatttcccccacctatttgagttcattaagatacctcttctaggcattcctagtacttttgacgatatgcagacctctggaaatggtcgcgacgcatctgtccatgggggtggagtagcccctggagaataggggttccctggtctaggagcttgtatatttctggatgcctagatatttaggatcccctaagaggcctagattcccaaagcttattggtaaaccacaccctaaggagggtttatggctccatgatatccaggaatgaccaagtatccttgggctaccttttgtcccatatatatgattgggactctcacccactcgtaaagataaccattctttatgagttctcgatctcatccttcaagtaatcttatttattcatagtgtgtctgatgtcaccatggtactcacacctcttactaggatcttttatatgcttgcctcccttgtacattgaagggggaattctgtaatggattgtgttgcacgtggccttgtagacattctcttgagtgtggatcaaatttgtatattcagaatattaggcatcatatccttttctgcctttcttcaaagcttcactccgattttgagtatttccacttctcttgctccaggattggttcacacctgactttggaacttttgcttgttatttcatatggatctagtgagagtgacactgcatccagtctgtgccattccaaaagtggagaaactcatttgtggaggcccataccctggggtagcgagttcgtagatgattggacttgtgtattcggttccaggaggtagaatagacaaaatcatgagttgttgtgtggagctattgaaattgattggggtttaagagccaccctaaagactcaagtttaagcctcttatagactataaaaccttggtccttgccaaaaagtctaataaagtgtcaaacttttgtctttgcatttcgttccaaaataaggatcatgtcgaagtccccgactgcagggtcactaacttcatgtcatcgttaactttcatcttggttgttacctccatcatccactagaaataagctttgaggctctccctgacttattgcttgattttggtcaacaagatgacctccatatcaaagtccttcatggttacaaattacttctagaacatggattgtagatccttctagtttcagatagagctagatgataaccttttccaccaatcttcgataattttggacaaggccaatgagaaacatagacattttccatcttcactgacacgttccacttgcaccagcctattgtactttgataggtggaccctagaattcgttttgcctttgtacagatccatttgcaacattcagaatttttttggcaactgtgcctcaatgattctctttgcacatggtttcgaatctttttcttccgagtcgaatacgtcaccactttattt

SEQ ID NO: 81440 - DNA, 1093 bp, Cannabis sativa
aagcttcaagtttctccatatagaaaatataactgcatcattattaatagttatattattaagacacaatgttgatgagtagtacacatctcaaccaaacatttctcagcttattaattcttttggtgctgctgtgttggactaatgctgctaacatcactttgggttcatcactcactgcaaaacttaatcatcaaaatgaggagtcatcatggctatctccaaatggagatttttcatttggctttcagcaaattcaaaaagatggcttccttcttgctatctggttcaacaaaatacccgaaaaaaccattgtttggtcagccaatagagataatctagtgcaacaaggctctattgttgaactaaccaaggttggttcattagctcttagagactctacaggaaaagaagtatggagtactggttttggagttgaccatgcagccatgcttaacaccgggaatttcgtgctagccaacaaggattttagcaataattgggagagttttaatgaaccaacagacacattgttacctacacaagttcttacaacaactaaacaacttattgctagttactctaagtcaaactactcaagagggaggtatcttatgacaattgatgatggagatcttgtgttgttcagcagaagacctccacaggatcatgaatctatttattggccagagaatttgattgatgggagaagtactggccaaggaatcagctttcaagtgatgtttaacaaatctggttctatttatgtccaagcaagaaatgaaaccgtacttaaatggttgtcacaatcaaactctagttcatcaacatcaggcctctatcaaagggctattcttgaatatgatggtgttttcaggcattatgtctatccaaaagatgatgatactctaaactctactgcttggcctctcaggaaatggtctcaaacttctcaagccatacccgaaaacaaatgtctaaattttcggtcgcatgtaggatctggagcttgtggatacaatagctactgcagtatagacaatgatggcagaccaagttgctattgccccaatggttacaccttcattgattc

SEQ ID NO: 81441 - DNA, 567 bp, Cannabis sativa
aaattttttgattttctaagcatagaaaatcaaatttccctaatagacattactttttgataatcaaagagagataatcacaagaagtgaaagggatgcatttttcaactaaatcctcaataaaaaatagatattttatataatgtattatattttaattattattttttttttggatatatactaagtttacataacaccctctaaaaaaagagttttttgatagattttcaattagtttcagtcatctaaaaaattagaggtgtttattaaatcgcttacagttaataaacgattaatatcatattataatgtataaaaatatgatttaaaattttttgcggtggagttatagtttgcatgtttgccaaactctacaatatggtacaatttgtaattttaaatttaataattacgggtcaaatcacaccacactatctattacaatttttttaatttttacatataatttttaattttttcataaaaaaaaacaaatatatgtgtctattacattattttttagagacagtttaatataatttcaatataatgaattgatgatta

SEQ ID NO: 81442 - DNA, 1628 bp, Cannabis sativa
aattcctccaattttcataagtggaagttaattgtttcctgaaagtaagttctcagaagtctaacttattcatttgatagtagtctcgtggaatgatagttataaccatcctgaatggctttctcagatgtttatcatgttcacatggcaggagtcttctccaaattttgagctttttccttcctggaagagagtccaggatagtcgactccagatgattctttttttttatcagagaagttcctttagcatacacttctatcctctgtcccggaagcgtatgtctcgtccgtaagcactttgtcttgtgctgacgtgaaaatattgttacaaggagtttgttaagtttgttaagtagtaactaacttaacaacttaattaacagttgcagccactgatttaggatctttatcctgggcctataaatacaactaacactaatcaattcaacgggtgattcttcaaacgagtattaagaggtgatttttgaagagagattgagaggtagaaagagagaggtacagagaagagagattggatttgggttttgtctgaagaaactttttggtagatgaagaagattcttgggtaaaagtgcaagagtaaacaccttgagagaatccaagagagaattgatctcgactgtattgtaccctattcttgctcaatcaataaataagatttagtggtattcaagaacagttgtagagtcataaatcatatatatttataaaacttaaaccagtatatatcttggtgttgattttattattttactactttaattgtttttgagtttaatactctcttctttctattttatcttagattattggttgtgacctaatatgatgtaccaaacaagctcctaatgttttaatcaagcttgcctatattctatggagtctatttggagccattgacactgagtaaacttctcggctcctacaactagtgatatttctctgcatgcatcttgatcaaatacgataaaaacactatttttacataagatataaacataaaaaaaaaaaaaaataaacagaattgaaagcaaagaaggggaaaaaaaaacaattcctgtacttctgcataaaataatttagctcacaccactttatatttttgtacaagccttaagaaaacagggaaaagaaagagaaagttaaatcatagagggttaattactgatctacctgtatatatattgataaacaattagtatcatgccaagaagagggaaccatcgttcctgcaaagaagactggtaagagaccataaagaataggaaaactagaagaaagccaactccccatggagtcgttcctgccctattgaaggagtccctctcgggcaaaggaatgaaagacgataagccgccgcgtcggtgtcggcggggggtttcagcgtaggaaagcaagtggagagctagtagcagcaggagcggggagaccatgagtcccagcttgatctggtcgagcatgccctctatcagggcctcgtaattggagtaccacgacagcgctacgaacgtgaagagtatgcaaagaaagaagcaaagatgaaaaggcatagaagcttcggacctctgcgatgatgagtaataacctcctgacatgtctctctaa

SEQ ID NO: 81443 - DNA, 1088 bp, Cannabis sativa
gtagttagcttaatttaaaactaaatagttcaaacattatgttctgctaacattgacttcatgaggtgatgcatcctaaattgatgggtcactaaagaatgagactttaggaattcattccataagaattgtagtttccatgcattaaatgaaaaatataactattggcaaaaagtacacaccagtcattgcagaagtgtagagcaaattcttgaatttctgcaaaaaatattgatatgaaaaatgttaagttacggatacgtccttacagattagaaaagatgaaaatgatcagatagcacatcgaatgcaagcaacataagatcacaataagcagacgaacaaacaacatatctcatatcaccaacaaactaccaaagtcttcttgttgagcagaagaatgccgagatcttaaactatgtgtaaagacattttcattttgcaaattaagtaattaaattttaaccaaaaaaagataaaaacacaagcttcccatagccataggcccatagcaatctcacatccacacacttacatcaattgaagaggcgtcatctggtaagttgttttgcagaggtgcagctcggagagacttagtcttttcctctatttcatccacagagtaagctgccaaaggaagaaaaaagaattcacttttcacattcttgctttcacaaaaaaagaaatgaataattcatcatagcaacattgtagctcaagtttaactaggtccaatgagcacatatttcacaattagaaaccaaaaacagttgaatggtacatttcacagaaaaattaaaacattcaaatacataaaagaaacccattagcaacaatgtagtcaataaaacaaaagcctaagcttttagcatccttaagccaaactgatcaagtaaaaacaaccaaattcaaatccaacacttcagtgtattcaaaagcaacattgtagccgatacaataaatacctaagttttgatcttccaccacactagatttcatcaattgaaagaaacccaaatctcaaaacacaaaaccaaattcaaatcattcaaaaaagaatcatttttttttttaaatcgcataccgta

SEQ ID NO: 81444 - DNA, 801 bp, Cannabis sativa
gtatttttgttattttttttttgttgtttttgtacatttgtgaaattaacccattattgttaaacattgaaggtgttggttttttaacagggtttgaattgaccaaactacccttggttattatttaatatttgacctttgactaggggtaaaagggtattttattaaaatgtcctttgtctttttgtggcttttgtgtaaggtataggtagagtaaataaaagttaattaaattagaataatcctatattcatggatgaaactagaaacccacatatcatatacatacacttgttcctctttctttttctctctttgtcgaaccaactagaaccagcaaggggaaggaattttcaagctgcaattcaaggctttgtagcaagatttaggtgcttcaatctaaggtatacccttttaacacatcaattcctagttctcttaagtttttgtttgtgtattgcatgaattttgagtattaggtcactatatagattggagtggtttgattttgtgtcttggggttagattaagttttcgttgattgatttgggctgcattggtaagctttgatgagtttggctaaggtttgagttgaagaactcaagccatgccctctaatggtgattttataatttgagctgtttgttatgttttagtgcttgaaatgagtttgtcgggacattgtaacatcccaatttctcaagatgtcacataggatagtccgtataaaacaatttattaagataaagacaataaaatacttctttattgaaaaatatctaagcatgagatctcactgtt

SEQ ID NO: 81445 - DNA, 683 bp, Cannabis sativa
tgaagtcaattgtaaagggaatctctcactctcactctctcacgctatttcactctaaaaagtcacttcaagactaaactcttgaagaacatataatttttgagaactcttcgaccagtaaattaaaatataaatggactagtctattaatactgaaagggcgtaaaccattataaaaattcatcgttcatcaaatttcattccataaaccggtttacttttgattaatattcatttgtgttcatcttgctcgtttacgatttttttatctgttaatgaaaaactgcgtcaacaatattctattaaaatttgattatattccaatccaaaatatattattttgaagctcatgttatcaatactataaattattagaaaaattttaaaaaattaataacaaagtatttactatacaattacataatattgtatatcgtgatatagaaaaaattattattttctccgtatacttataaaactatataagcctctattaaatatgtctcccaattttatttaatacatatagtttaatttctttattcttcctagctagtgactttgcattcctttttcctagttactttataagatatagtacactactctcatgagaaatagagaagaaaaatgaaagaatataaagtgggaaaagtgaatgtgtttatttgaatagggctttt

SEQ ID NO: 81446 - DNA, 1266 bp, Cannabis sativa
  modified_base (35)..(46): a, c, t, g, unknown or other
ttcgaacctaggaccttgaagctattaagctattnnnnnnnnnnnnaataccattacgctacactaaaaaaaaaatcacttttgtaacattaggtaagccattgttataatatttgtccccatacactacatataattttattgcttaaaatatgtgtaagttagaaaataactttgagctaaaaaggtaattttggagcaataaaaaaaatgatgttgtgatgtggcagaattgaatagaaacacattgttatatttaagagaaatgctaaaaggttttagtagtgtctgtaggaattttgtcaatttaacctacaccaacaaaacacttaatatcagtatccaaggtcagttttgacctttccttagtcgaagtaaatttagactagaaacggcagtgtataacccacacgacaccaaaacctgtatcgtttagacccttggcttaaagactctccaagaagagtctagaaaccctaactcacacactcagcctctcaaacctgaaaccacgaaaccctagcgatccgaggtacgaaacccagaaatttcacccaaacacacacagatttagtttagcaaatgaaaaaacaagagaaagggagagagaacaccataattattccagagttcaccccaaaaattagggctacatctctctcaagctcatctcagagattagcttgatatccactatcaacaatgtcaatttataaagttttagagttttctgtcacagtaatcgatcaggtaagacttaattctttctgtacaatttctacttttgtttcttctgatttgttctcgatctaactcagttctctgttgttctgcatgtacttcctttcttctacctcctcaccatgagaacatggtttatcatctttggatcttggagaagaagcctcaactagggtttatttcttctaactcttctctctctatttttgatctgtatttctctatctgtatatgctttgatttcatgtttatatatttgtatagagtcggttgatcacagatctaggagttatttacaataactgaaacaccctaaaatatttaggcacgctacccaataaacttatgaaaccctaatcccctaattgggattactagtagaattagcgcggaaattaaactttaattacaaatagcatgaaaaataaacttctaatactttttcacttaataaaataaaagatacaaatgtcgggatctcgaaagtactttacaaaatattattacaagtttgtttcctctagc

SEQ ID NO: 81447 - DNA, 517 bp, Cannabis sativa
tctcggaccaactactgatcatcgccttgataaactattgcctcaccctagacaggcggtaaaaattaccgagctggagtacggtaggggcagagaaaatttccgatagagcagtgaaatgcgtagagattggaaagaacacctatagcgaaagcactctactgggccgacactgcattgagagatgaaagctagaggcaaatgggatagaatttcatgacgtgtaggccttctacctccacgcggtattgctccaccaggctttcgcccattgtagaaaattccccactgatacctcccgtagtagtttgggctatgtctcagtcccagtgtggcctataataattcttcactttatttatatatttattcttttccttttaaaatagatatggatttgagaattattatctattattcgttagcagaatggaaataattagggaaagaagggcccacgggtaatgaatgggaagataagaagggcccacgtgtaatgaatgggaagatcgaaaag

SEQ ID NO: 81448 - DNA, 1724 bp, Cannabis sativa
ttcgaaatttttcaaaaatacgttgtaagcatgcatatataacgaacaccacagtgaaaaagaataattgaaaaaaaatattctcacatgtatttttgggcataaagattgactaacagattgtaacaagagattaacggtaatacttcccgtaacaactaattatacattcaagttaggcacatacaataaaatattctttaattagtccaatcaaggacaaaaatagtctttaaatatttataatactcgtaaagatcatattttcttgtagcaataaaataatataagaatttaagatactattctaatcctataatcttcaatttttttatttttttatccttaccaaaaaaaatctttttatattatgagttttttttttttttgaagtaagaaaaaattattaccttcgagataaaattacggccatgagagaaataatcttaattctttttgaaaaaaaaatgagttttaagtattttcttcaatcataatacaattaatttaacatattcacaataatttatcttaatatttcacaaaaatgttaatattattttttgataaaaaaatgttaatgttattgaaatattaacaatatattcaatcttaatatttctttacacaacgttataagtttttaaacaatcacgttatattaccaaatgttcaatatataatcaaaaaaaaatacataataaactaaaaattttaaaaaaaaaattaaaaaaatacatcaacaccgaaaaaaatttattgttacgctttgaatttttttatttataaaaatacctctttaataaaaaaaataaacaatctttttattattttatagtttatttatagttgtgttattattataattatcatgaggttattttttgttgtttatagtttatttatagttgtcgtgaggttaatttttcattgttttttagttttttttttaccttttgctaagtaaaatgtatttttgtaattttacaaccatatttttataaataaaaattttaggttgtaaaattataataaaacataaagaaatgtatttttaaaaatttctcaataattaaatagctatattttgaactaactgaaatttataattagatgatatcattaaattaagtaaaatggttaggtaacaactatatatatgtatagctaaatcccataatctctactcaactacaagattagataaaattaaagatggcaccaacccaaatttctgaggaattagaagccagcctatttgccatgcaattagctggtacttcttcaatactccccatggttctcaaaaccgccttggagctcgacctcttggagatcatagctatggcaggtcccaacgcgttcctttccccttcggacattgctgcacaacttccaacaaataaccctaatgcgtcgatgatgctagaccgaatgttgagactattggcaagctacaacgtgcttacttacttgcttcgtgataaagtcacaagcgatgggaaagtactagtggagagactgtatggtctggctccactcagcaaattcttgaccaagaatgaagatggagcctccattgctcctctttgtctcatggtccaagataaagtatttatggagagttggtacgtatacataactaattaatgagaaattaatttgtgaaaatattacatttagtttgatgtttaagattatatataatacattgggtaaatatt

SEQ ID NO: 81449 - DNA, 1401 bp, Cannabis sativa
ttaaaattatattttctactaatatcttttgtatttagaaaatacttagcaagagagtaaagatataaggagtgcaatagactatattttggagaacctttccaaactgggttgtattctttctattactgatgtttggcgctcaaggcatggacacccttctcataaatgattagctttactttataaaaaagttcactttaatatcgatagtcttcgtagagattcatcttgttatatctgtcttatggcaaagcaaaagaaattacccttttctaagaataacaattttgccaaaatgaaatttgatttgattcattatgatacttggagtctttgtcatatcatttctcattcaaattaaaagtactttctcaccttagtgaatgataaaactagattgacttggatctacttagtaaagcagagttctaatgcattgcttattatacctcagtttactcaatttaattgtacattgaaatattttagttccgataatgctcctgaattggtcttcaaaaatttatttgcaaaatatgaaattttacaagattttacatgtgttgaaacacttaaaaacaatgatattgtttaaagaaaacatcaacattttttaaatgtttcaagagccctttaattccaagctaatctaccaatacacttatgcatttattgcatcatgaccgcaacctattgtcataaactgtaccctgcaccaaacttagcaaataaaaccccctatgagtttctttttgataaagaactcgattatgagcacctaagaaactttggttgtctcatgtatgctttaactctcatagcacgcaaaacaaaatttacttatagagaaagaacgtgtattttaatgggttatcctcaaggcattaaagggaattggttgtatgacatcaacatgacttatatctaaaaatgttatctttcacgaatatatatttctcttctacagactaaacaccactaatgattttgtttaccctttttctaatatggtttttccctcaactataacatttctcaaactgcagttggagattttataatacatgttccaaatagcttctgtactaatagtgctccttaagtagaagagtttgaacaagacatagatgccactactattttacctgaacaagaacaaataccaaatccacaagggcatccaattcaacaagatgatcctcctctcgtactgagacgcacaaccagaccctcaagacaaccatgttacctacatgactatgaatgtcacttaattattcaaaaaaaaaaaaaaaatcctctacacctcactcacatcataaatttgtatcttatgataaactgtctagatctcacaaagtttttattcttgccactttgaaccaaccacatacaatc

SEQ ID NO: 81450 - DNA, 1043 bp, Cannabis sativa
aaaaaatatgtatattttttaaaacgtattttattttatttggacccctaaaatgaataagccctaggcgcaaacttaactcgtctacgctttaggtcgaccctaagtatatgtataaaaacttatatgaattttgtcagttttgattatttcagtcgatttgtaatcgaaataaaaactgatcatttaaggaccaaagataaatagtatttttaaaaattattaaaaaatatgtatatctttcaaaatttatttttttatttggacccctaaaatgaataggtcctaagccgtctatgcataaggtcaaccctaagtatatatataaaaacttatatgaattttgtcggttttgattatatcaattgatttgtaattgaaataaaaactgatcatttaaggaccattgtaaccatccacggttttttcaatttggtgggaatatcatataacataagtagatatggtgataattgattaaattttgtggcttcaaaatatttttagtctcaacatttttatttgtacatatataataaaattatatttaatttttattacaccattatattgggagagatattgaaccttgatctcctctacaagaatagtggtgtagaatctagggtaaaattaagtatgaatataaaaatctaaataaaatattattacaaagtaataactatgtaaacaattaaaaaggaatgtaaattcttttcctccaagtaacggaagaagctaagtatgcataatatgtaaaatagagcttgatccacaagtaagaataaaagaaaaaaaaaaaaaatagcctaatatggtcttacataaatagtacttagtaaaatattaggatcatgtcttaatttctacttattaaagtgtatagatttaggggtgtatagatttaggggtgtttattgaatcacatttaatatttttttgtatataataggggtgttcattggatcacatccaatggatttggacccatccgatccaatccaattatttattagatattggattttgccatccgatccaat

SEQ ID NO: 81451 - DNA, 1553 bp, Cannabis sativa
ccataagcttagtcacgtgctacttgcttcaacccgtgacaaacgctttttaattagtggtggaattcccacttgttcacgtgcatatataatatttaccttttatatttttcttataattattaaaagaggttacaaatctatgattagatctttttttatttcatcaaactcaaacatacatatatgtaatccaaattgggttaagatgacctgtcatggtattggtccccaacctccaatagccaaagttgaaagcaatggtttctaaaaagttgtattacaaaagaaaaaaaaaactatggactcctattaaaataatagaccaattgatcgggatgtccaaagtgacttgaaattgggttcaatcaaacaatttagttgagattcaatgtatgtcaaactccaacaaaattgacataattttatcttaatccattaaattaaataagtatattagtcttgtattttttctagaaatatgtcatttttatttttattttagacatgccttggtgtgttgtgctactagatatgtccccaaagttattactactaatagtatattttaattttcaaatgtaaaatttattaataaattaacagtgtcaaaaagcacgttctttcatgatcataattggtaagattaatcattaatttaaagttggcaagttgcctccctctaatatttgtctaaaattataacctcctttccttttatttttttaaagctaatttgcaataaaatttagtgaattttgaaatttgacacaattaattctctagattgaaaaaattaatgttaaattcctgaactttcacaattgttttattttgtacttcttttatctatttagtttgttaagtaccaaagcggactgtcactatatacataagtgtatacgtgacaaaattttacaagtttgcctaatattaataattaaaaatataatttttaaatttttaaatatttctaaattagaaaaaagaataaaaaaatctcttttttctttcttcttttttttctttgttgttcactcagcgtcacaccagagaaccatggtcgttctccctcgtccaaaccactaccaactttctctcgctcagaccacgccaattctcgatcgcctaggtctcatcgcacgacaccatcaccacctccttcccaaatctccctggctagaccacgccgattctcccattctggatctctctcactccacttcttcttagtgggcgtcgaggatgatcgcccttaaatcattgcagaagttctggggacatcatgacataagcagtcatccttttgcctttagtttgatattctcccgatatttgattcaccaccaattaggaatcattgtgcacttaattatgttgagctccaacttctttggccagtcataatcctgctagcaaggctttgtgctcagcttcgttgttagaggcaggaaacttgagacagagcgcgctttgcagttgatgcccttgcagggagattaatatagctcccactctgactcccttttcatagctccaggactgactcatct

SEQ ID NO: 81452 - DNA, 1078 bp, Cannabis sativa
aattagacaaaagtccttatatttaacaatctcaatagtttgggggaaatttctaacgaccaaaaaaattcaaaggcacgatttagtacattaaaatttggagtgaaaaattactaattagcctaaaaattaatgtaaggttttctttttaaaaaaacacatattttatcaattagagcaatcttccaacaatttcatgatgtacccaaattgctaaatctatttcaaatatatatatatatgatcatatgtatgcacacgcattatctatacattgatatgtgtgtatatatacatgaactatatatatatatcataattgctataggcatatatgcatgtacatttatttttctcatagtattcatataaatatttcatttatgggaccggatcataagttgtaggtagccacccaattatatccaaatcctatccattgcattatatgtagtatttgattatttatctatttattttgtaattaattataagtcttatatatatgactggctccatactagtcatgttcagcctcagcctgtcatgttcatgtttttttttttttaaataaataaataaaaacaatgattaattactatacagaaacgaccatccatatttatgattcatatatatctagcttttatataattacgctataaatttttcaaataaaataaaaattgaccacacatgatatcaaagttttccttgcttaattagaagaacaaccatgcatgttttatataagtcgttttataaagcttaaaatgtttttaatttggatcgatataattataattggagagtttaattactttgaaatattaattatataaagtccttaatattatatttacgttatcttaaaatgccaacacgatagataatattatgtcgtatttcacacaaagacttaattaaaaaatttataaaatagattaaaaaaaaaattaaaaaaatttacaaaaatacgaaagaacacacaaaaaaaatatttttattctttgaattttttatttgtaaaaatatatttttaataaaaataataaattattttttaatcgttttataa

SEQ ID NO: 81453 - DNA, 1266 bp, Cannabis sativa
taatcagtttgggcctgattttttggtcaactgggccccagccaatgttgacccgcccacttagcatcaaccctaccaccatcactttcatcctcttcacacactcagccatctgccatttacaaagccacagatttcgcacccagcaaccagcgttcaacctccgttcatcatcttcaatccccaccatctcgagctgtcccgcctgactcacaacaccatagttgacccaaatcgattcccaccagcaactgcatctcctagccatttcctccattcaacccgagccacctccaagtcgataccaacccaccagaaatcaccattgtccagtcgaccagcctgcaaacgtatcaccatttcccactcgcctgaactccaaccgttcaactcagtttaaccatcaactaagtcgaagctccaccgtgaccaaccccaccttcgaaccaccaactcacctgaacccgtagccacagaaactgcatcatccaccccttaatcgcacaccattcgaacccaacagaacccatctcagcaacactcagttcaccatcttcaacccgcaccatctcgagccattccagtcgaacaccactcaacccgatccattgctaacccagcttctatttgtcgagcccttctagcaatcacccttaaactcgcaccacccacgacttcaccagaacacacctccgagcatcatagtccctgcacatccacgaatccagcagctcgcacgaaccaagcatccacctcatgtccatccatgttcgacagcaagaagtcaagagtgagcttttgaattttaattttgtttttggagaaattcttggctgccgtatatagtgttcatgtgtggatgttttaatttggttaaatctgatagtttggaatttgttgggagggttcggctgattggagtaatgttggaaattctttgtatgtgatttttatgcattcaaaagggtgccatgatcaataggtgctgattgtttggtgtgagaattttcaacttgaataggtgatcaagttttgtgggataatgaagttttgttggggttttgaacattgaactgcctggttgtcattatttgagttaaattggaaatttagtgtagtattggaagtgttgtggttttcggacagattattgtgctactagttggtatggttttgggacgaattgccatagatccaaagttattagtgtgattccattgtggccgttgtgagtgttataggtgattttggtgaaggtgcagtggt

SEQ ID NO: 81454 - DNA, 682 bp, Cannabis sativa
gaattagaactcgtataaaaaaaaataggttagcttattctcttaagaaaattgcccgctttagtatttttcaatatatatattgcgcgtattgtcatgccaatatttttgaaagatgtataagttcgaaatctttgtgtcgtatgatatgaatctgaacatgacacaaaaatttcgaacctattttttgaaaatattagtatgtcaatacacacgatctatacattggaaaacactaaaacaaaaagataagaattggactatatattttgctgatgcgcacatatttacaagaatattattattaagcactaattatatataacactacctacaggtgacacttcacaatttattaatgatattttttaaaaattattatttaagttataaatacttaattacactaatagcaacacaatatcaaaaaatgtgataaataccactaatactttttatccattcggatgcatggtgttttttggaaatgcattaatttctttgcagaaaagtattggtagtagtatagctaatacatagtaaaaaagaaaataattttaattttttgtttgtaattgtcattaattaattgatgagatttattaataaataataatttgtatatttggaaaggaaaaagagatgaaattagatgcaaatggtccgacaagccgaccaagaa

SEQ ID NO: 81455 - DNA, 1337 bp, Cannabis sativa
tcttagttcataccaaaatttccaattttaagggttttgattggagctatggcgatgagggccttggcttcactctcactacggagatcccataaacagtttaagattcttttgtgcaaacccatcttttacagaagcaggtacctctttcttctctgcttaatttagtacaataatactgcagctttcttttatatatttgtatgtgtgtgtatgtggttcatcatgaattgagatggagctttatttttcgccattaaagttttcaaatttcttgatggaaactgaataatttgttgaagaaataaaatgatggtactttactgtagaaaagcttgaactcgtcttatactttttttttaatgtatttgaagttatagaattcaatttcatgtaattagagattttcattacaacaatagatatttgtgtcttactcacggaagaatagtttggatggttttctatgcaaggttattgttcaggagcctgcttttggatacctccatggtagtaataaaaggtttctcttagatgggcaacaatggtttcactcagcttcatgcctacgcatggttgacaaggttgtggagccaacaaatgactctgaaattaatgctgctgttgatgatggagttggtagtaccaagatgaagaggatgaagctcaaagggaaaagagcagttgtgaggtggctaaagttctttaggtggaagaagaagaaagattatgagagaatgacgccagaagaaaaaatactctacaaattgagaaaggtcatctaagctttttagtgtttagattgattaagtttcatttttgctactttagcttatagttatagtatagtttatctttctttctttcttgttgtatcccaggctcaaaagaaggaggcaagatatgttgaagctcttaaaaagattgaacctagtgagtcatctgagacaacccatgacccggaaattttgaccccagaggagcattttttctttttaaaaatgggactcaagtgcaagaattatgttccagttggtagaaggggaatctaccagggtgttattctgaacatgcacttgcattggaagaaacatcagactctgcaggtggtggtgaagacatttacgcctgaggaggttagagagattgctactgaactggcgagattaactggagggattgtgcttgatattcacgaagaaaacactataattatgtacagagggaagaactattctcagccaccaactgaaataatgtcacctagggtcactctttctaggaggaaggtatcttcttgtttttctttgtccacattgctacattaagcttagctt

SEQ ID NO: 81456 - DNA, 1191 bp, Cannabis sativa
ttttgagaggggtatttttggagttttagaaaagtggtcatatattttcaatgtagaaaagtattagtttagggaaaaaaattatcccctaatacatacatagaaatttaaatttcccaagtttaattggtgttattttttctttttcaaagaaaagaaaaattggtgttattttacaatgataaagtagagagtgtagtcagcgctcttaaacattgcaagtaaaaatatgacctaacaatttattaaatattttaaagttaaatatacattttcatattttaaatattaataaccattaaactaaatatatgtataattgttagaataatttaaacaaaaaaaaaaatacatttaaataattatgaaaatgtgataaaaattatggaaataataatttaattttatcgtcaatattaacatatattgaaaataattattaactttttgataatgaagtgtttataggaacattatattaacactctaaaatatatttatattaaaattgaggtagttacaatgacaatctaaaaataatttaaattaccttatctttattcatctaaaaaaaataataagaggttaaatatatgttaactattaaacaaattaaattaaatatttgagattaatctttttcatcttttataatataacataaatatctatagattttctccttttcaaaatctaaaatttaaatactttttgaaattaaaattattgtaattagctattttatcgtaaaactggtttttttattctaaaatatggtataaacatatttccgaaaaatatatattttctttaagaaataaaaaaaaaaaaattgtgcagccttgcttacctagggtacaaatataaacaggggcattttggtcatttaagaaattaccagggataaaaaatctgacaattatagcaaacgagagggtagaaaggtaattttaaatttttttctatttatttagcaatggaaatatgaaacaaagacatataagactgaggaaagcttgagttgagttgagttgagttgagtggcttttgtgctttcctctctcaataatttattattttgcgttgtatctcagaaaaagagagaccaaaattatctctccggtttccttatttattatttatcttcgttacatttctctgaaactaattcttaaattcatattttttaac

SEQ ID NO: 81457 - DNA, 1508 bp, Cannabis sativa
cgagtactagaagaataaattagatgaagaaactagaagaaggaatacctatgtttattaagggaaaaaaaaaggaacattgtaatgtgaatgtgatcgaaggtacaagagaaaaataaattaaatatagaaccatatcaacataaacacgctataatattgttattataattattattatataattaatggtgtagattattcattttgaagtgcgtttgaatgagttttattaattaataaatttcttaatttattcaaaaaaaaaaatagtgtgtaattattttacaaactaatcgattattaacacatgctgcactccttttaaaaataaaaaataaaaaacatacagaaaaaaacagtacaatgtgattattggcatataaatgcaatcaactccattcatttaacataacgtaattgttatttataaaatcataaatatatagtaacttgtatatacatttaaaaaaaaataataatgtagtatttacaatacaaaattttgggtgaattattttttaaaaataaaaatttaccacaaagctttgttctaatatgtacgagcatttgtgtaagcattaaaagtttgctattatattcaacaaaaacatatacaagtatataatgaaagaattaaaggttagaagttttcatgttaatagaattagaaatagttttgaaactacattacataaaataataataatggaaataattacctcatgtctcatgataattatagtaagagaaaattgcatcgaaagggtgaagtggcaccaagagctcccccaaacacttcaataagaaggctattaattattaataataataattaaattaaattaaaccttgattgaagtcttcagaggaactccaggagacacccctcccaacttctcatatatcttattttattatttgattcttacaacttacaaactgatcatcctctatttatacttgagaaaatatatatggttaattttttctttttcaaaaaaaaaaatgggtgtacatgtggctagcttcatagtgagcataaaaatgtgaacctggtcaggatatggggtagatgaaggtgttgatgcatatgaattggtgagaatgagagatactcttgctaataaacttttgagttttcttctctcgtaaattttgttatgtactaaactatgctttttaaatttttttggcaattaaattttttttctaaactattgagattattagatttaagaatttttgtctatttttatacaattttaccaattcaatgattatttatccctagactttaatgtctattaaattatgttcctcatcttagagaatgaattattaagctgctttttcacttgcttgcccaggaaaatatttttacatataccaaatcatgttgtctgaactttcatccatgttaaacttttattattaaaactggacaaaagtctttaaatctaatcatctcaatagtttaaggtgaatttttaacggtcttaaaagtt

SEQ ID NO: 81458 - DNA, 1183 bp, Cannabis sativa
aatacacggagctcacggacacacgggagcgggtatattttgccacaaggaaaaatacacattaccggaagcctcctccactgtacattacctcgaaaacttggtataagttttgctaacgtttgattttatttattaagtccttttctccattgttccttcataatatttttattagaggaatagtcttactcctgaagacaatatctttattatgaaggacttgtattgatttttcctagtaagaaaaatctgcataaagttctaaagtatcataacttagtacaaaatttaagtctgaaacatacttttttaatataaaaaattatttgcatttttaccgcttgaactttttaaactaccaagttgcggcccatatggtataggctttattgataatatcactcgaaatataactttgatagtttggaactcgctagaatctgtctttttgatgcttgatcttttttgtggtggaaagtgcacatgtaactgcagttgtgtatcactcgataaacttgagtttatgacgcgacacccaaatgatacgcacagtcaacctgggcgcatgatctagagtttgaccttcctcgcggcacagtttgcaaaaactcaagtcctagcatcgttccatgttggatttaagaaattggagtccaaagaagttcccataaagctaagccctaattgtcgtgcccctaggatgactaaaatagtcaacctagacgttaggtgtctaagcacctcctgatttgaattgttctagagtttgtttagttgatttttagggttcgaattagagtacaaagttgtttcaattgaaaaaaaatattttagttgctgataatgtgaaccataagcctgaggtatacaacatatttacaaatattacactattatacatatttattaactattagggtataccacaggtttttcagatccgtctcaaaactcagaacaagtgacggcttgtaagaaaaattaatgatgattattttgtatacagttatacacaacttatgagacactatgatgatgagagagggggagtgaggctcactagtatagttgtgtgtgagaaaaagaaacagttttcgacttatatgatttttctctaatgaaaaattacaatcgatcgttttaagtcaaacctatcaagatatttataacttctatttaa

SEQ ID NO: 81459 - DNA, 586 bp, Cannabis sativa
tgtttggttttttttacccaagtagttttttttctactgtttcattgatcacaaagttcattttgtctcccatcttttcatctgtccactgactgttaaatatcctctcgttttactgttctcttcaagctcctttttgtcttttgttttgtgctgttatgggggatactactcttccatcacgtgtctcaattccagtggaatctgattccatgaatggggccccttcagttattgtgaatcacgagattccttcccaactaccccaacaacctgaggttattatggaggatactaataatgagactgctgaggagttggtggagcctgctaataacgataataccgtgaatacagatgcggatattgaagttcttcgtaataacttcctggagtcaatgaccttggagctagaacctgatttcgagcttactgcagatatcgtcaactctgctgttttagctagcttttttgacggcaagggggtgtccagaactagactcagagacattctcaatcaaatatggaaactcaaaggttactggaaattcaaaacattgaaacctggcctttggggtattttttt

SEQ ID NO: 81460 - DNA, 1063 bp, Cannabis sativa
ccaacaaaatagcccttatacttctcattttataagaaaaaaaaaaaaaattaaagtgaaaatatttctacgaacacactattaatctattaccttaatatttcattacattgaacaaaacaccattttactttttgagtcatcgacttttaaagtttaaactaattttttcagtaaaataatcatgaaaaaaagataatgataaagcaacgacacaaaccaaaaaaattgggtaaaagtaagacaaaattctcttggaagtttattttaatttgttcgttttcggttagtagttctagaaggaatcattcatacttaattatagacaatgtttacgtagaagtgaaagaaaacttgaaaagacaaaaaaggaaaagaacaaagcacaaattagacggccgaaaagtttgaaagacccaaacttggcgggccgaccccctctcaaagtcaaatttcatctaaccattgggccatgcccagttaaccggcccattatattcttatgtcactttcataaaacaaatatggaacaccaacaatgtcaccacttctacaacttttatctctttattgtatgtatccatgtattttttgaattaaatgttcatatattttgtattgcgcacaataaatatttggtcaatttataattgcattttcattctagaatgtgatacgaaaagtgtctttagtttataagtgtaagagaaaggaatgaaacttttgtgattctaatagtttgaattctagattggagatttatcattcctctctgttgtcttttacagttttactacaaaattagtaattatcaaaactaatttttttcgtaaaatttaattttctcatgaatattgaaaattattcttaattcaaaagattacttttagttacaaattataattatcaaaatatttttaagtgactcatagtcttttgatcgatcgatataacacttaactagagatggaaattggtcggttaatgtacggggaatgcaatccccgcccccatccccgttatctatttatacccccatccagggccgtctcaaggtgttgag

SEQ ID NO: 81461 - DNA, 508 bp, Cannabis sativa
  modified_base (482)..(482): a, c, t, g, unknown or other
aattttgggttcaagttatgttgaggttgaggcctggaagcttgatttccttggggaatagcaaaggaggggagattggaagcgtcatgggaatcgaacgtgatgtcagctacttggttgttgaccgtgggtggaggaccgccatcttgggagtgagttgaaggtcttgccatggaagcagtgggcaaggattattctgataccatatgagagaaacatagcaagcataatgtttcaatctttattataaaattgattaaactgagtacaaatgcttgaacatatatatatgcaaacaaattcggttaggataggaacctaacagacttaaccaactgatgttaacctctaactaactaacataattaataaaactaactaacgctaagacatggatatcatttttgaaatgtggcaataaaagagaataacatctgaccccacctcccagctagggtgatctgttgggttttatgccctanataaaactctttacaatctgattagt

SEQ ID NO: 81462 - DNA, 1309 bp, Cannabis sativa
ccattaaactttttcatcacttttgtttgcctgagttttttctttttttttttttttggtctcgtatagcattatttcaaccttttatcttagatggggtttagttaaaggtaattaaatgaaatgaaaatgaattgatttttgttctattttttgtttggttatatttttaagtattataatgtcattttaccattgaatttggtggaatagtacttctattttaaaataaaagaatttattctaatttaaaatgagaaaaaatttaataatttttttattattttttgtgtattttaaattttattttattttatttttgtttttattctcatttacaatttattcatgtgtttttatttctcccaactaaaataccctaaatgtaagagaaatgctaagagatgactttaaagtgtcaagtgccacatatagcattattgatgcattattttttattttttattttgtttgaaaatatattgatgcattattagattaatatgaatctttaaatatatacatgaacaatcttaaatgaatgtagaatatcctctattttcatatataaatatacatatatattgaacatgtatatttatatattctaatattctctcacttaattaatatttaaatttactacttaaaaccagtgttatttattacataataaacatataaatcatagtaacaagtactcattaaatagcgagtattagctttcatatattacgatatatttattatataataatgtacttagtggtaatatacttaagagaataaactttaaattttatgtttattctagtcctctgaaaataattttctcagattaaaattaattaggtgtacatgaatatgaaaaaatatcgaaattagagtttcattgaataatttaattgtacaaaaaaaactacaaaagggataattgaatcacatgtttactttatgatccttaaattatgttgcaacatgcctttaatcaacgatactacgattatacaattcagtgttgcgtgcttaatgacaacttatcacgtatttttatggataaatacttaatgttgatatactagcctcgactacaactattatagttcttagtcataaatactataactgaatttattgtaattcttaatggccttgttgtcgagcaaatttcgcaacaccaaatatatatgatattatcaataacagaaagaaaactatatgaagaacaactgcgagtattcaacctagagtggcgagtactcaaactgggaatgagaaatgcttcacagaaaactggaaataacaataa

SEQ ID NO: 81463 - DNA, 2037 bp, Cannabis sativa
gagtaggccctagagggcccgcctatgcctaggaccggtcctggaaatatattttgaaacttttactaactacatgtctttattcttgtaggtgtttgctgatcatgaatctagtgaatatccaattgatgttcctaggtcatggttgtggaatttacgtagaagattggtttattttggtacctcgaccaatacaatttttagaggtaattcttagttttcatttgaaatttttttaaaatatgtatactacttaaagcactcccaacaatttttactttttttattttacaacacactttacattacaacatacattaattttttaaaatacattatcaaaattttattttttaaaaaatttattatattttattcatttcaaatatataatattaatatatatatatatatccctatacgaaaatcattaataaaatatatttagaaaaatgaacaatattctataaatatagagcatgaatagtgtattttaacaaaactttaaaatgaagaagaaatttagaacatctgttgtagcgtgtttttaatacggttctttaaaaattttaaagcttctttactttagagaagctattgtgagtgctcttactaagatctaataattcgaattcgcaaactcaactcttgttgtaatcccgctcgggattttcaacatcttaggtcaagttttaaaccaaaatgtttgtgcatgtgtatacgagtttaaaaaagttattttattaacaaaatctctgtgaatacaggcttaacaactgaagaaattcagcattgtttctggcgaggtttgtaatttcatattcctaaactcttttaaggtactaaatttgcattcatcaaaacccaaaatgttcatgtattattactattggcattgcatttgcagggtcactttgtgtaagagcatttgaaagaaaaacaggctatcctaaggctcttgcgccaagattccacgtgtcaacagcccatgctgccaaagaaaaaatcaaaaccaaagccaaaaaggcaaaaacaaaaacaaaaacaaaaacaatggatggtcaataatcatgtttgtaaatatgcatatgtacatatgtatatactttccatgctcacttaacacaaaattttggcatcaacttttttttttcttagttgaaattacatttttaaaggtatcactttgatacataattttttagatgtaattattttgaaatgtttatatttgaatttaattaattttttttgtgagtaaaaaagtttttattactctcctcggatttaatggttgcggtgcctatggtatttttaccggtttcatagatagattcctattctttttttctggtagtgaatggtgaacaactttttttcttctaatataacggatacacaaaatattcatttggttcgtgagactgtttaagccatcgaagagtagggaagagatctgcatcatgtaattctcttttattgagtacctttaatattttttaaaaaaaattgtttaatgccaatgttacaatgaataatttacaacttctccacgggtataaaataaaaaaaataaataaataaataaaaaaaaaacattcatacagtaaactctttttttaatttttgtattatgttccttgatttccttttgtacctctagtgccatctgtagagataattcttagtttttgttaaaatttcataatagatttattcaacactaacttctcctatgataagtatggttgtattattcttaaagatgaaattttttgatattcttatgagttaaagaatatttttagttaagcctaatataaaattctattagggtttttagaaactatttcatggatttaattaattgtgtttgtggtattaaatgaaaatattaagataatttaagatcaaactccctaaattaagtttggcacgatcaacctctattactgaatttttaggtagaactgtccaaactctagttacgttttggtctctactattctatccattttggtttgttaagtgtcaagg

SEQ ID NO: 81464 - DNA, 1708 bp, Cannabis sativa
tcaattttacagtggtaactacccttaaccctacatgtgacaagcaactcttacactaccctcatcaaacttgtccttagaaaggcacagtaatgtcaagcaccaacataaagtgtcatatttactgatggaatttaattttagattaactaaataagacattaactttatggtgtcactcgttattactagcgcgtaaccacccctgacctcacaccaccctcagtaaacttgtcctcaaaatgataaagggcaaagtgatatctaacgctattgatggaattcaatatcaggcacctaactatttctaaaacatcaactttatagtagtactaaatattactggtgcaatgctcttaaaataagttatatgtaaaactcattattaacaaatcaataataatataacttatttatcttttttaaggtttttttttttttttggtgttaagccttttaagttgctctttatttcttctaggaatatttataaaataaccgatttaatttaattcgcatgatccaatctaatctaatctaattcgcaaagtatggatattcacacttgtgcggattaatgttgattgacatgtaaaagtaactaatccaatcaaatccacacatatttataaaaaaaattaagaaattatatatacaaataacattttaatgcatgtaaagaaaatagtatattaaaagtttaatacatataatataattatatttcaaaacttaatagatgaaatgtatattggattcttatatataattttttttacataaaatttaaaacaaaattaaatatttctttatacatacaattttttcttcttcttttgaatttattatttgttattttatttattttaatttgttgttgtagacataaaataactataatttatttattttgttgctcgttatgtgaaaaaaaagtaattttttataaatattaaataatttaatattaaaaataacaaatttaaaataatcgacccaatccctacttttaccaattaaattagattttaattattttgcggattggattggatcaaaaaaaaaataaattccgcaatcaaatgatccattatgaataaaatagtacatattacattagattagatgaacattctaatttgaatcttctctgattcttaactttaattattgccttaaagtctctttcggttttattttatttttataaagcatgagagaaaaactgcaagtggagggtgcggcgtaagatatatataatagtttgattatatataaatgtagtagctagcttaacctggtttttccataagtgtttattttttttttttaattttaaatagataaatactctattatttttcctaaagtttttcaacatcttccttttgatcagttgaaatttgcaaaaggggtcactctctcatatatttttatatatatatatttgatttgtttattattgtttcttataagatatattatattaatggaaagttttggaaactatttcctaatcattcaagttcaactgattacgtttagattataagtgtatagttataatagacattattatattgattggtgaacaaacacagataattctggtttttttaggtccactctatgatttagggtcacttcttttaattttcttcctagattagaagattatcatttttaatggttctaaaggctcatttat

SEQ ID NO: 81465 - DNA, 4184 bp, Cannabis sativa
atattttccacaattgacatacatccttaaaagatattttagtcaccaaaatttaaatttgttgtatactgcgttgtccgatattggcccccctaactatttagttcttgctccgcccctgcataccattaaaattatttgcaaacgcccatttagccacattatgagtggactcgaaacttcaattgagagaagcataataaaatttgaatcattagcctctatatacatatataatttaacttaattattacactaaaatttatattatatttataaatattatctttaattaactaaaatgcatatattttttttttcgatctttttagggagcattgcttctaggtaggtccgcccccggtttgaattacaatactcgtgatataaaagggtttcaaggtttgatatagaggcataaatagagataaaatatgggtgttatatttgaacactttgtaaggaaacggttactatgtttagaagccaaaaacaaaacactcatgacatcaaaaaacaaaactatacttcttttcttttgtttgtttttgttgggtttgtttcaagtaagtaaagtgaatcctttacttgtattttctttcttggtttgtggtccttttagagtaaatcccacttgtccaaaaacattactttctatagccatattttctcacaagtggaacataacatgtagtgtgtacattttactttttattagtattttatctcatcccaagatgggtctaacatttaaattatcctcattgaaattcaaaaccatttcatatgaaaaaaattatttgtgataatgtacatattatgtctcataaaaaaataaaaaagttgtgtttttttatggacgtggatcttcattcaaccatataatgccacgtcatgacttatatctggaatagtagttcgtataaaagtagtaatatataaaataatgtattgtattaattattacaacctaaatttttaatagaatgtaagttgtattatttaataaataacaactagtctgtattagtttgtattataatatttataaagaatctggagtcaacctcaatctttaacttagatctagggattgagaccgaacctgaccctagaccacgaacttgaatcccagactcgagacctaaacccgaccctaaagtcagaccacagacactagactccaaatctaaacccaaacctagatttggacccaatacagcgtaccaaatgagtatttatccaattattattaatacatgcctacgtgaaagggagaataacaatgctattatattattaattaacgtgataaattatcgttcatatgttgtgattaaaaagtttttagctaaagatattagttataaaaattataatttattgtaactaaatgtgtttttagacataatatttattgtgattacaaataaattaataacaatttatatctaaatactgtgttttaattacaaataattttttgttgtagtcaaaaactatatttaattatacaaaatttatgttgtgattaaaaacttatcggtaactattttttagtcggtttgagaagtttcattttcagtagtgtgtatattgctttttttttcttctctttctttaagggtagtgtgtagtgttgtattgctttggaatactaaaaagaatctttttttttcttttttttttaggataattgtaatttgctgatgaaatattttaatttgttgaacaaaataaaatttgacttttcctttttaagtaaatatattcacacaatgatccataccatatatatcaaataaaataaccatagagctgactttctttctctaatatcattaatgacatgatataaaacaaaattgtgctaaataatgtttttttgtttttaatcaaaataaatatgagtgttcaaaagcaacataaatcatgactaaatttaatcttaaaaataataaacaaaagttaggccaatcataaaataataagtatatgcatgtattttgcaagattgaatatggcataaaatataccattaaaagaaaagaagaagaagaaaaaaaaaaagaatatgccatgcataagtatcccatattactattatataatttggttaatgttgtctcttactctaacccacaaatattgttttggcatttcctaaatttcaattataaattttagaataatagaacttttacctctaaactatgatatttgtataattttgcccctagaacttctcttcgttgcaaacgtacccccctcctctgaactatgaaagttgttgcaaatatctcccttcaaggtataatttgctcattttttaaaacagtttacttatatagctataagttacaagtataattgcaatcgaaagacttatttaataactttaaattacttaaaatccagttgttgacattaaatatacaaacaatatcgtgatctccaagaatgcatatagatacttgcataatttattattaaataattatttatgtatttattttttgtctgcacttttaaattaatattatattagtgctgtattaataaattatttaaataaatgaccgaaacgcaaccacggagaatatcaaataaaaactattaaaaccaacaagaactaaatatacattttttttaaaaaaaaaaatgtaaaattgcccattgactttggtatctttcctcaaataatatttttgtaatgtaattttaattaagagaactatttggagtgatctaaaaagaaacatagttgaaagttgaaacaatattcatgttataatagataacttctataaatctttcgtgttattttctcatcattctttaaattttgattggagataattatataaaacactaatttttgtaaaaaaaaattacatttttacgtttaatttatttttatatttttatagtattctataaaaacacatcaaaactacatgaaaataacaaaatacaatatcaaaccaacatacaaaataatatacaagtaacagaaaattaacaacaaaataataaaaatacaatataaaaatacatcaaaaaattgtattttatataaataatatccataaaaataaaagtattgaaaataccgtacagactgtatttttgtaattttttttattgttttgagttttttttttaattatcccttttgattaatgagatcactaatcatactaaataattaattttgcattaatcacaacttttttttagtacaacaagacaatgtggtaaggtgctcccataaaaaatttgcacccataaatgtaaaaaagaaaaagtgttaagaaaaatataaacaatattatttcatgtatcaatataatctgcagattgaatagtccttacaagctccttcaaattagcaagtacatgccttggtcctaaactatcaacaccaatgaaatttaaaagctcctctaaatcctacaaatacaccaaaaaacaaaagaataagaaaattgttaaggtcattaagatatacataataatataccaaaacattacatttgacaataatttttcgtgtgtttatgatatgtgtatacaaaatatataccgaaatactacactcaatgatgtgacaataattttttaaactatggttcgttttaattagatgagattagtagaaaattattgtcacgttactgagtatagtattttaatacatattttgtgtgcacatatcagtactctatcgatgttttgttttagtaacccatttgttaaattagaccagatggggttttgtttgaactatcaaaaaccattgcaatgtcctcaaaaatggcaagccaaaaagggtgcttaagaattttaatagccaactaatataatacacgaaagtgaaaatcaaaagcaaagatctgatggagaaaaccgcaccttgtttagtaagaaaacggcgtaagcagttcttgttgtgtcgtgaccatctaaaaaaagagggaattccacttgctttatgtttgtcgaaagagatgtattcgattgcaaatcagccgatgatgtaggctctaccgatggtgcatagtcaataatatatgaccgagagcaaccaaagcgcacagggtaccgaagtggaactttcaagtatgaagctataagtaaaacagcctgtaatagttcaaagagaatacacaacacatcatggc

SEQ ID NO: 81466 - DNA, 1128 bp, Cannabis sativa
cggtcggtcataaaattgtaaaaaccgaccataatcgaccgattttcacccctaatcccaacttgcatatgagtttccaaaagttgaatttgggatctccaaattgaggctgaagctgaaccccaaattgagcctgaagcagcacctcaaattctccatgaagcagtaccccaaactgaacatgtagcagcaccccaaactgaacctgtagcagaagcaacacaacaaactgaccacctagttagaattaattttatatgaattttatagattttaatccattaaataagtagaatacacacaacttaatttgatactatgttatctttgatttacatgagaccccaagaagtaaaagacacagactgaggaggatgaggagaccccatactgcaacccaaacaacaccccaaccatcaccccacactacacagcaaacataacctgaaacaaaaccccaaactgcgtcccacactgcaagccaaacaggacacacaataccccaaactgagcctgaaacagaaccccaaactgcaaactgaatagcccagacagtaccccagctagcaccccaaacagcaccacaatctgaaggtgagtttgaaatgcatgaggaaaagtataatggtgaaccagatgtggagttgaatgagaatgtgcaacctgagaattgttcttggtggggaagtcacaccgagttggtgcatgataatgctaatgaaagtgatattggtgatgaagttaaaatgggaagtgtgcacagtgatgaagagaatgaagcgacaaccccttataagattcaatttaaatgtgagatgcaaggtaaccatagaatctttcaaaggtgttatgtgtgtcttcatgcttgtaaagagggttttaaacaaggatgcaggccacttttagggcttgatgggtgctttctgaaaggatgcagtaaagggatcttacttgctgcaattgggattgatgcatcaaattccatcttcttagtagcctatgccatcactgagaaagaaacaaccaacaactgaagttggtttttagagctgctaaaagatgacttgaattccattgagccatagtcatttacttttatgagtaacaggcagaaggggcttcaaaatg

SEQ ID NO: 81467 - DNA, 1193 bp, Cannabis sativa
aaaattataaaaatacaattttctaagcaaaaagtaagaaaacaacaagaaatcaatctcacaacaacattaaatcaattataaaacattcaaaaacaacgagaaaagaaaaccaacatcatcacaactataaatcaactataaaacaaaaaacaaaaaaaaaaatatccaacagtttaattgaagtctgtatttttgtaaataaaagagtttaaatcatataaataaaattttcaaatttttctgtgtgtttaacacttaaaaaagctattaaacagaataagattgtgtttcaagctaatgaacacagattagatactaaacctgaagagtatcttttgcagcaatggcttgctgagcagaagcaaacaaagcaaaacccattggcttctcccctttagaattaacttgtgaagcctcatatccaggtaaccatctcaaaagattctgaagttctctctctttaacatcatcaggaagacccgtaatgaaaatcgttctaacctataaacaaaatacaaacaattgcatttaaattttcttcaattgagctgaatttgagcgaaatgcatcgaaaaatactaacctcatcagtagcggaacgattagggttttccacgagtatgggaggaggagctgtaccagcggcgggtggaggaggtggtggggctgcttgtggccattgctggtggtaggggtgaattccggcaccggccatttcgaagttgccgccggcgaattgaatttgtatggttgagatcggaaaccctagattggattggaccactcgaaaaaggtgagcttttttttccctcttttctttttatttgagacaaaaaactcaagagtgaagagtgtgtattattttactttaaggagaaaaatattaaaagttaattttgtcaaaaataaagtgaaactttatttaccaaaattaatcacttcaaaaaagaaaaaaaaaaaaactatttagaattttaggaaatcaccccatatgatatactatttttaatttgttttttaatttttaccatttgatttgagttgctccagtagattctatgtgggttgctatttagattgttctgtttgttgctatgtagattttcgtaaaaatacaaaaaaaaaaaaaaaactgctttaaagtgtaaaaataaaaaaaaaaaaaacctaaaatttttttgttagcaaag

SEQ ID NO: 81468 - DNA, 844 bp, Cannabis sativa
aacataacagaatgggaaacagaagaactaacatcctaactaacaccccccgtaaactgagctgggataatgaagccaagctcagtttatctctcaacagtgtaatcttggtgtagataatgcttttgttagaatgtcggctatttgatgttgagctggtgtgtgtttgacaaagagttgtcgattgataatcctttcacgcacaaaatacaaatccaactctatgtgctttgtacaagaattaagtacgggatttgtagacattagaaccgtactttggttatcacaccatatcgtaggagttgggagcttagaaataccaatttcagctagcagtgattgcagccatacgagttcagcagtggcatttgctaagctcctgtattcggcttctgtactagacctggagacagccttttgtttcttggaactccatgatacaagattagaaccaagaaataagcagaaaccagaggtggatctgcgatcatcaggatcagatgcccaatccgcatcacaaaaaccagtaagagtgagattggagcaaggcctgatgtgcaaaccataatccaaagttcctacctaagaatctttttgacaactttcaaatgagattccaaggggttgtgcatgaattgagagactttgtttacggcatatgctatctcgggtctagttattacagcatattgtagagcacctacaatactcctatactgatggggatcaacaacagggtcactaccataccttgataatttttcaccacctgtcattggtgttggaagagaattggccagttccattttacttctgcataaaagatcagtgatgtatttccttt

SEQ ID NO: 81469 - DNA, 1468 bp, Cannabis sativa
  modified_base (43)..(43): a, c, t, g, unknown or other
aaaacagagggtccaattaataacttttgcaaaacacaaggtncaaaatagtatttaccctttgtaaaataaaacaaaatattaagacgttacaaagagataaaaaaagtaaattatttgttttttttttaaaaaatattttttattagttattttttgtttttttagattttaatatggttttttttaaattatttaaataagttaaataaggtgaagcaatgaaaatctgacacgtgtgtacacttgtatacacaatagcgtggaccaaaatagacgaaacaaaccaaaatagaactaaagtgtgtagctcccacaatttcagtttagagggatgatcgtaccaaattagtttagttgaaaattaccctatatgtaacgtccccgtttcaatcctctattgggcattttcccacgaatttatagctcttacatgggtacgtcactcttggctgtttcatggagtgacgactggccctacaaatcaatacgagtatttccagcgtgttttattctcactcgcatgctccctgagaaaatttctagaaaacaagatacaccttgtttatataagtagtacctattaatccagttacgtctatcttcaactgtgtattctcatacatatacaatcttagaataatcacatttgactttccttaggcggtgtggaattacacagcttaccagacattttcctttacggatcactagactactaactgtcacaatcacctccttacgggttcgacgtcctcgttatccacacttctaatttggtcaagattttgatacaatttgtaatgctccgctttaagcctttattttgatcctataaattaatacgagtgtgcacacttaaccgtgaagttctttcgtaataaattagtaaaaaattaaaatgtgtgtaaaattagactaatttactcaatatttgtctttactgatcacaccatcaaatttaggattagttgagaaactttagagggtgtgaccgcaatcagccgtctttctcactctcccagtcactcactgtctctcgctcccctctccttccgacacaataaaacgaaaccccagtccagcgccggcgcgggccgccggagcttcctccttctcgctctcgttccctctctgcctctccttcctgtcgctcacggctcgctctgtctctcctctctctctcgcacgctactaccacaccagaccagtcaccggcgtatccccctcccccgacggcagcaagcaaagcaggtgttttttttccattttatttaatatttattatttaaattatataataagttatatattataaatttatatagctatatattgatttaatttttatttattacatatttgtaatgtttgtcattttttaatttttgatgtattatctaagattaagactaattgggtgctgatttttatatttgagataggattttaactgttgattttgtta

SEQ ID NO: 81470 - DNA, 1148 bp, Cannabis sativa
gaaattagacaaaagtccttaattaaatcatgcaatcttaatagtctatggatcatttttaacgactttaaaagttcaaagggtataatttggtacttgtcaaagttcaaatacagaaatcctaattagcctttatattattatgctttttctatttatttttattctaaaattgttttcttctatttctttttacggtaaggatcacttgtttatttttttttcttctctaagcttctatctgataccataatgtgagactaccatcattggagagtacttccatcctatgactaccattacagtgtttctccatctttgcatctccatataaattcatattgcaactctcaaatcgcaacccactgtcttgttctatctttctcttcacctgtgagtttttctctttcctttactttggtgagattatattctttgagagcacaaacctaaattgtaacttagatcgcaaccctatcatcccaaccctaaattaccatcgaactattcgtcattgctacaatatgtccacggcgttccagtccactcccccttggtttcgctgacaatgatttcccaaatcaaaattcaagtcgcaactcaaattgcaactcaaatcacaattcaaatcgcaatcctaaattattataatccatttgatgtgctaggcactgcttacggcgttcaagaccactaggtatcgcaagatatatgatgtcatttgcttaaggtattctctaaaatcgaaacccaaatcccaagacaaaccacaaccatctagactataattacaacatctaatttttatggtcagttgcaattctaattgcaactcaattcgcaacctaaattgcaattatctaattttatttttactgtgtgaaatcctaattgtgaacccctttcttttttaataccataattttgtaaaaagtaaatttgaactgtatttttgcacaaattaataatgcattataaccttatatataagaaaaagccctaatttttatatgttgttagaatttatgttattataattttttttgtttgatgatactcttaaaaagttatcaactaatcaatttttgtaaggttctaaatcaaaagatattattttttattttttttttttgaataagtaatcaact

SEQ ID NO: 81471 - DNA, 900 bp, Cannabis sativa
tttgttttcaatggcaagggagatttgaacttgagaccttttcattgtaagaaattgtgaagagaggtgtgatacctttaggctgaacctatgaccactcaaataatgcatttaattagtgcctttgttatttcttagcatgagtgatattctggatttgcggtgaattttgtattcttggaggaatattttatagctgattaactataagtctcaatggggctgaatttatgaacaacatcctaagtaaatatctttcacacatgtttgtgagtaatttcattttaaacaaatattttatttgtatatacgttattatataaatgttgcacatgtcaaaaaaaaatatataaatgttgcaagtcataaacaaaaattttagtgtgcatgtattgtcatttctcaatcttggcacctattatacatgtatgttctgctttttcgtaagttgaatttgattatgttatatgacaattgatgatgaaataatgatagagtttctagtttagccaaacttatgaagacagaaagaagagatgcctaattagcaaaacttccaaatgtacagcttctggtttttgaggacttggaggttcctactcataaaaccaagaatattgtgaactatgttcaacaaatggagaacgccaagaaatttctgctggtggatggggatgtaataggtgaaaagttgaaattggctactcaaaatctgcattatgtgaacgttctgccctcagttgtaagtagtgcatgtctaacccttgaacaagatgtgtatttgcttggcaaaattacttactagaactgactttttttatgaaatagattttcatttggattgcctgatggaaactgctactatttaaacttgttaaataatttacctatcctcatgtt

SEQ ID NO: 81472 - DNA, 2066 bp, Cannabis sativa
attgtttcttgtacatcttcaattaacttaattctacatataccctatattaacttaattatttatcaagttattataactttatcatataatttaagtaattaaataaatactattttagtgtgatttaaatttaacagaaaaatttaattatgtgaaataaacttaaaaatttaaacattttcaccgctaataaaatatagtgagcaagcccaaaactaaaattaagagggtacatttttttttatgtgagacgggagcaaaaaataaactaaatatcaaagtaaagatgtttttattaggatttaaacccttgcaacctctataacatgtataagataacttaactaacataccaaagctattgttatgtttatatttatcaccttatttgatttcaaatatatgttgtaattaaccaaaataatacatatacattttttcttccagagagcaacttcctcctattgtggacattgtcttacatagaataattggtggagtattgagtcatatatataagaacatggactacttgatccacttattaccaactggttttaagatggaaccttatgattatcaacatggtatcatagctatatctcttgcgggtaaagtgatcctatccgatccgcacttatacaaatagtgactatgtccactctgatacggttcaagattgatgagcaaaaaatagttattatcttgaggaggaatattgtagacattgtctacatagaataaatggtagtattaagtcatatataagaacatgaactactccactcattactaattggttttaagatgaaacatcatgattctcaacacccccttatcgcctttatgtgagtctgcctactacagttgtcaaaaattataaccgaaagtactttagctgcaaaaaaagaagcattagtttataagtgttagaattcggggataagatgaatgatgttccatctcaaaaccaattgacaatggaaagagtagctcattcattttatataccacaatttattttcacacattaacaatgtaggaccaactctaataataaatgttattgtaaaattaaaaatttaaatattttcaccgcaaattactctatgtttatatataagaatgaatggaagaatagtagatgaggtgagtgagtcacatctgaacttggaaacaggcaccgccggtaagttgctatcattatcattatcaatttatctatcacacacacatgcatacataatatatatatatatataaatatatatgtatatataatgcagcataatatttatgagtactagtagctcgtgtgtgccgtatcgaatagggcacactcatcctcactctactgtatatatagtacctacaattaatgcaaaaacaccctccaccacaaatatacatatataattcaatcaaacaatcaaccccaccaaaatagaagagtttagacattttatattgagaattttaatgacttatttaatattacactttttttttgttaaatatttatttatattttttttaattaaataatcttagtaattaaatatgtaggtgtatatatataattacatgtttgattaatagaattacttacaagtaataatttatattatgtcgtcctaatatagttttttcataatagctaaagctgtaaaattttgaaaaaataattaatagttcagaaagagttcaaactaatgatatatataataattttttatagggtgatttttgcacctaaatctccttttattccatgtatacaattaatcctctaattatgtttttggtgtaataccttcttaattaatttcactttcattttgtaacagttaaattttattattaagtgttaattgggattgtcactgtatgtatgtacacgtgacatatttttattagtctaaataattttagttattattcaaatattataaaaattattttaaataattcgtatttaacggtaaaatttaattgaaattttaaatatgcaaataaaaagtgaagccaaaggtatgctacaaaaaagaaaataagaaaattaa

SEQ ID NO: 81473 - DNA, 1873 bp, Cannabis sativa
ttatttttcaaaaacaaaattttacttttatttttgtgattaaaaaattttaaaataaaagtgttatcaaatgtcacctaattgaattaacatctagtttaaatttaaattaatagttatatattaaaaaaactctaaaaagaatttggcgtgtgtgactctgttttctctcttccatggcgaagaagaagagagtgatccaaaagccagtatctcgagttgaagatctgattgatgaagctgatgaaacgggagaaaaaggtgagattgatggtctgaatcttatagctgaggttgtagaagttggagagttggggcgggggaatgggaatcaagaaaaggagtctgagtatgatctacatactgggactcgatcgaatcgcagttgggctcaaatagtggaacaagaggaaaaattagagctcgaacaggggatttatcaagcttcaggaaagaatcactggaattctttagctacggagccaatgatcaaagatggtgtcaagatagcacaagtggatgttgatgaagttaaagaacaggcagctaactggagttcagcattaatttgtatggtgttaggtacaaatccaccccatactgtgtttaagggatttattaagcgtgtttgggggcacctggagatagcacaaattgcaagaatggccaatggtctaacaatggttaggtttaatgatgaggctacaagggatcaagtcctggagaatggtgttattcaatttgatagaaaaccctgttatttttaggccttggaccatggatttgaatgatgttaaattgataagatcaatgcctctatggatttgcctacatgacctaggactccaatattgagggaataacagcttgagcactctggttagtactattggaaaacttgaagcatactgtcaaactgtggatcatattggggggattttaattctatgtttaattttgaggatagggttggtgggaatccaataactcataatgaattggttgattcaagttcttggtttgcttaagctcatgttgatgttctgaaaaagggtggctcgagatttacatggactaacaagcaagaggggtcaaggaggatttactcaaaaatagaccgtgcttttgtgaatgaagattggagtgaccatttccccaacacttcagcaatgtttaaatgcgaaataatatcataccactgctcctgtgtgatttcttcaacaactactgaagaattagccttaaaccatttcattattacagtttttgggtagatcagagtgactttaaggaagttgtaatgcagagttgggagaaacctatagcagttaggggttttacgggtatatacttgaaacttatgaggctgaagcatcagcttaaaaagttcaactatgaaatcgttggtgacatagggagaacttatcatgaagctaaacccagatgccttgaagctcgtcttcaagcccaaactcatccaactaatcttaaccttcaacagaatgaatttactgcagctggtgtcttcagtaaacatgaaaaaagctatcacaatttcctcaaacaaaggagcaaggtgatatggataagaaaaggggataccaacacatcctattttcatgcttgtcttaagaagagaaagattgagaataggattgtttcttttacaatagatcatggagtggttaataacaactttaaagaagttttggagcatttcttgggccattttagaagctacatggggagtagcaacaaggtgtcgaaggggttaaatatgaaatgcttgaagtatggggttgttttgactttagatcagcaactggaaatgctaaagttgttcactgacaaggagatcaaaaaagccttattt

SEQ ID NO: 81474 - DNA, 758 bp, Cannabis sativa
aggtcgactgctatgactcgggtctactcaactccataacatcatccttcttgccaagtatcaaacattgatgtccacgtcaccagagaaagtttttgagttaacatttataataaaaaaatgtgtaaaaaatttctataaataaaaaaattgtgtagaaaagactctttataaataaaaatctatttataaaataaatacaaaattttcaaatatacaaatcgacacaaataagcttttgatagctaatataccaatcaaatatttaataataataatttttatatatatatatatataaaatttggattgagaatgtatggatgatttcaatgcttgagaatttcctctaatactattttgttttatggtttgaagtttttaatcctgtattaatgttcagtgagcaataaatttttcgctaaattaccaaaacaaattttgtaaaaattaaaaattcattataaataaataaaactttttataaataaaaaaaattgtttaaaaaaattctatcgataaacaaaagtgtttataaataaaaaaaaatcgtgtaaaaagaatgtttgggagaaaaatcagcaagcccaaattattattaaaaaggcccaaaagttacaaaatgcccattctaaaaaaaaatactatataagatgtattctagataaaataagcatataggtaggagagttaaatactagatagataacctatctcagtcgacgggcgtatctcgggcgacaggcctgtctcggtcg

SEQ ID NO: 81475 - DNA, 606 bp, Cannabis sativa
gtagcgccacctccgccggccgcattagccgagccccgagttctcaagggcgaaacgggtgagcctagatcgagctctttaaagtccggcttgttatcattctcactaccattaccacggcagctcaacgcatctctaaacctgtttgtcagagaatcaaaacccatttcttgtattgatttcccagcatgcgacatttttttccagtataattatctgtatattgaactacaaaaattaaaaaaaaaaaagtaaaagctgtttctgggtttggttttgtgtctttatatctatctaagaatctagttctctctgttccgaaagaatgtgagtcaacgaagaagaagaagaagaaagacagagagatacgaaaaaagagaagacacaggagatggatcccgtgatgtaaaagaagcaagcaaagaatttttctcattttttttttttttttaatgagatttggaaaaaaaaatatatatatatataaaaatacaatctttttagaagagcaggttcttcacgagagacagtacatggctgtgtttaactcctcaactcgtactcaacccttttctagtttctcccttcccttttctctttttattt

SEQ ID NO: 81476 - DNA, 3214 bp, Cannabis sativa
gaaagtttccttatttgacccaatttgccattacagattccaattgcgttgcaacaaattagagattattttagaaaacttttatacaactgtgaaaacgtatttgtgactgtctctaaagtttctatgatctataaatgggacctagagagtagccaaatgttctcacctcttctaagtctcattttgcatatgtttatatttgcgagaagggaatttcttttgtgaaaacttagtgtgttcaactaggttttagtctttgttatcttattcttattctggtcttagaataagttgaagaacatctttgaacaagagaaatgtcttcgggagaatacttgcttaagctttacttcgagaggaagtaagcacacacatcaaagacaaagggaattcagtatttggtctgctcagaattcatattagcaaagtaaattacaaaggattgcggcaaagctttagagcgagtctaaacttatttaagtcaattgtatttgtaattgtttaagactttactaattgatttctttctctaggcgtgaccccgtggactaggagtgttcgaaagaatactgataccatgtacaattctcttgtgtcaagttttattttctacacaatttattttttgtttttatttttctattgcatttctgtgttctcctgtaataagattactggcaagtgttactgccactttttaattacagtttctaaagaaataaattgacatactcaaaaacacagttttttaattggtattagagcgggacactaaactcttaatgtggttctttaacctgtttcttattttttgtgaaaaatgtcgttctttgtagaagaaagttttatttctcgtccacctcttctcaatgactctaactatccttactgaaaggtgaggatgggagctttcatcaagtctcaagcgaaaaagcttggagatccatattatcaggttggtcccatcaagttgtgacagattcagaaggtaatgaaaaacttaaacctgaacttgaatggtctcatgaagatgataatttgtttgcttacaataataaggcattgcatgctatatttgatggagtaggttagagttttattaaacttatatcttcatgtgaatctgctaaagatgcttggtaaattccttaaacacgatttgaaggaacttttgatgttaagcgttctaggtttattattcttcagatcaaatttaatgatcttagaatgtctgaaactgaaactctgtctaaattttatgaaagattgtctaatatagctaatgaatattttgctcttagtgaaaagcttaataaatttgttcttatgagaaaaattgttagagttcttcgagacaggtttgacactaaactcttggctatggaagaagctaaggattttagcaagatgaaagtggaggagttaatgggttctttgcgcacttttaaattaaatcaacaaatcaaacagaaagatagacctaggtctaacactgatagaggaaagggtatcgctttaaatgttgctaaaaagaaagttctgaaaatgagtgcgatgatgaaattgaaaaggcaaaaaataaaaatattgcaaaggataatgatcatattttcactgcacacacttatgtctgataagtgaatacaagagtgtaagtctcctctactcgaataaaattaaaaattaccctaattcacattattttgtaacttgtcttttttctctcaacatttatgtgtgattggtatttgagatactaattatttatcatcttttgaaagcataacatgtgtatttgtctccttttatgaaattttattagttaattgctctagaataacttgtttttcttatcaatttatttttagttattcgaataaaaaaaaataaaaaaaaaggaaggaggcgcttgtgacttgacttgtgggttaatgaaatttagttcttgatttgtttgctaagtatcaatatttgctctaattgatttattatgttgagtttccttttaaagtttgatatcttattcattgtattttgattatttgttaatcttgaatgattttttcctatcttaattggcctatttttgtaaagtatcatgatttatttttgttttctttttttttttttttaaaaaaaaatcaataagggaaaaagagtggggcggtttcctctttgttagtgggcaaggcagttaatttttgtttccatttaaattggtttcctttttgctcctctttcatatatttatttaaaccaattcttttgtcatttaaatctcaccatcttctcttctacccgatccctctttgttggttttttatctctttgttctttattttctttttcaaaatttcatggctaagacaaagaacttagggcatccaagcaaaatggtggattcagaaactgctccctgaaatgcttcacatgtgccttcaaaatcacctcgtgctgctgcaactgcttcaactccagaggattcattgcctcctcggcgtgaatcaaagaatgtggctgtaaagaaagcttcttcttccatttccacttttagaaaaagggctcccaaaatcgtagctcaaaaattagtgagacccgtccgattacccaaattgtccaggtccgattcgaagtcttcatcttcgactaataatgaatctccttatcaaggcactgagtctcctcctgctgcaactggtgttgcttctacggaatcaactccaaagggcccttcctctcggacccgtgccgaacaagcttctcttgagaaggaagctcacaccaaaaggcgccatgacagacctatttctgctgccaaaaagcttaagctgaatcctccctcagcctccacgagttctgatggtgaagaagaacccatggaagtgtcttctgacaactctgagtccaaaattaagtccttttcttctgaaaaagatcttccagaagatgttgttgtctcctctgacaacgaagaaactgatctggaggctgagccacccttgcagagctcaccatggcaaaaagagagcgaggcagagagatgaaatcgttttgggttttttaagaagaaagagaatgcgtttttttcaataggaaatatgagtttttttatttatttattaaagtcttattttttttaatttataattttttaaaataaattttatattatttaaataattaaattataaaattttatgtggaccaataa

SEQ ID NO: 81477 - DNA, 971 bp, Cannabis sativa
aagataagcttcttcaccatccatctctttaatcctctttctacatatctccatttctttattataatttttttttatttctgggtttttattattagatttcaaattgatattattaatgtaaggagtcatattagaagatcattcaagggcatggattgggttcttctcaaccttttaagggtgctgaggtcagttggtgctcctgcaacattttctcaattgagaacaccatcgcccctgccatagctcatgttttcactaatggcttgtaattgaagaggctatggttttaatatctatagtcttcgcctgacgaacagagaaagtgaattgcctggagtgagagttgggatcaaagttgagcaagatggttcaaacgtcccacaaggtagcgcaaacgacgggtcgttttggctggacctactggtggacaacaatgcaaaagagaaagtgaaaaaaggtgacttgagtagtgctaagtttacctcctcaagatcattaaccgtttttgggattttttttttcaatcaatttttggtttttttgtatcaatttttgggtttgtatatattgatttgtatatgattttttattttcatttttttttagtttaggttagtattttttttctttaaaactactcatttgtattactgttattaattataattataattattatgttttgtaattaatctaaatgtatttatattgcttattatgaaattatttatataattttagaatttaaataataatcatacacatttaaatttattcagccaaaattttcccaattaaaatctgattgtatttatatacccatttaaatttttaatacagatcttaaatcaaattaaatattattatttttagaaaaatatttaatatagtgccactttttgtgtgtcactatatctctaaaaatattaataaaacagaaaaaaaaggaaaaaaaagatatagtg

SEQ ID NO: 81478 - DNA, 872 bp, Cannabis sativa
tcaagattacatcaaatttttttttaagtgataacacaattaattaatttttactaattaatggctaattaaacttaattattaatgtaaaaaatttgataacatgtattaatcaatggccacgtgagtcaaacgttagagagaaattaaactaacaccgtaaaaattcaaatttagttatttatctcaatagtttaatttaagtgttaatgtcgcaaattattttttttagtattttattagaattggcattagaaactacttgtggtagcatcatttataagtagcaaattattaaattatattatgtaagatttagtacttatttatattaataatagcgatatgaaatatctaaatagtagtaaacatcattaatatttattttttagcatttctttacaaatagaaatgagaatgttcttttttttttttagcttttcaaagtttatgatacattgttatcatgagctagtgatatttgctcatgataactatctcttattattattattttaattgattgaaatgtaatgatgatggtaagttggtaacttagagatcaaatgatgaaatgagagtgagagcctctattcatagctttcagcttctttatacaaaattttctcacctttcttacgcaaataaagtaatatatcatgtaatttaatgcaatggggtcattatttctttattagtactcagcccaactgccgacaaattgcatacatgcattaatttcagcacaatgtaacaaaaagtgttaaaaaaactcatttctatgtgaattttataatttattaaagaaaataaacacatataagtccttaaagatgtttagcacataatttcgaaaggtagtcatcgagcac

SEQ ID NO: 81479 - DNA, 1515 bp, Cannabis sativa
gaggagacttcaatgaaattttgcagaaaaaggagaaatcgggaggtcaaccaaaaccgggatacttaatgaataacttccaaaaaagtttagatgaatgttgcctcagggaagtcgattgaaggtagcaagtatacttggtgcaatggaagacaaaacaatctcatatttgagagattagatagagtttgtgggaatccggattggtttgatctttttccagcaactaaagtaacacacctggactgtataaattcggatcattgccctcttatcctccaaagtctaaaaggtaatcaaggagagactcttggggccaaatggcactctcggtttcacttcgagagtgcttgggctaaggatggagactgtgcggagataataaatgagacatggggggcacaaagcagaagtgccacggctagggagttaaaacttaagtttgccaattgtggagttgctcttcaaaattggaataagtttaagaagaaggagatgcatatgcagctgaaagaatgtgaagatagaatacaaattctctccaggagaacggatccaaaagattggaatcatttgaaagatattgagcggcaacacaatgttttattggataaagaagagaccttttggaagcaacgtagtcgcgccctttggctaaaagaaggggaccgaaatactaagttctttcataggaaggcgagtactcaaaaacggaaaaacacaattgaaggattgctggacagtaatgcaaactgggtgtatgggaataagaaggtgggtctagtggcttgcaagtattttgaacaattatttgaagcaaatccagcaacccaagaggatttggaggagtttcaatgcctaattcctaacaaaatatctcacctaacaaatgagcttcttatggaaccttttacttcggaagaaatatattcagctatgcgtgctattcaccctctaaaagccccgggaaatgatggaatatcgggcctcttttatagggaatattggccgatggtaggtgatgaggtgtccaaggtgtgtttgggaattttgaatgaaggaaaacgggtggatgatattaatgatactcttatctgtttaattccaaagattgacaagcccaaccaaatgtctgatttctggccgattagcttatgcaatgtagtctacaagattgtggccaaatgtctagcggggcgaatgaaatctagtcttcaccaagctatatcggaagagcaaagcgcttttgtggggggaaggttaatccaagataatgctatcattggtttcgaaagcctacattgcatgaaaactaggagattcggtaatggccgaaaaatggccttaaagttagacatgtcaaaggcttataatcaggtcgagtggagttttcttgttacaatgatgaaagggctgggctatgcagaggaatggattgagaaggtaatgcgatgtgttactagtgcgtctttctcggttctcataaatggagaaaggatagggaattttcaacca

SEQ ID NO: 81480 - DNA, 1543 bp, Cannabis sativa
ctttagtttttgaatagaattattgcgtcgacgagatgaagccgaagcatgaaaaaacttgctgttattatcgccatcttggagccaaagttgcttagatctttgacgccaaaaaacctctcgttgagcatacgtttccaccagattacgctttgcctgtttgaagtttgtagtagacgtctcatcacggccgagtttccatctgctcatttcttttttccactttcctattctttccttgaaattcccagtaaactccttaccccaacattgcaattgtctactgcaagcttccagcttcccttgaacattactgtcaatacatccctcccagctttccttcacaatttgaatgcacataggttcacgaagccaagcgttttcgaacctgaacctacgaatcgaaggagtaacaaactcagttgttaggtccatgaagatcggacaatggtccgatgttgaggtctcaagattatacaacttagcagccttgaacaaaactaaccaagattgattaaccagccccctgtcaaggcgaacttcaacccaactatccgaacccctgcccctctcccaagtatatggatagccacaaagatccatatcatgtagaccactatcagcaagagctttctgaaacccctgaatcaagaattccggataacgattgcctccctttttatcctcgtgagacaccacattgttcaagtctcccataacacaccaggggagattcgaactgacagcaagagctctaagcaagtcccaagttgtctttcttttacttcgattcggttcgccataaagacctgtgaatctccatttcgattgaccaagaacagtcactaccacatcaatatagttatctgcaaaccgagttagagaaaactcttcttcatgtctccaaagaagggcaatacccccactttttcctttcacatccacaacaaacataccatcaaaacccaaagaaattcgcaccttctcaacttgatcacgtctacaaagtgtctcacagagaaacaccaaattgggcttcttttggataaccatatcctttaagaattgaacagtccatgggttcccaagcccatggcaattccatgataggagactcataatgcttggtgggtctgtaaaccagaacccaccaattccccattttttgactcaccctgagcttgggccgagatcttgccttccaaattatcctctggccttacactaaggcccattcaagtccttcttcgttttgagtcaataaccaacaaacaatcctcatcaacattaattgtatcatttccaacacaatcagcatcaatcgttcctcatttctctcccatgagagattcaccaatctgtcccataactacctctttattacgtgatagttggcccccaattttttccttaatcacaggtgcctgattcaaaattgttggtgacattaattgtctcgccggagctccacctgcaccatgatttgaatacgattgatcttcattcatctggcactccttcgtaacttctctgaattgtttca

SEQ ID NO: 81481 - DNA, 598 bp, Cannabis sativa
tgattccacaacattctcctcggaatgcccaacaacattggtcttcgaatcggcaggcgtcttcaacgtggactcatctacggcgcggctgcactctgccttcttcccacttcctctacaacatcctcctccaaatccttctcactacgaccttcaccttctcctttgtccataagtttcaaagaaaatgatatgaactgagattttaactccttggaaaagtactccttcaactcattgattgcactgaaaaaagtgttcagtactctttcttccttccaagtcagagtagtagttgggtagtattacatgagttgaagtcaactttatctgttaaacaaaacaagtttaaaaaaattaattattgaatgtcgaaataattaatataaaatcaaatcaaatcaacacaatataaccaaaatttgatgtaccttctcactgttgggaccccattgtctttcacccatttgtaagtggacttacattgtttactaccccaaaaatcaacagggagcactgttcgtttaacatatccaaagttcaactcgacgtgagtcaagtaaagtaactgtgccaaacaaacaatgtattagtaata

SEQ ID NO: 81482 - DNA, 3610 bp, Cannabis sativa
aagcatgcacatacacctataggcactacaaccaaattgtcacgagatgagtctagagaccctgtagaccccactctatacagaagcatgataggtggattactgtatctcgcagctagtcaacctgatatctccttcaatgtcggcttatgtgctaggtatcaagccaaccctaaacagtcacatctctctgctgtcaaaagaattttcaaatatctggctgggactgttgactatggtctctggtatagctgtgacacgaataccaccttggtgggatatagtgattctgattggccacgatgtctaaatgataggaaaagtacttcagggggatgtttttacattgggaataatctagtctcttggtatagcaaaaaacaacagtctatttcactttctactgctgaagcagaatatattgcagctggtagctgctgcactcaattaatttggctgaacaaaatgcttactgattatggacacccacaacaaacactgaccattttttgtgacagtacaagtgccataaatatctctaaaaaccccgtgcaacactcccgaactaaacacatcgacatcaggtaccactttattcgtgatctagttgattcaaatatgctgtcaatatctcatgtgcccacaactaatcaactagcagatttattcactaaagctttagatactcaaacttttactcacttaagaacatgatattggtctccgtaccatctaaactgttctcagtgacatctggtcaaatatttttgtctctgagtattcttgtacttcaagacatgacttgagcattgtgttgtcatttctatcactatctcctataagctatttcgaatgacactgatcttgaatcttctccagataaaaggctacctcttctagatgcaatgggaagagctctcttaaacctatttactaataagtagtatgctccttctatattagttcttctcgtccaaagaggacggccacatctctggaagagagtgaaagccatgtctgggtattatagaaaaagccagagtgattcttaaaaaaaaaaaaaaaagaaggcatctgaagaaaaaaaaaacaaacatatataaacaaaacagtttgtgtaattgaggggtggtctagaagatctcttctcttcctggaccacatgaggacactcttcacacacttatggagattcaagatttagtgttgctaagtgtgtcattggggtttggtgtgctgaaatgatctgttgctcatgttgtgtatttttttatgcttagaggctttatttatgttaatgatcagctattaactatttttttctaaaatttttgagtatctctaagtttctatctcttatctcatttgtcacgtatgggctgttcgtatatattgctggtatatttgaagtcgttagttcattatgctcacaatacctgatgactatgtgtttgtttcattttttgtgtcgtaacgtgtggtagaaactattcaattaatttgggcgtgtacatctcattttagcaaaattcaaattttttttaaaaaataaatgtttttctttgcatggtcagccgttgtcagggtgcctctacttaaggcctaaggaaagtgaatagtctctctcactttactctcagaaaccctaagacctgtagctttcaaatttctttgtctacaatggagaatattgctcccatggtgctgacccctgttgccattctcattccaccaccgacatctcctgttgatcctgcagtcgaacctgtagtcgagactagtatgactaatccttgccgtgccattgttccttactaatcggaggttggtgcttctacttgccttccaagtcctgaggcgactccgtctccgccatcgcctccagtcattcaaaaacctcacacatttcaagttaaggctcctcccctatctaaaaaggcttcctcttctttgtcgtcaccccctcagaccgtgtcaaaaagagtcactcgttcctcttcgagtttacagtctccttcgtccccttgtctagccttcgtctgtgcctaaatcaaaacccataggacctcctcgtcctccatctaaggtttctattcctccccaaagcagagaaaggttcagccaaaaagaaaatcttcacgtgataccacgtatcaaccacctgaaaagaaatccaagaccaagcctattccagtcccatctacagcctcatctcccaaacagtcgtccaaaggctctaaaaagtcaaaacttcctaaagcccatatatcaactgtcgacccatcctctgttcaatgctttgttgatgcctccaaagcatctgtataccaacaatggtttggtagtcgtgagctttggttcaaacaagtggtgatgctagatgattttactgacctgcatgattttttaaaaattgggaaatgggttaacacggtcactaacttggctgcccctcatcccattttagttcgtgaattctatgccaatctagataggactgttattgctgagggtcatccagggtgtgtgagtgcatttgttaggggtcatcgtgttccgtttggtccatctactattgcatgcatgttgaaagttgagtctatcagaaatccaacatatgggaaacaattcaattcaatccagattaaactatgatgggtagaggggtaactggcagggatgactatctttgggacaaacaggaaattttagctactcatctaactcctttctatagggttcttcattgggtagctttgtacaattggtttcctaattcccatctgtcctctgttacacttgagattggcaagttcttgtatgttgtaggaactcatgtgtctattgatcggccatctcttatctttgaaaggatcctcgaagccttagaaacaactggcactcgtaacaaactaccctttccaagcctagttcaacgagtactcatggctgctcacccacctcttacaacgcatgactatcaagttcaaaatcccgttctcagtaagagttttctctcagttgctaacaggcagccctcatcgaccactccttctacttccaaggtgagcacagtctcctatgttcaaagggttatcagattctagctggcaggtacaaatgttttctgagtttaaatcttttgtcaaacgatataagaaggatcaaaagcgccagcttgcctttgaggcctccatgtataaaatggttcgtatcatcaagtctactgtactgcaaaatcattctggggattctgtaactccatcaattgatatttctctgcttgagtttcatagagattcgtttggtgcatcctcagatgggtcagggagtaacgcacatgtgcagggggagctgtctgtatctgccctagtctccagtccaatacaacaagatctgcctcatacagctgacccgtctccagtaaccacggcaactcacttggtgtcgtctgggccactttcccaaggggagtctgacaaaaaactggagcaatcaactcatgttcaatgaagggggagatgtttgtattctcaagtttttttttttttgatatggatttatggtttgctatgtttataattccaaaaacattttttttttgtgccat

SEQ ID NO: 81483 - DNA, 856 bp, Cannabis sativa
taatagaatgcaactagtatttctctaatattagagaattttgtttttgtgatgttcgaactgcagaggccctttggcatcaattaaggcggttgggattggatgaacgtagtgaaagccatcctgtccttggaaatgcaaagcaggcattagaaacacttgtccagcaaaggttagaattttctgctgcgaagaattgtttgctagaatgctttcagctgcacaatagtaatctgagaagcattaataggatctatatctcaaatatttttcctctttagatatttgcagaaggataaagtaagtggacctgaaggcaccactttgttttatgagcttgctgagagagctttagacagacctgtcagtgagaagattaaagaatacatatcagaggtattgtgaatttttattgttaatggtatcttttcccttaatatagttttggtaaaggaattttctgtttgcaggttgggaagaaagaggtgacttatgttgatgatgactagtcctgttgcaaacttaagttaactttgtagataatattttatttattataatggtagtattagaggatatattactttgttgccctacccatatgactattgaaggcagtcatttgatggccttcacttctcttttgctggagtatttgctctatctattgttgcaaactggcaaagtagtaagatggtgataaccttacatgaaatagactggactgaaggtgaagttaacagctttactttagcattttttgttcctttgggctttttgggaggaatgatcattatattttgggatattttcaaaaatatgggaaaaatgagtcatcttatgataaatatggcaa

SEQ ID NO: 81484 - DNA, 1864 bp, Cannabis sativa
acgcccaaaggttcgaataaaattttcaagtactcaggtcggatgaccaccattgaaagtacgatttttaatttttgcaatttgttttatttcatgttaagctaaggatcaggtcagatcagcataataactttgatgtaagttactacggtattagacacatttctgaccaataaatgaataaatatgtttattttaaattcaaattgagttgagttcattagcatgttattaatttaccatccaatgcgtacaaaaggtttggtcgaacccaaaaccttgatcagacaaaaagtatacttgtaaaaataaacaaaaaagtgaccaagagtcataagtctgctccatcacttgggggggcacttatacctttacaaagcatttggtaaaaaaataaaaaaaacacaattgcacgataattataaacaaagaatgaaattcattagggatagcaaaagcattcaaacccgggattaaaggctgcccggtcagctagctgttcaaaaaataaaaaatatattccaagtttaaagatcgcttggccggtcatcttgtcttaaaaaaaaggccttatggtcgagcatatagaaaaaggaagcattcaaacggctggagttccaggctccttgtatgggacagctaggtcagaaggagctagaggatcattaatctgagcaggaggcacttcaacactttgatcaatgggagaggtggaagtggtcgcctcggattccccgtaagcggccggagcagcacaatagtcgagaaacatgtctttggaatcgcctaggtaatcaaaatttgccttggggttggccatccaaaagtcataaaaaatctcgagactagttgtctctagggcattcaccttccctccgagcctcgccacttcgaacctctgttgctcagcctccaacttatgcttctcaacttcggcgccaagctcctcctccctggctctcttctcttcctccaacctgcgaaaaagggttcggagaccctctctttcctcttgagggctggtcacttccttagataaagaggcaatatcggcttcgagctgctcggtagatggcgtgtcctgtagctccttcgtcagttcagccaggaggttcttattaacctctccctgctctatccggatagccccaagttgaacccgggcatcctcgacgtccttcttggccaagtccacttccgtccacattgtgttggaaatggcaaggttcttaacagcagccgacttagctcaggattaagcataagccatcttcaggccagtctatacagagagaggacattaaaatttgaactaattaaagaaggacaaaaggaaattgtcaaaaaagacttaccctccaaagctccttcaggattcctcccataactaactccaaagacaggtcgtcgtccgctccagctagttgctcattcacctcagggaccgaccgattcatataatgggtgagcatttctctacctcttttggtctccgggttcagcaatggaggtggagcaggggccttaacctgtttagacccgcttctgattagctcggttccgcccttcacctgttcaggcctgttcgagctacctcctctggaatctttggacttagtcattttagtagggaaagcagctgagatagagagagttgttctccctcaaagtcctttatggatttcgagtcgggaatagagctggcatgttcatccgtgtagctcggcacaccataaagaggtgacagctgcatcatcatggtggttggaggtcgaaagagtatggatttgtcattagcagctccggtaacaacgacgattcttttctttctccttcgtaatcgggaggaagcggttgaaaagcc

SEQ ID NO: 81485 - DNA, 7359 bp, Cannabis sativa
  modified_base (1833)..(1835): a, c, t, g, unknown or other
tggtaaaataatttccaacaacgaatacaagtcaaaaaataggcatggatacacgaatacaagtcaaaatatgagcatggatacatatcaaattaaaatttgtgaaaactgaaatgtaccaataactaaatgttatcttttgtagtgcttgtttacaatttcttttttacaacaacttctttagtttttttatttataattttttgtacaatttttttggtgaaatatttatttttattattaataataaaatattattatttgatatcttttttttgaataaattcttattcttatttttattaaatattaataataaattatttgatattttaagatacctataacactatacaaatatatgacactttattaattagttagtaattttttatattattatactactctatgtttttgtttaacataattatgttggattaaaattctcaatatgagctcaatatgtatattagtgtattgctatatttaaaatttgacccaaataaagtgattattatagtaattatatatgggtcattgggtattaaagtattatgggctaaattccactctaaactgttttatgtttcctttgttcaagtaccgactgttgattatgcaaagaacatatggaatagattgatattgccaaaacacgagtttattggttggcaattagtgaataaacagctgcttacaagagataatataagcagattcattgaaattcccaatgagagttgtcatgtttgtggtactgagagagaaacacatagtcatttattttatagctgctgcctcactcaaaaaatcatcaaagagattatctggtgtggttatttagctggccaaacaacatcagaaagtggttgtctaggccttccaacaatgttagggagcaggtgttgaatgcaattgttttagcaaccttgtatgttgtttggacaaaccgaaatagttgtgtgtttgaacagaaatgtaagctagctgagattgttagcaatgatgtcaagtctattgtcaagctgagattcttaaactgtaagagtaggagaaatgaatccctgttcaactatattctcaatgtaatggaaagctggtagaagggtgcggctgttgctccctttggctggctgctttcttttgtttgtattgtgatattttgcctgttttgaataaagaactttctttcctgttcaaaaaaaaaaatattatattacatgatcaattaatgcatatgaaaatatattttcaaagttaagatttatgagagattattggtgacaataaaatttcacaactaaaaaatgcaatggctctaagaaaatagaagattaaagctagtaaagcaatgttcccattcaagccacaattaaagatgaatacatcaagcaagtaaagacactaaaggaaacttgagatactcttgcgacactattctcgaagaaaaatgataatgagattgcaacattttaagaacgaacttctctctattacacaacgagatatgacaatccattaatattttactaaggtaaaatctctttattgcaaaatttctgcattaaattctattgttggtatgccaaattttaaaattaaaagaattattatttatggataaaaacttgaatataaaaattttattactataataccacgtttgcctattcagccttctcttattgacttaaaaaatctgttagtcaatctaaaagtgctggctaaataaatatgtagagtgtcattaaagagtgaagaagtaagactctttaataataatagtaaaggtcgactccaaaccgaaagaactcaaaaaaaaaaaaaaannnaaataaataaaaaaaaaaaaagaagacaaaaaggttgtcaatttaagaagaataaattttatggtgaatcctatagttgtggaagaaaggacacattgttaaaaattattggtaaaagaaaaaaaaaaaaagagttgagaataatgttgccacccaaacgtaagacaaataatgattaatggggtgtaaaatcatcttttgctaatttgatggaagaaaagttaactccgataacaacaatcctttggtgattattgactttggttatgatgggaaatgaagagaagttgcataacatgaccaattaattaaaaaagtaagttatgtggacatttgtactgaaaattgatttacacttatttgttgtaattaacaagtaatgtagataagtaagattattgttcccactaagataagtatataattagttattagtaggtgtttggttgggctaatgaaatagaatagatattaattaattcttatatgaggtttattttgaagtattagaattatatatatttcaataaaatattttttttgaaaatgactattatattttaaaatagaaataaaatttattttaatatgtaaagtgatttttttaatatatatacataatatttttaatcaagatgaagctaaaagtgcaccatataatacataaaatcaaatagcatatatttattctctaaatgattttcatggtaaaagattttaaaaaagcaactcaatataaaaaatttattattgagggagagggttaaataatctagatgtttctagttattagtaatagtagtttagtcctatagtagaaaatcagtttttcaataacatgttaattttttttttgtcatttcttttttgctacctttatcgaaaaagaaaacataatgttatataaatttaaagacaaagaatccccaataataaaaggaatctcatctaatcatacaagttttttatccactcagagatgccaagctaatccatgtgtagctttaacggccaaccaacgtacatggattagggacactcttaaaaaattaaacatcaaaacttgctaatcttctaacaaagaactaagtttattgaggaaaaaataatatttagaaaagcattaacatgctgctaaacaatttgactcaacaaaaatatgaaaaagttaatagtaattaagagttcaattcaatgctacaaaatgagtcacaacttctgtctgaataactaaaaaataatttttaacatatataatcagtaactaattgatttatgaaaaatgctaaaagataaaatatatcatattacaattagtacaattaaatatatattccacataaactattatagaatattaccaaattatttataaggcgtaaaagcgatactagacaacaccgttatccttataacaatattgttgatatataaatcaattaaagccaattatttgataattgataaaatatttttaattattaattgtagtagatactttaatagaatatttcatctatatttttgacaaaatatagggtttctactaattttcgagctagctactcaaattctgtctccaataactccattttttttctgaaagaactgatgttcattaaaagagaagatagctagagatcacaggaggatcacccgcatactgatttaagctacgattaatataataaaacttacaaatattgaaacagttaatgagagctcaaaagtttaaatacgcattgtaattcgtgcttcttttttttttttttttccaaaataatgttagtagattaagctatatcaaaatcaaggattggagaggtacacagtctcgatctttttatatttatgtaacaatttacttgtttcgcattaaggttattttaatctaacattattattaatgatatatgtatttataatttttttttttgtactaatttacatcttaaaatgccaaacattatagaaaagataggttcacttatttatttgtcaagcactatatttggatctcgatgatctaacatctcattaattgctctagagttatataaaagcttcatatgttttcagaactagtttgtatatttatgttacaagataaatattttgaaaaatgagaatattaataggagtattataaccgactgataaatattggatatctaattgtgatcggatcggctgtattggatgttatttttgaatatccaatcagatcggatcggatattgattgaggtgtctaaaaatccaatacatccaacatctaatcaaattaatgaatattttcatttaggttgaatgagtaattagattttatgttgttataagtaaaaaaaaaatatatgtatatataaaaattaatatgaaaattattatttttttgattggatatgtccaattcaatccaatagatattttggatggatctgatccaataaatattaggtctaaaatattggataaacccaaattaaaccaatagatatacatattaagtattaaatagttatatttaatatttggatatagagataatgttattcttagttgggtttggtgtatattctagggttagatatcctcccctacataaagtctatgtaacatttaatatattcaatacaattaaaatacttttactttactaatatgtatcaaactctctctaggtgacctagatcctattttcacgcatcacattcggatttcacagatcttgctgttctccttagctcgcactcgccggatctctgctccctccaatcttccttcggctcttcccactaccgctgcttccactgctggtaacgtcgtggctgattacaccactgctcccatagtgtctcctcctgtctaagaaatgaatttagcatcttttgatgcttcgatcgaacaacctgctaaagctctggatctccaacacactgttccgtctccacctcaggatattcggtcttctttagtcattcctccttcgatcggagccacttccatggctgctccggccatgccttcaagatccatccctcccgtgaccattggtaatgttcttctcactaatcttggtcctcacaatgccgatcccgtttctttgcaactttcctctcacgattgcccaaccaacgaagataatccctatttcgttggctctggtgaccatcccgggttgattcttgtgactcctcccttgttcgaccataactttcagcaatggcgtcaggattttcacttggctcttgaagataagaacaaaactggcttcattgatggaactcttccacaacccgatcctactagtcatctcttccattcttggatccgctacaaccaaatggtaatgtcttggattattcattgtgtttgtttagatattaagagtagtgttatgtttcttgatactgctcataagatgtggattgagcttactaaccgttttagtcaagggaatggaccttgtcttgttgaacttcaagaatctcttacagatttacgataaggagacgaatctgtcaagcctccgctgacaacgccaagttttagaaccaagaaaaggtctttcaatttcttactggccttaacaaatcataccaggtggttcgtgatcaagtgttaatcaccgaacccttcccatctctatcgaaggtgttctctactatcatttagcatgagcgacaaaagaaactctgcattctctcgaacctcatcactgccacttcatctcagtcctcaaatcctccttgcaataagaaaatgcaacctttttgtactcactactcgaaaccaggacacttgaaggagaaatgctatattctccatggtttccctcccaattattttgacaagcgcaaatctgactctttacagcgctccacttcagatcggggttcccttgccaaaggtccggctgctaaccaagcttccacttcccactctgtttcggacaaacttgctttgctgcaagaaataatttcacagcttactcaacagattcaacatgctcaacaggctcaatcaacagttgatatcaaaactccattggcctctaacctcattggtaaatctatatttttctcaaataatctctggatagttgatagtggggctacccaccatgtttgttttgataaaacatgttttacttcttttgatactatccctagtgctttgcatattagtttacctaatggtataaaaatccatgttactatatttggtattgttcacattaatgctaacttttgtttaactaatgtgttttttgtacctgattttcagtttaacctcttgtcggtcacatctattgttcaagatccaaaatatttagtcttattctcacattctagttgttctattcagaacactagtcagaatctacagattgggattgctaatcgcgttggataactttttttttctctaacaagaaaataattgtacttgtcattttgttcaaaccaatagatcttgtaatgatgtacacaaatggcatttacgccttgggcgtccctctttacgggttactaaatccttgaatttttttttcattttaatgattctgactcatctttgtttccttgtcatgtatctcatttagctgcgcaaaaaaagactaccctttaatttggctaataatatggctcctactacatttgacttaattcatttggatatttggggtctttttcacacaaccaacatagaagattattgatattttcttactattgttgatgatcacactagatttacttgggtttacatgcataaaaataaatctgatgtcagcactatcatacctcaaatttatgcttatgtactaaatcaattttctatctctattaaaggcatacgatgtgataatgcgaaagaactaaacttgtcttctttttttacaaccaaagacattcttccttatcactcgtgttgaaagacctcaacaaaattccgttgttgaacgaaagcatcaacatatattgaatgttgctcgctctcttgcttttcaatctcgtttatctcttgggtattggagttactttattaatactgctatatatttaatgaatcgcacaacatctgttttaattcactttaaatcttcttttgagttgttgtataacaggttaccttcgtatgatcatctccatatctttgattgccttacctatgcttccactctggatgcttaaggtacaaattttccccaagatcttgggcttgtgagttcattggatacccggttggtatgaaagcttatactctacttgatcttgaaactcatcaaatatttcactctagagatgtcattttttatgaacatattttccccttaaaaatatatgttccaatgacattatcgatgctttcttttctaacactaacggttcacctagtggcctttcacaggctcctcccaaagttgcggtacccgtacctatacatccttcaccgctgcctgaacaagtggccattccagccacttcacatacaaccataccactaggtccaccaccact

SEQ ID NO: 81486 - DNA, 2225 bp, Cannabis sativa
tgataagtgagatttcgagtaagtgtttacataatcttcttctgtccaaagaaatgattcatcgaaataatgagtaattacaattatactaatgtttttgaacttttttctatatagaattttgtcttgtgactataccaattttacccctaataaaattataaaattacaataatataaatgtttttgaacttttctctatatagaattttatcttatatctattaaaggacagtacacttttaactcgacacataaaactgttattatattattattattattattattattgaaagtagcatgagtaataaccttagtactacttattctatctcttttgtcacatatatacatacatagctatagtgcgtttaatatatactgaaaaattcacatatcacatttatatatgcataattaaataatttagtgttttttgtatcatttttttcttgtccatgctcttttcttttgtaaattgagttgtatatattattttaatttaattatttattttaatatcttcttaaataatttattacaaaaataattatgcctttatattttagttaaggatctctatatgtaatattttttttctttttctttttttttttataataattatgatttttatattaacataatattatttaagttatttttttttatagttgtgtacattatagttatttaggacgacttgtaaatttttagaaaattttaaataccaaaaataagattcaaatattttgttgcacgtgtgactgcttcttcttatacatgtgataagtaattgtttaattattattttcggcattgtaaactatttagaatttttaaaaaatttacagatgatcataaataactacatcatacatgatcataaaagacacttagaattaaaaaactttcttaaatactgaaacatataatgcaatttactataacacctgtttagggagtgtgttatagattttctctaagttttttttattaatttttttttaaataattacaggttgaaaatttaatagtatatatcgtaagaagctattctatggtgcactccttaaaaaagaatgtaccgatgcacccccttctaatttttttccatggtcgtgtacgtaatatgtttaagacatcctacaaaattttaaaaaattcagaataatttaaattatagaaagcagtgttcaaacaatctacaatatttatttaaatgtttgtcctttactattctatcttcagtataataataaaatatgtactttgtaacttgtactataattaaaataacatgtaaaaattaaattatataaatttttgttataattatttgtgaaataaaaatataaataaaatgcaataagtagagctaggcacgtgcattgcgcacgtgctacactcacctagtatatatacacgtcactatgtctaatttttggatgtatattttaaatatacatttcaaaaaaaaaaattgttgtaatttatatctatatattttgaatttcaaaaaaaaataaaattatatccatatatattcattaataaacttttttttggtcttattattttgcagaccttttattttttatggaagcgtgaaatatttgtgaggagactaaagtgcaaatagaaataattccaggggaccattatgtacattttttaataaaaaaaattaaaatttacaaaaccataacggaaaaaagtacaatctaattttttttaatatgatattatataatatagttatttagaaaatttcttaggaaattctaaggatgtgtttagaagaaattacgctatataatataatgtgtgtttggatatattagttttagagagtgaaaatgatttttattgatattgaagagctattcaattgaattacaatggcaagagtgaatgtttatataggaaggaaagtcggttaagctagtaaccaactaaccgaacataactaacaataacaacctataactaacataactaacttagcctcttggagacaatgtcatggaaatgagtggggaatagaggcttcatgaggatgtcaactaggttggacttggaggcaatgtgattcattttgatggtgccattggtgatcttttctcggatgaggtgacagtcgatttcacgtgtttagtacgctcgtggtagacgagattctctaagatttgaatggctgcattgttgtcacaaaataatgt

SEQ ID NO: 81487 - DNA, 1386 bp, Cannabis sativa
  modified_base (55)..(59): a, c, t, g, unknown or other
  modified_base (1048)..(1054): a, c, t, g, unknown or other
actcttatgtgtttaattttattgttttagatatattcatatttaggatgttaannnnnatacttgttagtaaatctagattcaggtaagatatttccaacataaataactaccatcattgcattctacactcaaaactgaatccaacgaaatataacatggctccatataaagtttagagttctgaaacctcacataataagcggtacacaataacaattggtggtggtagaaatcaatgtatgtactaaaaacattaccaaaaataagggtagtatatattaaaataaccatctagacgaacagatcacacccaaacctactatttgtcaaaatgatagatggtatagtcagaaaggggcagagctacaaaaatttcactaaaaaaagtagcaagctgggaaaaatgacttagtgtagattgttctccccgacgagctgcgtctagtggtgaagacggttcgtctaacgaacatcaaaagtcatcgaaaaatatgttcaaagtttaaacctcaaaattttgacttgcgaacccgggataacgaagacttatgaggaaatgctacttggggattgaggtcgtcaacggctaaagattctgatggtgtggcacgtggggtcagaagatcgccgtaaattggttgtcagagatcaccaatggtggtggctatatggtggcttctttgatgatttgttgataaagaaagaaagaaagagagagaaaatgactaagatgggagagagaaaagtaaagtattaatatacactacaaaaaaaaatctttttttagtcataacaaaattagtgacaattagtgactaaaagtgactaaaagtaaaataaaagtaaaaaaattatgattaattataaatcatcattcatatgttgtgactaaatggtctgtggttatatgtattagccacaaaaattacaatttattgtgacaaaatataattttaatgacaatacttgttgtgattaaaactaaattagtaacaacttgtatctaaatactatgctttagtcacaagtaatattttgttgtgannnnnnntcacatttaatcacaaaaaaattatattgtgactaaacagttgtcactaaaagtagcacttatagtaatatggagtgagttgcactctatttgtttcattgcaatttttttttttctgttttaacaagactgaagtcgatatttgtgttgtgccatgcttgtgcctctcaaatttgtgtcaatttcgtgctatgcagaaaaggttgtgggccaacttgaatgtaattactctaaactacttgtactatatatgctatatatatatatatatattttaaaaaattattatatttattctattaatatttttgttaaaaaataatcctccactt

SEQ ID NO: 81488 - DNA, 1829 bp, Cannabis sativa
aactattatagatggaagaaaatcctcctctggttgcgtaactttgttacctttgttattttaacctgtatcggttaccctacaaaaaaaaaaatgattcctaatatcatctccaaccatatatcaaagagattttataaaaatactcaattttggataaaaatttattatttactgttacacagaattttttataaaaatattctttttataaaataaccacaaaataacaaaacaaaacaatcaaaacaattaaaataacagtgtaaccactaaaaactaactgtgaaatgaaaacacaatataaaatttaaacagtaaaaaaattaaaaaaattcagtgtaaaaactcctagtctgaatcacagggacaccaaatttgaggctcattctatttctaatccagatcgctaatttagggtttcatctcacgagcaatatctacagctttaaaaagaggcttcatcaacaatcatagtcacgctctcaactctcaactctcagctctcatcatccacatcttagtattttctcaactcggttagtccttcctccagttcatcctccttctccaatttctctcttttgtttttcttattttttttcgtattcttttgtgattagcaatcaactgatgagaatataactgcaacaatatgatggatttattccatgattcttagtacttaagtctctgatgattcttctattctgttcactttttttttgatgaaattattgtgttagatgtgatgattaacaattggtccgtgtttctgattttaccgtgaccgacaacccttaaccacttctgatctatcactttaattgttctatctttatataatttttgttttggctatggaaaataaattctttgttaagtttttatggctctatgattacgtgcctagtgggccatatacgctattctgattcattatatgagtagaaaatttacatttacaatgagagctacaaaaatcaatttgcttttgttgctctttcattatcaatatgcagtgaggaattttgaataaattaacacatgtcagacttcggagattttcgaaagaaagtcaatgagatagacaattcattttacctgagcagaattttgtataacatcagtttgattttcttaacttaattttgttttaatcattcgacgtgagatttctacgaggaagtctcctgctttatctatgggagcaagctgtttcaatgtttgtaaaatcccaagtaagcgtcgtatgaaaaatctcgacaacgttgacggtcctcccatttttgggagttcctccatttccggtggtctcatattccattgtcttgggtagcggcttcgctgcgtttacctattcggccggccatgagacgaacatttgttatttttaattatttttctttataaattttattatggggcttgagtttgactctttagctattgaattactgtgctttatagatgaatgaagctccctagattaaacatttcatcctttcactaatgttcgctattgtttttattattagtggatgcataatgaggctgatacatttggtttttcgatttttcaataggataaatgtttttggttttgcctggttattcaagcaacacttctgtaattttttatgatggatgatgtgttatactgctcataaaattttttttattgctcttcagatttgttgaggtaacattgaagctggtctagtaagctttagtacctttcttttaatttaaacttgagatgttttagaaggatccttaactgatgccttagttattattttatatcccatgtgattattgcttttttt

SEQ ID NO: 81489 - DNA, 1854 bp, Cannabis sativa
ggatggaggtggcgcgtaaggcccacgcccagctcagatggatgccaaatttttaggttttgtcgatcggaggtgggataagctccctgggttggaggtgagaatagaaaactcctttaaatgagctttctaggataaagcctccaaaccctaattttaagaagggaagggatgagaaaaataatatgttttaagaagcttcacatgctcaaataccatgaagcaaatgagagaaaaaggtttttatttctaatgatctattttagtatataaaatggtatatataatacaatgtgaacacctagtaatacaagggtaaatgaaaaattcattaaatataaatttagaattaatttacaactagcttgattttctacagtatatactatataaatatcaaatacatatatacatatacaattacgagttcaaagcgatggggtcggccaaccaccatggactaccgtggtcggcgatggccatgtaggccaggagagaagacagtgatgcactacgaggagcacatagagagaggtgggtcgaacccgcctaagacccagtcgggccttctcttaagacggtcgtaaaatgtccttgcatgcaccatgtatgcatgcgattatggaggaggaaggtggtccaaccaccaccaacgtcgaccatcgacatttacctctgggaccaaagtcccttgctttggcggcatcaatatggtgaaggggcacggaaccagagacaatggtgtcgtggtgcatggccggggttccaccatgaacctaagctcacatgtatgtgatattttttacatgcatgaccgagttttaagtttagaaccaagatcacgcgcaacaaacattacaatgtataatttttatgtaaaaataatttcataaataaattacataaaaaattttatgcctcaaattggcttatattattttttaaaaatgataacaacaaaacctacattcaattatactatataattaacgattcatcacctctcatacattcataataatataaccatccattcgcacatatattacatacatataaatgtataaaactcacacaatatttaatgtatacacattcatggagctgctcttgataccaattgttggttttatggtactaaattagataagcatcaaaagagtttcgtattgttaattatcattatactatatcccaatagatttccagatgtctgtacattaaagcaaaacataaaatagtaagtttagaatatatacctcttgaagactaaggatattctcaaaacttctcgtatattgtatcccttagtccagataatgtaatttgaactcacactagtgtcatccaaattgttcaaccacacacaaggaatagtttgggctattaggataaagtgtatatgtttgttcttattgagttctcaacacatgggcaagaacaattgagagaaaaattctttctttcttttttctcttaatttcaaaaattaatatgtcagaaggagtctcttaatttatcaaatcaaacttctatagttaaaaccctttaattaaattatatttaattatttaaaaaaataaataaatatctataattgaattcggttactgatatttatgagggaatctctcaactacttgagagaatatctcaataactttataatatttttaactactttttaaatttagatatttatcaaattgaattaattaaataattaattaactcaaaaagacaaactccatagggataggttatatgttaggtgcctcccttgtctatttaggacaaagatggcatcttttgtcttaacaatttttatctcaacaaatcttgtcttgacaaatt

SEQ ID NO: 81490 - DNA, 1089 bp, Cannabis sativa
tttgtattagtatatttaatacaaaactatgtttgttattgacttgtattaatagattgtgtaaagttatgatatattttcaataaactcaaccccaataccaactatgggttaggtccaggtccagggtcgaatccgagcttgggtctgagtttcgggttcggatcccgagtccgggtctgggtctctagtccaggtccaagtctcaggtctcatgtcccagctttgggttcacgtctgagtcctgagtctggactgagtctgggtctgagtctcaggtctcgggtcaaggtataggtctgagcttaggtcctgggtccgggtctcaagtctgcgacccaggtctgggtctcgagtccaggtttagttctaggtctcagtccgggtctcgggtgctgggtctaggtctgggtctaaatttagatctaggtctaggtcccaatttgggttcaagtctaggtctgggtcgaagtcaaggttcgggtcaaatcagaagtgatccgtcaattcggagctccaacccgatccaactaaatgtatctttttgacaagcctattgacactagacaaaagtacgaggttcaagaccaccacctgcaacctgcaacctgcagatcatggatgtcaccatgtcccttgggaccactagtgtaccctaggctattagagccaataaatacctatttctcaaatgtgataggcggatggaaaatctttgtaacatttgacctagaaaaatttacacttctatctttctccgtagctactctacacttttctttacgttttcatattttcagatcttcatcttaatcctaggacttgcatctaagttttgattttccggctataatttaattcttgagttttcaccgtcaatactattgacctgtgagttaaggttcattaacatctaaatcacgtaaaaatctcttcccttaatctcttctaataatttatttagctctaaatttttatttcattagtttccaaaaaaactcagtagagaattttatatatgttttggatataatcaaattgaaagtatatacatatgtttgaatttgaaattcaaaaggtattgattca

SEQ ID NO: 81491 - DNA, 1294 bp, Cannabis sativa
accttaggtattttcaccgccaatttttgaggttgaggactaatcggcatcaacctcaagtttttggggacttttgccgcaattatccctttattttactcataatcatttcaactccatccttaaaataccaaacaagacaaaacgagtaattaatttattatccatcaaaatgcctttagctagagtggtccttagttaatatttagttagattataatctatcttaaaagtcttcttctttctgcagttcttaaaaaacttcggaatcagtcacaaaccctaatctctctgaatcgaaagccaccgtcttcacttgcccaattcactctgttttcccctaagacaatagtatctgcaactacttctacaggtaagggacaacaaaacaaacgattctatgtcttttttttaaagggatcaaagggttttttgctgttagctgttgcaggtcattcatggctgaaaaaagagttaaaagtacatcattgatgggtgaggatgataaggaggacagaatttcaaaactacctgatgcaataatcacacatatcttgtcatttcttaaaacccgcaatgtgattaagacatgcatcctttcaaagcgttggaaactcatgtggtatttagtccccaaactcattttctgtaattactgttcgaagtattatggtaactgcaaatttgtggacaattgtttgaaataccgaaagagaggtatgaaatttatccccgattcagtcataactagttttaagcttcattatttgtatgaaagtaggatggatagccgcttaaatagatggttagcttttgcagttaagaatcaaatcaagaacatagaagttcgtttgaactggttacacaggaagaataatgattattactactactgcttacctgaaacactagtggtcaatggaaattttttgacagatttgaaattgtgtctggtagagtttgattcttcttgccaatcatttagtttttcatccttgaaatcattgtctttgtctgctgttcgttttgctgatagtgatatgctagataatctgttgttgggttctccttcccttgaggaattaaggttaagagattgttgtttggaaactgatgatcagctacacatccacgtacgtaattcaactctcaaggtcttggaaattgaacaaacagaggctctagtggagaaaattgaactcataaatcttgaatctttaatactaaaatatgtttcctttgacaaaataaatccctgtgcatgcaaggaaattagaaatcttacattgacttg

SEQ ID NO: 81492 - DNA, 2856 bp, Cannabis sativa
tttttctctttaattaataaagttacttaatttttccatttaaaaagatatcataaaaaaactagttaccataaagtttcatatccacattaaaaaacaaaagacaatggaaagtttcactaataagaaccccttccacttaggtttattttttaatacaaagttggccattgctactttacattagtcaatttttttaattgaagaaccaataatataacaacatcaatatttaaagcaatttattattaaatttaataattgagatgccaaacagagcttttaattaaaataattctaaggccacattttcaatctatttctctcagataatgtaactttaatttgataatggtgcaatatttacactcatttattatttattctccaccccattacattaaaatggatatttaatataatattctttttttaaagaaaaaattattgattaaataataaaataagaacaaaaaataaaattaaaagctacattgggttaaatttgggacactaaatttgggtcaaaaactctaatttgagaatgattgttattaaaatttatataaaaaataataataattgaagcacacttaaattacacacactttttacatacactactatataattaatctcagctacataattaaaaataatataatttctaattaaatatcaagcattaattaaaaattacaacaatctcatggtagaaaaatttaacaccttattataacacaaaattaaacacatttaatgaaagaatatttatttatttattttaagaaaatataattaatgatgacataaaatatggaaaatctcagagtttgagacagtaatttcctatatattgagtgacgtaaaaggtgtttataaaactaaaactaacaaacaaaaatatattttgaaaatgggaaacaaaaatcaagactttataattaatagcaacttagaaaataagcaaaaataaataaactaaatatatatatatatttatatataatataaattcatatgaagaagagcatttcaatgtgtgttgatccaaaatctgaggggatctataatattataatcaattcctctaaacaagacaaaccacttcagtcaggttcagatgaagacagtccacactaaaaacctttctttatttttatttaattatttcatttttttctccagcaaaataatattaaaaaaaatcatttaatttttcttgaaagtcacaagatatgaacttcttaatatataaaaagataaaaaagaattaagtataataaacaaggcatactattataaaataacatgtaatgtgtctaaagaacaagccatactatttagttatttatcaaaatttaagtggtaactaaagaaaaaagaaaatgtaattttttcttttgaaaaatgataaaaatgtgtatttatttattttaatcttttaggaaattttgatccataaattatgccaaaattatgttttttggacctagtgtaatatataggcattaggtacaatatcatattatattgattcataaattatgttctagcttattctagctaatacgattaaattaaaaattactatttgtttttaaattattataagcttattcttcatagacttttactagagaagttgaaaactttgtggaaaatatggaacttgttgaatgttaatacttaatagactaataataggaaattagtagcaagttcgaaaaaaaaattccaattatttattttcataaactatagttattgtgattttttttataagaatataaaaattgaaaagtggtgcagatataaaattcagctataatagtttccaaaaaaaaaaaaaaccataataaataagataaatattattttaaattcagtattttgtaaaaaattactaattaactttttatttttataaatgataattcagacttcgtatttttaaaataatataaaatagaccttaaaattaatttttgtaattttttttaatatactcatctatttatagcacggacatatataaaaaatgtaacaagccatattataacaccttcaagctaagatattattaaattttaattttataaaaattaagattttaaaacataagatttaaattgtactattttaaaaaaaataagatttttttaacaaaataaaaccttatttgacttatggtcctgtttgatttagcttctatgagctcttacttagcttttaaattaaaaaaattgttttacgggtatttcgataaaaaaatataatttaaaaattcttttggaagaagctagaatttgtagcttctccaattttttttttttttttgaaaagccattttaaaaattaaaataatttatatcattcataatttactaacaaaaaatcttttttaatgatacacaaacactttaaattaataaaagatttttatataataattatctaaatggtaaaaaataagtcaaaacttatacttctagctataagaaaaagttgaaacaagcttagccaaacatgatcttaggttttataagttcttttttaacttttaaaattaaaaaattaactcttgagaagctattttaaaaattaaaataatttacatatttcttaatttgcccataatttttgtgggataattaaaaaaaaaaatacaaaaatacggtcggtatggaatttttaatatttttacggttttttaaattttattatcataaaatacggtattttagtatatttttattgttttattgttaattttttattatttgtataatattttgatgttattttttgattacttttatcttatatttttgtatttttatagaataccataaa

SEQ ID NO: 81493 - DNA, 733 bp, Cannabis sativa
caaatcttttgcaaccttatttgattctaacacccaaaccactccctaagacaacaaaaaaacaaagctttcactatcaatgtaatatcaaattgatgaagaattgagctttaaccccaaaaatttcacattatttaaattaaaacaaaattttgactatcaatgtaagaatcaaactgataaagaattgagctttaacccccaaaaattttcacatacctgtttgttgttggagaaatcaagggattgattagggtcaagctgtacaggttgatctttaggcttaattttgcggcttaatcgattaagaacgagaagaacaatataagcttcaacagctaaaatcaccaaagccccaactacaatccctaaacaaaaccaaatcatcttgactctgaagaagaagatgattctccctagtacccaactacttggtcagagcaatttcataatccaaaattggaagaaaaaaaaaaaaaaaatccaatctttttccttattttgaattgggaacaaacagtgatgtttctttggtttaaactgagtcaaaaatctttttttgtagatatgataagaaaggaaatgaatgaattttccataagattcgattaaacttggaaagggaaaggaatcggattctgtggaggaaagattggaaatgggaataggattgattggaatgattccgctttcgtttcaaaaagcttttctttttcaatttatttttggtttt

SEQ ID NO: 81494 - DNA, 684 bp, Cannabis sativa
aaaaaaaaaaatccatcttaaagtaaaaaagttaaaaatttcagtatgtggtctaaaaatctattttcatttttacactttaaattagtttctttttatatttttacgaaattctacgtggaaacattcatagcaactaacggagcaacctaaattacaaccaaaatctacataacttacataaaaatcactaaaaaaattatgggaacaaactaaatcataaattcttttaaaaaaataatatataaaataatttcttattaataaattaaacaatatttttttttcaaagttaatgaacaaagaactatttgacagcagtaggtaggtgactactacatttggaagttggactgttggtttgatttgattttattttattttaagaaataatgtagaagttattaattaccaactcatttatacgaagaccacttaagatacagtacagacacgtttttgtggtaattttgttgaagaagaaaaacacccaacgattaggtgagtttcaaatttcattgaaattaataataattagaggctgagcaggatttttttttattattatttttgttaagaaagagcatgaggagagaaaaatccataaaaacttaggctaattagtaatttttcctcttaaactttgacatgtactaaatcgtgccccctgaacttttttggccg

SEQ ID NO: 81495 - DNA, 631 bp, Cannabis sativa
gaagaaatggaaatgtgatgaatgatttttgttttgagtaaagaaaggagggttttgattgtttgtttggccggcgagaaagttgtgagtgagtttaatttacgtaacggaatttgagaaagtaacggtttttaagtttttaaaataagtgtttattatatacgtgcgttgacgtggtaatgtaacttaacctcaaaaaaatgccacgtaggcagtctcctggcttatatgtgattgaaggaaaagccctacttattctttgttaaaagacatcacaatttggacccaattcatctaattcaattatttattggctattaaattttattatcggatccaatttaattgaattgagtcattagatccaacacaatacatgtattgaattggatcgattcgcattgacgggttttctatttgattaaattggatctatctaatctattttaggtaccattgatatatatatatatacaaaaaaaaaatacataatttaaaacttcaacacacataataaatattagtttagtccaacctaattctcatgatctaatcataataaaactgctaaaaaattatatttatttttattagcaattagaaagagaagaattaatattttaggtctaaa

SEQ ID NO: 81496 - DNA, 700 bp, Cannabis sativa
tgtcatgatcattgtgaacactctgttcagaattatcagtacccagaagtgctttattgatgtcaaaattaggagctcaatcagttagagaaggattgttgtgtgaattaaggtgagaatagaaagatatatttagttaaaatgtcatatcaccattttatatttctcttttatatatatagattatttggtataaataagcattgcttaaaagattatacgtgtcggtagaatatatagagagttgcaaaataaagtgattaagactcctcttatttatataggagaagatcaatacacgggtatatatagttagataaataaaacaaccacttttataacagcttctacacatgttacagttacagagacttcagtatacattctcaatagctttcaaaataacatactcgatccctatctcatccaatgtctaaacgatcgagttattgcacaaccaataacttctccttattattgtcatgaagcgataaaagattgtcatctatggtagtcccaccttccatacaatatgatacctcagcctgtatatattttgaaattaaaacgtatatgagaagacatttattagaatacataaacagagtgtatataaataaaaggatataaaatatcaatcgatattccatataatcgaaaagattattatatgtaccatatagaaagagggatatatata

SEQ ID NO: 81497 - DNA, 1456 bp, Cannabis sativa
aatctcgtaatagcccccctcaagttgtagtgtagatattcgaaacgttcagcttggagacaatgttgttgaaaggtgctggtagcagagccttagtaaagatgtcggccaggttgttttgagatgggacatgaagcaacttgaggacgccttgttggactttctctcgaatgaaatggcaatcgatctcaacatgtttggtgcgctcgtggtagacggggttttcactgatgtgaatggcagcagtgttgtcgcaatagagagagaccgatttgttgagtgagatgccaaagtctttgagtagtgcaaggatccaagttacttcggaagtggcattggccattgctcgatattcggcttcggctgaagagcgagagacaacttgttgtttctttgatttccaagatactaaggcttgtccaagaaagacacaataacctgaaacggaacgtcgtatgtcttggcaagcgccccaatctgcatcagcaaagaatgacaattgaacattcgttgaggatagacttgtctcagcaaatgcagaaagttgcggagaagaagtggcagggaaaaaaataccctgtccaggagttctctttaggtactgaagaattctatgagcagcttgaaggtgtggtgctcgaggacatgataggaattgactcaggtgattcacagaatatgtgatatcaggccttgttatggttagataaatcaatttgcctataaggcttctatagacagtaggatcgggcaggagcttgcctttatctttgctaagcttgaggttagtttccataggcgtggatgctggcttagctccaagataccacgtgtcggtgagtaattggagagtgaatggtcgttgggatatggaaatcccattctttgttctaccaatttcaagaccaaggaagaattttagatttcctatgtctttgagtttgaaatgtttatctaagaaaattttaaaatgggtgatggccatgtcgttgttgctagctacaatgatgtcatcgacatatatcaaaatagctagaaaaaatgtgtttgttttttttatgaaaagggagttgtcagataaggatatgataaagcctgcagtggtgagagtggtgctaagtttttcataccactgacgagaggcttgttttaattcatagatgcttttattaagcttgcaaactgaatcgagtggtgccttgtaacctggaggtaatttcatatatacttcttcatgaaggtcaccatgtaagaatgcgttattgatatcgagttggtgaacattccaattattcatagctgcaagagctaataagatcttaagtgtgttgaatttcgccacaggggtatatgtttgaaggtaatcaatgccttggttttggttgaaccctttggctacgagacgagctttgaatcgtacaacctcaccttgttcattatacttgactttgtatac

SEQ ID NO: 81498 - DNA, 1415 bp, Cannabis sativa
  modified_base (39)..(56): a, c, t, g, unknown or other
gccaaattgtttttaaaaacaattttctgtttttaaaannnnnnnnnnnnnnnnnngttatgatgccaaacatgcacctagactccggtgttcaaggagattaataggtaaaattctcattcaatagtataagataatattttcttgtgatattctttgagttataaatgattgtttgagttatacctagatattattactatgcttgctttcattagttggaataattattttgaaatgatatatgaattagacacttgggaacaaccttaatgcttacttagagtataaaaaaaatactagtcttccataaatttggtgagataatggatagttttggcccttttggacaactcatatattttagtgagatgatcattgagattgataatacccttggccttggcctttacttgtgtactgtaatatttttttagtgaaattattatattatagtcatggttgatactaattacttgattgtgtggataatattataaattttattaaatggtgagtttaccttgttgtcgtacttgtatgaggatgtatcacaggtatatatggaatttatactaatacaccaagtatagattatattattttttatatatatggattgatatcctacaaagctacagtgaaatagaaatttgttatgccatgaatatctcaagaataattattgattgaaaaaccagttgaacactcaatggttgggattttgttacttgcattgagtgcatgcttaaactattttatttgacctggttatacttatagattcattttatttgagatagttacgaataaagccaagaaaggtaactaataattaaatctataatttgacaactattagggtcgaatcactcatatcttgagcaaagagtatttcactaataagaattcgtaaagctcggatgtaggtaagtaaagtactcaattataatataagaattttatgttttatgacaatttgttttatgttatttatcatgctcttagttgcaaatttattaacatttcagcgtagcatttcatgatatgtagagatataaatagaaacacatattatgagaccatgcatgatttttgagaaaagctcaaagtcttatgaattgcttgataagatcttattctaagcaccataagtgaaagataagatataagaaatcaaagaaaggttgaagtgccactatttcgggaagcaatagagaaaagttgtagtttcagacggaggtctttatggctcatagtggcagcccaatagagtgggccaggtcagagttagtcatgagataacatgccatgttaccgtctttctctcctccatttatatgagtactatagtgttactgaaaaaccgtgtttttgcaaatgtcagttgtatataagaaaatataaaaactgta

SEQ ID NO: 81499 - DNA, 1158 bp, Cannabis sativa
aaatatagtattttgaaaatataattaatcatttttcttttaaaaaataagtatcttacaaataaatgaagtattttttcttaaaaaatagttatattatttaataaataataataaaatatagaaataatattttaaaaaataaatttggagcctttttattaaagggttttttggtcctgggtggggggccttgggcgtgggcccatgctccctcactcttgagtcgatcctgatattatctaaccctattgtaaatttcgccaaattataagttattacattagctataaagatgcttaataataagcctaggtttttttttttggtttacttttagtaccttaccataattctattaaccataaactttactactaatctaatttaaaagttttccctaaaacctaaagagaagattcatggtgaattggaaaaagctattttgggctataactttaaatttaggtatggatttaataataaatacaataattttgtattttaccatatactttttttgcttaataaattaaaagcttaaccaaagtgaccctaaaagtgctctatttttggaggttttcttgaaaaaagaaaatagaataataaatgttaccataaatatatttggattctcacacatcaaacatcacaattaattaatttttagctaatggaatgttggcatcaatgaattaaatcaaaagattgaaaaagctaattgctgtcatgttatgtaattacatttatgtcaatatttaaactcatgaactttcttcttttcctttaaaccaataataatttatatataaaaaatgttaaaaagatatttttggtgttaatcatgttcttatcagtataattaagtatcagttttatataactttagaaaataattttcaaaaaatattattaaccaatcataaatatatacttatacaaatattgaactctactaatatctaatatcaatctctttatataaatatatatatatatatggaaatttaaaatttagtccaactcacttgcctaaatgaaatttagtaacttaacaatcattacattacatgtccttgcacttgggttctaagagcaagtttggtttgttgtaagtaataataggaaaattacaaaaatatccaagaactttaaaaa

SEQ ID NO: 81500 - DNA, 2265 bp, Cannabis sativa
aaatcacgtcaacacgcctatgctagttagggtgttacagccataccattggaccttcgagaaaaattgaattaaaggcaagagcaactcaatagagagatggaagaactcaaaaggagaataacatcagcggcatccacagagtgcaattgggatggagaagatttcgatgatgaatcttctttcttgagggaaattcaagctgcactattgccactaaaatttaaggagcctaatttgccagttcatgagtggattactgaccaaagtaccatctagatgccttcaatgaggtgattaaaatgaagaggatcacaagcaaagtgagatgtcagttctttgtcgtgatgcttagaagcgtaacttacaaatggttcaaaagggtatctcttggatccattacatcgtggagagagcttgctgatgagttcttggctcaacatcatgcctcctgcgactacaccttcctcaggacaagcccaacaaacatcaagtaagaggaacacgaatgtatgaagagttaaatctaatgcttcgatgttgaagtagctaaagtgggcaggttaaagaaagaagaatatacaatggcgattgccatgggagttctatgcaaaagcgaaatgtggaatagcttgttcaagagagaatttaccagactagaagatttctatgagggagccaaagaacaaatcaacatagaagaaaaatacgagattctcaatatgggcaggaatgaccaatgtgggaaaacttaaattgagaaaccgcacaaagagagagagttcgatcattaaggagatgatcagagcgaaaaggtcaagagagaggtggagcgacatttctaggaatacacatgctacacaaagttgagtcactcaagggaacacatcttcttaaccattgagcaccgcatacctttcaagaaaccaccccatgaagaaagataggtccaaaacggacttgaacaagtattgtaaattccacaaagacattggaaattttacaaaggaatgcaaagatatgaagattgaaatcaaggagttgatacactgaggatacctaggcacgtaccgcatagagaaccaaagacttgaagatgagcaacaaaaagaagaataaagaaaaataagaagaaataaagtgttttcgtaaagaaaaatccaccaagatatcatttgggtctcacatttaagtttgcttagaatcaaggtggaaactcgttaggtgacccccaataggaatatttatcttttagatctttgtaaacaagtgaaagacccctttattatgaaaccaagatgattggaaaatgatatcttgaatttatgttattagtgaatgcttcaatgtggatgttcagcctaaaaatattgagattgaaacttgagtgttctatgccacgaaaaatgctacatctttggtaggccaggaaaggagacttgaaagacactcatggcctcgttaataaaggcaaaaataaaagaaaaataaaaaagagagatcgagaaaaaaaacaaaggaaatggtatgactatgagagggatgtttctataaaaggaatacctattttctcccattcaaacacactttaagttccatgaatgcaatgcaagaggccgagttccgcccaagggctacttgcttcatcaatagaatcacaaaacttgaaaaaggtagagtacagcacaagaggctaagcaactcccttaaccttcaacaaaaaacttaaaaaaggctatgcttgacccaagacgctataaaactcccttaacttctaatatgtaactggcaggaggttgatactgctcaaaaattctatactcccttaataattatgttacactagataagaggttgagaaagcacaagtggcagaagattccctcatacaaatgatatcaaggcacaagcgcttaaagggacaaccacagaacagagtgaaagggatagcacttaccgaacttagtctactagagagtgtaaaagaattcttagaggatgggggaaagtgttaaactcaaaaattgacagggttaattctcgagattagtcaacaattattcttaggaagcaacatacatcaactttaagagtcggtcgaggaatgactgagttgacgcatatgtaccagggtagctcgaccgaaccctatcttgggtgatcacttggccaaggtcaacgaaaggcaattcgaccaaaggctttggtgaaagaataatcactaatgagccttgagatgttattcgaccatgttcttgagatgtc

SEQ ID NO: 81501 - DNA, 3264 bp, Cannabis sativa
taagaaaaggaatctttctttttgttcttaagtcaatacaaataacgaggattatgctattaccgaactgctcggggctgaacctttataaaattcttgtgtctatatattgctttatcatattttaattgttataaactagttgtggctttctaaattagactcactgtcgttggctaaaagtgaggtaaacagttgctatatttttacatattatatctcatgactttaagaatagaactatgaggcaacaatttgcacgtttgggtgaaacattgagtagacaatctaatgttgttttgaatactttgttgcgtcttcacgggctattattagaaaagcctaagccaattcttgatggttcaactgatcaaaggttgaaatggctttagaattatttgggagcactagatggcccacatattaaagtcaatgtgcatgtcatagataggcctaggtatcagactagaaaaggtgaatttgctactaatgtattaggtgcagtctctcaagatatgcaatttatttatgtcttacatggatgggaaggatcatccgcagactctagagtgttgcgagatgctatatctgggccaaatgggttgaaagttccacaaggtatactttttttccatgtgtaatatcatacatatacgtgtaaatttcataataggtctacacttttgtcaatgaatttacaggatattactacttatgtgatacttgataccataatggcgaagccttcttagtacagtatagaggacaacgatatcatttaaattatttggatgtcccaccaaatactcctgctaaatttgtcaacatgaaatattcttttgctcggaacgtagtagagaaagcatttggactattaaagggacgatgggaaatcgctagaggttgatcatactatcctatcgaaattcaatgtcaaattattttttcttgttgcctttttcacaacctaattataagagaaatgcatgtagatcctctagaacaagtcgtagaggaaagtgaggatgattcttctgacgaagataaaagtttacgcaatgatcattttacacatattgaaatatctaacgcttggactttttggagataacatagctagatagatgtttgacctattgcgagaaaggaggcatacttagattgtgtttctgtacagtacttgtgtttgatttgcttgaatttgtatagatttttatattgttggatatttcatttctttgcattatttgtgcttaacttgtatgaatttttatattattggatatcagttttagacttatgtgttggatattaaatttatatatttatgttgttaatttatttttgtacgttaatacatttattgctacacaaacaagtagatgtgagatatacatatcttaggaaaatagatgctttgcagtaagcaacattgattccagaaaaaaaaaaaacactaatggacttcaattgaggatttaaaacttgttgagtgcttgttggagatggtaaatagttgaaaatggagagcagacaatggaactttcaaactggctatctacaacaattggaaagatagatgaatgaaaaagtttctcattgcggattgaaaggacaaccccacattgagtatcgcatcaagataataaagaaacaattcaatgcaatttaagacatattaaaaaaagcaagtggtttcggtttgaatgaggacctaacacgtgtggttgttgaaaatagtatctttgatgattgggtaaaagtaagtgttactttattcaatttaatttacaatttgattatatattaattcttttaatatgttttttattcatcgtagagtcatccaaatgcaaggtgcttaaggaataaagcatttcctcattatgatattttggttactatatttgggaaggatcatgcaaatgggcaaggtgctatgggattttcgaaaacaatggatgagattgatagagcaagagaaaaggatcaacaatttgagttcgatccatttgctcaatagatgatcttctgtgtaatacaaccgattgtcacacaagtactggaacagcataatcaagaaagagaagtagaaagaggtctagaaatgaagattcattagttatggtattgactaacacagtgaagaaattttttgaaatacaagctgctggtggtgatagtattagaagaattactgattgtttccagttcgagacagaaggtgcaagtagaagattgaaagtgtttgatgaactaaaatatatcgatggaccatcatttaaataatgaatcgaagctggaaaacttcttgtccaaaatcaagattataaggatctcttattcacattggatgatgaatacaagttggcattcgttcttggtttgtttaagtgaggtgggatttaatagctgatggtatttcaaaaaatactattggggtgactttataaaatgtaagtgtttgacttttagaaaaacttttcgccgattaatatcatcttttggatgaaactttttgcaatataaaaatacgccatatattttattataaactagataatatgcaaacttcttgaatttaaaattttaatcaatacttatttttttttttttttgagtgattttaaccaatctttttaagacatactattatgtattaaagagcttttattatggtttaaattatttattcttaagaaattattaacaaattaattttgcaattaatcattgtgacaaatatatatatataggaattacaatttgagctttttttgcgggtcgagtctttcgcccgtgacatttgaactttatttgggtcaatcactcgattcggcctggcccgataacagttgtttcgatcattgttagacaattatttttttatggtaaagaagagatacatagcctttaatatttttttaaaaaaatatatcaacaatatgaaaagacaatatcaatttaagagaaatgtctctaaagatgtattatgaaaaatgaaatttacagagatatttaaagttaaaaattctacaattcaaaaaaaaaaagaagaagggggtgggtgggttaagcccgactcgtttatcttgggtcggacctgacccgccaggctaaaagaagttgtcggatcgggccagatcgtgctgcagagatatcgtaatgggggctcgaccttgcctgagtgaggttcctatttatatgtatattttactctttataattattcatgattgttaatttttttataaaaaaatatat

SEQ ID NO: 81502 - DNA, 1316 bp, Cannabis sativa
aagggaaggggcgggggggggtgttatacattgtcattgcgtgctgtctgtcaggtaaggttgtctattcttctcattctccctgtttgcaggagaaatcacttgcagatgtgcaggctcaaattgatcagcttagagccagtatggccatgaaagaggctgagatgggcacagagctcattgaccacttaaccccagaggaaagggttcttctttcgagattgaaccctgaaattgcagatctcaaagaacagctaattaaatgcaagacagaccgtattgaggttagtaccatgggttttgttggggattatatagattttttttcatgtaatgtgatctcatacatgcatatattggcaactgatagactgaatcaaggaaatctgagcttgagactaatttaacaaccaacctcaagaggcgaaagcaagaattggaggtcatagtatcttctgcagaaactgacaatttgcaaggagaagttgaaaataagaggcaagaacttcatgatgctagatcagcagttcaggatgcaacagagcaacttaaaagtgagagccatgatatattctttgtccatgatttccagctggaataaaggtttaatgtttgcttctgttattggccaaaaactatgtttctcaggagtatgtgcaagtataggggatagaacaaagcaacttaagaagatcaaagatgagaagaccaagctaaaggtagtttttttgtgtggctggagtggtggctgtgtgttttgttgttggtgctttaatgattgtttgtgaatgcagagtttagaagacaactacgagagaacacttcaggatgaagctaaagagttagaacagctgttaagtaaaagaaacatgttccttgctaaacaagaagagttctcaagaaaaatcagggagcttggtccattgtcatcagatgcttttgaaacgtatgactttttgatctttaacgtaactaattaatctcacacacacacacgtatttatatactattttatagtattatttatttgttttattttattgtgtagaactaataaattgtatattcgtatttggatatgtaattctattttattagttccagcaaaaaaaaaaaatttcgatcatgtcacgaaaataaattaataatcaaaagcagataataaaacaagagaagtatgttaacacttaacaccattaaactccttttatcgtaattgattatttataagaaaatggattgaaacatttagagaaaagaaaacctgtagaagtctctccattttcatttatatatggaataatgttattgcgat

SEQ ID NO: 81503 - DNA, 1481 bp, Cannabis sativa
  modified_base (104)..(106): a, c, t, g, unknown or other
tcattataaagcaattagaggaagaaaaaagatcgaggcatgctgactcagtgaagaaaaaaaaaaagtgtgtgtgtgcgtgtgtgtgtgtgtgtgtgagagannnagagagagagagagagaaagtgtgtgtgtgtgtgtttcaaaatttagagagaatgagaagagaattttctttgagttttttcttagaaaaacaagtgtaagaaagtctctccttaacaaaggtcttacaagaaaaaggaaatcctaagactttttcgttccaattaattagataaataaaataaagtaaataaaagagccatgctcgcgtcaaaaaaaaaataaaaataaaaaaataaaagagccatgcttggtcaccaagcatgcttgaccaaaccctataaggcttgttctcttttattgtcctctttattatttcaaagcccaaacttaaataatatctttccttttatttatgtcataattaatttattccttgtatttaaatattactttccataaaataactatatcatgataattattttcataaaaatattatataaatacttattataaatttatgacaacaaaatgtctaattaataataaaatctttataaatatttcttatttaatctataagtattcacattattctcaaaattggatccttactaaaacaatgtgaatatttatggattaaataaatattcaaaattgacaaaataataatgtgaatatttatggattaaataatcaattgttgtaacctaccgtgaaacattatcctaaatactgcagagactatgggcccatgtaatccaggctcccaataagatggggaatttacactgtttcttatttttagtgttacatgtatataatgattttttctatttttttatatattgtgtactgagtttttgttaaaataaaattttgttctattttattgatacgtgtcaccccagtttctattgtagccctttttattatatttaaagattgtaaaagttatgatttgattgttcatgtaacttttgacaatatttttttgattacgaatgatgatgaaaaatgagaaaacattcttttacacgcttgctttaaatatttgtattttttttttttttgaaacataaatatttgtacttatattagattttttctttgtttttaattctatttttattgtctctccctgttcaacttcttattcattttttcttttttcttttttttatattttgtgtttaaaaaatcacacatgtttctagtttttgttttttatttttttgtctttgtctttttattttctatttttgtttcaattttttttttctctcttgtttttgttagtaaattagcaatgggtaaaaaaaaaaattcaaaaaattccctatagccctgccctatcttttatagcttccaaaagaaaataagttgttcattctctagaaaagagaaaatcaaaacgttcgaaaccgatcatt

SEQ ID NO: 81504 - DNA, 1652 bp, Cannabis sativa
accacctccaagcccaccaccgcctagcccacctccgcccagcccacctccacccagtccaccaccgcccagcccacctccacccagcccaccacctccgagcccaccaccacccagtccaccacctccaagcccaccaccacctgcaaatccagaaagaccagatcacagatgtgggccttcaactgccaacaatccatgtaatccaggaaggtgttgcagcagctatggttggtgtggtagcacatacaaatattgcagcggaacagattgtcgataccaatgttggggtgaagaacgttggattgatctccctcgtgctttgctccaacatgacaatactaccactagtaataataatgttattagcaacattattagtgaaccaattttcaacgaaatgtttaagcataggaaagattgtccaagtagaggtttctatgattaccagtcttttgtcattgctgctgcttctttttctgatttttgtactactggtgatgtggcaactcgtaagagagaacttgcagctttctttgctcatacatctcaagcaactacaggtaattaattagtacatatacatagtgtaataatatatattatattatataattttaatgaagtccaatttgtataaatatgtaggagaatggactagtacaatcgattcatatgcatggggactttgttttatcaatagaactgccggtgatgatgattattgtacatcttctcattggtcatgtgcttccaacaaaacatataatagtcgaggaccttttcaacttactcagtaagtacataataatatatatatatatataaatttccatttatatatgagtttgaattcaaatgttatttgttgacgatgcagcaactacaactatgggcttgctggtggagcagtgggagtagacttgataaacgaccctgatttggtagcaacagactcagttgtgtcctttaaaacagccatatggtattggatgaatcaacatgacaacaacccttcactccatgacatggttatcaatgctaattcaggaactcataatcaagtactcccgacttatgttaataccaataatgccagcaaaaacactgttgggtactataaaagatattgtgacatgttagaagtcagctatggagattacttagactattatctgtctgactttccaaatgcttctggcatttttatgcctgtccagatctgataaaatcatttagaggccggtaaaaacaacactagctttattatggaataagaaagttttatatattggcctcatacgtgttacaatattttactattgcatcaaataataaggagccaattatttggtataatgttcattgagcttttatgcattttgattgaataaataagttattctctctttaatatatttagtacgtacttacatagctacataattcgaattcgtatccaacttttatatacttatgtatatttattctgaattattattggttttttacaattatatatatgtcaaattcaaaatatttacataattgcggtcggataaattttgaatatgtttggaagaggtttcaattgttatatttttattgtaaccatagttacatttttttaagccattagattactattaaat

SEQ ID NO: 81505 - DNA, 987 bp, Cannabis sativa
  modified_base (32)..(43): a, c, t, g, unknown or other
gtaagaataccaatcgctgattatcatgccannnnnnnnnnnntgaactgacaaatcatggaattaaactttttaacatttaacaatgcttatattccattgtgctgacaacactataatcataaacaaatacatatgttctggagttaatagaatttataatataatcataaaataaattatgcgaaccatgcaacatagaatgtgatttctgatctttattaattagtaaatcttattatattaaaatgggttttatttagggcacaaaagccaacacaaggttcattcttaactaagcattgggtcgcggttccacatccaaatttggagaaatcttacaggctgccataattggtatcgcgtttcatcacaacagttggtgttgttcgtatcaatatcactttgttgtcctgggaggacaactttacagagtacaggctctacccaaaaggatttccttccctagcccgtgaaggagaagaagaggaaattcagtgcgtgtcgtgctgagggagctcatcaggagaatgaactcatttaactcaatcgtgaagctaagttgaagggaggtacgcgagccaagcaatatgctcaggagcgtcttgagcaggaagatgaggttgaggaagagccagagactcctctcaaaaggaagaagaaacttctgaccgagcacagtcctatcgaacatacgatttagattagggagcctagtttacctgctcggctctccactcctatggtaggaaaggggaaatccgtcctggatgagcaagaagactcgtcagatgatgatgctccatcaagtcttgctcgggcagatgcttctgttgatgtgcaagatactccatctttcctttaactttcctaattattaagccttcacatttctcatactttttcctaaccatgttgctttcatttcgtatagacatgtctcagaaaatgctcgaagctctgaagaagagagtaggaggaagctcg

SEQ ID NO: 81506 - DNA, 635 bp, Cannabis sativa
tatggacactttatatggctttttcaaagtttggtcatagtttatgggattttaaagtccatacagatggaattcatttgtgaaaagcccatagtgtgtgtattgtagtttatttaggttattttagtaattttaggtatttaaatttttttggttcagttttttttttaacataaccgtttttttttttgtagagttttgcatgtaatcatcacgattagatggttgcttatacatttgtattttacttttgcagtttccaattcaaacctattttccctaaactgcctatatcattatctttctccctctctttttttcatttcaccatttattcatttccatctttcttcttttcctctttcgttttcctcctctgttttgttttttttttttttggctctcgatattttggaggacatgcattgccgccattggtcttcgagtaaggtatacgggtgagagcttccattcttcgtgtgttcttcaaggtaagcatgggttttttccttttttctttctttgattttagggttttttgttcttttcattttgtgggtttgttgaagttgcattggttcttaatccttcttacattcttagattttcgtttttatttttttattttgaatttt

SEQ ID NO: 81507 - DNA, 630 bp, Cannabis sativa
tttgttttactttttcagatagagagaaagaagagaagcatatttctacctcaaaatcaccactagatggatcagcatttggtgtaattttcatgccgccaccaaaatactttccattaccaatgcaaagggctgtcacttgaggatatgtttgccactcaccttcattaacctatatattaaatagaaaaaaaacacacattgatgccaaataatgttagaatggaaaataagtaagcaatgtgatgatgtctagtagtaggatatgaattacaaatgtaaaaaagaaattataatctctttctgagattagtgaaacatatctaccttgattctgaggtcctgattacggtgcccaataaaggcttgcaaagcaccaataacatagcacaagtttccaaatttcttgtatcttgaggcaaaaaatcctgcttttgcactcctgcacatatttcaagacacaaaaaaaagtacgaagagttaataagattagaatgagttcttgttgaaactcaacaataatattttctgaggaaccttacaaatgaatatcagcaacattcaagaagtaatgggattctcctttttctccatcaatgacaccaatatctattcgtgacctgtgtccta

SEQ ID NO: 81508 - DNA, 1920 bp, Cannabis sativa
caattatatttatcaactagttaaaattttgagacaaaaaaattgatttcataaaataactaagattaaaactcacacacgaaaatcagttaaataaaataattgaaatatcaggaactctgttttcggtactgtaaactattcgaaatttttcaaaaatttacagggttgatactgtaactatatcgaataccgctatgaaaaaaaatatttcggtgtgtaatttcggaagtagaggttgtaattaacattcctctttaaaatacaaggaagtagtaattacacagtttagcaattatattatattataaaatacatgaaggttgtaattacacaatttagtaattgtactatattttaaaatacaatagggtggtaattacacagtttaataattgtactatattttaaaatacaaggagatggtaattacatatgaattcttaatatcttgtttgataaaataaatagtaattatacaagaaaataatatttttagtagttaatttttaaaatagaaaatttatagaaatcacacagagtaattacactcaattcttatagggacattgagaatttgagagtgtaagtaaaaattaaaatcccttaattacctctaattacatagttgtataattaccttcaattacacacaaattcaatttcatcatgactttccaaactcactttaccatttaactgtatatatggcttgtaggtatgttagcaaatgattttataaaataaacaaaatgtaatcaaatagccatatttacaatgattactgtaattcgaaagaatttttcaaaagtaaagaaatagaaaacaaaactctacaaatttcacaattccgaaccaaaatttttattaatattcactatttaatcttcctaaatatttaaagtatgcaatagtacactctactccactctccacaaccttccatacacaagaagtacctcaaaatattaaataaagaatataaatgcacttgtatagtactatatagtatttacttcacagccccacaactttcaagtttcaacacacaagaagtacctcaaaatattaaatggggataagcatagcataatacttgtttgatttcatgagagagagagatgtaacccatgaagtgagtagtcactgctatggtcaaagatggggatagctttttaagtccttgaaggacacaaaagacttaaaagtaaaactcatcataaatataaaaatatgccatataatatatatcaaggaaaagttaactctattttaatcacacactccttgtcttttgagtctttctttaccttctctgcacctgcttctgtcatttcaaaaccttcatcaattctcacaaagatcgatatatccttgtctttatcccattaccttcaatagtaacaacacacaacactttattaaacacttttactctactcttctcttctctatgcccaagtgaaaatagcttatcaacttaatagtattaaaccaggttgtataaagtagaacaacataagtgaaaaaaaaaaaaattaaataaataaaaaaaaaaaaaagttgagaacttttcccttcgtgcactatgaatttattctgcactaattgatgattgtttctgatgaagtaaaagaatgatttttcatagccgtttaaacacaatataaaacccctttgccacattctctgtactgcaacaaacacttttttttttcacaggaatcataatcatgatgtaatattctctccataatcttaatacaaaagtttttattcaccatgattattattataagattaagttattatgctatattcttagatataaagatgaaattaatataggtaaatgtatattattttttaaacattgaaagtccttcatttccttcaaacctaatcaaccgaaagaacaca

SEQ ID NO: 81509 - DNA, 1016 bp, Cannabis sativa
gtaggtgaagattttttaatgggcccttatacccgatggtttaaaaccgtcgggtataagactctcctaaaaattcgcattttattaaaaaatgtcccctattttatttactacgattttaaaccgtcgggaatactaaatttttcttgacagttttaaatagttacttaatttttttagcgacggtccccgaaaaaaatcatttttaataccgtcgtaaattctaatatttgtagtagtgagatcatggattgccttccaatattctcggacagaagatcatatccttctaaataaggaaagatgataattggcaatcaggtaattaacgtgtcattaattcttacaaagataggatatggttttgacaatcaatatcgtgatgtggcatccacatcagcatacacaaggcgccctatgaaccagacttcactaaataagtctaaagttaatatttcatttgtaaatccccctagaggaaaacatggcaactaatatgacctttatgcactataaatactctacaaatcctacatgcaaaggatgataaattttttactcacatgtctaaaagagaaagtgctcataccaaaatatcaaaatatgctatttcaagaattctcatctagctcaaaaattttcgacaaaataaaaaactctcactcaaaaggtttttaaacatagagactaaagctttcttttattattgggtgcattagttttgatatgatacatttttttttatttgataacgatatgatatattttaagtataaaacaatttagaaatatcaaatggaggaaataatttttatacaacttcttttcaataaaaatagaattatatgtaaagtacacgtcttgtcctctgacatgtttaaggttgtttcttgatttgtttaaggttgttttggtgtgctagtattttattgagatctgtcttattggttatggcctcgagtagtaattccgttggtgaccttgccgagcagtatgagaattttcagattgatgat

SEQ ID NO: 81510 - DNA, 1970 bp, Cannabis sativa
atgacatgaagacagttcactactatcaagactgatctaaccacatcctcaaaactctttctgggcttttgaagtatgatccaatcattctcctttgataatacagatatctcaggcttaacatcagaaagatcaaacctccatgctttaacttgcttaaacacttgttgcaacccattatcagcaatcccatttaggaaaacctgtggcttatcaccaccaattttttcagtaaccccccattgaattggcaaaacagaaaaagaaacaagttcatctttttcgtcaacaaaatggtaatttgaaacagatagtggcagagtctcatcctcatcgcctgatgatgacatcttcttaactttcactatcattgggaagttcaaatacaaaagtcattacaaaaaacaaacacaaaaatttattgttactaactcttttcacatatcaagagaattttatatacaaaagtcattatcaaatcagtttgcaatttgatcaacatgatacctcaaaccccctctatctcttttttacacttatcaaacgaatttcaaatacaaaagtcattattatcagtgccatgcaatttaatcgaaaacaagaaaaagtaaaatatcataatcttgaaaagaaaagaacaaaaagaaaacatatctttctaacaatttaatctgataacaaagtaaaaagaagaaaaaaaaaagaatgtagttatctttcctataaacagaaacatatttttcaaaaatttctaaactgataaccaaaaaaaaaaaattaaagaatgtggactaacataagctttgatttgatcagaggaagttcttgcttgtttttttttttttcgaaatggagttcttgcttgtttctcagtgaagatttggttctttagattttatatttataggcagtttcctcttttttcaaaatgtgaaaaaatattggtttcttatttgtttgttatttatattatttttttttatcttgtttaacaaatatattattattgccttcaaaaaaaacaaatatattattattgaacactaataacagtttaaaagaaataataaaataaaagatacttcctatttaaattaaatttgaaattttactcaaaaaaaaattaaatttgaaattaaataaaatattttcaataaatttaattacttagtatttatccaactatccgaacatataattatgtttctcaaaaaaaaaaaaagaaccctacaattatgtctttcaaaaagaaaaagatataattatgaaaataaacttttaaattcaagtatatgcataagtaaacctaattaaatatctaagcctgcttttaaggaaataaataaataaatatttaagtctatttcttggaaacttttaaattcaaacagcatgttaggcatcaaaattagggctaaatttttgtaaactgtccaattcgaataactcacttaaattaaattgagataattcgatgaaaaatgcaaactaaaaaactcgatgaaaatataactagtctaatctttatattggaccaaccgaattaagagagtttttttatatgtatatatataatatatttttaagatggaagaattaaactttaaattaatctttatatttatctcattatcataataattaatataacaattgaatgtgaaaaaaaaaaatagtttggacaggttaatccgactaaaccaaccaattgaagcggattgaaactttttttgtaactaatttgacattaaataaaatttaacgtaataaaatgagtgttttaaaacattctagggtacaaaattacaaataaaatacatatctcatatctttatagtaatatcctctctgaaaaaaaatagtaataatatatatttttttttttttttgagataaaccataaaaatattaagggacttttttaggaatatactatattaggtaagtttttacaaaaataacgttaataa

SEQ ID NO: 81511 - DNA, 2329 bp, Cannabis sativa
  modified_base (46)..(52): a, c, t, g, unknown or other
  modified_base (108)..(120): a, c, t, g, unknown or other
aaaattaaataaattaattttaacacaaatataattttcctatttnnnnnnntctcttaagaaaaatatcaaatatttaagtgccttgaataaaatcaacttaaatannnnnnnnnnnnnttaattaaatatatctagaaaataaagctaaaaagctcctctgatctcgtttctctctctcctccatggcgaggaagaaaaaaccaggtcgaaggccgggcttgaaggtggcgattggttctccaaagaaactggatctggagaaggaaagctctgatggctcactcgacagtcatgaacacttgctggttcaagttccagaacagcacgcagtggagaatcatgatgaagatgaatccccattatcagctaggagaagttgggccgaggaagtggaaaacctgcaattggcggctcagaatcattggcaacacttcttaggaggtaagatcttaaatactgatgctaaattgacatatactgaaccagtgattaaggagggtaggaggatagcccatatagaaatggaggaggtgaaattgaaagaagaaagttggaaatcagctgtaatttgtatggttttgggtgctaatgtcccagcagtggtgtttgaaggctttatttgtagaatttaggggcacttaggtattgttcagatagctagaatggctacggggcttacaatggttaaattcaatgatgaagcaacacgaggggaggttcttgaaaatggaattatacaatttgatagcaaactggtcattgttagaccttggacaacagatttgaatgttgttaggattgtgaaattggttcctctttggattacgctacctaatcttggtcttcaatattgggggaaaaaactttgagtgctctcattggcacagtggggaagccaattatggtagataagcacaccaaggaaagaacaagagttcagtttgttcgtgttcttgttgaaatggatgtaacggagaactcagagcgctctttttggtttgttaaagaatatggacagctattaaagcaacgaatagaatatgaatggctgctagttaaatgtaaacattctagtgggtttggccatataatggctgaatgtaggaaggttgagaagcctaaacaggaggaaaaaaagcaagaaaacaagacagcaaaggagggaaattttgctggtgttcaagctgtagtcgagcacattaatgttgagatggcaattgtcagtagtgaagaggttaaggctgcttcccctgagactgctattgttgctactacagtaactaagaaaaaaaaaagccaatggcgaagaaaaaattgttgttgtcaaaacaattaatgggggctggattgcccctaagaaccgtgtgtctaagggctctggttcgacaaggagaggcagtgacaagggtgagaaagtgcttaggaattcctttgcgatattaacaaggggacagaatgaagaaggagagggagagaatgacttcagcttgtgttgttaatggatttttgcaatattagttgttggaacgttaggggtttgaataaaaaggagaagcaagataaagttgctgaagtttggagagttaataaagttggcattggagcccttgttgagaccaagattaaaggggagaaatttaaaaaaatgatggcaagtaacttctcgtgttgggatttttattctagtattaaagtggaaggtcggattctcctgctttggaggaagaatttttttaatgttgaagtcattgaggattccaagcaacatgttcattgtcatatcaaaatgatagggcagaaaaaagattactttgctacttttatctatggagcaaacaccatagaaggtaggagtgatctttggaccgccctatcaatgataaatgtttctaaagcttggatcattcttggtgatttcaatgcgatatttcatcatgatgacaagcagggggaaatgatattagtaactctgagcttgtggactctaataactggattgcttagtcttctgttgggcctatgaagcgcacgggttcgactttcacttggacctataagtaggataataggatcttttctcgtatcgaccatgtgtttcacaacgacgagtgggatgatgatttttcgaatacatctgctcatttctctggggagacttgttctgatcattgtctttgtgttgttcattcggttgctacagaaagtattggaagcaaactgtttcgattctacaacttctagattgatcattcggattacaagaaaattgtgttggatagttggggcaagcctataagatgttgttggttgtaggggatttatctaa

SEQ ID NO: 81512 - DNA, 1468 bp, Cannabis sativa
cgtcttcttcaatcaaactcaattatatatcagagtttatcaaattgaattaaatactctataattgagacacttaaaaatgttacatatagattgattacctgaatctctctcttctgaaggttcttgtataattcttccaaagcatggatgccactggtgtcaatgtcagtaacagctacaataaaacattatttgtgatgatcaatgccaaatataagtaatgaccccataaccactatacaagaatgatttttggacgaaattaattttttttattgaaaagttttttaataaaatagaggtagtaataaacaaaaagtttcttccagtctaaagtatcaatttcgacaactataataaaaatcaccagacaattattattgaaaaaaaataattataataattaattgcttacgtgacatctctacaatcaaatgttgaatttttggtagatgacattcatccactcgctcttcttcctcagttagccacctcagaattctgacaccaaaagtaaagtttgactagttcgatatatgcatctttctaataatttttataacaattctcacatcttcctaattaaataattaataataagagtgctgattaagcatcttcctcacttttgtaatataatttagtaatataaactataatcacagcattagatacctgtgtttaatatagttagagttagtaaagtaaatagcagaatcaactctgataattaaaattccaggaatttgtcttgcttctgggtattgcagggtgttcctgtacacactagtcataggtagctttccaagtacggcagttcgtggtctcgtcacttgcaaaagaattttagcaagagatagagaaacctataaaaataattatagtagtcattgttatatgtataataattaaagttacatgatatacaaaattaatatgagttagttaattaattaccgcaattagtaaaccaatctcaacagaaatgaaaacaacgccgaagaaggctcccatgcaagcgaggaagtctagtttgtcgatcttccatatgagaattgcagcctcaaagtcgagcaaacttatcacggcagcaatgatgatggatgcaaggatagcgctgggtgtgtacttgaataacggtgtgatcagctgtagcgttaggaacaccacacccgccattaccatgttcgacacgaccgtgtggcaccctgccatgttattcacagccgtccgagcaaaccctcctgccattttaaattaataatcaatttctgttaattaattcacctatactcacttaaaatagaacacatgcacaatcgttaagtgtagcacttaaaagtacggtgtaattattgctttgtacttttagtacatcgcattagtttgtatattttatataatggctaaatcatatgtatttagtgctgtcaagatattgtatatatgtctgtttgtgaagttt

SEQ ID NO: 81513 - DNA, 954 bp, Cannabis sativa
aacaagggcctagaacccaggttgacacctgggtcagcccaatgaccatgttgacattttgtcatcctgggccaattccattgattttttttagaattattccgagcatattctcaattttcagcaaatatcaagattcaactatttatggggaccaaacgaaacttctagctggcctaaacctggacccagcgccaaggtcgacacttggcactgggcctaacgaccaagttgacatattcatttctcgaaaaagtgttccgggcattttttccttcatcaaaaataacaaagatacaagaaaacttggagagaaaactacagccacaagggcatgaacgttgagcctagtgcctaggttgacttggtgctggacccagtgaccaggttgtcaatcaacatggttcgctagtttagatcattcaaatgttgattcttctccaagcgttctctctagaattgtcaaaaatgagggaggagaccttctcctcttgttctaaaaccttggaagtatcaaaacgacatcctagaagctccaaaatgacaaccgagcgaccaggttgacatattgccttgtgcgataggttctgcttacctgattctcattccgtctgaatgaatttattaacttatttttcacgataaataactgagagccatgaagttagaaattcaaattcacaattcatattttcacatttccaacaaggtgatttactcaagaacctggtaatttcgagtctcccgtttccatagaacaacaacatctccaagaactggttactagcttcaccagaacacaaaaaaggacaaagtgatttcaaaatgtcacttgggcattaaaaaatacatacacggcgcatttcaccacttacacaacaactagtataacgtaacatgtcaacctggtcactagaatgtcaacctaatcgtttggatgtcaagttggtctgt

SEQ ID NO: 81514 - DNA, 703 bp, Cannabis sativa
gggatgttgacagggcaagggcacagctaagattggggatatgttttcttccactggacagatgtgacctgtctctaactcactaccatgcacaaacttaccaacttattatctattatagaaagaagaaattgaataacaagatcttgtttggaagttatatatattgtataattactattggatatgtaataacataaatatttacataacataatattacttttactttaaaaaatactacaaagtgtgtttagatataaaataactataggtagatgtgtgtgtcttgtaatatataaacgcttaaataaaaaaaaataattattcttaacttgatctttttggtaagttaataaagctaatataatgtacgtacgtgtaacatggttaaacaaaaaggaaaaccataagcaattattatatttgaaatattattggatgttcaattaatatgtacgtaattggaatatattgaaaagttcaacacggtttggttgtacataaatcttacgttacactaagatttatatgattatatgttatatagctttctaataaccacatctaaggagtatttccataaggtgtcctttgatcaataactgatcagaaaattattttatattaagttgatgttgcttgtaatcacgtataattaattattttttaattaagtgatgttaagtgcaatacatgatgt

SEQ ID NO: 81515 - DNA, 1258 bp, Cannabis sativa
tttagggcacaaagcctaatagtattaataggtcaacttaaggacttctcaatctcgaataatagaatgttactttacaaggctcaggtttgtgttctgagcagtgatgagatcagaaaggaaatacttgttgaggctcatactacaccttattcattgcatatgggactcaccaaaatgtatcaggacttaaaaccctatttttggtggtgtggaatgaagaaagacgtagtttaatacgtatcaaagtgcctaactagtcaatagatcaaagcaaatcatcagaattcggcagggttattataaccattaacacttcctgagtggagtgagaagatattactatgaaacttttggttggtttacctagaaccatgggaatgtattagtatgggtcacaatggaccatttgagaaagtcatcacactttttgccaatgaaaagaacttataccgtggatcagtatgcgaagctatatgcaaaagagatagtgcattttcatggggctccgaaatccatcgtttcaaacagagatcaaaaatttacatcaaaatttgggtgagtcttgggaaagctatgggtacgaaccccttagactgatggaaagtttcagaggataatacggatattaaaagatttactgtgagcctgtattatggactttgagggttcatggagcaaatgcttgcctttgatagagttttcctacaccaatagctatcagactacaatagggatatctccctatgaaaagttgtacagtaggaaatattgttccccgattcactgggatgagactggggaaagaaagtagttgggtcttgagttagttcagtggaccaatgaagtaatagggaagattaaggcttggatgcttgctttacaaaaaaggcaaaaaagttatttagatccttagtagagagatattgaattttaggtaggagaccatattttcctacaaatttcaccaatgataggtttaaggcgctttggaaaaaagggaaagttgagccctaggttcatagggctattcgagatacttgagaaggtcgggcaggtagcgtatcggctaaccttaccaccagcgttatcagcggtacataatgtatttcatatttcaatgctgaggcaatatgtgtcaaacccgagtcatgtctttagttacacagccctagaactacaatcagatctatcatttgagtagcagccaattcaaatccttgatagaaaagaaaagtttctttggaacaagaccata

SEQ ID NO: 81516 - DNA, 1237 bp, Cannabis sativa
aaaaattcctattctaaatatggttagattacaatttactaattaatttatttttcaatttgatttcacgaattaattattaaaatattttgacaattaatgtggcaaagatactatttgatggactttagtatgcttttgctaatctttaattttattgttagaattctcataaattaattagggctaaattcacaatacatcatttttatcaaaactgtaacaagtatctcttagagctaaaatagaagagaaaatatgatctacttgttcttgaagctaatttagtggaagatgataatttatggaatgttgattttggagccactactatatttgttcttctatgtagatacttgattaattaagggagttggctgatggagaggtgaccatgaggattaggagtagagcataagtgtctgccaattgtgtatgcaaagtccgtttaaaattaaataataagtttttattgttgaacaatatttattttattcttatttgtaccagaaatataatttatttatctcttttgcatgaacaatattttaacattggttttattaataatgagattattatttccaagtttaaaatgcctatttgtagtgcaaaacaaagtaatagactttatgtactctgacctagtgagcaattaattttaaataatgaattgtttagagtagttttacctcaacaaaataagaggaaaaggtttctaacgattatgaaatatatctgtggcatctacatttaggccatattggcctagacagaataaaccgattaacaaaggatggtcttaagaaagtaatgaaggtatgtataataaaataacaaacaaatgatttttacgtggtttaggtgttaattatccttagtcaacgtgtccattttattaggctcatcgatcggtggttgtttatacaaatacaaaaaggatgtacttttaccccaatcccttgtgttcctcttgaagaaaaagaagcttaataggaatattttgaagctagtaatggggttacagtaggatgttcttacaagggattagtcttcggcctcagggcgaagagccaaaggatggaaagtgaagtcaggtctccctctctccatgtgcatctttgggtatttataggccaatcccctcgcatgggccacccttgatggatcttcatgcagataaacccccaccgttggattggtaggtggcattttttccatgtggtctttactgatg

SEQ ID NO: 81517 - DNA, 1304 bp, Cannabis sativa
aatctatcatccaatatataattgaattagatctagataaacctaaaaatattgaatgtggtccaataaacacccttagcacttaccactatttttttttttttttgataagtaccctaccactagcatttataaaaatctttatcatgtctaactagaaaatttaatgtgatgtaagtttttcatcattttgttcttctattcaaggctcaagcaataatgacaattttttttttatttacatttctattctatataaaatgtatttacataataaaatttttagcttaaaattattttttaattttcttattaattttaacagaatatttaattacttaataaaatactcttaattaattttatattattatatttatatctaaaaaattagtttagatatttttatataagttaaatttaaatttaaaacataaaatgtggtagatatttttaacaattttttaatttaagtttgatttttgatttttcaattaatttaattggatataagttttaatttttttatagttaacattgttttcttaggtctaataataatattatagtttcttttttatttatttcaaataaatatataatgtgtatatatatgtttatgcagacattaaacaagatattccttcttttgtgtcctcataatatattataatttatcaattaaacattattttagtctgcaagaattcataatttaatttcttatcttcaaagtttttattattttttttcttatcttaaaagaacataataagatataaaaggagatagaattaatcattaatcatttttagctaattaattaaattaacacacaacgattcattacgatatctcatttgatttttattatacatataaaatacatatatataattaaagggtacaccaatgtaattccaatacctttgtataaaaaaaaaaaaaaaatgtattacctaactaaaaaaattaactatacatgtattgcatttaacaaccaaaattagaaaagttgctttcacatatttgtttgcgaatctttaagggcccatttaaaactcaggatttgactgaactggataagattaaattatgctaaaagtaatcttgtgtttagtttaaaaataaactgaactattttatttatttctttttttaaaaaaaacttaaattacaataaaaatatttaataataaataaataaaaaagaataattttcagcaaaaaaataattaaattataaaataaaataatatattatacataatcaaatatatatcataaatatataataaaataat

SEQ ID NO: 81518 - DNA, 773 bp, Cannabis sativa
taatagcgatataataccaaaaatactagacactaataattttttttttactaattctcttataatattttactaaaataaaagtgcttgttttgttttattcttcttggtctcccttcaacaacttttaattgcaagggttaaccctttctttagacaagtagaataaagagggatttggttcagaagaaaaaaactaaataaaagtgcggctcagaattgaggaaagctttagtcggagccaagccaagccaagccaagccaatgcagtgttaagcaaaaattacaatactcaccactagaatatttctgtatatgtctctctctctcttagttggcttagattcagcaattgtttattgattaaacaagaaagaccattagtgccatggacagtaggatacacctaataaagatacaaatatatttaatctcttttttcttagcaaatgtatttttctcaacaaaaaaaaataatctgtattctttcgaactaaatcttttcgccatttggtcatacatacaacatctattgaaactatgtaaaattttacgaaaataagaagtaaagtgtggaagtgagtgaatagagtcttacatgagatagaaatactttattaaaagtgtatttaaggtataaatttagaatttaggttggggccttaaggagtactaattttgtgtgaatgggtaatgactcatacactaatcatcatagtaataagaatatgaaatgtgatatttcaaaaattctctatcatgtaataaagctc

SEQ ID NO: 81519 - DNA, 2302 bp, Cannabis sativa
aaaggcaaatgagaaaagatgaattattaaatgtttataattagttttctttcattagatatatgtttctatattgttgaaaaaccagtttcttttagttgtattttgaatttagtagataaatacaatgttatatagtttaaatggatatattttgtaaagataggatgttgaatgaatcaactttttatcataagtcattacatttaagttatataaatttagtttccaattaagtttttatttatttgtttattttttcaatatctttttaagaatacttactttgtattgatgctagtttttacaccgtattatttcattttattaaaatattgaaagtatacttaattgagtttaattatttttttgtaggttaattgtattgaaagtagatttttggtaatatttaaatgaccattgtattatttgatatttgtaggtaagttggtttttgaatttactttttacttgtgttatcacataacacaagtaaaattaatatctaaaatatatgaaatattccataaattttaaaaacaaagtatattactattattgtttctcatacttatatgttaaattaatatacattatataatttgtattatatttgtatttatttattgcattaacaatttttttttagtcaatcatataaatttttcacatagtgttatttattattatattttattatatacaatttatattattattataatatattctatttttctctttctatataaatttacttatttttttttctctgataataactgcaatgataggagatttttttatagatgataattggaagtttttgttatgtttgctgatggtattaccccaagattgagattatataatcaccaattttatattgaataattggagctttaaggtgatgagtttgttactgccagagatggatgttgtcattgacagagatggactaggtccttgaagaattttgaatcacaggagaagaacaatagtagaattgattggaataggagaaagagggatgttgaagcaattgcaagagagagaaacaatcaaagagcagaaaaaaaaaaaagattgtggtaccgcatgaaagagagttgtttcaaaaaataattttgttttttaatgttttgtatggcttttttttatttataaacccatatttttagtttgttttgttaaaaaatgccatatattgtagcattaagttttcatgctatatttatcaaaactttctcattttttcccagagttttgtaaatacccctaaaaatattacacaaatacattgggtctgctttataaactagcacaccaaccaaaaaatactaatctagaaaagactgtaaaaaatctaaacacatttaattttagatttatgcaaaatcgtgcagaaaaattggttcaaaattaaaattcaaccttgaattacgatttaaatatcataaaactaatcctcttaatatcaattttcaaatttaaaaatgtagatctcttataaatagatctggagttctcgatcaatctaaaatcagctatgatccaaaaaaaatacaaaaataataaaacaaatgcttatctcattgtattgacgttgttttccagatttttaatttgaatttgatcgtatcaaatcatgaagagtattaaaattctaatagatctacagacacatacatcaaaaaattgttctagtttgttaagtttatgaatgattttattacagttgcataatggttttgctaaccctctgaaacttgacatatcgttgattacaaattgataacgagacaatggtatttatcataattacatgtgttatccctattaggctacttttagcctatattttggatcgactttatgttcgtttttcgttattttaggacggaattatgcgtgtttttcaagtttttcaggttcctcagagttacagaggtctcgggatgcaaaagtgcattaaaagatgagcggagccaagaaaaacgcgatttttcaaacttacgcatatctggccacggccaaaaacaccatcgccgcagccatagtgaaattacagagacatgtttttgtaggcttatctggtcgcggcgagatacaccctccccgcggccatagtggacttacagaatcaacaattttttatgcttatctggccgcggcgaggtacactctagttgtggcgagatcccatacgaccaggggcaaaatcgtctgaaaaaccctaaaaatcacttataaatagaaaactgcgattgaaagtcaggggaggcgatttggaaccctaaaa

SEQ ID NO: 81520 - DNA, 1917 bp, Cannabis sativa
  modified_base (52)..(57): a, c, t, g, unknown or other
acggggtcttaacatattaaaattcacataatttcacatatattgaactatnnnnnnatataattcctcaattattcataattatctaattagggcttcgctaatctttttcttaattccagtgtattacacttgctgaggaggctcaacaggcaaaccctgttgcctcagcctctagatctctttgtcttattggtggattcagggttgtatttctaaaaacctttgttcccaatcctaaggagcttgtggttgattaacattaccatcgccatgagctcttctacgacctctaccttagccataaggacgagagggattctgacctacctgaatgtctctagtctcaatcatattatcatgactcctcgtgtttcatcgagcatatattttataggactagcctacgaacccgtaagccaagtcggtcaaacaacaaaaatataaattaaataccacatacatggaattttaggcaatgcattatccaattaatacattattaacatgcttcctatcatgcttttctaatcatataaattactaaacaagtaaagccttactgaaatgtgagtcgagcttgtctctgatgatgatattgtacatatcttgacagtctttgaaggacaacttgcagctttgataccaaattgcaacaccctacttgtttaggcatgctacattgatttttaaattattgtgccaacctttgctaattaaagaatttaacaaaaacgtgattaatttaaacttttaaaattataagacttactaacatagttacatttttgcaaattctaggatcccgtatttagattcttaacattccaaagtacattatcttccaaaatgtctcacctagcaactataaaatatcagcccatgtcgtcccaaagaaataaatacaacaggcctaatcatcccaatacgtacaatcaccagcaagctctggactcactgttgcttagtctttgcctttcttttacctacacatgaaaccatatctgtgagtcgataaatttagtaagaaaagcataaaacatataaacatatcacctacttgcaactaagcgcccatacacctacctacaagacttaatagatggatcaagaatgttcttaacaaaagtccatcctttataccacatgcaccgagtatctttctaatactagtgctagtagggttttctcgtaccttaagtaaaaatgatcattataccacatgcactctgtactcgttctgtactagtgttcgtaacgttgtgtcatattccttaacattatattgtataaatgcacatcatacctcagccatactagtgttagcagtatataaatacataaactagcatgtataacacgtgcacatatcttatactaatattacctcattttcaaattcaaacttgaaaccaaaagttttcctgtcgatagatagcataggaataacctaaatatcgagaaaacaagaaatttttgattcttgaaaatacccccaatcgataaactgggttcccaaaatggtaaagtattttctgagatcctgcccgggaaaatgattcaccacttctggaaaaatggtggactatttttctgcagatttctcaaagcactttgattctcaactcaaatcaacccaaaagttcacaaaactctgtgaaatatctaataacactttaataaacatagttctagcaataatagtaactaagactgagaaatttagaaaacaccattattgagcctagttttcgttcttgaacttaaacttgctcaacacctccaacatccataaaaaaacccggctattaggtcttaaacaacccccttaaaactaagaaaacaaatcctaaacaactttgagtaagacataaccaaattcaaaaaactgcatgttcaaactaattcatttcttcc

SEQ ID NO: 81521 - DNA, 889 bp, Cannabis sativa
  modified_base (660)..(663): a, c, t, g, unknown or other
  modified_base (748)..(776): a, c, t, g, unknown or other
  modified_base (824)..(835): a, c, t, g, unknown or other
cctacaaaccttttgaaagctcaagtcttgatcgtaggcacccccaagagtgggggcgacggaagaaactaactgttcctcaggcataggaggctcaacacccacagagtatgaaagaatgttaggcatgggaggaagagagacctcaaggaaatcatagtggagttgggattcaacaagagaggctctaagtctggaaaggtacacacaaggattggcaactaggtcatgctgctcttcgctcaagaccgagagaatttcaacctgaatcccctcgacacgctctcaacaggcaattatatgttcaaagggattagccctctcaaacattaatctagcgtatctagtgtacagattatgtgaagtgtcttctgaattagaggatgaaatgtccatgattttggtagaaggagacattgctttagtagctgacactggatgtgacccaggacgaaatgaatcaaagaagacatgctgccttgatagctccacctaggaggtaaaatcaaggtgttgagttcactagacattatgcacgaaggacatgcgccctgtcgaagatgcaaataatgcgaccgatatcacaagattagcgcgttggtcatgactgttggctgttgcgtgttttgtgccctaaacaaaacccatttcaatataatnnnntttactaattaataaagatctgaaatcgtattttatgttgcatggtacacatgattttcatgatcatttataggaagctaagtgnnnnnnnnnnnnnnnnnnnnnnnnnnnnnaacggtaaatttatccctactcagcgtaaatcatctatagaggatctnnnnnnnnnnnnattagaacgatggttaaatgtttatagcgtatctatatcttggaacatgtagag

SEQ ID NO: 81522 - DNA, 919 bp, Cannabis sativa
catatatatcataacgtgtcatttgtgttcttggaacaagaatgtcactacaacaataatagtatataggcacgtccaagtgcggtacgacctaaagtggtgccaatcacagaatattttaaggcccgacactcttattgtcgtgccaatcatttttttcctttttttttttaattttggttgcacatgggcacgacactatggtcagtggacacgaaaatgtcgtgccataaaaattttgaaaagtgtctgttgattgaagcgggaaattttcctccattacatatgggcacgaccacgtcgggccccatgccctgacatggtgtgccaattgaattttcttttatgtttggcacgacaatgggcactactggtcgggcccaattttctccttttaaaaaaaaaatcagacttggttatcatttaattcccccattttattaataccctaacccttatttcatttctcacttcccagctcttttcttcttctctgttttaagaaaagcccctttgtctcaaattccaccatcccgttcacaccatcggcgcgccccatctttctcacaacgtctttgttaccttcggtgcattagctcctccaaatcgaacctcacactggcaatttttggtaagtttcttttagtttgggtctcacatctttatttttcatcttcgtctctaacagccactccttgttttgggttgcaggggtgtcgactatggggtagttcaataggcagcggagggccaatcagaccaccaatatatttttcttatctaaatctattgaattttttttcacctattgaatttagtttcgattttggtctatttgttttgtattattattgtttgaatcagaacattctaatgccagaagaatagggaatgtagaggatcgttaagatctggctcg

SEQ ID NO: 81523 - DNA, 709 bp, Cannabis sativa
gtatttataagtttaaggggtgcaaatataactccccttaaaaaaaaaaggtaaaaataaaaaaagacaatataaaaatggtatatggtgtaatttcctcaaatttctatttcatgtaattacccccatcccaaccaaacatgtctaccctaattttcttaaaaatattttaaatagtatagattttgttttggtacttttgccataagtgtatggcgagaaatcgtttgtattcattgtgaaatgctgatggccgttctcttgacatgagattactttttttgtcctcttcaagttatgctgatttttgtaaaaatagagaaaaataagtatttttgaaaataaaaaaggacacttatttaaaaaatacagcagccgaacaatcaatattagtgataataacacaacttgggtcaacattaccaaattcaagtaaatatactgtaatatatatgggaatacatgtactgtatttgtacatacaaatacaatagtagcaatattttcattattaaataaccggactacttccctttcaaataagaaaataaaaaataaaaaataacaggactactaaattgtcacaattttttttttttttttttttttttttttgtattccactctaaaaacaagtctcacactctaatataacagacagcttgtaataattaattatcagattagattcaaattcatttttttagaa

SEQ ID NO: 81524 - DNA, 862 bp, Cannabis sativa
gtacgagctgggaagaactctcggcgagggcagctttggcaaggtcaagttcgccaagaacctcgataatggagatttcgtcgccattaaaatcctcgaccgcgaacaaatccttcgacacaaaatggtcgaacaggttcgttttttttttttttcaaattatcactcagaaaactcaattatttattgatttaagttttttctgttattcaacacaaattatttgtttcattgtagcaaaataattattgtagagcccacccatcaaaaaaaagaaaaatcatttatgatgtgagacgttagggattatttgcatctgacatacgattagattccacatggctttttaatctgtttctgtagttcagaatatactgttttcatggatttcagtaatttctctctctctcttttttgtgcatgttctaacgttgttacttttatatatatttcttttattatatttacaagcgttaaaacagaaatgctgttacattattctttacataggactgcacgggttaaacgtaggttctataactattcaaacctttttattcagttcaaacctttttattcagaaaaatatatatatatatatatatattcaaaactttttattatattataagattaaatgcatcacattattacggattacacaccaaaatatgatgtgtattcatatcaatcattcatttgttttttaaaagcgggacccgatcattttgaattgtatgcatgcaaataatggtgtatattatatgttatatatattgtgtggtctgcgtttgttattatatttatctatttattaaaatattaataagggaataaatgaacatagctttttctctctaaa

SEQ ID NO: 81525 - DNA, 1090 bp, Cannabis sativa
tacattcttaaaaaacatgagaaacaatattggatatgtatatatattgtattaggtatatgaatgaggtggatatctattgttttcttctaacctctaggatttttataaacaatatgtacatcattacatatataaataattatccggatgccgtaatatacattaattaataatctccttctaaagggactgccatataaattcctaaagaattgttaaagagtgtgaagcaccataagaagtgacatatatattattatggtatattttaatattagataagtttcacacattaattttaataaataatataataaaaaatcgctaactaattataaaatgtcacatcagtatagtgttagatactttaaaatgttaaatagcaatacttaaattccgaccctaaagtatatataatacatggtatatgtttgttatatttagtataatattatttgtgtgttcttagtcgagattgagttggtgttgagtttagaaagtttccgtcaagttgagtttcaagctgatggtttgttaaattggaataaagtaaatagttgtgatttgttttattaagcgataattttgtaatgtgtttatcgatctctgactatgtcgacaagatatagtcgatcatggactctctagctattgctggatcaccaattccagatcaagatgttgttcttcagctgctggacctgaattcgactttgtggtttcaggcatcactgcgcaaagtgacactcttactcctggggaggtgcaggctctccttcttttgcatgaaagccgcctagaacatcacaactcagtcactaatctcagcatgaaattacaagccaatgtggcattctctggtttaagaaccaattcttacagacccccacttggttccaagattgtcaattgtggaggttttcgtggagttaatcaaaataataggccccagtgccagttatgtcttcgatttggccacactgcccctgtgtgccactaccactttgataagaattgggctcctcccaaaccaggcacaatcagtcaaccaacacatccatctaacacctccctcgtgcccttgtca

SEQ ID NO: 81526 - DNA, 523 bp, Cannabis sativa
agcaaataaaatttatataggctacgtgtatatattggcgtctcataaattttctggatctatgtatacaaatatattattatatcacatattatagaattgagtaggggtggataggatccaattgttaatagcaagacaaagtcatcttataaggcatggcaactatcaatggttcagaagcaatcgagcgaaaccttcaagcaataagcgaaaggagttaagcaggttgtaaagacagtagccaacaatatctagccaaccaaagggtgcatatctggctgggaaaaggaaggttataacacaaccaggtcttgagcataggcttgctagccaaagagtgactatcaaacaaaaaagggcctattcgacaagggaggcagaactttccaaggctagttagcacgtaccaaggctggcatgaacatggaaaagctgacaggcacatggaaaagctggcaagcacatgagaaagctgccaggcacatggaaaagctaacaggcacatgggaaagctggcaag

SEQ ID NO: 81527 - DNA, 861 bp, Cannabis sativa
tgacacgataaatctcttttcatggacttaaaaccataactaaaagtttctttatcgatggataacatggaaataccctgaatattgtaaaaatgggaaaatctggggtgccctaaaatgccccaaccagtagaccggttccccaaccagaagaccggtgtcgtggggtctgcctatggatgaactgaaattctagttcttaatggtcccactaaaccaatcaaccggtttaatgcaaaatccacaaaaacaccaaaaacaacacaattcgaccctaaatgaatccaaaccttccagacgacctatttataccacaataagtagaatccatgcaataaaaccaaacaataccttttcacaacttttaatatgatgtctcaagcttgtaagccttgattataaatccaaaactttaagaatagaggtagaaaaataagaagaagtatggaagggttgagaggagtaaccatgaagaagaatgaggctttgactaattgatttgcagaggaaaaataaaagtatgataggttagtgtttgataaaaaatcatgcactgaagagtatgagatgttgtattataataggtttaggttaactaatactgctaaaatattattaaatcaacaagtatctaatttttaaattttaattgtaagccctctattttgtaactttaagacttcgttttgacctagacaacttccaaattatgatataattatttcttaaaaatatatagatccttgaattatctttctaacaccattagaatcacctcaatcggagttataaaactccagatatgatcagtttagtaaaacagttttcaccctgcaactttatccaaacctacgaattttt

SEQ ID NO: 81528 - DNA, 1257 bp, Cannabis sativa
  modified_base (41)..(60): a, c, t, g, unknown or other
  modified_base (1218)..(1220): a, c, t, g, unknown or other
ttgagtgggagcgctgatcatatatatggaatctataactnnnnnnnnnnnnnnnnnnnnaaacgatgatttcctttgagcttagcttaataaagataaataactgagatctcacttcagtaataacggtaaatttgtccctattcgatgtggatcatctttagaggatctttaactatttggtttagaacgatggataattcatagcgtatatatatcgattataatgatttatatgtaccaagatatagaatgtatattctcaagtttgcatgagcaaagtttgcaagagagttcaaccttaattgttcaaacttatttttctaggatctacatttactaacatgtatgtttgattaacaacctaaatatgaattctctaaaacaataaaataaacacataagagtttagaaaaccttacattgatggtagcggaataatataactccttttgctcagatctcttctctcacggagtaatagcagaatagatatgagcaaaagcgattcctctcggccatcaagccaccatgtgaaggaaaatatataagtaaatcaaacaatcgagagtcacaaagtgttaattcacgacaaaggaaaattaaaacttacagcattagcttgggtcctcatagcctcagctacgtacattggatccctgcttgccatcatggcaaacctatcaccactgagcctacaacttgtagtagcactttgttccaataggttagctgaaaatggtgacacatcagttccaatacgaggatgaagattctctatcaactcaaccatgttcacaagaggagcgcaggcttcatcccacttgttgtagtcaccaaactcaacgttgcgtctagaagagatgttattggtcaacttcttcatctcttcatactccctgccacgcctcttctagtagaactgatcgacggactctaggtgtgcattatctccttctgtcgttggcaaaggcttgacatgaagagtgacaggtgtcggatgtaatggaggcagttcattcctttccctagacagctgagtacatgtggcaaaataatcttaagtgctaggggtggtggaggaggatcttgattgtctcttgatgttctagtgccttgcctaggtggacatctgccatcaaatgtatcataccccttcaaagattgagtctttgaggctacctccttgaggtagccaatgttggaaattattttacnnngatctatttactatcatgtatgttggattaacaacct

SEQ ID NO: 81529 - DNA, 974 bp, Cannabis sativa
  modified_base (45)..(56): a, c, t, g, unknown or other
aagttcatatttagggtgttagtcaacatacttgtgagtagatcnnnnnnnnnnnnaaaataatttccaacaataaattggatagttttaagtagaggattctctggctaggatgttaagggaaaactacccatccaaacttctcaatgttctccatgtgtcaccttgcttgattctagatgaccctaggaagaatttggggtaacatttgccccccaagttcgtgtgggaaccatatgctcgcatgtggatttattcacccattacgttggtcagatgggggacacatgttaagtcttcgtgctctgtcttgatccaatgtgattttgattgagggaatatgaaatacgactatctcttcaatatctaggcatttaatgccttctgttatcctaatttttgcactttgatgtggcatcagacgatggtgacacgtggaaccaactttatgtatcttcttgcaagagatatgccgaacagagaaccacatatatttgcttagacaaagccttcttaaccgagtagtgagcaatctgaacatcacgccaacacttagcaatttcagctttcgcatcgtgagtcacatcttgtttagcagaaagatggatattactttctcatttttagacaaatactcatacacaaacctcctgtggggctaatagttttcatttctcatatcatggaaaacctttttcactcctcttagccctatcactctctagttgtattttagtgatagggtctatgggaactagatgatcctatttggtcaaatacctagcgaaaaactcctatgatcctttcattacaatatttttgaattgcactcggaaagctcatatccccaaccgcctttttgtgggaatcatttgaaggtttttcaaagcttttgctggcacaattatgtactaacaaaaggtttaaaataaaaaggaacttttcccgcatggaattttttttttttggggggg

SEQ ID NO: 81530 - DNA, 1135 bp, Cannabis sativa
gtatttattatgagctaaaatttgacacatactatcttttgtattaaatttgacacaatttttagctcagatcaaatttgatatacattttgcatcaccattagagtcaaattttaccaaaatgttttaaaaaaatagcaatacaccacatttcatttatagctctgtattggagatgtactaagaaatctaatcagccttgatgatactaaaataatagtaatcattattattatggacaaaaaaaataaaaaatttaatcaccaattataatctttgtttgttgctatatttcaaataagagtgtttttttttaatgattgaaaatgcgtttttttaaaaaaaaaaatccaaaacatattttaaaaataaaaaatatgtttggtaactcttatttatttatttattttttatttagaagttagtataaaaaagtaaagtgataggaaatgacgacagataaaataaaagtaaatgaatattaataaaagaaatacaaaatagattataattaaaaaaaaaaatttaaaagttcaccacatgatataccaagttcagagaaactaacaggtagaccacctttagggaaagtctctatcaacaaacatttactgatttgcaaacttttcaaagctgagaagaaacattgtgaaggaggttgttgctgtgatcgaaaaggctgagtgatgaggaggaagaaattgacaaactctttcacaaacaatcttaagggaatttttttgtgtctagaatttattcattttgagttcttcaagtctgactcatgagtgtaccatatataagatgagctaaataaaggctgtttagacttgtgttgagaagtgtgatgaagaagtattgagaaaaagagaaaaagagttttttattgtatttgaaaaatactgtactgagttgcaaaggaaagggaaagagaccctttaaatacacagcaaggtcggttggaccaaaaaccattaactaactaactaaacattatttaactaactaacctactctaacaaactctgacaagggtcctaaagcttcggaaataagaagcagaatataagagttacagagtaaaaaaaaaacagagtaaatatagtgcaatatagtgcaatctcttctatattct

SEQ ID NO: 81531 - DNA, 1780 bp, Cannabis sativa
caacaacaattttataattgaagctttctacccagcctgggtagccaatcccgtactggttcctaagccaaacaagaaattgagggtatgcattgattttatcaacctcaataagacttgtccaaaggaatgtttctcacttccaaggatcgaccaacttgtagatgctacagcaagtcatgagatcctaagctttatgaacacctatttagggtataattagataagaatgcatccacccaaccaagaacacacaacctttaggactgatgttggtttatattgttataaagttatgtcgttcgagttaaagaatgttggggctacctatcaaaggctagtcaacgaaatgtttaaagataagatcagacgtaatatggaggtgtatatggatgacatgctcgtcaaatccagaaaggctggggcatatagaggacttggatgaatgctttaaaatcctcaaaaagtacaacatgaaactcaatcccattaaatgttctcttatagtcaaattaggcaagtttcttggatttattgtaaactcataaggaatcgaagctaaccctaagaagattcaagctcttctggatatgaaatcaccaacaaaagtcaaggaagtttagaggtcaaataaccgcactaagtagattcgtgttaaaatcaacaaacaagtgtgttccccttggggcagtaaaatttggattcacaacatctaacaatgtagtagagtatgaagcactcatcaccaaattaaaactttctcggaaggtacgtcctgaatacctggacatttgtagtgattctcaactaatcgtcaatcatatcttgggggaacacatggcttggggagaaaatatgatggcgtgtctaagaaaaattcaagacctcttagctcacttcaaatgatacaccatcaggtaaattctaagagaggaaaatgcaactgctgatgcatttacgcggtttggcgagcaacaccatggttgacaaggaaaacttggtcccaatacaatttatgaaagaccctcatcactagtacggaagaaattgaaatgttggctgatactcccacctggattaccccaattgtaacttatctagaaagtgaaaagcttccaagtgatagaaatgaggctcaaaagataatgagaaaggttgcacagtatctgatcttagacggagtaatgtaaaggtgaggtttctctctacctttgttagggtgtgttacataagaggaagttgcacgtctccttatggaagttcatgaggggttttgcaacaaccacgttaggggcaaagtttatctaagaaaacccttcggtaagagtatttttggccaaccatgattgaagattcaaagacctatgtgaagaaatgtgataagttccaaaattttcttaaagttcctagggcctcgcccaaaaaattgatctacatgtaaaatccatgaccatttgctatatggggaatagatctaatcagacaacttcctaagggaaaaggtggagcgcagtacgcagttgtagatgttgactattttacaaagtggatggaagttgagtcacttgccaccataacttccaagagagttttagatttcatggtgaagaaaatcatatgtcggtacatacttcctcataaaattgtctcagacaatggaaaacagtttgacagttagatgttcagtgatttttgcacaacacatggaattgtaaaaagtttctcagtagtcacacatcctcaagaaaatggaagtagtaaacaaaacactcaaggacac

SEQ ID NO: 81532 - DNA, 857 bp, Cannabis sativa
gtataagagtcattcattccgtgagtgtaaagacccaatagaagcttgaagcgggtacgttacaattcttttattgttgaatgaaggtgacattgaagtagtgatccaacttatcaataaggtgatttatagatgggagatcaataactatttcactaattgtaagaggtattctaatatatttttggattttaaacttttttaagattactcataagcttaccattgttgctcataatattgctaaatgaacattgactacgaacattactagatttattgatgtttcctcaattcaatgatgttacaagttacaagttacaagttcatgtgaaggggcagttacaagttcacttttaagctatcataccgaaattcggtcaaattaaccaaccaatgttaaacttcctaataaatagagggactagtattaattagtagtggtttggtttggtttggtttggatggaataaaaaggtgatatatagaaagaaattagaagagaagggtagattgaaaagatagtagtatagtgacgtagtagaaactagaaaggaggggcagagatgacaaaattaaagaaacaaagaaaaaaaacaccatttctttttctttacttattactattctttcttactctctctgcaccactactgctctgctacactgtactcctctctcccctgctccactctacactttttatttatatactgtatatataaataatttcataacacaccttacctcattctctgtattttcataacattatattgctatctagtaaattggtttgttggctttatcttctaaataaaatttaggcatgagttcaaaccttttatatattttga

SEQ ID NO: 81533 - DNA, 1119 bp, Cannabis sativa
atatataagtatatatattacctgaatatatattaattattatttaatatatggtaggattactcatttttcttattttatgtctcccacagttttgtctcttatatatggtatttatatagcctaaaaaaaataatcaaaggcataacctagctaatagtaattgatcaacaccatttctattatctttcctgagttaaatataattaatactataaaataaatatatatattttttttcctctcccatctattatcattttaaaaataatgtctcttctaaattttttatgcaaatgaaatatgttgggtttcattttttcatatttttcggctatcacgcaattaatattgtttggagtttaattcctcacaattttatttgtagaaacacctttcgaaaaaacatcgatctactaatactagagtatgtagaatatttatattcaaagtaactcttaattatttttgttatgtggaatttgaattgatacctaataataaataaagaaacattggttaatttaaaatgtttttttttcttccagaattaagatatagtttttttttaattaatttattaaaacaaatactaattatgcatattccaaactttactaagtttaatttgtttttaataataaaagaatattttttttaagtgtcaaattttctcataaaaccaagtataaacttaatagaatttgaaaaagtcacattataaataacaaatgtaaacacattgaaaaaagaaactgaggcaaaaaaaaaaaaaaaaaaaactatatgcagtaatcccaataaataaacaaaaattttagttcaccaattcatcccaacatttaaagaaattaaggttagctcttctacaaagtacaaacaattcattattatattcttttcattttcttcaacctcatttttttcttattttcaatgaaataaaaaatacttaaagataccaaagttattaggtaaaaaaaatataagaaaaatgatgtataattttatatttaatgtaaaattttgataatatattttgaaaaataaagtaataagatttataatagtaacaacaaaattaaatgaaggggaatgtgcatgcatgcaagaagcata

SEQ ID NO: 81534 - DNA, 1297 bp, Cannabis sativa
actaaaaaattgcctaataataataattgtggaatttaacattcagttgttttcagtattatctgtgtcaatattgtgtgttaaatgataactggcaatttcttgtttcaagttcagtagacaaattcgaatcaagttggtctgtgtcatgtaacaaacttctacatcaaaaggttttaatctgtgtgttcacaaccatcttgatcgacttaccctagccggctatcctcatactcggatttgacaaaatctcaattaatgttgcttgatctgtagcaagaatggccaaagcacaacgcaattgtctccaaccgaaattgttgcttaggtccaaatcaagttgtttcattcatgatactatcaattgcttgtctacgattatccaatttgatcacaccatcattttctataccaatgcatctcaatcttgtcatagattaacactctaaccctttcctaccgcgattaaaaactagaaagcaattacacacccacacaagatttacagttaaagtggatcaccccaacgcgaaaaatccacatctcatctatcatgaactctctaattctctttctagcacccatactcaaattcagcacaattatcatcatccaatagaataagactctttacacacataacaaattcagtccacaaagagtccatttcactactcaaaacttataccaatctcttaaaatttcgtccaaaacacccaagttgcctaaccatttcattattattaagcctatttgggatgtttgatacgtatatttcagtcataccaatttcaaactttagccaatttctcaatgttgtcattccaaaaagtgaaaaattttctcaacatcaacaaacatgaatatgaatcattgattatagcattaatgttaaaagaacagaatttaaaaaaccaaccacatgagaattgattataaactaaatgcagtctacaaagagtcaacttcaatactcaaaacttataccattttcttaaaatttaatctaaaacgcacaagttgcctagccattccattattatttcagttcatatcaatttcaactatagccaattgctcaatgttttcactccaaaaagtgggaaaaaacataaaatataaatcattaaatttaaaagaaaagaaaatttaaagaaaaccaatcacaagagaatttagtaagaaacctgaacttgagcagagcctttggtcttcaaggttaaacaatccaccacagcactccatttattagaacagttatcaagtgacccaagtctatagtattgctgcatctgat

SEQ ID NO: 81535 - DNA, 611 bp, Cannabis sativa
aggtagatgatgatgaatagtgaaattttgaatttgggtgaggtttagggattgggatatggtttttgagaggaaaagtgttttagagtgatttaggatgaaagattatgaaaagatttgaagaaaaagggtttaaaatgagatgagatgaagaattttagttatggagaggagttttcggaggtggtggttttagggttgagaaaggggtgtgaatttgaaagtgatttgttttcccttttttattctcgtctgaccaatctcgtcgcagccagaagggggctcaccgcggcgagatacatgccaaaaatcagcttactgtgtagctcgccgcggcgagatgtcctttgaaaaatccctttctgcagtcgactttatggctgtcgctggggttgtgctcgccgcagccacttggcagtacccgaaaaaaaaaaacttctttcttttttttttttttgaacagtacaaaaaaattaaagaaaaccaatattcgttttaccagttcaataaaaaaaaaaagaaacaaaaaaaaaaatagtaataacaactaaaagaaaacaaaataagaaagttcaactaaaacaccaagaaaatttgggttgcctcccaat

SEQ ID NO: 81536 - DNA, 1626 bp, Cannabis sativa
tggagatatttgcatgggataattagataaagaaccatttttaaagaaaaatgaatattgtttttaaagaaataaccaaaaaaaaaaacacttgtttcagtttaagaaagcagaataaaaaagaatttgtataacttaatacatatagatgaacgttaatatttactaattatttgtataaagttatttttgtaaatagattattatttttttttaataaaattgtaaatagattgttaattgtgtatattattgaaaaaattccttttattttattatgtaaggtaataagaaaataataaataatccaatcatttctatcactaaatattttaataaaataaataattattaaaaaatactattggtgcttagtacttttttcggtgtcaaattgcttatagtgtaattagttatcgagtttcatataacttaagaagataacttttaaaaaatatcgtaaactaattgtgaagtatcacctataagtgttggatactactggtacttaatagtaatgtataaaataatataaatgatataaagtaaataaagaaataatacatttatggtgatataaattttgtattataatctagtacaatatttgctacataacaaatttgcattactttttaacacaatattactaatttgcttgattaaaaatgctcttaacacactaatgttgagcaatgttaaatataattgtaaaaggatagattaatagaataataagttgacaaaggatgaacatgatagcttctatcaacactttcctaccacctatttagtaaaaagctataaataatttggtagagtttgaatcaagcatgattagcctaagtacgaattatgcttgttttagtatcatgtctcgagtgttttaaattaatgttatatggttagttgtgtcatgagaagtagttgtgttttattttatgtttttgttgaggagaaaaaataagtttattttaatctgttaaaatagttgttgtaaaaaataaaacgaacaaatttattaaattaaaagcacaacatgagaacacgaaaatataaacttacaagtcctacaaaatttgcctttaaaatattaacccgattcgactcgatttgactcaatccatattattacgggtttttcaaaatacgagtgagacctcacaaggtacatttacatctatactaatacaaaacacaaatattgaccagttgaggctagctcaagtggccgtaggaggtatgtgtattggaggtgctgggttcgaatcccaagttatgctgatgtaatatataaacgcttaaataaaaaaaaaaaaatactaaacacaaatcccaccatcaaaacattttcttctcaactcaaagactcgtcctttaccttttaccaagaaaaaaaaaacacacaaacagccaaaaacagtaccacacacactcctactcctactacagtctcttctcctctctctctctctacctcttccccatcatcaaaagtccccctaaaatcacacccaacacttcacatacaatcattctccacttgggtttcgcttatccctttctaaaaacctctcctttttcatctctagccgccaccatgcaagccgcattcctaaccctcag

SEQ ID NO: 81537 - DNA, 1036 bp, Cannabis sativa
ggagtgtccataatttatgtacttcggttagccattgtggctgcccatggattagttgtgcatgctcttcggatggattaacaacttgttatttgggatgtatttagtcatttaacctatatgacattattcagttttcaatgattttggtcattgttttcaaaattaaaataatgaagccaagaaattttctagaattaaccgtaaatgaacatttgagaaggtttagtttcatcgtataccacatcaaaacatcgaagctcccttagatcgccaatgttccccctaactttacggacttcacaagcatatcatcaacataaatctccttatatttttaccaatttgaggcttggaccatatgatttacaagtctttgatatggtgcactaacatttatgagtctaaaggacatgattttgtagcagtacaatcctacatcagtttggaagctggtatgttcttggtcaaggggttgcatgtttattttattgtatcctaaacaagtatccataaaggacaaaattatgtgcacaacagtggcatccaccaatcgattgatcctagggagtgtgaaatcgtcttttggacatgtttttttttagattggtaaaatttatgcacacttatgcttaggccatttcaaagagggcagaatgacaaggtatttacttaatgttgtaaggaagtggtaggttgcagctgctgcttgttgctggctgtggcctttcggctgtgttgctcttggtttcgtccaacttgttttgttttgttctgtttttgaataaaatcttccctttgttcaaaacaaaaaaaaaaaaaacaaaaaaaaaaaattatgcacactttccatttcctgtttggcttggggactataacaaagttggacatttatacggggtaaaacgcctctatgatgaacttgttcagccataacttttgtacctcgtcctttaaagccttggtcgtccttttgttgaatagccttcatttttgttgtacaagcgtgaagttgggttggggttggggttggggt

SEQ ID NO: 81538 - DNA, 1033 bp, Cannabis sativa
gttgaaacgaaattagtgcccaggttagaatgtcaacttaggtgcccatagtgtggatgggcttcttcgggatgtcattgatgaaatatcatgtcctagcattattccttgatggatttgaggaatcggggtccaaggatgtccccaaaaacctaaatcataactatggtgtgcctagatcaactagatgtcaacttgagcgcccattagggattcttggtgactgggtgtcgtttctcatagacttatctccaaagtctaaaacttggttgtggtatgtctctcatgtatctaaggataatgtctaagcagatttcctatacgaagttgatagggaccaaaactgatgcgagatggcgcacatgatgtcaacatgggcgcccagcattaatgttggacccaagttgagccccaggatgtctacgtgatatcctcagcttcatggttctttttagggttatggtgacctatttgttaaaggataacactaaaaaatgactttgttggatcttggtgcttacttgggtgctcccagtgtgcaggtaacactgctctatcttgggatgtgggccccaatattgtttccttcatgccacgtgtcaaaaatagtgtccatgtcatcaagccaacttttcgagtaaacaagcatcgaagagaatatttagcttaacttttttctatagtcatcgacgttataattatttaagacattttgtaaaattttgagaaattaaaaaaaaaactatgtcgaaaattgggttcaaaaaacctgttgcacatggttgcacatgtaacacttttattttatacgtgtgtgaaatagaatgttttaacctttgtttttgatggttacattttttcgtatttttcaaaattttgtaagatgtcttaaataactacaacatagacgaccatagaaaaaaattagactaaaaaattctccctgatgacgaaacaaaatgcaccccttttagatttggaagctattgaattcttggccagaaagacttttctcaattgatggtaaagaagt

SEQ ID NO: 81539 - DNA, 1375 bp, Cannabis sativa
ttgaatttagggtagttgattttgtggctgggaaaagaagtctttggcattatgagcaacttctgcttcaagttctgcttccaacattatgtccgatccttttataatattctctgtattcacatccaataacttaattaacatgcaggtaaaagaatgaacaaatttacagcattagaaaatttaattaagataaaaaaagaatgaggatacaagatgaactgaatttatgagtatttcatactaaatttagctatttatttaggctcttaaatttttgaagctcctaaagcctttctgttgttggttgaatatatgtcctatccttctccataccaaagttgaaatttacacttagcaaaacaagtgcaaaaacattgaagaatttctgttaactgataaaggtataaagacttttaattccttaaagaggcaaaagggctctgctaaaattgaaacaacaaggacaaagaggataacaatgaagtttaagcttattagtctgcaaaagaaacttaccctttcgattcggaagcaaaccagcagactcagctgaaacaggcaaaattgcaaaaagaccaacctcatcatcaaacttcactttctctaaattcccttttaaagaaatgttcttaacagcttcagattcggccaatttcgcaaaggaagtagcttgagaatgcaaatcaactgaagttgaggttttgaaactattatcctgataaaatgaaatattagaaccctgaatactctctatgcagtattaagaaaaagggttaaaactttaaacaccttcactattggcttctgctcttccacaatcttctcaaccaaattctcacctataaatatgaagtagataaacattgcttattcataagagtatagtgcaaaacaaacaatgatttcatagttttctttggagacttaaattacccgcattaacatgattattgggatcaagtgcattgtccatcaaattccgagtcaaaggactaggattcataaaagatatgcttcgaatttcatggcgaatcgcctcaagttgagacattgtttcttgaagctctttgtgaacctaaacaaaatcaaaatataagaaaaaatttcaaactttttgctagcccaaacaattaaatcctacaacacaagtgaatacaaactcaaactcatctctaacttcataacaaacatgaaatttcttcatgccattggtacctggcgagcttgggactggtgcatgacattttcaaattgcccacgagctaattgtacatatccaattgaacgacccgcaaatctcccaagagttctggcaataattggaagatcctttggccctaaaacaaaaaataaacacaaacccaattcagct

SEQ ID NO: 81540 - DNA, 1477 bp, Cannabis sativa
tggtgcggggattctcgtgggcaatggcataattgacatctggtctaagccttaggtactggggtttagtccattggaggttcgtaatgctttctcctacaatgttactcatgtttttacttcagtttcagatctttttatcccaggcacacaaaggtggaatgaaagcttaatcaatcaatatttttcaacggaagtagcagatgctattttttcgaattcgtcctttggaaggaagaagtgatattctattttggaggggcaatagtaagggaatattcacaattaaaagtgcgtactagtatgcttaacattatcgggctcaagaagagaaacgggtgtggaggttgctctggaaaacaaagcttcactctcgacagaaaacactaatctgatgaattttaagcggctgtctctcgctcaaaaataggctatggttccttcaggagagtgagagattatgcgggctgtgtggggaagatgtcgagactgatactcatctctttcaggattgccattttgctagatgtctgtggttctcatgcccctgggggatttgcagcagtagcctcaccaacttatcttttgaggatctgtttttgtggctggttaatgcaggaaattacttggttgtgttgtatggggcctgcattattgagcagatttggaaatgtaggaacgatctcatattcctaggtgttgtcctgaatctgtataattcaataagagctattaagcacagggttagggaatttagtgatgcgcttatcgatgatcactgacctgtggaggaagaacccgacgtttccattccccctgaccctggctgggatctaaggatgagagttgatgcatcggtcgtggagggctgtgctaggataagttcggttcaaaccgaagttgccgaggaggatgtaatggtggtactgcaatacaccaaagttgacagcgtcctggaagctgagtttttagccattcttagtgctctgatgtgggcaaaggagaagaaggtcaacggtggaatcagattctttgattgctgtcaaggcccttagttcaggtgttcttccgtttgcttggggttctttccctatttttcatgaatgtcgtgcgttgttacccttgtttgctaagtgtgttgtgtcgtatatccctcgtgtggacaactctgtagcagatagacttgcctatcatgctagagtgtcgcgtgtttgtgtgaggtgtttgttgagggaggtagtcccctttgtggctatcatgtgacttgttttctggttgtttcaataaatggttttcacttaacaaaaaaaaaaaaaaatctatcctttcatcatcctattccttaccctttctaactctccatcatattcttcctctctcctagcaagtatagcctaaatgtgtgatgccctacaacattactaaaaaaaattgtagtaacaaactctaggctatcattaccatgtatatttttaaa

SEQ ID NO: 81541 - DNA, 1185 bp, Cannabis sativa
tctaatttggcgttcgatgttgcggcattcttggcggagacgcctctgccaatccctcaattgctgttgagggttggctttgggttttaagatgctcttgattttgtccattttttgagtctctttgatcagtccacaaacaatcaataagttttttctcgagaaaattacaggaaaggaaaattgaattagccgagatgatgaaaggtacgaataggatttttagtgcttaagatgtaagcgcgtattttgtgcttcggaatgaattttccgcagagatcttccttactactttttcttctggtcagcacaaaacgacaacacgaaagaaataagggctggtttcggctgttaaacggtgccgtttcccaaatcaatacttatataaccttcatttttttttttttttttaatttttgaggcatatttattaggataatgttggagcttaaattgtacacaatttttcaaacaataatgagtatttaattttaataatatataattttgagtaaggttacatcttttttaattgtaaaaagacactagtaaaacatatgatattacatatcattgattgtaaaaagtaaatataatttaaagtgtattacaattcttattctacttttttggtaaaacatatttgtaagaaatagtccgagtacacaaaaatgaaatgaactattaatatgttataataataaaatatgaagtagaacgaaatattttgaaaatataaataacagggtaattaaataattgtaagtaattgtataaccacatgatctcctgagaaagaaaagatgtttgctagcgacatcttgcctgaatcaatttcaaaactgtaagatagattctcaacaaactatggattaatacgtcagacattatttattttcaaatttatttttgagcattttttcaaaaaatctcatattaatagagatattattcatccttatatatcaataattctttttatttttagtcaatgtaaaaccttaattttacacataatactatttcaacaaccaataatagaccttatgtcaaaatacctttgattcaaaaagataaataaaacttttcatacccaatctccagcatcgtacaatcctcacaactgaccaaatcttcaattactatgtaacttttttttactacgtaattttttttttttttttt

SEQ ID NO: 81542 - DNA, 648 bp, Cannabis sativa
tcttgtgtaattttaggtttttataatcgaaatcatgatttgcattgcgtacaaactgcaacatataaagcatgtcagctgttaagagtcctgaactgagctttgattgttcttttactattattgtggagactttctactgttttttcagaaagaaaaacagaaatcagagtgaaactgttgtataaaactaaggtaacttaagagtgtagaagatgtgaaatttcaatttggtaatgtattgttgtttgtgtttaaatgttgtacagatggatcttgtgtaccttcaggacaagctattatggtataaccaccaaagatctcttcttcggttaaccttgtccatttttcgggatctcgaatgggcgtgaaaacacataaaaactcgaaatgaaaaggataacagttatctaccttataccatattcttaattagctcactaaacaaggtgctacatcaggctattaacttagaactgagtcaaatttcacatgggaagaccgccctacttagtctgcatgtggcttcgcccatgttcctagttctaattttgtccaagagactaagtgtggagggttgtaaaaggaaccttgtgtgtttgatcaaggttcctcagtgtgagatattgtgtaattggtgtttgaaac

SEQ ID NO: 81543 - DNA, 1059 bp, Cannabis sativa
tatattttatgttcatttctgtgtgcagcatcgaggtgagaggcgtggtcttggaggaatatttttcgatgatctaaatgattatgatcaagagatgcttctttcatttgcaactggtaattgatctacattcgttgaacattttgcaatcttaaaaaagcatgtactaattctgtataacttcctttcgtgcactttttcctgaactttgcagaatgtgcgaactctgttattcctgcatacatacccatcatagaaaaaagaaaggatacaccatttaatgataagcacaaggcatggcaacaattgcggaggggccgctatgttgaattcaatttggtatggaaaagagcttttgaggatgataaaagtattatatacaaatatgtttaattgaggtcctatttatatgttctttttcaaatcgaaggtctatgatcgtggcacaacatttggactgaagacaggaggtaggatagagagtattcttgtctctcttcctctcacagctcggtgggaatatgatcatgtaagcaaattgtattctcacttcaaatttatagtacaatatttttgagtctcctagttaaaagaggctttgttttctgatttacagaaaccagaagagggaagtgaagagtggaaattattggatgcatgcatcaacccaaaggagtggatctaataagccaagtgttttttgtatcatagagtaacaatgtttttttccctttctgtcatattactttcccacaaatttatgtttgtagctgagggttagaagaagttagaggttatcatcttgtatgaggtaattaattagaggtagaagtggatataattgctacagctgtaatggttttgtatgaatcaatcatatttcggagaatacttaccatcttaataaggcaattaattcaaaaactctagtgctttgacatggcttctgttttttttaagcaggctgatacataagtttaatgaacattaccttgaccaagcaatattttatgcctttcatattctttgcaacaacattaacttaaaaattgtcttaat

SEQ ID NO: 81544 - DNA, 1186 bp, Cannabis sativa
tggtaaaataattccaacataatgtccatgtcttgcgttctcgttcacactatgaaaatacttgcacagatgaggaagattgtgtgaaaattattggctaaaattagacgttcaaagatttagattccattcgcaatgtccaactcaatattcttgaagtgggaggtaaactgaatggttagaataaaaaaaatctataagagacagcaaattactataaataaaaagctcaaggatttttctattttggatgctaatcttgacaatgttagctgtgaggagcttcaaaaaattgagaaagagcctaatgttcttcaggaaaaagaagagaaatattagacttctcgggctaaaaataattagctcaaattgagagacaagaagtcagatatttccacaagtgtgcttcaggtagatgggccaaaaatataatcagaataggaatggctttgaggtctcgagtcaaggtgaaattagagcagtctttgaagatttttttgctgctttttttacttcagatttcccctcagaggatgcttttgccaaagtcaataatttgattcctaggaagatctcagaggattttaatgctcgtctaattcagattttttgtgccaaggatattagaaaagccttctttgaaatggacccatctaaaagccagagagaggatgggttcacggctgggtttaatcaaaaaaattgaaatacggtggggcatgacattatattggcatcattgacttttcaaaatggggtttgtagcttaaaaggtatcaataaaactcttatctatttgattcaaaaaattgatgatcccattagtgttgttgattttcgtctaattagtcattgtattgtctttgacaagattattaataagataatcaaaaaactgtatgtgtgacgtcctggttcatatcatatctcatgagcaaactgcattttttcctgggcatcttatcactgataatgtatctatcgggtttgaatgcatcaatgcgttaaagaaaaagaagagaggtgatcatttctgtgctcttaagttggacatgtcgaaagcttatggtcgggttgagtggtgtttcttagagaaatttatgggaaaactcgattttcatagtgtgtggatgaaaaaaatttattgattgtatctcttctgtggagtgctccatgctgcttaatg

SEQ ID NO: 81545 - DNA, 541 bp, Cannabis sativa
ctccaagaattagaaactaatgctttatcaagacgtacctcaatccatgcatttgtggctctacctttttcccaagtgaactgatgaccttgcagctcaaggtcttccaatccgcaatgaaacagagtttgtttatcgagctttaagtaagaaattagttgaatatttttattagaatgatataattataataagataaaaatattatgctaattactacctacaaataaatcaatctttaaaaatgacatttgttattatattatagagagtgctaaaaagagtgtaataaaggaaagtctctatattatattcaattttatatgtacaaaacacaaaacctttttatatctattttatagtttgagttaatttggactctaagaaaaatatttttttttgtgtttttataacagtaaatgatatttttaaaaattattaaaaaaaaaatatgtatatttattaaaaaaaaattatttgagcccctattaaaagtggaccctagacgcggccctagtaaattaacatttttcgttaagta

SEQ ID NO: 81546 - DNA, 1230 bp, Cannabis sativa
atattgatgggaagagtattgttacaatgtatcgtataagtggttagtaatttttcatattcgccccttaatgtttttcttatagaaatttacactattgaaaaaatatgtactgatacatcaccttctggcaacaaaaaaaagttatttgttttttttaaagtcgtatatattgtaattatttaagctattttataaatttttgaaaaattgaaataatctacaatacagaaaataatattcaaacagttgattttacacgtatataaaataaatgaaatacgcatgtaatagactatttgaatcttatttttggtctgttaaaattttcttaactctttaaaattaaattttacagaatgtcttgaataattataacgttatcataaaaataattaaattaaaaaaatttggatgtggatacatcaatccacctcttaaaattttccaatatttatttatttatttgtaattttatattatgtactcttctttatcgtacctaggtctagggatcaaaatgtgattattattttttatttgctaactttattatacatttaataaagttattacacaagaagaaaaaaaaattatttgaagttttagatgagtattataggatatattattttattttgttaattattaattatattaatcttttatttagtggaggagacaagaaataaaatataattttagacaacaaatttcaatctacacccaattctcaccacagaaattaagtcagattcatcagataataatcaacttataatataaaatattataaagttttatttcaattcattatttttggtaatatatgtttacaaattatataataataatttcatcaatgaataatattatattatatattcattaaaatatcacataacataattacatgtcatatcattattatatgtctacacgttaataagtactatgtaacaaattatatatgtgaattgtgatacttgtaatataataatgcaagcatataatgaatgaatattgtcaaataagaatattccaaaaaatataatgaagagaaaatgtttttttaattttcaattaaaaatgaaaataatgaagaatgacttcttaagtaataaaattataataatatgtaaactcaacattaatgtattaacagtttttataaacattattaaagtaaaataaatagaacaacacgagtcttttttaactctattattg

SEQ ID NO: 81547 - DNA, 870 bp, Cannabis sativa
tggaaaagagtaggatgttcaacctcgccctagtcatagttgatggtgattagattaacaatgtagtgtttaattggatcgtgctaaggttatgtatttctcttacctcggtacaaatatttccaccataccatgaggatatacttatatggaaggataatttagatgggtccttttcggtgtgacaagcctatagagctatcattaaggatcgtggatcaacactaggtgaggtttggaattaaatctagttgactccggttcatgatagggtctgcttctttttgtggaaggtggctagggacattcttccatttagacaacagttcaatcaaatttttgatagtaataatcaacgcatcttttgccatatggcccagaattcttgtactcatttcttcttagagtgttattgtaatgccctattagcgtaggtgcactacaatattttctaaattaatgtgctaatattttttttatcaaagagtagtaaaaaatgtgattaacaaaattttttatgataaatgtaaaactttactaattatacaaatgtataaattttacaaactctaggatcccaatttattttttaaatacaacaaaagtgtcgcccaacggctaacaaactaagcccacgtcatctcgaagattcgaacactctaggtccaactatttagatatgtataatcctcattgagctctagactcaccgttattcaggttttatcttgcctttactatacatgaatcacatatttgtgagtcgacagactcagtcaaaaatcataaatcatataatctgacttgtaacttaggcgctcatacatctaatcacaaatttaaccaacatctaatgtgtatgtgtctcaa

SEQ ID NO: 81548 - DNA, 804 bp, Cannabis sativa
agaattttagtgtaattttttcatgattaagtaagcagtatttataattatttataaatttttaaaaaatcttacataattgatagtataaaataagattcaaaagattgctcaccccacacatataaaataataaaccctgtaataaaatatttaaattttattttatgtactctttaaattattcataattttaaagatttaatgacaattttaaataattatcatataaaattatgaaaaatattagattaaaaaattatattacgtgttttaaaaattagttgttgttctatttttttttatgagaattagaaaattgttaaaatgtattattgatacttaatattctcttgaatattatatcactattagtataattaagtagcggatctcatataacttaaaaaaataatttttaaaaaatatcactacctaatcatattatgtcacctataaaaaatatggggccctacaaataatcaataaggctataataattattgttccattcaatatataagataatgtcatcaagtcacgacgagtggtagtggttaattctatttacctaatggtgacattattaagaaaaagggaaaacaacagaaggtgactcattattatttacatggttttaattgattgggccacatatcttattttaaaaagttgaaaaagaaggccacatattgatcagcctattggttttggttaccatttttctttcttcatgattgacaagtgttatgttatcacaggtgttagcaaagaatccaacctaaatttactttttcttttttt

SEQ ID NO: 81549 - DNA, 3017 bp, Cannabis sativa
tagatacaactgaaatcgaaagccctaacttttattcactgttaatttcctttattagtttaattgcttcttctttcactatttttattgttttctagttttaatcgtctcgcaaattttatttatccaaatttaaagtacttaaatttttcaacacttggtgatctggatcctgcagcatcattgccaaaattacagcagcaactcctcgatttgcttctgtagccaaagcttcaacaatagcaaagggaaaataatctatcaagggctctttctttggtaacctctcttcatctcaagttgtaaattcatgatttcttttataatgacaatcagcgtgattggaaattatatcttaactataagtttcaaaatgagaggaattttaatttaagtgctcatcgagtttatggcattgtgaagtgtgttcaatatagaaattggaaagacactttaactggttttgaaggttacatttatgttagagttagagaattttatgctaatttgactaatgaattgcttgataaaaaacctgtgttctttagcaaagtcaatgttcgagggcaatggttttcattcattgaggatgatattgctaaattcttgaaattgccaaaaggtgttaagagtgatgaagtgtctatggattgtgattgcattctcactaaaatcaccggcgaacaagttgaatggtctactagccaaagtgtctgcatcactcatcttacttatggccatgcctcactaatgcagtttgctcttagcaatttgcttccaaactccagcaagacaatagtgtatcaagatttggcttatcttctttttcgaataattactgggacaaccattaacttggcttcttttctcatggagaaaattgttttcttccgtcgaggtaaaaaatgaaaccataagattaacttccctaacctaatctaaaaagttcttttttcttagaaggatgtggtcttttcgaatgagacacttgagtcggccctcactagaataatttttcaaccctcagagtattttgatggagtttaccccaagtgccccaaggcttatgttggtacaactccatctattggtgttgcaggttccagttatgcttctacagctgtgcatgaagtcaagcaagaagtgaccttgttaaataatcgcttggctttcgaggaggaggttcagcaagaaatgtccaaataattgtccaccttgatcaaattttctgggacttcagttttgtgttctctttcctttacttttacttttttgatgatttatggttgacttgttttaatttctttttgtctttggcccttatagataaataaaaagggggagtaatggttttaatttcttgaattgtatactcaactctggtccctttttctgtggggagatgaggtttgtgttgtgttaaactttggttaaagttagctcttactctttattatgctttaatgttgtacttctttgggagagttgttatgtttatttttgctaactttgtattacaggttcttgttaattaaaaaaattgattatctaaaataccaaagggagaaattgtaaaatcttttttggcaaattagttgacaaaatattttctaaataaatagtgtttttatttgagaaattaaagtatttttattgtaatattttacttgcctttattgctcattttctttatggaaaattctactcataacttgctatgattgttcggaagcttttcttgccatagaagaatttctctatatggaaaagttacctatgtttggaaattttgatttttcttttttctttaatgatttcggttgtactttgataagattagatcgaatacattgtattttgctagtttgaagtccatatttatgatcgtggtcaattttagaaagtttcatgtttagttctattctactgctacagagtctgattctcaagctataaataaataatttttaggaatgtgttagacaactttgaaatcatttttgaggttgtccctagggttgctatgttctataaatagaacttaaaagaacagccaaacgatttacctcttctagtttttatttttgcatattttcttatttgagaggagagagttctttttgtgagaacctagttgtttagctaagttttagtatttagtttattgttcttagacttttaataggataagttgaataacttgattgaacaagagagttcaagtcttactttgagatgaagtaagcactcacacattaaagacagagggagttcgctgtttggtggtgtttcaaaatcagattcgtgaagctaattacaaatgattacgacaatgatttagagaagtctaaacttgtttaagtcagttgtatttgaaattatttgagactttactaatggatttcattctctaggcgtgaccccgtggactaaaattgtttgaaaaaatattaatatcacgtataattctttggtgtcaagttattttaaattctgcatttatttattcctagttctggtttgattttgccaatctgtattctgtagtgacagaattgcaatctattgctggagactgttacagctatatttttactataatttagtaatattattggcatttgtaacaacatgatttttcattttcaaacaataaaaagttgaaaggtttttgcgtacacatatctctgcctattgactctccatatgccatttcttccactctgttcacctatgcaaactataaaagtccaattcatgaatatttaaatccatttctgtttgaccttaattagtggatgcagataatggagttagaatttttgtgtggcattgtctgcattgtcatgaatatatgaaccaattaccgtaggctctgtttcatcacaccattgaagaagcctagttttttattacaaaattattaacatatgatcatgccacacaaatttagcttaccccttcatcattgaaaatgctattatgattttgattataagtttcatatatatatatat

SEQ ID NO: 81550 - DNA, 952 bp, Cannabis sativa
aaaagaaaaataaattaaaatttatgctcaaacgactgaaatatccttcaaaacaaaacagacaaaaaaggtttctaccaaaaaaaagattcaggaatcaactgagtcactcactcactcaacttctctttatagcttgattgttaaataaccaagttacatgaacaagttgggccttgttgctttgtatgtggtcttcaacttcctggttggtggcctaaccttcttgaagactaatgggaacttgattttcgagttgtggaattgcttggtgatttctctcttgcaaagcttagcagggatagttgcagtcttgatgatttgaatgcaaggaaacctgaccctatgacgagaagccatctcggtgtacatctgttccacagctccattaagtgtggtgtcacggtactccttgtacatgttgtgataaccagttcgactttgatacctcaaccagataccgaagttcttgattgttgtaggattcttctcaaagatctgaaattagttttagaaaaatttatcaatacaaagcaataacaattgaaaaaacaccaataaatggcatgacttgtatgtcaaaatgccccattcatacgtagtttattagaaaagactagagaagcataatgattgtggtcaattgtgagttttctaatcaaaatttcaattggaaaaacaccaatactagtcatcaagtacatattcactaaaaggatttcgatttcaaaagtttggtgatgcaaagacacatttgcatttcaacggctaacctctgttatcaaagccaaaaccaatagacaaaacaatactacctttcatcgttatcaaaaaatttccaaagtacaaaacattattgttgtactgtctccctaattgagccacattaagagttggtaatcctcaggctttttgtgctcaaaaaactccattttagaaccaaaagaaatgt

SEQ ID NO: 81551 - DNA, 2252 bp, Cannabis sativa
aaaacaacatgcacatacataaaactcacatgtagttgtacatatatataagaaatgaaaggaaaaaaaaacataagaacagtaaaatgaaataattttttcgtttggggttgggttatttggtaactcatctatatgaacttgaaaccggtaaaacaaaaaggtgaaagtaactgatggatatatctaaaacatatcttacaagttgcaacaaaatctatattttcttttactttttcctgtttataagaaagaaaatatgtcataagttacttactcaatctcaattgctatctactcaatgacaataataataacagatattgtcattgataaattgtgaccacaataaccattcactgaaaaatatgctatacaataataataatcaacagatattaattgtcatattgataaaagagtataataatgagttaattgccattataatcttctgacggcatcccttttcatttatggattcactaagtatatcgttagactatacgatttataacttttctcttttttggtcactctatggtaatgttgacaatttttcaactatcttaaggtaagtaaaattctcaaatattcacaagctaggttagtagtacaaacacaagcatcaacatacttagtagtaaaaatgttctttataagctataaacttctctctctctctctctctctttttatttctttactctccttgagtaattattacatacatgtacacaaatgtgaacattacatacacagacacatgcaatagcatatgcacaatacaaaacgtgataaaagcagagcataaagaggcataataataaacaaagagattaattgttgcttccaaagtcattgttagtggtgtcaggtgagtcacaaatcacatatatattcaaaccacttaagaattttcacttgacaatgaaagaaagggaaacacatagaaatgacatgcaacggaaaacaaaatgaccctcaccagaaaagaaatttaaataaaaaaaataaaaagtaaaaaaagtaggatatatggctcatgaaaagcaaattgagagtgattgaagggacatgaagattgcttccaagcagttgaggacatcaaaaatacgacgcagccaattagctagtgtaagcaacattaattcattcatttatagtgatatgatgctgacttatttgcacaagagagagagagagagagagagagagagagagagagatcatagcatagtactcatatgcaaaagatactgtcatttactatgttggatggatcaaacttctgatctatctatcagatctagatatatatttatataaatggccttgtctgtagaagtgggatacatatggagcacatgtgtcctggaaaagacaggtcatggtggtggtcttgataaataataggctcatcattgaaacaaagagaagaattaatcatgacaatcacacccaactgtgaagtgaaggcatatataaatatatatatatatatatataactaccatggaaactagcagagacaacattcctcggccaaattcagtgcttccatgttccatcctattgaatgactatatctttttcttttgcatacatacacacatatacatgtgtatatatatatggataatccaaatataataaaatgagttaatgaatagcatggaacatctgtagtagtacatgataattgtttgtcactaggtaacatcagaattaggttgcctttagattattgaaaaatccaaaagaacaaactccaagttggattgaaatagtgcattgtgtaagacaataaagtaacaaccatatttaaacttatttctaacattagaatgctaagagatatattaattcatctatttaacttaattataccacttgatttagagacttatgagtagggtcaatctatgttttattttttgtttctcttactaggaattacgttcattcacttagtgctacctgaaacagtgagagcctgaaccactgagaatatgtgaaagagaaactttcagaacagatcatatatatataatgtactgtggctaccgtaataaatggcaaacattacttttaagattaatcaagatatgagtggggaaggcataaactgaggcagaataaaaatccacagagatcagtttttgatacaaaatagtatatacagttgcatgtgtatacgtaaaagaagaaatcttgctccaatctttgaaccattcagcaccatacctatc

SEQ ID NO: 81552 - DNA, 1794 bp, Cannabis sativa
  modified_base (1749)..(1767): a, c, t, g, unknown or other
tatgttttactagtgttttataaaaacacagtatttttgaaattttttctgtataacagtatttttgtaaaagttaacctaaattctagtatttttgtaagtttctctatttttttttaccactttttctaaatgtgaaaaataacataaaattaaagtaaattaaatatttttaataaaaaaatttatcattaaaattataaaatattaaatttatatgcataattaaaatcttaaaatgtataaatttgagccttaattacttttctaagagtagattttggaagacttagaatatatatttgacataaacaaataactttattatatatttatattactttttaatattatgtttaattgcatgatacaaaatttaatatcaattaatactcttattaaaaatataataactttattgataactttattaaataaaacagtaaaaaataaatataaaacaattaaaatattaataacttagtgttatagataaatataataataaaataaagatatatagcataatattgttactgttatttttatgtaatttttatagtctaatttatggtgtgttttagtattttttagcctttaatttcgtgattaagagtcaataatgatcactttctaaaaataaattgaaatttctaagttttgaatgttcaacatgttcctttgtgattgaaaataaagtctggagcttcaaactgatttttgactatgatctattcatttttggggaaaactttcttaatgaaagttctagatctctcttttatttttcccaaacatcttaaatcatcaaattttaagttatattgagagagttatgagtaaaatactatcaatctcgtagtaggaaattgaaaacgagaaattacgaaaattagtgcagaaaatgggaaattgcaagcaaggctgaagccttagtgagaaaaaaaaaataggaaacttcaatttttggatctatttaaagggtgttgatggcaaagctttgacactattcaaaaattgagaggattctgagtgtagaaggagagcaaggagcagaaggcactggtagaggactccaaacagtgttctttctcttccatctctatcttttatatttttcattgatttttttattttttattttaaaatgtcttttattagctaagttcttttaaggatttttatgtgaaccacttaattttattttatggattaatgtgatttattcaatttcttcttcttctctttattcaattctattcaatctgttttaattttgcaattattgaccgattaactttaatttttacttataaattcaagtcaaaattttgaaaggtgaaatttaaatatgctctgattgatatgaatgtaattaatttggaataaaagtacttaagttgtttttatgattttattagttgttatgtttaatactatttgtgtaattaaacttaccataaaaataataaaaatataagaaattttcacatagattaagtttataactcttaatcagattataaaaaataataataaaattaaaagaaaacaaagaaacacaaagataaggataagcaaaaaaaaaaaaaaaaaaaaaatgcatgaggttagcaacccaaggattgtcctatagctaaatactccaacttgaaacttgaaattaaatggcatatctatatataaatagatgttagagtaaaacaaaataaaacttgccattgtcgtttgcttttttttttttttttnnnnnnnnnnnnnnnnnnntttttattttttttttttttttatctt

SEQ ID NO: 81553 - DNA, 919 bp, Cannabis sativa
agagcctgcgccaggttcagcaaagttgaacttgaagtgagcctttggtagatactaggaggaaggggcatctgcagagcataacacatttaatgagcaaccgatgatgatattcgtaaagcatacacaaaaaaaaagggtaacggatagagaaaagaacctcgttttgccctcttctaccctttttggactgtccatcgcctgtgaaaagctcctgaagtgcttccacagcgatggttccaccgttgtcacgttgcattcctccaagaacattgtctgataacagtgcaatgggagagatatctgttgcccttaaaaatggaatgggcactgtgttaccggcagcgtaaatggagaaaagctgtgatgataacagatttcaagtgattagacgagtctatgagaaaattgtttaacaaaacaaatcaaatggtttgcatttgaattcacaattctcatgaatcagatctgatatctgaatgactcaacctatagaaaagaaagttggaaaaaccatttaagaaaaaaccatttaagaaggatttactattactttcaataggagtctaaactgtcaacttccatacttcgaaagacgtaccgctaattaaagaatttatgtaattttacagcgagtgtaattctacatggcaagatgtaagaagcataaatcatttggtatatacacatgaattgagggcagaaacactaccttgtcttgtgcaaaagcttttcggctaacagtttcattcttcaaagcactaccactcatgccaatgccactcccaacctgagcttgagaagtgcttttcgtcttagggtcaggagcagtagagcttgggggcaaaggagaagatgattgtattgcctgcgtagtatgtgaatctccaaccaaattgttatttgaggcagcaactcc

SEQ ID NO: 81554 - DNA, 811 bp, Cannabis sativa
caaggtataatagggacatcatttataaaaataagtgtattttaaatataaaaataaaggtaaaaattaaaataattaaagtaaagtagatatataatataattttctaattgtattgacattagaacgtggatattagaatttaagatctctttgtaaaaccattttagttaaactaaattatgcttaagatcatttttttttataatattttatttttattaattttcaggaatatataattaaagctgtaagctcaattattattattgaccttgtcaacaatttaaagtatataggtatatttattcaaaagaacaatagtaagatgtcttggaagtacttatattcagtgtattaaatatatatattatcttcacaaaaacaatgttgttcaattccatttttttttttgtttataaaaacattgtttaattttcaattattgagttgataaatgagcacactatataattgtaatttttccatattaaaagatattaattccctaacaaagtcaatttagtcccaaaggacccaaactatatctttatgtttatggtagctggatgatttcttttttcgaagcaaatctatttgaaagattcaattaattatggaacctcaagattagaagtagtcaatttgagaacaaattaaataagttatcataattataatgttaactacaattttcctcaactataatatatactgcaaattatgttctcaatttttcatgacattaaaaattcttgtatgagttattaagaataggggtgttcacaaattatccgatccaatccaatcc

SEQ ID NO: 81555 - DNA, 1845 bp, Cannabis sativa
ctagggttagctctgatttctcttggttttgttcaaagcagaacgacaaatcgttttgtacaaacgatctgtcgtgcaggaaagaaacgacaggtttctttgtcgtttgatacatttggttaattggtttttctgggacaattttgtccctgtcgttttgaccatctacttgagttggtgtagggacagtcttggaatttcaccaagaaaattcctacagaagaattgatctaatctaataatattgattcactatgattatggaataaattttggcctaataaatacatataaagtctaattttcctttattttattagtgttttattttagttttgaattattttaaatgtatgggtgtgtgtatatatttaaaatgaataaaatatattaaaagatagaatataaaaaaagaataaagaagttgatggataggataatgtaaaagtttgctaaaaaatagttgaagtaggatcttagtaatgtaatttaaatgatagagaatagaagttgctcagaatgctcttagtgtaaagtataattaaaagaagtaaaatgcttttttttttttttttagtaaaatgattaggaaaagtctattatacattccattgataagtgtatattaggttatttttaataatttaatagcttgtaaattaagataatttatttgagttaatattttaaattagattaaataaacaatctaattgaatgaatacaataaacatcttatattcaatatgggttttgtaatatgtaaaacccaatagtaaacttaattagggtttatgggactctaattagtttgttatataaagaatagataatttcataaatacacaaaaataataaaaagattacaaaaatacggtcgtgcacaattttaaatattttacggttttaagattttattcaaataaaatattgtatttttatatatttttatgttgtactcttgttattttgttgctgattttttattatttgtatattatttttatgttattttgatattattttgttgttattttttttttttgttacttttctatagtttttttgtattttaattaatactgtaaaaacgtataaaaaaattgaacataaaagtacgtgtaaaatttaccaaaattaatatataattttttatataaagaacatgtttggtccccaagactaatctttaatcactcttctcaattccccttaattgagtgagaactcaaagaaagaaaaggttagtatgtgaaagataaattatttatgcaccaaattttagaatgaacacttgtttaattttatacattctattttaaaataattaaattgaagtaaaatattgccaaagtaatttttttttatgtagatttatttattttgagataatagaatgtatatgtttcttgtttatgggcttaataattattgattggataaacaatgaacatgcaaaattgaatggataataattataagagtaatttgcggtataaatacttaaattttactccgaatagcaaataagtacttaagtcgtatttttgacagtaaaaatactttctgtcactagtgttaaacttttgtaagtatctctctattttttgccatatatgtgtcagatagcgtaccatatcattaaaataaataccacatcactcttaccattaacaataaacattgccacattatatatctaaaagagaaatgcaaaaagaaaccaatggtgtcttagcacctcctcagtgtcatattactattagtgtaattaagtatcaagtctcatataacttaaaaaaatagcttttaaaaataatgattacttcttctttcaaaaaaatg

SEQ ID NO: 81556 - DNA, 895 bp, Cannabis sativa
attatatgtctaaattattaatgtttctcgctaaaattaaagtatttccccacaaaagtcaaaaatatttatttagcatatatgaagcactaggttattagtactcctgatatatacaattatttatttatttaataatttaattttatattaaaaaaatattatataatatgtgttagagtggcaaagtaatttagatagtggcaagttcgaaaccccactacattacatagtgcatctctatttttaataattttttcaaaactaaaagtgaggctgctgagatttaaactccagccccctaaatgaatcaattaactcacaaaattatcttcttttttttttttataattttttaaagaaataaattcattgaaaatataaataatgtcatagaggcaaaaatatataactccctactaattttgttagcttttagaaaaaatattgagttttgcggggtaatatcaccaacttggtttagagccaaaagctattatgtgtaaatattaatttagttgcaataaaataattattttggaaatattaatcacaaaaaatattattattgtagctgatttattttcgtctttttactatataaagtattaattaatggaaaacacgtacatatcggtgcttaggaattaatggaaaccattatctcatttgatcatatatataattatttattaatcatgtgtctaatagaacaattacacgtacgcgcgtatagccttccctaaaaaatgtatgcatactaaaaattcattaaacaaagcctaattattaatgttttcccagaactttgacatataccaaattatattttttaaacttttttaatcgttaaaaattccccctgaaccattgaaattgttagatttaaggactt

SEQ ID NO: 81557 - DNA, 2006 bp, Cannabis sativa
attgcaaatccttctatcaatattgtgctcatctcactcttctcaacccagtaatagaaactaacctttccaccctcatactttttgttaccaaaaagtgtgaagaacattccaccatgatgtattgcaagtgtcaaatactttagagtatcacctgtttaattatgaatccaagacaaaagatcacaaataagtaacatattagtacctcttaaaaatttcacccagaaaatcattttgcaactaatttagtcaacaatggaccctgatatttttttttatttttttttttgtaagaatacataagattgtattactgaaaatggaacacattacaaaaagaatgatagccagccaagcaagaactttgaggcatgaacctctcaaccatacaattaattggtcaatattgttaatgacaacatatatagaccttgtaacaatattgtgaatcacacatatatatatgtgtgtgtatgatatgatgaagcttaagtttgtaagggattagacaggaatcagggatatattttttacgtgggtttgtatgaatagaaatatatttcaaagatgagaatgtttgttcctgaaatcctttctcaaatagttaatgaataaatgaaaaattcaaagctgagtgtgagggtttcaactcgtcatttgtctgttttgtactgcagcatatgcattgagtaatttcttttatgctaacgaaggcggtaaaatgaaaccatactactttcacattatatatatttgatacattataattataattacatatactaaacattcaccatgaatttattattatgaacaaaataaatattagttaacgtagaggtagaggagtaaaaatgagagaaaaatacagctagggacaaatagtgggagaaaagtaatataaaacagtagcaacaaataaagatattccaagcatatgttctctcattcattcccacaatgccaagttatgttttataaactatatatatacaaagtagaacaaaatcaagaaacttgctatggatcacaaaatcaaaacaaagcctcatgaaaaaagtctgtcattcttctcataaggtatggaaatatggaacaatgaaccccactatttgtaggtacacatgcataaaatcactacaataataacacaacaacacccaactataaattttaaagattctcactctttctcacaaatcccaaaacatataacttctttatgtgtaaaatttctaattttttaattgcaaaataatctcatcaactcagaatagattaataaatattcacactcaatattgccaaaaaaatagaatattttttaatatattttaaaagccacaaattcctaacatggaacccaccaatgaataccatcattatcacacgctcaattcttccaaaaaaaaaaaaagactattacataacagccacaattttataggtatcaaactcctttctaaccttaattattgaacccaacaaaataaatatcacaaaaaacccacacattttagaagcaactcacaatttttgggccaaaaatcttaccgtaattaggggatcaccaccagccctaaaaaacaccataatctactgctcccgtcgatggctacttcccatggtcagagaagagggtctcgccactttatctctccccgacgctaatggctggttgccgtggtcggagaagaaggtcacaccaaaaaattcttgggtcgtggtcggagaatatcgtccagcgccctacctttctctctccccgattctggttccacagttttagggttggtttttgttttttttttttaagaacaataaaccttttttttaagaatatatgtttttttaggtaacatttgattttgtaataattatttaatatcagattatattatataaatttattaaactaattttatgtaaatatttttttaaaagtaaattaattttttaactttaatagttaatattaagtggctattttataagatgatgtg

SEQ ID NO: 81558 - DNA, 1165 bp, Cannabis sativa
taaaaaatattatattttatttaacagtggcatttttatccaaaaaaaaaaatttgcccctaacatttgtggctggctccgccattggtattagtcttgtcaaccggatcatgatccgtttattaaacgagttagataagtcaacctaaatacgacccaaacctactaacttttgtacaaatttcgagtcatgttatcgcatctgacttgttttgtcaaccctagttgtttgaggcattttttcttcaaaaataaataaaaaataaaacatacacaaaacacctaaaatcaaaccttttttagttatttctttttcattttttacattttatgggagttattgtttaagtttttaacttatatttttctgaaaaaacaacaatgttttaacattgcagaaacatagtgtaatataatgttatccttaagatttcacaaagtataatcttgtaactatgatgagcggagtagtcaaaactaagaggtcatcacttcacgatgatttggaggctaatcacatgattcaagtcaatttaagtgtctttgacacttattggtagagatggaaacaattggtgacttgagttagaaggcgtgaattgttaatggcttaagacacctgtaaagttagaattggattcagagctaggcataaaagttatagatctttttcttatctttcacttaattctgagttatagcgagcaagttatgactaaaatactaatggagggcacaataaaaatcaagggctcgtccgctcacccaagagcttgcccatgaggtataggctttgcccaagaaattcgggacccctggaaaggcctgagactcaccgaagtagcctaagacttacctaaagagctcccacaactccccatgactcatctcacttcataaccactcaactttcttacataaagatctcttccacggtggctcgcccatgggctcactactcctctcacttttctctcttccatggtggctcgcctattggctcaccacacctctcttttctctctcctgcgtggtggctcacaaatgggctcaccacacctctcatttctctctcctttgtggtggcttacccatggcctcacctttcatctcttttctctcttctctatggtggctctctcatggcctcaccattcatctcttt

SEQ ID NO: 81559 - DNA, 1556 bp, Cannabis sativa
aaataaataacacttgcaccttcaaactagattgtgaatagtatgaattcaaaatagattgtgaatatgtatgggagacattgtttttgttcaaaataaattcaaaaaatttgtatagggacattgtaggtataaaagacttctcctccaaaatatttttgcgaagattaacaaagcaaaaagatgaacaagattttatgtacattgattgaatggcataaagccaatgtttatatacaagagcataaccagaaaaccaactaaagaagaaaaaccgaaaacagttggaaagtagttacataatgaacaaaatctaactaacaaaacagaaagttagttggataaagtaaccaattatgcttctcttaacagtccctttcaaacgaagtgtcatctagagaagagatactaaatttgcttctgagatgagaaaaaagattgctggatattggctttgttaggcaatcagctaattggtgttctgctgggacatgttgcctttgaatttctctattgattacttgactcggataaagtaaagatcaacttctatgtgcttcatgcgagcatggaggattggattggcttccaacatgactgaacttatgttgtcacaccaaaccagagatggagatgagttagagcgattgcatccaagttattactgaaaccaaacctttaaggcttcgaaattttgcatctgttgaagatcttaagattgttggatcctttttggattgccatgacactagattttggccaaagaaaacacagaaaccaggtggatctactatcatcaggatctgcatcccgatcagcatcacggtatgtttcaatttgaaaattagagactttgttcaactacagaccgtagtcaagagtttcagctaaataactcaatattcttttgacaataacccaataagattaaagaggattatgcatgaactgacatactttgttcacactgaaagcaatgtcaggacttgtaattgtgccatattacagcaccccaacaattgacctatagagaattggataagtcgctgggtcactgttaagaaactgattaattagtaaactcattgttagatgttaatcactctgttattaacctttttctctgttttagcattgtgtggtcccatcaatatgtaatcgtgccttcagtgatcctttctgttattcttgtggtccattggtctgtaatagagtgacaagtgtcctcttctttcttctttgtactctgagttttactataaatggatagcctatgcctcagcatgcttttgagctgagttttatcattaaagcaaaaggttacttttctctctgtcactgccataggttgacagtttcaagccattattattcataggagtgttgtgagtctttgccccttgcattttagctttacatagaagatcttggatgtacttttttttgagtaagtagcagacgagtggcagtaagcagagctttaatgccaggaaaacaattttgggtgccaagatccttaagtgcaaatgagctgtttgttggaaattattttacga

SEQ ID NO: 81560 - DNA, 1339 bp, Cannabis sativa
agtcaccagaggagcaatgatctgagtcttctacatttgaagcaaaattatgcttcttttccctatcttatttgagtttgttcttaaactcaataacaaatctcttgatgtggcctacttttccacaaaaataaaattttctatcgttgtgatattttcccctggacttttatcttcactgagatctgtgttggcctttgaaatgatcgttcttgtagcggtctctacccctgttgttgtctctttctctggccaggtaagcttcatcctgaatattatcttttcctttggatttcaaggcttgaagaacatcattaagggtgagagtatctcttccatatttgatcacaaccttcaattcctagtatgcagctggcagtgatctgaggagaatgacagcttggctttcgtcatcaacaatgtacttaaaaatggccaatcctataataatttgattaaaagcatgaagattataatctagagacaaatgagaagacattttaaaaccatataaagattctaacagattgatcttattagttagagaggctttcaagtaaatctcttcaagtttgctccacaattctcgagctgtcttcatgttctaaaccttcccccttaaagtgtttgacaagtacattatgatagtgtagtatgcccattcttccatgtcttcaagatctaccttcttcaacttgtcagtcagttcttccttaggtttcaaagctttggcaactttttgatgaacaagtattccctttaagctttctctccatatgccaaaatcccttgtcccattgaacttctcaagtttgaatcttgttgctcctatcatgattggttgcagatgagtctatagatcgaatcttgattctttacttcctttgttggatcttgaacccgagctctgattttgttctaaattcagcaacaacaataacaagattctacactaacatctgcactaaaacaattaacaagaacaaaaataacaagtaaacacaatgaacaacacaaagcaatatgacaaaaataaacaaggaaggagacaacaagattaatcctagttccggtcctagagatcaatttgacccctgaccatactccagctgagaaacaccatcaaagctttcattaatatggagaataagacagtttgtacaatcaccaatactagagcaaacaatgctcttccgcactcgaaaaacacacaagagaaacagtctcagtttctccattccttcccgagtacacccttggttcttgacctctccaagaacatgattttacagcttagcaaactaagcacccactctctaaactctctctctctctctct

SEQ ID NO: 81561 - DNA, 996 bp, Cannabis sativa
  modified_base (32)..(33): a, c, t, g, unknown or other
tgattaacataaataactgctaatttccaaannaactaagcgggctttacattgacggtatggacggggtcatgaggaagctcagggagtcagaggactagatggaagccctttgcaatgaagcttgagaggacaaggcccttatggagcgaaatcatcaggcggcactgaaagcgaaggacgacatcatcgcctcaggtaagaaggacctctgggattcccgagaggagaacgaggaactccttgtgaagcttaaatctttagaggagctgcatcagactgacttggagataatgaccaacctgactattaaactcaaggagcttcgcgagttctgggacaaaacccaaaaagaggctaccaaggccgagatggatgatttattggctctagttacctataagcattgtgaaaagtgcttcgaggatggagcatttatgtgctggaaggccaacaagttcaaacctcaccttcacttcttccccaatcctgaggctgttgcagcctggttttgggagaagatcaaaaaattggaagttgtcttggccgagcgtaggggtcctcgtcttcctccacaaattgattgataaacttcttcttttttatttcacctatttcccccttttcttaagacaattttatttttgtatttactgtctttattttaggtaaggggagactattatggcccgaccccaggcctttagtcatttacattttagacaacttttattgtaagttcatatctatttttcttcttctcttattttatatctgacttgtttttgtgcatattttatgcctttgtacacccctaagtgacatgaaaaagggctttttgggccacttagcttaaatctttatatgggataacacatatatttagttcgtgacaggttagcttacagaataaagaagaatgtaattactgaactcttaactattgatagtatttgtggagatggtcagcattccaagctctaggtactatggatc

SEQ ID NO: 81562 - DNA, 953 bp, Cannabis sativa
aaattacaaaagggcaggcagggttagctctaacataaaaggcaagaaacttaatcggaacaaatttaacaagatctgaagatgatttttgggacaaaattcgaatcttgcaaacattttaagcttaattagtttcaaaggaggtgtcatgatgagattccaagttgtgtttaatattttttgcagctatacagaataaaattattgccaaaactttcatgatcaagttggtgtcagtcaacacatttatttatctcaaaaaagaaaaaaaagaaaaatcaaatgactaagcgtgtggtttggaaccatggttggatcaactaagtttgaaagagtctatagtaagtattggacatctgaacaagtaggaccaatcatttaagcttctcccatggaagaaaatcaagatataaagagtgaaaaagaaccatcaaaagctttgcatttttgtagaaacattcaaatttggccgaaccaaataagaatgaaagctaaaagtatatatcccataaaataatattttttaccatactattggaacatatttttctttaactaaatgaactatattttagttttgaattattatttgcatctccaaactacactaagaacaatttccaattcccagaatgaaaagattgagaggctcctaaacattggcaggaaggagaaactcatttggggaacccttttgaattgttgtctattaatgctattaatgctaggttcaagcatgactgttttgagttctcctgtggatcccaatctcttctagttttgcaaaataaacatgaaaatgaaaatgataataataaaacaagccataaattaattatatgaaaagtttccagaaatcagaaataagagttcacctaataagaaagcaaaaacaagtagaaaccataatagaaaagtgatagcatacacagaaatcagaaatgagagttttc

SEQ ID NO: 81563 - DNA, 2066 bp, Cannabis sativa
ctcactggcgaaagcacattcgccggcctgtgcaggaatcccttctgtgtttccaaacgttcctccaaagccttgttatctctttttccctttgcatggcgtttgggtcaagagggatggtttttgtggggaacgcaaacccatggaaggtatctttagaaggatgaatggataatgcgggttggtctaaccagccttagttgtgggtcatgtccctgggggtgtccctcggtatcagcagcagtcttctgcctttttcttttcctgcaaagatcattgtctcctataatttttgagaaaatggccctctccatggcagaccgagaagtttctacataagatagtgtggggttaagcgggtcagtacaaaacatcaagtctcctttttagcagaagacagtataaatgggaccaacattctcagaatactgactcgtacacagtatacaccattttaacctcaatattattgcatcaagtaaaaaatggtaaagaacacttactaattagtagacaagaatatcacgagggatggctctactacaccgtgtctggtgacgtgcaggtctgaggatggcccggttgatcaagtcttgcaaaacaaagcgagaagacgactcaaagtgttagaactctgatgtgaagagcaaaaaaaattgagacttaaaaaggtgatgcatgttgtgagcatttaatgaataccaagggaggtgccttccacgagaagtgaacaatctggatcattcaccaaaatagtatttgaggatctgataaatggggagctgagaagatgcatcagctctgatcattcaacatccattacggaatgcattgagaaaggcgcttggcaagtgaagagtatgttcagtcaattcactgccatttcaatgtctccctagacacgcacctagcacgtacgcgaatggcaagagtcagcatttaaagcactgccaatataacaacacaaataatatccccacattagcaaattagttgacggctacttacacgacataatgagaaactcagagacactacacatgtcagaagccaatcatgagaaggcgagggaaccctgcaagctcccagatcgcatgacacctcgaaagcttggggggtaaatattgtctagatttttgtaagcttgacacgtggactcaaatccaggaagccaagatggtaatcaatcaactagtatccttaatcctaactcccaccaaggatctgcttaagctcctgaaatgggcctccacaaaggatacgtctcatgcaaggtaaggttgcggggagcatccgctatcagtaatctttcccagtctcgaggagtgaagccgaatgctccgcaaaggataagggcttcccaaaggacgccaatacaggtcacagaagaagccaggatgagattcgttcagtgtcacatggaagctctacctgtacatgtcagactgcagacgtgatacccatgatttttcaagtacgacgccaagacttgtcccccacgttatgccgtagtacagagcatgcacgcctagttatacctacccaagtgatccaacggtcattgacaagggcaattcaaaaggaaaggccctgaggtaacacgtgtgaagtcatcgaacagtacaagccgacaccaataaatgccatgtgatgaatcgtccaccaccaaatcaacggttaggttcattctagcaagatcaacccaaaaatcacgtgaagaaaaaaatggcctatatatacccctacattccatgtgatagaggcaactcttagaagtcaaaagaaaaaatattgtattctacttataaaaactctacgaaaattcctatgaagtagcttcttctttgagaggaacgagaggaataaagagttccagtccatagtgtaatgacttgtaatgttcaccacctaccgacgtggctaataaaatagactcgtggactaagattagttaacgcctgaaccacgtaaaaatttcgtgtctattatttattattttatttctttcttaagttctaaatattcggtttctgaaaacctcagttataatataatttagaggtact

SEQ ID NO: 81564 - DNA, 1563 bp, Cannabis sativa
ccatggcagaatatcgaagaaaagcttatcgccggcgttaatggagatcaacccaaagttcctagtgggcattcatggagatcacaaaaaacttttacatttttggtggctgttaatttcagacctccatcacttgattgtttgggtggagtgttgcctccaatgaagaacaactcacattttgctcttttaagaaggagaagttttttggggaagaagactcccgtatttttgaaaaaaaaaaactttagtttttctaatttggtttattttctcttatagtaataaaaatgtaaagtttaaccctaataaggctatatatgaaaaaatccctattagatatttctgcagaaagaagaagaagaaagaataagaaaaagaaaaaaaaaagtaaaaaaaatttaattttttattttttattttttttttaaattaaaaaaagaaaagaagattttttttttctttttttctaattttttaatttttttaatttttattattattttttaaaattaatattacgtgtactactaaaaacttgctacgtgtacaagtgtgtacacgtggacagtccaccatggcacttaactatgatttttagactgcagagcaaaacgacaaatcgtaaagttcagatactttagctgccaatatcccgtcaataaataatctgtcactttagagtctaaataaatatcattccttgtttttattttttgatttttaattacttattatattttaattttcaattatttatttctagaaaatgatcgtattatatctttaaaactctacttttgccaaataggcctcattgaagcacacgtgtatgctaaaagctaaacaacaaagataaaattgatcagattaaaaaaacttttgcagaggaacaaatgtatgttttatattatatattaatttaattagtaattttgaaagcaattcaagagaagatgaagaaagaagatcatgtactaaaataaatagcagatatattgggtaaagggaaaacaatattacctcataattacgttttcaacttagctgcacaaatccctaccatcgtactttccgtctaccggcggcctacgaacacgccatggacgcgctcccaacataactctaaatgcctaccattacaccatttaattactataatatattatattgtcacccactatttttttttttttactaattaattaaaatcattaaatgagtagttatattaagaaaacaaaaaaaaaaaataaaatagacgaatgttttcaaaatctgatattgtccttaacaatataggattatgtattatgtatatatcttttttccaataggagtactatttatatgtggattagatataacactatagtatataaacactcatacgtattatataaatttagtgcagttactttcaatataataatatcacctatttccttaattctcttcttctcatttttcttctacgtacgtacctatactataatacaataaacaaaaaagtgaaaaagatggcgcatgttctgcagcttgcaaatggggtgggtcagatgg

SEQ ID NO: 81565 - DNA, 1057 bp, Cannabis sativa
  modified_base (37)..(65): a, c, t, g, unknown or other
  modified_base (793)..(819): a, c, t, g, unknown or other
tgcaacataaaatggtttctgatctttattaattagnnnnnnnnnnnnnnnnnnnnnnnnnnnnntttagggcacaaaatccaacagtgtgaacctcgacgaggagcctgtgggcctcgaagaggagcacatagagcatggcgaggagcttgagctcgaccccgaggttgagcaatcgaaggagaatgttgctaacttgcaacaacagtcaagcttaggagaggctgacgagctcaaccccttagttgagcaatcgaatgagattgttgctaacttgcaacaacattcaagcctaggagaggctaacaagctcagccccgaggttgagaaactgaaggaagttgttgttaacttgcaacaacatttgcatgtatcactggacaagtatcaggaggaaaggaggaatttcacgctgattccacgagcaatggactaaaatggtgaaaaagttatttcaatattttaatattcaaccaaataaagaagtagaaaaaaaattaattctttacacctattttgaaatgaacaaaatggtaaaaaaaaattattctaatactttcatatacaactaaataaagaagtgtaatgaaatttaattcagttatattttattaccccaaccaactaattttaggattattttatttatttatttatttgaaatggaggagagggggaaatataaaataaaaggaagtgattttatttattaaataagaaagtgattttttttagaaatcaaggaagtgaaattttgatcggcaaaaataagttactttcatttttttttaannnnnnnnnnnnnnnnnnnnnnnnnnntatatatataaatatatatttttgagttgtgctattcaaaagtagattttggtctatttatttagaaatttttacactaaaaatataaaatacacactttattacatatatatcttcacacgcttaaacgaacatttatacttattaactttattttattacacttttaccacttgcacacacaatctatgtagccacacatgtcattgattgatgacttatatcaatcacaccttac

SEQ ID NO: 81566 - DNA, 730 bp, Cannabis sativa
  modified_base (572)..(580): a, c, t, g, unknown or other
gacatgggaatgggcctgcggggacccgcctatgatgaggtgagaatttctcgtttgaaagggaaatagagcatgaaatagattatttcttgtccccgaatgttaaacatgcgagaataagaattaaaatccttaatggagatgggggagcactccctcccaattctccgtctcatatgcattcctactcccagtcctcagccactttgaaagttttcattttagtaacatttcctacatgtggcggcccgattggagtgttttctaaactcgaatgcaaaacacctaacgccttttttattccggcaaaggatttcgatgacgatgataaactagttgtattttcattatctagattctagaacactccatcagtttcttatcacatgatcatagtttctttcaccaataaaatattttgaaacataactcaatagaaatgtcttttactcttttctatttttctcttcttagaattatggccgaattcaaacttagtaccctaaagttttattgttctaataacaataataaagattatttaatgataaaaaaaaattatatttttacgnnnnnnnnnaattttttttttacattttacggattttaactttctttttttttttttaacaaaattacagtgtttttattttcaaaataacattattttcattttactgcacaataaaacaactcgagaacaatgtttttttttttggagaaaaaaaaa

SEQ ID NO: 81567 - DNA, 1096 bp, Cannabis sativa
tgtcatacatactttttgagttctagatattttattgaaaaaattactttaagagaataatttttcaaaaaaatattaaaaaatgtatatttttactaatttttttttttactaataacttactatcatattagtttggatttaatggtaattaacaagaaataaggtcatttttataatttaagaagcccaaaataacattctctcttttatatatttatagattactaataattttttttttactaataactcactacaatattagtttagatttaattgtaattaacaaagtaaataaagataattttgtaatttattgtaggaaacccaaaacaataatatatttaaaataaaaaatgttacccttttcttaaagaataattaaaacatgatttctaacaaatcattttgaaatattaaaaaaataaaaaaaaaataaagttaattaaacaaattttcaagttaattaaacaaattttaaaaattaaaaatataatttgtaattcttatcaacaattcttttggatattgaagacatttgaataagaatgaacacttaaatatgaaatttaaaaaggaaaatttgcggcaaaaattttcaaaaatttcgtattgatgcaaattagtttccaatcttcaaaaatagcgacaataatccccatggtccacttttgtgtaagtccgttaatcgtaaacttaattgatccgttaacttatttaaaattgtgacatgttcaaatattattagtctaaataataatttaattaaaaaaaattaaattaaaaaaagaataaatagcttttttgcctcccgaactttttaccctaccaaatttcgccccctataatattctgcttcttaaaaatatttctcaaactatttaaactaattaaatttcatccttctgttactctccgcttcactttggtttaaaactgatgatgtggcatattacatgtagagaaactatataatgacatggcaataggggtgttcattggatcacatccaatagatttggacccatctgatccaatccaattatttattgcatatttgatttttccatccgatccaatctaattgaattga

SEQ ID NO: 81568 - DNA, 789 bp, Cannabis sativa
  modified_base (103)..(118): a, c, t, g, unknown or other
aatgaaattagacaaaagtttttaaatttaacaatctcaatagttaggggggaatttctaatagccaaaaaaattcagaggacacgatttagtacatgtcaannnnnnnnnnnnnnnnttactaattagccttaattttaaaataaaactttatgcatttcacaaactttaacacatgcaaaaaataataatttaagaggcgcaaaaaaatatttttaaaaaaattccaaaaaaatataatgaaaagtctgaaaaatatatcttcattctaatttatatctaaagaacattaataagttaaaacacttttcaattctcatacttatgaaaattaattaagtgtaattacctaataattacacaataattacacccttatttattactttatagtaatttattatatgtcacatcttagtacttattacttgtagcttctagtagtctccatctcccatgtacaatattcaagaactatcaaagaaattaacacatttctaaaattagattgaaaccaaatttttttgatgatattattgatatttatatatatgagggtttgattaaattttggattattgagattttgggtgaggaaacatcttagaaacttctcaattttgggagcctttctacttagtttgctgcctttacaagcttcgaagggctaaaactaattaaaattgatgagttattttctttcataataattgtaataagtaatgtttttaattgctcaattgacatgaaaggttgtattaattaagattgtgtgcaaagttagtttaa

SEQ ID NO: 81569 - DNA, 741 bp, Cannabis sativa
agattaaaatcactggagattagggcgttacagttggtttgaagaaaaggaatattattaactattccaaatgtctagtatgtggttacatttctcatatcaatagccatgttatttttttgtgtaatgtgtttaagaaggtgtggaaattattaaagttcaatctcttaaacaatctttcgatagaagtttttttttcaacaaataatcattaaagtatcagaagtcttaccacaattagaatttgaagtattccttgtggcagtttggtatatttggggaaatgaaatcaattagtgcatgaccaccaatttcgttctcctgaatttatagtttcatatatttaactcctttctaatgaaatcaacaatatccaacataccgccaatttaaaagagaagactaattgtacattaacatcaaaatagattattccaccactaggtacctttaaattaaatgtggatacattcttagatgataaaagtactacaattagaattagagcaattattcgaaactcacaaggactactaatggcatgcatttcgaaatctttatttggtaatggtatccttaattaatgttttactaatttaggtaattttttaaggtggtttttcatgcttccaaataaaataaggatataaggtaaggtttagatgtttatgtggctattaaggatgaatggaggttttctttttgtccaagataggctcaatatttattattattattatt

SEQ ID NO: 81570 - DNA, 1613 bp, Cannabis sativa
cctatattttagggatttaactgtccctttctgtgatttaaataatagataaaaagatgttaatatccctattttaaagggatatctttacctttttgaattaggatcttgtaaaccctacattatataaagggcgttagatcattctctcaaggctaagtcattccacaagcagtaaagggtctttacaagtcttctctcatgctccatgaagcttccctagaatatagtcgacctatgaccttccatgggccggccaggtacagtctagccggcctttttaacttctttgtacagctttacagccaaaggtcgggcctccttggttgaacaggcctctttggtctgacatgtattcttggctggccagcttatttttaagacctagctatcttataagcttcctttggtcagccagacacggttggccaaggtcttgatggcccgcttaaccccttttgctaattgctttacagtttttcttggttgctttagaacccttgacatctgacacgccgtgtaaggtgactttgtcctgttattgacaagttgtattccacatgtcctcagttttgacagtgtggacatgtcacatcaagtggacaaaatttggaataacaatctgccttttcgaggcaatcagcgaaccaagttttcaaagtgaacctaataaattcaaccaaaatagttattagatatttcttgaattcttttgtcacaatattgaagctttgggcaacattgctggtcattatgttgtatcgatcacctagacaataaggacaaacccacttttcaaacactgtactctccacatatacagcaatggtaggatccatttatttaagcttcttaaattatctatcacaactagccttcgaccatgagtaagatatagacaatgttttcttgtgacatgcatcaatcttgaacttggagttcacgttcataacaatgtggtgatagcatgcacaatgacatgcttcggagaaaacaagtggtacaacatggttgatgctttgatacctatttgacacaaacactaagttctcaaccaccctaatcacttccctcaactttcgtaagaaatatgtctaagattcgttattctcactgtcaactattccaaaagcaatcagaaataattgtttgtttgcatcgtatgccacaaaatttaacattatgccaacatacttcatcttcaagaatgtgtcgtccatacttattacaggacaacagacaataaatcccctcctacatgcaccaagtgaaaaataatacttgaaccgctcaccctctacttacaggtcagtaatggtacctagattcttttgttgcaacatgtacaaatctctaattttaaatcataccccaacgggccaacccctaactcttcatataaaattttacgaattttctataaggttgtgttcacttttataatcccaattaaaactctcaacaccccaaacaccatcatacaatataaccagaacatagtcgatcatgtaatttcatacaaaaaaatattagtaaataaataacaaaaaaaatagagtaatttgcggcaaaaatacctaagttttatgtcgagtagcagataaatacctaag

SEQ ID NO: 81571 - DNA, 564 bp, Cannabis sativa
tataattgaattaaaaatataggacagttacctttcttccaagcaaattaataatcatatatatatttagtatatcagcaaactaattaataataatgtaaatgaagcaatatagaaaagaagaagaaaacatgcatggtcaattaatttcaaatgagttataaagattaattgtggcagttaattaaatatattatattaaataatcttctatttatatatatatgagggaacaattaattaattaaaagttcatgataatcactaatgtcactatagctaacgtcttacgtgcatgtgcctatataatgaccatgatatatatatatacataaatttcagcaatattttttaatagctcattgtcattatttaattcatcgtaaaaaaaaaataaaaaaataaaaaaataaaaaaaaatattaatgtgttatttattcattctattgctatcaattaatgtctatcgttattcaaaaaaaaaaattaatgtctatcgaatattcaaattaagtttgtttatatattaatgccttattcaatcaagaggttcgaatttaatat

SEQ ID NO: 81572 - DNA, 1483 bp, Cannabis sativa
actatgcaccctcctcgctctctctcttgcttcccctccagcccaatctccctcctccgccaccacacctccttcaacttcaaacccctctcttccctatccacgcagcctctcacccccactgacactgaagcatctcagtcctctcaaatcctcaaccttcgccactccctcctctcccgaaagctcactgctactcaacttgtcaactccttcctcactcgccttcgtctcactgagccctctctcaagtcctttctccacgtatctgactccctcttgcgccaggcacaagagcttgatgacaaaatcaataggaatgaggagctgggtcccttggctggggtcctcgttggtgttaaggacaatatttgtacctctgacatgccttccactggtggctctcgcgttctggatggttataggccaccgtttgatgccactgcggtgaggaagatcaaggagcaaggtggaatcattatgggcaagactaatttggatgagttcggtatgggtagcactactgaagcctctgcttatcaggtttttcatttttttatttcttttaaattataactatattttgaaggaatggatgcaatgtgagtagaaagtgaaggaagttacttaagatttagagtgtagaaaaatcatatctttggatgttgtaatggtaatgggagatggtgacacaatagctcatctctcctttttctcatgttttgcactggagagttgagtggtgacttgggttgatttactcaggtggtgcatctgttcattcattaggtgactgcaaacccgtgggatgtttctagggttcctggaggatcgtctggaggctctgcggctgctgtttctgctagacagtgtatggtgtccctgggaagtgatactggtggaagtgtaagacagccagcttcattctgtggtgttgttgggttgaagcccacgtatggacgggtttcaaggtttggactaatggcatatgcatcctcacttgatgtcattggctgctttggttcatctgttgcagatgctggtattcttctccatgcaatttctggccatgatagacttgatgctactagtagtaaacaagtaagaaatttcccaaattttctagatgtactatgttttttccttaaaataataatatataaatattgttcaatggctaatatagcaaatttttccaaacaagttaatatctgtttccaactattcgtgcaagttctgagcaaaatagatttatttattttaagattctggtgtttgtgtgtaaaatatgtcaatttttgtatttggacaaatgccaaaatgcttggtttaagcatcttgtttacattccacaatcctacttaatctaaagactaatgcaagggggtagtaagattttattgaacttttctgcagtactttgtaattctagtacattattgttatacattatgttttcaaattttgtctatgatcttttcag

SEQ ID NO: 81573 - DNA, 1402 bp, Cannabis sativa
atttttgtcaaaagcgggaaaggatatattgatcaagacaatagcacaagctcttccgaattatgctatgagtgtattccaacttccattagaaacttgcaaggaattaaagagtttaatgtgcaaatttttgtggcgatcttcttctaaaaaagataaaggtatccattggatgaattgggagaagttatgcaatccaaaaacaaaaggaggcttgggctttcggaacttacatgatttcagtatggcgtaattgggaaaacaaggttggagattattgacaaggtcggaatctttggttagcagggtgtatagctcaagatactactctaatggttcttttttaagtgctaagttggggggaaatccaagtttcatttcgaaaagcatatttgaaacccaagagctaatcaagaaaggggctgctgttcgagttggtaaaggtaatgcagtacaagtgattaatgtgccatggcttccaagtgtggaggatccttatgttcatactgtaagtgcctctctacaaggaaaaacagtttcaagcctaatgaccatggatcaaactcaatgggatgaggatctaataaaatatattttcattgatagagatgtgaatcttattcttagtactcctttggctcccaatgaaccagatatttggtattggaggctcgaaaatttgggacattactcagtgaagagcgcctacagacagctacagaatgataaggaggaacctataggaagagacaacagtgcatactggaacaaggtatggaatttaaaggtccctgctaaggtgaaaaatgtgttatggagagcttcaacaggctgtttaccaacaaagcaacaactcagaacaaaacatgttaatgtatcggctctgtgtccttttgtaatctggaaaatgaatccattaaccatgttcttgtcacttgttcttactcgacagtgtgctaaaagcagttaaattcaaggctcaataccgaagtacacggtaatttttcatcctggctgtagtcggcattcagcaattcatccactgcaaagtgccaactgataactatgttggtgtgggctatttggaagagtcgaaacgagctggtgtgggacatcaaacatcgtgctgtaggtgatgttgtagtattgtcaaaaactgtccttgatcaatggaagagcgctcaggagaaaacctttgaagcttcatcagagttgcaaatatctgatgttggctatgagcgttggcgaactccaacagatgacacaatcaaggttaacaccgatgctgcaattttttcacatacgaactgtttcagtttctcgttcgtggctcgtgatcagtctggttccttagtggaagctaagtcaaagtgtatgcaagggaaagtccagccatcaattg

SEQ ID NO: 81574 - DNA, 2008 bp, Cannabis sativa
gaggctataaaggctttcagagatatggaagatagagatgtagagcctaatgagattacattggtgaatgttttggttgcttgtgctcgaagtagggatctagagaatggtaaatgggttcacaatcgcatttgttatctggaattcgctgcatataatcagcacggccaggctgaggatagccttgatcttttcttgagtatgcaaatttctgagcttgttcctgaccaagctacctttcttggtgtccttggtgcatgtgcccatttgggggctttgattttgggacaaagtcttcatgcttacatatcaaagaccaaatggatcgatgtcctcgctattggtactgcttttacatgtatacgaaagttggagatcctgatactgcttggaagattttcaataatttgcagtagaaggatgtgaaggcatggactagtatgatcctaggctttgccatgcatggaaagggcatagaagctcttaaaactttcaaaactatgcaagaagatggtaatgtagttgctgacgagattacttatattggtgttttgtttgcttgcagccatgtaggtctggttgacgaaggtgagagacatttcaatgaaatgagaagtgttcatggcattgttccaactcaagagcactatggttgcttggttgatcttttgagcagagcaggccgtttgaatgaggcaatgagactagttgaggaaatgccagtacaaccaaacataatcatttggggtgctattttgaatggttgtgaggtatatgaaaatgttgattttagctgataaagtcacaagtcacataactaagttacaacctcaaggtagtggggtatatgtgcttctttctaatatatatatatatatatatatatatatatatatgccagggccggtagatggcaagagagatgatgaagcaaaacaccattaacaaaactattggtcagagttcagttgagatgaagttgctaatttaatcatgatctagcctttttatctattttgtcaattctagtatgctcagaaatatattacagcatcacctcctttggaggaaattttgtcaattctatcgccactcccttgacccattttaatgtgttcaagaatatcgaagcattctttgatgaatgaaaatgaattcatttggagagtcactgcttaattcaatcttctaatagctttcaattatttttcctttgaatatctttaggagttttgtttgtcattttcaaacttgacttcctatttaatcacatattaaaattgtatttgaatggatatgacttgtcattcccaaatttaagaaaaatttcttcaggaattttggtatgaaatgaagaccataaattggtcatctggttgacagtgggtaactaaggctcgctagcttaagcttcttcaaaataacaatgaaaatatagtggaaatcatttctatatttatcattgaaaatttgcaataaatacagaatctgtgtacattatttttctactttgatccagagaacaaaattttaaaagaatcgcagcctgttattaccatgtctggtgtctggcaagaactgtaaacgccacaacgtttttgtcatccaagatctgagcatttgcaaatgtaattttcccatgaaccaccacaaatccatatggaaactccatgttcaaactttttgctttagatccctgattgtgcaacactagagaacgaacaggagtttgacccctttgttgagttaacaatttcaggaaaaccagacctatctgaaggggcgtgggaagaaatgtgacacaacatcaccagacacctgtgcctcttcaacatcttcagtcaactaaaaaaagaaaagaaagaatgtgtgaattaattagttgatgacaaggagaccatgaaaataacatcaaaactggaaataatattccaaagatttaaattttttgtgcacctctccaaatactgaaattaaatattgataaaatatgtattttttttttaca

SEQ ID NO: 81575 - DNA, 1091 bp, Cannabis sativa
gaaaggttgaaacgattttgttgtgctgttgtggaggtgtttggaagccgctatcttcgatcacctaacgctgatgacgttgcaaggctactctacattggtgaacgacgagattttccatgaatattgggtagtttagattgtatgtactagaagtggaaaaattacccaataacttggggaggacaatatgcgagtcgtagtggatcatcaactattattcttgaagttgtagctgactatgatctttagatatgacatacatattttggtctactgggatctaacaatgatattaatgtgttggtggcatcctatatttttgctaatctttctgaaggtattactccacctgctaagtatgtcattaaaagaaaatcatacaatatgagctgctatctagctgatggtatatatccaaaatagtctactctggttcaaactattcatgagacatggggtttaaaaaaattatttgtaatgaacaataaggatgtagaaaagatgtataacatgcttttggagtattacaatcaagatttgcgattgtggcaggaccaacacgcttatgaaataaaagaatattacatgacataattacttcgtatagtatcatgcataatatgatagtggaagatgaacatgatgttaatgtaactattgaagaatcgaagtgtctagtccagaagttgagatggtgagtgatgacaatgttcaatttcaagaatttgtcgctcgacatggaaaatttaaggataaagaagctcacattgaactttgaaatacattaattgagcacctatgggacaaatatattaattctcaaaattagtataatttagttaatatctttaatttgtgttattttttgaagttaattaaatgtagtttgttttgtaagaggaaaaatgtaatgagatatttattgtaaatgaaataatattaatatttttactaatataaataattggctatagtaaattattattatactataaatgatttagggaaattctacaatgcacccttttaaaatggatacattgatgcacccttgtctcttttagcacccgaaataattttttagtcaa

SEQ ID NO: 81576 - DNA, 2107 bp, Cannabis sativa
tcatatttaggatgttaaaaatatacttgttagtaaatctaggtcctggtaaaatataatccaatagaaggtcccttgtgtatttttgttgtatcaagcatatctcagtagctgttttgtgaacttcaaatcccaagaagtatgttactggaccaagatttttgatagagaaactattgtgcagagaagaaattacttattgaacctcagatgtgtctgcaccagttatgagaatgtcatctacatacaccaagattagtagcaggttaccattttttatggaaaacagagtctgttgctagacttgctactgttgtatccccattaaatcagagtatttttgagagtgtcaaaccaggctcgaggagcctatttgagacatatatggctttgtggaatttacacacatggttgggataggtaggatccacaaagccttgtggttgggctatataaacatcttcttggagttatccatttagaaaagtattgttaatgtcaatctgttgaatttcccagccattgaggacaactaatgtgaacatgattcttattgtgcagggtttgatgacagggctataagtttcaaagaaatcaatgcttgatgtttgttggaaacctttagcgaccaaccttgctttaaacctttcaacagtgccatctgcattgagttttatcttatatacccatttattttgcacaataatcatctttgaagttctaggaacaagagtccatgttttctttttcttttatgcatccatctcagtgttattgcagcattccatttaaaattggtaagagcctctttgagagaagttggttcctattcattattggcatatgcaagaaatgtctttggtttgtaaaggcctaatttggaccaggtcgccataagatggagattggtgttttaagaggtgaatggaatattagttgttgagtactgaaccatatgaagaagatatggtgttgagagatggtggactgatctgtggaggagccctgtttggagatggtggtggactaggaggtggctgattttggttttggggtggtggaggaatgactttggaacaaggtacgagaagagcttgctgagtgctagcattagaagggacattgacagtggactgagttgaaggtaacaagctagtgtatggaaattcttactctgataccatgtaagagtactgaattttcagtactcgagcttgagcaagaaagaaacaatggaggagagagagaagaagatgaaagatggataatattgctcaactgaaaacaattggcctaatcttgacatttatatatggagaaccaatacaaagaagctcaagaaaaactttaactaactcctaacaacctctaaataactcaagaatagtacagttaagaaaaggaaaacctgcaataaacaacatgttgcttaaccatattctattctaacatatagattagattagatcgaatttaagtcattatacatattaaattggatctaaaatatgaaatttgtacttagtgtagatcgaacacactttaaacaaaatagtacaaattgaattggatgaatatagacacattatatttagttagtaattttttataaatagcgacataagtactcaaagttttaagtttgtaagtgacataaacttaatgcttatttttagcggtaagtacttaatatttttaaaactataatttttttctaattttgtcggtataaatttcattttaaatttatcaaaagaacgtttgaaattaactaatactaaataaatattaaatttacattatttataaacttaaaattttggttcttatataattatagggacacgattttgtcccgtaatgtactttcacggaatgtattccgtgatgtacgataaccgttagatgggggagttatttgatttgagggctggggttgatctagggataattaaggttaaaaaatagtaacgtaccgtaagacccatctaagacccatctaatgtactattggacccatctaatgtaccctgagactcatctaatgtaccacaaaatacattccgtgacaaaatcgtctccttataattataactatttatcctat

SEQ ID NO: 81577 - DNA, 632 bp, Cannabis sativa
agttatgctgcaattaattcttctttctacatacatttgtcagttgtcaccacaagcaagtccaatccaacgctgaggatttatcctcatactatataaacactttaattttaaatgagacattttgtttaaaatgtaaacacatatgcatgatctaaattgggaaataaactaacttgcacgattgaaaaacttcaaattcatacggttttcaatatttcaaatccatactcaatgcaaaatgtctttatagaagtaacaattgaactcttttgtttttccattatagaaaattctatttaggttggacttaaatagaatcttcttttgattgaagtgacttcatagttttgttatctaataactcttttctcttccacttctcatgtgaacaaggtagctaggtggtaaaataaaaaataaaaatggaggtgtcaaattttgtcaactgcgatttagttaatttatgctatattttattcaactccatttaaaaataaaattataaaaatttaaatgtaacatgcctaattaaaaaaaaagaaatagtaacacacctaatgaattagtctattagtcatattaacctaactactaatatttttttcatatttaatttttatattttaatt

SEQ ID NO: 81578 - DNA, 1511 bp, Cannabis sativa
  modified_base (800)..(806): a, c, t, g, unknown or other
aatctagatgatttaatggccaaaatcctagccatcgcccatgttgacccacacattggctaggggcgcccattgacattcagcgtagcgtgtgttgtttagttattcaaaccctaattctgttttgggaattctttgtatttttgtcccaaatggggatggagccctcatgtttagactaaaatataatcgaagtaccaaaacaacgctcggagggcctagaagtagctcccaacgcctaggttgacactcaacctggagtacatggatttgcttgtccaatttcagccctgtctcgggcatcaggctgttttccatcacaaataagatgtagcacttgtggaaagttaaattcatacttttatattttacctttttagaaaggaggaatatcagcaagttattcacaaattgggtagtcacaaatcactcgatttcaccaacgagaaaaacctctgagaactagtgaacaacttcatcataattaagataattaagtgatgcaatcatatcacttagacatcacaatatattattttggcccgattttccacgttttgatgcctaggttaacatcgggccacttctcaatcgcatcgcaggattgtcaacctggtcgtacattgctaaattgtgacagttagagccccatgatttgaaggggaaatatcgggagctgtacaatcctacatcacttagagaatgtcatgtgtgatgattttgagactgtgtaggtatgtgactacacagttgaagatggcttaaatggattgattagtactacctatatcaacaaggtnnnnnnngtttttcggtagcccatcacgaaggaactccatggttaagcgtgcttgacttgaggtaatttcaagatgggtgatctcttgggaagttttcccaggaagtgtgcgagtgaggacaaaacatgctggaaatactcgtgttggtttgtagggtcagtcatcattctaggatgcagccaaagtgacgtactcgtgtataagagccatcattttgtgggtctaagggcccaatggaggcttgaagcgctacatttgcatgacgccatctcagcccctttttcccagatgcatgctcaaggctcttttgtcgagatggtcatatctgccatgcactcctttcgtattttgactgactagccctatcttgggcaaggtttggctgcctgttcttccctggttggctggtgcagcctctgtgtcaactggaggtagatcacaacaattgctggagttaggtggatctaagtatctgaagtgattttattcacttcaagctgttattgtcttaggtgtttttacctgttcccaggcctagccggttaaagattggtctttgggtgacttgctctcggatgctctagggaggaagtttacgttgttggtcggccagaggtgcaccattataaggggttggccgaccaaaggttcgctaagtgggcgtgttgttgtgccaaaaatcacggggcgaccccccaagccgctagttgc

SEQ ID NO: 81579 - DNA, 1016 bp, Cannabis sativa
aaacataatttgaatatgttaagtaaatttaatgtaaattatgtaattttttcacacttggtatttgtgtgattgtacagataatggtgaccagcacaactctaatgttgtttgctggaaggttcgggctagctccatcggctaaccgaaaggcgacagctgggttgaagctcgagacaagggactccggtttgcagactggtgacccggccggttttacccttgctgacactttggcttgtggtacagttgggcatattattggtgttggggttgttcttggcctcaaaaacattggttccctgtaaaaaaattaaaataatgtgcaattttatgtacttgagttgtaaaaactgtttttttatgtctagttcaatgcttttttgttacctacttttttcttctaaagtaacttgattacttttaatccatttttccaagagatggaaccaaaatcagaaacatgcatactatttagaaaatataaataatggaatcatagagagagagagaaaaaatgtatcaagcaatatttggaagaatgtggtacttactgactcaaaagttcaaaataatatgaagtggattaaattagggtattttcaaaaagaattaaaataaattaatatactaaaagatattctcacttactcattggatttaacatttttttttaattaaaggatattagaattattacttctcattacgtcaaaaaacagaaatattacttctgtttcaattttgacgaatactttcacaaaattatgaaagtgtaggttagggcctcggaagcccacttttgtgcgaatgagtgaggacttacacgcgtgctcgttgttcgtctgaccgatttaaattgtactgactgatgtggtgtgacactttaattttataaaaatttatttaataaaatattattttttatcttattttatctatttaaaaatgtgtttaatattaaattaaatacttagtcgtattagttatgagacacgtttagtaacaactctttc

SEQ ID NO: 81580 - DNA, 2052 bp, Cannabis sativa
gatgcagatgcagatgctttcgaagaggatgataatggcatggcagaggttgaagaagattcagagggtgatgttgatgtgagtgaggatgacggctcggatgaaatacaacatcctcaaaatattgaaggctctgatttttcagcttcagaagactacagcgattaaggtgtcaataatcaggtgattgccagtcaacttaacccgttgctgcataagattttttgttgtgcagcctccctagtggccaatttcgtatttagggaagggagattgagcgagtttccccttgttttttttttttccaattttttggttcacgatttttaattctttagtcagttgattagatcccaggatagattgcacttgtaattggataaggaaataggcatattgtataatcacgtaacagagaaaatatcaatagttaaatatctaataaaggttaatcaccttatacttaaaaaagttaggatggttggtgtctctcttctatattattcattgaaccgtgatggaaggctttttctttctctggtgtttcttttttttttttaaaaaaaaagaacatgtaaatctttccttaagagagcgttcagtacaataaggtggtgttttatttgaggtaatggaagagaatggaaacgaaacaacttttattttatttgtttgtttggtttcattttatagtattggaatgttatttctattctagttatgttttcatttattttcactaaatgccacttaatagggtgtttcttatgtgagtttgagttggagagagtatagctgacttggagagaatgtgaagcttaggggggcatttggtacaaggggtttaaaataatctgattaaggggaatattatgaaggagaatatgattacttgtaaatttattaatatctatgggaatatttaattagattactgttaattaaattatagtgtttgattgagcacttaattagattatagtgtttgattgagcacacgaaatttatatattattgtagaaaaattaaatagtaactattatatcttttttatgttaattaaatataaaacataataaatattcataaaaatttatacaattaattaaaaaaattaatgtcattttatttgagattaatttaaatgaatatcattcatatatattttttacatttatttatgtaaaattattaaagtaattgaataagtatagataaaagttatatttaaataaattttaagaaaaagttaaaatgagaacaaatctccatgcatttattaataaataagaaaatagtctaaaatatttaagtttaaaaattacattttttgtgtttattaataataaatattcttattaaaaaaaaagctaaaataaaacccactctaacattaggaggaaatcaatcttactctaacatccctaagaggaaatcaagtttaaattgttcttctaaagtaaagaagtaatcgatgtggggttgatttgaaattagaagtttttcgattttaagtcgttgtgaatttgtgagcccatcaacttttttgatctcttcatatagattcattctcctagcagtaccatcaacttcatgttgaaaacaatcagcaagttttctaatagaatcacttgcagaagcttgcatagtactaaattcttgcactgacttaaaaaatagttcaaccaatggatctccactatttgattttgtcttagcctttcgagctgtttggcttgatggtatattgctattcatgcttgcattagcattcatctcatcaagtgtatcaaagggatcatagtcatcattccaaccattatttatcttttctgtaatttcatcaagtgtttcagagaatcccattgcaccatctccagtagcatgatcttttccatatactatagccagttcattataatacggaaatgacttgtttaataatctttttgcagttggatgactctacaaaattatataacattaaactaaaaaaataatgaatgattaattaaacaattaatgaaataaattttttctatagtaactaac

SEQ ID NO: 81581 - DNA, 1195 bp, Cannabis sativa
tgttttgactctctcactttttaattacttttttgctttgacttttaacgatatattgttacgggtaaaacgggtcagataagataataaacataaatttgttaatgggttttggtttacattaaatgggttcatgtatgtctttgttcggatcgataatagtggaaattatattttataccaactttactttatatattttaatttttatttttatttttatattcttttaatatatacccacttttataggcgatgtttctattataccccttaagttaatgtaatttaggtgctagatttaagtgaaaaatgagggtatattagataatccactcacaaaagtgggtatattttaataaaatataatataaaagtattttttgattaatgaaaacaaaaaagaggtataccccaacttatcctattatacgaaattgacatgttaataatataaatatgttgaatatgtcatcaacttattattaattaatattttgaaacaaaatatgcttataaataagatatacgggttgtacaatatcaacctgtttataaatagattgtgtttgaattttattttctaacacgattattaaatgaattgttttcggatcgaatatatacttactttacataagtctcgacatgatacgaatacaatttgggaacataaattgtcacccttgatcctagctaaagtgattctttaagaatatttgtttatctaggtgttattttataagtgcttttataatggattcttttatggggattttttaatgtactttctatttattttagataattttttagtttatataatcgtttatgctatagttatttaaaacatattgtaaaattttgagaaactcgaacaaatttaacatgcgaaatatagtgttgaaatagtatcttgtacgtatgatgtttttattttataccagtgtaaaatatagtgtttaatccttaatttcagtatattaatatttttcaaatatattaaaattttataagataccttaaataactacaacatagattgaaaaaaattagactaaaaaaaatttctaatataccaaaatatataaggtgtatcagtgcacaaattttattatttttttttaataagttgcacaactttatttattattatttatacacttttgttgaatgaattttttttccttatttt

SEQ ID NO: 81582 - DNA, 1153 bp, Cannabis sativa
ttataaaaactatttgcaattatataatcagattaaataaaaatcgaaaattgattttagtttcctaataaaaaaaatagtttaatcaataagatgtgaaaataaaaattgactcaagagactaatttataaatagaattataatttaaaaaaaaaaagttaaaaaatatgactccaatccaaacttattcattttccttaactatatgatatatttatatattttcatattaaatatgtttacttaattatataactcgaattattctaatggaatgtaattgttataaatataaaataatgaaataaggcatatatatagaaaatagaccgaatcatattagctgggaagtatatctatacatatagtttattttagttattaattattaattaaataataaaataaagattaatgattgtatcaaaaagattaatttcaacctgttgcgtgtaaatatttaattatttattgtattatatattctcttgattttgcttctgatgcaatacattacaccctctttatttattttattatattccactaaaataataataattagactattaaataaaattaaaaaggacatttgtgttaatgtgtaaggaaaaaaaaaagcatatccaatactaaatttaaggattcaaaaccaataatttaaggataatttatatccttccttgaccatattataaaatataagtactctatatgtataaattatgttatatattaatttatatataaaattatgttatatattaatttatataaaaaattatgttataatatattttttgttgatataatatttgtgtgggatggtggggagcacgtgatgttacttttcacgcatgcaataaaagctaagtgaaatttattttttagttttatttttgcaattgtacccatttgcctaggttttattataaatatatataataataaaaaatgagagcattataagttgtgttatttttgttctggttattatgttattattattatttttagtatgtaaaagattattatatggaattattttaaaaatacatacaaaataataaaaaaattacaaaagtatagtcgtacgaaagtttatatattttttttttttacaattttaagattttatttgtaaaaatatat

SEQ ID NO: 81583 - DNA, 1238 bp, Cannabis sativa
tcctcgatgatcaaggtgattttgggcacattctttctgtctgcgtccgtgttttgttggaacaacctccatatgaactctgtggctgtggttagagtttgcttgctgtattcagctccaatatcgttgttaaatctgatgccaccattggttgtttcggctttgttgatgacctcgtattgaacaactgcatggatgttgtcgaagctagccacggctaggataattactagtaaagaaagggaaatgaaagggtgatcagccatggttggttttgtttgtatatatgtatactttgataaatatttgatgtgttgattgagatcaggtgcctcatatatagggaagaaatggtaggttggaaatggtcaccaaagtagcttgacatttatgtttggacttttctaattgcctaatactttttttttgataaaaaacttgataattattacaaaacagaatgattttgtttggatataaatatattatatgtgttctttatttttacactttatagtaatattattttttatatttttacgaaaattcacacaacaacttatataactaaaattcacacaattaaaattcatatagcaactcacatgaaaattaccaaagcaacccggtcaaactataaatttgaagatgaaaagttaaaagataatatataagactatttctctataatataaagaattaatttgctgccaaaaaaaattagaattgaatgaagaattagaacttaattggattgctaattttgtgaggctttttttcacattggatttaatatattaataattttaaattattttacacacgacaatttatacatttttttttgtattgaacgaatgaaatttaattaacactaatataactaaatatttttatatataactaaacactgttttcaaatagggtgatttctaatttttagggagcgtaagacaaaatttaagaaaatgggtcttattgagaaataaaatgaaattctaagttattttttaagtttaattggatataaaatttttatttatttatttatttttaaaaaaaaaggtttaagaaactccaccttggatgagcaaaaaactcaacaacaaggggtcaccaaatcttactagcagtagccgataaagcatacttagctaagatgtgagctgccaaattaattgttcaacaatgcaacatgtttgcttttttaaacagtttgtaagaaccaaaattattaa

SEQ ID NO: 81584 - DNA, 822 bp, Cannabis sativa
tggttatgctgtttaccatgcctttaactcatttttattgaaacaaatagaaattacacttggggaattcgcctactgaacttattacattgttttttcaggtgggccggagtaagtgaggccagaggtgattatccatttagccaccataaattaactgttcaattttatgaagcagctgctgctcaggatagaaagttggaagggctggttcacaatgctattgtagagctttggaggcccgatccgagtgagctaactcttttgttgacaaagggagctgactctacgctacttaaggtgcctcctactgcagttactttgactggtagcagtgatccctgctttgtggaagcatatcatttagctgactctggtgatggaagggtcacattgcatttgaaggtaaactttgccccttagctgctgtagatgcaaaagtctacgtttatttatcacgtaaaatgcgctccttgtaccttagctgctgtgttggattaataatatgcatttataacaattcaattcatcttgaatgaaaagattatcaatttctttaaatttgttctcttgtaatgtaagtttgagcggtcctctgtagttctaagtcttacacccccctaatatatgtgattcaaatatatacatagaatgccttcttgttatgtttgacagaattttttgtttggttttttaaaattttctacgtgtagaattgtatcaattaaaattttatttattatagtagtgatttttttattttattttatttttttatctttttaaatattaaagccatgagtttttgtgcaaaaatttttg

SEQ ID NO: 81585 - DNA, 2619 bp, Cannabis sativa
ttcatgaggcagacgagggtagcacttatttgggtttgcctaacattatgggtcgcaaataaaacagctctacttggttttctgaaggataaaatgaggaaaaaaatccagggatgggaaggaaggttgctgtcgagagctaggaaggaatttctgattaaatctgtggctcaatcgctcccaagttatgcgatgagtgtgtttttgctcccagtagaaacttgcaatgagatggagtaattgatgtgtaagttttggtggcgatcatcgaagaataataaaggaattcattggaagaagtgggataaattggcgattcacaagtcaaaaggtggcatggggtttcgaaatctctgagattttaatttgagtttactttgcaaacaaggttggagattctttagtcggtctaaatctcttgttggtagaatattcaaagctcgttactatcagaatggaattttttgacaacagaattggaaagtaatccgagctttgtttggcgtagtatttttgaaacacaagatattgttcgtaggggggcaagatgcagagttggtgatggttcaaggattaatgtgttgctggatccgtggctagcttttagctattgtcgatcgggtgtgctgcaacctgaaatggtggaggcgttgtgagtgaaagaagctttgagttgggttaagaagaagtcatggaagcaagtggtaattgaaactgatagccttacattggtacaagctttacgaagttcaatcccaatggtttcttactttgggagtattatttctgactgtaagttgttgttgaatgagttatgtgatgtttctgttcattttattagacgttctgcgaatagtgttgctcacttcttagctagagcatcctatttagttactgatcgtgtgatcaggagtagtgatgttactccggatttaagccatgtaatcaatatagattgcatttaaataaagatgatgaatgttttcaaaaacaaaaaacaaactaaattacagcagttcttgtcaatttatttttggaaatatgttggccatacattggaaaaagtttgctttagagacaatttttataatctggctctcaagatgacattattggttgtatttctcattattggggcaacttgattaataaagtttgaagttatttcaaagataaaaaaggagatctttcataaatttagaaaaattagaatttatttttatatggcataaataaataatgcataaatttgcatgccctcattgtctttcactttcttcctacgtgttacatcagatcacgtctattattccagaaacaatcagaacccatcctttaatctttgaaatttcaattgcgaaattctaatttcttctgtaatcacagtcaagacagtaagtcatattctttctcattttattaatttttctccttgattgatgtttccttttctgcattcctttgttatttaggtaaatttaattttatttgtctgaatagttctaggtctaggaaaaaatttaggttattcgattcataaattttatgggttaaagtcgtgttctattttttcagaaattaggatagcactgtttataagtatgacccaatttattccagaaattacaatcccagaatccttagaatcaaattgtcctcaaatttcagccattccattcagacccaaaatacacataccctaaactattcttgagataaatgatgtaaaaattagggatcatcttattaaaaccaaccaagacgaaatctctagtcactatagaaattcttacaagaaataatttagggtaaatactattttttgtgagaagttgcctcgcctgaacctcataatttaattgatattccttcagcgagacctttgtttttacctctagtcactgttgctttttcaccaggtgacttagattttgagatcattgccttgaaagcacaaaaattaaagaccccacaagaccttaggtctataggatctcatattggagaggtactaaaatcgtgtggcatcaagtatgggcaaggatgctgagttaggtctgttgccccaggagaatttagttgtttttctcctgaacgtgtgagtcgagaagaaggttgtagtacaagcgagtcgtctaggataggtgcttggggcctcgaacacataagagttggagcagtactccatcttaaagattatttcaaggaattttgtaactacctcgtcattgctcctttccagctggtaccaaattcttatagaatataggccagtgaaagttttatatcatattttgaagtgggagtgtcagaccccactagaaattttatatttttattcagtgaaggcctgtcccacaaggaagcgaggagcaagtggtttccactatctcgagacccacactgatgatcaaaggatcattgtgaggctacccaacaaaaataaattcaaggatgaattcttttggacataaggtctcgcccccatcaatacaactgtgtttcgcattatacataagtattacctcatctcaaaaacttggtttcgagttttaaacttaattaatgcatgcatttacttattttatgttgtattgacagcagttacgaggagtgttg

SEQ ID NO: 81586 - DNA, 711 bp, Cannabis sativa
gttcatcacagaaatatttatgcatgtggagtagtttgctgctcttcaccctccgaatctcatactcttcactttcatggtagagcttctgggtcctactccactgcaggtcctttaccttttgcaggtttacggggtggcctagaatcattagatcgggaagagaatcccatggacgagattggtttccggcattgttaaaatttcttcgagtagaattgcggttggtcttatcagctgcgtgtcatgggcctgtagatctgcattcttgagtttgagtccttacaaacactcgctcgaagctcacttccctaacatgtgaccactccacattagagggagaacccataaatccacatttttgagtctgagtccttttggacgctcgctcgtagttcacttccctataaggaatcttagtacttgctgcttgctgagtagggccacgattactaggagtggtaatactgctttgcgtgttcatggatgattactgcttgcttgaaattatgaattcctttcggaacaaagctcctagcaaaaaaatcgaactataatcaggaacttgagttgtggctctcaatgaaagcagcaaaatgttgatgctaaaatgtggctaacactagctcgctagattgtgagatgaataacgagtttaagtaaataatttagggagacacacaaagtttatagtagtttactccccatgtc

SEQ ID NO: 81587 - DNA, 942 bp, Cannabis sativa
ccaacaccaaggaccacaaattttgagaagaaaaactcatagaattttgaaaataatagatataaagtattaggataacaataatactttattgaaatatcatttacaagaagaaaaatattttaaggctaaaattcatggaagggtaaaacgataaatttttccttgctcaattgaaactttctatagagcatcattagttatttagattgaaacaatggataattatagcatagctatatttggtatacagagtgttctacgtaatcaagagtgcaattctaaatctatagttgagtctggagaaattaataactcaagaaatttacttagtaaattatgaatctacttattgggagcttgatttcataggcccatggtctccacattatctgggataatacttccttgtagactcaattagtttctttaataagtcgattagaattctaaaatagactatgtcttatttaagaatttttagtaaagttaagctaatttgagaagaaaagagtagtaagggtttaattgttaattaagacactttgtaagtctaattaataaatatctttgagttatagtttgtttaataattgtataattattgaatagataaaattgatatttaaataaaaatattaggtaaatggaaaatttgtaaaaagatacaattgtttcattaaatgaaaataataaaaaaaatcaaagtccatgggccaatagtacaatttttttatggttcatgccctaaaaaaagcctataaagatatttctagctataaataagagttgaatatttttatgtatacttgtttgttgaattattaatattgaatgttgaataatttatatataaatataaaaaaattccttattcatatacgaggctgtgatttatattgtacggagaattaagatcatttagccacgaataaaataatc

SEQ ID NO: 81588 - DNA, 924 bp, Cannabis sativa
gttaggtatgagagattcgcacaaagagacactagtgaggttgttttttttttaaagaaaaaaacaagtctatcaaattttatctatataaatattaaaattaattaataaataagtaattaatacaagaataaaaaaaacctaagaatgaagtatctttatctctcactctcttgcttttttttggcttctctgtaaatgtaaccctatccctatgtgatcaagttggatgggcaatgtttcttttatagctagataggcccaaacaggcttcacaccattgaatccaagaccctttgtgttattccaatttttatccatctgatgtgacacttccacgtggatgaaaccattacaactaaacagggtcattctgtttagcttcgaagtcaagaacaaagatagagatacacaagtattaacaagaccatggcaggatgaccagcaggccaaacaacttgtagaagaccagacagcttacatcctgtagatgggcagatagcttactacttgtagaaggcaggacaacttaatgtcaggcaactccatgactacaaagttttaaggtttcaagaaagaataacacaagcttaaaataagattttgacaagaccctagccgagtcatcaactgcccgatcagaggtggaatgaagacaatcgagcagcttctagatagggatggtcggccaactcacaatgcacatcccgacagcctgtatgggctgtggtttttccaagggccttcttgaagacttccaagctttcctataactttggaacagctcaaactacccacgattaagtagggattcttcaccaacaagtaaagggacctctcttttcattttctacacatgcatttaagagcttagaagcactaaggtattggactctctcttcttctcatcacttcacgagtctt

SEQ ID NO: 81589 - DNA, 2027 bp, Cannabis sativa
attagatcttgtgtgagatgtataaataataggtttgaaaaattagagactgttagagcacacgtatttgatcgaggttttatgaaaggatatgaaaagtggacttatcacggggagccagagactgttgttgatgatgaagtagttggactagatgatgaaatgatccccattctccaagacttttttcctccgacaacagagaatgtacaagaggggccaaccacaaaccaacatgttgatagggagagtttgaagcctatttgcgaattgtccattagcgaaaaaaatttaaatcgctcaacaaaatacaaggtaaatagacagctgatgaaatatcatttaaaatataatttatcttaaaaaacattataaactcttttatttgtttatttttatacagaatggtccatcaaaagagcatatggtcgatacatggagagtgtctcatacgaaaaatttgtctagtggttttgtcgacgaaaccgctacagaaaattttgtaagtaaataaatattacattgttaaatttcaaatattatattaactacacgttttaataatgttaatttaaatagggggaattacgtaaggagcttgataggaaacgacttgaaagacaatctcagagtgatacatctggaaaagttcttagaaaaagacctaactatcaaagatgcatgggttataggaccaaaggcaaagggaaaaaattgcacagtcaaagtcagtcagctgcgcaacttctaccccctaataaaatttgcaatattgtggctgatatgtttacaactttacgtgacacatttgggagtaggctgacacctgaacaacgtgccaagttatataacccacggtttgataagtttatccaaatgtacggtcaatcacaaactcctggtgattcgtcttctcagagttacgccgctccttcacatcagcaacaccagccttctctacagcagcaacaacaacattttggttcgcaacagggaaattagttcgtatatggaacccctttgcagtctcctttgctcggttcaaattttgatgatttcaagatatttgggagtttcctgcaggaacaacaatttttttcaaccctgatactaaaccaagctcaattagaggaaatgatacttggtttatcttcaaatcaaacatatgttccttctccaccacaaccatcagaacctcccaacaataataatgtgaattaagactttttctttcgaaaccttaatgataattttatgaaataattagtttaagtttgttaataattcaaacactataaatattaaatatattttgtttagtgttaaatcataatatttagaattggtttaattatatttaatttttatttactttattatttatattattatgtaatttattaatttcttttcattttttttatattttttttatccttactattatcggcccccgttgctaatgtttgttgttattgacaattatttgtggcggactcaaaattcaccgctaataactaccaatagcgtacaatttatagcgatgagttattagcgacaattttcgtattattagtggcggatctctttgctgctaatactaaaatattgtagtgcctatctatttcacaatcagagatatttttcagtctaattttttttatggtcgtgtacattataattagttaagacattctgcaaaaatttgaaaaaattctaaaaaatttaacaagctgaaaataaggttgaagttgttttttgcacacgtgactcttttattttatacgcgtgtgaaataaactgtttgaatattgctttccatattgtaaatgattctgaatttctcaaaattttacaagatatcttaaacaactataacgtacacgactatagatgttaaatttgtacattaatttgtaatgataaaaagacaggtcgtgatccataagactaatttatcccacaatcaaatgtttaaatttttctttcaaaaaattgtaaacatatcaacttttgttttgtgggat

SEQ ID NO: 81590 - DNA, 1474 bp, Cannabis sativa
agtggtcatattttttaaattttaaaatacataagtttagggaattaatttcccccattagtatgcatatataatcaaatttcctaaataaattaaagagcttggttgcataaacccatttacctcttaataaaaaagttccattcaaaaaataagatggtgtttttttttaattagttttttatttttcttaattaagaatcaaaattttgaaaataaaaaagtgactttcaactatttttttaaataattttttttcttagttaatattttaagactcagatcaagcctagactcaaactcggaccccaaacccggatcgtggccctagaccaaaacccagtcccgacttcagacccagactccatacctggcctcggtgccaaccccagaccccgaaccttgaactcggacccagatccgacctagatctgacttaaataaaatcaaaaaatgaaatttatagaacatatttatattttttgttttaaaatcaaaaaaccaaaatagttatagaaggcatttttattttatttaaaaaaaataaaaacaaaattttattttcatttttgtgattaaaaaatgtaaaaaaaaatgttaccaaaggccacctaaataaataaaaatcggaagtaatactttagctacaaattgtttttcttaagaaatgtacattagtcgttttttttagtaaatttaaaagttagttgatatgtttcattttataattgattagacactaagttgagacactaaattagattagtaatttaaatccaaaaaagaatagtaaacccttcaacgaaatagttgggttggttgaattaactcgtccaaattgacttttaattttttcaatttaattttatattttaattaattatgataataaaataaatatagtttcaatcaaaagtttaaatcttgtaaataatacaattttaattacatatatttttaaaaaatatgtatataaattatattatagatataataaaaatataaaaaaaaatatttaattggattgatcggattagttcgggttggctgtgttgttaaatttatggtatttttcaatttgcatttttgttgagttttgtcgattttatgactacaatgtcatctatcttgtccacttaatgcaagattttagacaattttatcgtaaaattaggattttatttttattttaagaaaaatacatatatttgtcttatacaaaaatatggtgaacttaaaaaaaatataaataattataaataatatggtgaagatatattttagttaaaaaaataatttgcggcgtaaatatttaaatttaattataattattttatagtcaagtgtcaagtcaatattcaatatgcatgtgttatttttaaggtctttttcatttttgcacttttaaatatattttttttttgtatttttatggaattctgtatagaaactcttattgcaactagtgctgcaa

SEQ ID NO: 81591 - DNA, 887 bp, Cannabis sativa
acaaaatttaattttctaattattatggtgttcccatggtcaattaatgtatttcaaaagacatagtgagcattcgtattcttgatttgtctatgtcagcaaagaaaatattagaaactaacattttcatttgatatatgtatccttgatttatttattttcatttatattgttctttttagttttataatgttatgttatttttattttatttaatattaatattattatttttgttattattattttgtatttttcaagatgttagtgttttaattaaatcaattattatttttgtaataaatttttatttgaggactaaaatgtaagattatttttttacaaaaaataaaaacaaaggttagaatgcaaaaaaaaaaaaaaaagtttaacactcaattagtgtagatttataatccaaccccattaatgatgtagaatttggtgtacgccaatttgatgaacaatttagtgtactattgaagtgaaatagtataaagatttcacactaatttaataaaatagtgcaccattagagatgctcttaggaatcttatatattaataaatattaatttttattatattttttattaattaatatttttatatattttatcactatattatttatttttatttattatgtcatttatatatataatccacataaaatttatatataattaaaaataacttaattaaaaaaattaatctcacagattaaatatagatggtaatattttatttataataaaatataatattaatggtatttaaattaataccattaatatcattcaaattaatataatagaaaagaattaatattaataccattaatattaatgatatttttaatctaaaatatcattcaaattaatataa

SEQ ID NO: 81592 - DNA, 1308 bp, Cannabis sativa
ttttgctcttcctctttgtcgaatgtgtttgagaatatttaacaattttgtaaaagaagttcaataatttgatatttattttaatgcaaaatatagtttttttttttttttaaattattttctattctgaattattttatacaaacgactcaataacataaaaaaacaaactttattttataatgtctcttattattaaaaatatactttttttcaaaaaattatttataaaaaaataaaataatattagaaaaatatgttagagtaacctattatttcttagaaaagtatagggaaattagtttttaacctttgttttattcatttttacggtttgggttgtttcgatgattattatgtgagttactatgtgaatttagattgcttcgttattgttatatagatttctataaaaatgcaaaaaaaaaatatttgaattgtaaaattgaaaaaatactaaaaatatatcatttattttacatcacatattaatacaaagataatttattccataattattaataaataaactatatagtatatagaatttgaaagatatgactaacaaacaaatggtaataatgaatgacaagtcaccttaaagtaaaattaaaatgtaactaatccaaaatgtaaaaatactgcaattttaatttattttctaaactccttaaaaaactattaattataaacttaggtatctcaacccatctcactttctcttcattcttcaattctgtaaatattttcttttgatgatgcttggaataaatttaagtaaattctttcatctttcattgtcactttacagtttctcttttacttgttagtgtaagttgtgtcagtgccttatcttttttccgggtctttttcaggattttttggaatcttcctttgggtcttcttcgggatcttcttcaggatccttttcttttgggtcttcttcttctaggtcttcttcttcagaatcctcttcttctgggtcttcttcttcgaaatcctcttcttttattttcatagcaaatggatgatccaacaacatctgagcagaaggtctttgattggggtctctggtgaagcactcaagtaaaaaatctttagcaatgggagtaagttaagatggtataaaaggcgattcagtagaaatcttgttgtacaactcttcttcccccaaattctcatcccacggcagatttccagtcaacatcttaagaactaacacacccaagagcccaaatgtcagaggcctggtcttgagtttcttcacacacattctcaggagatagatacaaccaactacctgtcact

SEQ ID NO: 81593 - DNA, 1648 bp, Cannabis sativa
tagttgtgcaagttgcttttctttataaccgacttatggttaggaagtttagttggatttaattccaacactattatctaacaattggattgtaccaataatacaatatcaattatatcagattatactctttgagtcactgcaaaactctaatatttttatgaggtgacatcttttataaaataagacccgataaaattatatcatataacatcttgtaatagcagtagacgctttttaacatttctctatatttttgtgtcgaattcaaaacttgactcttttgactctctatccaatggtgctgaataccacagcacattcaatacacgataaatgagactcacatgtatattaaatacacactaacacccatatcaaaattcttccctccaacagttttttgtttttcttagattattattagttttgtctaccacagtattgagactccattaaagccatgaccccatgtaattaaatatataagacacattgttttcaactagctataaatacagtaaggacttgattttttcaagacttttaagctatagaccaacattttattttccctctctttcttttatttattcatatatggcattaattatattggtatgaagtatgagcctatagtttagttataataaacttattaattaaagttgtatgtatagttagttagagcttgctaaatattgcatatatatatatatatatttatatagttggtatgtaattgggaaagggtggatataccagctctatcttccatactaaaagctcctaattgctagttttaactcaattagttgtacttgtatctattccttaataataataataataataataattattattataaataatttaataactgtgaagacagtatatagttggcaataggaaatttggaaagtggatgtgttataaaattattcatggccatgaataatgatatttcacttagactagacattttgaattccagtccaaatattaatattaatatactgcaaaaacatttattattcagttatatgattccatatatagcattaatgattgataacaccattaaatgaacatcagttgttttttctgactgaatgatcacatatgctaaggtgaattgttattaagtagaggtaattgtgcaccatgcatgtttaatattataaatttttatgtagaataaaattttaaaaaattataaaaatatgttaatatagaaaaaaaattatttttacgagttaaattttttattttaaaaaacatggattttagttttttttttagttcttttatagattatttataatagtcatgaggttagttttttttttttggttattttatagtttattaatagttgattaataactattgttagattgatttatcattgttttttagttattttgtttttatttttttttacgaaatcatatttttataaataaaaatttaaaatcgtaaaattgtaaataatatatatattttttttgaaaaaaaaaactctttaatattataatgaagtagtgttttgtaattaataattaatattttattataatatttatcaaattaaattatataaaatttgatatattattaaattaggctaattaacaattttttc

SEQ ID NO: 81594 - DNA, 1383 bp, Cannabis sativa
atgtcccggatgctaccttattacataaagacttagcaaataatttgaatgttaagcttgttcgatccacgtgtccttaactggttggtccacgtatattgggcaaaatcaggggcaacaattatgtattcagttcatcccgagatggacttattgtttcactaatcttactcgttaacagttattattcttatcttgcttctacttatgtggtagcgagtttgaatatttttattagccgtatattcgagacaagttatttaatgtgcatttaatgctgcaattcttaagctgattcatattctttctctggtataacaattgccccctaaaaagtactttctaataaaaaagaactttttaaatgtcttcaagggtaccattgtatttttctcatttaaaatttacatgcttttattttggcgattcaaaacttcaaggcaaattatttcttcatttaatgctccaactgttcttttctcacacagttcccattcgtttgatcaattttcttttcgaacggttactatcatttaggtataaatttcaaactctcatttatttttgccatttctacccacgaacctttccaatttcgtgaatctctcaaccaactcctcctttgcatgccctcactttctttcaccttttttctttgaatttcatttgactatattcgccagcttcaagatcatcaggaccctttcaaatcggagattccatcccaaagtttgtcattacctagaatctctcatcaaactagtaagtaacatgctcttttgttgatttttcttaatttttgatcttaatttctttgtatgtgttttggtttgcattatttattgttttgggtgaactttgtatgaatgttcgagtaaactagggctagaaattttaaggttatgtgattcacaaattttgggttgtttatgctttatttttccaggaattgaggcattaatcactgtgatcatgtcccaatttagtccagaatttacacccctagaatccttagaattgagttgttctcaatttttagccatagattttaaaccccaaacccaaaaacctcaaatcatacttaaaattaacgatgcaaaaatttggaaccaccttattagatctgatcagagggaagcttctaacagttataggcgattattacaagaggttattgagggtagacaccattatttgcgcgaaacagcttggcttgaatcttcaagtttagttaatatccccttagcgaggctcatatttttacctccaatcactgttgctttttcaccaggtgaattagatttcgaaataatggctcaaaaagtttgcaaatccaagaacacagagaaacctactgttacctttgaggctgaattgattgag

SEQ ID NO: 81595 - DNA, 692 bp, Cannabis sativa
gcatgaaaactgtttttatttataaacctattcatatattgtattatatactcactgtatgccctattttttactgttacacgtacatgttcttaccttttatagtagtgcaaatattaaagactaacattaggtacatagtaagtaatgatatatttacacacaaattacatacataataaactattaacactgacaagtaattttaaataatctatatgtattttgtgtgtaatttaattatatatgcacgtattattataatagtgggcacatcatgcactttagtattttccttatgtacaaatatttttgagtatgaatcgtatcattttttttcttatattatgtagttgaatagttgaggctgattacacattattataagcttacttttttctttatgatagatttaaaaagcttaattaattaatatgtgcaatttgtgagtgtctcaatggctaatcaatataacatatatctgtttaactcacacttttttttcttttttatatattaattaaaactaacacgcatttcaatattggttgatatgtattttgttagtatgttgatatatatgtgtgtgggtgtggctgctttaggtgtgaggagctgttacgatgagggaaaacgaacggcagaaaccttgagcatggactatcataggggccttggcattgaggtagtaa

SEQ ID NO: 81596 - DNA, 1339 bp, Cannabis sativa
tgtatttttataggttttttttttaaataaaaatacggactattattttagggttattaaaagaaaatttacttttgattgatgctatattgtattatgtttccacaacgagaaaataatgttgcgaaaaaatgtaaataaaaaaactgaaaaaaaaaataacagtccataaaaaatgtaagaacaaatcataataaataaataaaaaaaaaaaaaaaagtacaattttaggtgattttatgtgttttgtgtaaagtttcctattttatatgtagaaatggaatgcaaattaagcaaatcgtagtatagtaatatacgtataccatctagtatcatttgatattaataaaaggaccatttttctttattttcttattggaaaactgacaaaatataattaaatcaacttcaaagtacaattaatttagcaagttgtacaaatgatgtgccccataaaatattattaaaagaaatgcaattctgtatatatttttctcaatcaatttgtataatgaatcctgctagtgctactgctatatatatatttaaaataaagaatatttattaacacaataataataataatgggtagtactagcaatttgagcagccaatattactactacttgttcttcctttggttcttgtcttgtcttttccttttagtacattctataagcaaatcatgggttttgttaacacatggattaatggtgagaaatccaaaccatcccttcataatctactcaattatcccattgttaactcattgcttccatgaaaatactccatattaatccctctatccatttccttaattatttcttctatcttaaactttcatgaattcttcttcagataactgatcaagatcagtattattcaaaacaggtttttttttttttgttttctcttcttttattataagagctttgcaactgaagaaataaatcattagctttgttggtttgtttgacctattttaagttactttgcctttggatgtaatgtgaatatatgtgcttaattatattttggactttaattttgttttgcttttcgttttgagttaaagggagtttcataatcataatcttagtgcctggttactatgaattgggctcgattatgaaatgaatgaggttaacttattattagaagctgaacgagacaaagagtactagccatgtactcattgtaatttaagaatttttttattttaacttcaaaataatttttttatatttttatagaaatttacatagcaatctacataaaaccaacttaaattgtaactaaaatctagataacaatgtaattgctctagttcaaggtaaaa

SEQ ID NO: 81597 - DNA, 965 bp, Cannabis sativa
ttttcaaaaacatgttctatataactgttttccctttttaatttttgattgataatcaaaattttaaaagttttgaaaacaaattaaaaataactttcaaaattttttaaaacaatttttctaatcaatattttgaactccgacccttacttggaccttgggacaaggactccggtcccagtcccagtcccaaactcggaccacaaccccgggcctagtcctggactcggaccacagccccgatcctaaactgggacctatacccgacttaaataaaataaaaaactgaaaataaaaataaatgtgacacgttttttgttgttttagaatcacaatttctcttatttttataattaaaaacttaaaaaataaaaatataaccaaatgcccccttaaagagtgggccaccatgttgtatcatagaaaaaaacacaaaactgctttgctaatggtttgcacgaacgtttttaccttttatatttcgaaggagaaattgagaaaagttaccacagaatgataagatatagatatgctataatcaaggacaactaactagtaacataaataaagaaatggctaacacaatccaactcacataaagacatgctgcatttcttacagtttggttatttaaataatgaacactcaaattttattccacatcaagttgtgtagatgtgtattctaacaaacataagtgcaaagacaaacattgccaagttgaccaggattataacacattgcttcagtagagcttccaaatttgttgagacattttaatagacaacatttttcattgcatttctggctgcattgtccgatacctgctgtgcatgtcctcccttgacacatgtcaatgtgtactgccaaaaaaaagggtccattattacgattatcatgcactaaataacctgaaaaataatatatgtactgattcataaaacattagtacttacctgaaagca

SEQ ID NO: 81598 - DNA, 740 bp, Cannabis sativa
agctcactctcttgcaaagtttgtactctcttgattgtacaaaggtttggtcgatttgcttatcgccttatccttagtttttttttttgtaatatttaaattgtttggcttttgatggcaaaaaaaaataaacattattatggggcaccaaggtgtctaacactcctataacatgacatcttataattagtcaataatgttttataatttttattaaattaaaatgaatgagaccctatattcaattgtaccaataagaatattaatctaaacaaaaaaaattgagtagggattacatattttctaactcaaaactctcatctacgtggcaaaatatgattagttgttatagtggtagacaatgttcacatccttacacgattttttttctatatcacccgtacacgtgtactctgcacacgttctttgttcaaccaaatattcaacctcaatatttaaaatcttttgtccttttttgttgaaagaaaatcccaattcaatttctgtagccctaatccccaaaattttgattaatcattcgttatattttataacagatcacgattacagagctggatttctttgcctaaaaacccaatttaacctcaagcttgtctttttttcgctttcgtatttgttcgtgtgtgtatataaaaggtacacagtgaaaggaatttgagcttgaaaacaaaatatatcaatggcaccgagtttgtaccaatgggaatcagaccctctgt

SEQ ID NO: 81599 - DNA, 931 bp, Cannabis sativa
attatttgtcattgagttgtaatcatgttggtttgatatttctattggagcacaacaattttccaacaatttgtgattataataaactagattataacattatcattataatagatcttaacaacaatactcagttcaactatttctcacagttctgctacagttattttttctcacatcacaactacagttattttttcccacagcacaattatgccaaactgacccataattagttataattttttaaaaaaatttacaaataattttaaatagctacaacatattagatcattaaaaaaaactaaaaagtgagatctaccataacatccatttctttagggaatgtactatacaaatttcttatattttattttaacttttcttttatcatttttcttttgcactgacaaacccaatttttggggtacagactttattttagatgggtcaacaacacttttgtgacgatatatattatcacatcaaataaaactcccttttatacgagtctaccaagtcttatgcgattatcccaaaacccattaaatttctttctcttttagtgaccaactgaccatcaatgaaatttcttccattgagaattatttcatttaaatcgaaatatatatgtatatatattaggataaagggatatattaacggtaaaattatatgaactatataacacttaggtggcgtttggtaaaatggaataggaatgggaatggtaatggtaatagaaatagcaatagaatgaaatagaatttctattattttgtttggtaaagcctatagaatcaataatttaataagaattgtgatgattggtataatataaaatgaaatggaatttttattattttgaccaaaatgtcctttactcttttaaaataatttttgttttataaaattaccattatggtacaaa

SEQ ID NO: 81600 - DNA, 774 bp, Cannabis sativa
acaaaacccaatagaagtgacattacagaaagtaattgttgacagagagaaaaatgttgctgaaccgaaacatgatgaggcttaagctggggtaattgttgaggagcaaccaaaggagacaagcaaaacccaaaatgattcaggtgattggcatgcacctaaatctaaagtctcgaaaggggcagggtccataaagaaagtcattgagacacaggaacatgttcttcgcaactcgtttgagattttaaatagaaagcaaggtgagaaggtaggagatgagggtccattattgtctttttattaatggatttttgcaatataagtagttggaatgtgagggggttgaataaaaaggaaaagtagcagatatttggagaattaataaggtgagagttggccctctccttcagactaaaataaaaggggtgaagattcagaagatgatgaatagtagtttctctagttgggagttctatagtagtttaacaattaaaaggcgcattttggttatgtggaaatagaagtttattcaggtggaagttttggaggaatccaagcaacatacattgtcacattaaaatgatagggcagaaaaaagattactttgctacttttatctatggagccaactttatagatagtagagttaatctttgggctgccttatctttgatcaatgttactaaagcctgggttaatcttggagatttcaatgatgtgtttcatcatgatgacagacagggggaatcttgttagttctgctgagcttcttga

SEQ ID NO: 81601 - DNA, 1418 bp, Cannabis sativa
atattttttgttcatttatttatataacaatatgtacatgatagttatactacatattttattagttttcaaaatattgtaatattttttgaatagtaatttttaaatattgtgttgcgcaccgttgaaatgaaagatcatgaattggcacaattagagaatgaaaaacaatctcactcagcaaaatgtatctaatattaatgttgtaataattgataataatattagctcatgatattgttgtactaatgtggtttcaaagaatattttcttatattaattataatagtcaataggaattatattagctaatgtatcaatcatttgtaaagtacggagaaaaataatacaatcactctagaatatgtaatattcatctttctcctattttctcttagtatcagagccactggcttgcatcaatggcctcagttgaagatgataatcagtcctcagccacaaattcaaataaaacatctgaatccaaaaaaactagtccatctagtcttatttccccaatcattaattgtagatgtttctgttgcaacacctactctagttgctcatatttctccatttaaaagtttagctctccttaccctcaagcttgatgtagctaacgatgcctattggaagttacaggtgctacctgctctacgggctcatgatttggaagggtgaattctagggtcaaaacttgtccaccacagtttgttgatactgttgcaggaactttttactacaacaaaattagcttttagaggcggttacttcaattgaatatagaaaaaaggtagctaaagcatttttgattagttttgggttcccgctcattcaaaattttcaatttgtagtagttattttataaaaattgtaactatagagtacctcaatatttatgccatcgattacttatttttatttgtgggaatgaccttatgtcgtcagttatttggtactaactgatgccataggacacgcgttggctacaccacaataagaattgtcacttttgccagtgcagttggcaaaatgcgccggtaaagtttttcagcaaaaagggtaacttccaatccctaatataattaagtttactttttgtcggcgcgtattagcgctggaaaaaggcatagtgagaactgtcaaatggtgcatcccattttagcagtttaatatactcttgccaacgcaaatatgtgctggcaaatggtgaacattttggtgagaaatttccttccatgaaatagttttagcagggaattcaaagtttcaccggcgcataactgcaccgacaaaagtaataaaaaattttagggcaaaattcttgtgtgggaattgatttagtcggcacagttaccatttaatgaaacacaccatttcatttagggttccaattaagactttttcgacacaaccaa

SEQ ID NO: 81602 - DNA, 764 bp, Cannabis sativa
tacaatataatacatatatatgtgtatgaaaaggttataaaatttagacaacaccgcgcaaagcgcagcttagttccctaatttaccatataaaacaaaccctaaagcatagattattatgaaaagtaatgactgtaagtgtgtcgtcatcttctcttcatggtttaaacttttataaatatacaatgcaatcttgcatataatatacacatttatttaggtgttagaaataataatatataactgttatactcaaaattcgactattaatcaaaagctgacacgtatcctacaaaatgaatattaatcaactcaaagaatataataattaaatcgcattattaaatacatttcaaaataactcgttacaattaatttaagttgatagaaatattcaaactccctgactacgtgagcatatacgagaaaagaataaataattattaacagatttaattgatgagacaatacgtccgccttgggatgaacagagtacataataagagcgtgcaagacgagacatcaaggatcttacaactcattgactcgcaattgtacatgaagaagagtacatttatccctctcgctctcaacgccacctcgcaaataactttataatatgaagaacattgtaagaagaagaatatctatacttagcattttttcctccaaagacgaataagaagaataactcacattctgtgagaaataaccctcttagttagcataaacgtttaaaagataaaaataaggagtagttgggt

SEQ ID NO: 81603 - DNA, 3631 bp, Cannabis sativa
ttttttttttttgtaaataaaagtgaatttagattaagattaaaaattaaacttcatagtcattatataaaatattattcagaatctcgataagatgaaccatccaaattacattcttggtaaaagtccacttaatcatattatggactgcaaaattacattgtctaggaataggaataggaataaaattacagctaatgaagagatttgagagttgtttacattgaatcacataattatataagagtaaattccctttcagcgcattgataactttctcagagtcactcccaatcatcacaaaatagtacttcttcgagaccactgattccataactaacagacatgtcatcgcttctccaattagtgggtcagagaagttgagcactttggaagccgcccacaaaactgtctccttatgatccctagccaaagccaccacgcacatcgaatcacaaccaactttccacatcacagctgattttgacccactcatctaggggaggggaccaagcaggagactcagaggtcatcggagaagttaacaaacaagaaccataatctgcgtaacacacataaatagagtcaatatactgtttaacattacatataaaattattatgtaccttatcattacaggctttctagattgtgtcgactacaattgaagcatataggaaaagttcttgaacgttcacacctcagtctttagactccataaaaatttaacccaatcccacattcgggctccagattcctgaactgggaaaacaccccatggggaagacctccaaaggtgaaagacaaagttgcaatagagaaaaatgtgttccatcgtttcatcactctctccataaaaaggacaggaaacatcctcaatatgcaaccttatagccagaatggagtgaataggcagagttttaaagagaatgctccactaaagtaccttgtgacgctccaaaatttttgaattccaaattttattccacatacttggagcaacactgcaacgaggagcccaatttagggcctggaccacgtaggctgacttagtaaagaataaaccattcgactctttaatctaaatccaccagtccgaaccctgacctccaggtttacctcccttgataatgttattttttatttcaggattgaacatagcttgaggctttgttaaattccagtccccattttttgttagtaagtttgctactttcttgaaaccctccacccaagtgcaattcggttggtagaatccatggccatgcataatccacggatcctcccaaatattagtatatttctcatctaaaatgattttacatgcaccctatttaatgatctccttagtttttacaacattcttccaaaatcaagagtccaagctcttgtaggcacatttcaagaacgatcttcccttcaggtacttagcacttaggatcttataacacagtgacttatccctagttaaaagagcccagtcccatttttccaaaagagcacaattcatttcttgagtttttctgaagcctagaccacctctagacttcgacaaacaaatctgatcccaagccttcaagtagatacccctctttccttgctcacaaccccactaaaagctgctaaccataccatcaattttaaaagcaagcctattagatagcttcgttgtttgcattgcgtaaattggtaaggagaggcctactgatttgatcagagtagctcgacctgctttagagagcaattttaacttccacccatgaagcttatagactaggttatcaagaatgaaattaaagtctacatctttatttcgactacgaaacagtgggagcccaagataattaatatttccagtggcaatgttaggccaagttctttcttgatattacatttcatcccctctttattcaatatactctccacctcattacgcctattacggatagtggtggtagtaaggaaaaaatttgaacatttgtccccctcctttatccaagaaatatgagatctctgttgccagtaaagagctttccgtctaagggccttgttaaggaccttccttacttctgattccttagcccaacttctattatccatcggcatcctctagatatctatgagttatttttccagtggaaggtcattcctctagtatcaaaaatccactattgaaaattcatagttgtttggctgaatgtggaaaaatattttgaattggcaagttaatatctttgatactgaaggggacagtacaattgtaaggggtatcgtttggaagtaggaaagatgtaaaaactgtcttagacaaataactatgaattttcagtagtggattttgatacttgaggaacgatcttccactagtaattggaaagatgcaaaacttgacaaggtaatttgttgggaaaggatgagagggttccctttaaaatcgttcactcttgctaatgtgtaaagattgggagctaaggtgggtgaggtagctaaggtgcgatggagtaatccttaataaaactaatggctatgtgcgggtacgcattggcttcccgattgcacaaagtatatttatgggacgacttattccatcaggagggcagaaaaagtcgattcaaataaaatttgaacgcctgcttggcctctattttcactgtggagtttgaggtcatgaacaaagcatttgtcaaggggaggaggtcaccgaagttgatgaacatggtcaatgagctcctagatatgggaaatggttaaatgaagatgatcctactccaaatggcttcttgactcattatattattcaggcacgtcaacgacaaggcaaggtaaatgggaatgaggtgcaaccaaaagaactagattagaatataatttttcatcttcaagaggtggttcatgcatatgatttagtgagaggcccaatggcttatggaatggtgggtgatggagcttcagaggcagcggtgaggaatgagactatgacagaggaagttacaaaggtggctgaagaagttagagttaatggagcgattaataatggaggaaagatagttgggtagattgtggcaaaggaagttatgttactagtgatagtgggtctcaatcaatgggccatcctaacggtcatagttcttttatccacggacctactatttttgggcctcaaactaatgtgaatgaaaagaataatagtgatattttagatcatattaataatgatatgggttagtccattcaaaagaatcttagggccagtttggcatagccgtgttgtgggaaaaagcagttgtagctgtgttgtgagaaaaagcagttgtagcaaaactgtggaaaaaaactgagctgagtgtttggtaaattataaatttcaaagtactgtgagttgttaagaactattataatgataataataatgttataatctagtttattataatcacaaatatgtaaaaacttactttatataatatttttttctatatattttttatttttttttcaaatataaatttatatgcatttaataaaaataaattatagtattttttattatgttttatcaaatgtaaaaaatattaaaactcaaatatataagaaaaattctatggtgatgttgtttgttaatattaaaata

SEQ ID NO: 81604 - DNA, 1412 bp, Cannabis sativa
cttaaacctaaacatcttggaaatgttcattgaagataaaatatatatcttaaaagttaaaaactagctaatgattttttaattaataaatcaatacaagcacttcttcaaaaaaaaaaaaaaaaaaaaatcaatacaagctgcacaattctccactagttcaatttaccaaaaatatataaatatatatactgtatatcggtaataataactagaatcaaggcactttcttattaaagaaaacaaatcattatatttaaattcaaactttatatattcatctactttttaaatgtaattataatcacaccacattctcaatatagctagattgaattatatgtaattaaactccataaatatcattgtaataccgtacatgccaagattcatcacgacccaaatataatttaacccgtacaatgaagttttgcacattctcaatatattaattatattaaggtggtatttgatgatatttttatttttaaatttttgaatcataaaaataaaagtaatttttttaaaaaaccaaaaaatgtgtactacttttattttcatttgtttattttatttaagtcgagtcaagggtcaggtccggatgagtttgagttcgagtttggatctgggtccgaatttcaaggtctaagttgaggttggggtttaaaatattgattaaaaaaatttgtttaaaaatttttgaaagtaacttttttttatatttttaaaattttaactcttaattaaaaaattgaaaagtaaaaacagatttacagaacatgattttgaaaaatatttttatttttctaattttaaaaataaaaactgattaaaaaaatattatcaaacgcactctaaacatttatttattaaaaaaatatattaaacattttcttacatttaatatttaaaacattttacaaacacaattcattaaaaataaatgtagatgcagctctttaacatcgataaagatttgtgcagtttgagtatggttgttagaaataaaaaaagaaattatgttttggtctttgccgcttgcggaagctttagctttgaggaatgcagcttctcagtgtgttttatttggttttgacagtattttatttgagttaaattgtcttggcctactgaaaaaaaaaattaaaaataaggttttattagagtcttctataggcttagttatttatttatgatttctgtcttttttttcttctctagatttaatctagttgtgcttgatcctattgatgtagtagcacttactttagtaaagttgactttattgacaattgttagcattgtttggttctctagctacccctcttaactttaattcatatttgcacaatacaaataatttataaatacataaattgttaaataaatcaatgaaattatacagtttaata

SEQ ID NO: 81605 - DNA, 939 bp, Cannabis sativa
agagagagagagagagacagagaggggtatcagtgttggtactgggtttagtaacctctgtagttgggtcttaactgtccaatcatgatttttctcaaaaaaagaaaaaaagaaaaaaaaaaactgtccaaccatgtgacactaaattacagcatgtgaattgtttaataaagtatttcttttttttttttacacgttaattgtttaatatcaaaataacaatatttaaagtctctttaatatataagatataagaatttattaaactgttcctaaatatggttatttaggattttggaaactttatgtatgtcaatgaattttttagcccattaaaaatattttttaaattatttacagtgttttgtagtcattctgataaataaattgatgatgtgaatgtttaaactattgatccatcaacacacatgtgtaattaatttttctattaatttagttttattcaatttttttaattattaattaatttttaatttaattatatttttaaaatacatacttttattttatttgattttaaattgtacatataacgccaaattaataataatataaataggtacatctcatcactttatttgttatttgcaacttaatatgagagaagcactacattacaacactttaaattaattagtactgaacaaattcctaaaaaataaatgactttcaagcataatatttaaaagaaaagaaaaattattatttttaatatctgcatactcttgttttatgtagcaatataatctctacatatactatttaatatttatcaaagtaagtgggtgagagttgattttcttttacggttgggtagcaaatagcaatagtattataattaactagagtttaggtacgtaaatggaagtgtacgcaatcaataaagataaagcagtacacattattattattattatt

SEQ ID NO: 81606 - DNA, 1280 bp, Cannabis sativa
tctgtttggttcgattatttattagagaaaattacttggagatacgcattttttaaattatttataaaaatacactttattttattaatataaaagaatagcggaaattttgtaatcattccatgtcgtgtataccgaaataaaagttttatgtttttcttttggggaatgaaatgactcaactgacaacacatcaattttccatattttttctttgagaatttctttgtcagttttttttttttggaattttattatgctatttgttttatgtttttattatttttttaatattttttgagaagttttgttattgttatgttaatgtcatatatgtcttatttaattatttatttcttattttttcttttttacttttataactttagtgaatattttagtatttgaaaaatatattagcaaatattaaataggtaatcagttagtttctaatgtatttcataaaaaaaaaattaaaattgaactttcaactcaaataaaaagaatcaaataaaattttatgtaccgatcaattttacaagttagtaataaatattttataaatttattactacaaataaaggtaacaccaaagtatcttaaacaacacaataaaataatattacctaaaataaataagaaagtaataaaaagtaacaaaaatgtagcttaatcaatataaatacatactttaacatattgaaactataattttagtagtaactaactgaataagtaatcaaaagttactttatacataattttgtatttagtttaaagtttgtttgttttatttcttaataaaatattaaagtaacaaaaatgtagcttttaattactgtaatcttcatcggtgaagataataatgttattataaaaactaacttaaaattatcttaaacaacaatccaacataatattacttaaattgaatttttttaaaaatagttaattatatgttttttaactttaagatatcaattagtttccttgattaagagatacttttataattacatgtaattagcatatatatatatattgaatgatgtttaaatttaaagtttagttacttttttataaataaaatataaaagaaattaagaggttattttttataatggttacattttttttttgtaacaataaaaaaattatatgtgtctacgtatcaaaatgatcaccttaaaaagtagatcacaataatattatttttaaactattataattaacgatttgatgagaaaatagttttgaataatagataagagagagaataa

SEQ ID NO: 81607 - DNA, 622 bp, Cannabis sativa
ttctcataaaccaagaattttagttatataggcacactttatatagaatagatatatagatttgcaatcatcaggatcgggactctttctatcaatatctacttaattagtatccatccaaaaattaattaattatatatttaaagctaataaattattaattaaaagtggattattaattaagaccttccatgactaaaaatatattgcctaattatattgtataatttatatgtatgttcttatataattaagtagatgcatgtatcaaaaatcaagtactcggcaagtaattagttgagatcagataagggttctgtacggtctttctcatcttgtaattattgtccttttattatgtatatataattatttgaataatattcttattattaagagatctctatccaaatcatatgcaataaatatttcaatttcaatttcaatttcaatacatgcatatatattatggtttctaatatattatagcttatccgggctgatgaccgtgttctgtttttatgcttatcaatgatgaaaatcctagtttattccaaaaaaaaaaaaaaacaaaataaatcaacatatatttatacttttacttataacccacatagcctga

SEQ ID NO: 81608 - DNA, 1667 bp, Cannabis sativa
accatggtagaagctttcaagaagggaaaggttgggtatgtccaacccgaaattgctgagatcataggcatcaaagaagctttgaggttgattgcaactcatccctgggacaatgtagtgttagaaacggatagtttggtgtgtgtccaagcagtccaaagtaatatttttatgtcctcacaatttggtcttattgttcaagatgttaggaatttacttttggctttatcttctgttgagttatgttttgttaaacgatctgcaaacaagttggctcattgcttggcaagagactcttgtttctctacaggttgtgtgcttcaattggaagattgttcctctgaagtacgttatattattttgaacgagtttattaattaataaatttcctttttttttattcacaaaaaaaaaaattaatactataaattttcaatcaaaaaacttataccttagtttattttaactaagtcatgttactttaaagattctcatcatacagacaccacttacagtgagaccaagctttttttaatcctaatttagaggaattgtggtagatttcgaactgttgactcaaacaaaaaaaaattgtctaaagacaatttctacacaatacatggtaattgatatgaatttaagaataattttatgtatttttaagtgttaagagctaattaatatgttttttttttatcttaatcaatggacgtaaaaagatgagactaatgtaggagagtatagaatgttacctgttgaaagcatacttaagatcgatgtgaattgtgaatgcttctgttgttattgaaaatgatttgagattagttgggtagtgcatgggtatgaagaaattgttattgaaactgattcaaagttgttgtttgaagtctgatggtatataaccgactatgacagtagttgtgcgagtcaaaaagattcttagttggatcaaacattaaaatctttttcaaattgttattgaaactaattgtcaagtagttttttatgcaattagtcatactctctaaatgactttttcatttagatcgattcttttagattgtaaacttttactttttttttttaaataatatatttttttttaatttcattaaacgatctgctatcacagtggtcaattatttcccttaatactacttatcttttttaggttgtcaattcagtacaaaatttgtccaaatttttgtgctattttattaacgaatttacaattaataatacacaatgtgaaaattcacataaaatacttaattagtgtagtattttcaaaaattaaatccaagtaattaccatgagtccatgacaataatttatatgactaagcattataatcatagtcgccatatttttatcctattaccattttaaaaatcaattaaacatcataataaaattcctatttcaattcatattacattcatatattattaacattatcattccaattctataggatcaaatgtcaccttagcttttcaaaaagcttttccaaaacccaagtgtaaaaatgttttttttttttttgtgctttaaaaactcaaaaatagtttaccatcctaataacatactagatagatcactcatttgtataaattcattaaaaaaaacaaaaaaaagttccacaatacatgattaccaaaaatctc

SEQ ID NO: 81609 - DNA, 2118 bp, Cannabis sativa
aatctattttccccaggcctctcaaggagatctggctgtaggtctgtatggatggtcacgtaacctgttgcctttagtcagtggcaaaactaataatccacagtccagggatctggttttacagttcgcggagaggtatttgagcatcactgctctagttttttcattatattttatttttttctgattttttaaattcttgtcttaaacttattattctcttctcatttttggttccaggatcttagctaccccaaaagcacgaactattttggtgaacggtgccgtcagaaagggggagcgtttgattccaccttcttcatttgaaatattagtgcgagttacatttccaacttcgtcgagtagagtgaaggtgagttcacattatctttttggttggggagaattatatgttctattcgttcctttcttatatgttgtgctttcttcaggcaactgaaagattcgaggccgtatatcccaccctaaaagaggtagctcttgctggctcccctggtagcaaagcaatgaagcaagttgcacagcagatacaaagctttgcaattaaagcggctggagaaagtatgtcatgctacccttagccctttttttttttatataatattttatgaagaactgttgcttatattggatttcgacacatatcttttccttacaggcccaccggaattggccaatgaagcatctggaatctttatctggtgcttgacccaaaccgctgattgttacaagcagtgggtgagctattttactccctacattcttacatttttccaagattttatttttatttaaccaactcctacaaaaactgtgaaatctgaattaacacatctatgcaaaatctgaacaggacaaggtttatcaagacaatttgaaagcaagtgtatctgtcctgaaaaagctctctgagcaatggaaacaggtgtctgtgaaacttttccctcttgattccttgagggaaactttaaagagttttaagaaccaggtaccctactttatcctttatattatcaatctgttcccaccttatgatgatgatcttgcttatgaaatattcacctaatgatttgcctaatcatattaaagtatttagcttgtttctgttgttttcttttaatagaatgagcaggcattggctaatggggtcgatggtaatgaacaagctctcttcaaggaatcgaacaagtattgtaagcagctattgggaaaggtatcacgtggccacgggtgtctgaaaagcattgttgttgttgttcttgccgttgctgtgggcactgctgtcatgtccccagacattgagtcatggaacttggagaaactgtcgttgctcgtcaactcctacatgccccattaagctgaataatacccacccaaaaaccgcagtcggtggttcaaatcatcggtttctaacagcatggacaacaacaacaacaaaaaaaagtagttgcaccctttaaatcaggtggcggaaatgagaggttccatgtatacttttacgactccccggtggtataagaaactagaaatagtataaaaggttaaaatactggttggaaactttgagatggtttgtgccattttaggacttttggttcttctgttcatttcctttttctttttctttggaacccttttaagctattcacctctgacatatatagtttcactcaaaaattcaaatgagttggatacacatgatgtagcttgggatttggtataatttaaattcgaaagtaatcttatgacatttgacatgaaaaatgtcactgttttttgccaacatgtacttctgtatatttggttttgcttcaataaccacaattaaaacccttattgctgaatatttgatattgtagtatatttacttgtccatcattcatgatttttatgttcgagattatatttcataacgatatttgttatacttataatattattcttgtttaaaaatctttattattcgaatttttttaaaaatttacaagaatgattttgtaattataataaatacagtaatgaaaaaaaatatttgatgtgtttttgaacctaataagaggttgatattagcactccgactagtgaatcagaaaatat

SEQ ID NO: 81610 - DNA, 869 bp, Cannabis sativa
  modified_base (815)..(842): a, c, t, g, unknown or other
tcggtagtggtgaagttattggaatttgtaattcctcccaagggatagtctggcaggatctcactgtctaccgtttggacctatggccttagattagatggctgaccactatgagtttgtgcggtatgcctaactgcatacccttctgatccgttcaagggaatactgaatacaatagctagttgttgatttgtaacttggtaggcctttctcattagcatggtggcctgcctagtgcgatcatcaatggctgcctgttatgcgctcataatttccatctacaggtccctccattctatgaattaacgtctttgttcatcgaatgcaaggtttgtgattgctcgaaaatcctcttggtcatgatgcaacgcgtcattatggccttgcattagcccaagtacttctcgtagattttggaatttagtgttgcctccaactagcccttgagtattagtagtggacaggaccccggtgctaggagtggtttgatcgattgatgtactggtgtttccaacttcttgtacgcctggtgtgattccagtaagaggggaagtcacttcgtggcctacagtaggagcttgtgtatttacctgctcggggtttttccctgatggtcctcttgtgtttccaggagtttgcacattgggatttgtcaccattgggtcgccttaatcagcaaggcctcccctttgagtttgtacaaccatcttgcttacttgtcaaaactaagacaaaggcttttgtttttgctctcaatgaaaggaccgaaatgtaacaccctaactaacagaggggtattacgtgatttttaaacnnnnnnnnnnnnnnnnnnnnnnnnnnnnaggtttatggaaaacgtgattaattaa

SEQ ID NO: 81611 - DNA, 2595 bp, Cannabis sativa
caatatcaaataaataattggattggatcggatgggtccaaatccattggatgtgatccaatgaacacccctatttttagggattgaaggatttttttctggtttgaattttaaattttgctcatataggaagttgaattaataaatttgcatgttattatttggtttatatcctatgtgctttggaattactatgtcccggtctcttgatggaataatcatcaatatataaagatacgatttttgaaagaaaaatttttttttattttttttttgtggagatagatttactgatgatatccctttttggatcttgaaattttgaattttgctttgtaataatcatcctatctttcaaattttaaattcctggcaaaaatatgtattggattcatgttttctgtattctattgaactttgttttcaattttgattagtggacctgaaggtgttttttggtccaattattattttttggtcagacatgctctgacagcaaactatgttttattttctcttttaaaaaatgctttcgaatgtttgaaacattcactttctcttataaatttcattattctatgagtttcttcatctgggtatctctagatctttgttcgttatgttgtgcattctccatggtttatatgtttctggtcatttttttcaggtgttatttatttatttttcgatgtcttaagttttcagcgcgttatatatagatcaaacctttgaagttttctacctctaagtaacgctagtactgagaatttgtaggtagctgctctttcgcttatatatatatatatatacgaatcaactgatctccatacttactatctgaaaatgatgatgagtattggtagtggttcattgtgggtgggtatctgtttgttgggcctaactggtgttgtaacatctgaagatagtactaaatgggtactactaagcgacccacccagtactcctacggaattccaagggtcctggccattctgtggattaacaagtttacgtaacagggtatgtatgtgtgtatttctcttatatatttttattattacatatatatatatattaatattcacatgcaatgcacatgtacaggttaagcttcacgaaccaggctccccaaactatatagatgctaaaaaagacttagacgatgcaattgctgaaatagagcgtgagaatgacaattttgctcgtattgccaatattctgcttaacaacaatactaggtcccaattaccccaattcaacaaaaccaaaaatattaaatactctcacctcaacaattgctatcattcactagtaagttatttcattaatattcatatatattactaaattatttatcatttatatatctagtacttatatacatttgtctatgcatatgcagatggatatttatatagaatattgtgggcgcataacattttatgcatcggcacgtcggaacgaaattgacaacatgtgcgatgcccgagtaactgagtttgaaatgactcaggcttcaattcaaatttgttctacttcatcatctccatcgtacaatgttatgttttagtatgtacgcctatatatacacaataacaacgtcgtggtatattaattatctatacataatgtttgatttttcattattcaacttttcctaaatttattattttgtcgttataatagcaaattattacaatacaatgattcagtgtaagaatttagaaaatgataacttgggaaatgggataatagtatattccatatacttgctttcttaattcatttcctaaaaagagaaatcagggcacaagtcctttatagatggatttaaatttaaaactttactttttcatttgatccagctaattatagtaataatatacttacctttcgcatatatggcaagtgtaatgttcggttcacatatgagagtattgttcattttttttttcataaataggagtacgtttggcaaaattcctgccatcaacctctcagagttggcactccttcaatgctgatttagttgtgctttattatacaacttttgctcacatatgaaaacctggtaaataatttcaacatcggatatcacagtaatatcaagatcacatacaaattattcatgtgaaaacaaataccactcttgataagaaatatatacctgaaggaggactattgcagtagtacctcctgaagtagatgttactaggttaattagcacgcaacagatgggcagacataatgaaaaagcagcctcagtactacaaaaatcttagtctacaccgagcacatgtgtacagatgacatatcctcgctaaagctattttctcactagcgggaatgttcgcgcttattttttgggtttagttcttgtaccgaggacatgttctcggtataggtgggtataccgaggacacgtcttttccaatataatttaccaactctttctcttccccttcgtcatttacaaaaatccatgaacacttcactttcaaagaaaaaaacaaaaacccagaacccccaaaatcgtcccaaacccagcacatcactttctcttccttcttcgactccctctttgtcagctctctc

SEQ ID NO: 81612 - DNA, 558 bp, Cannabis sativa
ttgttgttattttaatgttattttgatgttacttttatgtaatttttttattgattttgtgttattttttaaaaaaccgtaaaaatataaaaaatattatttaaacataaaatgtaattattttacgaaaaattgtgcctaattattcctaaaaggtacacttcaaaaacacccgtcaagactagactgttcaaattattttatcaatggacgtaggtccaacaagggcccaatggacttgcatgaatccatccacagataatatatgaatcctctgtcccttatcagtgctctttcatataagacctctcaagtcaaagatatgccttttctaaacttattctactaatgtgttttacaccaattatagaaaacaaaatactgttaagaattgatctagtagagaattatatttgatgagtaaaaattaaacacaaatatgtgctataagaggggaaaacctaatattacttatcaattatttatatttattgatttctttttagaaaatattagatgttttaatgtttgagctagatttataatatataatattga

SEQ ID NO: 81613 - DNA, 2236 bp, Cannabis sativa
ttttcatccacatcatcgtttgggtccctcctttgggttcttgtccctgcaggtgcttttggaacaaatccctttgaagaagacttggaagttgacacttttttcggtttcctcctaggaaaatctgaaaaggaaaatttagaaatatggaaactaaaaagaaaaataaaacaaatgcactttatcttcaaaccaaaagatgtaaacgatagctacctttaccggctgcactagcattgatttgataggaaaccccactcccaggtcgtatttcggaccatgaagaaaactgaaatcaaataatcatccatgatttagattgaaacagagcaatttacatgttacaatacaaccgtggtgaaattcagcaattagagaataacaaataagaaattcacagtacaaaaacaaaatccaaagaacctaacttagaaacccctattatgaacgcataacccacttccaaatagtaaaccccaaatcgaaaaaaggccataaatttacgagtaaaagtagtacaaaagcagtagtactacataaaaagttctcacctgtacaaggtgggaaattctcccatggctaaaagacccaagaaaaggtctgagctttaaactgtgtctatcttgaaacactgctctgtaactcaatggcctatgtgcttgcaacgccatctccatgattgttcttgaaagaaaagaatgtctgagttgttcaagagagagtcttaaatcagcaaaacatgctctgattgatccaacaagtcatacctcccttctctctctctgtcaagagtattgtattaatgatataaatatgtaagaattaatatagtaatgtaggaaatccagtggtaagaaacggaaaattgggactaagaatctcaggctcttcaagaacatgtgtctattgttaacatcacattcctatttctgaccgttgataaagactgcggcggaattggacggtggagattgaatgttttaagtatgtgattagtgaacaaatgtggttcgaaatcgattgggttattataaatattaaaaagtattatatatttgctaaatttaaggaaaaaaaaggtaggagctttaagaggctaggagtagtgataggttacctcgtaagaaatcaatgaggtgttgccacgtgaggacaaaaatctgcggtgggcctaatcacgtgttcttctttaggaaattattacgcttagaatagaagaagaaagaaatggaatgatgaaacaattaagacaaaaattagagaatagagaaagatatgtgttattactaattaggtatttttctacttacctctttccttatagtttcttggttacttttttttttttaattaattaaagattttcattaattggaattattatatagaatatataaattgatactttatatataaaaatattttgataaggtgtggacaatatttatattttttatgtaaatttaattaccaaaatatctcttacactatcacttacacaataagaaaatggttgcaaagtggttactgcgtggttgcgtgatgattgtattaaacgaaggtttcaatcagacgatggttgctaagtggatggtcgaaggttgcatcagacgaaggtttcaatcagacgaaggttattcagtggttagccaaagattgcataagacgaaagtttcaattagacgaaataactgatagcaaaatatttatgcaactgtgtaatgcaactattatgatttaatttgaataaattcaccattaaaaatttagaaaacaacataaaatatacaaggataaatattttactatagtatattgatgtaattttattattttttggattatttgggaactccagtttaactttttgagatctacatttcatggatatgaaaattgaagtcatgacattagttttatgcaaattaaactaaatttccggttaaattttagtttcgtaatagtttttctatactttttttttcatgaattcgaaacaacctttattttgattgattctggtcgtcttctgaggtgaagtcgccagaattaatggcggttctctttctggttgaattttcctttcggtttgtgttgagttgttgcgtggtggtgcgatagttgcccaggaagtagagacggacacaggtgtattaatgtggggggctataacaaaaatattgccttttaaaaaattaaatgtaattttttaaatttgataattatagatcaaaat

SEQ ID NO: 81614 - DNA, 847 bp, Cannabis sativa
aaaaaaaaaaaaaaaacttgtaaagaaatttagtttaaactatagtttattattaattatgtttttatcaatatttttgtggggtgttttttttttttttttaaatttacaatttgggttacttcaggagtttttttgtgggttgctatgtagattttcacttgcgatatagattgttccattagttgctatgtaagtttttatgtgaatttctgtaaacatgtaaaaaaaaatatatattttaaagtgtaaaaataaaaaaaaaaataaaaaaactcttatttttttttttttaactttttccattaaattttggacatgtataataatgcctatataaattttttcaaactataggtataaaaactatattatagaaatttctctgtaattataaattaaaatgttgagaaaattataaaaatgcatgcaataattcataaaaaaattagagacatgctgttacgtacgataattatattattttatataattacaaaacatctgtaaatctgtaccctttcaaaaataaattatttactagtattgatttaatttgtcgataaatgtatgaagcaatttgttagaaccttggaattatttcaagtcatgaaaaaaaaaaaaagaagcgattttgtgggatctgcgtgggctattaggtgtccttaattttggtaagtttttccattaatgaagttataagttttcttattaaacctatatataaactgcatgtacaggattattatttgatagtaaatggaattctgtaaatatatatccgaatgaaattttatataaagtattcatcttggcaatattatatatatacattacagtttcgaga

SEQ ID NO: 81615 - DNA, 1306 bp, Cannabis sativa
aataatccgatcaattaatcaaattattattaaaaggagaggaggttagtacacgtgagaggcacgtgatcatacagttgtatagatagagagaacacagaattgtgaaaattttaataagtgtggaatttttgggaggtggggtaatgggtcaaccacaaaagcagtttctctgttgggaaaaacagaatatgttccatcatcacacaatcagattgaatctccaccattggattctaatttcttcatacaaaaacaaatgatcataatattcatatatatcgatttattaggttactacaaaccatttttattcaagtgcgattacacatcaaaaagctccttagtgggttcctcagtgaagtgaatatgtgaaaagaagaggaaacacataataaaataaaataaaattaagccctctttctctggaatcctggcagaaatttcttcaagcaagttggcctcccctatttggacatatccacagaaaataactatatatggtcctttagttgtggtaataatatcattgtacttaaggatattcagtaattgttgtatattattggattatatatatgcatatatagtgggttgaatcataaacattactattgtccacattattgtactgtagggtatccttaatatatcttcctacatagtagctagcttattagaatatttgtatgttgtacaatatatttatttattctctcttttttaaatattcaaaaatattactttatctatataatttatatatatatatattgactattatcttttaatgttatttttgcaaaataacattatatttggtgctttcgtttctgccattctattttcaatcacaatgttataatatcattttgtactaataactatcaaatgttatttttttttcaactataacatcaaaagttaggtacattaaaaatatattctacataattataaatttttagttaattttcacgtccgagtccgaaattgcatggtgaaatatttgtttcaaatctttttaataactgtattcattatagtttcagtatcattcctgtaaatgtttgataatttccaatagtttacagtattaaaaataaagttcttaatatttcagtttaccacgtttgttctaaaaacttcaaacgtattttcaacactgtaaattgttcggaattttataaaaatttatagagatgatattaaaaacataacgatcaccgccataaaaaaaatatcatgtcatgtattttcagacacagagattgactataaaaaactataatagaaggttaacggt

SEQ ID NO: 81616 - DNA, 1402 bp, Cannabis sativa
  modified_base (1360)..(1366): a, c, t, g, unknown or other
actccgatatgatcaatctttaggctcaaaaatccgagtcacctcaaacccgttctatattgctaatacccggactcggcttcgacctcacattgctagcccatcttctttggctcccacaccattatatcgcctgaaccaaccttttatcatcactgaaagctctttcaacgaatctccatatgattatggtatgcagcacttgggtcaaccacatactacttccctaggtttctatatggctagttcctcacctaatattttccctcaacaacctcatgaccttaaccaacctgccattctcaaccctctaacttcaggccttaatactgctatcacactgtcatcgggctttcacatgtccctccatcaacataccactaccaatctcaaccccaaccattctgcacctgtaactactgctgaacaacttcaggcttcgtttccaaaggcctctttgaccgcggctgctactgttgtggctacttcttgtgacaatcatcatgtaatccctatttcccaagccttctctaccatcttggcggatcttaaccccacacaacctcctcgatttgctattggcaccacttcggcttcaacccccaagactaatctctctcgcaaggcaaagctagaccgaccagacggccttaatgctgaagagtttcggaaaatgctcaaacgcacacgcaacttagcaaaagcccttgaagacggccaagttgaagaggcaggtgacgctcagcgtgcccgcctagaaccatgagtatcatcagctggaatgctcgtggattagggagtaaacgatcatttcgttctctctcccttttagtgaagcaattccacccaacccttttgtatataatggagtctaaactccctgttggcgctttaaataagtttgcttcgcatcttaaatttcctaacggtttagaagtccaacgtgttgggcttagtggtggtcttttgttgctctggacacatgatgtggatgtaactttgctttcatataatataagtcattttcactgttatcttaaatttcctaatattcctactttcacttttactgctttttatggtgcaccatctccaattaataaaccgcattcatggcaactgctccaccgtcttggaagcacttctcgcttatcccctggcttatcacgggtgattttaatgattatctatccttgacggataaaatagggggtgacatgtcacgctctccctctgctcatttccaaacttttattaacgattatgagcttcaccctctccatcagtctgggcagtccattcacttagactaatcgccaaaagcatgttggaagttgttttaccaggaacttagatctannnnnnngtatgttgatttaacaacctaaaagatcggaagagc

SEQ ID NO: 81617 - DNA, 1087 bp, Cannabis sativa
ctttaaacgggctttgttagactgaccaatatatgtacagtatatttataatattaccatttttttaaaagtacacatataaataaactttagtgaaagttattttttaaaataaaaatatgcatataattatcaaaatataaaattatgaagtacaaattaaaaaatcatatttatttgtgtgtcgtattttttgagcttttatattcgtgcttgcttgtcgtgctttcgagcttgtggtgccgtgtcgtgcttaagcctatttttttcgtgccgtgtcgtgctaatttgtagcatcgtgccgtgtcgtgctcaagcccatattttttcgtgtcagatcgtgctcgtgcctctcagactcgtgtcgatttcgtgtcgtgtgaaaaagtccggtccatatttacagcactgttagttaccattagaataacatatcaggatatcggtaaggtgtagatagagttgtactgaaataccaacaaattaatgtcaggcatatcagtagccattagattagcatattcggatattggtgaagtgtacatagtgttacactaagatatcaatagatatatgctaggctttttcatacaaacattccagactcagtacgcatgggacgtgagatagaattgcaattgggtgtatgagcacctagttataatcttgtttatgtttatcacaacaccaatttgatggaaatgtttatgcattgctcaaccattttttcaactcagcagttggagcaatttgcaacaattctttggtgcatttggagtgaacaaaataaagagaggcatggtactagaccaaaaccagctgatgccctcctctattttgcttactcataccttgaagagttccattgtgctagaaaagatttaaaacagagtgttgcgtgtaggagtccagccaatacatctgctgctgaagaagcatcatggatgaatcctccttctggtcatctgaagctaaatactgatgcaacaattgacataaggaaacaagtttctgggtttggggtagtcgttcggaacagtttgggggatattgtggcagctacatctattcccttcaaaggctgctt

SEQ ID NO: 81618 - DNA, 1752 bp, Cannabis sativa
ccgagacaagcccatactcaatctcggcgctcaaattaacggcaggcatggaccgtcgagatagagcaataacaaagggtcgggcctgccgtaatagacctatatttttgtagtgatatataccttacaatagaaatatatataatgacaataaataaaaataaaaatatatagcatgctaataaaattatatgtcgtgtcaataaaagtataataaaaaataaaacttaaatagtattttaaaaaaaaaatgatatactatataacaaaaaatacatatatatatatatatgattcaccaaaacatgtagtaaaaaagatatattattaatatatacattatactaaccaaattatataccacagttaaaatatatatactatgacaacaaaattatatatcaccattgtatacaatgaattaaaaactaattaaatattatttaaaataaataatatatagcataattaaaatatataaaaataattattaaatatatatatatagtatgctaataaaattatatacatacattaaaatatttgtattatgctaacaaaaattatatactaatatcatacatagcaaaataaaaaataaatattatcttaaaataataatatatcatacaacaaaataaaaatatactatacaataaaatctatataacaacaacgcataaaaaagtaaaaataattatcataatttttaaataaaaaaaaaaattaactaaactaatatatagatatattataagtaatttgcttctaattttggtgtccacaacaacaaccatggcagcgttgctttcagctgccgctccaccatcatcaccatttctggtcagtgcctcatttccatgtccttcatccaaacccacttcgctttcttgggcatcttcatttcccaaattcggcttatcctttaactctatcacaatccctcttaaacctccttccaacctctacaaggtattttcttttctcttctgaatttcgcgaaacatttgaaaattttcaattgaaacaaccaagttattctttttcttgaattctgatgatgggattgtttgcatttggctgcatcttctccaactggatacacgagtattctctttttttatagtttgattgaatgtagctaaggtgtttgctaaaatgactaggataataggaacaagatattatgatattttggcaagcaagaaggttgatttagctacaaaaaagaatttaagcataggatttatgcttaagcttgttgtgctttgaaaggtaccaatttttttattttcatacgagaaaagatgttttgtggtaattagttaaattaaagcacctggtacacaatggataaaatcactttgttggattttattgttctagagaagtcatttcttaagttgtcactttttaaataagatgccaagatgtttttctgacattcaaaagtggcatttgaagaattgtactgtctcgattttgtaccacctgcatacatttgagcctaaagcttcttaggaatgagatgagataatctttgatccttcatgcattctattaaaataaaaccaaaatatggagatctcgtttatcaatgatcgcattgagtttcatctcaaaaccaattgataatgagtggagtaacctatattcttatatatggctcaatatttatacatttaatccattgtccaatattccccctcaagatggtagcggatatgactctgataccatgttgggaatcat

SEQ ID NO: 81619 - DNA, 1140 bp, Cannabis sativa
atgatgtctaacttttggtggggatctaatgaaaatggctcaaaaattcattggcacagctggaaagtcttatgcaaaaataaattcgatggtggtatggggtttcggtccattgtgcattttaatcaagcgttgctggctaagaaatcatggcgattacttgataatcctacctctcttttaagtagattgttaaaaattcgttactttctcaacaactctttccttgaagcacctcatggtcattccccttctttaacttggtaagacattctttttggaagagagcttcttagtgctggactgagatataacatggtgaggggagaaacataaattgtggatctgaaccatggattcctggccatacagtttttgtcccaacttattataggggtcctcatcaagctgttgttgcaaacctgatcacagaagatcgtcaatggaactgcaacctgctacaagaatatttctccagcgtggatgtggatcgtatactcactataaccctaagctatttctcaaccagtgacaaactcatttggcatcaccactctttaggtatttaaaatgtccatttgggttaccattttgatgcatctctggaagaaactgaactttcttcgacatcaacttcatcagcaacctagtggaaatattgctggaggttacaactgccccaaaaggtaaaaatatttgcttggagagtttttcatgatgctattccagttgcgacatcactggtgcagagaaatattattacaaactcgacttgttcaatttgacgtcaagcttgggaatcaattggtcacgcaatctttggttgcaaatacgcccgagtagtttggcattctactaaccttcattttgattggaacactactacaatgatgcacaaaggtgattatttaattcacctaacaactctatattcagtcagtgagatggagtttataattagcacattatggtgtatttggactgaacagaatcgtgttgttcatggacaaaaagccaaaccagccgcacacttagcatcctttgcaaagaactattttgtccaattattgatctgctcaagccaagtatcgaccacatcaaaattcagctcctaagacttcaactccccctgttatttca

SEQ ID NO: 81620 - DNA, 1990 bp, Cannabis sativa
agccgttgaaaaaattggtagtagcattgttaataatgatgccaaattaaataatattacaaatggtggctcaacggatcttgatagttttggtgtgtcaaaaattggtccaaaattattagaaaccttatcaggtacaagatttgaaggcatagctggaaattttagcttggacaatggtcaactagaaacgttgacatttcaaatagtaaatattgtgaatggtggcggagaaagagagataggtttttggatacaaaaactcgggctagtaagaactttgttgaattcgagtgaatcgaatctagggcctataatatggccaggagagtccacattgcctccaaaaggttgggattttgcaacaaatgggaagagactaaggattggaattccggttaaaagtggctttaatgagtttgtaaaagtggtcaattatgattcgagtactaacatatctgatgctacgggcttcactattgacgtatttaaggctgtagttaaagtattaccatatgctcttttgtacgatttttttccctatgtaaaggatgatggtgaaagcgctggcacttatgatgacttagtctatcaagtatatcttggggtaagcattttagtattattgtttaatttggtgcggtataaatatatcttaatatttaaatcaatttctttttgagagtattaatacatctaatattctgtttctcgaataatgttgaatgaaaattgaaatccatttactttttattgctttagattaattagaatttgtttaattggccttctacttctacttttagctttataggaagcttttcctgagaaaacgtactactaactaaagctagcttcaattaaaaagagcttttttagagttaaaatttgaaactaattttgtccaatcagaacaaaagtctctttttttgaataggtaataatctttattaactaacaaactcagttgggacatctcccaaactgaaactacgccaaggatataaaatagaggcttgcaaaagcatgggccaccatattagttgaacgtttaataaaacaaacaaaaataattttgcgagcaaatttttacaatttttggagcttcagaagcccaaaaacaaccttttttaaaatccagccaagtagggctaaattggttggaccaataaaaagtttgtaagtatcccacaaagtcaacatttaagaaactaatagagaaacaacaagcaaaatacaaaaattagatattcatgctaccgattaagacttatatatatcatcttcatgtaaataaatttgatcattcaattataatatatacttttccagaaatatgatgcagtggtcgcagactcgacaattagagcaaacaggtcaaaatacgtagatttcacattaccatacactatggaatcaggtgtggcaatggtggttccaatggaagataacaaaagaaaaagtgcttggattttcataaagcctttgacttgggatctatggatcgccatcctttgtttcttcctcttcatcggttttgttgtttgggttctagaacaccgaataaacgaagattttcgcggaccaccttctcatcaaattggcacaagcttttggttctccttttctactatggtttttgcacatagtaagtatttcatttatcactatcattcattatatttatagtagagacattttttattttgatatttagaagaattataatttaatttttgttatataattatgtacattgtaggtataccacttgttttttacaaaaatttataacaatttacagtgctaaaaataaaattttaaacatccggttgcacaagtgcaattgactattttgaattcaatttcaatactgtaaattgtttagaatttttcaaaagcataaataggatgcttattataactaaaacaattatattttgtttaagggtagatagtgacataatacttaaaattttgaatttgtaag

SEQ ID NO: 81621 - DNA, 719 bp, Cannabis sativa
caatgtgtggttgaattggatcagactgttatccatctcacgagatcgatttcttcctagaacttgggagaatcctagtagagttgttggactggtgtttccatgactggtgttgcctatattcaccatctgagaaggataaggctctgataccataatagaactatggttattcctcaccattgttgcagaaacacaaaaatagagtaaagagagaaatagaagaagaaaggaaagaaagagaaagaaacagagagagagattgaaacaaaaagaaaaatctcttatatttttttttgataggaagaaaaatctcttatattaattagaaaacaatacactttataaacaaacataaaagagataacaaccagaacagaaagcaataacaaacttttaactaaaaccaaacaatcaagtgctaattggcataatgacagttaggtttctaactctcttgacaaaaatgaccttgctactatatttacatttacactcatcatgatactgactatattaattagtgcttaatttgatgaattagctatctcattaaatcgagtgcaataataggccatttggagtttcatatattatttttaatgggaaagatctcgggggctttgtcatcatatatatatatatatatatataaatatatatttaaaaaaacaaaataaaatatacatatgtagaaaaaaaactatcatggggtcgat

SEQ ID NO: 81622 - DNA, 1620 bp, Cannabis sativa
aaaacaaaaaataaacattaaatttttttatttttaaacttatttatgaacttttaataaacaaactaagaaataaagttgcgcccctagttttgtaaattaaacaataatgagtttttgaggtcaaagatgccccttaaaagatgaacatatagatttcaacgatttctttttattataaatttatataaatgaaaacttattttttttagaaaaaatactaatcattatatatatttataaaacataacaaatgacacgtgacttatatctctaatcttaaaaaaaatgtggaaacacaaacaaattagtcatgtctcaattaaattaaattagaatactaaaataacaaatgcattcgtgcatttgtttattctatagctttttattaatttttaaggcaccaataatacatatccatattttaatgtacaatgttcttgaacaggtatacctgcagatattagagatgcacatattatttttgtaattagttccttcaggtcaatatgacagtttctaaaaacaaaccaaaaaacaataagaataatgctatcagcatataaaattaacaaaaaataccaatcctgtgacataaactaacttccacatattataaaatcagatctaaaatatttacatacttttgtgactcgctaattggtaagtgtgctgaaataagctgagagtataacctgaaacacagaaaattcttaaagtataaaaaaaaaatacaaaattaagttatcctcattaattataactttttcaagtgaaagcagatattaaaaacaaaataaaaacaaattattgctaaattttatttactgtcaatagcctcattccataagatatcaaatagactatatgcttgaacatgattaaacacaaacagacacatctaatatctaattacatactttttctttttggtgaaaatctaagcacatacttgatttctaaattttaagaaagttccctacttcgatagatttatgtactcaagagattttgtttcaatgtaccaacacaattatactcaataaatttacatcagttaaatatctatttacaacctcaaaatattttcttttaaagaccatgacacttctaaatgcacaaagattaattattttaccttaacaagtgcccattttccaattaaagtgcccattaaaaaatacataaaaaagaaacttgaatgaaagggaagatgaagttaaataaactaaccttagaaaccgttaattggaataagacgtcttcatcatcaatcttatcttttcctttccctaacttctaatctgccattgattaaattgaatttcctcaaaacacaaaaatcaaattaagtcaatattaatgaatcaattgagcgaaagtaaataccttttggtctactaagattggtgtattcatgaatttctctgcttgccattactgtaattcattacaaaactatagtttcaggtgctagtagctctgagaatgtaaaaaaaaaaaacaaattctaccaaaaaaataatatttacaattggccttactatttatgaaataaattaaaattgaaaaaaaattagagtaactaaaaaaaatagaacccaaaaaggatcttttaaa

SEQ ID NO: 81623 - DNA, 852 bp, Cannabis sativa
ttttttttttttttaaatgttaatatatagcatatagatttattgcagttacctatgtacaaaatttggtgacaaaactcactaagcaatagattttattgcaattaactatctatgcaagaataatttaaataaaaatttaatagtatttaaattatttttacataaactattgactttatgttatcaaagtagttaactaaaataaatataactagataattatttgtaacaaatcaaactacatagtctcccataattatttcaataagtataaatattatctttttaaaacagggattcttattttaagatcctaataatatttggaaattaaattttaatcaaaaaaatatatataaaaaataaaaaataaatattccaatatttaatataaaagaaaaaaattatatggaaaaataaaaaattaattcaactaaaattttcataccatacatgaatattttcttttgttctattcatactttattatttctcactaaaatccaactttgaacatagtcaaaataaaattgcacaaatctcaacatcagaatattctttataagcacaagttgcacaacccaacaaaacaaaccagcttaaattatttaagcatggtgttgatcaaatcaaataatgattaataattattgaccaacttgctactatacataatagtcaacccatattacctagaatctatttaaatagctttatttaaaatcaattaaaataggttgatttttttaacctttattacacatactaaataatataactataaaaaaaatcttatcacatattgatatagtgtatatatactaaataaaatatctatatttacataat

SEQ ID NO: 81624 - DNA, 1016 bp, Cannabis sativa
aaatagtatttacccattataatagtacaagaaacaaatcttgctcttaaaaatatacaactttatgaaaaacaagagctacgcgccaaataatggacaactttatttgcagattgttcaacgatatgaataatgacattactcaaagaaaatataataacattgcactcatcacattagatcacgaataccgttgaatctaactcaaaacctctttaatacctattaattttgcaatttctagtaaaacaacacccaccctactcgttaaataggcctccaaaactcgtccttcatgagttcttaccaaacaaccaaacccaaaatgaccagcatcattaaataaagtcccgtcaatatttatcttgatctgattagaagtcggtgtagtcccatgcacattatgtttcaaaccagcagaaacaaaggacaaagaagatttcatctgtgcctgtgcaaaattaaactaatcaagaaaagatcgtgctaaaagagcaactgataccacagtagggatcttatattgccaaaccacctcattatgggccttccaaatcgccaaagaaatcatagcaccttcttccaaagcttgttgattaatcacgatagactgagacttaagccagcagccaaagtcattttcacaccaactggaaacatcaactagcgatcgattccaacatgctcgagcaaacgagcatcctaccagagcatgaaaaattgattcatcatggcaattacaaataggacagcaagaagaaacatgcacatgtcgtttgagaagctgtacacaaataggtgaaatactagaaactgcatgccaaaagaaattgctaaccttaggtagaatcttcaaattccaaaattttctccaaaaacagtagaattatcctcaaatcagccacctttaagatcctccaagaaccgataagcactcttaacactatagaagccattcctttcaagctttcaagaccaaaaattgaaactatgcgaagtacttaattaaatagaaa

SEQ ID NO: 81625 - DNA, 2192 bp, Cannabis sativa
  modified_base (244)..(248): a, c, t, g, unknown or other
  modified_base (293)..(293): a, c, t, g, unknown or other
ataaccgatactagcatactttaccatacttatctaatggcgtaagtaaactttatcgctgactatcacatcaatataaattcagtgcattgatgaatcatgggacataaacttttgaagcatataatcacaattatcttccaccgtattgacatcactgtaattgtgagttacaatatgttctgattaacagaaattgtatattaaaccctaaatataaataatacatgtaaacataaatgannnnnaatcttctattgataacaaataaattatattgaaatgagttttanttagggcataaaatcccaacagtggtatagggtcaactggcttaaaattagtgacaagaacaccaagtatttttacaatagagcttctactagaagaagaataatattattaaggttatcacattggatgataattctattattagtaactttatggatattaccaatagttttgttcaatcctatacttatatctttactactagtggtattgacttagactctatttgtaatatcctaaaaattataattatgttaatttagatatattttattaaatatgaaattatatgaatattagagtaggattataatcttacttaagtcaattatgagttaattagtaaatttttgagtaaatgattaattgagaataatttattaattacagagattttatagggatatgtgggtattatatatactattttttaaataaaatatttttgagttcgatgaccgtagaaactcaatggattggccagagatatcacgatggtaatagaatgagttttattagaattgtatcaaattggtttagtatgttgagttattggttagtcagggtagctagtaatgaccaaagtaccccctaagttataaatagcttaagtattaaattgagagtaaaatagtcattttgctaagtcatatcttagtttgtcctatttgaattgttgtaacttaggctgaaataaaggtggatttattagatttatattattagttttagataatttgaagataaataaaaaaaaaaaaaaaatctagcattatcctatctatctcttctcttcagttgaaagagaaccgatagaaagtaaggaaaaacttacctcaatttcagtaatttcttgttaatttcttcagccgtaggagttatccatacttgaggtatgtttttttagtgttcttgaaggttttaaggttttaaggttagcttttgatgagggttttgatgattaggttttgtgtttgaatttatttgttatagcttgtttttagatgttcaattaagattgtttaagctttaacttgatgatttaggctctgttgtgctaagagttaggtgagttgagttcaagaactcaaaaactcattcaataatggtaagtttataattttgttgcatttgtgagttttgagtgttaggttatgttgattttatgttgtttaattgttctaaaaagtttaataggtttggaggagctttgggttagttttgatgcaaaaactaggggttacccgtttctgcagtagaaactggttaatcggttctacagggcattgtggaactagtcaaccgattgatgtagtggggaactccattttttgaaaccaggtatctgtttggggtatttttccagaacttagttttatgtgttttatcgatgtttaagctattcataagctagtattgattagggtttgtttgcttttgagtttagggcctattacaggatttttggttaagttatatatcaagtttttgtagtcgtgacataagacccgagatcatcagcatcattccactcaagtcggcccgcacacctgactttggatttgatgtaagaaaagtcaattgcactactttgcatgtcaaaataagatgcggtaattactgttgttaagaatgagttattactctcttttaaaactgctgagttattatatactacattttgaaatgataagattttattatttctattattaatgtaattatttatttaacttttaaaaaataaattatcattttaactgtcactaattcaaaagaaaaagagaaacaaaaaagtttaaagtatgaagttgtaacaacaaattccgtcaaaaaaattatataatagtacaaaaaaataaatcaaattatccaaactaagtaaaaaaatttgtaat

SEQ ID NO: 81626 - DNA, 1488 bp, Cannabis sativa
aaaattttagtattatatacgtgctgcctcgcacgtatagtatatatatatatatatcaatgttggccttttgtattttcttagcaatagtatttcatgtgtccatatctcatttccatttctataaattagtttatttgtttttttttctttatattatttaacttactatatttttcatttatttttattcatttcaaaatgaatttatatacaaaatgattgagaggacaatagtatctagaaattaattaaaaatatttatacttggtgaagagttcatgtagagtacagtataaaaactctagcaaaaaaatatatatatattattttttttaatataattctattgtacaaaaattattggttctcttaaagaagaagaaaacttagagaaattttagcagagcttcaactatctttttcttattccccctttgtatgaaaaaagttatttatagggtaaagtatgggtatggatatactcatgacccgtttaggatttctaccaaaaaacccacaattagggtaaaaatacatataaaatactgactattgagcctccaagaaagttctttcttatgcgatgaggcagctgtacaatggagaccattgttggtataggacacatgtcgccaaaagatcgcaccttgaacataagatgcctagacaaaccgtcaggaaaaaagagtgtattcagaggtaaatcgtgcgcattttcatagtctgatgcaaagaacaagatccgattctgtgtcagaaaaattataatcgtcgcttaagctatccggctttcacttcatgataggtaagttactcttctctgcatcctgaaacaacagtaaggcttttgggtcctgaacaaaggcttgtctgggagaaatccctgaagacttttttaggattagacctttcccagacaagtgtacttcccctctattcttcttcttctgagattaaggagatttaatttgtgctaatttgagaggttatttttttactttttaccacatgtccctcatacagaaacacgaataatatttaccatcaagcttttgagactttagagtggtggaagcttacaattttctcccgaatggatgggatatcctttgatacacgtggataggtccttaaatgacagtagtatctttttgacactcgttagttgagaagttgaattacttccatgcaaaatgtttgaatatgcattcgtgtcattcatcttacgaactcgtgggtcatacgcatttgggaatgcgcgtttgtcgttgagaaacctaactgacatctgagttatgatgtgatgactctttaatacgtaaggaacccaaggcaaatgatgatgaacaaatgccttgattttgccgagggacattaaatgcggtctttccacttcctcaaccattagattactcatgcttttttgctggttgatttacacctttaattttaaattttaatgaattgcccctttcattataaata

SEQ ID NO: 81627 - DNA, 511 bp, Cannabis sativa
  modified_base (348)..(357): a, c, t, g, unknown or other
ctaatattttagaagtattaaaatatgacactttattggcaatggtcttagaatttacttggctttggatattaattttgtgttctataaattttaatttaataaataatataaaaaattataaattaattataaagtgaaaataatattaaagtaccaaataacaatgaattatttagaaaaggtaaacttaacagcacatcaagattatctagccttttctttattaaaaaaattttatctagccaagtactgaggtatgggcttaccagattaagtgagaagtgatcatttctttgactatttaaatgagaaacagtagttaggatttattattattattattannnnnnnnnntattattattattattggtgtaattaatcaaatatattagacactcctattactaaacaacaatactctatttaaataaaaacacacatcggtttcctaaaaaaatttttttaataaaatttgttaatttgttttgtttttttttttctttttt

SEQ ID NO: 81628 - DNA, 1633 bp, Cannabis sativa
ctattttatgaacacccctattattaacccacatatgtgtgagtatgttaaatgcctacatactcgtgagtatgttgaaaaactaagtccgaaagttgccatgaaaggcaacaacgaggacaagcatcttaactagcatattgaataatgcgactagtaatttctgaacaccattggaagacgcgagccatggttagagtatgtcatctcggtagcagttatttgattttatccacgtgttgtaaatatgaaacgtgaggattatctacgtttcatgagcggttacttagataagatcaaaaaaaaataactgttatttctagaactcctataaatagacacaaaacttagggagaaatagatcgaacattctctggaaagggagaacttgtgagattgagtgaatatttgtatttattcctctataaggaaagtacttttctagaaatattcaaaaataagaatgactcatggagtatgtagatttaactataaactacataaagggtctttgttctatatatattaattaagtacgattatttatttatttttatttttacaaggcttcatttattgttaataaaatctgaattaacagtttggtgctttcactgagaaccttagcaaaaataaaactcgaaacatatctcccctttatttcgttacattatggaaaatactcagtgtgatgagcctattgtggaaaaagaaacaacacgacgaccaggaaaagagcctcagggggcacagactcaaaccaaccaaggaaggggtcccactgaaaggaactccgagagaagtgaccctgaggaagaaattcctaagagaagggaggtcagatgaatatgacccacaagatatgtccccattgtcgagttaaaaaatagacaactgcatcgaaggttcgcagagtccatagaggaatgaagagttggaacaggctatggctatggccagagcaacctagaacgatacaccacctgtacaagaggaacaacatgcgcaacgatcgagagggaggccccgtggttcgtgaaccagaagggcacaaggacctaacactggagaataggaaccaaacaatcccactcaccccaggaacaacagctaggaaaaacaagagacattcctattgatgagcgaggcatccagaattagggtgccacgacctcgcgacaaatgcgaatgaggggacaacaaatgtctcaaagaaatgtttaaaatacaaatgaacaaccacctaactggcgtggttgcgctccacgtccaccacaaggacataagagaggagtaagagaaagtatgtatacatacctgaatagagatattctccaatttatttgaaaggcgaaaacttactcaagaatcaccacaagaatccaagactaatacagcccaaagcagatcggtgagttaaagatagactcaatctttgaggtcatgtacatgggaaaacccactgcatggggagagaacacctcaatatgaatatcaaggcgaacaagacagtataagtaactttcaaagttaccaatcaaaaagtatctccccgagtcgatttgtgagaaattatgataacagataagattgacaccggaagtgttggaattattttaccagaatcttagat

SEQ ID NO: 81629 - DNA, 558 bp, Cannabis sativa
catggctcatattcttaaaatacgtgttaatttataaacctgccacaaggaaaaaaactagataatatgtaattgataattatgcaacaaaagtcatctaagttgtcaagaagcatggtgagtagagaatagaaggcatagatagataaactcaaagggaagtaaataatgttgattgaatttcaatatgccaaatagaatagcttatgtacatgttacaaccccttaggtagaactcactccgaaaagctaacctaagagaagagggtgcctaattagttataaatcaccaaccaacctcatacttttgatggcgggccactctccggtagcccactagacttttccataggtcgcctttctgtgacatctctctcacttgagagttgcatagctttgataccatttgttacaatcacttaggtaaaactcatttccaaaagtagcctaagagagtactcgaatagttataaaccaccaaccaaatctatacttagtcgacgagggatcctaatagtcagtatattcctaatcctaaaccatgcatttatttgtgaa

SEQ ID NO: 81630 - DNA, 602 bp, Cannabis sativa
gttgaacccgacccgaccacacaggttttaatgttttttggtttttttggcagcaggtcgagacgggtggcgggattttttgggtttgcgagtctaaatgttcaaccttaactggaattattaactgtggaggtctctgcaaaaaaaaaacacaagaaaatgaaagttagcaattttatagcaaagcatttgatagagaataagacctccatcgacccgtatcagacaaacaaaagtgaaaaaaaaaagcattcacaattggaccagtatcgtcctcaatcaaacctacatgcatgaatatcatcaggacaggaattttcccagcatcggaccccattgtcccaatagactaaacaaaaacaaaaatcggtatatcccctatcggactaatcattggactaaagatcgaactcatcgggcctacagcaataacacatatataagagatatcaggccattatcggaccatatatcagtccaaacaaaatcataaaactaaaagaaaaattgtacacctatcagaccaccatcgacccctataggacctacatcttcaacctcgaaacctattaaattcatagagcgcattagacctacattgg

SEQ ID NO: 81631 - DNA, 878 bp, Cannabis sativa
tgtccctatgcaaagaatttttttttctttttactgacttatatgcaaagaattatatcaacatgcaaaggaaggaattgtctattaactgtcataagataaaaatataaaataaaaatatgctctaattttaattttctgttttaaacacaatactctctactttaacttcttcttcatttttcttctcataaaaaaaacttcttcttctttatttttcttttccttttttctgtaaaataataagttagacaaataaataataacggctaatgctactatacaataaacaaccacaattacttttttttttttttgaattccttacaagttataaaattaaatatttattatttgttgtgataatgtgaataaataaaagagaagttcaaatatattgtatatatttttggtttgggaagacaagaggttttgtttgttttttttttaagaaaaaaaaaacctaatagggataacttcttttaatattattaatgttttttttatttaaaaacctatattgcaaggaaaaaatatttttttttatatgtatatttatgaagtatttactttcttagtcttttttttttttttcaaataactattaacatctattaatgtatgaaaagaaataaacaaatatctcttatataatctttaaaaaaaagttttctttattaatactaaaaaaaatgaaactaatttttaatttgattgaaactaattaatattaatacatatctatcattcatttgaagttatactaaagttacaaagaaattatcatagaagataaatttcttagaaataataaattattgtagcaaggaaagaatttatttactttattctatttttctcacctataaaagatatta

SEQ ID NO: 81632 - DNA, 1701 bp, Cannabis sativa
tggatccaaaatgtttcaagtggtcttaaagttgaaagcattgaagattttcttcaagaaattcaatagagatcactactctgatattcaggcagcagagagaaaggctaagcaagaactagacgaaattcaagggctttttcaccaaaataggctagatgtcaatctgcagaaacaagagcaagaagcaagagaattataggggaaaattcgaaaagattactgctctttcttacaacagaaatctaggataagttggctaaaggaaggggatgaaaactcagctctctttcactcgagcattcgagaaagaaggatctgcaatagcatcttgtcaatctgtgatactgcaggaaaaagaatggaggaaccttatgagattacaaatgctcttctgatgttttaccaaaatctattgggatctaaaattgaaaatagaaggacagtagttaccaaattaatcacacaaggagcttgtgtcacagagcaggacactcagattttcaaggctccttacaccttggatgaagtcaaagaggatgtcttcagtatttctgtaacaaaggctccggggccagatggttacaatagttcattttaccaagataactaggaatcggtcaaaaatgatatctttgaagcagtcacttcttttttacatacaggccagttgctcaaggaattaaactcaacaatcattacacttgtacccaaaagcaaatgcccaaatgttgtaaatgactatagacctatagcttgctgcaatgtattgtacaaagtagctactaaaatgatttgtagtcgcttgaagctgattcttccagatattgtagctcaaagccaaggcgattttataaaagggcgctatattgctcacaacattatgatttgtcaagatttaataaggcactatgggaggaagaatgcaaaggctaactgtatgataaaactcgatcagcagaaggcttatgacacactggaatgtgatttttatagaagaaatgatgcatgcccttaagtttcctgctttctttgtcaaactaatcatgacttgtgtctcaacttataggttctctttacttttcaatggatccttacatgaattctttgcagctaagagaggacttagacagggggatccaatgtctccccttctttttgtactgggaatggagtatctcagtagaatattgaaggcaattggagataaagaagactttcatttccatgaaagatgtgggaaattgagaatcaaccacttgagctttgcagatgatgttcttcttttttgcaggggtgattacaagagtatttacttgatgctcgaaggcctcaagttgttctcaatgacctcaggcctccaccctaatcaacagaagacagccatttactgtagtgggatggcagaaagtgaaataaagagaatcattgatgtttcaggttttcaaaggagcagtgtacccttcaaatatctcggagtcccaatttgtgctaagagaatatcttcagctgaatgttctgtgctagttgagaagatgacttcaagaattaaagtatggagttcatggaatatgtcttttgctggaagagttgtattgataaactcagtactctcaacaattcatacttactggagccaaatcctcatcctcccaaagaaagtcataaaggagatagaaagtatttgtagaagtttcttat

SEQ ID NO: 81633 - DNA, 2438 bp, Cannabis sativa
  modified_base (1502)..(1504): a, c, t, g, unknown or other
tccatgtgtatttttatagaagtctttcaaatagaataaaaatgtatttaaacaatatataagagagaattatttatatatataagttatatatatataatagataaaaactagtggttaaaaatacttacttttaatataaaattagtttgttttgttctttatatacatactattttgaaggattaaaaattgaaaagtatttattaattatatcaattaattagaaaataaataattaggagaaagaaaaaactgtaggaatttaatggacaaaaaaatgtaaataaattttttattgatttaggtagaagttgaatatgtatgggtgatattgatttagttaattgtataaatgaagaagtagtaagatctgaatatatatttaattgggttgttatatttttttctttaatattattaaatgaaaaaaattataaaaaacaaaccgttagataaagtaaaaaattaaaaggataacggttaagtcaccacacctattttttatttagatttatacgtaaatataaaaatatatagataaatagataaattagaaaacaacttaaaattaaatattaataattcaaaattaagtttatcaataacaaaagaaacttcttaaattaatacttttttagaaagttaaataattaaaaaattatacatatatcatcttcaacacattaattagccttaattaaatgatgtaatttataaaaagttaatataaaagtatgtgatgtgtttttagaaagttaaataattaaaattaataaaaaaaatactaatatataatcttcaatgcattagttatattatgtaaattattaaaaaaaatcaaaaggtatcattaaaattaatataaatatatgtaatttattacaaaatagttaagataataaaaaatttaagctcatgattgaaggagagaaatataataaaagtttaattattcattatgaaaatgtaaaaaaataaaattaaaaaaaaattatattagctcttataataggttttcttagatatacatgtatatatctgtattataatatataaaaattttatggagagagataaaaatttatcattttattatactttgtaattaaaaaataaataaaaattaaattaatatagatttttaaagtacgaagaattactaataactttgaagcgaaaaaatctattaaagaagagcttgatacttaaatatagatataaaaaatctttcaaagcaagaaaaaaattatccaacaattttgttgcaaaatattcattggagaataatttatcaatgaatagtctttttcaagtaatctaaaaatataaaacatcaaaaaattagaaaaatataataaaaacttaaaaaatgaacatacattgctaagtagtgaaaatagatcaacatcaagaattaaaaagaaataaaattaatataacaaaaactttaaaactatgagtggattttggtacaaaaaaaaaaatctattggagaaaannntaatacttaacttgtaattaaaactttgacaaaaaaattgtaattaaaaaccaaataaaaataaaaataatataatttttcatagcaagagaaaaaactacctaataattttgttgcaaaatatctattggataagaatttgccaatcattaatcttttccaaaatctaaaaaatatagaacatcaagaattaaaaaaaaatatatataacaaaaaattcaaaaaataaatgtatattgtcaagtaataaaaatagatcaacataaaaaattagaagaggaaaaaaaattaacataacaaaaattctataaagtttaacttatatttgaacattatatataagttttttataatggaagaatataatagtttttttttttttttttcaaatagagaatataaatagttttaatataataatagaatattaatatatataaataataagagttatataaaaatataaataatctttttttagtcaaagaatacaaataattttactataataattagacattaatattgcagcaaataagctttcaaaaaatcctaaaaaagcaataaaaaaaccttattaaactaaaaatcaacagccacttttctcagcccaaaaaacccaaactcgaaatcctatagaacaaataacatcaaactcagcaatgggcgattcaaaaaccaaatacacattatatataaatacaatgattattatatatacacactatatattaaaattttaaaaaatccaaaaactcttaaaagaagatcataatttttcaaaaagaaaaagaaaataaaattactaccactgtagtggagggttcagtggcggtggtatccaataataaatagtttttctaacaagataaaacaaaaaatattaatataaataacttgtatatgataatattgtaatatatattaccagttt

SEQ ID NO: 81634 - DNA, 2181 bp, Cannabis sativa
tttttttttttgaaattttaaatagtattcaacactatcacaaagcgttataccactttagtacaattaattaaataaagaatcttatttatatatatatatattttttatttaataactattatagaatatcgtaaattattcgcaacacactatgtgtagtaatggtgttgggcgaaagcttgaagggagatcaagttgagtttcaaggggagcttgagcagagctagagggagtctagcagttggagggattccagcaaactagaaccactgggaggctagtaacttgaagccgaaatctactattttttgttcttggaaacaaattaaaagggagtttttatttggttttttgtatgtataagaatagtttgtagcaactttatttatatggtggattacttaacctttacagtaggtcccatggattgatctaagagaaataacttaggccaaactacttaaaatgattgtgtcattttttatgttattttgttcttaggttttatttgattaatatctgaatattgttaatctaattaagtggacaaatagtttaagtagttaattagtcttttaaatggtatcagagctaatatgttggtccttgctgctttcttgattgatttatttgactctttactcgtgttgtttgctctgtattggttccattttgtattgtttagttgttgattttttttactcattactgtcgtctaagtgttctatagattgtttcaaaaaaggtgggtctacttctaaaatccccatgcaattttacttagaaaatcccatgcttgatggaaccaaatatgcttgttggaaagctcatatgagagcctttcttaaagctatatagtatatagatgagtgtgtgtggaactctaatattattggttggtctccacccattgtgcacattggtgagaagactaatgtcaagcttgtggttgaatggaccaatgaagagattgaaagtgaaaattggaattctaaaagaattcatgctattttaatgttgtttatgttagtgtcatagttaattgtaaattttttttaaatattatccgtatttttggatgggacacgtgtaattctaaaaaaaatagtataactaagttactttaagtccaatagcaggcctaactaagataatggaccaaatttattgtgaagtcatgtcttttggatattggacaaatgactcgttcatgcaggataaccctccagcacagcgtgtatttggaagacctcagtcagagcgtctagagaagtaactagtgagcatctggatatccagttcattatcatactcattaattaccagatcttgcgatatcaggacttaattctaaagatttcattcaaggatcatatcttcccaaaacggaaagatagtaattaacaatcaagcattaatgtgtttttattatcaacaaaaataggacacgatttgacatatttaaacgatatgtggtctccacataaacatacaatcagcgtctcagggtcgggctccaccaaatgggctcaaagtcaatatattatttgtatttaccccatcagtgggcagagtcaagaaaacaagaaccctaacactataaattaagaaaactcattcttgcaaagggttagaatctcaatccttgagtgctgaggcaaattctaaagttcagacacttgtgtaaatcataaggtttttcgagtcttataacaataatattgattggtagactaaaactcatcaatgcctcaactacataaaagctctgatttcatgctttattgattatttttctttagttttattatattttattagtttctaaaaatcttagcaaatatattggtgttttaattgagaactaaagaaagcagtgatatcataaaatgttgtatactgtaaccatagtactcacttgaaacaaaactggcagtcgcaatagagacatatctatggacgatgtagatcctatcgttcaggtgaaaacagcaatcgaaaattcaaaataatcgaccagtcgtcctatcaaaaaaactcagcataatagttgagtgttcttaaaattaattatgatgctgcattagtctttttaatgtgattttttttttttggcaaactcacttacctatattaataataataatatgattggtcgctggtcgctagcaagtgagt

SEQ ID NO: 81635 - DNA, 1576 bp, Cannabis sativa
tgtcttggctccgatcttcaatgattgaaggaatcttggctacaattgcttgctattccacatcgatttttttttggaaggctttggaacaaaaatttgcaagttagtccaaggcaagactccttcaactcaaaagtcaattaacaaatttgcagaaaggtaacttgtccatttctgattatgttgacaagatcaaatttgtgtgtgattcttttgctattgctggacatcctcttaatgattttgatctcattttacaccttcttaatggagttgttcccaagtttgattctgttgtgtccaatattacttcttaaagtgaaactctttcactggaagaagttcaagctctcttgatgtctcatgagtcaagaatagaaagacactctactatcttggatcttttaacaaaaatgacaactaatcttaccctggatcaagaaatggaacatacagatcttttaatggttcaagaagaggttaaggatctaaaaaatgcactaagatttcctaatcgtggaaatggatctcgacctgtcaacaataacaaacctctctatcaagtgcgtatgaggtttgggcacactgctattacctgtcactataggtttgatagaaattgggttaccctaaaggcttctattacttagccacaagccaatcttacaaaacaatctcttgactatgatcctcaggcctttgttgctcatactatgccagattttggtgatgatgttgtgtggtatgtggattcaggtgcaactaatcatataacacactccatgaaaaatcttgaatctgtcactccccatactggtcatgaaacaattgttgttgcttatggtaagaaattggttatttctaacatcggtacaaccactctttccttaaactctcattctttaaaatctaaatcctgtcttgcaaattccttttaaaactaaaatcttggttagtgtatccaagcttactaatgaaaatgatgttttcttggaattttataaaacatgttgttttgttaaggataaggaaataggggcagtcttgtttaaaggaaaaataaaagatggtctctatctcctaggagatgatagctcgactctttccaacacagctctgcaggtgcatcttgcaactttagacattcaatccaagtctatgttgagtcattctaagtcttgtaatcactgttgtacccaggttgatacttcaacctttttttgtactgaacagaataataaaaacccttatattatcttttcagttgtctttaattctactattttgctttcacaaactgataatgacataaatctttggcataataaacttggtcatcccgctcctcacactctaagcaaaaatttaaccaaagctaacataccatgttcctttaagaatttaaaattttgcaaagcaagtcagttaggaaaaagtcataggctgccatttccattgtctcaattcagagcctatcaacctcttgcaatggtgcacactgatttatgggttccttcccatatttctgttgggttttgtgccctaaataaaatctatttcaatataatcaaattta

SEQ ID NO: 81636 - DNA, 1290 bp, Cannabis sativa
tgcccttcattagctgcaattacaaaacttgttgtaaccattttagttatgagaggtaagcaactaacttaacctctaaaactcgagtaccaactgtcataactaatagccgagtttgtccttgagcatttgaccaatacttaacacaactacttattaggacaaacataaatgaaaaatgagtatctagaatttaaaaagtgacaatttaatgttcgttaaatttaggaaaacattcattatgatatgttcgagatttcttaagtgtttttatgaagaattggttcctagttctttgtccaatcagaaactttcactaggattggttacttaggtagtatttggttagaggtaatgaaatgaagtagaatggaaaagaaacaactttgattacatttctaagtttggttttattttaaagtactacaatgtcattcttattatagttatggtttcattccttccaaccaaacgctacctgatgaggtgtttgttatgtgagtttaagttgtaagcaggaccaaccttgagtaataataggcccaagaaattttttgagtgtgtgttttatctcaagtaaaatgtgagtattattgggcttctttttacaaaaaaataaaaaaataaaaaataccttttttttcaatgcaaaaaatatactgtaataaaattttgggccttaggtttgagtaggccctaggcacgagcctagcccaccttagcccagggtcgagcatggttgtaaggaatagacttagaaggaatatgaaactcgagtgttggagggaattaacgttactacaatttaaatttaaaaaagtaaaatccacatggaaacacaaactccttggttattaatttaatgtgacattctcattcacaccaagtctaaacctcgtactaaacgctcccttaataactcgagctagttaattagttttcagttataactaacttcttccaaagacctaagaaaccattaagactgatcaacatagatggctagttctaggctcaagtgttcttgaatgttcattgaaagaaatgaaggcaacacaatcatttcattgtgaaaattcaactaaggctcttccttgcatcagagtaggactaatcacattgattgaatccgaaccaagtaatcggtttcattaagtatttcaaagtacataaaagcttaaaatcaagacatacaaactatacctcccaatccttgaaatcaagtctgaagataaaagaatggtagttaacatctcttgacgcgactgaatctgcatcgggagagttcct

SEQ ID NO: 81637 - DNA, 1262 bp, Cannabis sativa
attatggatttttcttgacattaaaacgtaaataaaataatcatatacagaaattggattaactttacggaaaaattgtgtgtttttcccaactcttatctttttatccttaatttggacacaaaagatgacttgtttaggatactttttaattgtttattttttcgttgacagagtttagaatagcttcatgcacttgagttgagatctcttatttttaaaataatattcctttattagaatacacctagtttacttttttttttcttaattcaaattagaaaaagtactgtgtaaaagtacagtactttcataaaacgtttataatgaatctaaatcggataaaaaaacaaaacaatgcaaaagtgatagttggcacttgaagtacttgcctttaaatggaatgagaataatcaattagagtaataaattgatttattctaattattttttatttatataattataaaagataattagaattttttttttttttttgaaaaacgtgatctggatcacattaggatatttccgagaagacttcaacaatcggtgcttggaacctcttcaaacaggcataacttattgtttagcttaagggcatgtttagccaaaccatgagtggcagtgttatctttgcagaacaattgagacaaaattgtcctcgaaaatttaaacaataaagctatgacatcttctaacagcacacctatctcatttgccaataccatcctgttgttgatagccaaaattacggagagagaatcaaatttaaccgcttctaggagaatcccacacgaatgagctcaatttagtccagtcagcaggacaaaagtttcagcttgaaaaacagcaatactacctcgtaatggtttgcttaattaatttaataaaattgttattgttaaaatatgtaattatttttatttatagatttttaaaagttatatttgtcttttttatttttaattaattaaattaaattaaaataaaataagttaagaaaagaaaatgtattctctgtaaaaatggaaagaacttttcttttctctctaatttgtgtggactctactactttctctctttctaaaatttagtaaataattatattaaatcaatgtcataatttttattccagttaagtaaacacatgcacctcaatgtcctctatatgctcacagagctaactccaagtggttataacacttttaattgttgaagtatacatttatttttaaaaactaattatttaaacactaaaa

SEQ ID NO: 81638 - DNA, 3129 bp, Cannabis sativa
taagaactagatggtgtgttctggtccccatgctgagcaggggctatcctgccacttcactcgtacttctgagacatagccaattattttgggatctgcccagcacagttgagtccaaatgggatcaagtaaatgtcttccctcttcattttatatgcacatatgggttggccacaaccttcgcccttcgagatcagatggtattttgacctaaaatccaaccctagtcagggtcaatcaaggtacttctacttcagccagttgggctacatttggtttggtggcaggaatgatcccgccatgtctaagattggcggctatgcccgggattattttatgggctatggtgcaaaggttgtgcatcataccttctaatgggctcccacctttgatcagccaatacctaccctacaactcagggatagggccaaccatatcctctcgtttctcacctcaagatgaaatatctacaagttggtgacgagaaagaacttcatcaagtatggtctctactctctacccttctttgggcaaaccttaaggtttatttgataagatttctttgaagaagaatacaagaaccaagaggaaagaacttgagactgaagctccctttgataacctttctgagaagaaaaaagaaaccaagagggagagaattgctaggaagagggtttagcggggagagtctttgagtgaggcccttgttgtcattaggccttagggatcagagtctaccacaactttctgcgtagtaattgttgagggcaagggtaagggtattgcgagtgtggagagtgaagagtccaattcaaatgacaagagttccatatatccttccctgggatgacgcttctgggcaggccaagggtaaaacttctttactttacactgaacttatgtcttttaaagttaatttctgaccaacattttgagtctttgtatgtacggcttctaaattggaacaatttgtcaagaggaaatctgtgggcacaaggtttcaaaaggaggggtcaagctccatccaatcaggactttctccacctcttcattatgctccttcagccaaccagcccatggtgggtaactaagaagaacgtccttctcctactaggaggtcaagtaaggagtgccaaagatccaactagggatctactccagactgggaagaaaaagtaaaagagattatccataactatctggacaggttcttggttcaggtagatgagcagctgcaagacatatatagtaagtctggtaagaccctgatctctggccttttgaaggaccatgcttcagtaaattatcttccctcttttgaagtttttttttttaatgtgcaacttttattctaacttgcaatcttttattctcagatgtccctaaagtttgggcacgcctatgccccaacaatttaaagcagttatcttgtcttaccaaaatactataaccttttcttttggagttgtaatctttaatttttttttcttttttatcggggagacactcttatttacctttccccaaggctcttttaattccttatctgacatttgattttgagagtaatatttcaatgcatttaattatacttatgcacttccccctaagtgactaaaacaattcaatcctttttgaatcactttgtagaacttgttcttataatttaaaaatgatcatatattacataaatttcttaattcacaaaaggttttttttaatcaaaaaatgtaatcatgattattgataatactttcagagattatcggcattccatgctctcaaaatcacagacccaatactgctactctgggatcttgtgagtcaagaaagattctttttagaaccaagtctcatgttgagaactttttgtttctaacttttgaattaaagtattttgccactttcctttggtatgcagccagatgtatttatgactcctcctatagttcttctatgagatccaatgattcttgtagcaatgatggattggtggttggatcgtaggtagtcctataggtaatggtgctttccactggaccattgcttcacatctatataccattaaaaatgaagaatgcacagtggtggttcgggcagtggttctgtatgcccagagtacctgtagcaattcttcaagataattttttttacaggctagaagtttattcttgtgtgcgacctttaacatcttattcacaacttatgcttgaccattttcttgtgctcaattttgtaattcttgagtgcctggagaaattccttgcagtcgagacataagaggccatattctctctgtgggtctaatattctcctagtacttgcttaacaaccaactaggagtcactaaaaatttataactagttggctcccataactttagacaatctcaatcctgctagcaaggcctcatacttggactcattattggaggctaggaatttaaattgtagggtagtctgaagtcgtaaccctttgggagatatcatcactactcctgctctcgatccacttttgttcgaggccccatctacatacactttccaagtgggtgcaattacttccagtgtattggcagtttcctcagttttgttgcactccataatgaagttcgctaggccctccccttgatcgagatgcatgggatgtactgaatgtcaaattaattgagctccatggcccattaaagcaatcttcctaaagcttctggcttctgccaaacttttcaaagtaaattattagtaaagactttgattgaatgtgcttggaagtagggtcgcagctttcgggatgctattagtagatagtaggttgatttctctatcaaagggtaccatattcatcaaaccgtctaaaaaatgcagtttgaaatcttttgtggcgcggttgcggtttatattttttccaaaccgcacggtgcggtgtggttttcagttttgaattaataattgcagttcaaattgcactacactatatattataaagttactaattcttacaatatgatttttattttttttatataagaacaaatatatatataatatatgtctacattactttattttatagagacaattcaatataatgattgatgattattatacatgttatgatgttaaaacttta

SEQ ID NO: 81639 - DNA, 1305 bp, Cannabis sativa
tattttttaatctatcatgcgtatccaaaaaactttaaatttatttcaggtacaataaactatttgaaaattttcaaaaataattaataggaataatgttgtattaccatgaattttttttttttttttaaaaaataatattctaacatatatttttaaatataaaaattaactaaaaaattatgatatatataaatttgatgatagcaccatgttccaaattattcatatccaagttatatcatgctttgtctggaattaacgtagttattttgtagatataactaatgatagatgccactttcattattagttaatatatatctcttgattatgagttttagttttttctttttgtaggtaattggcaagtcaatctgattaatatttttaattgtggtattatgttacaacactgaaagagaataagaaatgatgtactaataaacaatatgtgttatggctatgatatgattgtaatattctttgaaacagctctacatgtaattttaatttaagaattattataagggaaattattctggccttgaaaagagtagacattgtgaatgtggcagaatgtatatttataaacctgctaagacagcagctatgtaagtggctcttggactttgtacaaagtttttgtgcagacaggttagctgcagcagcctagttcttcctaattataacaactaatatttaggaaagcccaaaaagatattcctttatacaacaacaagtatttgaataattaataaaaatatagtaaacaaatagttcaaaagtcaaagctaagaattcttcattcaaagctcatagttcaagaaaaatttaccagtaaaatcacatgggggccatattggccactgcctaacaacaccggtgcaccctacccaaaaatgtaggccattgatctcaatttctctcatgtaacatctactccttttgttttttattttactatattagtttggatatgtatatatataatagggttttaaatttaataccccatgttcctatgtgttaggacaatgttctctgtgtgattaatttcccaagaaatagactacactcccttctacatgttcttactgaccctttcatgtggacgaatttcatatagtaagaatattttcctcatcagtggatatgttagaattggtgaaaaaccacctttcttcttcctattattattattattattatttattttaaatatatttatcatcagaagaaggtcaagattataattagaaccctttgatccttttaaagaataataataatatatatgtatgt

SEQ ID NO: 81640 - DNA, 815 bp, Cannabis sativa
gatcttcaatgaaaaagagtttcccttcaaaattggttttcttaacaattaccaacccgaagagtcagttactgtcactatgcctcattcttggattcatttaccattaaattccttgccatctcagtccactgcagaaccatcttctcaggctccttccatgcataatcaggtacattcttgcgattcatttgatcactgccctgctgcttctgctattcctgatatgtgtccaggttcttctcctttggctacatcacctgccacggccagtagctcatctctagcattacattcacctctgccagttgcatctccaaccaataaccctcctgctgccatagatgtctctgcatcagcaactactgtccctaatcatcccatgatcactcggggtaaggcagggatctttaaaccacgtattcttctgtctcacagtggaactaagcttgatctccatgaacctcgatctgtcgaagaggcacttcaccatgaggggtggaactctgccatggggtgtgaaatgacagctctaaagaaaaacaaaacatggtatcttgtgccccctctcctaactacaatgttgttggcaacaagtgggtctataaaattaaactcaatgctgatagttcggttcaacgacttaaggcacgtctagttgcgaagggttttcatcaacgacctggggtggattttggtgagacttttagccccgtggtcaaggcctccactgtgcgtgtggttctaaccattgctgttgcaaacagttgggatatacgtcaactcgacatcaataatgcatttctcaacggtgc

SEQ ID NO: 81641 - DNA, 800 bp, Cannabis sativa
tgaccaatctaaattaacatcatcaattaaattagtaaaggtttgtcctgagtttttcttggttatttcatatccatttaaatcattcttccagtcaatcatctcaaaagagagtgtaacccttatttaatctttgttatagccttaaggaataatgttctctcattgtcaacattttcttcttaaaatcactctaatttgcatttttaggagtgtgaagtttttatccattttcactgtaagagtgtattaatgagtttgttatatatatgaatattagatggaaatctatgattctttgtagtcctttagtttgatgttatataataacattaagtttgaagttctcttcattgaaatatacaaactattaagcctgaagaaaaatattttaggggctaatcactaataactaggtatatatataatatttttttctttatacaattgggaatttatgttttaaatttagaatttcggttcaattttcaatttatgttttctggaagggaagttttttactttagatcattgttgagtatttgtttcctttatatagtcttatttgattttccttcaattatattttaaatgtgggatcttcatttgttttaattaatattgtaaattaatcaaacacttaaatttgtattttgttgtaaggtaaaattattatatagggattcttctttgagagcagtggagaatgactctaattatttgagaatttgttggggggagaatgttcatattttggagtaaaaaaaaaatggctatactaagatccaattccttttttc

SEQ ID NO: 81642 - DNA, 1085 bp, Cannabis sativa
gcatttactttttatggcatatttatcataaccttaataatttttcctatatttttgaaaatagcccttaatttatagactcttgttcaatcttactaataaaagtctatcgtttggacacgatgtagtacatgttagttcgggaacataatttagtaaatatcaaaatttaagaggtacattttaatatatgaacaattttttgttgataaaattaaataaaattagatagaattcttgaatcaacaatctcaataatttacaaaattttttaatgattctaaaaatttgaaaaaataatttagtacgtatcgggaaaaaattagcctatattattgaataattggccaagcctataatacatatttatgctacatagttgtgagtgcatatataaatgtaaaaggtaattgctttcgtaaggagcgattatgaagtccagcgaatgttccactaatctttgcagaataaagagttttgtttattagtttaataatttcttcaataagaaaatagtaaaaatacttgattttaattgtatcctacggtgcatgtgataagaacgtgcatagtctgaaaatgaaaatccactaacaaatacttgcccacagaaaaagaataattctcaggatgaaatcatgcatgttgccagttacatacattttttatttaaaacatgaccgcatttaatataaataatgttaatcaatgttgggccatcaaacgtttgataacttgtctaggtaagataatcctccagcaaagtaagaattcaaaagacattatttagagcgtctgtaaaagtattcagcaaacttctggacaactaactctgtatcatgctcattaattacaagatcccacaatattagaatttaattcttaagatatcgcctccggattgtattttctcagtattgaaatatagtaattggatattaaattagagaaatgctaaagggcaccaatagtgcatagcatcctcttatgtgtcaatctcgctattgctccaactaagtatcgggtaccatataatttaatataatagtttttaaaaagtatcgctagccaatcgcaacgcgaca

SEQ ID NO: 81643 - DNA, 1173 bp, Cannabis sativa
tatctccaaacccttttgtctgtcactcatcatagtgaagatgcttggattttgaatgttcagatcctccacaagtagcttcaaaaaccaggtccaattgactttgttttcattctcaacaattgcataagctaccgaaaattgagagttgtttggatctataccaatggcagccaataagatacctctgcagtagccttttaggaagcaaccatccaaacctaataaaggtctgcaacccttattaaagccatccttacaagcttttaaacatatgtagaccctctcaaatactctttcgccttcttgaagtctggtttttagtatagctgcgctacttggatttgttgccatcaactgcctacagtagtcatcaaggattacatattggtccttcaatgatccctctaacatctcccttgcttttctcttagttctgtagaaaattgaagctgagacattactatattttgtagtagatgtcatctcttggaagccctggtactccatgtttggatgaattcgaaactgatcaaggaaatgcttggctagccaagcacttgtcacaagcttgttatcaaaaatcaacccacaatcatgtataccctcaaacttgttcaccctaatagttttttttccactctgtaaccttccataaatataccatccacagcctttagctttgcatttggctctaatcctagtgttgtcattgaaaacaaatttgtattctttatcatttgctataaagtactctctcaaggcataccttagatcacccatagtaggaaattccataccaatggcgaactcgaaattctcaaagcttgtctgcaggttgtattctttcttactcctcttaatagtggcattgccttcatcttcactatccaaactgtgtaagtcatcttcagatactactccttccgagtcaacttgatcattttcactgcatatttgtgtcactgaagaccaccattgtcttggatgaattgtcctctctaaatcctttttatgttcatgttccacatcagcatattcttcctcttccaacaagaaatcatcctcttcatcttctacaaatatagctttattcttcccctttattctcgcattgtgttgtggatgctttcctttctttttctcaaccctagtgttgtttgatagatgttc

SEQ ID NO: 81644 - DNA, 924 bp, Cannabis sativa
aagaaagacaacaaatgaattaaagttaggttttgaaatggaaccatagtacaaatcatcctaatagtaaaagtgcaagggactaaaagatgatacctaaaattttgaagtcccacgagaaagctaaaacttgcttcatggggaagccagttgtgagaaaccagtactcacggtagtctggactatgagaggaagtgctcgtggaacatcaagcatttttgtatttacggagatggtcaaacccaatgttagaggggtgacctcgcataggttgggatattaactcataaaaatatgaaatctcttttggggttggagcagactttccccgggatttgtagaagataaaccatcctacgagcaacttgtatgcaactagtaggagctgaaatggagcgattccatctttaacaaaaaatcctgtgaagtaagtcctaagtggaagatggggcgccgcaagagatatggaactaactccacgctctaaaaccatcacagctttgggaagtagactccccaaggacagatatgcggtgccacatgagtcttggaacattttgtattcctccatccttagagtacgcttccaaaagaccataattcctcaataagatttgcctttagtctatctcccaaaatagagtcgttaagaactctaggaactggagaagttgcgagagatttgccttttcctttacctttgctcatataacgtcatttaggttgaattggctcggaaggcccctcatcttgcatgagatctccaagattctcctcagtaagaggtacctcaagaatcttctcaagattcaccaaggccaaatgaaagtcactaccttcactaaacactgaaaaaagtgaaaagaaaatccaagcattcagtaccctacatcctaatgacaaatagggtacctagggaagtct

SEQ ID NO: 81645 - DNA, 690 bp, Cannabis sativa
aacatcctctaacccgttaataaatgaatattgtttaagaaagttgatatgtatcctgagcccgatccacgtgacagatgtgggttggtcgacagctctaattgtttaaatgcctaaattcattaatctactatatatttaacattttttatttataacctatttatgtcttgttgaaattttataagctagtttcagaccgtggtaagctgaatatgaaccgtttattaaacaaagtagacaaaagctaccaaggctagccaactcagtggtgatggaggagtaaaaaaaaagaaagacatagattcgaactcaaaccctagcggtgatagagtaaaaaaaaaacagagaacataagttcaaacccaaaacactattaattgatatacagacccttaaattattaattgatatgcaatcccattacgctatactaaaaaaaaacaagagagagaaatagaaaaactcaaaaataatccaaattcatttaatgcaaactcaaatggatttagagtattgatacgttacactcaaattttcattacttttaggttgggacctcatattttaatttgttgttatcattactctaattatcattatcaatctatcaccggtttcatatatcttgaaatatcatatcagagggaaacttggggtgattcataatgaaattttgagccatgaatg

SEQ ID NO: 81646 - DNA, 727 bp, Cannabis sativa
atactattaaatttaaaatttataaactagtgacgttttataataaaacatacaaatttgatattttaagtaaatgttattaatcaaaaggtcatttactcattctagagtgaaatttttatcaagtgttactaaaataatgtttttacaaacaaatgttacagaaccaaatgtcactataagcttaaaaacaaaatacaaaaaaaaatactcaattaatttaagaatatttttatgaatacaaagaaaaaaaaaacaaatagcatgcatgcatacaaatttgcagttttttcaaaaaattgtatggatttaaacttttcttttatttttttaataaaaatacaagaaatatttaattttacgttgttttcacaaaatcattatagtgtacgtactagtacgattatatatatgttaattaattttcatgttggtttatatttttaattacgagattccgtaaaactataattaaaaataattcgcaaaaacagtaaattataatatttatcaatgtaaaaaaaaaatggtgttgtccgcttattatatgcttacattgatttttaagtatatgttaaaaaatttaagtcttgggttaaatcgtgtatgaccaattcacatagtttataaactaaagtcaacggtcaaccaaacttaatagtattgaaacccaaaaccaagtcttacagaaaagctattacgcgcacacacaaacacacactaaaaa

SEQ ID NO: 81647 - DNA, 977 bp, Cannabis sativa
ttgctgaaacattcgatctctatgtgtttatatcgtgcatgaaacacgagattagcagcaagagatgcagctccttgattgtcaacccagattattggagctgctgaaacattcgatctctatgtgtttagagtgtggatgaaacacgggattggcagcaagagatgcagctccttgattatcaacccagattattggagctgctgaaacagagatgtgtaactcagaaagaatgtaggacagccattttatctcagtagcagtgttggcaagtgatcgaaattcacttgcaatgctgctcctagcaacatcttgttgcttttttgctgaccatgagatgaggttttcgccaaagaacacagcatatcctcctgtagaacgtgtcatcagggtaactagcccagtcagcgttggagtaggcttgaagacaaagtcgaagacaaggcttgatgtgtaagccttcatgaatagtccctttcaaatatctgaatagcctcttacaagcctcccaatgaatagttgttgggggatgaataaactggctcaacttgttgacaataaatacgatgtctagtcttattaaggtaaggaattgtaatgcccctaatgtactcctgtagagtttatgatccaaaaatggttcatcagtagacaaagataatgtgtgagtagaactagtaggactaggacttggtttaacaccttccatgtgtattttgacaaaaagatcagagatatacttcgattgggataagtagataccagttgaatcgcttataacttctactcgaaagaaatagtgaagaggacatagatcttttagggaaaattctctgttgagatcataaattagttgagaaattaaccctttatttggacctgtcactaaaatgtcatctacatatacaagtaggatgaccaagtttgcactagcaccatgatcaaacagtgacgtatctgacctcgagacagtaaaa

SEQ ID NO: 81648 - DNA, 1382 bp, Cannabis sativa
cacagcacagttgtgccaaactggcccttagactcaaaactaaaagtttcactatcaataaatggtgtggaaataccctaattattgaggaaacacaaaaaataaggcttcaggaaaaaaatccccaaaaaatggtaggccgcttctctaaaaatggtaagtcattttttcgggacactgctagaggaaatagtagaccgtttttcagaaaatagtttgtcattttctgttgcagaaaaccaaaacctcatttctaacctcaagactatcccaaatcacgcaaagctctaaaactcctgttttgatccaataaacataattgaacaaccaaacgcaatcacaagcccttgaaatcaatttcaccattaaaggaccaagtttgagcttgaaagctcaaaccttgatcaaccaacaaaaccagcatataacaacataaataactttaaatcaactccagaaaataatctcaaaccaaccccaactcgtacaacaccaaacccccaaaacatgcatgaaaaactaaattttctaagaaaatcaaagagaaaaggcttaccttagcttagctaccagaatccttgaatttctatgcttaaactctctgaaattggtctgaaactaaggaagaaaatcagtttttggttgggatttccttgtggccgactagagagaaagagaatgtgatggaagtggtttttttaatttttagtttagtataatatgacttaattaattttatttctactcaataacgtcaaataaaacttagaaattactaaaaattccacttaaataaaataaaagtcaaaatgacaaatttctccatttacttcactaagaagtaacataatcccttagggataaaatggtctaaacccatagcctcaaataatgctgacattctaaatgtttaactaccttgcctcactaattctaagatactccactggatctaagtgactcaaacagtcaagtcgtcacattctattgctagcgggcataacatatgaaaaatataaaatttcatacatagcatatataatacacccctattattcaaatatatctccataattaaataaataataatctaaagcctatttctgaaaataagcctttatctaactaagaggcatataatgataaaagattaaaataaatccctaattatctgctaatttccatactaaagttaagcgatagttaccgtcaataagagttaaaagtctctaaactaatagttaggtttgtattatgtattattgtgttgagattcagagtttatagttcatatcgaattcaacaatttttttttattattaaatctcattttattctcttccgctacgaatctaatatgaaccctaaaaaccaacacgggg

SEQ ID NO: 81649 - DNA, 1533 bp, Cannabis sativa
caacaataaacttaatatgaaaatttcaccattgttgagccaagcttgagttcttgaactcaaatttgctcaactcaagaattaaccataaaaaatcaacctaaacaagcttaaaataacttaaaattaaccccaaaatcaatcccataaagctctaggtttgaacataactaaaataataaaattgcatggcttaactaactatgactttaaaagcgtaaagaagaagagctctagggcttaatctgggaattcaccaccaaaatttctttgattcattgataaaattgacatgaaaaagggagaagaggttgctggttttctagttctttctttggactgaacaagagggagagagaaagtgtttaatgcaaaattggtttatacttttaagtaacatcaaaataatcagctgaaaagagtaaagaaaatcctaaaaaatcacaacaaggcaaaactaaatgaaataaaattcacattaagtccttacttaatgcttaagaaataattaggcataggagtaaaatggtccaaaactatatccccacctaatcccaataatctaaaaataaacttatgattgtcccactagaataaaggttccaagctaacccatccgtcttattttctatcgatactgagcaaaaatcataaaaataataatttccacatataggataaatacttagagcttaataaaatttcaagaattgagacattataattctaatgcctattttgtaaaaatgggacagacattatatatatattcacatataatcataaaattaaagtatttaatgctaattgccctactaatccatattctaataatgcgaccattacatttaggtatttctagtattattttcctaaggaaaaatatttttaggtatttcttcatcatgagccatattctctttctcaaatctaaccttcaatctggcctaggttgcttgcatctggcaagaaaattctttttatgccgctaattttagcatagtttcgacgagttctttggccctttcaatgactgcaggatatggctcgtaatcatattcatcatctttatctttcccatcatcttctggatttcgtctttaggaccttcctctcgaacctcatataagggattttcatcaacttatttttcaatacgttgagtcgttttcgcaggatgggtagttcctcttttggttttccattgactcctgtctctgcttgggccacaggatctacgttatctattgaagtatctccatcatgaccacctactttgcttcgggtgagtaacatggttgcagtgtacaactctcgatggtatcactaattctttcaactctcaatgaatgtaccaaaatatttttcgagtttttttggaaaccaaataaatattaagaaacgtaaagaaatatatagataacaaagagagaacactagagtttttacatggttggggcgttaataagctagtctatgagtaaatattattacgttaagattggtaaatacttagaatttacagaagtgttt

SEQ ID NO: 81650 - DNA, 1115 bp, Cannabis sativa
tggtggttttgcagtgtgtatcttaaactggttgtagtatctctttttaaactcttatgttctgtcgcgtgaggagcatggtcatatgcaagtcaaacttcacttctctctctcttgtttatattttatatatttattttgaagaaagtgaacataggtagctttattggggttgtaaagccttttaatgctcaaaacattaaaccttccctaccttcaaagcaaacagtcagaggatctgggattccatgttgaccaactggctttctaaatttttctttctttctggcttctgctatgctacctatattacttctattctattttctatggacaaaaaatatatatagtaaaataaataactcttcttttgtttttcttttttgaattgttgataaacaaaactcttaaaccccattattcatcacattccaaagaatgaaagaagtgatgaagtggaagattattaatggtgatcacatggacatatatggtattggtcaggctggcttattattttagtgttagctccaacaaatacttgatgtggatgcaaagaaaaagggcggactagcgtgccgctaagtaaatgcaagagcgtgaccattcctgtcttttgaaattttctaggtgtgtccatgtaggctaaacaaatccagactcaaagatttggaaaatataagaagaaacaaaattttattaatatggtaaaagactattttacaattagttagaaatattttataaaagttatattaaagtgttaattacaactctcttattcaatttctatgtccgaaatcatatatcgaaatatttttttcaattttttttttcatagcgatattcgttatagttccaataccatccctgtaaattttttaaaaaattaatatagtttacaataccaaatatagaagtcatgatattccagtttaccacgtgtgctcaaaaaacttcaaaagtattttgggctctgtaaattgaagctaataggagtattttaaattgggaaatttacatgatatactaatttttatcatttttttataaaaatactgccaggtagtaactttttcaattttactgtatttttttaaaggttttatactact

SEQ ID NO: 81651 - DNA, 1804 bp, Cannabis sativa
tgggcgacgctctctgccacatcagcgcctccggccacctccatgacgtggctctttagggcgtttgggctgtcccttgttacgaagatgggaggctttggcttgtttttggaaccggggggacggcctctgggcctgcggtttccaacctccacggctccctccctaggctcgtccctgtcgtcatcgtcaatgtcgttgtctcgttcttcttggtggttgtggtggtggaggatctctgatgatgatcgtttgttgttttgtagtacaggtgagttgtttgctgccagctccatggccggcagccccacctgattggtccaccacggattagccagactaccaattctgttgtatattaattcaagaacaagctacaacagctaaaacaaacagaatcaattcacttcaggaaaacctaataataagatcagctgagttttattaagcactctatatgcaactttatctatgaagaacgggaatcgaagagaaaattatatattcagtactggaatgatatcttatatgtgtatatatatatatatatatgtttatgtgctgtgtatattagggtatacgaagaagatgatgaaactgagggactataattatgaaaacgaaggattatatgatttttttttttttttttgaatacaaggatcgattatgtgttttaattatggaacatatgataaaattatacaagagaggaaagagagagagagagaaaaggaaaaccaaagaaagcaaagcactaagtaagaagaagagaagtagaagaagaaaaattaatagtatatatattatattatatattattatattaaaaagaaagagaaagagactcaaacaaatttaaaacgagagctcagctaggaataagtaaaacaaaattaattaacaatatttttttttttttctttggcttagcctgttagggtattatattataataatatgtattgtttgaaaaaatctaaaagtgttcagtataattaaatatggcgtttaatatattttaatttaataattttttaaaaaaattactaactattaaactgtagattgtagttttgataaaaaaaaaatatatgtagatggattgtagtgtataaataacaaccctctttagaaagctaccaacttattaattctgtcacaaattttgttttttgtgcaattaaatgtggcattcaatatatattaatttaataattttttataaaaaattactaattatgaaagtgtagattggagttgtattgaacactattaatactctatataatataacaatgctctttagaaagctagctacttaatttgtctcacaaattttatttattttatatatcttttaattttaatgttatgaaatattatatatataaatgctcaaatcacacaaatcaattattatcataaatataattgtattttttgattttattaatttagttttctttttttttctatatttttgtataaataagagttcaacttactggagagtaagcattgagaaattttctctttctctcttcatcatcttcttattttatttatcgattaatattattcataataatttatagcactttatcagcacgagtctctgcccacggtaaatatattttctttgctaattaggatttttaccccctaaactttaacatgtaccaaatcattcttcctgaagtttttggctattaaaaattcccctgaactattgagtttgttatatttaaggacttttatttaatttcattcaattttactatttcagtgattgtttatgtac

SEQ ID NO: 81652 - DNA, 5262 bp, Cannabis sativa
aaaactaagcggtctttacagctattgtggccccctatactattttagcctacctccttcattggatgagaggggattgatgaaaggacagaaggtgcttgcttttgtagttactgttgttgatcttgttacagagattgtggaagttgttgttgtgttagttgttgagcttggggctattatggttggtgaggtttgatttgttgtcttctgttgccgctggagctattgttatgatggttgtgcatgtttttcttttgatggttgttgcttggtttattgttggcttgggacctcgacctacctcagatttccttctcccataggagactactactcgaatgctatcacctttcccttcttcgcctccttctcaaagccagtaggataatatgggtgcttggtggataatacaactttcttatgcaacacaaaaccttccatgctttcatctgattgtgtagtggcttccacactatcttaggttgctttaggggtagttctccttgaagaaaccttaataggagccagattgagttgttaaagaggtggaatgtaacacactcctaaggcgtgttatcgtgattttcacttagttgtgcagctcgctactaatcaacgagtttattgaaaaacgtgattaactaaaactttatttaaaaacatatcaatatcaaaataacatatatataactgggatcccgagaataaaatatttacaactgttacaaggtatgtactacaaaagttgccgcctagacactatacaaaatacaacaagttatcccaaagaccgtatgctccaggcctaactgcctcgacatgtacaatctccatccgctcgctcttacgattgctcaaccttagccttgcccttacttacacatgcaaacaatatatgtgagtcaacaaactcagaaagaatagcataatcaatatcataactataacccgaattatattgaggcgcccatacacccaaccaaaaccctatccccgtgttcaacacagtactgagtctataacgttcaaacaacaatactattgaccataatatcagcctatactccgcactcttgtcatactctagtcgtatcgatgtgatactatcaagtagaacaatactattaacaataatattagcctatactcggtacgctagtcatactctagtcatatggatgtgatactgtgaaacagtacttaagccaacatacattcatcaatatctaatataatactaaatataatgatatcgctattcgaatgtaatctaacaggcttaacaaatatgtacgctaaacatgtaatcacataagcatatcattatactaatcttacctcactttcaaatttaggtgtgccggccaaccagagtggaactactgcgtgacgatttccaagcccctaaattaaactatttgtaaaactatgagtgaaataataaatcacttttgaaggacttaaaatccaaactaaaagttaccctgtcgatggataacacggcaataccttaaacatcacaaaatgggaaaaactagcattcctgaaactgccctaaccggcagaccagttccccaacctgaagtttggttctatggggctcttagggaccaacccaaattctggttcctataggtcccactgaatcagtcgaccagttcaatgcaggaaacactcaaaacctatacacacctcaattcgaccccaaatatcacaataacttctagaatacctatttacaccataattgatagaaatcaagcaataaaacacaatacaaaccataatccaaaaataccattgaagagcaaaactttgaattctaaactcaagctttgctgaaacaacacaccaagcaacaaaaaccacatagattagcttgcacaacactaatatagactcagaaaatagaaacaaaccacacacaactctacaacacctaatccattaaaaaacatgctttaacctattttaaaacttaagaaataacaaagagaagcgctacagattttaccttgagctagatacacacaaaacatgctaaattactcagaatcaagctaaaaatttccaaacacttgctagtttctatggagctcgagaagagagagagagatatgtatatatatatagagagagagagagagagaaaataaagtgttttgattttttgcaaaataagttaatcctataattatcctatattaacaattaaaatcagcttattaaataaaataaatcactaaaagaccaaagaataaaaggccgagaagagcattttacccatgcctagccaaaaagcaaacttcttagttaggggtattttggttattctaatcctcggataatccttacattcccaatatctaactatactgcctcgctaatactaaaatactaaaatttgattttattggccaaacgtcgcgttccattgttgttgagcacaaaacatgaaaaacataaaatttcatatataacataaataatacaccctgaattaaaataaatctccatatattaataaattataattaataatctaatttcataattaagtcctaattatctactaatttccgtattaactctaagtggtcaatacaattatcctcccattaaaaggattttgtcctcgaaatacctgaacaactctagatactactcatgtcagactctaactcccatagtacctcgaccgaagctatggtcttgttttgaaggactttatcttttctgccttagatttgaactggttgttctttgtacgatagatcggctgaagttcaaggttctcataactcagcacatgagtgggatagcgacatggaatacgttgtgaactgctgatgtgctgaaggtaaggccaagcaatatgccaccagtccaaccttctcgagaatatcaaaaggctatataaacataaggcataacttaccctttttcccaaaacgcctgatccccttcatcggacacactcgtaggaatacatgatctcctacctgaaactctacatgtctgcgtttcgaatatgcataactcttttgcccactctgagaggcaggcattctggccttgatcttttctatagcttcattagtttgttgcactgattccaaacctaggtacttcctttctctcgtttcatccaaatgaattggaaatttacacttcctaccatacaacatctcgtaaggagccatccctatagtactttgataactgttgttgtatgaaaactctatcagtgaccggtactttctccaagagccttcaaaatccaacacactatcacgtagcatatcttccaatatttggattgtccttttagactgtccatcagtctgaggattgaaagttgtactgaacttctgtttggcacggatggcccattggaaactctaccaaattgaggtgaatttcagatctccatcccatataatcgacttcagagcccaatgtaatcttactatttctttcacgtatagctctgcatattgattcactctaaaggttttttttactggtagaaaatgtgcagactttgtaaattgatataccacaacccaaatagaatcccactttccggtggtcctaggtaaccgaaccacaaaatccatggtgacatcctcccacttccacgtaggaagtgttagtggttgcaataatcgtacaggtctctgatgctcaaccttaatctgctgacaagttacacaacgggatactaattctaccacatctttcttcatcatacactactagtagtaaggttttaaatcttaatatatcttggtagttccaggatgcagtgagtgtggagttgtatgagattcctcgagaatttcatttctaagttccacacaaccttgaacacaaaatctggtcttgtataatagcatcctgtacttgacaccgtaaaattcttagcttgaccaactaaaacctattccctgatttttactagttctggatcagtcaattgagaggctttaattctgcctaatagattagattgcaatgtcaaattattaagtttgcctacaacaaacttaatgcctgatctaaccatgtcatttgctagttgaggtgaaatctttatcatactagctacctgccagagaccctttctactcagggcatctgccaccacattggccttcccaatatggtaaaggatttcacagtctcaatccttaatcagctccaaccaacgtctttgcctcatattcaaatctttctgggtaaagaaatacctgaggctcttgtgatcggtataaatctcacacttttctccatagagataatggtgccaaatcatcaaagaaaaaactatagccacaagttttaaatcatgtgttgggtatcgttcttcatattcctttaactgacaggtggcataagcaatgactcgatcaatctgtatcaaaacacaccctagacactgtctagatgcatcacaataaaccacaaacttttctttattagatggtagagcttatacaggggttgtaatcaatctttatttcagcttctagaggcttgcttcacacttgtttttccacaaaagtcgctgattctttttgttatgttcggttaaaggtgttgagatcttagaaaatccctcaaaaaattgacaataataactagccagacccaagaaacttctaacttctgtaagtgtcttcggcctcgaccaatccctgatgaattcaatcttccctggatccaccttgaatccatctttactaacaatgtgttcgagaaacgacacttgagatagcaaaaacttgcactttttgaacttggcatagagtttatgttctcatagtcactgtagaaccattcgaagatgttgctcatgctcctcttttgattgaaagtacacaaggatgtcatcgataaatataataacacaaatatcaaggaaatccttgaataccctattcatcagatccataaaagttgttggagtgttggttagtccaaaagacataaccaagaattcgtagtgcccatacctagtgcaaaaagtagtctttagaatgtcgtcctctcggaatctcaactgatgatagcgcgagtgaagatcatcttagagaagaatgttttcccttgaagttgatcgaaaaggttgtcgatcttcggtaacggatatttcttcttgatagtcagtttcattagttcccggtagtcaatacacatgcataaggattcgtctttcttcttaaaaaatagtacaggagctccccagggtgacac

SEQ ID NO: 81653 - DNA, 1201 bp, Cannabis sativa
  modified_base (73)..(73): a, c, t, g, unknown or other
aaaaccgtacggtcggttttatacggttataatttctaaatggtcggttataaaattgtaaaaaccgaccatnaccgaccgattttcacccctacaattttgttaaaaatattttggttatctaaagtgccaaagggaagaataaatggtgtggccaactttgttttgtaggtataataaatttgtacacaataatagtaaaaacacaactgtaacagtctgcagcaataaaatgtattaagtcactgagagaggttgaagtaagaattgaattttatggtcgcgaccaaaaatgggcgtaatggtgtttttttttcacttttctatagtggtcgcgactatcgtgactaaactatttgtggtcgcaaccacaacttcgtatgggacatgggcaactttgtcttttctcaatttttggctgaaaaactctattttaataaaagggggtcgcgaattttagtggagattcagaaatagaactccagaaacaaaggtagaagtcttgtcttatgacatggttttgattgttttgatcgtttcgattgtccagtcatagttcgttttgatcgtttcgattgtttggtttagtttgattggttttggtattgctctgtactacggaatggaggctggcagtggaagcatgagtggtttaggggaggatatcttcaattttcagattgaagaagaagaactcgaggagatggctgtgagtgtggatagtgggaatgaaggaattgatgatagatggtgtttggtcggcagatttttgtcgaatcgaattgtggattttgaaaaaatgcagaatatcttagcgtctctatggcaaccggggatgggcatgttcgtcaaacaaatggacaataatcgcttcttgtttcagttttatcatgaagtggatattaaaagggtcattgacggtagtccatggacttacgatagaatgcaactgattatagggagactaccagtgggtggtgatccaaaaaccttggcgctcaacacgttggatatatggatacagatgcatgatgttcaacctggatgtatgatggaggccacgatcaaaggggtaggcaatgctatcggtaagtttcttgaatccgatccaaaaaattttattggcgtttggagagattatctccgtatgaggattactatcgacatcaccaaaccgttgagacgaagattgaagctgacg

SEQ ID NO: 81654 - DNA, 1903 bp, Cannabis sativa
aacatgacttgtttttaaaaacttgaaaaactattttttgttctcatttttaaaaacaattttttgaaaacaaaaaacaaaaaacaataccaaacatgctcaatttctagtgtcttattttgtaaaataattaataattacacacagaaataatatatttattagtagttgatacttaggggaattactccatataccaatttttaattgttttttatattatttttacggttttggttgttttgatgatttctatgtgggttgctatgtatatttgggttacaatttaagttgctctgttggttgctatgtaagttgctacgtagaaatccgtaaaaatacaaaaaaaaaaaaaattgttttgaagaaaagttttatttatatacacccaaaaatttataaaatgcttgcaccctattttaataatttttattttgcataaaatatatatctttgattatgttaatttgtatttctaggttttttttttaattaatattcttaaaaaatatatccataaaaaattatattttaaatattattacaaaaaataaaataaaaaattatatgaaattttattagacaaaaaaattacccatggttttaaagaaatatggaaataagtattgaaattaacattaagaaaaaaaaatattaagagtgattttttaaaaattatattaaggttatttttttaaaaaaaaaaatttgagatgtgtacttgtctgcaaatagaatttttcttgttaaaatgaatttttttgtagtaaatacacgccaacaataataattggagagtataattataattttaattatcttcaattacacagttacacttaattacacaatcacagaaatgcatgaaattgtataattatctctaattacaccaaagtctatagctttccaaacctaagcctagcttgaatagtattgaacgggaaaattttttgattgtgatattaattagtaaatgtatctaactatatttagagaacaggtggtttagtggtgacattgacagcggtggtataccacttctgggcatgtcgaaattgttgtgtggaatcaaaagttattaagtgctatagttgtttaaaaaaaatacagcaatatgtaaaaaataaaattagaggtgtgatgctaaaaaaggtgaacttgatggacagggagtggtttgagaatatgtaataatacaggcctaatattattggtgctgatttacccaaaaaaaaaaaaataagtactattgaataaaaatatttacccttggcatgaccacttccataaactttgacatggtgttggtctgtagtactttgatcgtgtggatgaagcaagtactcaatgaaataggctgcaaatgcatttgcagagacgtaggtgtacgaaatccctgctgcctctgtggctcttctgatctttcttttattttctagtaaagcctcaaatggtggcaatccactcactctatccacttcattcccatactctgatggaacaaatctctgttttccccatataatatatcaataaccattaatatttaacacaataatattaattatacacatatcattactcttctgtaaatataaatataataaccttgatgttaccagcttcttttatggctttgagtatcttgagttgatcaagatgttgaggaacaggcaacgtagatataacaacatccacttgtttaagagccataacaagtttatcgtgctcctccaatccaccctacgtacgtgtttcagattcgttattaattgtaataacaaatattataaataaaggatttgtatcttgttgtgtatatgtgtgtatatatatatattaggaaatcaaaatgatataaataatatttaatacgtatattatgtacatggaagatggt

SEQ ID NO: 81655 - DNA, 2147 bp, Cannabis sativa
  modified_base (347)..(367): a, c, t, g, unknown or other
ttagtcacaaaaaaattatgttgtcactaaaaatagcagttttttgtagtgcttaaataaaaaaattttaaaaaaaaaagttacaataatttgtttaactataaaaataattactagagtccaacattggctggtagtatacgctcgattcacttaataaggtgaggacaatcctctcctaataagttaattttgttaagttgagttaggttcaataaatttcctaatatggtatcagagcaggtctagctagttttgcaatgttggatattcttaatattcaaatattgttcatgtgttgtgtataaaagtgagtctcacattagctaataataataataataatnnnnnnnnnnnnnnnnnnnnnaataataataataataatacttatccatttaaaatcatttcctcaattttatttagttaaattaaataaaatagctttcctaatataataataattaagatttataaaattcaaatcttctatatatactagtctcaaacaagtcatatttataccatttataattatattattcagccaaatacttaaataaaaataggatgctacaaatgattaaattataacatatgatgatgtaaccaaataaaataatacttaatgatgtataatacatttctactaataaataaataactaaaaattcaaaccctctccaaataataataataataataacattttacttagtttgtctcatttttctccaacaacacacacattcaaaaaatttgttttttttttttttgaaagattcaaaaaatttgtttattgattatataattgtacattcaatacacaaagaattgttcataaaaaataataataataattagagaattaattacaacatattataagtcggtgccacgtactaaatctatatttattacataagtgatagtcaaattcgtaatctctgattttattttttatttataagttaataaataatttgtattaatagctatagacttagactatgggaatgaactattattataggtaggaaaaattaggcagttaggtttaaatatatttatataaaaaatatatatatgtatattatctcttataaatttacttgaggtggctctttaatttcagttatgtgtttataccaaaaaatatattatctacacttggtgacaaaatgggtccaaataaattttgtttttttctgcgcccacttcttttatttttattttttttattaacacgtgcttaaaaaagtccacttttaacaatgactttcttctttgtaataattctttcgtatatcacgtacaatatattattgcaatatatatagcctaatttggtgatataattaattatgacgaacgcactgatgagataattaaaactacataatattaagatcaatgtttgatttactattaatagtacaaaacatccttaattagggttagggctaattatttgttgttgattgttgttatatataatatttaatttatgatcaatttttttcatccttttttttcatagatcaaattgaagattttattcctcgtctcgatcattgttttctcattaggattttatagggcttctctgaaatagtcgtgatagagaagatcgcgagagaagccccgagaaaacaataatcgagaaagattttcgtattttatcgctattataatattttttattaattttgttagataaaaacatcgttaattattggtaaaatagaatttctattaacaagtaaatcagaagcaaaatcgttaataaattaaaaattaacaggtaattaaattttttattaatcagtagcagtgaagtgataaattaaaaaataaaaattatttatatatatttttttataatttggaattaatttgtgtcacaatcaagatgtgcattaattgtatgagttgattttcataagaattggaaattgtatatcaaaagtagaaaaacactaattaattaaagaatcaaagtcaaaagaaaccttgactaataataattatgaatgaatatatatatatatagttgttaaaagatcaagcaataaaaaggacacttatatatatatatatatatatatatatatatgagctttgcattttgcggcgcttcaaagtttaaa

SEQ ID NO: 81656 - DNA, 806 bp, Cannabis sativa
  modified_base (778)..(780): a, c, t, g, unknown or other
tcaccagcagctaccaaacccccattcgcccaaatcgtaccagcgacccccttcctcacagtcataccaccacaacaaccacacctccaccaccatcacactacaaccaccacaccaccaccattatcaccttcacaccaaaactaaccacctttagcagatctagataaaaatttatatatagggcatagattatagtttcactgctccaaacaccaaatgattatcatccacacaaccagagcgttgaaataaacaccaacaacttgcaaaacaaatctttctaacattcacatacatataactaatccatctaaaaacaaatttcagaaatggagtacctgcaagcatcagacaatgtaacattgcaaaaaatcggagaatttttttaagaagcaaaagaaagctgctttgtttggagctgtaactgcataaaaaagaagaaaaaaaacaaattaaaaattaaaattaacaagaaaaaataaatcgaagaagaaggaaaagggaagattatgtaaaccttgaggggagaagggaaatgggttttggaaagaagagaagaagaatggcgggaggggcagagaaggtaattagtgtgaaggccaggcaaaagggcagtggtgcaatccattttctccggtctccaagaggaagaagaagaagaatggcagaagaagaagaagaatggttaggggagggggggttctgtctagaagaaagagaaggagaaagagaaagagaaaaagagaaagaaaaagagaaaaaaaaaagatttttnnnttttttaatttttataaattgttttt

SEQ ID NO: 81657 - DNA, 3132 bp, Cannabis sativa
cgatcttttattgcatatattatcaatatggttatagtttttccgcattacatattgtttatatatatgctatatattatatactatattatagtctagcaatataagctcttaattgtagacaattaaaatactgtatatatgagctggtccccttgtactaatataatttacaaaattatttaaaaattttgtgaagtacgtacgcctctcttgtactaaactttattttttttttttgacctttttttttcataaattacttttccctttcttttttattttcttctgcaataaattttgatttattctcggctttgaaactccctagcttaaaaatgtggctttaaaatatatatctttcttcttcctcctcctacatcccagtcactctatcatgcatgaaaaatgaagcttgatttttgttaaattgaatttaaaacaataaaactaaaatgaaagatcgatagaagattctgactgagttgtagactatgtctctttctatgttttgcgattttacccaaagtgtgcacgacagtctagcaattacggcgtccccaagataaaatagcctttgtatacgtacgatatgttctgcatcgaatgatatatatcgctcgattacaccctaaattattcctctgagaaaaattgtaaggaagaagataattttttttttttgttattgaaatgatgtattcttttgttgttctgatcaacttatagagaagtcgatctaagattaaacgataagaaaacggtaatataatcatggaggtttaacattaaagataattaattaacaaataaataaaaaataattctttatttaattaaataatttttctttaaaaaataaagtgagctcactcgccggctagcccaactcgactcggtcagacaggtggtgacggcgtgcccgtgtgtggtggtccggtgtgtgagtcctgacccatgcgcacaaaattaggtaccccttcgggcgccaacccaagttccaaacttgcacattatatgcacttctattgaactgattttatctcatgtgggactccatttactcacacacttcacttttcttttctataaaatttcacaaagctccaacaatccctcacttaaaatttttaaaaaatattttttcgagcaatatcagacaactataagatagtgcttaaacaaagatctttcgatttgaatattgcatactgaatacaatttagattttacaagagttattcaaagtcttgaactctatctctaacatcgtaccacacaccaatctttcaacgatgtattcaaacaagcccgcgcgttaatgaccaaggacgtctatcttagtatagtgaatgctctagaaattttgtcccaaattctataggaagcgaccccactcccacattcacataaatgagtctatcaagagtactcatgtagttcggtactccactccacatagagtatagatctcattaagagtttctattaactcatcctcttatcgcttcaagacttcatgcttctcatataacaataccgtgatcaacacatatcacctcataacttgttattacccgttgaacctaattcttgggatctccagtcattaggttgggttaccattatgagtgactcatctttctaagggcaatagtccaatttcttttgaatttttatagactttctctctagctagtcctttcatcaaatacaaattgtcattagggcgtacatgatccactctaacagctcctgttgagagaaactctctaacaatgttgtgcttgtgatggatttgtcatttcttaccattgtaatagtagttttggaatttttcaatagccacagtactatcgcagtggatcaacacagttggtatcgatttctcccataaaggtatctcaactagcaatcttcttagcaaagctacttctttactagcagaggctagtgctatcatttcagacttcatgattgattgtactaaaatagtctgtttctttgacttccaagaaacaacgccaccagctatacttagaatatagccacttgttgctttggagtcatctgacaaagtgttcattacaaggaaaaactattttgtcagcaactaagctcaccggcaaaactaagagttactcgccgacatagttttatcggtgacatttggcgccggcaaaagatgccgataatgattcgtcggcatattagcttttgctagcgactttaatagatgtttcgacaaaagtatttacacaagagaattaagttgtcggcataagttcatcgccgaaaatttggtgttagctgagttgtccttgtcgacgttctgccggcgagttaatgcgttggcaaaactttggcacgaatttcgcgcctattcttcatttttccgccaaagttttgccggtgcattaacttgttgacaaaatatttaatattaaaattatttatctttgccgacaagttaatgtgtgccaacaaaagtatatatatttttttaatattttaatatttataatatatataattaaaatcatagtaaataaatataatatcaaatatattattgttgacgcagtttttcgtcaacagatctaagaagatcgtaaaacgagcaagatgaacacaagcaatagttaatcaaagtaaatcggtttgcaaaagtaaattcacaaaagataacacaagaattttataatggttcaccccctttcaacagtaataggctagtccacttggagtgttattagtctcaatgcttgtggagagttctccagagttatgttctctaagagtttactcgtcaagtgagtttttagaattttagagtggaagctcaggagaatgattttgtgagtatcgagttcagtatcccttttacaagtaattgcacctcccttatatagattattatctaggatctaaaattccttattcataggtgcaccttcccgtaactatagttgggttaggcttaagatacaaaataataataaaataatcattaaaaaataaatgtaatggccgctttaataatttggattagtaaaggcaattagcactaatttctgttaattttataattatttatgaattaatttatttgtggaccccaatattagaaat

SEQ ID NO: 81658 - DNA, 1346 bp, Cannabis sativa
atcttaaaattgtgtgtggttgtcttgaaaacacaattaagtgaattgatcaacttgagttctctacaagtttattttcaatacatgtcttgttactggaattttacaaaatattataggattaggtggggagctcccatttaaaacttggatttgctaagcaagtttgaatattttctgggtaaaagctcgaggagcaaagtcttttcttatactttagtgagggtggatacatgattttccatgtcgatgttagcatttatttccatgatccatagattttatttacttttcatgatgaggttgccaattcatcttccttaggatcaaacttttccttttaaaataaacaaataaaattgcctctagggctttagtgtagtgggaaggtttccttgagtaaagtctaacttaggccgaggtctcaggtttgaatcctggccaccgcattaagaccatgttgtaccctaagacctgatggtagggcctgctgctgggtatttccctatgggattagttggggtggggccagattacccatgggtttcaaaaaaagaaaataaaaattagaaacatgaactgatgctgttatatttatagaatgtttgtatagaaggcttgaatcaaagccctgctaccatagaacagtgcagcaaaaggtgaaccgtagatatacaattcattttaaatatctaaattaagttatccctctatagaatattgtaaatatttaatttgaccaaagtcaaaagctagctgaaagtaaggtttatactttggcggaataggagctttccaaacaaaggaataatgttgaataggcaaactatcacacggttaattctttaaacaaaattacaagatctcccaattttccagctttcaaaccatacaaaaactgcctcatggaagtcaactgaatccagtattattatcaatctcgagatctgctctgatttccgttgtatcaaatttttgatgaagtttccatgaaaatctaacttctcatttcgactatcacattgtccttgctagttgatgaaaatgattccacctcgaagctgcagaaaatatgcaaccaccacagaatttaaaaaatattctaccttttttgcgttatgtatttctgtccataatttatgggaatgatgtgattcctctctttatgctaccaatctctacaatttgcctattgctctatccttgccagttgtataaaaggttaccagctatgacgtttttgttaacactcagtagattaattgtcatggtatataaaaatattgtgtagctcaaatggttaggcatgtggttcgctacctcaaggtctgagatttgagtccctt

SEQ ID NO: 81659 - DNA, 589 bp, Cannabis sativa
aaaataaatacaataagaatttcaaattaattatatgacctcaatgtcttcacaacttgcatcggatggcaagatactcctaacagaattagcatctaaaccaatgacagcttgcatctcatatgcccgctgctgcagatctgtcgagtgtgaagctgataatgcctcaaccaaagattgacactacaaagacagaagaagaattagaaatgctgatacaattaatgaggtacaatgtgaaaacacattcaaattagctctatatttcccgtaatccattggttgaaacaaagacaggtgcgagcaaggtaacatctcaagagcataataacttactatgcgctcctattttcttcaaagttaagacttctattaaactaaaaagaaagtacacacccaacttttattgattgacaacaacataaattatgcttacgaaaacaaaaaaaaaaataagagaaacagatgtaaacaccattatatatctacgagtagctataggagcagtcctcaaattctccggtgaagcccaaaaagaagctagaaaacataacaatcacaaaatgttacaactggtagaactcactcc

SEQ ID NO: 81660 - DNA, 595 bp, Cannabis sativa
ttcatatcataaatcttattgttaggataaaattgtttgaactaagtacctctccaaattgatctggctttggaacattttaggagagcatgagtaatagactcaacattattaaaacaaaaagaacaaagagaattaggaatgacattttttttttgtataaatttaaagcggaagaatgtgattaaaagctttctaaataaaatacttaattttaggaggaattttaaggctcgaaagagttttccaccaataagaaagaaaagaaagatgagtaggaaggagaagaaacataagatttagctaagtggtatgcagatttgacagtgagacaacaattgaaacctgcaaaataggattcaccatttcatgatcaaaatatacattcaacttatcaatattccaaggactattgtgagtgatgaaataagaaatagtatcaacgaggataaacattatttttataatggagggatcttgtaaccagagagctaaaaagagccaatagtagagataaatttttcattttcgatcttctagattagtcactgcttaagaaggtctttgccctataataagctttctcgagtaaaag

SEQ ID NO: 81661 - DNA, 1705 bp, Cannabis sativa
  modified_base (131)..(136): a, c, t, g, unknown or other
ttaagtttaatttttaatggtaattatattaaagttatatttttaaaatttttgtaagtactaaacgttaaattttaagtcaatagtcatatgatatttttagattggttcaaattattaaatttttattnnnnnntaaaaattaatttaaatatatcgataagaaaataatatgtgaataagaaaatgatcattgacttgactaacatttaacggttaagtacttatgaaatttataaaaatataactttatacattattaccgtcaaaaattaaatatgagtaaatatctgcaaccaagaattaaacttaggtatttatactacaaattactcttaaataaatgatgttttatgaataataagtgatttttttaatgggtattgctaaaggtgtctagtatcactgttctataaatagtatgtaattttttataacatttattaaaataaaataagcggaatttaatattaaattttattaatattgatattacacatataaagatgtcagacactatgtgttctttagtattttttttaataataattaataaattaaaatatacgaaacttttgtacaatcctataagtggaagtgagaaaaatatgtgaaatcaaacaattaattatattgataatgataaaatagtttatggtaattttgaactctaatagtctaaataattaattaagttaatttttcatcattggattgaatgaggctaattataatagtcaaaaactttgatggaatgttttatccgacaaatggattgattgaatgatttattatataggtactttacttaatgagatcttgaatttttattattatttaaaaaaaaaataattagatcttgaattattgttacatccaaaatgcttgttgttatagagaatattattaagtaattattttctcaaatggggttgaaatttataaacttatagccatgtgtgtcaattgaattaccatattcaaaaaaagaaagaaagaaaaagaaaaagaattaagacttgtgttaagtcatttttcaacacaataataaagtataggtcaattcattgtatagattgtaaattgcacgtattaatttttgtcttattataagaaacaaaaaataataattcattttcataacatggcacttgcattgaatccatattattattttaatattttactaagtgacaaagaaaattaaataatgcaactctcactatctctaatctctatcttcctaaataaataaataaataaaattattggaatgacttgtttaattgaagatcatatatattgctagaaaaatgataaactgcaattttttttatagctttcactataattaactccttttttatttgagttcacataatttatataaattaattgtagaatatgttattttgttcaccacatataatttgctcatttattaattttattaattacaccataatttgcagcagctcattcatactattaattatttgtagtgaaatgccattattagacatgaggactcaatcatatataaacagaacatgaactaataaaccaaaggttaaaaatagactaacacaaaatttttttagtggttctacctgttaggtcccgttcttccatcttgttgggccgctaactcaccttaatttcgacattaatatgatattattcgctttgcgcttaagcattcatg

SEQ ID NO: 81662 - DNA, 1588 bp, Cannabis sativa
  modified_base (94)..(96): a, c, t, g, unknown or other
aaagtaacaagagtacaacataaaaagaccgtattttttgtaaataaaaaatcgtaaaaatatttaaaatttcgtaaaatcgtatttttgtaannnttttgttgtttttgtgtatttgttgaaataatcccttcattccctccaattggtgcccttttcagcccagaaaaccccttcctcatcaggtccaacattaagcccaagcccaagcccaagcccaagcccaagcttacaaacccccgaattatcttcacgatggcatattcgtaatttcggcgtcgttaaaccttgtgtcaaacacagtccttaaccagtaaaatgtgattcataatattgttcatggctatggagatcgcctaccgactctcattccgtctccttccactacttcaatctgaaaagtgcctaaaccccggcgttttcaacccaattttcagaaaatcatgtgttcccgttttgggtcatgtacaccaagtactgccatccaatactatattcacgaaccggagaagttacagtcgggcgtccccgtcaattgccagagcaggctggcttttgggtcttggagaaaagaagaagacaagcttgcccgatatagtcaaagcgggtgacccggttttgcacgaacccgcgaaagaagttgaggtcggagaaattgggtcagataagatccaaaagataattgatgatatggttgcggcgatgaggaaagctcctggggttggtcttgcggctccacagattggagtacccttaagggtcagtttttggatattaattttaaatttattttctttttccatgcttgtttggttactgagaaaatgcatgaatgaaaagatataactttactgttctgatacttaaatgattgcagatagttgttttggaagatactaaggaatacattagctatgcacctaaggaagagactaaagcacaagacagacgcccttttgatcttctggtatgttagttttgattgggagagaagactttttttcacattacctcgagtatcactacatgttggttggtttggacaggtgattattaacccaaagcttaaaaagaaaagcaagaggactgcaatgttttttgaagggtgcttaaggtaaatctacaattgactttatccagtggtgataatgttttgttctatcgaagcatggaaaacaggattctaactgaatgaatagatacttgaattgttgaaaatatctcaacttgacatgtctgagcttaatttcatatcatttggggttgtcgattttgttcattttttggggtgttttgcagtgttgatggatttagagcaatggtggagagatgccttgatgttgaagtttctggtttggatcgttatggcaatcccatcaaaatagatgcttcaggttggcaagctcgtattttacagcacgagtgtgatcatttagagggaactctttatgttgatacaatggtgcctagaacattcaggacagtagaaaacttagatttgcctctagcagatggatgccccaagcttggagttcgctagcttatcgttttgaaaaaaatctagataatttgatgcaaggggataaag

SEQ ID NO: 81663 - DNA, 1573 bp, Cannabis sativa
gcctaaatttcttgatgttaaaccgtttactgcagaaaccaccatcaatgaatccgattccaccatatccacttgtaaatgcatatttttagcccaaattaagctatgatagagagccttagcctccatctcatgagccttaaggttaccagcagctggtttggaaagtgctgcaataacttgtccagtggtgtctcggatgatagctccaaatcccatcttattgcagcttgtagaacttgctgcatcaacattcagtttcattcgagagttaggaggagcttgccacggctggtgtggagctgcagatgaagaggttgccttagaagctgaagccaaattagcctgttgaaaactggtgagataagccatcgattttccataaattgcagcaggtgtaagggccactttgttatggaaaatattgtttctgtcaaaccaaacaaaccacatggtgcatagaatcttttccaaatcatatttggtatataattttgacagaagcataaggaaatccccatcttgcattcgacttgcagcttgaaaatcaaagtggaaatctgacaatctccaaacggctttagcatgcttgcaactaaacatagcatgtcccactgattcccaagcattcgaacataaactacaggcagcagaagtaattattttacgctggtatagagctgctgcagtgggtagtgaattctgaatcaatttccaaccaaagatcttaacctttgaaggtatgttcaaaccccaaaaattattccaccatgaagagtcagagctggaattagaagaggaatgttgatcctccaaagagcaagcgaaatggtagccagattggaccgtatattccccatgagttgtgtgatgccacacccaacaatcggctggagcagtggaagataaaggtattgtgaggatcttatcaatatcaacaactgagaagtccctttgcaatagaagtaggttccattcatgatcagaagtgatatattcagcaactgtagcatatggtgaacgagtaaagtgagttggtgtgaatgttgttcgacctggaagccatggatctgtacaaagcgtgttcaaaccattcccaacttgcatcctcataccttgaaccattaactcacgaccccaaacaataccttgccatgtgagggatgagttataacctttgtttgctgaaagaaagtcaccatttaaataatatcttgctttcagcaagcgtgacagaagagaattgggattgtgaaaaatccgccaagcttgcttagccaataaagcttgattaaaatgaacatatgaacgaaaacccaaacctccttccatttttgttttgcagataaatttccactttttccaatgagtcttgttcttatctccagttgaaccccaccagaattgagccatcattgtatctaattgactacaaaaactctttgaaagcttaaaacaactcatagcataacttggaatagattgtactaccgctttcagaagaatttctttgccaccaattaagaacaacttatcattccaagcatgtaaaagcttccatattctttcttta

SEQ ID NO: 81664 - DNA, 3540 bp, Cannabis sativa
agcatgtaaaattcatacaaacatcaatcacttcaaattccttatattgataactaatcagattgtaaagtgttttatttagggcataaaaccaacaagtaattcatctctttttcactatgaagttagtaaacatattaacacttggcattgtaaacttggtcatcccaatgaacaagtcttgagcaaattattacctcacattccccacaatggcactttaaaagatcttaatttttgtaatgcatgtcaacaaggaaaaagtcactctcttccctttcctttatccagtacctgtgcctcccaacctcttgccttgatccatactcacttgtgagggccctctcatgttctttcaaaaagatggtaataaatattatgtctatttcttggatgactatagcaggtacacttggatatttcctttaactctcaaaggacaagcctttgaagttttcattaaatggaaagccttagttgaaaagcaattcaatcttccaatcaagctgttcaggcagactggggtggtgagtataggccatttaaaagattcttactttatcaaggaattcattttcaaagtccttgccctcatactcatgagcaaaatggccgtgctgaaagaaaacatcggcatattaatgaaacgggccttaccctattggctaatgctggtcttgacttgtcctattggtggcatgtatttagttcgactgtcttcaccattaatagacttccaacaagagttctgaatgttgctactccttatgaaacattatttcacatcaagcccgattgcaacatcctcaagccatttggatgtgcttgcttttcacatctaaggccctacaataagcataaacttgatttcagaactcaacaatgtattttcctaggctattcctctcatcataaaggatacctatgtgaaaataatgaaggaaggatatatattgcacgaaatggggtgtttcatgaggacttttatcctcaaaaagctgcttctgcatccacttcagcagcaccatcccaggtattaacccctgctcatacacctttttcttgcacttcatccttttttactcaacctagtacattttctaactctgattttaccactagtaacagtgttgctactgaggacatgcctgctggtcctatgcatgctgcttccagatcagaaaataacaggttgcagcctgttgatgctgctgctatacctgttattggtgctatcgatgccacacaagctgtgctacaatcacatagtcctattttacataacactccaaatgttgaaccacatattgttgttgctcatttacctgaaataccacaaccagctgtcccaaatgaccacatcatgcctgctgtccctatgtctgcaccacaacagaatcctgtcctcataccctatccaccacaaaaccaagagttaatacctccaaacacatctccaacactctcttccatccctaatcaacctaccatcaccagagttcatcccatgaccaccagatcccaaaatggaattcacaaaccaaaagcatatatggccaccaaacaccctctttccgagtccttactacccaaagagcctaaatccttgaaagatgctcttaacagccctcaatggtttacctccatgaatattgagtttacaacacttaagaaacaaggaacttggactcttgttccttatgaaccccatatgaatattattagcaacaaatgggttcatcgagttaaactcaacagggatggctccttggatagataaaaatctcgtttggttaccaagggatatctacaaactcctgacatcgattatgaggatactttcagtcctgtggttaaacctgccactgttcgtattgtgctaagcattgctgtgactcacaattggccagtcaaacaactagatgtgagtaatgcttttcttaatggcaacctccaagagaccatttatatgcagcaacctctagggttcattgacaaagacaaacctcaccatgtgtgtctattacacaaagcaatttgcgggcttaagcaagctccaagggcatggaatgacaagctgaaacaaactctttgtcattggggttttcatgtgtccaaatcagatacatccttattcatacatggctctaatgacactcttatttatctccttgtctatgtggacgacattctagtaatcgatcctaactcccctctcatccactctatcatcaccaatctaaatactgccttctccctcaaagatttaggatccgttcactatttccttggtgtggagatttacagagatgacacctccatgtacttaagtcaaagaaaatatattgctgatttgctaacaaagctacacatggaaggagctaaatcctgtccaaatccagctagctccactactaaactttgtctgaatgatggtgatccgtttgctgatattacactctatagaagtactcttggtgctctacaatatcttagcctcactcggcctgatgttgccttcataatcaataaactgagtcagtttatacatgcccctaccaatactcattgggaagcatgcaaacggttacttcgttatctcaaaggcactatatcacatgggttaaagcttcaagtttctgacaatttaactctccatggatatagtgatactgattgggccatatgtgtggatgataagagatcgacaggtgggtatgccatgttcttaggcaaaaacttggtgtcgtagtctgccaagaaacagcaggttgtggctcggtctagcaccgagagcgagtttagggccttagctaatacagcagctgaaataaatggattacttatcttctatctgaacttcaagttcctctatcccaagctctagttttgtgggttgataaccaaggtgcaatagccttggctgctaatctggtgttccatgctcgatgcaagcacattgagattgacttgcactttgttcgtgatcttataattacaaagcagctggcaatccgatttgttccctcgctggatcaaactgccgacattcttacaaagtctttaactacagatcgctacaactatctcaaagacaaacttcatatggcaatatcaccatttcgtttgaggggggatgtaaaccagaacacgtgcgttaatgttcaaagtagttagttgttctgtttattctgttaggatagttgtttattgtattgatctgttaaaagagtctgttactctttcttgctttgtatctttatgctatataaataagatcataagctaaccattttggttaagctctttttggcaaatactctattttctacgctctgcatttattttctttcttctctgcctttgagcttcttcaaaaactaatgagagtacgaagaattatagttatataattatgaaaaataataataattaaattaagaaaaaaaaataaaactaaacaatctatatatataacaaagattatgaaatatcaattagataaaaaaataaaattttttaattatttacatgtaatta

SEQ ID NO: 81665 - DNA, 1224 bp, Cannabis sativa
cctgctgtagaattctgcagcatccctgcaggatagccattaactccgcttcgaacgaagacgacaccgccctcttgactgtgacagcctcaatcaccaatcccgagcgatcacagcagccaccctaaacttacctcggactgcagcgtccacaaaaacattaaagtcacaccaaggtatcatttcatataacagcaaccggttgtggtaaatttatataatattaattatttgtaaataaaataataaagaaagtaatatttctgaattcatttgacatgtactcattttattcttcaattctctctggttctttttattgtacggtctctcatgtttacctattcgagcttctctcaaagttctagccattgatagagaaatgattatgaaaatggcatagaattagtttaatattttttttctccttgtatagtttcagatttttattgttggttttctatgtaattcattgccatttttttatgtttggttatgcccatatttttcgagtgctaaggcataataagtgtccatatagatttaaaagaatgaagagaataataaatgcgagaaatgaataaatatcctgcatcgagataagttacaattaaaagatgtattgacctcatgtgacgctatcaatacaataattcacaataataacgggtttataagctaatcctcgaaacttaactaagataaatgagacaggtgagacaggtgaatagcgtgaaagaatgagttaagtggaaaaggtaggtaaggaattttttaaagactagctcaagaattgtcgtaaaagacagtagcaaggataaacatcttaactagcatctcgcaaaatatgactaactattcctgaacacgttaaagaatgtgagccaaagttagaatatgttatatcgacaacgacaaattacttcctgataagaacaaaaaatagttatcaacagttattttattttatcatgttgtaaatataaaatgtgaggattgtccatgttttatgaacgatcatttaaataagattaaaatagaatgactggcattcctaaaactcctataaataatagggacaaaatctatgggctttctgtagtccctcgccgcagccactaaaagtctcgccgcgacgacaacacttttttttttcctgcttcgatctctcttagtaaaatatgtataattttcacatataaactctaaatgagttgattcaag

SEQ ID NO: 81666 - DNA, 2164 bp, Cannabis sativa
attaatcttaacaaatattatgtatttttcatttgaaaatatttttcgcaaaaattaaatatatatgtatccaaatccaccccattatatatatatatatatgtacaccataaaatattaaaattacaacttacgggttgaaagcggggtgttgtaggacagtcgggcatccgcccttttttgcgttgtggccaaagaccatgaatagtaaagctattaggcaccaatttcttatcttttttcgaaccgaaacctggccactgtatatattaacaccagttatatacaagtaaattaattatattataaaatataatataatatatttttatcatatttgggctgtgcgaaatgcggtgctttggaaggaagagcaggtgggaaattgaccatattgttgcagggataaaagagaaattaagaatgagactaataatatttcaacctcagaagttaactagcaaagatagagattggattcaatgcttgtaaaggattgtttgtgcattttacagactatatactgattgtaattagaatacttggaccttttcaggtgccattaggatgtacgaaaattggtttatgatttatcaaaaaataaaaaaaaaaaattatattataaaaattgcgcaaaaaaaaaaataattatacaattctataccatttattaaatatttataatttaataaatgtttacaaaaaaaaaatcatcatattcatattaattatataaaagaaataaacataaatatttactattttaacatgttaattatttttaattgattttctaaaaaatattacgcataaaattaaatataaaaatgcataaattaatatttatattttgatatattactaaaataatagatttcttaaaatttaatataaaattaaaaacatttatctttatcttcatatattagaagttgcagcatcaattgttagtttaacgtttcgtcttcttcaatggtgttggtcttttttgttcagacttcgccattaaaacaataatgatggtggtgataaaacgagataatcaaagggaaaggcttttagatctaggttttagaatattttaggttttaattttaattatattaattttgattctccatctttttcatattaaattctaggcttttagatttgggttttcaaaaaaaaaaaaaaaaaaagttgcgagttgtattctttattttaatttaaaatagtcatttattaaaatattttatttggcttaatttcctttcattattattgttcttttaaaatattgattctctctctaaaaatgtttgtttgtatcaatcaatgttgagaagtgtcattttctgtttctttgtccctctttctcttctttttataggcgacgattttaaaccgtcggaaagtccacataagcaatgatttttaaccgtcgcctattttacctgttttgcgacagtcgtataggtgacggttataaaaatcgatggaaatattttaaacgacggtttaaaaatatcgagaaaaactatttttgtaatagtgaatctttgtatttatagtttttatgaaatatatcttttacctatttatattacaaattaaataaagcaaaaatataataaaattccattcgattatgacttatttattaattatatattttacatgggcataatttgaagagctttcaaaaaaaattaatctttaaaatgttcatgaattaccaatctaattattgattaattactacacacaaaataaacaaataacttactctttttgtaacatataaaaaatatttatttgtatgtaataaaaaaattatataaacaattatttattttgtaatataactgtaatgatatttatggtttgtttgatattatgttgtattgtattattgtacaatattatattaaattatattttatagtataattctatataatgttacgttatattttaatttatattgatatattatatatgtatacaatactaaagaaaatattatataattagaaatataaaatatagtttaatataatattatacaatataatataatgtaacggaccattaatatacatatatatatttaacatgcataaaaataaaaataaaaaaaataaagagaaaaatagtattgaacatatgtatgtatgatata

SEQ ID NO: 81667 - DNA, 2501 bp, Cannabis sativa
  modified_base (107)..(129): a, c, t, g, unknown or other
gtacataaataatcactgaaacataaaattgaatgaaattagacaaaagtcctgaaatttaacaatctcaatagttcgggggaaatttctaacggccaaaaaagttnnnnnnnnnnnnnnnnnnnnnnntcaaagttcgggggaaaaaattacgaattagcctaatctatataatatatatatatatacaatatttcatacgcttcctcttgtatgttcataattgctgctttgaaaatcttgccagaaaacttgacgggtcaaaaactcaaccaaagggaaaaatggtgcactgtataatcacttcccttcatttttgacatttttggagatctttttattggtgtattctcatcttgtgtactatcttttcaaaatgttgatgttggtaatgattttatgaataaatttataaaattgtcacttgattgaacttgttacacattgatattacctttatcttaaaaatcacgatcaaagaagaatttgaatgaagtgggtttaattctatctccttcaatactctccttttagttgaacgatgtaattaatattaattatcttcatagagaattgtttatatattgggtgtaatacatatgtactctaccaatgattacttatacacagggtcgaccctaggcataggcgagctaggcccgtgcctagggcccacactttccgggggcctaaaataaaaaaaataaaaattctattaggcttttatttaagtaaaatttaagtgtattgtaaataacaaatacatagcttagttggttgaggtggatggaataatattcaaggtcatgtgttcagctcccataacactcttctttcgatatttttgagggccccaaaatttaattcgtcttgggcccatatatttttaaggccggccctgcttacacacattctctacttacacgacaacaaaaattatcattaggggcagacttaataccggcggaggagattcgcccctaataataggggttactatcagcagagtacactttctaccggtaatggtcaaaaaatttaatttttttttattttaaaatcatttttatttattaatagcagcgtgaaacgaagtattagcagtgaaagtttttgctaattattcaaaatgtgaaatgtgtgggaaatatcccgcttttatttttgatttattattagcggcagacttatactgagggaactcgctggtaatttatcattgttatacttattaccgatagagacacttattaccagcggacttattaccagagatacttatcattgttatacttattaccagcggactcgtgccgataataagttgatgtatataaaactaaccacatcttttctttttgatttcttttcttctccttcttgctcttgcctctattctccttctaaatctctcttgcctcttctctctttctctctctcgatctcttcctctccgacgggcagacggtggcacttttgaacaagctaacattggtttttatactagcacacaattgcagcttcgtctactctatgtaagttttaatatttatttactatatattgatatttatatatatgtttagtttgtttagtaatcattcatgggtaatacccattaggaaatgatccatatatatatattcatgtttaatagtttttttttctgctagctaaacacttggagatcatcagctcttacacctattgcatagtcatcagataaggttagatatttttcgttctgaatctctgacatatatatttattataatttgttaatgtatatttttagtttgttttctcaatttatttaatggaatattaattaatattattttaatattttcttattcatatttaaaagaaaacacattggaggagatatttttgtagcttgtataaaagtaaaaaaaagtatgtatttttaaatgttagcatataataagttatataaagttgtattttgttttatttttttatgtaaaaacatttatatagattaatttgtgtctgtatatatatatatatatatatatgaagttaaaataataattttggactatattagaaaaaaaaaatgaactattctagctgaattaattttttgtagtttttttttttttaaatgatttcttttttagtttacaacaatgattatactattaattttttgtctaacattttgtattatcaggatcaaataatgcaagtgagatagagaggcaacaacttccaaatatgttactaccttcgtagcagtctccactaccttaatacatttcaccaccaacaccataatatactttactagtattacaacactccatgatagtggtgaaagttgaagacttgacttgaacattacagatttgttaatgaatatcctgattgaacaataaaaattaggggtgttcaataaaatttacaaaccgttcaacccgaataaatcgcccaaaccaaaccgaataaaccgacaaaaaatataacccgaaataata

SEQ ID NO: 81668 - DNA, 1830 bp, Cannabis sativa
tcttgacacctggaggttgatttatcatctttctggaagcatcactggcaggtatctggatgctctcttgacttgataggatgtcttttcggaacctggatggcttgagttattaaatttggtctattatctttattggggttataaattgggcctttgttaattgagtttggatcatggaagtacacgtactcttctcgcaaaaacacagataacctttacccctaagcttctagaacttgagaattgtggaagcttgtagtattccttctagatggtatgaggtcatgtgaatgtttaaaaaggtatgaaccttttcaaattccaagccaatgtgtagtagatgacaattttccgctttctgataatcaattactcgtggcactattctcttagctcatgaaaattatttaccttgagaaaacacatgaagtccgattttgagaaacgatgaatgatcatgctagcgcatgtaccaagggaaaaatcatcattcaaattacctcaattttgtaagagtcattaaactttaacccttccacttttcgaatcgtcaaatgcagtttctattttcttaaatgtaatatggaccatcgatttaaaagctcacagatcgccaattttactgtacaaataaagtgaaaaacatttgtttacaacttttgaccattttaactttttaagcttgaatttccttagagagaatgaatgaaaattatttatgattaatgtccaatcctttcgatgagttcttacatcttcttcttcgaatttgttcatgattaaaacaaggagcaccacccacaattctcataattgattcctcaaagccgtcagaaccactggatactcaagcggatattgaagcactaaaagatcaaattcacacccttcaatctagggtggtacgtctcaatcgaccttataatgaccacatacttaagatatggaattagtagacaattcatattaattatttacatattacgattatgtgagtattttgtcaaataagacatattttcaaaaaataggcatttgactcataatttatcaatttcaaaaattttattgaattctaagtgtatcgtagatgatatacataatttttttgtttttttgtattttgtgcctggtaacagtagaaataggtcgggtggcaattttagtcacatgaatacaaagttgtatcaaatatttgacgggccaatattacgagatattttagaatattgggatttagcgaggtatgaatttggattattttacccctatagttaaaagcttacttaaaagtgaaataaggggctaaatagtaattttgccaagaggaagcttagtcacctttggtggttaggtggctagtgacttgtatgtgaggtaaatattaggaggaaaccctttgggaagggtttgcttagccaataaccaattaaaagaaaaagtaaaaaaaaaaaacccaaaaagctttatcaccatcatttcatccttcttttcttctcactcacgagcactcaacaaccaagagctaacccacccttttgaagctcatttcactgaagaataacccaaaggaatcaactccttcattcccccgaggcaaccaaggtaaaaccctagtttattttatggttttctaaggtcttagtttggtttttaattgctgcttatagtaggacatgttgaggaagtttagagaggttaggaaaagtttcttaaggatatttaggactgtttagaagtggtttgaaatgctttgggtgatttttgcaaaaattatgcaagtttgagtactagacttagttgtgattgttggatattattttacca

SEQ ID NO: 81669 - DNA, 1096 bp, Cannabis sativa
atttatatatttcttaagtgttttataaaccctaacaaattgggctaaaaataacaaaaatataactttcataaaacttataaaaaggaaaacaaaatataaaacccatatacaaaatactttatttaaaaattccatagaaagtaaagacaattattttttcataaataatataatttttactttttaatttaatttttttatttatatatatagtggtaaaaatttaaaatataattttttgaaaacataattggaaaagattaaatgtagtgtctttaaaaataaacaataattaaaattaaaatatacataatattattttaaaaataaatttaaaatctttttgttaagattttttgtgtttgggtgggagcattggacatgagccctgctacctactcttaagtcattcatgtttattctttttcattctattacctctaactaaaaaccaacgtactcatgtcttccatttcatacttatgtaatgtgtacactatatattaacaagcctatgaaatgaaaattgggacttatacagaaaaaccctatctaaatgggcacctcgcatttaccataaaattacattaattttagctttcccataaattgccttgtagttgtccacttatatttcgttagttaatattataattaaattgggttttaaaattttaattctgtattgcatgtttggtggcgaatccttgattgtattttggaatcaattttggcttgttcttcaattgacattgcctatgatggaatttatttaattaattttatttttttcaaaataaacatttatatggtaagtacgacgttaaggtaatcagagaaaaagaaaagtaccgttaatgaaaaaaagaagtatgaacacattccacatgtttatttttatcttactatcacaagtaattgattaagaaaaaactttgtatatatataaaaaaaaatcagcaaaacaaacaaaaaaaaaaaaaaataacggctgaacagaaaatttatttcaaatttaaagagattcaatattttctttttggaaaaaaaatctaaattcatgtgctgtatgatttattgttttaccatatga

SEQ ID NO: 81670 - DNA, 2030 bp, Cannabis sativa
attggttaaagcctaattaagatgtttaggtttaaactgttttaggttgattttaaggtaattttttgaatcatattcgaaggagtaaagtgagctctttgaggagcgaaattcacattttggttttcaactcttgtgtatattaaattttggtgaaaaggaatagagcacactatttcgttttcaaaaattgtaattgttaatagaatacatagttttacatatgtaaatataggatgaaaagatagagattgaatggggaagctacgtattagagagtgagatcgttgatggtgtaaatgttttcaaatgaagatcattgatttatttttttttaaaaaatatattgttgtatctagggtgtttatcaaaccgctcaaaccacctgcatcgcaaaaaaaatacggtttgaaatttttcactgtgcggttgcagtttgaatttttcttaagcatttgtggagatcttctaatcgacgaatcaaaccacctgcatcgcaaaaaaaatacggtttgaaatttttcactgtgcggttgcagtttgaatttttcttaaaccgcgtggtgcggtttgcggttttgaattgttaatatgtggttcaaatcttattgtacatcatattataaaaatcagggaataataccgcactttgcggggttttaataatgtttttattaaaacaaacgtgtggttttaattatgaatagaatttaaaatttaatattttttatttttttttaattatgtaatatatataagaaaaattataagaaagataattcgtaatactaacaaaataaaattacctcttgtattaagttatttatgataataaataattctttcttttttcttgttttacacttgaaaataaattaagaaataaaatagtatatattgcattcttcaagaaaaagaatttattaattgggctaaattatatttattaactacaatatatttaaacaccactatatgaactataatacattattctttttgaaaatatacattattcttaattgtttaaattatgtgagatttttttattttaagaaactcactaatatgaatcaaattaacaaaatttataaaaatatataaaataaaataaaataacacaaagtgatggattgttaggatactaccatcacattggtctgtacagtactgtcttttatatatactaaagaaaactatagatgtgtgcttgagaaatttttattactttctttttaaaaaaatcaaattttatatttaataaaaatgtatataaaatacaataaaaaattataatattaaaatatttcagtcacatgattcgattgaattatcattatttttattttttattatttttgtcattattgtgagttttttttttatggagtattaattttgtaagtttaaatgaataaatggtatataatattttcttttcattatttttaaatgtacataatttaactataaatgcatatgttctaatattattttttattcttttaaaaattaaaaaacattatttaaattaaatatttaattttaaaactatcttcttatttaatcctttttttcacatgaaattgagttaattatatatttttatatatatattttactataatattcgatttaaactaaacatcagaaagaaaattatatttttgaaaaactgtactctatacgtataaataaaataaataaaaataattattatcctgatagcaaaactttaattataaatttaacttttcgcaaaaaatcatattgtttaactttgaagaaactttttctataaaaagaaaaaatactaatataaaagagaaactaaatagtctataatagttgttcaaaaaaaaaaaaaaatagcctataatagaataataaaaattagaatcttaaaattatttgaataataaaaatagtggtgggagatagatagttaattcgtgatggtagtcaaataaataaaagttaaaaaattaatgtgcctatatatattcgatattgtaatttgtaagtgtcaa

SEQ ID NO: 81671 - DNA, 2219 bp, Cannabis sativa
ggacccagaccccgacccagagctaagaatcaaggccagacataggacccaagaactaaactcagactagggacccgaaatccagaccctgactaggattcggaccaaaacgcggacccaaacccacacttggacctgagactcgaacccaaactaaaacacgaacttggacccagatcgggaccttagacccaaacatagatgggggacccagaccaaagaattgggccccaaactaggactagaacttgggcctcagaacttggatcaggatctgagacctgaccccagacccaaacttggacataagacccacctcgggacttgggatcaaggactcgattcttggactccacctgtaccgtgtgacttgaaattggaaccgaaactagaagcagatcgggacccagtaataggacaaggagcatgaccaggacctagactcgaaattgtaactggactaagacccggactcaaacacagacccatactcagattctgtgtctgggttcgagttcggctccggttttgggtctgggttggggtctcagtccttgtccaagtttgggttcgggtccaggtccaagttagtgtccctagtgcgggtccaggtttgggtctgggtcaggatctcagtccaggtcttgggtttgggtctagttctaggtttgcgtctgcgtctgggttcgtgtccaggtcccatgttttgaactcggtctgggtctgggtcggtatttggttcctggtctaagttcatgtccatgtccaggtccgaatcctagtctcggtgaacggcttggtgtgggtttgggattgagtcccgagttcgggttcgggtttgggtttgagtctcagtcctagtctgggtccgagactgggttttggactacgtttggctgccggtccaagtctaggtcgaggtattggtcacggtctcggtcctgttccagggtcctgttcacgttcttgttcaatttcagtttcgggtcccatgtttaggtttgggtccaggtcctagtccagcttcgggtccttgtctgagtcccaaatcaagattcagactatgggttttttccaagccccagttcccggatctcaggacaagatctggatcccaatcacaagtcctagtatagtttcggttcatgtcccaggtcttagtctaggtctcagtcttggttcgggaccgagactagggtgcagttctttgtctcgatctctattctgggtctcgagtcctgttccatgttcgggtctgagttcaggtgtgggtttaggtccaaagtctcgattcgggtttggattcaagtttgggacccaatcctagggtgggtttgtttccgaatccgggtcctggttctgttacagttttcggtctgggtcgaggtcccgttcttggtcctgttcctgggtcctgatccgcttctgtttttgtttccagtttcaagtcacggggtacgggtttaggttaagtttgggtctgagtctgggttcaggtcttgatttgggtcttgggcgaggtttaggtctgggtttctgtctcggttagggtccgaggttgggtctggtttcgagttcgagtctagatctaggtcttagtcccgttccaagatctcagtccggttccaattcaagtttcggttttggttcccaagtgtgggtctcggtctaggtctgtgatcggatcatggtttgagttcgagtttgggtgcgggttctagtctaagtcctatatcaagacaccgactacgggtcaggtccaagcatcgagtcccggatcccaggtcccgtggtgggtcctaggtccaaatttgggtctggcgtcgggtctcaaatcccgatccaagttccaaggcccaagttctagtcccggtttgggggcgcaattcatgggtctgagttccccatctatgtttaggtcctaggtctaagtctggctccaagttcgtgttccggttcgagttcaggtctcgagtaccggtttgagtcaaagtcctagtttcggtttgggtccatgttcggatccaattcctagtgtgggtccgagtttcgagtccatggtccgagtttcgagtccatggtctgagtcctagactcaaacactgactacaagtcaggtcgaagcctcaggtccagattcaaatctccgtctttttccagtttggctctcaggtcatgggtcgggtcctatgtttgggttcgggtatgatttcgaggtt

SEQ ID NO: 81672 - DNA, 786 bp, Cannabis sativa
tcgcctctgaagcctagtaattggcaagacttttgagagattagtcacatctggaaggatccaccatgaggataagagttttctcttttcttctccggaagtaaaatcgacccagaaaagagatagaaggacaagcggagcatggtgcgctgctcaaggttaaattactatacacgcatttaatgcggtatgaggaagaacatcctacacaatactcttaaaatacgtgctcaagaatgtaaacccataattctctaattttacaatacctcatacatcatttgacggctacattatgagctatccaatcattagcaagagacaagtctagtctcactaagcgcctataatgagcctaagctcatcataaagaatagacaatcatgccctatattcaagtctgggaaattgtgcaaagtatgttcatacaaatacgataatggttgtatttttaccactattatgagcctataaatagtcgaatgatgtacggaagaggggaattctctgtaaaaaaaaaatactgattataacagtgactcgtggactaaggttcattaatgcaccaaccacgtaaaaacttctcttcttttaacttccattaattattataaacaactctaactagtagttaccaaaaacttcagtcaacaaatataaattggaaaaaaaaaatttaaaaattaatataattaaagatatatatcttatacaaatagaaattatcaaattggagttaaactataaatttttgggtgcatataatttttttttatattttaatat

SEQ ID NO: 81673 - DNA, 864 bp, Cannabis sativa
atatggactataaaaactaacaatctagacctggacccaaacccatacctcggtctggaccccaaacctggacccgaaccccggccccagctcctgtcaaactcgggctcggacccaaactccagacccgaaccttggacttgggacccgaccctaaacttgacttaaataaaataaaaaaataaaattgtttttgaaattgaaaaacaaaaataattacaaagcacatttttatttttcaaaaacagaattttaaaaacagaaatcttactttcattttttcattaataattaaaaataaaagggttaccaaatgctacgtttgagtgttctgtaaattatattttcgtttttatttttttgattttatttaagtcagatctgagtttgaagttcggggtctggaattgaggacgaggccagagccgaggtccagggtcgtggttgggtctgcgtccgggtagggataggggtcggggtcaaggtttgggttttgggtccaagtttgggtccaggttagggccgaggtcagggttcgggtttgggcccgaggccgagtttggtgttcggggtttgggttcgggtttgggccagggtcgtggttcgagttcacgattcaggtgtcaatgtctaagtttaggtcggagttcaaaatattaattaaaaaaatgtctaaaaaagttttgaaatgactttttttttttgtttttaaattttgattctcaattaaaaaattaaaaagtgaaaacagttttagaaaacatattttaaaaaagtattacttttctaatcagaaaaataaaaaaaatttacaaaacacgtattaatatcgattgtgaaattcattttatattccaatgagat

SEQ ID NO: 81674 - DNA, 935 bp, Cannabis sativa
ataacttggtatgaccctccaaaagaaaaccgtaatggtcacaaacaatgaaggcaaaaccataccaattatgttcttcgaatagagtcgcaactacattgatcttgatactgtcaatctgtaatttaattcaacacttagccccatcacacctctgaagaccagaccatgatgtcttaatttgaaaatttgttagcgtgtcccattgatcaagataacttctcgtagaagccactacagacgaagcttgcattagtttttttgccaaaccaagtcatttttggctccccaaatagcccaacacaatgtcacagctaaacatatttttttagcaatcaagttcttaaatattgccacacaccaatacataaaatttcctccaaaagctaggttagtgttgattcctacacggtcccatataggttgaatctccttgcaagtcacaaaattatgttagatagacttatctgttattttatggcactaaattaggtacacgacagaataataattacctgattattgtaccatagtttcaaggatatccagatttatatatattaaatttaaaatataaattgcatgaaataaataaatacctcttcatgactatcagggtattcttgtgtttacaccaaaaatagtcctgatgacgtggattaggggtgttcataaaaaccgaaacaaccatcaaaccgaccagaccgtaaccgaatttttggttccacgtcatcaccgaatttggcggtcggtttcggtttcggtttttttgacatgggagtcggtttcggtttttgaattaaaaaaatagtttaaccaaaaaaccgtcaaaaaccgccaaaaactgctaaaaaccgcctaaaattgccaaatcgaaaaccgccaaaaaccgtacggtcggttttatacggttataatttctaaacggtcggtta

SEQ ID NO: 81675 - DNA, 1589 bp, Cannabis sativa
cgggttaagggtctaccagtgttatattttttaaactctattttgccactcaggccggctgaaagaaaaagacttgtaataaagttcgtaaatatttttggaatcccaactgctgtaaagttcaaaatattacaagtttgattttcattttgtttattaaaaaaagtttaaattctgcgcctttttgattagtaatcccatttaggggattggggtgggtttcgtaagtaacttaacttgggttgggtaggtagggtgcctaattatttagggcgttacaaatcatcattcatcattcataaccagttcatagctaattgggtcatatagaccatacattgaagtttaattacaaaattcgccctgcttcaagcctccattggacctttgtaatatcctgaaaatctaattatagataattaaggtttattatatattatgagttaattagagaataatgagtaggattatgatcatactaatctaatttaacgtgaattataaaattttttccataagtaaataaataagtgtaatttattaactgcagaaatttatttggaatatgtaggtataatgtgggttatttgttgaataaaaatattttaagtttggcaactttggagacccgatcggaggccaaaaatgtcacaatgagttcagttagtaattttaatgggattattaaggtaagttggttttagaattactgaagtaactcgggatactcggagttgaccaaatgccctagtgttagaattttcttaataaccaaaaaagtgataaaatgattattttaatttaattacgttaattctttttattattcttttcttttaatttttctataaaagaactgaaatgtatatacatatatattgataagttaaaggaaatgtcaaaaccctcctcatctctttcttttccctttctctcaagctaaagaaaccaagccaagaaacaaaaaaaattgatttgatttctgtccaagtaatcctagtggaagggaagcaaggtctcaggatcattgatcattctctattcaggtctgccgacacacctgaattgaaacttgaggtaagaaaagtacatatgtaccacatagcatatcaagatacgatcatgatcgttcgcgagttagttggttatgaaagtaaagagacaatcattaccgttatgaaaccaaagagacggtcattactgttatgaaagtaaagaggcagtcattactgtaacaccctgtcccaccaagacgccacgtgtgtgcttttacaaacttatatttaacttaatttattagcttaagaaaagtgcggtttaatttaaacttttaatttaaataaacataaatggtattaaacataaaaccaccgttacgtatgagaattccctgtataaaacttttacattctgttctaaaatttattttacaaaataagattacatttcaaaatactgccaaaaggggtggatcctgtccactggtagtcgtgacactgcgattgatatgtacactgctggtaaacctctaactcatggttgctttgctttacccttccctttacctgcaccacgaagcacccatgagt

SEQ ID NO: 81676 - DNA, 1263 bp, Cannabis sativa
  modified_base (27)..(45): a, c, t, g, unknown or other
aataattttctaaatatttattggaannnnnnnnnnnnnnnnnnntaatttattttattttcatatccatctaagtataattttataatttagactattaatttattttaagttgtattatattatatatcctttactgcattatgatattttgtcgttttaaagtttataatttgatattctgtcaagttaaaagtgggggttaggcgagttgattttttgttagtattatataaaaaattgcatggaaagacataaattgtattttatttgcagatatatgacatcttattaaatttaggcatataccgaatacgatccatcttaaattcataatcggtatactctgtacattcaaataacaatatgttttgggcgttttgtttgttacaataagaatccaacgactccgtttcgctcggagtacgttgtcgcccaccagtcatggccacggatctcacactcacagtgcagctgcccggttatggtattgacgtcgtcggtatcatccggtggcaacgtgtaccggtcagatgaacaggaaagcaaaaagttcgtgaggcgatttcggttgtcagagaacgcgaaggatgataccatccaatctcacacccggaggattccgaccttgtcaccagaataatctcatctgatattttgacggtaacatagaccttcatttcgtaatcctatcgaggatttctacggcaagtcttcctagtcatctgtgtcgaagctttatgttggctgcctttcttctattgagaacgatcctcaccaggttattcaatttctattgttttgttatttactaaaaggtatgtcttttaatttccgaatatgagtatgtttggttgtctctgtttttgtgatgaccttattaattttagttaagttctctcatacccttttcttattcccttaactaaaaatctctactatcaattgtgagtggccagtttattttgaacgtcggttagcttttcttatgcctttgatgtttcgattttggtgttttcgttctttcataatttttgtagcagtgctgatagtcatggaggacattgatgaagagagggtggtggtggagctgccttccgattactgcatgagggtgttacttgcttaatttacgttaattaagttttatttgcttaattattcttattttatttatcgtaattgtaggagtttttgttttttaatattaataatttatgtgtattaagtggcctacataattccttccaaaaaaaaaaaaaa

SEQ ID NO: 81677 - DNA, 1288 bp, Cannabis sativa
tatctaccacatgtttgtcaagttctcaacagcagttggtatcgaccgtatccttagcaaccaaagagtagcatgtgaatgttacaacacatcattgatattcaccaataagacctcattcgttgtgataacaatcgaggggatgaggaagacctctactgtgctagcagctgaggggaagtagaagacctcctttgctgtcgagacaaccaaggggcgaagaaggcctcttctattgtgaatacaacagaagggacgacgaagacctctaaggttaagaccaaggataaaatggagactgcacctaaaatcactctaaggtgcacccgagacggggaagacattacccccatcttgggtatattaatttgggagttggtcgcatgttcaattgaccaatgaacagccagcgattgctacaatacattgttgacagtcgtcaagaagacctcatccgctgtaaagttgaggagatgatgaagacttctccgctctgaagccgaggagatcacgaagacctcctctgctgcaaagtcgaggggatgttgaaggtttcctccgctgtaaagctgagggtatgttgaaggcctcctacactataaagctaaagagttgacgaaggcttcctctactatcaaatcgaggagatgaataagaccacctttgttgaaacatagccgatggaatgctaaagattttcaaggctacaacctaagaaaatacaaagactacatttatattcacataaacacacaatgtgacaagagattcaatgataagacaacaaccaaagatcaaagtaaataggtcaaactttgcattgggacatgaactagacataccacaaacatatttcaggcatcagaattagattcaaagaaagttcatttttgagcacccaaagcactcggtgtccgggcacccaacaccgaggttgacaatttgtcaatctgggcaactttcaagtattagatcaacaattctagtcgtgcatcttcttcgtcttcatcaaaaatggagaaataggtacttttactgtatagacaacactccctgtgtgccagaagcaaggcccaacgcccaagttgatacctgggattggcccagcgcccaggttgacattttgtcaactcgacgcccaggttgacattttgtcaacccgggctaattctaaagatgttttctgagaactcttccgagaatattctccgttttcagtaaagattaagattcaactgttttcggggaccaaatagaacttctaagggtcaaaactaggacccagcgc

SEQ ID NO: 81678 - DNA, 1567 bp, Cannabis sativa
gaaccataacatccctgttccacaaatgaatcggcattttcaaaatcttttaatgggcaatatgatgccttatgtcctatgatgttgcaatcaaacaatactccagtagtctttcgtagtggaaaagaagagagacctcattcctcaagtcatccactaccactcgtaatcctctcataagcgattctgttatgttaatttggacacaggccttcatggctccgttttgaatcttaatgtcttctaatttaccaatttgttcaccctaatcccttgcaaaatgttctgtcatacatgacaaagggacgttattgatcgaaatccaaaaggaggcaaagtcaaaattcatattcgaaatttctcttaatccagttggcttcacaaggaagattttaattgttgatcgatcgtccatggtccacccccgaatactccctatcgatcttccttgctaccaaagtaaaatcaaaaaacattttagactttaattcctcgacctgaaaccgatgattaatcttccacacccctttcatagcattctcctttcccaccttactggcagacctagcccccaatactttcctcactagacacaagtccaattttttctttccttgttccacacctttattaaaagagataacagggccatctccaccttcttaagaaaacacatccgtaagtgtgttcaccagctcaatatctatcatcaaaatcataaaacacacaaaaaaactcacttacaactcttcccataaagggactcaaactacccaaaaaatttcaagcgagagaaaccaacgagagacttcaatttggcctataactattaataatttcaataatttgtttcttatcgtttaccaaacacctttttattagagtttgcttttatcttttttaaaaactgtgtcaaacgggttcttaattctaaattcttaagtagagtgttttattttcctttaattgtattttatcctatagtttaattgttttattgccaaaattcttaattgtatagttaaatcaaaagtaaagtaaagttaattgtataattctacctctcggaagacttagttctaataattgggcataacattgtgattttttgagtggaaaaatatttcaaagataagttttattttgttataataataattgtgttttatccctaatttaaaaattcacaacattatcattgtatagtgtgctaatccatatttttctatatctatttattttgtaggtagtttggtccaggtgcttgtttacatcgaatctcttgaattgaaggtggtctcaagttgttttgtctaaatttctgaattaacttggtctaatataagtcgctttgtctgtagtgactaatattctgattttgtatatctttggctagataattagcttgttgattgaaaatttctttgtgtcgacaattatcatagtgtgatttagatcactctctaaaaaaatatctttttttatttcttaatataaatattaagttattgttcaataccttactaaaaaaatgatggttcaaataatccttcagcctcccatatag

SEQ ID NO: 81679 - DNA, 795 bp, Cannabis sativa
ttttatttctcacttcagaaactatttatatataaagtttcctaattattattataagtatccatataaaataaaaaatatttttgtttgtttgttaaaaaaatagtttggtttattaaaagtttatggtatttatattgactcaaatttaatttgaatatatttttaagaaaaagaacgtcaaaaaatagatttttcttaactaattaataattatattagaaaaaaaaaagaaaataaaaaataaatatcataatttggagaatataacggcacaaactttaatcttaattatgattgagattttttttaaaaaaaaagtatgaataactttttctgtagtttgtgtcgataactataagaatataaacaaataattaatttaaatcaataattagaatttaggtataccaaaaaagaaagaaattgtagaacatatttattgtaattacgctcttttctaattgatatgtggaaattttttgttatagggatgaaattaaattgtatgttttcctaatcataaataatatatgttagatatttttgctagttttaattcgttgtatcatatatatgtttgtaaagagattttatttattcataatggtcacataaaaaaggaaaaatcttaaaatatattacacataaaagaagaatatgagagaatatatattatatatgttaatggtggaagttttaataattacattaaatatattaaatatgtaaccattatggttatattttttttagtcattaaattactactgaatagttataattaatttgaaa

SEQ ID NO: 81680 - DNA, 1220 bp, Cannabis sativa
ttttctgcaggaatactcagactccagtttttcaaaaccagcctctcctaaacctatccaatctcaaccaaactttccagaatagcttaaaaccacatttatgacatatcaatgaacttagaaatcacaaagacaccaaaactataaaatcactattgaagctcaagctttgagtttttaaaactcaagcttaaaattccaacacaaccagaaacaacctaacactaaacaaacttaaattctaagctaaaccataataaaaacaactccaacactgctagaaaatcccatacccaaaatcaccattgaggctcttaaaacctaactttaaacttagaaaaacatgcagaagaatcttagaagcttaccccaacctttttgtagctcctagggttgattaattgttgagaaactgaagagaaaaaaaggaggaaaacttggttcttcctctagtttttttgggccaaatgaaggaaaacaaaagaggagaggaggataacttagtctattcttgatttttctacaaaacccataactaacttatcattaattcaaatcaaataaaataataggataataactaatgaaataatccaaaatattaataaatgaaacacgtggccattaccaaattgcccttcctcacactaaaacccaacattaatctttatgggtaaattggtcatttaataaataaggctcttttccccataattccaaccataacataaatctttacggtaacactaaaatacccactaatactatcgtgacattacaggctaattaattgggtttctattgttgtcagactttaaaatattttatttcacaaatatcatttattttacccacataatctgataaaattttcttaattaataaattacgcttatttattcatttttattaaaatctctaattattacataattagcttgttaagattataatttataacctcacccattatgctttaaatacataatattctatatctaataaaatattccttattaattataattatatttttcgggatattacaacttgcctcttttgtggcttctgtgttccttgaagttggccaccgctttactgttgtcacagtggagaaccagtattttttctacttctaaaactacttccaaattagtgtagaatttcttcaaccaaatcgcttccttacctgcttcgcaagctgatatatattcaacttc

SEQ ID NO: 81681 - DNA, 1067 bp, Cannabis sativa
tatatatgcctttgcaatattaatggaaggaatctctttatgtctatcattattgccattactttgatattctcctttatctttcctccctctttgccttttttattttcctttgcctcttttacatctctgtccctgattaaatcattgtctttctgtacggacttttttttgttttgttgatgaataagagctgttttattctcaatcaatagcttacttggcaaagttttttactttacataattagaataatctattgatttgattggtttttgtttatggtgttcaaaattttaccagaagaaatccttgtgttttaggtttctttagacttttaaaatgctttgcatcccgattgaagttacctcccgagctataactggtcgagaggaaggtgtaagctgtaagtaaaccttccgaccatttccacagtagcatgtggctcgggagattgaagttacctcccgagctatgtgctatgtggtaacgttggaatggtcgggaggaaggctcacaaagctgcaagtaaactttccgaccaatcccacagtggcatgtagctcgggaaattgaagttacctcccgagctaagtggcaacggactggtcgggaggaagacttacaaagttgtaagcaaaccttctgaccaatcacgcggtggcatgtggctctggagtagatttagcatttgatctcgtccaactttgtttgattcttttggtttaattgatattagtaattaatgaagtagtcaatcaaatcaagcccaaattttccatggaccttgttttcctggaaattctgtaattctaaagtcaaaacagctatttgtatatgtgtattatgtattgtgtattggttggttggtaaagtcagatttttctttccttgactttttttttgggggttttcatttttttagcataacagaaaactgaggtggcctttgctttgttctcttgttcttttcaacttaggtggtcgaacttattagatgtttgtaattagatattagattatatatgctttataatatcccaaaattcaaaagatatatatatata

SEQ ID NO: 81682 - DNA, 977 bp, Cannabis sativa
atatatatgatcatgcaaaatatgatattgccattatttcaagctaatgctttaatacaagaattgtcacatcaatttaatccaaggttttggaaaaggaccatacgggtaggaattttcaatcaccaatatatatacatatatattaatatacttccctctaattaattaagaatttaaatctcccatgatttaaggaaaaaaattaaaactggcctttattctattttggctgattagagaccacaaataatatatttgttggtgattacttttcatgttttaataaggtataatataactcatcaccaaaccaaatttggataaatatatattataataacattttattatttctaatatgttacatttcatttttgtgtttcattattattttttacatttgtatatatatatgtacaaactacaaaggaagcagatatgaataaacgatgaaagagaaagggtattaattggtctcaatcaaataatatgaaaacttatatacataaataaggtttacaaaattgttattattaaatatttctcattcatacatactcatctttaaattggttcatgtagaggggtacgttaattaataaatttaaatataaatacacaaatgaataataaaagaaagaattaaccattcaagttcaaaaaaatttaacaagatatatattaataatgagaaattctatggtggatcctgaaaaatggtgtattgatacacctatttgtattttcaattaatattcatataattttattttaatttttttatacaacggtgtgcaccctagttattcaaggtatgagaattgttgagcactattagtacttagcatcgcttaggagtagtgttttatgattgattacaagcatattttataaaagctatcatattaaattatatattaaattatatagaatagcgatacgacacgagagtgctatacgcactaatagcacgc

SEQ ID NO: 81683 - DNA, 3850 bp, Cannabis sativa
tgagtaacaagatcgccaacaattattgaacagacagcaaactgacgagaagttagcgcctaaatatagttcatacagttttatttctctctctcatacggtcaatatagatatatatagggaaaccgataatattaatgtatataaaagaataataaatcacatttcaaaagaaaatagtaatcactaatgtgatgtataatatataagcttgtattgtagtttttttatttcatttttataggttagctggcaatggaagagaactatagagagtaattaattaaggaaaagataacagttcaaacagcttttctttgtttttttttttcttttttaacattgactgtcctatttaaataataataatagcatatgagcttattcataatattgttatttgaattttagcaggaggttttattgggaggtgatataagtggagagcaattgagagggaccacaatcacaattaatggtgttgtggtcttttaaaaaacaaatggcccactttcactttcactactacacatgaaaaacacttctacttctcactagcttaatattcaacaaactaaatttaatggaaaccccatcattaataaattagtcctttttttcgaatattcgatgctatataatataaatatatatatatatacaaaatgaaaataattataataattcaatagaaatagtttatgagttaaaaaaaaaatagaaatagtttatgattcatacattatagtgacacagcaaaatactttacgcaacaggataacctttttgtaactatttaattttgaactccaaaaaatcaataggccatcgttaatgtaattctaaagaaagagtgttgaaacctcttcttctaaccagagaaaacaacacaaacaactataattttttatacttatgtatatttttaattatataattaatttcttttatattattcaataaacaacgttatttttattaaaaaaatgtttagttgaagtgatatttatgtaaaaaaaaaaaatctaataatatttaaaatttattgttaataattttagtttagtagtaaatgaaaaagcccctattttaattttgtaattcttttcatttttagaaatatcatacattttttttataataataataaaaagatatttattttgttaacttcaaaagataggaacattacaacagtaattttttgagaaacaaaaaacaagtttgttctattttattgtttttttttaaaaaaaaaaatacactaataggcttaaatttaaaatgtaatgttaaaaaaatatacaattaatataataaataaaagataagagaaatatttgaagtttaaatttgaattgtaatattttaaaaaataataacaacactttctattatataagcacattttatataatactatattgaagttatgtacgtataattaattatattttaattcttttttttaaataatatattataatttttaattattacaatatacaataatattaataatttaatgaaatagataattttattaaaaataaataaatatttaatataaagtaaataaaaaacaaaatgatatattgaaataaaaatagtgtgtagagttttagaaataaactcttaattcttgtacataatttaaaatgattataagacgtgcttctaatcttttatcaatttagtgacttaaatattaggcttattagccttattggataaactaccaaccacccaatgttgtgatattttgttagtataatgaaataattatcaataaataacagtaaatagccaatacaatgattgttcatactaacatattatttttgaataaatactattttagatcttgtgttttgtaaaagttacttcctggaccatctattttgttaaataataaatttgattatgtatttttcaaactatctcacaattgattgatacttgattagagaaaaaattcattatcgttgattcgatgaaggtcagtcgtccagaagaagtcattattgttagagtgagtgcccaaacaaaagcctcccaagcagttcttcctcacggtacatatttttaaactataaaaacataaaatctctaatggtgttgggcattcccatcccatgatgtgatatagcatcttcaaacaggccaagatcctatatgtgttagggatgagctgaagaggtgcaagtctaagataattacaaaaatccttgaaatactaatttaagggaaggatggccccaacgcttatatgtttgattctccaagtgcctattattgaagaaccacttgtgctgcaaccctccccttgttcttccattaaacgagttggggaaaagtagctgaacttgcctagttcaaccaaatgactccaacagcccttcttgttcttaatatcgtaggactttaaaaagggacccacgttggtaacaagtgacctaaccctaaactcaatcagttgagcctcgaattgaacagtaaggttttggggtaacttagacttacgttcttttggagacatgatctcaaaattaaattgacatggggaaaagcaacaataattttaggtaaaaataatagcctcactacaggatacacatgtaaactaaggagttttagccatgccgcatctcgcaagaaacagtgttttccattaacaatctcatcaataaaatgtctagagcgaatagaagtatcctctcaataaagtttttcgttaaacaacctaactttctcatcattagtttctaaaattattttcgactgttcaggtcgtggccttaagggtaaagctagtaatttagatttttccattcaaataaaatatggaaattccaattttgaaccagaaatagacattcttttcttaaggaaaagaagatgtttataagggattctaaaattttggaaaataattaaattcagggaaaagaatttttaaaatttgaactacctaatcactttagaacaaaattcatacatgaaatttaaaaagaaacaatggaaaataaaaagaaaaagaatggaaaacaaaggcttaccagcttatgagtttctctgatagcgttgacagttactcatgggaaatctccggtaccaggggtttgggttttcacgggagcgtagttgagaaaaaatggtgttgattacaccaagaaaataagtcaaagacaaactgcgcatgcaagaaccttttgaataaaatgtggggggtttctctctagttttgtgtttcgaatgaagaagacaatggtaacaaccctatattgaaagatggagaaccattgatcaggtttcaaatttagatcaagcggccggggttcaatcttgataatacaaaaggtcagttgaaaagcacattagttgaaacaacgcacaattttatgatgaaataaactttctcaagagggtgaaaccgccaaagaaagtactcatttaaatgacacgtgtgtagcttctgtaaataaaccctttcagttccagattgagttttttagggggtaattgttatgctatatttcgagccataaatactaacatgacacgtggataattggacattaaaattagagaaaaatcattgtgtaataaatgagttgtctcgaagagataataaataacgagcaatatcagtcttgcattatgcattggcgatgagacagcaagataaacaatgtatggtgatatgataaagatagaagtaatatcgggtgtaacaaatcgaaactgtatcactaaaaagggtagataacaagttcaagagcttgcaactcattgacctacacactcgtgagtatggaaataaaaaaagtgcaacttatcttagaatctc

SEQ ID NO: 81684 - DNA, 1134 bp, Cannabis sativa
tttttaacgactttaaaagttcaatggacataatttggtacatgtcaaaatttaggaggcaaaaatcctaattagctgttatcttattaccaaagtttgcaaaataatacttgaagatcacttaaaaattgctaaaatgttgtattttatgtattttgatttaccttagctacttcaattttataatgggttttacatatatgtattaatgtatatagacacttttaaattgtcattaatttaataaagttgaaaatgaaaataagatgacattatcatggtataaatttaggtgtatattccttgaaaactatttgtatatagtacactgtttttttttttgaagctaattgtgcccctacaagatggctataattacctaaaatatattcatagttgtgatatgggggaaggatgtcttgtattctaatgacaaaaacaaaataccctaagcaaaaaaacaaaaataaatattaaataaatagtgccatgccatcacaagtattatatactattttagttgtttagtgatgaagaaaaatcaatcaaatggcaaggtacctgaaagaaagtgaagacaaatatataattaaacattgagcctatcaaaagaagtttatatatttatatatattttttgtaatttttgtgaaaagaagtttaaattatacagttaaacttaaatctgtataattctacatagtttgaaaacgttttagtaaaagcacaaatgatatttgatcttttttttttttccttttgaaaaaaagaagtaaaaaaaataaatgtgtagagggagtaatatagtggtgtccattattgaaaaagagtaaaataaataaactttaaagggtgtttactttttttttttgtcatggggaaacatctaactttaaacataattataattatagtaggtattttacctaattttttttttttaaatttgggaaacaaaatttttttgagtgtttgttataaatatttaaattttcaaaaaaaaaaaagaagaacaaattcaatagttgtcataattataatgcacataataattaaaaaaacatttagagttctttatttaaaattatgttaagtggtatgttatatattattatattaaattaggttatatat

SEQ ID NO: 81685 - DNA, 1573 bp, Cannabis sativa
caatgaaaactcttctccattacagtccaaacctcccatttctactcacaaccttgatgtcattgatattcctaaatcctcgacatctcatagacctttaagacatactaagaaaccatcttaccttcaagattaccactgttttctctctactaacagtgtttaatctcatgtccccaagtgctcaactactcattctatttctgacattattgattatagtaggttgtcaccaaaattttgagctactgtgatagcaatctccagtcattttgagccagaattttttcatcaagcaagaggcatccctgtttgggataaagctatggacaaagaaattgcagcccttgaatctaatggtacttggatcattgttagtctccatgctggtctccatgctataggatgtaaatgggtgtataagattaaatataatgcaaatggatccattgaaaggttcaaggcaagacttgttgccaaagggttcagtcaataagagggtgttgattacaatgagacatttgcttctgtgaccaagcttgttatcgtcaaactcatccttgccatggctgcttttcaagggtagtttcttcaccaactggatgttaataatgcttttgtccatggagatttgcatgaggaggtatttatgactatacctcgagggtatagtcctaagggggagatgcctcctaatattgtttgtaagctgcaaaaatcaatttatggcctgaagcaagcttctaggcagtggtttgagaagttttcaacaacattgattgcagaaggctttcaacactcagcatcttaccattcattgtttattcaacgcaaaggatccatcattattgttcttcttatttatgtggatgatgtgatcatagcaagtaattacatgacagttgttcaagaattgaacgtcattttgaatgataggttcaagctgaaagaccttggtgatctaaaatattttcttggccttgaagttgctagaactgatgctggcattttcttctcaaagacattatgcccttcagcttttagaagatttaggtcacctaagttgtaaagttgctaatactcccatgaaagtgaacctaaaactcagtcaagatggtgaagatgctcttgcagatctaaaatttatagaagaactattggcaagctgcaatatcttactataaataggcctattttagcttacactgtgaataagctaagccagtttctggttagtcctagagttacacacatgagtgttgttgtaagagcacttcaatatgtcaagggcacacctggacaagatcttttttatgcagcctaatcagacattcaactccaagcatacacagatacagattgggcagcctgtgttgatacaaggaggtctaccattggattttgtgtgttccttggaaattcattgatatcatggcggagtaataaacatagtactgtctcaagatcctcagctgaggctgagtacagagctatatccaatacgacttgtaaactggtttggcttctatctcttttgaaggaatgaacattgagcatccaaggcttgtattgc

SEQ ID NO: 81686 - DNA, 1151 bp, Cannabis sativa
aagtcttccataactagtaaaatgctagctaaaaggtaaggtagggcaatatgaacaaaaacgataatgaacaaattctgtgattgagatcttaaatagccaaacacaactaaatcggcaatcgaaggggtacaaatcctaggtacaatcaagtgccatagatgataagggtaataaccataaatggtcggttcaagctggggattatctaaatccatctacaattctggttggtagacacaacaataaaagctaaaccctaaactaggatctgaaaggacactagatattaaatacaaggagaaaaaataattagatttactcataaacaactcaaacacaagaaattttcattaatgtcaatccacactttctctaagatcctttgtgctcgatattgggctgacctcatcaccttgggtggaggcagttgtgtgtcaatcgccataaatgtggtgccaccacaacatagaaaagggttgaaaaaatacctagaaagattaaaaagttgcagagggtcatgatgatctttgttgttcgaagaggaagaggaagagacttggatggaaggcatgctctctgagaaagatgaagggtgtcgcaaagacaaggacgggcgaccaaaatttcctcttgtaaattagtatctccactaatttagggtctactaatttataaccctaaattccacttaatttaatattattatctttaaataaatactataaagataagtaacgaactttctcaaatataacctacaacatggaatcaccaccaattaattaacacctaaacaaaattaaatcaataatttcatttgaagacactaacaattaaatgagattaaagttgaacttaatgagattaaaattgaacttaatgagtttaaactaaatcaaattgtatataactttgaaattattaaaaacgttaattaaaatattaacttcaaaagttttaatgtacgaataataatattatttcaactcatattgtaacaccctaactagctaaggcgtgttacgtgatttttaaacgtactatgcagctcgttgctaaataacgaggtttatgaaaatcatgattaattaaaattttgctttttaattaaaacttataatatttcatacaaaatactcgggatcccg

SEQ ID NO: 81687 - DNA, 2153 bp, Cannabis sativa
gtcacaaattttttaatagtaaagttaaaattttaatataattttattaaagaattattattaattaaaatacacaatttattttttatatacaatttaatatatttaatatatctgccgcgaaacgcgggatgttaactagtttattatatataatttaaaataatttaaacatccgcccgccgaagatcgagttgtttactaatttttccatgaaaaaatccctatatttaggggtatattgaaaaatatctcttttatttatcaattaaccaaatcttcctctaatttatatttaattgaaacatacctctttttatatgtactgtacccaaaataccttgatataaggaaattacatggagaggagagtatcttgaagtgacagggataaaagtggcacagtgtttaaaaaagaggtaaaaataataaattttaaaaaagagggtaaaaataaaagaagacaatataaaagggataattataccacatactaaaatttttaattttttttttttacttttatactatgggtactatggggcagatggggcagaatttttttcaaaaatactgtgtaagctttatactttgtactgtgttaagtttttactgttgttctactgttgttttttagttattccactgttattttttttttaagcaaaagataatttattcaatcagaaacattcagcatcaacaatagacataagttcaagaggagcatttcactcgctaaaaatacgatctgaatggaaacaagacgctcgtgcaacacaatgagcagccctattagcagaccatttaataaaatttaaagacacatgattaagacaagaaaataaagaacgacaatcttgaaccaagaaaccaaattgagacggcatttgaattgagcttagaacaacctgcaccaccactagcgcatccgtctcaatctccacatcagtccaccctatgcgtttgatccaactcacgcttctttcaccccgataacctcggcaatctcaagccccacatctcccaaccaactacccgatattacctcaattaatttcccataagctccatgtgccatacaacacaaagccatacttgtgttccgtcgcaaagatagcaccatccacgttcactttaatggagtttgacaaaggttttttccatagctccaaaccagtatgtgaaccaaaaaccagaaacgggccaagcttttgagaatgagcagcactccattgctgcagagtggatcaggctgagcaaacaacaccaacagtagtacgcattttttgcttccaaaatacatcatttcgagcattccagatacccaacttaccatagcagcatcagcagaaacctttgcggaattagaatcaagaaccttagaaaaccagctgctataatcatggttaaacccgtgaaccacactcgagctagccaaattccagcaagattttgcaaattgacactccataagcacatgtgatatagtctcataagaattaaggcagaaaggacaatgtagatccacatttacatacttagtttgcaactgcactttagttggcaaacatcctgaaatggcacgccacaaaaagtgcagaaccttggggggaacctccaatttccacagctttatccaactagaaacatcatccataatggaccaattgccatgagcagattgtaagtgtttatacgcacttttaacagaaaaaatacctgatgtttccatattctaagaccacttatcaactgaactatgatcactaagttggatagagagaattaaatctgtatccctgtccacaaatagatcattgatcacctctaaatcccacgattggtcatcaacacatatcagcaaagcaaaaagttgattatcaagacttgggtgcaccgtaacaatatacgggttatttaaatctggcagccacaggtcatttagtatactaacagtgtgcccagacccaatcgtcttttgagctcctttccaaactacatcttgagcttcaaatatacttcttcatataaagctaggattttgtcctaatgtggtagataaaaaactaccattaggataatatctagctgttgtgaaaaattatatacgcaagtatacgcagtcaaataagtaataaagtgataagtaa

SEQ ID NO: 81688 - DNA, 952 bp, Cannabis sativa
tttaaaacatgttaatttatgaaagtaaatgttactaaggctttgaggctagttgttggagcttattttactaggatctaatattttaggggaactaaaaaaagtgtatttcatccaatcaaactttacaattctacaatgcctccattttaaagagacctggaaaaaaaaccatctatacactcttgcatcaaatgtgaatctttataaatctataatgcttcaaaccattccatatttttcttacaaacattcttagactatacatataaaatcttcattttaacactattttatcatcataaccatttcacctacctttgttgcttttggggatcaaagttttcatttctagctttctaaatatggtagaccaaggaagctaaactagcccagaaacattgcttctgaaatttgctcaactttccactaaagatccattgggttagttgttgaagggaacctatttttgcattccatttcaggcatgatttaatcctcatcaagaaatccttactgactttgcattcaaaaataaattagaagttgattcctatgttagacaacacaataaacaaagatcgtcttgaactatgttgtatcggggaagtaagtctctggttttaagcctattctgtacagctagccagaaaataaaattgtatttcaaagtattgaatctacctcaaacctctttagacaaatgtagacgagtatggtcaggcctcattagcttatagccatattttattttatcttgtatatatcatctttgaacggttgctcagccaccaacatgcacaaattatttttgacagccactactttgcgataggggtgtacacagtcggtttggtcaggttatattgtatttttaccaacccaatataaatatcaggttgtatatatctaattgtaacccatccagtgattttcgtcggtttggtcgggt

SEQ ID NO: 81689 - DNA, 909 bp, Cannabis sativa
agagagagagagagagatttggggctttggagttggggtcggggcttaaaggtttgtctttccacacttcttccatggctatgggagaattgagtttgagaaagaaaaaaaaagaagtgaacaagaagggtcgagtgtggctggaggtagtagagggtggagaaaaaaagaaaaaaaaatataatttaaaatgtatttttaattttttttaattttaattattttttattaaaattattatttggaccaataatgacttaacacgtgtcagttatgaataacttaacggatctatcaaatttaggactaacagacttacaaaatatgtgaccttgaggattattaccgctattttttaggttagggactaatctgcatcatagtaaactttttagatacttttgccgcaaatttcatataacaacaacttgttctttttcaaggcttctaatgtgtattgtgtaagattcatgcaacttttgagctggtatggggcagcctcgaatcaattggttaactttgacatgtttattgtttattttagccaaaatattttgagttttgaaattgctaaaatggttgatttgttgagtgtcaagggggttgattgccatgagaagtatttaggctttctttattttgcggagcataataagaccggttgtttgatgccattcgtgatagaatatagaaaaaacttaacaggtagaagtcaaaattgttctcaattgtaggtcatgaaattcttttcaaagcgggcatacaatctaaaaaaaataattatataattaaaaatccatataatcaaaataaaaattataaatataattaagtatacataatattatcttagtatatatatttagggcaagactatggtaggacctagcaaaagttctctactggtag

SEQ ID NO: 81690 - DNA, 1843 bp, Cannabis sativa
taaacaaaagtaacaagaaaactcataccatctaaagtagagacttgaagatgtattaattgacttgtacatttgattatattgatgctgaaggtatttggattccacgcaactgccattctccctcctttatgccatgctatattactagtaaagcaccatccattaaaaacatgagagtacaaggaaccaagttttggagccttgactcttgtctcaaggagaccaacaagcccaacattttgattatgaatcaattgcttgatcaaattttgtttgtgatggttgttggctccccggacattccaagctaatattctatccatttggatagggaggcactccccctcctcttgtcttatctcgagttgctgctagcattcctatgccctcattttctttagattctggttcctgtaagagaataaaagtattcctggtgctggtgctatcggccgttgcagtaccatgaactttcagacccttgtgaacttgtttaaatccatcattatcctcaagtaccactggtttctttcccttgtgacttccagcagctgtaacaggatgattcacaccagaattagtgtttaaattcacacaagaattagttcctgctgttgcacaaccatctgtatcagccccagacctcacctcaatatcctctttcgattcacccttaacccactactgtttatgagcagatggtttcctcctacattcatcagtgctatgtcccaacccattccaattcttgcaaatgattggtttccattcgtatttaatcccaactgatgtaatatagccatgctcatcttcaaacgcaatagacgatggtagttcttgttccatagaaacttcaacaagtattctagggaaagtgaatttttgcctcattttagtgacttcatctaccattataggctctccaatctgccctataatcttgaacaaagtgttttggccccaatatttcagttccaagttttcaatttgaatccaaattggaaccttaagaatatccccttttctgaaattagtattcggatcccatgctttcattattaccggcctcttgttgaagaaagtatagcctccattaagaatgctatcccttgtctcaactgaagtgaatctaatcagaaaaataccatatgagaggagcccaaccttatccactttctccttccatattcttctagaaaatacttcaagaacatccagtggagggtttgcacccaacacataacatacaatagcagaattccattgtgactttaacaattactttctcattatcaggtttctgtttctcagtcgaaacctcctgaaaagaactatctaatgatctaataacaaaatctgacctaagaattgggggaacagggaaattacctttcgagacatctctgctgcaactatggttagcttccaggaagtgagcgaagtcactccgaatgtcatcttgcctctgcaattcatgaagcgaagatcgtggtgaaagaccctgaagctgttcaaaatctggctcgtgtttatcgtcttcttcgtcagtgaaatcgatgggttcaattcccagaattgcatccatcgacttggttttcttgacatctccagatgaggatggacctcgtttcttcacaggttttttattcttcgaagtagatgctagttttccatgattcttggacctcattttttgccatggcgccaactcgggagctgcgagagcaagaaactattctttgattttgacttgaatagatattacggtaagtttgattaaatctatgtcaaagttcaatgtcagtcccttccgatgcatactccatgcacccaacctaag

SEQ ID NO: 81691 - DNA, 1378 bp, Cannabis sativa
atgttatacaaaatatctttatatgtttgtcgatgatgacttatttaaatttgtactattgcaaattatttgcaaattatttgcaaaaacaatccttaaacaacaaggaactaaggaaaaacagcaggaaaaacaaaggtttatgttgcctgaaattgaatattatcatcataaaaatttcatatttaattagtatgtgtagaatgtagatgtatcatgaattagtataatatatggagatataaaaagtacacaaactgcttgtttaattgtgatttgcaataatattaatatttatcatttttgccaataaacattggatcgaaaccgatgctcattgctaacctgactattcaaaactatttatacatttctgagatcaatgaaccatcattggctgtttaatgtgggagctaacaaagaaaccatgtgaaatcttaacaagcaaatatgggctatggaacggcacaacaatcacaaaaataataccatctttatagtaatttgctaactgtacggtttttttttaagctgttacatctttgcaaggcttgtatggcatctatgatcatgcctattcattgagagttaaaatgaaatgatttcactcagtttcaagggccacaatttcatatctgacctcttccaaatgctcgtttatagcagtcacagcatcctgtactcctctaatggcttcctttagttccttatcatacttagcatctgcttctgcctcttcagtcccagcagcttctgtaatctcacgcacatgcacacactcatgctccattggtttctcaaatttgcaatctgcatggctcaccaaacgttctgacggcctacctgccttcttaagcacctgtaatgtgactgtctttaaaagtaaaagaacttaatgttagcaagcaacagagtaacttggaaaattcgagttactattctagaagtctggttgatgagtacagaatcatcttagagaattgaaagaaagaaatcacactgctacagctataagatgaacaattatcatctgtcaccatgatatttttttaaatacaaacaaaagtttttctttgaattcatgaaataaaagtaacaatcctagcagaaaaggaagaatagtcattaaaataactcaagacttgacttttgagtttgactccatataatatcaagaaaaagtaaagaatccttttactgacttgaaataccagagattggctcgaatcgaacaacccaaatcaaaggtaccactagtgcaaataagaaaagaccttcatgcttaacgatattggtcttttgatactttcattgttcctcaataaactattcaacgcagaagttttcttcaccaatgaaggactaggttggtttaatt

SEQ ID NO: 81692 - DNA, 2335 bp, Cannabis sativa
  modified_base (2283)..(2286): a, c, t, g, unknown or other
tgcctgcaggcgcgtttaggctgacttgctagctcggtgtgccagcaagtgccgcacgttccacctacttggggtgtccaaataggcggcccgtgacgtagggcatcctttttacccccactaggcacggggtaattgcttattgtaaggaaatttgcaacttgtacgatctgattgttgtaaacttgtaaattataagttactttttgtttgcccaaacaatactcaattagaatttatttttagtaaattcgactgtgtttatattgcttttaactttatatctttactatctaaatactataatcgaattgaatcaacaaataaaatcataattgataattaaactcggtaaccataaaaacttgggtctttcatgtgcaaacatgaattcatgagtttattttgaaacgtatttccgacaccataaattattataattttttaaaaaatttagtaaaatatcttaaatacttacaatatacatgttattatataaataaattaattataatttttataccaaaatataaaaaaatttctctcgaaggccaaaaaggcaaaaaaaaagaaaaaaaaaatccctctatagaaactcattatatctagggataattgcagcaaaagtctcaaaaaacttagagttgatgcagattaatcttcaacctcaaaaattggcgataatagtccttaaggtcaccattttcgttagtctgttagttcctaacttaattgattcgttaatttattttaaaaatgttatgtgttaaaatattatttgtctaaataataattttaattaaaaataatttaaaaataaaaaatagtattaaaattaaaaacattattttttattttcatttttcatttttttcctatttcttgtatcgtcttcctcatccccccccccccgaccttcaccccacccaatcctcatcctcccacccccacacagtgttcaaatatacaagagaccacataaagctcacgagtacaaaaactccaacccataaaaccctaaccccacctatttctttctctttttcttcttcttcttcttcttcaacgaagcccctgtgcaaaaccactcaacgatagaccatgatctctccaattcaaacccatatttctaaaagccacaacataatcgttcaacttctcttactgaagcatcatctacattgcctcaacgcagtgaaaccccaatccctcgaagcctgaagattccccaagaagaacttgttctataaatcgatcttgatcatatccaattaatgattgttgaataaatgaatccaaaaaaagagagagaaaagaaagagggcaaatcgttagccttagtggtgtgccttcgtccacacagttccctttgcagctctgcctacgcttcaccgatctcttccacggtgcaacctctcatccaacaggaagcctcctccatagcagcttaagaaatcgcagcttaagaaaaacctcgtccatctccattgagcgattgcaaaccaaatctctgaagatagaatcccaccgttccagatctcgacacctcccatctgctatttcttcagctacgattaagttaatgagatctgatcccacaatgggattcaacttctcaaaaactcttgaaaccttcactgatatcatccagttgagaagtcgatgaatcccaggagaaaggtcgatgaacatatcatgggtggagggtggtggaggtggtggatttttggtaactagttgagcagtcacgatatgggcattaagcaagaagaagaataagaagaaaaaaaagaaagaaaaaatatattttttttaatttttaaataatatttatgatgtggatcaataaacttttaacacatggtaaatttaaaaataagaaacgattaattgggtacttacggacttatgaaaaattgtaatcttgaagactattactgttaatttttaaagttaaaggcttatctgtatcaatgatgagtttttagagagttatacgacaattatctcttatatctatacatatacttatatttgcaaaaaaaatgttgttgatcattctcaacaccactttacattacatggcatatacataaagtttaactacaagaaaaaggaacattaatgatgacaaatttcgttggtaaaaatccctgttttcgtcagtattgcgcatcaatgaggacatttcgttggtaaaaagtcgttgggaatactccgttggtaaaaacgattatattaaaattattaaattaaataattaatttaaatttaatttttttnnnntatttatttatttaattaattaatatataaaattattgaattaattaag

SEQ ID NO: 81693 - DNA, 1487 bp, Cannabis sativa
gcatatagcatgcttcaaacgagtacaacgaaccttatatgctgcattaagaaactccatcattgctgaaatcccagtattgaaacgagttccttcaatttcttctgtcacctgatgattaggaaaaacccatcagtcaaacaagttagacaaactaatttgggatacagacatgctttcttataagctaccatattaccttaacaatgcatttatggagggtgcgaagttgttccaatgtgggttcctcatcagtcaccacagttccatcatggaatgtaccatcaggtaaaggtgaaccaacaaccaacctccaagttcttcccaaaaatcggtggacaccttcaatgccactagtattccatgttttcgagtctctagtaaaatgtagtaaagcaccgtaagaaaagagcaagatttgtttgctgtgctgaatgaccaataaaaactgtttcacaaacacaaaagcaaacaaaatgctgtacctaagtggacccatgaacatttcatataaacgaagtgaatctgcaccatactcggaaactacgtcatcaggattgacaacatttcccctgcttttactcattttgtgggcgcgtgcaatcaaacgaatattcggattgtctttcatgacaaaagaatctcctgatttcatgacctacaagtcccaaaaatatcatttctagaaaaataaataaaaataaagtagttcaaaattttaaaatgtatattttagaaagaaattattggagtcatccaagaaattactttttcctctgggattctttcttgattgtattccccaactgtttcagcagactctgcagaaatgatatttccactggcatccttgcaagccatatattgaacctgcaattggaaggattagagagtcaatgatgaagtattactcaataagcagaagcaactaaaacttacttctccaagaataattccctggtttatcacacacttgaagggttccttggtcgatacaacaccaatatcatagagaacctgagacacagaagttcaattaagatgtacacatgaccctgcctaaaagtagaaaatgaattatcaatttgttccacagcaattttttgtaagggttacactataatttatatcatcacaatcctccaactctggcatttcaggccatattttgacttcataaagtcaataatgaaatttcaagggtctcgtatcatggatcttataagggccatgcacatacccctgtgctgtaaaattccttgctcgtattggagaccatatgcttaaaaaacaaaatatacactgatgtttctactgaggacctaaacaaaaatgaagctaatgagagatgacaacatgaacgatgttttttactgctagtagtgtttctcttttaatttcaaatgaaaataataagaccctagcaatctttttatctcagatcatgaacagaaaaatgcagctgaaccttgtgccaaaatctagca

SEQ ID NO: 81694 - DNA, 1067 bp, Cannabis sativa
tcaaaggttgcatgcaatatagagaaaagaagtgattatatggtgttattttataaagagaaatcaaaagcttcaaacaaattagttgtgtcatcaattgtgaacatatctcaactaaatctaaataaagtctgttattttttaaaaaaaaaatactacaaaaaagtctcaaaagaatttaataaatatgctaactctaatcctataatttataaatattaataatttatatttatccttatcatattctttcttatattttctctttataatggttgcacactacatctcttttaatttttccttctttaattttttattaaaagataattaagagtcaaaataaattaactatgaatataaatattatatattgtgttttcagtacatagagattttttttatagattttttaatttattaaaaatttattatcttttacgtacaattaaaaaaatcaaattatgtatataaaaatacgttgtgagaataataggagacgactataaataagatacgatgataacaacatgcgagatataatgatgacaactttaaatgatcgagatataaatattacgagagaaaaagtgtttaattacttaaataataataacactctaatttttctctatactacccacttctttatttttatattgataatttttttaacagaacaatctaaaatttcatatatacattaatcctataaataataaaattaagatctaataaataaaattgttattattaataagtaattttaatgttattatatagtaaaataatgttttttttttatctattattatattcataaataattgtttttttttactattatactaaaaaaaatattataagctcaaagagcgaaaagcaaccatattacctaattatatataaacacaaatgttatatgttttgaataaaataataacaattcttataagaaaaataattaaaaaaaaaaacataaaagttagtcattttgtgtaatatataaaccctcattcattcaataataatattaaaaggattgtattgttcaaaaataatattaa

SEQ ID NO: 81695 - DNA, 2056 bp, Cannabis sativa
aatttttttatgttttaatttttatacacttaattttttttttttttttggcaaaatctctttgattagtttacttttttttttgtaaatttgaagcgtcagttaaactgttaaaaaccaactggatcaccgttgtgtacacttatgtatacgctaaagtgaaactttgaaatcaatacagatagtaatctagttggtatttaatagtgatatcaaactaatacctcaaatttataaataaaaagaataaacataagaaagttttgctaaaaaaaataaagaaattaagtataaaaaataaaaaacataaaagaatcttgccacaaataacctttattattattattattattattattattagggttttcaacactatggtcaattaacgtacattacaagtaactaacaatttttcaataataattatcaactaatatatgagtattattattgaatagcactagtgcctataacattgaaattatattaccgcacaaggagtacttttaagcatttctcttaaaatgtgtaacacctcaatataaaaattaaggatccaattaagcgtaaactaacttacttttttaattaatttttttaatatttttttctttttttcagattcgacagagatttaaagtggagaacaggagtagaaatagttccaatccattgttcaagctcaaatgatttcaaaatcacttcatcatcactagaacaagcctacaaccaagcccaaaagcttgacctaaaagtcaaaggaatcctcataacaaacccatcaaatccattgggtacaaccctgtcccgacccgaactcgaactcctcctagatttcgccttagccaaaggggtccacatagtcagcgacgaaatatattcgggcacagttttcgacgaatcaaatttcaccagcatagcagaagtagtcaacgaccgtacacaagaagtcaacgacgacacgtcatcatcactagagacacgtgtccacattgtgtacagtctctccaaagatttaggaataccaggattcagagtaggaatgatatattcacaaaacgaaaatatcatctcggctgccacgaaaatgtcgagtttcggactcatctcgtctcaaactcagtacacattatctcgtatgttatcggacgagaaattcatgaaaaaatacgtgagaaagaacaggaagagattgagaaagagaaaggaaattctcgtctcgggccttaaaagtgctgggattaagtgtttgaagagtaacggttgtttgttttgttgggtcgatatgagaagtttgatgagatgtaatagtttcgaggaagagaaattgatatggaagagaatcgtttatgaagttgggttgaatatctcgccggggtattcttgtcattgcagtgagcctggttggttcagattgtgttttgctaatatgtctgaagaaacactccacgtggcaatcaagagaattaagaattttgctgagcttatccatagagagaatagtgttattcttaaacccaaacaggttaataacttgttattgagtaggaatttttcaagaacaaggtctttaactagatgggttgttcagttggctaattctgatgaaattcatcttgaaaatggtagataataattaatttttaaaaatttgtattttaattgaagtttaaaaattggattagaagataataattatttatttaattatattcagatttgttgggttttgttgtactagataggttgatttctatctatgtacaattggatttgtcacacaaataaagacatattatttatttattttataatttattgtagaaattctatttgtaccctacaaaataatttttaataattacttttaatatttttgaaaatttcttttcttgtattgtttttaattaattttaatatttatttttattttattttcttttttttaaaaaaaaaatcatgtgtaattttttttctaataaattttgttatattatttataaataatatattaaatatgtgtaacaaatatatgacaattgtcatcattttg

SEQ ID NO: 81696 - DNA, 1079 bp, Cannabis sativa
attctggatatgtcatactttcaaataatattttattcttttcttatctttactcaatactacgtatatgacaaaaattatatcaaatattagaggttcactggctttctgtagattagtgttgagtaaataatcttacatgcatatttcagtttttttttcttttcgaaatcgatccttccgaatgtgaaattcgaatcgattcaattaagacaaggaaaactaaaaaggagaaaagaaaaaattaacctcagagtaggaatatgagcaaggattacattgaataatcttcttcttctctactttatactctatcggttgataaatgaaattttttatttatgattaccaagtgaatatttaacaaacaatttgaatgatgcataattatttgatcagaattgaatctgctctgttagaaaccaaacctcatagatcataaaaatattggaaaaacgaaaaaatcacacacgaaattttcatacatgatttcaacaatctttttgattttaccagttcatatggggcacatttagagataagatttgtcgcaagagtacaaaagcaattgacataaataaattcaaactcctagtaatttgtcgcaaccttgttgaactccattttgttgattcaatagtgatcatgaaacaccaacaacaagaactatcttctaatcttgatgagtgattgcttcctcaagacttgtgaaaatcttctctagaaaatagtatgttacatttaatgaccttttcaacttgttaattacataccaataaaagacaatacaataacaaagtaatagttgaacaaaaccatgttttacacaacaaaggactattgaaaatgtggaaaatatattagctcatggaagatgtaaaattatgttgttggtttatgtgctatttacaacgatacggactgttcaaaatagaattgctcgatcgagttcctactttcaaattccatctgaggtgtcaaggttttgaagcttactcatctaaggttacaggatttcaagctcttctccaattcatctgggctacaagaaaatgtgagcaaatcaacagtttatgggg

SEQ ID NO: 81697 - DNA, 3008 bp, Cannabis sativa
tagtaagatacaatttttgtccgtaggtatgaaattttaacatcaagaaaaattagaaatgaatatattgtaattataggaagtattttactattttttttaaaataaaattaaaatattttactttagtttaaatatgcatatttattcatataattattttttatatgtgagtaatagatcattctgaattttatttttgataatagagactattttaattttttataaatgtgagatgtatattattagtttaatgtaaacaatcctattaaaaaaaatagattttaattttgataaatgccaaaaacataaaggaaatttacatcatatattatttttaatttttttttcaaatttacactttgggttgctttgatccattagttgctatgggtttttttatgagggattctataaaaagacaaaaaaatattatttttgaagtgtaaaagtgaaaaagccccaaacataaatacttaaattttagggtttttcttagtctaccactgctaggggtctttaactctcttcagacatggctcactgacttttctctaggcttgggtgtggctatgtcggaggttgttgatcacgcttcttatggtttcagtgggggaggatcgatgtctgttatcgttaaatgtttggggttttattttggggttgttggagttggcatcgttgggatccgccacgaggtttcatcaacgaagatcttctggtcgttgtgtcttgtttctttcttttgtgggagtcattttcttctcctatgaggcggtttgggtgcgacatttctagatgggtggttctagtcgctttttcgtgggttctggtgggtcttgtgggtgtggggtgcttttgcacttcgtggtgtcttttttttttttttttgaaaatgaaacgtgcataaatgaaaattagacctcacggtcattacaaaagatattgttcggaataaaagaaacacacaaccgaccaaatcgattatttatgaaagcccacttagccacattatgggccataaaattacaagttctactaacaaaataaaaattacaacaagcaaaaattgagagagagtcttttacaaaacttagcgtagttctcaattttccaacgagattctagattgttgagcgaattgataaccaccttagattaactctctataataatatacttccagctatcccctttagcaacttccagcgccaagcaacaggcagtctcttcactgcaaagagcatcagagaactgtatgcaccccgcaaaccaccccaaagtgatttctagccacaactgcaatgcacatgctttatatcctaactttaacatcacagtttagcttaacccactcaagagggggtggaagccaacttgctttcagacacggggatggagtggggaaaatagaaacattgtaatcttcataagagtaattaatatagtgaatacactaataaacattggccatacttctattatgtaccttgttattctgcgttcgctaaattctatcgacaacgattgacgcataaagaaagacttcatttgtattgatgccttgtttttctgtccccagatgaatttgactcaatcccacaaacgaatgccagaattaaaaatgggaaagatcccccacggggacgaccaccacaaatgaaacacccaattaagtgagaaataagtgctctaacgtttcttcaccacccccacataaaagggcaggacacatcctctatatggaatctcttagatagaatagcacgaacagggagggccttagaaagtatacaccaccacatcatcttatggcgttctaagatgttactattccacagtttgttccagagggatggagctacatcatattgaggggccctatctaaagcttggatgagataggctaatttacataaaaaccgcccattactctctttcgtcgtaatccacctatccgtaccctgaccagagggtctatccctttttaggatggtcgaaaaagattctttatcaaaaagataattctaattctgaatatctcaatccccataatccgtaaggagatcaaaccactttgttatgatctgttactctagcatctttcgcttaggatagaactccctgccattggagatccagggatcctcctcgattctcgtatccttaccatctgcgatcattttacatgcccattttctcataatagccttggctttcaccacattcttccaaaaccatgaatcagagtctttatacttgtaggtaaggtaatcttttcctttcaggtactttgcttccaatatcctgcaataaaaaaaagtgactcctagttaataggttctacccccacttagccagataagcctggttcatttccttagttttctaaaatccagtcctctatgggatttgggaagacacagtttatcccaagccttaagatgcatcccatggttacctttctcaaaacctcaccagaagtcccgaaccatgccatcaatcttatgaatgagacgatttgagagtttggtagtttgcatagcataactaggcatggacagacccacatacttaataagagtagcccgcccaactttcgagagagattttgctttccagtcttgaagcttaatagttaggttttccaaaatgaagttgtagtctgcatcctaaatgttgataagttcgtattgagtactcccaatggctttctgtgtttatgtatttttagttttattttatttttaataatgccttattatggtttttgtttttctacctttgtgtggagttgtctactcaccagcccctaataagggtaggaggttgtagccctcctaaaaaatattgtacgtatttttctctctattaatgtgtctaatatctatttttgatagtatggttttttttttttttttatcacaattcatgtcactttatttagtaactcattcatgtgacaatattgatgtctgtcatgattttacttggggtttaaaata

SEQ ID NO: 81698 - DNA, 1422 bp, Cannabis sativa
acaacgacgataataatcgtttcatatcatgtccctcaatcataatcgagtcacaacgataataatcatttcatattattcacctcgatcgttatcgagtcacaacaatgataatcgtttcctattatttccctggatcataatccactcacaacgatgataatcgtttcctattatttctctcgatcataatcgagtcacaacgatgataatcgtttcctattatctccctcgatcataatcgtggcactatcgaccataactgattcgtatttattcacttagctgctcgatcataatcgagtcataacaaatacatattattaatctcgatcttaatcgtggcactatcgaccataactgattcgtatttattcacttagctgggctcaaaacttttcttacctcagtccagatattaagcatgcatgccagcctaagtgaaaaataaagcttgaagatcccgggtcttatgtcacgacaacaatattcaataactaccgtaaactaaaatccgaaaacaaaatcctaatcttaaactggacataacctaacttccaaaaatccccaattaggctacacaacataaaaacatcttgaaacagatactacacaaaatcccgagcaaaaacagaacctaaagaaaacccgaaaaattccccctaggcaactggtcgaccggtcctcgtgcaccagaaccaatcggtcgacccgttctggtagaccagaaaattcgagttttcttcccaaaaattcataccaatcctactcaaaacctgcgcaacagctccaaaatagatgaataagatacaaacaatatttacaaaacaccagatcacatcaattcatcaaattaaagatcaaaagcacaataacatagaaatcaccttatcaaacctaccattctccaacctaaaaccaacagtcccttttctatccaagcctaacttaaacaacctttaagttgaacctaaaaaaaagtgttagtctcaattatcttttaatcccaaaagtcttgaaaccttactctaaaagctaatctaagtctaaggaaattcaaaggaaaacaccaaggacttacctcttgagcaagcactcctaaccttgataaatcccagttgaactatggtggaaaaactccctggttgtggctgccccttagggtttcgaaggatagaaggaggaaggggaagactttcttctttctttgaactttatccttaattacatatatcaattgataacctaaaactatatacatattaatattaactcaataatcagcttgttactagaaagatacataaaaaaataaaatagggtataatgactattttgcccttccccatagaacttaagttataaaataacctagggcattttggtaatttaactaatctaccaaactgaaaatttaaaatt

SEQ ID NO: 81699 - DNA, 1010 bp, Cannabis sativa
  modified_base (611)..(616): a, c, t, g, unknown or other
tgtttggtgtgagcctcagggctccattatgtaatatcgagtttgataatttattattgttgctgctacagatcggctgtcaacaggaattactgtggctgatatagatttctcactgcttgattcaatcagaacaaggatgccaattgctagggtaagctttcttattcttttctggaaaattgcctaacttagactcatataatgcgatcaaagccaagtctgaaaatagaatcagtttgtactgaaaataacactgatttgcattttaaaagggttaggcttaatgtaccctgtcctataaaaatgttaaaagagttattaataagtcctaggatgcgtttttgataatatttttttaatcagttttcggtttttttaattagaaaattgaaatattttctgaaaacatgttctataaaattgtttttactttttaattttttaattgagattgaaaaaaaaatcactttcacaattttttcgaagaattttttttaactcaatattttggacaccccaacttggatcttgggatctggactctggccccgactccaatcccagactcggaccacggtcttagattcggacccgacttaaataaaatnnnnnnataaaaatgaaaataaaagttataaaacacacttttgttttctgtttttaaaattaaaaaacaaaaatgattataaaacacatttttatttttcaaaacacaaattttacttttgtttttgtgattaaaaaattaaaaaataagtgttaccaaacgactcctaataagtgatgttttactttattttgtttgtcattaatgactctatactcttatttttctccatgtacagcataggaagcctattgaattctggaaatctgcttccctatgatataaatctaccaatatgttgtattgttttgactgtttaatagacttaaattattggagttgtaatttacaatttacaattttctttttaattttattttcaaataatacattgtactta

SEQ ID NO: 81700 - DNA, 1626 bp, Cannabis sativa
agtgagtaggatttcgtcggagaataggaggacggaaatattctttgaaagtctttttaatatctgatttcaacgttggaatggggtatgaagggtacgaatagaatcacaattttaggagagttagtttcattatcgctatcaagcttacaattttctagggaattaggttacgatcactataagtgcattccgttaataaaaatcatccaataatctttacattttatataaaatagatattctgtttttttctcatttttctttttagactgtctcctctcacctttccgtggatatgcaccctttttgaaaaagcacaccaacgcgcatggtttggactttgaatgaacattcaatgataacatcacattagcaaataaataaataagagaaactgataattcaatacaactaatacatattaaaatattaatgagttgaccatgaacattggagttgtttgaataattttaggtagttaaaataaaatgatgcctttggacatcacatgaaaatatatattacaaaaatattgtacaataaaagataccaaattgaagtggtgatccaaatacagagaaatacaatttaagggtgtttctcaattgatttggtgtgtattgtcactttttggaaccaaaccaaaatatatggttttttaaaagtttaaaaccaaaatagacgaagaaaatgctcaaatcaaaccaattcacttgaaacatattagtttggtttgaaacaacataaatacaacaaatttacaatgaaaattatccaaataatataattaccatcaaaatggactaggttcctatttcaaaaaactaatactaaaagcttcaatggcaataggagaaattagaaaacactacgacaatgtttggcttttcactcacataccatttacttttttcaatttaaaaagaaaaaaaaaaacgcaaaattttaataatctcctgtgttgcacacaagattaagcaacatttacttaatgatgtgtcaaaatatgattaactagaagaattgtcatatatataaagaacaaaaagaacaaggttgttcgactagcatggtggctgaaagtagtgactaccctggtgagaagtgagtttagagaagtcttttaagtaataagaaacatgaaagaaagtgattaatattaaattttaagttttagtgatgaatatattttcaaaataagtaaccaatcatatttttttaataatacattattcaaaaaggaaaatgtctcagctctaatttttacaacatagtttctaaaattgatttaccaatcgactattacgtggagcccacgaatggcatagaagacatgtaattggaggcaaatcttccggacgagaatcggaccgagttatcgacctttagaactcggtccccgaaccgagccgactcagtacccttatctttccttaacgccaccaccaaattatcttcccgggcctctttttcctgcccgactttctccttaatctcacgaatcagatcccaaaagctttcacttaagtccttcttcatcaaattagacgataattgaagcctctctctgcaattttccaatctcctaaaagcacatatcaactcgaccgagtccacaaagct

SEQ ID NO: 81701 - DNA, 1310 bp, Cannabis sativa
caattttgtaagaaatgccattaaaagtaattttatttatttttattttagtttttaatattaaaaatatataatgacaatgttgtcctttaaaatacgttttacaaaataactaccatatactatagtttaactcaaaaaaggaatttagtccatttaagcattccgattaccttttctgatataagtaaacaaaataaattactattattctattttaaaaaaaaaaattagtaaacaacatattacaaatattgatttcgattatttttccatttattttgttatatttttctattaatttattttgattctgaatactttatagtaaacgtgtcaaagtacaaaaatatatgtgttaaggcagcagaggattaagaaagtattctatggttcacattgttgaatgtgcttgtttgaacgtattatgacatgtattggcaaatatggcagatcaacttgctttaaatccaacccaaaatttgttagtgtgggagtacgtaacttgtaacacatagcataattgttattgtgatgtattaataaattgagacatttgttttctgtgttgtaatattgactattgaattgctaatgagataacttatgaaagtagaataagtacttgaatgatggattatgtgttagaatatatatggtttgattgtgcatgacgttgattatagtttgctttcgatctatatgattttaggctggaattgttaagttgaaaaataccattttttttatccattaataaaaaatactttcatattatattttattaaaatatatcatttttttttgaaaattagggtattatattttccaataaaacttaaaatcccacataaaaacaaagtaagaaaatatcatatttacctcaaatgttgacaccgcgttgttcgctgccactcatcaatttgacattgccatggtactcgtgatcatcagggtggtcttcttaaagctcgttccatttgctgtaggggagatataaaacctaagttggttgaattattagcatcaagaaagctctcagttagattaaggatagagaatggccaacagtagtgctagagacagattatttagtagcggttgaggttgttcgtagtcaatttatgataaactcccttttttgaaacctaagttagttgaattattagcagcaaggaggctctcagttggattaaggatagagaatagtcaccagcggtgccagagacgaattgtttagtagcagttaaagtcgttcgtaatcagttgatgatgaactctccttttgaattagttattaatgactgtag

SEQ ID NO: 81702 - DNA, 1843 bp, Cannabis sativa
gataactaatgaaataacaacgaagttctcagatctaactttttgaaaggcttcatgggcatccaccaatcaatcgcttgattgggattgggagtgtgaatggaagagtccactggctttttaaactttttttttacatttttttttcatgagagtcataggttaacgactttacaatttcacgagaataatatgttaactgcctaacaaggaaaaagttaaaataaataaaggatcgttaaaccaagaattgtcgttatatagccacttgtaatacataaagatacattctatgctagtcttacctcatttgtgaattcaagcgtggcggtcaacctaaatagaaatacttgctgaacaaaggtattatgttacaatcatgcaaaacgggtaaacaacttcttaaaaccttttcggggatctaaattcaaaattagaagttttcttatcaataaaagcatgacaaagcttgaggaaacacgagaaaaacgactaaacggggaaattgcctaaaaatggcaagctatttttttgagtctacaccagtaaaaatagtagaccggttctgcagaattggcctgccattttttactgcaaaagaacaaagaccctctaatttgattcaaaacaaccccaaactctacactaaacttcagaattcctatgaacatcaatataagccatttctaagcaacaaaactagatataacacaaaattacacatttcaccattgttgagccaagtttgagttcaagaactcaaacttgctcaactcaagaatcaactatcaaaaccacatgaattaagcttaaaacaacctcactatagttctgaaaacactcaagaagaaatcctaactcggatagaagtgaaatcaccattttttgcatgttttgagttaaaaagaaattcgaaaactagaacggaaaggcttaggatttacctcaactttagctaccaaagatttcttactgaaatctcataaatcaaacaccaaaactcagcttctccttgcgtcttattgggtttgaaagagagaaagataaaaatggatttttttttttttttcttttcttttaatttgtttgatctaataaattaataataaacttaagtttattactaaggacttagtggcaagttgccatctaaagaaatcagccacaaaatttaaatctaaaatgttcattttacccactaaaatgttcattttaccctcacataagtgtttaatttacaaaatgacttagggataaaatagtctaatgcaataaccctacctaatcccgatatttcaaatatcaacatatgagtactctcctaagacaaaggttctaagctaacgtatgtgactaaattggttgtccgtcgcattttccatcgtcaccgagcaaaaatcataaaaattataaatttcatatatgacataaacaatacacagagtttaataaaatctctgaaattaaaaaattataactctaatgcctattatttaaaaataagacccataacatatataaccataaaatactaaaaattaaactaatcacttttacaaatccataatctaatcacgcggtcattacattaagcaaccaacaaccaagttgacatctcaatagctaagttggcatttgatgtcaaagacaaatacctcaccatacattgatctctcttcgttctctacatctttgttttctgatgcaaaagatacattgatctctcttctctctctatctatgttttatgatttctaatgcaaaagatacattgatctctcttctctctctatctacgttttctgatttctgatgcaatagatacattgatctctcctctctc

SEQ ID NO: 81703 - DNA, 2988 bp, Cannabis sativa
  modified_base (61)..(63): a, c, t, g, unknown or other
ataaaatgttatttctgatctttattaactactaaattgattatattgaaatgagttttannnagggcacaaaacccaacaaaaggtcctttggacagatttgaaaagaattgcaacaaatgaggcatgggtgatactaggcaatttcaatgagattttaagcaaggaagaaaggataggcaaaaaggtgaaatacaatgaagctactgattttattgattgtgttaatggctatcagttggaggacatcaagttcagaggtagttattttacatggagccacaaaaggcaaggaaatgaaagaatatggtctaagatagatcgagtgcttgctaataagaagtggatggatctgtatccgaatgctgaagctgtctttatggtggaaggtttgtttgatcataccccaacaattgtatcagtttaaccagaaattcttagaggcaagacgccctttaaatacttttgaatgtggtcctctcatccacagtttgcagagattgttacaagagtttggaagtcttatgttgttggcactaaaatgttccagattacatacaagctgcgaatgttaaaggccgaattaaatgagctgaatagaagagagttctccaacatccaagaggcaactactcaagctaaaaaggatttagttgagattcaaaagaaaattcaggcagatctacttcaacacgaactacttgaacaagaaatggcagtacggaaaagatatggatttctgcttaaggggttgtcttccttcttacagcagaagtccaaggtcaattggatcaaggatggtgatgagaattcagctatttttcatgccagcattcgagaacgaaggaagcaaaatagtatactttcaatcgaagatcaacagggaataagagtggaggattagaacaaaattacagaagcctttctctcattttattaccaactgctaggtagtaaaatggagaataggcagcaagtaattaaaagtgttatgcaacaagggcctttggttagaaagcagcaggcagaaaatttaatgaaagagtatactaaggaagatgtcaagacggtgttttttgagattccaggaattaaagctccaggacctgacggttactcaagcttctttttctaggataactgggacatagttggtgatgaagttaccgaagcagtattatcatttatacattctaggaagattctgagggaaattaatgcaactgtgctaacacttgtccctaaaagcaagtgtcctaacacagtaagagacttcaggccaattgcgtgttgtaatgttatttacaaggctgcaactaagttgatttgctctcggctcaagactcttcttctagatctggttgcacagaatcaaggaggctttgtctcaggccgtttcatcgctcacaacattgtgatatgccaggatttgattagacactatggaaggaaggcagcgctcggcccagggtgtatgattaagctggatttacagaaaacttacgacacatttgaatgggatttttgggaagagattttccaggcttttcaatttcctggggacttcattaaactggttatgacctgggtatgcactcctcggttctcgttaatgtttaatggatctcttcatggattctttgaggggaaatgaggtcttcgacaaggtgaccctatgtctccacttctttttgttcttggaatggagtacttgtcaagaataatgattcaaattggaaccaagctagaattttattatcatgatcggtgtaaggaactaaagatgaatcacttaatgtttgtcgatgatgttatcctattctgccacggagacttcaaaagtattcattacttgcttcaaggattgaaactattctcttgtacatcagggttgcaatcgaattctgataaatcggccatttactgctgtggaatggaagaaagcgaggtgcaaaggatcattgacaggttaggtttttccaaaaaagaggtaccatttaaatacttaggcattcctatttgtgccgaacatatttctagtaaagaatgtatggtgttagctgaaaaaatgacagcaagaataagaacatggagttcaaggaacttgtccctagcaggtagagcggtgctagtaaagtctgttttgatgtctattcattcttattggagtcaaattatgattctacctaagaagatcattgaagacattgagcagatttgtagagcctatctctggaggggccatcatacaacaatagggcctggattaatagcttgggagagtgtgtgtcagccgaaggcagcatgaggcattggtctaaaaaaaatattagaatggaacttggcagcattgacaaaatatgtttggggaattgaaaacaaggaagagaatttgtggttcaagttgatacactgtgtatatataaaatgggaggattggtggggctaccaagccccgtaacaagcgagctggtattgaaaaaaactggtgtatgtcaatgagcaaatcaaggagaaaatgagcatgcaacaattcattagttcaccttatacaatctctgatggctacaatctattttgtccccctcaaaggaaggtaaattggagtcatggagtttggaataggcaaaatatcccaagacaaagctacattttgtggactgcagtgcaagaccgactcaaaaccagatcgagattgaagaaaatcaatgtcatttcagatgactgctgccttctttgcagtaaccattctgagacaaaatcccatctattcttctcttgttctttctcttcacaatgtcttctgcagattaaaacatagttgaattggaaggttgaaacgatagacgtggatgcaatattgagatggattgaaagatcaaaggctggcagatttaggaagagcttatggtttgctgtcatagcttcgactgtgtaccaaatctggaaaaccagaaacctgctgctttggtaatcaatggaacctag

SEQ ID NO: 81704 - DNA, 599 bp, Cannabis sativa
agtccatgagtcaatattattgagagaggctagaaaatttcaagggattacaataaagtatgaacactctgtttttgcacgagcaagtgaatcacgaatttttaaccctttgcatgtagggtttgttaaatatttatagattatagaggtcatattagttatccttttcctctaataaaaagtttaaaaatataatataaattttgggcttatctggtgaagcctgtcccatagagtcttgtgtatactaatgtgaatgtcacatcatgatgctagttgtcaaaaccatgtcctatttttgtaggtaattgatgacatgttaattacttgattgataattactataaatacttgtgttattcaaatatttgcctaaagggccaatacaattgactcgtggactagggattgttaacgcccaaactacgtaaaaaattatttatctattatttactgttttattcctttcttaagctctaatatattagtttctgaaagtctcggtaaacattaagaaatttaggattccataattatagatcatcagtcatccacattattagtttcctaaaatacaagttgtaagaatcatcttctct

SEQ ID NO: 81705 - DNA, 596 bp, Cannabis sativa
atctttccaaagctgggtgggaagggttaggtttcagagaataagagaggctatgatcaatggtctcagggttgcacgatttgttttccctaacctgggaaaaagggatacagtaccctatgacaccacgaacggtgtcagtggacagcaggccactacccaaggccaacggcccaccgtacatggccagcgtagcacacgaaatcacaccgaattcaaaatttgtacggagagaatttcatttgtacggagagaattattgggatcaggccattagaagggcattctcctaaaattattattggatactgatttataattaattaattagtattgtttcttaattgattattattattataataaaaatatgctttaatttaggcaatgtaagtttacataataaaaaataaattaaaatctaataaagaagacaaatttgaagaaaaaaaaatagataatagatttttttttattaaatttaacagggtcttttttatttttacacttcaaaatagtttttttgaatttttacggaattctacataaaaattcttattgcaactagccctgtaacttaaattgcaacaaaaaat

SEQ ID NO: 81706 - DNA, 1620 bp, Cannabis sativa
acaaaatatgcactcttttttttatcttttgcgtcggtttagaaatgacgcaaaattatttatggcatttcgaaaccgtcacgaaaaacttattgcgtcggtttaaaaatgtcacataaatgtcaagaaccaacaacatgtaacattataaaataaaagttaacagtttaaaccaagtatgcttcaaggaaggcacccataaatggtgtgacaagtaaccaattaaaagatctacaaatatttggaaacaaaaacattaacaaaactaaccttggtttcttgtttttttttcaatcaaaatatatatgtgaatctagaattgagcagaaattaagttataacataaaaataaaaataattaaattctaagtagcaaaatgtggtctctgtagccaatgcatatttgaaagatggtggtgtaaaaatagagacaagatcgatgtaaataaaaacaattaaattctaagaagttgaagttgtgcgagacttccccccagcaatgctagcttcaatcaaaaggatagcctctatatttccacttgataagatgtgattatctagcatgatagatctttgcatggaacattttatagccaaaacacagtaacacatagcaattaccacaatgccattcacaaggtttaatacattttttctacagataacttgaaaaaactaacatgtgaatggaagagtagagttcaaattttaccataattaaccaccataaaagtttaagagataaagcctatctataaatatccaaattggatcataacatatgtgttggtctttgtaacatcccaccagaaaacggaaaagatagaacgactaagtacaaaacctgattatttcagcaaaaaagaaaaagtacaatacctgatactgagaggagctctcgcacaaagcgtacatgatctttatactggctattgcaactacaagagccaaatttgcaccaggaaaagtcctttgtatagtatccaccagtgctttagcagagtccttagtgtgggctgaaaacattacatactaaaaccataagagatgcagcaactctaaaacaaaagattgcaaaatgtaaggagctacagtacaacagtagctctatcaactacaaaatgaaaataaccatacttagtattgtttaacagtacaaaacaaataattaacctagcttcgaaccataaacaaaaataatatcatttcaaaactagatttaaaattacagaaatgagtaacaatagtagagaaaaacactaaagaactacaaatccactagtattgtttaaactaaatcttcgagatatagccaggaaattttgtttcactaacttcatcaaagatattatacacactgcttttcatgtttctgatgatgataggaaagaagttacaatagcaaaccaaaaacaaaacaaacatcactacacctactctagcgaagaaagaaactgagaaagttaaaccgaccacttattcttcaagagaaccaacattggttgcagttaatagtaaataaacttgacagttgacaacaaatacagtagaacatctatttaagaatactctattcaagaataacctctaatttttttataaaataatcaagtcccgatt

SEQ ID NO: 81707 - DNA, 1004 bp, Cannabis sativa
caatctgtgttgatattgcactcactgcttgataatgtacagggttgaccacaaagttctgaaagttggggaggaactatggagggaaacactgccttttcaaatgggttctcgcctttatcagttacaaggacttaaatcttatacgtggtatgaagtaaagatatcatacccagcttctgtatgtatttcatgcctctgcgtagttgctttttctacatttagcaatctctctgtgatttctcaatggggtttatgtgttgatagataccagccagcttttccttagaactgaagaagggctcagcaaactcactacacacgagtagaagattgctcaacacagaaaagcttattttcaagacagaaagcctgagtaatgaggttcaattattctttttggaaattagattgaattatctcatgtgtcgtgtcaataaaaatctaaacctttggaatctgcagaatggaatgaatatcttggtgactgtggaacctgaggggtttgttgctaaacctaatgtgcctgagagagagtttatgcttttcaacataggtattgttgaacatattttgtgtagtctctctgacggttgatttcttactaaactgcttactcctttctcacctttaactttttttttttcagcttaacaattgctctttttcagcttatctcttcttatattaactaggacgattgaattgttttagaccaaaacttggattctacaagagtttgttttcatttttctggttatatttctggggataaaatgaaaatctataacatggccagtcacccttgagacttgagttagcctaatatttagaagaaaacgactgtttttccttactaaaacttactccatgtcatgtttcctacattgtctttactatgctctgctattgctttattccaccaggcatattctagtttgttttgtgtcagaccttgtaaattgggtactaattggcatgctatttactttagtttgtgatga

SEQ ID NO: 81708 - DNA, 768 bp, Cannabis sativa
cttaatcaaatttgcattttgtatttgagaagcagtgtacgtctactcaaagatgtaggcaacatagtaacaaggctacacatgcatgaaagatatttatgtaaattaatttataaataaataggaaaacactcaaacaatatacacatcattttgccttataatttgaagaatcaaattaattaaaaacactaaaactttttaatatattaaaagctttataagtaataagctaagcaaatgaaaaatatatatatagtttaatatgtaattaaggaatgataagacaatggttccttaactccacgcatctctcaccatgttccattcaaacttctatatgtagttattcatttatatatatatgttgagaattatgatcaaatttattgactttgataattattttttatgatcattacgtaactataagatatttataataaattaataatcaaaaccgtttaattaatttacttaatatataacattgtctagttaatatagctttatcttactcaatcaatatcttcatttttcaattaattattaattatataaaacttaataatttcatatataatgtcaattttttttttctaatcactaaaatataaatttaatatcatgtatatttcaaaatcgtacatatttatttcacttgtgatttttatttttaaaaagtcacttgtgaatttttattttgttaatacaatatatacatattatcatgtgacataaatattgaaaataaatatatatatatat

SEQ ID NO: 81709 - DNA, 894 bp, Cannabis sativa
  modified_base (55)..(83): a, c, t, g, unknown or other
cactctttccctacacgacgctcttccgatcttgatctatattaataagtaaatnnnnnnnnnnnnnnnnnnnnnnnnnnnnnggcataaaacccaacagttggttggttggttggctggccgggcgcgggcaggatgcctgcctgtcgggctgggcgcgggtaggctggctgggcacgtgagcaggctatccgcaggatggttgggcgcgcgggtagcatggagctcccctttgcgaacttttcaggcataacactaatgactctaaatattacacttagtaatcttttggggtcaacacttgccccctagtctataagaattctttaagtgttcttgtagactaagtttgacgagcttttatcttgacgacttaatttttcctctcttcttccttttgttacccttcgcgagtggcgtaggccttatgatttatcttagccccttttgaagtttgtgtttaccgtaatgaaggagttttagctcgttgagctttctcaaccttttatgggtcactcgtcgggtataagggagcttatgtctccttaggtcacatatgacctttttataaatttaagaccgtattgggagaacttgtggctttttatgtagcgttcatccctttacgttgcatttgtggtacttagagcacatttcgagtgttagaagatcggtactccttttagagaggcgtccctctcagagtcgtatccgattcttcttttccttttaatattttaagggagatgatggttccatgaaccgactcgaccttttgttttcaatgtttttaatgagaatgatggttccatgaaccgactcaaccttttgttgttgacatgtttaagggagatgatggttccgtgaattgactcgaccttttgcttatttaac

SEQ ID NO: 81710 - DNA, 1756 bp, Cannabis sativa
tattttcgtattacgctaattagtttaccattcaattaactttggagcaactaaaccacacctactcactttcaaattaaaacacgtgctatcaagtggagcccatcataataataacaataagagagaggtttattcgtagaataatataatagatggcctacatacctaattagttattaatgtttggtggaaaggacaaaatgttttgtttgtgggtaatatgacattaatgtactttaatggttattaatattatttttcttctttggaacaaattggttcttgaccaaaaaacattagtcttccaaagtttaccaagccagtacgtgagtctagtaaatgacatatatcatgtgactatttataggaatgggattaggaggaattatccttataactagaatttattttgctagcaatcatttttgaatcaatttcaacttccacaattgtagagttcataaccaaaaaaattctgcacaattgcacctactttcttcatgttttttccaaactaaagcatcaacattgagtttaaaacaacttgataagagatttctcttgataatatatactttatgtatatatatatatatatatatatatatatttgtaggtattttaaaaatataatttttaaattattgatcatcttccaaatactaaaaaagtgaatttataatttattgttcaaacaagtcttatataaaataattaataaattacaaccaaatatatatatatatatatactagatttatatttttctttcttttcaaactcaattctaacgtggtttgtaaggaatttaactatgatatatagaaattaatttttgtaatttcagcttcaagatcacacttaaataaataaatcaaattaaaaaccaaaatcaacaaacacatattaagctagaaaagataaacacagatgaatttagatagctttcaaacataacaacacacgagaattatactggttttgatcttaagtacaatgtgaacttaatcatactccagtttgaatacgctgccactaatctttattgataatgagaattagagatatcgatctcaagagctacaaggaaataatcatagtaagtcattcatggtgtaatccctcaacactcattaactcactaatccgagccaacataatcgaaaatgtcactcaatacaatgtcccaatcccaactctctctctctctctctcagatatctctctcaatttttcactataacttctctttctactatgttgtgtctctctagttattactctccttattctcttgtgaaatgagatgagtagtcctctttatatagatcaaaggactcaaggatacttgctgtcatatttgatagttaagttagttaatgaacaactaactaactaactgaatcttagttggggatttaacgaataataccccaaattctaccttatttcttcaagccctaataagctaagcatatctatccaatggagatggtagtactttcatgtgtacctacttagccaactaaggttgagtaagttcaagaaatacttgaacttactaataagtaacaccttagtgccaatatcagcagggttttgttctgacttcactttctccaactcgattaattcttcttctatcttctcctttatccaaaataatcgaatatcaatgtatttttccttctcgtgataaattggattcttgcacaaatgaatcaaggattgactgtcaaaatataccattgcc

SEQ ID NO: 81711 - DNA, 1236 bp, Cannabis sativa
tttttaaagaatttgatggttattattgaaatttgaagattgaaatgggcagacctaatttcgttgcatttcattgtttaacaatagttgctccttctctttgcctctattttgtagaaatatgacattcttttattgctgatgaggacaatgaatttacagtaaagatatctgaattactaaaacatgtatcatctgaatcaattacttaaacaagcaagcacttcctcctgttactcttgcagaaaccctaacttctctctgatcaaagcttatgttagtccacattctttcatttattttcttacttctttctctcttttattattatttttttttttttgttatcagattagaaattttagaaatatatgtttatatttataggaccactttgttcaaaaaaaataatttataggaccactgccatcctttttttctttttactttttgtcacttatattgaaaccattattttcatttttataatattcttacaatgatacatcttttatattattttattatgaagattagttaaggaaataattatatatttaacatatttacacaaaaaaaaaatacatatttttattcaaagaaaagaaagatactgttacaaatttacaaccatatgttatatgggaaaaaataaaacatgtgaatgaaagtaatgacccagggtagagattctgtatgtatctcattatttcacaaaactaactaatcagtctatcttcaagagacccaagctctcaacacttcacacttcttggaacaatcttagagtcttgctatttagttgaaatcactgcacaaaatatgaaaaatatgaataattagtcattattatatatatatatatatatgtgtgtgtgtgtatgttaccaaaaaaagtttgtaaatatagtgtcctttattgtccatataagtctactacatcaatatcatattatcatggtgcttcttgtgcaaacttggttcctacaaagttcagaactgatcagaatttaaccattttgcagcatctaggcatgcaataatgatgttattatgtatctaagaaatcttgataggacaaaatctaacaccatgaatttaatgctcaaacctagtaaaaggcaacatagtgataacaagcctagtaaaagcgtgtagtgtttacacaatgacagtgtccagtaaacatactacttgaaattatgtcaaaattaaagaaagcttaaagaagaaaca

SEQ ID NO: 81712 - DNA, 1360 bp, Cannabis sativa
acgccttgcaccaagtttaaccagttctcttgcttgccatatgctctgccatacaaagcttgggttatttccaagatcagcattaagaaaatcagatcgagggaaatacttagctttatatatttggttgacaagcgaatttggtgagatgacaagcgaccaaccttgtcttgcaagaatttcaaggttaaaatcatgtggtcgttgaaaaccaatacccccagagtctttatgaaccgccatctatcccaagccatccaaataatcccgttacctttgttggatgtggtcttccaccagaagttagccattagtgtctcaatttcagtgcagatttttttaggaataagaaagacactcatatcataattgggaagcgattgaataaccgttttaagaaaaatttctttgcttgcacgagacagaaaccggccaccactttattttttagaaagccaagtattgttgtctttttcctaccaatgatattaggaagcccaaggtaaagactatgctcatcagcttcaggcatccccagtgttgaacagatttcattctttagcaaaagatcagtgttggggctaaagaatatggatgacatggtgacattcactttttggctagacgccatttcaaaagagtgaagcaaggtgcgtacatttgaagctgcccccgaagaggcttgacaaaataagtaactatcatcagtacacaacatatgcaatattgatggagccccattagccacatgtcacccttggaggatttgatttaattcgaacttcttgataattgatgataaacccttaccacaaataatgaaaagatatattgagagtgggtcaccttgctggatttcatggggggggatgataggacccataacatgattgttatgcatgatggtatatctcaacgaggtaacacaagccatgataaggtttacccatttttccgcaaatcccatacgaagcatgacagctcgcaaataatcccattcaacccagtcataagctttgctcatatcaagttttaaagccataaagctctttttacctatccttttccgtttcaagtattgcattacttcaaagcccaccataatattgttcgaaattagtcggcctggtatgaacacactttaggttttagatataacaaagtcaatcatgttacgcatatggttggtaagaacttttgagccaatcttatacgaaacattacacaaagtagttggccgcaagtcacccattgaggagaagtttttctttttgggaatgagaaccaggttggtatcgttgagctcttgtggaaaaacacctgtctcaagaaaattagtaactaatttgacaaggtcagg

SEQ ID NO: 81713 - DNA, 1391 bp, Cannabis sativa
aaattaattgatgtgtcacaataagattctattaattcaaacacaatcttttaaatcttgattctacaatatttctacaaatgtctgtccctctctcctccacgtcaccctacactgtttgcagaatgacctcagtctgaaatctaacaatgtttatgattttgcaaataggcgtctgcaatttctgacacactgtgtttggaattatatgtccggagggccattttgcaaattaataaaatcaaggccgttggacaaaataatgataaaaaaaaagtgccaaaaacccaaaaattactcaacaacccaaaccaacctcataaagaagtgcctaatcaacaaaattttaatgacaattttaaaatcataactaagagattgaattagagggaagtcccactttaattaataatttgatataattatcttttttggaaacaataaaaaaaaagattgacaaatgtatcatactaaaaatcattatttatgaatgatattacaattgagggaaatgctaataaattccttgcaaagtagtcttctcaacaacactttagacatattgagtgagcctgaaaccgagactttaaacatttttagggtgcgtgaaaccgaactcatctttggtgtaacaccgtgacaagtgtgttgagaagactatttcaaaaataatcttttaacatggcctattttggcaaagtgatgttttaaaaaaatttattttcataaataagccaaaacagcaagctcaaaaatactgcctaaaatataaaagctattaaagagaaaacaagcaaatccgtaacacaagagagttctaaagttcatattttaacgataagtttgattataattcagatttctaaagttccaataaaaatttcatgctataactatttatgttaatcatattaaaagaaaggactagactagtattttaatatcaactgatgtggtatatttgttgaaaatgtataacaaactcaactgccacatcaattggtatcaaaattcagaatcctctgcattatttacagttaaaatgacatccaaacaccgagtatttttaaattttttgtaagtaatctaacgctcgaatcaatcgacgattcatatatcatgtccccattttttgcttctcaccattcaatagcagccaactcatttaaaatgacaattaatggacatttaaatgagttagttactattcagtgataagacagaaaaatgggaacaagagatttgagtcctaaatgattgcagttcgaaccaatgcataaaaaattgagggactacccaagaatgagcgcgaaacaaacaaggtaagttcgggagcatagttacttaccttccatatgaacatgtaaaaagatgttattgcagctttgctg

SEQ ID NO: 81714 - DNA, 1129 bp, Cannabis sativa
gatattctggtactcatcataatagtgatgatgatgttgatatttttgattccgtacatttttaaatttgttggcacaaacaaacaattgtctttatgtgtacgtgtgtgtggcacgtacgtattttgattcatgtggcaaccaaacaagattcaaacacatattaaaattcattttcaaaacaaagaaagaaggcaaagatttaaaaaagaaatagaataaatagaatttttacttttcaaatatgattttttgtacagttttgcccaataaagtttagtcttttgcaaaaaaaaaaaaaattatagttattgttgtaaatattttttttagttaaattttgtttatttttaaaataatttatttatgtgattatgaattatatgtataattataggataataatttatttaataattttaagttacttaaaatttaatttattatcattaaatgtactaattacatactatgaaagaatgtatataattttaagctacctaattttaagaacgtatataatttacatattttcataatttattattagactttattgaactagaatagattagcattagtaatatatcaataaattgtttaaataaatgagctaaatgcaactacaaaagaatatttgcaataattttcaaagttcaagaagtattttatgccgcaaagaaaaatttaaggaaaaaaacttactaaaggttatagttcaatatattaattataaaaacacataataaaagaaatgcaaatgcatattttattttacatacatattttccaaagtagtgtcggaattgctcacgccacatggggtcgtgtgggccattcaatctcttataaattagattttgatgtataaaattttaactatttttacgtttgcccctataaaattatttttattcattttagtcctatataatcgtatttttatccctataatgtttgtcattttttttattttatccccttacaaaatttacacatttttttttctctctaataaatattatattcttttttatcaatgttggcttttttttttacaatttttttgtccctaagaaaaatttattggctttactattggatgttaaattaaaatatataaaattta

SEQ ID NO: 81715 - DNA, 512 bp, Cannabis sativa
ctaagtgttcatcaaacctcatattgtattaaaatatgtataatacatttttaattctattgaaagtattttatttattcactacaaaatttacttttaaatttatgaacttgcttgaattagactcttaaattagagatacaatcaaaagtttgtgactaatccctctccttctcttctcatctttatttttagaattcaaaataaattcgaaaaaaataaaataaaaataaattgactcacctaaaactaataactcaaaaattacacactaaaattttaattaataataaaatgagaaaaaaaaaatgaactatggcaacaatttcatactaaaaacttcatattatacaactattataaattaaacgcgtgatcacaaataactacaataacaatttatgcaatcataaaaattaaacaaaaaaaactcatttaaatactaaaacaaataatagtgtacctaatatttcattgtcttgtatttttttctttttctccatcaacttgtc

SEQ ID NO: 81716 - DNA, 793 bp, Cannabis sativa
ttagatcaggcttcctaaactaattattacctttgtctcttcaaagtacaagtgtagaatagaagctattccaaatttctgagtcatgttttataattccattgaagttacttcatcttccatcgtatcatatgttgtcattatgaggttagttttgagccttcagaactgagaaaaataaaggttattaatgatgggagttgaactagtatataattgtattttagttttggtgaaacatattcattaactgatttacaagacatttcacagtatttgtctttccaagaattttggaaaccaacagtttgaatatattccttttcttcaggataagggtgccatatccatttcaatggggtcgtccttcttttaatgctggggatgcttttgcaatggtggctgcttcttttgttgcttttattgaggtttggtcttataacttagttatttgtttacagtactaattggcagtaaagatcgttgctacttgctagtacttaaatatgaagttcgtgaggtcacacatgactcttgagcttaacaaatgtatttgtttggagcagtcgattggtacatacattgcagcctctagatatgcaagtgccacaattccaccgccttctgttctcagtcgaggtgttggctggcaggtaccattgtgatctgaaattacttatcattttatcattaagcataataagcataatatcagacatacatacctgtcgtagttcagtttgatactaaactagtagatatgcctaaatgacagggaataggcactttactg

SEQ ID NO: 81717 - DNA, 951 bp, Cannabis sativa
aattttttttatgacaattatgcttccgacatagcaaaaattctaagtttgtcactactaatcaaaacacccttgaattttttatacaataacataattaaatttttattaaaagttgaactgaacctgattactctgaactggacttctacattgccacaacaagggctctccaccattcaaaggaagaatcccaacatttgaagatgaaggagattgatcaggttttgaaaatggacatgggaaaggatcacatttcagctctcgaaaatcggtcccggtatcttgggagttcagtgaagtgttgttggaaaggttttcttcattgctttgttcttggccattagtattagtagttgttgttgttggtgaaggtttactcacttgagtgagttgaagcctttttaagtccataatttgttgcataataaaactactactgcttctctgcttttcatcttttatctacaaaaaataccatcaaaattataccaagaaacaaaaaagagtttattagtcttaagactgagccaagtggagcatagataagagttcgaatttgctttaaatgagttcgggttaaaaaaataaattggtcgtgttcaggttgacaaaattaatatgagattgactcgttaataatcattagtatattaatgagttgacatgttcatttccattcgaacaagatccagttataaataggttacatgtgacatgtcgtgtcaattcgtttataaatgaatcatattttacacgattattagatgggtcgagtttaaatcaaacatatacatttaatacataacgtgaacatgaattatcacccttattagacaacttaagtggtcaagagaagtgtgtgtttaagtggtaagaaatttaaactcaattaagtatcaaattttcaaaaatttctctaatcttatcaaattttttgcataccttaac

SEQ ID NO: 81718 - DNA, 1263 bp, Cannabis sativa
  modified_base (328)..(332): a, c, t, g, unknown or other
ctatttagttataacctcccaattagaatataatttacttggtcccaagtgtattcttggatagaggttctactgtaataataatgtatgtagtgggtgcgttaaccaacgtaaagtcaccttagggtatcttcaattctcaaaatttagagagctctgttattggccaataagcacttaccataaatgacaccttacgattggtaagcgatattacttaaaagttattttttgaaaaatgctaaaacgcatcagtggtgcctagcaccctcttatgtgtcaatattgctattagtccaactaaatatcgggtctcatataatttaannnnntagcttttagagagtatcgctagtcaatcgcaacgggacatgtcgcaaaggtgttaggcactactagtgcataatagcaatgctcgagtatcttcaattctcaaaatttagagagctttgctattagccaataagcacttaccataagtgacatcttacgattgataagcaatattactcaaagttattttttaaagctatatggcatgcaatacttaattacaccaatagtaatatgacaccgagaagggtgctagacacaagttgtgccttttagcgattctcaaatttagagaatgtttttgaggtagacatattaagtagaaaaatattaagatgatgcataattggagagatagatgtcattctaaaaatttgcataatactatacagtagcattgatgctattcattttttttaataaaaaattaaagctaaaaagttattattgctaaaaattaagatatatatagaacattattattgggcactagtggtgcctagtgccacgggctcaccttttgagagccttccaaccatccgagtaacaatgggctcatttttcgcgcgatcgtgtgcctcgtgcacacttctgtctctcgaacaactcccgacgagtcatgctcgcaagcatccatgaatgcatccatgcatcgaggctctctagccaagatactcacatcgtccataagttctcgttatgataagacaaatcccaacatcggcgctcacctagtcacttgtgaccaaggtagcatgtgtggcaagatgccaacaccaagctgacgcgtcaacgcttctaatgatgccccattcgatattgtctgaccctcatcgtccaaggactcccatacgtccatggaccaatccttaaggcgccatgcctccacgcatgttggcaggccctcaagacaagccactaaactagttg

SEQ ID NO: 81719 - DNA, 687 bp, Cannabis sativa
atttctggagtctaggccggtcacaacatccacaagccagctgacatggtggtcaaagtcctagccgtccacctcctcagcaagatggccgaccagcccctcatcatgattccctaaggaaaacccctctatataggcggtggtctggtctgctcccaactagatctcaaatagcatctttccccgagccaacatgctctcaaggaaagcctcacttcctatgtaccacagattagcctagcagttacgcagcttgaactcatagatgagttttgaggacaagctaacgtaataatcctttatggtttgctggccatcaagagccactctcagtttctcctcatgccctgggagtttagactttagcgtagagatagaagcagcttgcgtggtgttctccttgttccttgtaccaagcatggtctccaagcgaaaaatcatgctctgcttctccacgaggagagactccatctcaaatatggctaggtccttttctagaagggaagcctccatggtcttcatcttctcccaaagagcatttgaggatccccgagagcgatcacgtgaagagctcaggttcatcaaggcctgaaagcaaaacaagacaaagtcaatgtcaaagtctagcactggctggctagcccctctctgaggctaccatggccggccagcccctcaaagatacaa

SEQ ID NO: 81720 - DNA, 1967 bp, Cannabis sativa
aaaaaaaaaaaaaaaaaccccttcaattacaggacagaaaagtgttatataagggaatataaatagctcgatagtcatgaactggcttaactgaggtgagagatatcaactccatctgggatcttaaatgtgtctgcagcaccaaacttcctatattcttcccctgatacagagtcatctccgttaccatcatcgtcttcatcatctccatgacttgatgaaggtgttgagggatcgcggaaacttctagacttacaatcctgtgtcgcaagcatgtttacctgaccaaggtgggagatttctacaacaactgtatcatcgttcacagggaggggttgcttccatggttccccatcaatcctcataaaagtgtggtctgcagcacctttgtgaaactcaaagcggattcgatgagcctataaccacaaaagaatgaatggaaacttgttagcatgataaacacagagtccactctgaaacagagcaaaaagctatcatgcatacaagttctgaacttagtcataaactattcccattatggcaagaaaactagcctcatatttcacttattacctgagcaagacgagttccgtgcccatttggagcaagcaaaacaagtccatgccaagcatctctgaaaccaacgacctcaataaggccatcatctacatatggggcagtcaagtctctctgtaaaattatacataaaggcatttatcagattgaatctttactctgaagataaggttaactactcataaataagaaaaatagatgacatgtttgaacgaacatctcgaagcttcttgctgttaggtgtcccccaaggatttaatccgccagaaaagctaggcaagttgaggcacacaattgaccttatactgtaatgagaatagagcatagtcaaagaatggcatggtagcaatagtcaaaaaaggaatagaacaacacaagtattgatggtgaagaactagagtacaacatccttaaattaattacaaaaacaataaaagaactttaaactagtgtatgacaaaggggagatgacaacatacaaagatttagaagagcaaaaagtaggaaaaacaagtttcaagaagctatttgaacactaatacgatacactagataacaaataataagactcactttctctttgtcacagataagggtttgaacttttgaagatgaaaacttcaaagttattattcataacatgaagtaacattcacaaagtactcatgactgatgggtaagcaaaacaagaagaatctcaacctagcgcctaataatagaaaattttagtatggtagactacatggaccattttattatggcaccagaataaggttgtgctagaagtagtagttgattacaatatgaaacacaaatcctagaatatcatatatcaattcaattatggctaatatataaagaacaattacctctgaggaatggtgagctctacccaagaaccttgttttttcattatgctcacctttgctaattgagctatgttcctgtattatgaaaaatcatggcagtcattattttataatttatacaataatttctgtataatgttaaagcagacacctcatagtagcatatgtgtgcatgcaaatgaagagaataaaccacggcaatcaaaatgtaagccaagagagtcttggtcatgtttgagatctacatactcaccgagaagagtggtggaaaagagaagcgaaaaaccagccttgactgcccacaatcttggcataagtactctgttttggggataaaataaaataattagtagagcacaatagaactattcaagcatgcgttgtagttcatgtattagcaaattgtttgtcatgcaaaaataacatgtgtaaaactgagaagtgcttaaaatggacaaataagttcctctaaaacaccaaagagaagcagtagctaagaccatattacacatttttatgaca

SEQ ID NO: 81721 - DNA, 1420 bp, Cannabis sativa
tggctagtattgtggctttaacactgatgttgttctgtttcgatttcaagcattgatgaagttgagctcagcctgtgatggatctcgagggtcctcagatgttattgaagagagagtgaagaccttgcaggcttcctttgtgaaggcaaagccatatctgagctggaggctatcccaatagagagacagagaatggtttctagcttagagaccatgcttggtgccagaaatacagagaacaccgcacaagttgccctcatctctgggatacagtctggccttgatgatcataagaaaaagttgaaggaagctctcgatggccaataggccattagggaggagtatgttgacttgtccttcgaacttacttatgagttccagttgcgcaacccttgagctaaactgtcatacatgggaaataaggcttttgtggaaagattgttggcccgtggaaagtcacttttcgagagccagatggaggtagacaaagtcgctgcctattgagaggggtcatcatcagaaactcaagacgaggagctggccgacccacatgtggaggaggtggctagccaggacactgaccagcaggccggccagcatgctggtgatggggccagcctagactctatggatcttaatcttgcggctccaaattcagctccttttgcccctgcacacatttacatagcatttttattagtagcattcaacattatatttgtactacatagacaatgttttcatgttccgcatagcatgtggctttttatggcatgtggccttttggctttagaacatcacttgcttttatgctccatgtggcttgtggcatttcggaacactgttttactttcatgtcctatgtggcctgtggcttttttagaatgctactttatattcatgtcctatgtggcatgtggcctttttagaacactactttatttcaaccccagagccctctatttttgaacactactagcatttggccctattgcattttttatcatggattatgtgactaaccaagtagtctttaatcctggctatcttcttatggccttgacaagtaagggtccaaatttactttgtcaagtcgaagtatgcttacacgacttagaggcaagtttagtagcttacactaagcattaaaatttctctgcataagttctttatgctagttcgatgtgttgtacaatatgggtgcccctaagtgaccatgtagacaagtctcttggtcacttgctattcaccaagtttcacagagtttgcctgagttctatcttgcgagggtaccatagtacgcatgtggaaccaaaagaataactttaagaagttaatttgtgagcaagtggtttttagacacaataaatagaatgtaaatattattattactcattaattggtctttgttgctgtgcaa

SEQ ID NO: 81722 - DNA, 670 bp, Cannabis sativa
cagattcactggttattaaagaggaatggggcgagaatatgggcataaataggtagctaaaataggggcgggatttatatttacggtacattaattgtccaatttctatctctaatcctcaatcacttctggttttttgtttattaaagcaattttttatataaataattaaagtaaattgatttgatagataggtcatcatcacaattctcagtctctccctctttaaccaaatggaacaaccgctaccctcacccatataaaagaagtggttactccaccattgatttagtagcttgttaatgttttgacctatttcaaatggctgttatatgtatgatttttaagtaattattttatcatgtagtaaaagtgaattactggtaaaatgttctattccctagtccacccgttaattttctaagaaaattgaaattatgatatcctaacataaatatagaaattaataaggaaaaaaaaaccaaaagacaagtatctttttaattagcatagaagatgacttatttcgtctaatttagaatattaatttaaataaattattttaattcataagttcacgtattaaattattaaaaataacccaacaagattttgtatgataattctttagtacaatgaaattttttgtaaatattttatgtttactttt

SEQ ID NO: 81723 - DNA, 1367 bp, Cannabis sativa
ttatctgttgcaaaaacaatttcctctaatttagttatgtgctaataggtgcaacaatagtaaaactcatgaactctgtactcataacagtagacgatagaacagtgaaaattagccaagcaagccaagagtcgggtattgtatgaaacaataaatggaaatgaacaaaatattgctcttttcggacctatgatgcagtgaatgaatactcaattcaagcatacccacacactaccaattccccactcaataactaccctcaataatgactcaaatacctactttagttgacgatactgtaacacattatcctacaattcctggggtctaacaaaaacattttcccagagaaaacaatttctgggagattaatctcatcccaaacataatatacctttctcccttggacacacatcactgatgatcccttagataacttccttgatggttattactatagcttttaaaggttattattataccacctcaaacatattcttgattgttgggagtttgaaaattttgaatgggctttaatgagccttagttcctgctttcaaggtacagtaatatcaactccaactatatcaacctaccctatatgagtaaatcctataccctatatgactaaagcctaatctcatcataagagccatctaaaccaagtcaccaaaatcaataatatatattcatgtttcgttacagtatggtgaatttcatgacattgttccacttccatagaagtgaagtaactaatcagtaaaaatcttacacttaatcagattcccaattcttcaaaattcaaattcaaattcactttatcaatatgcacaaaaacaatacaaagaagaagcaaagattaataccaggcgagccactatattcccagctgtgacctttccgggaccataaagaactccgggataaacgactatgattgggaacccctctaaggcagctcgtaacgcaatcttatcagcagcagctttggatttctcatactcagtgcaaaaaaacttttctggatgaacctgacatcgtcacagttcttgataagagaaacataactaaatataaatatataaaaaccttatatatgtatgactgaagtaactgtacttgattctcgtcagctacatagccatcggttggtcccagggcgaaaaacgacgacgtatatacaaccttctccaccgtcttcgtctctctaacagctcgcaacacgttctctaatccacctatattgacctaaatcaatgtaagataaatttcaaaacaaagttacagaagtagattacattttatcggaatcagaacaaggaagtgtgctcaccgagaagaatttagaaggatcgggaagccagggc

SEQ ID NO: 81724 - DNA, 2037 bp, Cannabis sativa
ccattgagtgatcgagttgtcatacggtgaattctagaggctgggggagggttactagcctgtgtgtctacaacttgaggagtaggaaatggatctggtgtaggttcagttgaggatgtggttgatttggttgtgatatcgggtcagggatacatgagataggtggtgaggatgaatgctgtgttgttgctgggacaatgggaggagggatatggtcacatgttggcccagtggaatgttgaagcaccacaccaggaacaataggattattagcagtggtattaaaagtagcagtaggaaaagcatgagatgagaatgatacctgacttggtgcagatgcagacaaagtgccaggatattgagtctcattaaaattgacattccttgcaatgtatattcgaccttgtgcactttcacaaaggtagcttttgtgatatggtgagtaaccaagaaaaatgcacttctcagacctgaaatccatcttatgagagttatagggtcttagattgagggaaacattcacacccaaaaggtttgaggatggtataatctggtgattgaccaaaaagacactcaaaaggactaatatcatcaagaattggggtaggtaaacgattaatggtgaaagtagcatactgaaatgcataccaccaatatgagaagtctaaccgagactgtgctagaatcgtaagaccaatttcaacgatatggcgtgttttctctcagcctcccattttgttcatgagtgtgagggcagggatgagagaaaatgatgacctgatcagacaaaaatctcttgaatggcttgtattcaccacccccatcagcttggacacctttgataggaagtccaaactgtttttcagccatagctttaaactttagaaacgtatccaaagcttgagatttgagggagaggggatagatccaggtaaacttctatagtcatcaatgaaatgaatatagtatttgaatccatctttagatggtatatgggatggaccccaaagatccgtatgcacaagttcaaggggttgactagattgggaagcaatttggacaatgtggctaaagatgggtgaccaagcttgcaatgccaagtattaacatcaaaacatttagaggcaaaacatgcaataggcacagatgaactagaaaatggttctttattgatattcaattgagtacaatcagatacatcactttggacagtagaaaatcattcttgattggtcagattacaacaagaacattgaacagaatcaggagtagtagttaaaagacattgtaaggctgaattggacttgaccgaaccatcactaagcatgtatagcccatctttacgctttcctttgaggagaagagcacctgttttcttgtccttaacaaaacaacagtttttgtgaaacttaagaaagatgtcattgtcatcgaccaatttagaaacacttacaagattcttagttatgttaggaacttgtaaaacagattgtaagtgcaaaggacaagaagggagataagatggaataacagagttgcctatatgagaaatgacaagtttcttaccatcacctatagccacggaatctgtgccagtgtaaggatgttgagtgtcaaaggtcgagttgtcaaaggtaacatgagcagtggccccagtatcagcataccacgtgttgtcatcaccaaaatcttgaaccatggtagtggtgtaggtttgagggtcatattcgaactcaagttcagtgagatgagctctgggagggggtggatttggtctaggcacaacccagttcttgtcgaacctgtagtggcacactggtgcagtatgacccgatcgaagacacacttgacatatgacacgttgctgattgtaacgtggaaagcctctacctaggccattagacgattggggatagtaagattgattgttcttggctgtggaatatggtcgaacacctcctgatctaccattagcaaaggcaagatttgcctgcatcttgacttcaagatcactcacagtttggtgatgttccaatc

SEQ ID NO: 81725 - DNA, 1445 bp, Cannabis sativa
ttttaccgctgggcactatcaatgccatacttaagatgcatcgttgaaatcaaaatcagtgctctaatccatgatattcatgttggcttctatggtgatcacacatcaagtccaaactaatcaacgaaaatcctttgacaagggtatttttggccgaaaatgaagaaggatttaatagaatatgttcggaaatgtgaacaatgccagatgtatgctaagattccatgtgcaccacaaactaaaatcacacttatgagcagcccttggccttttacagttttgggtattgatttagtaggagccctccccactggaaaaggagaagtcaaatacatgatagtcgcggttgattacttcactatgtaggttgaggcagagccgatgaacaccgtcacctcaaagaaggccttggactatgtcatcaagaagcaaaagcgattcctgtagtagcggcgagcaaaatgggagcagcctaaaccgcgaaaacggggttgtgggagagcaatacaagtgtcgtactgctaggcgaagcggtggacatcgtgcgtcgtttaggacttccatacaagattttttctgataatgtgaaccagtttgatagcaaaaatttcaccaacttctatgcccaacatggaatcgtaaaaaatttctcagctgtagcccggccacaggccaatggacaaatagaattcgtaaacaaaattatggaaacaacattgaagaagaagctccgggcatgcaaagctcattggctagaagagcttctgcgaggtcttttggcctatagcactacagagagaactttaacaggacacatgccatatgcgatggcttacaggtatgaagcaataatcctaatggagacaacgatcccctctcaccgatgagaaaactatgatccttcccaaaaccactccttactccaggaattgtctgatctaattgagaaactcggggaatagtcataggtcaatctcaaaatgtaccaaggcaagatttcctggcacattaactctaaagtcaagaatagtacatttgaatttggggaccttgtcctgagaagagtattcccaactttgcaagaacaaggagtggggctactcaggccaaactagaaaggcccatacgaaatacttcaaaaatgtgggcaaggaatgtttcaacttaaaggccaagaaaagtcgcctgagtgttaccatggttttagcccaataacaagggaaaacacctaaaacaaataacatcctcaaccacctttccaaaagcaaacctttgtaaaaagtagtggtcaggaaatgcttaaaacgcgaaagcctaaccttccatgaaaaaaaaccatccctatcaaagcatccttcgaaaacactatgtgtgggtagttaagtactcaatgcacttaaaaggcactatgccttgtgatagcttgatgctctgagagaaagtta

SEQ ID NO: 81726 - DNA, 1350 bp, Cannabis sativa
aaagaggaggatggagaacctaaaacagagcaagagttagccaagtgataagctgaattgactttaaagttacctgaaggatgatgcccccaaatgagccaatcatcactggagggatcaatcaagatttggaggatagcttctacttaataagtgggaagatggtgctaacgtttccttaagttccaattccccatcagtatcaataaaaaaaaacaaatagtattattaagagaggaagcatcattcaagaaggtaagagaattcaaacctagaatccagcgggagtcagccaaagagatggaattactattttccaatctctaaacaagcccctttataagaagatccctttcctaagtctcccactcttgggatatactattaaacctaaattgggattatctgctaagaattacggtagagaagtttatgaatgtcttcgtggtggacttgattttaccaatgatgatgagaacataaatttccaaccatttgtgcgttggataggctgtttcttattttgtgcagaagtaatttataaatcacaagctgaaacaagggaaatcaaaagacattacttgaatgctactgcaggtacatgtgaagaaataatccaagtgagaaaagaacaatgacccttagaagcggtaagaaagtcgttttgtttaaaatacctagcttttaacaaacaagaaagaaggaagttttgatttgacccaactctccaagcctgctagcaagcattggttatgattggtgatagatcgaaatccaagtctcccaaaaaattttgagacacatagactagaccaatttttccaaaagactttgtgtttgttattagaggatccccaccaaaaatttgcaataagcctttggagattctcgcaattatgcttgggcagcttgaaacatgacatggcataggaaggaatagattggaatatcgctttgatgagagtctctttcctagctttggaaaaaaacttagcattccatacattcattttagaagaaacattttggaccaggtaatggaaaagagagttgtcaaccctaccaacacactgaggaactcccagatatttgctacaaaccctcatttctaagccccgggtggttacaaaagctatctttagccacaagattagtattaagggaaaacagaatagaagatttagcaaaattaaccgactgccccgtagcacgattataagtagctaaaatacttttgattgctaagctagatgtctcattaatcgaggaaacaaaatattgtcatcagcaaaaggtaaatgagagataacttaggcatttctacaaatagcaataccagaaaactatcta

SEQ ID NO: 81727 - DNA, 1256 bp, Cannabis sativa
tttgttatacaaatgtgttttatttaatcagttagtttatttcaattatattttcttgtaaactattagaaattttaaaatttctaaatggttataaataattattatgtatgcaataataaacaaaaatattaaaaagactctcatagatacggaaacgaacaagaatgtaccataacaattaaattagccttataaagagtaattgttttttatttattaaagcgtttatatattacaatagcctaattttattaatatattctaaaaaaaataggtaaaaatacaattcgcttgactttcttatttggcctctcctcgaatttttgtctggttccgccactgacaattgtgataaggagtgtacttgaaaattacacaaaacaaaataatttgaatttttcttaaattaatgtgggtcatttttggataatgtctaacaagtttattaaacaagttattttaacatgacaagtttacactcttatatttattatatttattacatgtaaattgtattaaactaataaaataagacataaacatgttaaatgattcataaatgtattaaaaaataattataaagatgttcaatataaacattatcttttatataaactggttattcaggtcagaccaacccatttatgtgaattttgtttggacactattaataattggaccaagtttgagacttgtaatactgaaacctcgacataattgaatcagatcagatctcttgccggcggccaggcctctcttctctgtggtttctctcttcccatcaatttaggtttgttttcccttttctttaatatgcatatttttgcttctgtcttcaaattagggtttcatatttgatttttcaggttatactaattttactactgtctttgaaattctaaacaaaatcaatcaatgggtatcaaaactaagtttgtttctatgttttgttatgaatattagcagattttgaagttgcaactgtttaatcttcattggatttaagtcaaacatgaaaaaaaatatcatcttgaattgattgagtcataaatatgaaattatactgataagggtctggtctcttgagaatcatcaatagtagttcttgatctcaaaacctaaacaactcatttcagggctttgttctgttgattgattcaacatgaagttatgtagaaagtgtatgcaataatggaattgtcaaacaattttagattactattttgtgctttgttgtgtctccaagccatttg

SEQ ID NO: 81728 - DNA, 830 bp, Cannabis sativa
aatctttaattaaaatatgaaaaaaaaattattaatttcttttttatgtaacaaaagtaataaatagtctaaaaatgtctttctttaaattttaaaataaaaacatttactaatatataattctataatttgaagtcatttgctataatttttcatatttaaaggtacaaataattactaaatgtaatctatattagtcataattactaaattaaatatttaaaagaattactaatgataatatacttgaaacaacagtaagtagtgctgatttcataaatatatatatactgtatataataattatgctgtgtatatccaaacaataaacatacaacatcaatgaaaatgtatgtggttgtattttaattgaggtgataaaatataagagaggggatatggaaaggaaatgtgggtccactgagaaagaaaatatgcgaaccaacaaaaataggaggtgtattgaccacgtctctacaacgaagattagcaatgcaatgcatgtgcattatggtttttgtttttgtttgtgttgtgttgtgttctgttttattttttttttcttgtggcagaaaattaattacaatatgcattacctttattaactttgtattttaatgcatatatattgatagatcaacccgtgtctaacttttatggtgactaggaaaaaattttaaaattaaattttatttgagaaataaaataaaattcaaataagaatttaaactgcttttctagttattaatcagacttacttattaataaagatcagaaataacattttatgttgcatagttcacatgatttttttcatgattatatgtata

SEQ ID NO: 81729 - DNA, 1052 bp, Cannabis sativa
  modified_base (1009)..(1009): a, c, t, g, unknown or other
gatcgaggagaaattccttcagcgctttacagttaaagctatcgtagccactaccacctcttctatctaatttcacaacaaggcattggtcttcaatgcaaatctgtaataaatcgtactcccgatctttgtgctctgataattacataaacatataattaattatttcatcaattaaagactgttggttcttgaaatttaatatgaaaaactttctttcttgtacctcttttatagtggttcatggtgccactgtcggcgtaattgtaactgcgatcggcacagagagcgacgatgataggacgttgtttacggatcttcttttgcatgtccataacccattttctggcgtagtcttcggtgtcgacccagagggtgtgaacggcgaatgatcggcggcggccatcactattttcggcattgttattgttattattagcagtagtgatgtcaacgacgaagttgaacatgtcgtttgggaaagtacgtctgatgcttacttccatggcttctttctctctgtgtttcgatattggtttgtgaagaaatgggaatgttgaaacttgacaattgaggaggttgttttatgtggcgagttcttgtattaagcgagaaattaggaattcagttaaggtatttaaaatagtttttttttagattatatatgtgcagagactggatatgagtacttgtttttcaagaaaaaagagattaatagaataatttgtaagaatttataatggcgttattatgaagaatagtagattaactactgtaatagtcccctttatatttatattaatcattttaaaatgcaatattaccatcgtttccttacaaaactaaatatcgtgttaattattattattgtaaaatattgttaattagcgttaaaggctactaatagactttttatttaggttatgtagctaagtccctccctaactctataaatgcagtttgtctcatcacaagtatacattttgataatcagataaataaactgctnctgatttagagatttagggagaaagacttagttgatagtattg

SEQ ID NO: 81730 - DNA, 1324 bp, Cannabis sativa
  modified_base (316)..(319): a, c, t, g, unknown or other
ttaaagaaatataggataaaccgccaaaccgaccaatgtacagccctaaaaaaaatacgtcgccatgcatttttgagatgacagcttaattgacacttaacagccaaaaaatactatagctgcaacaaaatcgtaaaataaagtatttttaccattattttttaatatatatatatatataacaattacaaatattaatagagttttctctcacatatcccttacaattaatgaaatttgatcatctcaaattaaaaatatatgtaaatatttattattttgtattttgctataaaaaattaatatatatatatannnntatatatatatatataatttagcattacgatgcttcaatgcaaaataggaaaaattcatgcaagatttattttttatgaatgtttattactatttagtataaaaaaataataataattgtatatttatgtattttattagtaattactaaatgcaataataatataacaaaacatgacataaaaataaggaaaatttgcataaattattattttttttttttgtagaatttatactattttatgttcaaagtttttcttttatatatttttatgttattctaaaaaaaaaaaccacatgaaagtaataaaaaaaacaacaacaaaataacaacaaaataatataaaaaataatatacaaataactaaaaattaacaaaaaaataacaagagtacaacgtaaaaatttatcaaaataatgtattttatgtaaataaaatcttaaaaccgtaaaattgtttaaaattccatacaaccatatttttgtaattttttttttgttattttttgtatttttttaaaaatatttcctaaaagtaaatcaagagtattttttctaaaaaaaaaaaaaaagaagtagtatttataatgatacaaaatttagcacaatttttagcatattatttgagtaaaatccatctaaaataaattatattttagcaatatataacaaatttagcacattgaaatctaacttcatatacttcctaagtctcaagtcgaattatacttactcattaatatttatgttttaaaaatatagtatattgtggtaaataatccactcaaaactaaaccagtttttacctccactgttatttgaaagttagttactttcagttataactctttcatcttgtatcagttagttgttagttattgtgttagttattaactaacttcggttgaactgttaagagctggacatgtcagcatctaacaggttatatataggctcaattcatttgatgaaaaggagcagaaaaagaggtagagaagacaagata

SEQ ID NO: 81731 - DNA, 1101 bp, Cannabis sativa
  modified_base (61)..(62): a, c, t, g, unknown or other
atgttaattctgatctatattaataagtaaatctgattacattaaaatgagttttatttanngcataaaacccaacagtttcaaccaggttaacaagttttactttttatctcgagattgaagctctcgagatggtctgaaccgttcactgtggtcaaagtttttccatatggagccgttgaagtaacaagcgagaaatttagaacttttaaagttaatgggcaatgtttaaagctctacttgggtggccaatttgatcaagccaagtcgccattctcttggtgcctttgtgaaaaggaaatcagcgcccggctaaatgacattaacgacaatgcttttgggaggcatcctaagtttttacagtaattttttgttaaagtgagacaattgcagtgtgttttgttttgtttattttgctcatttttcatgttttagacattttattttctgtaaaatacttaattaaaatcgtgaaatacgtgaaaagaaaataaatttggggcctgttagagtggccacgacgagcttgaattatggccgcggtgaatttgtcttggtcgcggcaagcttgacttattgtcacggcaagagttgggcagagaggagcaattttttcttcgaggcacagtagtcgtggtgcggaagcccagataaccaataaaagcccaactcgggctaaacacaccccaaacccccaaaatcaaccctaacactttctaaacctattcctaaccttcatatccaaaaaattcattcccatcacccaaaactcccattatcatctcaaaaactcaaatttatttctctttccatcaaatcgttacttccaatcacttccaaacatcctttctctcatcaatctctttttttccctcaaaatcacccctcaaatcactcattcacacccaaattcgaaaattcacaattcatcttcttcaacctctaggttttcaagaatcttcatcaatggtggttgtctaaggtgtttctcatcaatgtaagcgatttcgcatatatattcttcaaagatggtgagattattttgggtttttgttattattaaagaaattagtgtgtgcatagtgctttttgttattaatt

SEQ ID NO: 81732 - DNA, 807 bp, Cannabis sativa
actgttatacagtatttccttgaaaaagaaaaaaaataaacaagcctaggaaaacaaatggacattttgtcttggtacgcttctctagaggagtggaaaaaaatactttgggatgaatgggaaaaagtttgcaacaatagccacgtctttgtttatccatcagtagcacatgtagccaatatgagggattgctacactgtcttccttatcagttttaatgaaaaatttgacgagaacaagaaaatcgtttgcaatcccacttttgaattatacagctctcaagaagcaccatttagaggaagttcagagtacatggatctccaaaaggttatttttgagaaaaaccagactactccaccagaaatttggccatgaatagaagatgatgccctatgggaaatattttcctcagattattcacaacgcatcacaaaggctttagaacaattctaaatttctaaaaatagtcacaatcagctccaagcccctaaagcaaagaagaaaaattcatcactatttaaagaaatagacactataggggtcctactccgtaagacaagtatttttgaggattcacaagatgcatgcatggaccaagaaataaacatggatccctatctctttcagtacaatggactggaatgggataatatttattttgaatattatgtgtgttcactaactggaagtgataaagattatgaaccatcaggttggcaccaacttcaggaggaccccaattatgactcagactacaatgttgatcatgagtaaattattgatcgctaataagcagaacaaagagat

SEQ ID NO: 81733 - DNA, 1743 bp, Cannabis sativa
aaagtttaaaacatctaatgtagtgtatttttagtttggttttttaaatatttaaagtttttctattttaaagtatttgatctaagtgctctaagaacattttcactggaatgttaaatatgtagtgtactattattttttgacactttttaataaaatacttttccaacagtatgctttgagttgtgtcaaatttaacataagatataacattgtgcagggctgatcctaaactatatggggcacgaaattaaattttaggaccctaaataaatagtttgataattattaaaataataattctagtattttggtgtagtggtaaaaaaaaataagttttaaaatttttaaggttcaatcctctaaatatttctaaaaaacaaagtagaaattaaaaattgatccatttacctcattgctcgcctcacctcagggccagtcctgacattatctcaaatttgatacactataaattctacagagatttggagtacaaggaaggcaaacacctttcttgtggctagagggatttggagtacaaggaagttcatttttgataatagtgcgtggatcattactcaagattctaatctcgacctatggaatgctccatggtcttgttgtgatgctgtcacttttaccaatgctgatatcaatctgcttactcagtcaaattgtgtggttgggggaccttataagccttgttaaatgctagctggaatacaaagcttattcaaagaatctacaaacctcaagctaccactattatcctcaattgcaacttctcgactcctcctcttattgattccttgctttgtaaatcctcgttgaatggtttcttctttgttaagaatgcttattaggaccttaataagcctacgttcagggcttgcaatgaaatgtgcaagtgtattttgaagtcaaacttccatgagagattgaagttgtgtcctttggaatctgttttccgatgctatcccttttggtttgtgactgagttgtatctttggtagtacttttggggcttgtgttctgcgtggtggggagaatagcaactttgctatgcaatttctcaactactgtcttattacaaagtctatttggttcgattcgaattgggacctctgcattgatactctcctgctccagtttggaagagaagttgttagttggatgttggatcctatgcttccttttgtgaccaatgcttctagtgtatggagttcaccatttttgctagcattctctactataacatttggcattttaggaatgagaacttctataatgatggtagtgtctctgtccagaccatcatctctaagatccatcggtgtttcgcgaaacattggtgtgacagtcagagccccgtgatccgaaggggaaagactgggagctgtgcaatctcacatcatctggggatggtcaagtgtgatgattctgagactgtgtatgtaatgccctaatactaaagtacgctacagtgatttttcaagctaagtggtatctttgctaatcaaagtattttttttttttaaatcgttcaaattaaaacttttagaattaaccatgaaactttataaagtatatataaatatttacaagtgtcgggatctcattattaaaatttttacaaaatattctaaatacaaaagtcatgtcgcacaacgactacaaaatgaaaaccctagatgtcccgagaccgaacactccaggtcgcgccaccatgacatgtacaacctc

SEQ ID NO: 81734 - DNA, 2191 bp, Cannabis sativa
ctttagtttggtaatagcctactcgccttagaatgtaattacttgagaacaatgaacacaatgtttcctctcttaaagctctcacaataaaatctctgagtactttctcttagatctctctctaaagaaattcttttgtttcttatcacagtgaagctagatcactatttatagggctaaatgcatgagggaaggtttcccttttgcttacaatatctataattggtaagagcatacattacatatttagaatacatgaaatgggggatagagacagcttgcgtatctctctggcaatgatctcatgattgtagggattccttttacgcttgagtttcacaatatcagtcctggaataattaagtcttgatacatggctcggatcactctttgctcgggtcatctactcttgctccgctcggtcaagcaaactttgtgagtgcagatgtgttgcttggagtctgttcggaacattcttcttgtcaagcgtaaagaatagctgacacgtgtcactagtacatattgccacgttatagtgcaaaaaagaggataacatttgcccccaagtatgcacgggacttccaaagtcgcgcgtagacttcactcagtttgaatttgtgtttgaatgggtggcacgtgttcgatgcgcctgttggtgatccgatgtgattctgaccaaaggtctttcttatatttggctcataaatgttgattgattcgtacctcgaactccttcagaagtttgcatgcttttgacgattgctcttcctcaggtaattgattacttgatggggggaaatcgaggcatttaaatttccaaatggttataattttcactaattttcttataaataggacaaaaagtcctaataaaccacttttagcattttcttacttgacgattttagagcaagaacactttttcctctcaaatccttcgaagaatttcataaagtgtcaatcagcgtcatctgagcaaccccaaagcttcaaaaagtgagtaagttcttcatctttttctcctttaacatttgaatctttgattttctgggtttcctttgtagaaaattcgatagtcttgaacttgttctaggaaaacgatggagaatcttggtttaggaatatgagattttgactgtgcttgaccatataacttgattgtaattgcagtctgacattaatttcatgatatccagtttcactttcccattcggggtttagtgaagattaacccttaatctgaagtcttgaaatttttcggttatgaacctaaatcatgctaaatttcccctcttaatcttttgatcggacctggtcggtatgctttatttgtttttgtttgataattaaggggacatcgaagtgcaagcggtggaggatcagggcgaagccaatcctgacagtccatctgaagccgaggaggagggagttgctcggggattgccctttagtggttacaatgaggaaggggaacccgtgtccgaggccggtgaagtcttggtagatggtgatgactacatcactgaagaatacactgaagttgttcctcaaagaaggcaaggtgccttacgagctcggtgggtttctcctccatctatagtaacccaagccaagatgaggaatttggagagggacagatacctggaaggtgtcgaatgctttttcccatctccaaatcaccaggcaactagtccaagacaggtatattatgcttggtcgggtgctcatactaagcagggtgcaatactgcttttgcttccgtacttcaagaggattgcggattattatcatctctgcccgacccaatttactccaaaaggcatcaaatatttatccgctctgttcatcctctatgtttcccaaggatgggttgagccatctccgcacgacaccaactggctttttgacctgaagtcaactcctaaacagagcaagtcggggtatttctacttctcccaattggacgagaaatggctgaagggtactatggacactgatgttagtaaaatagggcattttgtggatgagtactacttcgtgcagggcatggataccgtccacactcggttcaagaagatttccttgtactgtcgtcctcctttcacattgggactcagggagagggcacaaaaaattcttcaactgtcagaagctgcttggaacatcacttggttgaccactgaggccaact

SEQ ID NO: 81735 - DNA, 1859 bp, Cannabis sativa
gggcaaagtctatccagaaagatactccgactgggatacttttagccaacaatgatcaaggatttgatggactatgtcaaaaaatgtgacaagtgctaaagattctcaaagattcccagagctccacccaatgagctcaggatgatgaagtctccttggcccttcgtagtgttggggatagacctgattggtcaattcccaaagggaaaaggaggggtgtagttcgccgtagtcgcagtagactactttaccaagtgggtagaaactgaacccctaacaacaatcacctccaaggaagtccatgaatttgttgtcaagaacatcgtaagtcgattgggacttccacaaaaaattgtgttagatattggaaagcagttcgacaatgacatgttcactgatttctacaacagacatggcttcatcaaaagcttctcagtcgtggcccatcctcaagcaaatgggcatgtagaagctatcaacaaaatcctcaaggacaccttgaaaaactgccttgaggaagcaaaaggcaattagcttgaattgctcccagaggctgagtcctcatagaaattactgacactttctgtgccactcctcctaccgtaggatcagattccgtcatatcctactcatttcttcattcttgattaaagtttttctaaaacacttgtcccgtgtaggtgacattagctgattttggcttggaaccataatttccacctgatgcgggtgtttatcttgctctttccaacacttctttttcttttgtgctactggttaattcctcaattctttctcggtactttgggaaattgtcatttgttgcaactcatcacccttgagttgtggttcagacccacttgtttggccgatctcttactgattttgagttttgtctactctagctcgcatgtcgaccattttgggaataaacttttgcatagattggctggcatcctcttgatgttgtctattttcatcttgattctgctggcatctttccttagccaagcgctattcttgttggaatttatcttctgcgagatgctgcatttcatcattgtgtttgtctcgcacaatcattcctcattttcatggccaaagcagtagtcgaatcaatgatagggttggaggtatccttcacttggaactactgccttcagtgcattctccagggatttcttggatcccgtcttagtttgtaacctagtcctcaacttcttcattctggtgattcccacatacaacaccaactattgatgttgaataatagctcaacatcaaatttgtattttgactgagaattctttacataagatttgatctaatgaaagtaggatctctatcagtttacacaattccctctaaattctctcaatcgttctattttgtctgcttctcgagctcaaaatgatctcgaggatgtattccaatagaattttgactagtctaatgtgagcaagaatttgttactctttttgaatgatggtatctcctatttataggtgggagtggtcattagttctttgtctttcttccaatctgattggtccacatggattagctcttcactgcttctttgtgtgtttctttctatccatttgtgcttttcaaaactctttaagctttgctcctttcctttcagctcttgcttcgccttttgcatttcctgctctgccttttcccctttaaatgaaatagtgcatttatcgaacctgccacattaatttattagttcttttcatgtataatggatagaattacttttgtatccctaaggttatttttatcacttacaccttatttattatttattatttttttgtgatttattttttttttgttacataaattatcta

SEQ ID NO: 81736 - DNA, 2432 bp, Cannabis sativa
aaaaagtgctaaaaatagcctaacagctccctagcctacagcgcccagtgcccagcgccttagcctgcacgcctacatcgcccagctccccaagctccacgcaccagctccaagcttacttcttcacgcgcgtccagctgggcgcctggctcccacgtgtccaatcttcttatacaaataaaagtaaggagaaaatatcaaggctaaggtcgtttaagccaggacatttcaaacaagatagcgaatacaaaatgaatattgataaaggagacaaagttcatttcatctgaggtacaaatagaagaggaagttttggtccatctaaggatttctgagacaacatgctacatgaagtactaagttacctagtgtgaaagtgacctgacattctcaaacttagggatctgatgaagttcaaaattgtaaagaactcactataaatagggcttttaaggtcattgtagtttaagaaaaagattaatgaaacaagagttttttttagaaaattttaatagtctaaagtttttctttgaaagttcttctattaagaacttagaatatcacttttagttctcaatatttcattgatgagttcttaccttcaataatttggcttcgtcaatgagaacgacaagcgctagctacgttagttcctaaaccattcactacaatcttaaatatgtcgagaaattcccatcgttcttgaaaaaatggggttcacttaggtaaaaactagttgaccaccatagtaagagaacgtcaacctccggttgccggagagggccagaggaagagtaaccaaagtatggaccaccatgtaaatacttaaaaagggcccgtagcactacgtgactcaataatgacatcagtggctagcctcattgatagaatattcaactattgagagggccatctccggtgcggtgccttccaccatttgcgccaccaaaccccgacactttaaggaataggcctcgaaaagaaaagcaagcgtacttggtgagttcaagctctcgggcttactgctatgaggaggaaataagggacctccactagaagaacaagaggttagaaacttttgcggttggtatgaaaagagtgttaagtggcatactcaaaggcaaagcccaagcctcacacttttgtaacaaaagccacttagtgggaagcaagatcttaactacatatgttgaaaaaggtgattctatgtcatccactaataacaccttaagagatgagcacagaaagagcctattgcgagacaaaagctcaacgggccaattgagacaactagagcctacccactatgaggggatttcgctgagggaagcacctcatagcctaaggaagagacttcacccatatggtctcatgctaggggcactttgcctatggctccccaccaagagcaaggtaagtggaaggccttattcatcagctttagtggaaagttacacaatgtttagataagaagagcaccctccacgggccctgtgcaaaccacacaaaagatccaagttccactcgctaactcccaagggaggatgagcagaagggtgaaggagttagaggcagaaatataagacctacatcaaaagatagctatcactacgaagggggacttgaatgatgacgaggattttgatgaagaatcccctctcacgatggagattcaaatgtaagcattcccaccaaactttaaggagccacatatgacaccatatgacggtctcacggacccaaagtatcatctcatcgcatttaatgagttgatgaagataaaaaaggtgtcgtgtaaggcaaggtgtcaatattttgggatcacagtaaaaggagttgcgtacaaatggttcagacggctaggaccgaggaagatcacatcttggaagcaactttcagataaattcctccaacaacatcaggctggatgcaataatattatgcatgtcacaagtgtcaccaatgtgaagcaagggagacaagaaaatttgtgaagctacatctagcgcttgaacaccaaagttaccaaagtaggaaaggtaactaaagatgaactcaagttttctatagtcactgaagtacaccttgggagtgaaatttcaccctgcaagagagcgttcctagcaatgataagtttacctttggtacattaaactaaattaaagaaggcactgaggttggtctccaaaaataacatttgtacttgggcgatcacatatttacttcatcaatgagatgttaagttttcaaaagccattatataatatttattttataaatgcttatatggacattaaatttataagtacttttttagtttggacattatgattatggatatgtattatatagtaatattatggactatgatactatgaatgaagtatggactatagtttaatttggacataattattatggacatatagttt

SEQ ID NO: 81737 - DNA, 807 bp, Cannabis sativa
  modified_base (67)..(69): a, c, t, g, unknown or other
  modified_base (770)..(776): a, c, t, g, unknown or other
attaaatataaataaaaagtcactcatgaatttctcataaactaagaattcagttatataggcacannntatatagaatagatatatatcttacctactatataaaatatctatttaacttgtgcaaaaaataaattattgtatatttaataaaagaataatttacagtataaatacttaaatttaattgacactatctataaaaattctaaaattataacttaaacttagatatttatttgcaactgaaagttaaatttagatatttaaccacatattactctaaacagagtataccaaaaaaataagttgactttaacacacacattccatttacaaagattattcacataccaagacaaccattcacaaaacatccattcgcacaagttctcattcatttgcacaagtcataaatgagacaaataaacaatcataatagttttaaaaaaactttattcgataactcgctttgtgtgttaccaccatttcagaccaatttctttattgtttaccgaaaactgcagttgttgtcgtctcctccaccgagagctggagcccaataatctgctccattgtcactcccagtgtgcataaaacaggcaccaaacacaggcgcttactctttaggtctttctttgtcactctctttccttttcatgcaattatcattcaatagctgtaaatttaatagcaatagtgttatgagaatgaacctaatagatatagtgggagatcgaaaggaagttattttatatatatatatatannnnnnntagcaaaaactacgtgcgaggcacgtatact

SEQ ID NO: 81738 - DNA, 1073 bp, Cannabis sativa
cttaaaaaaacttatgaactctatgtatataaacttgatatataatgtatatagatatataaatatatgtctaaatgtataaataatatattagttgaataaaaaaattataactaaatgagtaagacataaatcaatcatctcatgaaaataaattaaaaaaatatcaggtcacatcaaagttaaaaaaaactattatagactacatgagcaacatctaaaatattattaaacaatttgagagttttaactaatttagtaaaaaaaaaaagatatgacttttttctttagtaaaaacttgaaatttccaaaaattgtaaaaatactttgaaaaaaatatgacatgccacatcatcattcttaattttttttatataaatatataaagtagcaggagaggcacgttagttcacacaattaattacgaaaatagataagaaattcaaaatgacagaatatatagaaatattacttcataagatgaaaaggttttgagtgcctattactcttattcttaaagtttataatcctaagcatgcatccgaattttgccctattagctctgcaatatttcatacaagattattgcaaacaccataaaaaaattaattgcataaaattttggggttgattacttttgaagaataagtgtattttccccttggtagattcattactaataattctatgattggctttgagtgtgttaaccatcttaaatgcctattaaagagttaaattggtgttttcgctcttaaacttaatatgtctaaggcctataatcgagttgagtggtcttttctttgttgtcttatgcgcaagttagggtttcatgagaagtggatttgtgttgctacagtgactcacaattaatcgtgaattaagttctaggcaaatactagatgaaggcttgaaaaatggcaagatatttgaagaaggttcgaaagaacttggagaagttcgatttctttaaaattgaacaaattccaatagaacataactcaaatgccgacgccttggcaaaactggtctcgcaaaatgaacttgacaaattgaatttggtaccagtcaaa

SEQ ID NO: 81739 - DNA, 750 bp, Cannabis sativa
agggcacaaaacccaacacactctcctccaattccccgccccgtgtgcatccctagtagagcctctcttctatctctctctctaccttaaacctaaaccctattgatgccacatcacctcattctgcaccaatgccagctctctctctctctgccccaaaccaaaaaacccattgacgtcggagaactctcctccacttgctcctcccactctcgttctctcgttctcttattctcttgggcctccttctctcgctctcttctcctttctcgattatctatgttgctctatcaagttggaaactcatctctgttgctccacagcaaagtcaaaattagaagcacgggctctcttcagcatgcttcgaacggatgaactcacttggtagctttgttgagtgtaggatcttttcgtggttgtagcagtagtcataggtgctctaggtggggtaggttgagggttgagagatatactccgtgggatttcaaggtacatgggtgcttttcctttggatgatgaagttatcactgtaggaaccatgatggggttagagataatggggcaagtaatggaagagggggttggtgcgttatgggtgatattggaggtggtaagtcgagtggatgcaatggagggtgcaatggtcgtaggtttgacaacagaagagatgtttgcaagggtggtgtatgcaatacattgaaccaggaactgatccacaacctcctagaagccatggttcgaagtgttaga

SEQ ID NO: 81740 - DNA, 2006 bp, Cannabis sativa
taaatgggttgtttcgggttttggtacattatagttatttaaaattattcgtaatttttttaaaattttacgaaagaaaatttgatggggatgaaaatttaagatatttaattcgatacatgttaaagttaggacataattttataaatatcaaagtttgggggacaagatttaaaatatagacaattgttatattagtaaaattgagtaaaattaaacaaaagtccttaacaatctcaataggaaaaaaatttaacgacctaaaaaatttaaaggacatgatttggtatatctcaaaatttaaagataaaaattttaattaatttttttcttatatacataataagtaattatttaaattttatttttcaacgctttaaattaattaagggtgtataataaattttatactttactattaaaaagtatgtgtatatgtgtgatgggtgtggaatgacacatagctatgattatgaagtatgaaactaaccaaagtagaaattatgagtgcagaattgttacttcatctacagaatcaggactcaaaacagcagagatatcatttaataaagccaaagggaaaaaagtgtaagttaatttaatgagaaatggtaaggaagatgttttaatgtttaaggactttttgttacatgctttatgaataagagtatgtatgtgataattcacagtggaaagcatgaagttcggcgtgtacaaaggaaattgctcatggaagctctctcaaatgatctcccaaatggtactatcagattctcctccaaattggttgctattcaagaatctggtttcttcaagcttcttcatcttgctgatggtactatcattagaactaaggtaatataatataattatatgatttcaaaacccaaattcataaattaaactttggataagtaacaacttttgagtttagcaatacaagttgatggtaaaattgtaatttttcgtcaaattttgtcaatatagaatctgtttatgtcttaaattggttaccaaacttaattttttaatttatataagaaaactgttactacatgttttcatctagataggcccgacttgggtatagatggactgacctatgcttagagttcacctagctcagggttcaagaaaattttacccttttaaaattatacatttttttttactgattttgaaaaatatcatattttttttccaaataaaagcccaaaaatatattttttcttctaatagctcactaaattttaagggcagtcctgcgtcagattcaatgatttaaaatttgagtctcacatgcttacagttagaaactctaatgaagtttgtactaacaaaattagactaaagtaatacttttattaacattaggtacttatgctgctaaaaaaattattgaatttacgtcggttagaaatttaaaactttaaatacttatacggtaatcatccctaaaactttatttttttggtaacgatttgggtctgattcataactactgttgatgcttgttgttaattattatgaaataaggtgttaatagggtgtgagggagtgaactcagtggtggcaaaatggctaggattcaataaagctacacatacagggagatatggcattagaggatgtgcaactaattttgccaataataatcatggacttgagccactttttagtcagttctttggacatggtgttagatttggtctcgtcccttgtgaccccaaattcgtttattggttttttacttttgctgcttcccatgaccaaggtactaaaacaattttattctttaactttgttgatatgtgttgtgactgattttttggttgttgcattttatatgtagagaaagagcttgaagagaacccaactaaaacaagagagtttgtattgagtaaattgggaatgattcctgatcaagtaagaggtgtatttgagtccacagaattagaagccttcaagttaatatctccactaagatatagaaaaccatgggagct

SEQ ID NO: 81741 - DNA, 1195 bp, Cannabis sativa
tcaggaacgttcttgacaaagtttgattaaccgcgaatctagcctatactcagtactctagtcgtactgatgtggtagcagataactcatactatctgatgccctggtatgctaatctgagggctataagtttgcctattccgacggcaactaatatgtacgctaaacatgtataaacatatgcataacattatagtaatcttacctcaattctgaattctagtgtgccggccaacctcagtggaacaactgctcggcgaattacagactcctaaatcacatcgataacaacatgcataagtgacatgctaaaccacaaccgagacttaggttttaaaccaaaaccctatctactgcaacttaatatggcaataccctgaactagcagggagttaaccaaccgaggctctgaaactagaaggaatcgacaacataaatttgtcaggaatcccagctgttaaatcctagtaacctggtttacatgcattctaaaatcggttagccggttttacccagaaaacccataacaaaccaaaccctaaccaaatcgattccaaaccttccagacctacatattataccccaataaatattttccaagcaataaaacaactacccaagctcaaaatctaaaatcaccattaaagacaaaaatttgagttctaaaactcaactttgtcaaataaccaaaacaagctatcatttaacttcaaatcagctcaataaacataattctaacttcagaatatctcaatgaaaataaatcacaagaacagcaacctcaaccctaaaacaagcaaaacttacgaaaacaagaaggaaaagtttgaggggtttataccttgaattgaaatgctaggctcttactagaaatttgagttgaaactagaaaaacttcaattcttgttggttctagggtgcttcgagaaagagagagagctttggagagagagagggtttattttcttaatttctattttttgtaaaatatgaaatgaataaaaggttttattatttaataacataattacattcagcataataaatctattaatgtccactaaaggacaaaatattaacttaggcaaaatgaccattttgctcctcccaaacaaactaatcataaaaattacctaggggtattttggttaattctaaaatctcgactattcctgatattcccaatgtctaacta

SEQ ID NO: 81742 - DNA, 2385 bp, Cannabis sativa
acagtattagtaattttcaaggagtacatttcaattttattttaaacaatatcttatactttgaattattaacatatggtatattatattatatatgaatttgtaaaaaataacaaaatatataagatgtataaattgttctctttatatagaactacatgcatcttacaatttttatatagtataaaaaatacataaaataaatatctaatccaaaaacaaaaggcaaatcgagaaaaaaaagaatcgaggaaaagagctaccaaaaatctgagtgataaaaaaaaaagtagagttaaaagttatttgtgattcagatttaatgagaaaaaataattaagttgcttataatcaaagtatttaaaattagtgaacgaaaaataaccgccaacttaaataaatattagagcattcacatatattttacaattaacataatttattagtagtacagttattctcacaacaaaaaagaagtcttaagtgccaatctctttcaatgtcaaaaaaaaaaaaaaaataaataaagcataatatttgattttttttttaagaaaatagtataatataattataattttaatatgatttataatttttatttgtaattttattattttaaataaatgagtttgagaattatatgatccaacgtggattctctacatccaacaaaaaaatgcaggaatagaggtaggaaatttcccactattaattacttttagcactagaaacacatgtaagattgaaaaatgaaaatcaatcaaaatatcattagaataattaggatttttagccctttaatttcgatatgtcactacaaaatgaccaattataaattattatgttcgtgacaaaaaatctgtaactaaagagtattagccacaaaaatcatagtttgttgtgattaaatgtattattagtcacaatactagttgtgactaaagctaaattagtgacaacttgtatctatatatatatatatattatgttttagtccacaagtaatttttgttatgactataaattaaacttagttgtaaaaaaattatgttgtgactaaaaaattatcactaaaggtagctgttttttgcaggtagcaaatcatgcctccttaacttttttggtcgtttaaaattcttctgaactattaagatttgatttaaggacttttgttcgatttcattcaattttactaattaattcagtaattgcgatgtactaaattatactctccggacttttatatctaccaaatcatatcctttaaactttaacatgtacgaaattattttccctgaactttgattcatgttatatttttcttactgaaattggataaaagttcttaaatccaacaatttcattaatttaaggagaatttttaacggttttaaaagttcaggaaacatgatttggtactaaatctaacaatatcaataattcaagagaaatttttatcttaaaagttcaaaagatataatttagtacataccaaggtggataaaaattctaattagcttgatcaaataataatatactttcatagtggcgggccaaaaaataaacttgattgaacagggagatttttttctttaagataatatggtatgcaaataatctttgttacttgaaggggggaaattttaatttctttaaaataatatggtatgcaactaatttttgttaaaagtactagaatttgaattatggtctcttaaacttatagaagtaagcttaatcatcaaaactaatctaattctttgataatgtttgtcttttttaattatatacactataaataattaaaaaaaaaaaaaacaactctttctacttttcttttccaggggggtgaaagccttgcttcaactataattatgtcaccaacacttgggaaaattaaatttaggttccgatcttcagttctgtattagaaatagaaaaatgtagtaataatattaaagtaaaatttattaattaaaataggttaaatttattactttattatatttataattttttttttttttttgtgaatagggttgtcaaacatgtcttttttttttttttttggttaaaggatcgagttaaacatttttaagccccgcagtccatgtcatgatcttatcatggtaacagttcaattcaatcttatcatggtaccacagtttcaatgtgcacagaagagtgaaagcaaccacccatgtaattaatgggcccaatttattaggctgggcctgttagtttatggtacctaataaatatttaaatatatattaaaatgttcaactctttattaaagtttttaagggcacaaaccttaacaagatatcccttgcatgtctccatacatcttcattttctatttcaaagttctatcatgcc

SEQ ID NO: 81743 - DNA, 783 bp, Cannabis sativa
gatctcaatacactaagatatcttgagtatctcttggttacactctcttttgacaatttaagtactgttgttgatgatgagactgagtccatttctgaatccaataggaagttataaaagtcctgaaaatgatcacaaggaaacaattaaggccatgtcatataatgctcatacaaaatgattcacatttatattctcaattcaactacttaaacatagtatgggaaagaaaatctaagcaaatttcagtaccactccattgctgttggcgtatataacatcttcaagttcaccccatgaatcagttgcttcctcatactgaccctgctgaatttgttgcctaatcttctcagccaaactgttttgtgaaatggggtttttgttagattacagacaatttaactttccaaaattaaaaatttatgtacaagagaaaacagaagaagcaaaatgaaaaaagaacctttgtgcttgcttcaatccattgtcatcaagtcttgagacatctttgagaagaggaccccatgaaaactgtagtttttaacagatcacaacattgaaaggacttgataaaatatttccatagttgtagaataaaaaagaaattgaaaattcagataaaagctttaccacaaaatcttcaggagatatccaagtgtctcctaatgcaagtcctgcatattgaatttgaagcccaacataaatatatatatatatacatatattaattcttggtaaagattggttatgtgaattgaattttacctccaagtttaagtttca

SEQ ID NO: 81744 - DNA, 980 bp, Cannabis sativa
agtaacctcatcagccgacaatttgatcttttccttattaactattaatggaatagaatcaatttcaaaggttgttttaacatctgatgtaagcgaaacactgttgcgaatagaaactgaccttgttttattaaactcaagtgtcaacctcatagtgctatgtacattatcagggttgtcagcaactgcatgactcttctctataacactgagtttataaactctaccctcctcttttcgaaaattgatgttgtagattttccttgacgtgacttgctccaccaccatgaacttggttttatcactaatgttactctcgtttgtataaagtgctattccaggaacatctttttccactaataggaatgatttgtatccgaaattctgcagtaccacgacgttgtcagcaacttttatgggaaggtatgtggtatacttgtcggtggtttcgttggagtcggccacgacggccttgtaagtgttctcagacttccaaaacaacttagtggaaaggtttcttatgcgaacataaccatcgccaacggtggagatctcatgtgatgcccattgatcaaagatgttggcatccttgagcgccctcatatactgatcttgtttgttgctgacataaaaccctaaaccgctttgcgatttgaaggcgacggtagttttgggaaatatgacaagcgattcccaatccaagactttgaaagtatcgaaatcgtctaccttcttatcgctcacatagagaccatcctcgtaattcttttcccacgttgaatgacaagcgtaacggttggtgacatgttgaaattggagatattcttgtttgttgttatcattatcaaaagtattagttttgataggcttgaacatagtatttttccaatctatttcgtcttcctcgagaggcttgtcagctgaggccaagaaataccaggaataattggattgcatggtcaagtatttgttgttgtagc

SEQ ID NO: 81745 - DNA, 660 bp, Cannabis sativa
aaaaatctaggaccactaaactcaacaaaaatatctcaccgatattttgtagtgacaaatccaaaactaataattaataataataataataataataataatagttattagacatgactcatgataaaaaaagcagtgtcttatatctcaatgttggccaattgggtttgtacatttgtacaagacaacatcataagatgtcactttcgaacccctcaactgaaaaacagacaagaaatatcgtttggtacatgaaaattgctcaactgttttagcttattattgaggatacacgtggacaccaaatatgtggccacgtatcatgtatgaaaattagtagttggtttttcaagttacaaacaaacaagattatctagaacattcaagaataatgtatctggtaagtgtgagccatgtttcgataagcctttatttgttttgggatctcaatggatttttttatttatttttttagtttatttttttttaatagtatatatagttatgctaaaaaaaatagtatccaaggatctcactatttttaaaatattgataattatgtctctgtttgtaataaactctctaagtgtttttttatcttgtaatttttcttttattcctagaggttgtaacttcgctgcccataatgtggctaaatgg

SEQ ID NO: 81746 - DNA, 1093 bp, Cannabis sativa
  modified_base (1064)..(1064): a, c, t, g, unknown or other
ggtctttttgttgatattgtaatcttgttaatttgttgttattttatgttattttttgttgatgttttaatattgtttgaatgttatttttttagttttatgttattttctaatttttttttatagatcccccataaatatataattaaaaaaatctttgaacccaaaattgtaaaaaatttataataatgcattatgtaattatctaaaaaacaaaataaatttaacttatttatatgttgaagacaataagtactagtccgtgtggggttactttgggctatttatttgggttttaagctttctaatgttgttgaaattgactctttgtgtaattgggttaattttcaccaaagtaatattgtctttaagttttgttgttgatgagattttattatttttaaattttatagctcatgttggtggtggtatttgttatgccactttggcatttagcgaatggtgtagactgtagcctgtattagaaaaatttattactagtttcgttggagttcgagtttagaaaaatatttgttttagattttggttttttagtgaaaaaccttatttaaaaaaataatctataaataaataataaaaaattaactaacgcggccggtagaggttgtgtgatactatatttatatgccctagctagtaaaaattgtaaatatttgttaatcaattttatttttgaggcaatttattataattttgttattatgctatttacctaatattatttaataatttgtgtaaatgttttcttcgacaaaataaaatatgcatgaaattttactaaaaattaattattgtaccaaaaattgttgaaaaattatataacctaaatatttaaattatactaaatattaaaatagtattaattaaacaacaagttcgtaatataagatttgttacacgcacgataaactataaatgttaattagtaatttttgtccccgaactttgatatatgtactaaatcatgttctccaaactttttttaggcgccgttaaaaatttcccctaaactattaagatgttagatttaaggacttttatcnaattttagtaaaaaaattctaatatggat

SEQ ID NO: 81747 - DNA, 1388 bp, Cannabis sativa
atcaaatcacgcaccctaaagtttttctcccctgttaaaaattctcctcgaactattgacaatgttgaaatataaaactttgttaaattttgaaattctaatgtccatcgaccatatcatcattttattagccacctaatatagaatttaacaaaagtcctatatttcaacgcgggaaaaaattcaaacggaaagatttggtaacaataatatttcggggcgaaaataaaccctaagcagctttttcttggtgtattacttacctactagcagcaggtgcaaaaccaatggtgtaatatgtaagaacaatccaaatcccagcttccattagtgaaatcggaattctaagtatccaaataggcaaggcgaaagcccatgccgggtagaacaatgaatctctttgtttatagaacacaggaagcctaaagactgtcattgcaagttccaccattccattaaacatgacattaatgagactgaaaaacaatgctccccaaaaccttgtcccatcttcaagctttcccgatttcatttgtgttctaaagaagacagtaaaagcaatcacagccatgactgttatctgaaatgttttgaaaatgtaaacaaaagagtttctcttcatcaaaagccattcccttgagaaacatgctttgaagagttcccaattggaaatgccatacttttctctaaccaaagttgaagaatggactttggttttatcataagggactcttagctcttcacaaaggctttggccaatgtgaaaagagttaaaggcttgcgaaaactcgggtactgatatgtatctgtaaggttggttattcctacaccagtattgttcttggtcttttatggaagttagttcttgaagaaaatccgcaacacctttcctttcggggcatttgaagcccatctgttcgaaaaattcaagcacattatcgcggggaccttggcatactatttgtccattcgaaagtaggataatgtcatcgaagagctcgaatgtctcgggagctggctgcaagagagatatgatcattgtgacatccataacatgaactatttgcctcatgtagttgatgatctgaaatgtggttgaactgtccaagcctgttgatatttcatccatgaaaaatgctcttgctggcccaactaacatttcacctgaaatttagtgtacttcttaaatatatccattcaaacaatataaaacaagattaatgctaagatgctactaatgactgagagtgacacaatctttgatatatacagagagagttttgtattgagattaaccgatttcgtagtgtatttccattcactacaaaaaactgctatttttagtgacaatcttttagtcacaacattaatcttttgtgactaaatat

SEQ ID NO: 81748 - DNA, 1255 bp, Cannabis sativa
taaatgtgaaaaaatgccatagaaaagtgacaaacctaaaaatgccatatttttctaattttgttatgaaatcccatatttcatgtaattttcacaacaatatatggctctcattcttttgcctttctttttctatcaccaatttttgcgcagggaattcttcctctacgatttgagtttagatagcaacaaaattattggaacatttaaaaaaaatatgatttttaaaaataaccaaaaaaaatatgtatttttaaaatattttttttttatttttgggctcctaggattagtaggcctacacctaacccgcttttgtccaggcccaatatgacaactattcttctagatacctatggagatattttgatgtgaaataggacttgctattacaactcctcaaagttaagagctataaaaatttgagtcggttgataaaagtgttgccaatggtgttatgagtaattgaaagtagcaattcaaacaagttgtggtgaaagctttaagatcccaactataacattttgcaagtcaagattttcaaaatcaaaatatatatatataagtaatttacagtctaaatatctaaatttaattttttattgcaaatcaatacttaaatttaatttgttagttgttacggcaataatacttaaattatatttttggaacttttgtaggtgcttaacaattaagtgtgaatttaatagtcacatagttgttcctaattagtccaagaaagtcgttaaatttttatattttatttaaaaattcatttaaatttatcaataagaaaatgacacgtacatattgacttgacagttaatggtccggtacttactgaagctttaaaattataatttgggtattattaccgttaacaattaaacttaagtatttatctgcaactaagagttaaacttaaatatttacgtaacaaattacactaatttcagctaaactactttatgctatactaagtattaagttccatttttccactaaaattacatcatcaaatattggaaccaaacaagaaaggacttggtggagcagaaacttgaacaatcccttcaagcattagcataaccttcttcatggaaggtcttaaagaagggtcttcttgaatacaccaaattgcaactctcaaaaacctctcaaagctcttcatgtcttgaatggcctccatatcatttccaaccaatacatccaatcttccttcaatgtaacaatcataagcccaatacactaaaat

SEQ ID NO: 81749 - DNA, 1472 bp, Cannabis sativa
tttccctcttctaaaaaccttataagggtttctattgtatatcaaaaccttcatttttataaaaaccttaccttttgatctccacaaaaacatcttagtaaccactcaattaggttatgtttggtagagaagaaggtccaatattaaaatttattttctctcaaatagaatcaacttggtgcttttgtctttttccttataccaaatatagcctaaaagagaacacacaaccgccttgagtaactaatggagccaaaaattgcctaccaatgagccaagtttcaagctgacagaatagatttagctaaattgttctatcaaaacaaacatttgtaagttaattttttagtaaaaagacaattattagagcaaatactccgtagtttcctcttatgtctctttgtctctgccttgtgagtaaaggtaactcactactaatctctactctttaatatagctcacaacacattcctcactactttctttttctcttgcaaaaaaagcaaacttggataatatgatctctgaaaagaaaaacgcttttactttcattattttgaactctgcaaaaggtaagaagcaaccaaccaaaaccatcatttcattgccttaccttcctatctttatctttgtttttacacatatgaaagccattaatacaaacatgtcataagtaaaaatataatatttagggaagtttcccatctaatctttcttttaacacatataagtaaaaatataatctttaggaaagtttcccatcccatgaacttccccatttttatgttttcactctcttattgattttttttttttctttcactatattgaaagttgtgaagtgatttaaggaaaagaatggagtttaggatagaactttcttcaacaaaagactggtttttttctagactcaagggattttacaatgagtaccatcaatacaagaatgagaaaggtaaaaaaccattaccaaattcagattccgaaaactcgaaaaaaggcgatagcaaggcttgtggagaatcatcatcatcatcatcatccaaagggaacaaggctgttttgtggggaagtgaagttgatgagcttaaggagagacttaaaattcttgaagaggaaactgagataattaaagatgctttcttttggagtttgaaagaaagaaaacatatgatgaaagagatatatcagcagtttcagctattacatcatctccttcaaactcaaaatttagtgctggaagaaaattctggtgtcaacccttttgaggtaatgatgtttttctttttatgcaaacttgaaaatttcaattccattttgagtactaatttgatgattgcttaaatagaatgtggatttcagaaagagtttgctagaaattttaagcccacatccaaatccatctcttcttaccagagagcttaaagctgaagttttggcacttcaagaacctgctgttaaagtaaagtaat

SEQ ID NO: 81750 - DNA, 778 bp, Cannabis sativa
accttgagaaggtttttaatgctaccttttcaactccccgtttttaagatcaaatatttctttttggagggaggattcaaaccatttattttgaactacatgaacttggtctgactataaatagatccaacacagaccaatttttcttccttaccattttagacttctcaaaaacctttgctttcaaattttaaaccatagcccttattcccaaagaaaagctttcatcttccactctgttatcccaaagtttgcacagctaatgtaatccttccacgtggcatgatctagacatctctttgacctaatagagaacctctcggtagaaatatgtttggcaggtctatataagaagtaatagccataggctgtagatgtcccatgaagcattttgctgggtcaaccacttgctgaccaaataagatgggagcaacaccctgcaaggatgattctacaagacaatctctaatggagacaactgtcgagagacctatccatatgacaaaaatgttgaacagatcttgcactgccagtgataccagatagagatacgcgatcctttatttgtctttaataagcttcctcaaatatctataattcaatcctacaaactcagatccaacaaatatatctaagaataacggagattcaatagattgtaattgcttcctaaaatatagggatatttatcatttgtcttctccttttacggagccaaatgtaacaactctccccttataaatagtgaaggcattcacaaggggaagggactaaaaaa

SEQ ID NO: 81751 - DNA, 1450 bp, Cannabis sativa
atattagggttaggtatgtgtagttggccgacccattaattagtatattacagattttttttaagttttatttgcgtcggtttttatctaatgctactttgcgtcagtttccgaccggcgtaatatctaaaaatgtctattttcagttgacgcaaagtagcgtcaaatagcaactgacacaaaatttagaaccaaaatttgtgtcggtatttagtgttgactgacatgttgatcgatgcaaagttcaattttgtaatagtgtgagcatgctttattttcctattgttgtttaattctagtgtggcatcggttgggggtgtggtcagtactccgtcaatgtttttatggaccaatgcatgaaattcacatacgtctctttgacaagctatcccgtgaggattttgaattgatgatgacaaccctttggtggttgtggtatgatagaaactcagtattatttgacaacaagcagtcaaaattggatgttataccagatttagcccataaccatcttgcggagtttaaggagtatggtcggataggtcttcatttgcgattgggccttgcaaagccagttgcaggccgacctactcggtggatgccaccacctccagattcctttgctctagcaacaaatgcttcgattgtttaggggaggggctttgttggtttggaggagtgatacgggatgcagcgagtgtggtttagctggcgtgatcatcaggtgtgctaggtgagttttttgctaatgtggcggagctgcatgctattcatctgggcttgactcttgcgcataaatttgttttcaatgtctccattattaatagtgattctactgtggcaattgagtggattaataagcttcacattaattttagtttttagtatattttattagatatctagtctttattagctgttgttggtggtggttcttgcagtgccattccacgttcagcaaatggtgttgtccacacactaacaacctctgttactagtttaaaagatagtatttaaaaaaatacttgtctatgatttttgaattctactgtaacagtaaatttatcttaatgattatgtctttttttttttaaaaaaaaaaaagatagtttaaagtttgttaaaatattaaataggtataaattacaataattagtgggacaagaaaaatacaccaatttagagacaacaatttttatttttttttttcatatatatctaattgtaattttcatctctctttgctgttagatacgtacctaactataatatgagatggtgatattttgtagtataaaattaaagttctaacttctaaattatttttattatttttgaaaaagataagaaaatttgtatattcttaaaaggagtacgcataaaatcacaaacaaaatacaaacaaactatacaacaaaaagggcatttttatgttttctttctttctttc

SEQ ID NO: 81752 - DNA, 631 bp, Cannabis sativa
aaaacttactttctgccaataaggcgcttgacatcaaaaacggttctttgtccattgagaggagcttgattttttgcagcttcaccaatgaggcgctcggaatctgtgaaagccacccaagaaggggtgattctgttgccttggtcattggctatgatctcaacgttgtcgtttttaaacactcccacacaagagtaggtagtaccaagatcgattcctattacagaactgggtttcgatttggatgatgaagaaccaccagccaacgccaccaccccaaacaaagccactacacaaaatactaaacacaaaaacagttttttcgctgccatcattgatcgatgaatatgagttttttttttaatgttttgaaacgatgggagtgaagtgatatatattgggagggaagtggtgtatttatagtaatgttgtgcataaatatctaaaagaaaattctaaaataactaacaaatttgttttaaattctacgtagaaaaatctatctttttttttttgataaaaccattgatatttagaaagatttagtttaaattttaaatttaaaatatttttaattatttatctatcgttcaaagaataaaataaaattagaggatgaatataataacat

SEQ ID NO: 81753 - DNA, 878 bp, Cannabis sativa
agatccatagtaggtgctcttcaatatgctacaataactaggtctgaactctccttctctgtcaacaaagtatgtcaatatactcctctgcaagcacactagacatcaataaaacgaatactcaggtatattgctggcactttggactatggtctgcacttaaaaccaacacctgattactctttagaagccttttgtgatgctgattgagcctcagatccagatgacaggagatccacctcagggtactgcacttactttggaggcaattttgtggcttgaaagtctcaaaaataggtcaccatcagcaggtcttccactgaagtagaatttagaagtctagctaatgttgtggctgagatctcatggctttgtctttactagcaaaacttcaaattcctcaaacagttatgccttccatatggtgtgacaactagagcactgtccttcttgatgccaatctagtgctagatgctcgcataaagtacattgaaattaatttgtactttgtttgagacaaggtgctacaacatcaaatacatgtgaaacatgtccttgcctttgctcaacttgctgaatgcctcaccaagtatgtttctagttctcgatttgctaaagtttgagacaaactgtgtgtagtttcaaaagctacacttagtttgaagggaactgtcaagaatactaacagttagttatcctgtgttagttaagtgttagtttactattagagagttagttatggcattgttattagtagcttgtttgtatatatatatatatagcctgttgtaataaacacttaatcaatacaattgttcttgcaagcactagttttctctatttctctccctttgtctttcctgttcttgttcattaca

SEQ ID NO: 81754 - DNA, 1113 bp, Cannabis sativa
tcgggattggtcaatagcaattgaattatgattgctgatattgtggttgaaattagcagttggcatcccctgatttgcagctgctgcattaacttgagtagatcttgctggcatcgtgttcgtcgaggatgaagccgccgtaccggagcgtaaccacggggaggctaccatgtagttctgtcgcctggttggagctttcatctcaatgctatatggcttgactattttctctattggcatatcatatattttatcacagaacttttcagcatgccccatgataccacatatgaagcagaaagttgggaccctttcatatttgaaatatgcataaaatgactcgcctttgcgactacgaaacttcattcttcgttttagtggttcagcaacattaatccttacccggaccctgagataatcgcgccatactccttggaagttgttaggatcagtatcgacatattggcctatatatcgagccgcttctcgaatagcccaatcagttttgaaaccagaccgtaactcatgaatttgtacccacatgtctaatgtgttgatggcgattagtctaggattctgtcctggtttcagcctttcaataaggagttgttttcgatcataagtccaagggctgccttcgataacccgtttgatatctatctcatgatagaattggaataagaatcgattttgatcgagtattttaatgaatatgcctttccccggtttccataagtcagcaatcatattttggaagatctgaaagtcagacaccttccctgacagtaatcggcctacaagacaccatctgtcatcaaactgcagttcttcttcgtcttcacaatcatcagcaagttcaacctcatgttgctcttcatcttctaggcatatatctgcccatttcagtgacattatgggatcctctgtactagatgaggccatcgtgacaaaagatagttcacacactgccaaaagatgcagacgcacacactacagtcatacacaaatcactctctaacaagggagactaatacagatcactctctatcaagggagacaaagcactctctaccaggagagacagactactggtcaattatgttaattgtgttt

SEQ ID NO: 81755 - DNA, 1994 bp, Cannabis sativa
cttctacaggtccgaagcagcttcttgtaggatcccaaaaaaagcgaggatctatgtttgtgtccccaccctggactaggcttcattgccccttatcgggcttgtcatctagagttttgacaggcatcttctcctctttggccttggatagggccatgttgtaacagtgatgagcagactgctggtctccgctcacgcatgccaccccatgcctcgtgggaaatttgaggcataggtggtagatagacgtcactaaattcaggtcgttgagggctggtcagtctatcatggcgttgaaagctgagggaacgtcgatcacgacgaactacgccattagttttctggtagttggattttctccaactgtgaggggtaatctaatatacttaataggtgtgatgccttggccaaaaattccatacatcacttggttgcaaggtgccaagtcggtgagttggagccccatcttttcatatgtttgtttgaaaagaatgttgtaagaggcaccatcatccaccatacatcttcccacggtcatgttcctgatttgtacagtaatgatcagggggtcattgtgcgggaaactgattcgaggagcatcttcttcagtgaaggagatcgttggctatatgggcttctattgcttagatctccggtcttcgacagctaggacttcacctttaggctcgtgacgaagtgtcggagcatagcgctccctagctttgctagtttttccagcaatgttgggtccatctattatgacccctaggtgtcttgccctgggtggtggaattggatctccattttgggcaccttgtgcataggtttggtcgtcttgcacataacgatgcatgtagagattattgtgccttatcaggtactcaatttccctcttcagattttgacactcattggtgtcgtggccaaagtcattgtcatatcggtagaactttaacatgtccctcttacccatctctcttctaataggaaaaggctttcggtatgggattgctccttgagtggccatgaagatggcctcagacttctctgttagaagggtgaagaaagtttacttctcctttttattcttctgtggcatgtgagaagtgttaaacctcccctttttgccattgttcctgccagagctgttggtgttgcacttgtttctagtgtttttaccactagaagtttaggcagaattactggtgtacgcctgtgcacttggtgggtcatgaggttgttgggtgcctcgtgactgcttgttgttgacatgccttgcctgggcctattgtatggcttcttcaagtttgataaagccatcagctctatcaaaaaaactcctttatactgttggtggagattctccggatatctttctagaaatcacttattgggagtatgccccctagtctggctgtataacgaccttcttttgtaaggcctttgactttagtagcctcagccatgaatctctgaatgtaatcctttagaggttcaccttgtctctatttgacttcgaaaaggtcttccagctgcgatggtacaagtcttgaggataagaattgtgtgtagaaatctcgtgaaaacttgtcccaggagttgaatcttcctgtagtcagtttaaagtaccattgttgggctgtctttgataatgtggttgggaatatgtggcagcgcacatcactagtaaccttctggaggtcgagttgcatctcgaagtacttaatgtgagctagtgggtcttcttgcccagtatacatcttccataccggcattttgaactttggcaaggacaaggcatttatgtatgtcgagaatggtgatccccttgaccgataaagtttaaggtctgaaggctttaggccagctatgtcctagatcatatccctgagttggtctaactgtccttgcataggggatctattgttgtggggacctaattgactggccttccttggggaggctgcagattttgaagagataggggctgactg

SEQ ID NO: 81756 - DNA, 1551 bp, Cannabis sativa
tatgtcaatatacacttcctagacaaatctatttacaattacatccctagaatccaaaacaactacagaaactctcctcatctgttaccgttaccatcaatcaaactccatagaaatgtttatgttgtccactaccactacattttcatatcaagatttcaactatccctatcatcagtcaaaacattctgctatgaactatcaagaacctgactgtaaataacatttttaccccacgtagataatattacttacagcttctgtcctgtgatgtcaaacgccacttttaaagttcactcatctcctcatatattggtcacaaagtgaaaatactttcttcattagttttcggcaatttattagatcatttttgtacaaattgtaagcattttagtttactataaagtttttaactcaatttgcttcaaaagttatttgcacagaaaaattataaaaaatatatatattcacacagaatattaacagcatcaaagtcataaattcacattcatccttctcttacatgaaaaatatatcaatgttatttgaataaaaacaacagcatgcccagaatacaagattaaaaaagtgtcttcgaaccaaaaaaagaaagaaagtaagcttccctttttatttcacgtacacacaaaaactcttgaactgttcatcaaaacatcgtgcataaaaaaaaatcacataaaaggagcatctgggcaatccaggaaagtacatatttacaataaaataccgagaactaattcaatgaactcccaaataaagaaaaacacaatatattaaacagagtgaagaaatcaaaaatacacaaataaacactagaatagatgagtttcatttttcatcaaagattccaaacgttgaatatgccgaaactggggacacttaagacttaccatgctatgagatgagtggtggagaattggggatctgggcggggtggcggagcagtcgtggcagtggtgacggtggcggaggctgctcccgtccggcggcaatgtcaaatttgacggaagtgagaaagcacgagtcttgttcctcaaatttatttctagggtttctcaatttatttcattaaagtttaattgagaagaaagcatattgggcaatatttttgatgaaacatatcagaaaaggaatatacagatggatggtatggatttttttaattgtgggtttctttccccttataattacccttttgtgtacaaaaaggaaagtacatataaaatatttttgaaatgcatcacatcttttttttttttttttttatttaagcgtttatatattacaaatatgttttatttggaattcgaacccaggacctccaacacacaccgacttatagacacaacaataatacaaatttattattttattttttttttgaaaagaatttattacttttctcacatatttatatttaaatttaatttgtgattccatatttatttacacaaatatattagtcactctaattacgaaaatgtcccttgataacgtaattcatatttcatattagaatttggaacttga

SEQ ID NO: 81757 - DNA, 1082 bp, Cannabis sativa
taaaaaataaagaaacaaaagacacatatccatgagtgacctccaccaaaatttattaaaaaccctcacgtttctttttatattttctgtgtgaaactaagattcccacctaactgtacactaaggaaacttattaaaagccctcactcacttatggtagaggaaaactgtggtgacaaacattaacttagaagtttaaacaacaaaaacaaaaacaaaaatataaagcacgacatgaaactctccattgttcttatttattttttataaaaaaaatacaaagagtaacgtgagttgtataatctaatatgttttgtggataatctatcaaaaaggtttaaaaggatttaagttaactattcacataattctagtacctctaaacgtacttttatgttttgttaatgatgactaaaaagtatgtcatgacagggcataacatacttacccattaaatgattttcccaatcaaaatgcatgagatctgaagttatgcctctccaaattcacattttcaaatgaggagtgagaacattgcctgttacagtcttaccttacaaccgcttattcactatatttctattagacaaatacatctatattcaccctccaaaaaaaaaacaaaagacattacatctatactcaggctatgcatgacgatgtatgtccaaaaacataaacctcctcgacagacatcagaattctttgtgtgtgtgtgcacaaataaaactttttcataaataattttcatactaaagacgttacatgcaaagggacagatttaccattgctctcttgatgttacttgtatgatgtgcttacttgaggtgaatgggaatcatttgtatggtaatgattcccattcacatatttccaaaaaattagcactgaaaaaattaagtgatacccacataaattaaggagaaaagacaaaggaatgtcgttacccgtaattattttttttttttcattttgttttgttttcggggagttctatttccaccccataaaattataagtacacccaaatattaagaaaaaattaaaaaattactaagattttattttacattattttgcat

SEQ ID NO: 81758 - DNA, 784 bp, Cannabis sativa
taatactcttttgttaaacatatttattttaattatcaggtagtattattaataatggataactaatgattatacgatacaattcttttttagcaaaagtgtattatagtttaaaataaaattagaataaaatcccttagaaaaatttgcatttaaaatgttaaaaacattattattagtacccaataaataaaaattaattcatgactctgttactgattacatatataattaactagaattatttaatattaaaataatatagactgaacacattataaattgatacataacaggtcattgatggcaacaacaaaattatacgaaggagggtacaaaaagttgggttggttagaaggaggattcaatcgaagtaaagttggagattttgtagccattgaaggctctgaaaagttagaatatgccaccattggaggtgtctcttacatctttcttcagttgctcatccttttaagagttgttacttaatcactaacacagtggtttcgatctccacctcagatgttccaagatcgatattttttggatgtttaaaaaaagttaattgtttaatcatctccgtaaggtaatgctttcaagaaattatgtatttgcaagcttcttatattttgtatgtttatatgttacaatgttagatggtaggaacatcttacactaaagaattaggatgacttggtagattatttcatgacttgttcaaactaattaaattagtgtaaatcaatttgaaggatagataatgattttaaaaaataaaaaaaaa

SEQ ID NO: 81759 - DNA, 1762 bp, Cannabis sativa
gcttatgatgagactttgttgaagctgggaggacttttcaagaagaactttgagacattcacaacctataagattgggaaggataacaatctcactgaagagatccttgctgctggtccaaatttttaaagctggcaaaagaagaaattactagtgtcttgtgaattgggggcaaaaataaaagatcttagtataattattatattatatatgtactcaaaatgtggtctgagcaccccaaaaaagaagaggtgtggggagaaaaagttgggttatgtgatatgtgtcaaatggttattgtaatacgttgatttatattagtaaaaaatgtaggtgatgaacaatcgagtccgtcgcgccttgcatcagttcatattatataccttgtatttcagtggaaaagcatctttgctcaaaaagctttggcctattttcttcttcttctttgtcttttatttttattttcttttttatttttgcattaaaaaagtccattataatatctacctagcacctcaacgttaactgtttagtatttatggaagattgatttttttttggctttcaagtattcttccgttagatttttctttttggcatacagaagatggtttcaaatactcatgttatgttatgccatgttatgttttatgttttgttgttgttggtgattattggatagtattgtcctacctggattaataaagataaaatattaaatcatatataagattatatactatttttgaaaattaatctcatgtttattgacatggtattagagccatgtctagaggaagggaaggaaagtttatttcttccgtctaagatttatatgtttatttttcttatcttatttatattttagtgatgtaaatgttattttaatgtatttttcaagccaaacttgtattgtagctgtggtgctagactggttgtttgggattggacttccacttaattctattgagtcaagttgtttagtttgatctctgatttttatagaagataattcgttttgtaataatttaggcttgttagaagatagtactagtttactttccaattttttttgaagcatctttaatttatatttgtagtctgactatcatagctactcatgaattagttgtgcatgcgacacacaactctttccataaaattaagtagaacagttcagagcctaaacaaatgacttggcaactcactttacttaggcaatcgtttttctttcgctaactgttttgaacatacttcacttaggtattaatttcttttgttggagttatatagtgaaacttctatgtagccttaagcaataaaactaaacttatatttagcaataattttgagaataaacatataatattctaattatacttataagtgaatgtttgaagataagagattattccaatgtaagttgagaaaaaatttaatatatttttttatgtattttaaattttattttatttcattatattcttatttttattcctgtatttttattctacgcaactaaccgttacaattactaaggaaaacaagaataatattgtatctaatctagctatgactattgatagattacaggtaataaattggttgatagaattagttaggatatttacagttaaattagttagttaatgactgattggtacacttgtacaattctgttacaaagttcttgttacaactccttgacttttgtaagcttttgtctaaaaataaagcttagtttaatgacttgatcaaaatt

SEQ ID NO: 81760 - DNA, 852 bp, Cannabis sativa
ggtatattgagatttggttcgtcttgagcatcaaggaattgagggggacatggtctggtgccaaacagaaacccgtctaggtcgtgcgcacgaacggcgggaacaacttgagaacgccagtacaggtagttgtctcgatccaggcgaatgacgattggtgcaagaggttgatgcaggggagctggaagagcgggtgcaacaactggaatcggggctgccggagctggaggaggaggagcatcaacggcttggttcctggggttgttgactgaggagtcgccttgggacgccggtgaagccatcggctctgataccgaatcaaaatatgcatatgtaatataaaaggaaaagacagagagaatagaatggtattgattgtattaattcctcagtgattctttcaatcatttacaggtgtatttatagtacaagaaagggaataaaatctgtaacaataaaatattccttagacatatgattggctccttaggataaggagaatcccacgaaatgggaatactatgatagcatgtgacagctcaccaagggtatagaaatctggtgtggacaagtacactatttctaacaatatggactattttactcatcactaattacttttaagaaggaactccatcaattttatcaaggaagaaaattcttccaaaccaaacataatctatatctaactctaaaatatatttagcaaattatgagtagcattatagcagttctccgtacacaagaaactattactctaaaaaaaaaagtaatagaggtatcaaatatgatatctgttaaactacaattataatgatatgaaattagtaaattctaaaatttctccaccac

SEQ ID NO: 81761 - DNA, 1987 bp, Cannabis sativa
tttgagcaaggtcctagatggtacatcttggagcatgggtcctggagggtacatcttggggcatgggtcctggagggtgaatccttgagcatggatctcggaggtgcctccttgagcatggatcctggaggtgcctccttcagcattgatttcagagatgcctccttgagcatggaactcggagatgcctccttgagcatggatcctagaggtgcctctttgagcttggatctcagagatgcctccttgagcatggatcttagaggtgcttccttgagcatgaatcttggaggtgcctccttaagcatggatcccaaagataactcattgagcatggatcccggagataccttcttgagcatggatcttggaggtgcctcttgatccttacttaaggatgagtcattcaccgagatctttgcataaagatagatcttctatcaaggatgatacttttatgggggtgaatcctcgaccaaaagataattttttcataaggatagatcttccaccaagaatggtcaaggagggttcatacatgatgatggttctttcacaaggatgatcaaagaaggtccttggatgaggatggatcctatatgggggaccatgtcttggctttgcattttgttaccgtcatctaaaatttttggttgttcgctggatctagcttctgttctgatgccaacggaggtgatgggtatatgaagagtcactatcgttatttttctcatgtttttttcccattatcgacaaatctaatgggcgttttgccggtaattgatatattttggatcatgtgaaaaaaatgtttgttataagaaaccattattaatgtggattacaagctttctcttcaagttctcaatgaaagcgctaaaatatggaccaaaattttcgataactaattaaataaataaagatttagagcaggaaaagaatatggagaccatgatttttacgtggttgggacgttaatgagccttagtccacgagttacttgtattgagatagggaagatggagttctctctctagaatttagcagcgttttagcttaatacccatgaaagagaaaaaacagaccccttttacatgtgatcccatgttcctatttatatggtcctatttataggcagccatggggtttgtttcttttattcgtctaaatgcttcacttgatagaagaaaatacattgatagacataaataaatcaataattgtaggcacatgagtttgtcttgccttgtctctttatctttattgggaaagcttcctaacatatcacattaactttaatttgcagttgtgtcagctagtgggtggactattattagtctttgtttgacaaaaaatgggacaacaagaacaattactttaaaaatgaaattagtatcagctataaagtctaaatcgtagtttcaaactaaaccaattcgttattaagtggactaatttggttcggtttgagcattttattggtctagtttatttttaaattttttaagaactccatattggtttggtttaaaaaaacaaataatttggaccaaactaatctatgaacagccctactaaccccaaagaggggctccgtgcgtggtttggaccccacactaaataaggcaggatcttgcctctgcatccgtactttaagaaggttgcgacttactataaaattttcccgatctagttcactccgaagggcatcaagtatttgatcgcgctattcgtgttgtatgccaaacaagggtggggccaaccttctgcccatgatacaaactagttcttcgatttgaagtcaagcccaaaaaaaaatcggtcaagttacttttacttctcacaaaatgagtatcaatatttgagggacacaacgcacaaggatgtctcaaagattgggggttcatccaagattactatatcaaaaaggacgtggatgtcaaccacctttcattccatttgactctaagttattgtcgtccccctt

SEQ ID NO: 81762 - DNA, 722 bp, Cannabis sativa
gtgatgagacaatatgtatttatagagttaggaaagggatttagctacatgatcctagttggactggatctgctcatcaaaggctttcgttaattagtttagcccgcatttttgtttcaactagactttacaattacatatactgataccaaacccattaactattgatcactaaccatacgggttatacaaagaactatccaattaatctatattttattaaaaccaataaaaattaatataagcacaaataaaaagtcttacaacaattaatagctaacctaatctcactttccccacagccacaaactcatttagtctagtactcaactccaagagatcacatctttgactttgcacatattttaacaaacaatgcagaatttgggctccaagtaataagaaaggcaaatttaatagaaaaaaccaaagaaaatataatctgaattttagacttctagatttaataattgtctatgataataacaaaatcaacttacttttacaatacgttattttcatctgaagttgaataacatatatatactaaatgtattaataaaagacttcagattgtgtcagctgagtgaataacattgaaatttatttctatgtatgttccttgaaaaatttatacataggcatgattggtggactaacttaaaaaggctataaaactctctccacacacaacaattaataccagtcaaaaagagctctct

SEQ ID NO: 81763 - DNA, 1963 bp, Cannabis sativa
  modified_base (358)..(365): a, c, t, g, unknown or other
  modified_base (1725)..(1731): a, c, t, g, unknown or other
aaagcatcattttagtttttttttagtatttgtattaactaaaatgcttttaaaaaagataaaaaaaccctcaagattaactaaattataaacttaaacacctcacaaagaaaatcttaaagaaaattaactatagccaccaatttcataaattattataaagtatttagttattttataattaaaaattattcaataaggatattatagagcaactttgtaagttactaacaaaagtacttacaaagaaactaaatgacatcttagtcataagtatagtctaatacttttacatctctcctacaaagagaagttttcaagtttcaatcctctctcctccaataataataataataannnnnnnnataataataataataatttacaaaatcacttacataatacattaccattttttttaatgtctaagatactatttagtgtccttatataagttattttgaatataaattattttgtaagttaaacttatgtagaatattatttattttaaatataaaataataaaatatattttggtaacttgtgaaattggttggtatattttgttttaagtttaaaagttgattacttttttgatagctaaatatatatatatatatatatatgaaaaaaaaaactaaaatgtcactttttatttcgattttctggtgaaaaaatatattcttcgcacattttaaaagaatcactttaaaaggtggattatgatgattaggcctagtgagacataactcttgaactcaaataattatattgaccataattttttttaaaatatttgaaagaaaagaaagtaactaaagtatactttctttattaaaaatttagtatataattaatataactaaatttatattaccttcttattttattataagttattttagaaatatatttaaattgcttaattaagtaaacttgtttatactatactatctcatagtttttaaatataaattaacaaaagatttttaataatttatgaaattggatggtatatttaattttaattatttatttgttaattatataaaaaaagaaattagatagttactttaaattctatttattttctctagtaatagtaacaaaaatatatgtatatatacttatcttattaaaataatgatcttcaaaaataaatcatatgtaattcttcagccaaaataatttctctacgatcgatttttttttttaaatttttaaacgagagaaagagagaaagaaataataataaaataaaatatttaaaatgaatacttcaaatcaatgtatcaagaaaaaaaaaacaatacgatgacgctaaataaaaggacaaaacaaaaaaaaataaaaataaaagaacaaaaaaaattgaaaaaaagaggaaactggcatatatactagtgtctattgaagagagataaaaagaggaaataactttttcaaactctctaaaaatctcatataagcaataagttttcattggtatacagttgccgaaatcaagtaaaataaataaaaacaagtgctaattctattataataaaataggcaacgctattttcaaaatttgttttaaaatttcgtctcctaatgtaattttctctaatttttttctactatactgatggtatattaatttttcactataatatttatacttatgattgcaggtttatatgctattgtatatcgtggaaaaaaatcatttaatagtatatnnnnnnnagtttatggtatattcatattggtctaatgtatatcgtttgtatgtgatatgtatatcgtgaaggattattaaatattaatttaagtttttagtattttttttattttgtacagtatatctttatgatatgctatgatataataataaataaatagagtggtatattgtttttatttgctatggtatatcatgaaagaaagagaaaaaaaaaacttgtggaagtttatttaa

SEQ ID NO: 81764 - DNA, 1445 bp, Cannabis sativa
tccatttatgttgtgactaaaaaattgtcacaaaaaatagtaattttttgtggtgtcatgattcccataaaaattgagttgagtataattatactatatatgtaattactaaaaattttattttaaatattaactattaaaaatattatttttctaatgtaattatcaaccgtttttcaaacaaaattttaagaatttaaatgtaattaccattttatatttaaacataatttgtattttaaaatatagtatatttattaaattgtgtaattatcgctttaataattacaccattactttcaaacacactttaatagtttgttggatgaagttattagaagggtttgttttcaatgcatattagcaaaggagtgtccaacaatagcacagtataaaaaggaatgtgacccctaaaaaaaggtcaatattattagtaataagtaaagtgttgtctatatagggacagctctcaactttgaaatagaaaggatttgagcttagtgttttggtattataatgaagtggaacttcgatttgtaatgattttaagatataaatatttatatatgctcatgacatttgatcattcaagtgggttcaatcaccacgaatcacgtcatcatctccttaaagttattaaatgattattgttttcttcttcttcttcttctttactaaagttccaatgattatgcgaatgtcacatactttaatcaagaaattaatcctacccttgtgtgatatatatgcaggtctttttgtttcgattgtatcaaacacagtatttacctaattataaaattttattataggataattgtgcgtggagattgatgttgagaacaaggatatgtaatacagaggaatagaatgaactatttcattcaattctttcttttttttttttaggaaaaagtctaaccactaaagactaaaagcaacaatacaataaacacgtttaaatatgagcattaggagacaattaacagcttattaataatttatttaatatttatgattatatgttcattagtagaaaataaaacctattttcagaattaggcattagcgagataatttctcattttaatatttttatattttgtgcctaattataataaaatttgacgatttgaccattagtgttactttggtgcactttagtattttagaattagcagagcaaattttatggatagtttgaatactggagttatgcgaggtaattgatgatgactattttatccgtaggttttaaaagttatttaagagtggaaaaaaagaacaatttggtaactttagagttataagtttgatattagttgcccttagtggaaatttttagggaaaagactaagtcttttgtgatgaatattaagttgattaaaacaaaagtaattagaggataaacatcaaaaaaattcaagaactctctctctctctct

SEQ ID NO: 81765 - DNA, 672 bp, Cannabis sativa
aaaatacaccaacacccattttccattacatcttagccacctgctttattattattattattattatttaaaatcatctcataacaactttgaaactctcaaatgaagcagttgatttttattaataaatgattatggtgtgagactgagtgtgactgcgattcatctatttcacctaactccaatccatatatgttttctttgattaaatctattttctgttttcccatgcaaattggcttaggactgcctcattctctgactaattgtcatttattattattatcattggtggacagttaatgaagaatcataatcaatcaataagcttaactttcctaaacaaaaaaacataattaaagtgggttcctcatttagttagagaaaatgatttttgggtatttgtaccttaaaccaaaccaattactatactaagacttacatttcaaattgataagaatgagattagattcttttctaactaaactaatttaaaaaaattagtatttttgatatacggtttgttaaaattttacttaaaatataacagttacataatcatgttcttttcgataaattccattagtttaaccgttaaaaattagtatttttacccattaaactttgaccaattctaaattttgttccattttataaaaaaaaaaaatcaaa

SEQ ID NO: 81766 - DNA, 2019 bp, Cannabis sativa
  modified_base (676)..(685): a, c, t, g, unknown or other
atccacataattattaatatttataacatatgtatattttttctctattcttaaagaaaaattaggggtttcgttcttataatttacagctatctatagttgttttttctggttaggtttattggtctttactgagcttaggtgcggctttttcattttactattgtcattcgatttttattattacaattattcttgtctctgtgacatgtttttgagtattttagtcttgttttttatgtcatggttttgaatgttttagtcttgtttatgtgacatagttttgttttgttttgtttcgttgttggttcttctttcttcttcaatggctcgccgtttaattattgttagtggttggagataataagttttttacgactgaagggattgttaatagtgcagttaaataccttacagagtagttgaatgctcaagctatgaggttaaacttactgtagtttttactgttgtgtcttctgaacagttgatgaaatagaatataactgtttttaaggttaattgtcatgttgcaattatttatttgtgaaacagtgtgggaattagacgattgatcatttagttcgtttttttaattctaatcctactcgtgtatgttccgattgaattccaaactattatttaataaaatttcatgctttattcaaaaaaaaaaaannnnnnnnnntatatatatatacatatattgatttcttatttatttttaatcctctttgaaaatgataagatttttactagttagggatttttactgacttgggacctttattttttatttttatatttgttttatttttaagtaataaatttaaagttgaaagaaagttccataagaaaatattgaaaaattatatagcacatactcaaaaaattattttggtatatttttatttgggctgaataattttttagtttaaattttttaaatgattgtatacattgtaatttttttaaaacaatcattataattttaaataaattaaaagttattttcttgtatgcctttctttcatataagtgagataaataattgttaaactatttgtaaagaaaatataaaaagcttgaagcaacaatttaaggattcaattcatactatgttttaagtcaagtagtgctctgctcgttaattctttattaattggtttcttctctaggcgtagctccatgttgtaactctgaccaatcctttatcccctttttattaaaggatttttggttggataagtggaaagaaaaaaaaaatgaatttcttccttaagttgatagaagagagtttccctattgcgttgacatcatcaataattaggaatcatcttgcaaaactacaacaaatttaaaagcctatcatgatataaatcttatattaacattagaaacttaagtgatgctcttgtattcttcttctacaagagacatagtacataaacacatttttttttttttttattcaagcgtttatatattacaacatgttttacctgggactcgaacccaagacctccaacactcacaaacctacctatggccacttgagctagcctagctcaagtgacataagcacattctttttagtaagaggtatctttccttccatgcctcctactttacataatatttaagcagaaaaataccaataaatatgataagaacaaaccaactttttgagaccattaatactcagtaattacacaaatcttcaaccatggctaaccaaattgaattaaagatttatttaactatctcctaatgtctttaggggtaaaatgcaagtcacttctaattcataaaaaatatcccttgcgcaagaaaatttccagggattatacattgctaaaatatgaatctttaaacaaaaaatttctcgcacctcgatacaaatagttctcatgaagcatcttcctaacacgagagctactgagatcatcgttcgtgtcatgaactagccaaggcattgccaaaaactgtaaatatataaaccttaaatttaatctgaactac

SEQ ID NO: 81767 - DNA, 1510 bp, Cannabis sativa
gattttgaacttgaggatggggtcacctcccccattttcaaccatgccaaattcaatggtcacatcacatttggcatttgagtaattgaaggcagtgtcctaggttgattatcaacttaggcactaggcctagcccttgatcaaactgggggctggaccctatttccagggactcaagattgtgcttttctccctaaatttacttgaatctttattatttttgatgacggaaaaatgcctagaacattttttgctgaactggtcagaaacagcccaaacttatgtgttaacctaggcgctgggacccagtttttccctttcagaaattttgtttggtccccaaaaatagttcaatctcaatattttctgtagacagagaagattctcaaaagaattcttaaaaaactccattttaaatggcctaggttgacatttgcacagggtcagccccaagtgtcaatctgtgggctaggcccttttatttatgcccaggaattgttgttttccttcagaaagacccatttccttgtttttgatgaagatggattcgatacaaaagtcatatctccaatcacacacttagaagacacctaaattgacagattgtcaacttgggcgctgggtgctaaatcaacttactctgattctgatgcctcaaatatgttcgtggtatgtctggttgatgtcccaatccaagtttttaccactttacaagaagacggccccgaaaacagaaaccctcattaaggatgtcaatttgggtgctgggtgaaactctaggtgcccaagttggcttctgggttgtaggttcgtgtaatttcagctccttgggcttggattaggttgttccatgtcttcatggtacagaatactaaaagatagtaggttggattcaagtcattgaagttcgaactttcatcctagagatcttgaagtcaacctgggtgcagggttagggttccttccttggttgactgctatgactcgggtctactaactttgtaatgtcatccttcatgccacgtgtcaaacattaatgtccacatcactagagaaagttttcgagttaacactaattaataaatatatttaaatgataattttgtttgataattatttataattattaaatagataaaattatcatttaaatgaaagagaaaaatggcatttttggaaaaagattggaaaatctcatttaaaaggattaagtggtaaaaatccaaagatgatgggcttattgtggatttcgacattattatggacttttaaggttcattgctttttactaaagcccattctattctaaacctaaacctagagagaccttattaaaggaacatacacggctttgatttagtggactctcaaacctagaaaatggaataaaagaaaatcttctctcctcctttttatatttttgaatctttctctctctctctctctttctcttcaatttttgaacccttatagtgatagaatacatgcccatgcatagcaagttggtact

SEQ ID NO: 81768 - DNA, 908 bp, Cannabis sativa
taaataaaatatagtgtaatacctcaatgccaatggcaactcctctggcttaggaggattaggagccataacacaaaacacagtgtccctccaattagctgctggggcattaaacagatcaaaattactattataccgaaccttcctcgacgaatcgcgagtgtaaaactctttcttcacctcattttcttgctcaaaaaacctcctcaccgcggtctccatttcctcaagaacacttagaggaataccatgattaaccacttgaaaaaatccccatgactcggccgcaaccccgacttcttgcacgatctcttggcgtcgagtcaaatcatttttgacgttttcgagatcaacaactggaatactgagttgggtttcccccgaatttgaatcgggtgatggaataatgttgttatcattttgttttggctcatagaaaattcttgggatttttgtgatgccggaatcaactagccctttgacaccagcttttgtgtcatcaaaagcttttagctcactttttctatcatagttgagctcatccatagcttaacaaactctagaaagaattagtgagtatttttaagctatgaaaaagtcaaaaagagaagaaataattgtgagtgaatgttagttattgcaacacattttgaccattcattctaccaaactatagtgactgttagttatggcattgaaattattcaaatgcattaattgctttgggttgatcacagatttggtgtagataaaatatcattccaagtatttatagttcatattattgagcttttctaccaaaatcctgttttctggaatggactcttaggggtacccgatcttagtggggcagaaattttccgtctaactgtaaagggttgatcccgaagtagctccatcatcaatta

SEQ ID NO: 81769 - DNA, 1304 bp, Cannabis sativa
ttgtgatatatataacttttttcaaatccaagaactcaactcgacccactccctttcaataaataggtaataaaatacatgcaataactatatatagtaggccactacaaaggagagagatgtagagaatattgtgttagtaattaattgaatatattggtttttgatagagtttgtgtgtggagttagggatcatcgtagacacggagatgccgtgtctgagcattgaaagccaaccagcttcacatatatatattcattaatatttattaatattgtaatatcaatttataaataatatatatgtacgaaacggacacacacaatcaacttgcacaatctttgcggcttcatcatccatctttatatatatcgtttctgcatgttgtctcctcatttattaattcattatagtatatatattactctctcatttctctatactcacacaatttgatcatctataacaactactaccagctttgcccataatagtacatatacagagatcacggctcaatagtcaatagttaaaatgatggaacaatttttaatcaaaaactatgatgcattccaatctctgagaactaccatgcctaacgttattaagattgagcattatatatatatatatttaaataggctgagcatgatttttttttttcaaaaatttgacatgatgtactaaatcatgcctccaaaattgataaaaatttaaattcaaaaatttttgtttaattttactaatgtagcaattgtatatgtactaaatcctactcccaaattttgatatctatcgaattctttttgaatatttttaatatttaccaaatcgtgtctcttaaatttcattaacgttaggattaattaatccatttgtaaaattaaataaaaacttttaaatccaacaattttaataatttttttttaaaaataaccacctaataataaaaaattcacactacatttcaatactaaaattatattgaatttaaccaataataattaagtgtaacaatttgtaataattatcatttaagttgattacataataaaataaaacctagctaatcaatttgattaactgcctgacctgatcagcatatagacaagaggtatcatactatgagcttttcctttttttttttttttgcactgaaaaacatgcatgcatccagttttggcagacaaaatttttagaagtagcagttattttcattcgtctactattcttgttatttgcaaattattataatgaccaatagatcagaagatacctctctctctctctgtgaaagtaatat

SEQ ID NO: 81770 - DNA, 1898 bp, Cannabis sativa
ttaattgattaataaaagaggtatttttcaacttaccccaatttatggtgtctaagactaacaccataccgataccgatgtaatgtgttgtgggtggtgatcggtttcttatattatttattaaattaaaatgtgtaaaattcgatattaatttgcaccaatagtggtatgttatatcttgtgatgtttggcacttacgagcatttctaattgagggtaacatttatagttgctaaagtacacctatcattttaaactattttttttttattttctttatcatctacataagatttgttacatttttcaaaagaaaatactccaatgatttaacttataaagttgtccaccattgtcttatattacattaaattaatgatttttttaggtaaaaaataactatgtggtcattgtctatattaaacaacactttatataaaattagtctttggatcacattgcatatgtagcaaggtcactttaataaactactcgctttagagatgctctaaggtgcccttagcatttctccttaaaaaaaaaatatcatttttggcacacttttgaaatttttactagtcaattttttttttttttttttaaatttacaatttttttcttttcaattttaccgaatcttataagcaatatgaaacaataagaacgcaaaatacaacaccgtagaaacaacatgaaaacacaacaatgtgaataaatagttcatatttttgtaaaaaataaaaagaacttctattccataaaaatatttaaagttccaatttttatcattttttatttatgggtcattattaagagaatttcattatcttttacttgtacaaacacacaatgttagtcttcccaacccataaattagagttctatacgagattgtttatattaccatactaactgatacacacaatttctggaagtgaattgctaaacccattaatcattttgtaaagttaaactagaacacggaaaatccacactcctatgtatgttttaagtgtggaaaatcattcattataccttacattcctcacattcattcaactcatgtgttaattatacatgatcaaatatgcttgcaagaaaagcctgccaaatagaaccaatcttaaagactcagttttcttcaacttaaattttacaataaaaaataaaaaaatgcatagcacaccactttattcaaaagcaaccccttcaaatcaaaaactatatatatagtcattcattcccactcatcccatatcaaacacttcttctctccattcaatttttcctttactagaaaatggctttctctttgctttctaagctttcccttttggcattgttgtctttgtctctctttgcctgttcttcattagcccatgatgacttttcaatagttggctactctcctgatcacctaacttccattgacaaactcattcatcttttcgactcgtggatctcgaaacatggcaaaatctatgagagtatagaggagaagattcaaagatttgagatattcatagataacttaaagcatattgatgaaacaaataagcaagtcagtgattactggttggggcttaatgagtttgctgatatgagccatgaggagtttaagagcaagtatttgggactcaaacctgttttcactgagagaaaagaatcttctgagaaattcagttatagagatgtggtggatttgcccaagtctgtggattggagaaagaaaggagctgtcactgcagtcaagaatcaaggttcatgtggtaagtacagaaaaaatggtgatattgtcactatttggtgctcttctacattggttttaatgtttatctttgtttatgttgagcaggaagttgttgggcattttccactgttgctgctgttgaaggcat

SEQ ID NO: 81771 - DNA, 2350 bp, Cannabis sativa
tctttctatcctatttatattttgaaaaacttacaaatatactagaatttgggttgacttttacaaaaatactgttatacagaaattttttcaaaaatattgtgtttttataaaataacagtggaacacaaagcagaacaactaaaaacaacagtagaacaactaaaaaacaaccatagagcaacagtaaaaacttaacacagtacatagtataaaacttagacagtatttttgaaaaaaaattcaaccccacagtaaaaaggtaaaaaaattagacatttcaatatgtggtgcaaataattctatatttttctatcctataaaaataaatttttttgctacccctaacatttaccgctggctccgagttcatattatatatttcccattttcggtctgtgagcattaacagttgtatttgttttcagtacctgttttttgctctttctgcctcagctccttccgtttcgtgctgatgttagaattttcagagtgtgcagcagtgagtaccttcttgaggaaaatcattcaatctgttatcagtttctggtcctaatttttatgatagaggcctaattttatcgaggttcttcgtagagtttctaattcatttgcagtatctacgaattattgttacatatcacacaatcaatataaacaccagggtgttcaatcagctgtgctataatggaaatacaagagagtttgagaggttctctataatcatcttcttcatagtagatcacattgaccgaactgttataaatcgttgtgtgtttttcgtgcaatcatttgtgttttactttctgttttggatcttagctacattgttcgatcttgatcttgctaaggttggtgtttaaagtgtgagtaggattattgagttcttcatttatatttatcatgaaagataagcaggaaaattcataatgacaaaataaaataataaagataatctaaataattgctaatttatatgttgaagcctaaataatgccttgaaaacattattaactgaaaagattcaattatgaaaatgaatattaaatgaacacaaccattcttgtggtcactaacagaggagaaataatggcacaataaatagcctttattcattttagatttgagtattgtcatatcaaattgacattgctcttaataacacaatgtggacacttgaacatacaacaatttatgacaacatatcagacaaggttcaaatgccagttaatttctaagttactgcaatcgaaaaaagtttcaactttattcaaagctgcttgcctgtgttgtaacaaacgaagtgaactattttccattgtttgcttttcctctcctccattgttttcctttttgcgaggcaactttcgagagaaaattttccattttgattcgaattccgaagctgcaaatcaataaaagacatgagtatcatcaaatcacacactacaatccattgtgaacctcaaatattcacactgctgatgaatcaaattacttgtttgcttgcttagaatgttatacaacttatcttattaatcaagactggtttttttacctctattttcacagacatgttcttgacccaagtgggttttagctcacatgatcatcaatgtgatttgttatagttttcatgtccccaaataatgttggactggattggttcagattttcaattttttcaaaccaaatcattattacggtatttaaaaattttaaaccaaactagactaattaaatgctcaaattgaacctcaccaatccacttaagaacgaattggtttagtttgaaactacggtttgtatttcgtaattgttctaatctttatttttaagtaattgtttttttttttacttttcaaagtttatatacatagataacaatataaggaaattcccaaacaatattaaatcaatataaatattttgcctaagattgttctcaaatatcaaaatatttaataaaataaaaaacatattaagtatatgtaaaagatttaggtgtttgatttaatttgaatggttggctagaattataaaaccgtgaccgaatcaaaaaattataaacgttgttaactattgacaacagatttatttagtttggtctgaaatgattcggtccgcataagttaggattttgaaccataaattgcgcattgtattaatagccctatgtactagagaattgataaaaggtactattggtgcttagcaccatccttgattagtagcaggtcccatataacttaagaaaataacttttaaagaatatcgcgaacaaatcttaagatgatacctatagaaggtgtgtgcgtgaatgctctaagatcggcagagcggttcagca

SEQ ID NO: 81772 - DNA, 3616 bp, Cannabis sativa
  modified_base (892)..(894): a, c, t, g, unknown or other
attaaaaagttgtcactaaaagtagctattttttgtagtgtataccctagactgctattttttgtagtgtataccctagaatgttaattaaatttccatgtcgtaattcttaattggtccaagttgttaactttttatttttttttaaaaaaaaaaaaaagaaaatagtttaaataaaccaataacacttggtattggagtggcaatgacccctacctactgattctgttataatcttgttgggtcgttccaactaaaaaaaaatgcaatttgattgctttaattgatagagacatgtttatttggagaagtattatacatctaacatttaaattaaaaacatagatattcgtttcaataattttctcaaattttaattagagtaaataaccatacgattgatacagctctcatttaattaataaggaagtttataataatatattttttttacatttaattgataattataatgttataactattactgacgtgccacatcagtcaaatttgatgtttctgatgtttttcaacgtcttttaacaatttttgttttattattattttcttgcatttttaaaagtaactttttttgattagtaatagtgttgataagaaactaattagttatctttatataaaaaaactttatttttatatcatataatttgagattcattttggttattttctaaaaacttatttgttactacaaaaatcttacttttagtcacaacaaaatttatgactaaaagtgaaaaagttgtgattaattataaattatcattcctatattttgattaaaaagtctgtggctaaaggtattagtcacaaaaatcacaatttgctatgactaaatgtgttttcggtcataatacttgttgtgactaannntaaattagtgacaacttgtatttgaatactatttttagtcagaagtaacattttgttgtgactaaaagttacatttagtcacaaaaaaaattatgttgtgactaaaatattatcactaaaagtaatcttttttgtagtgtatatacatcttagtaactaaatagttatttttaagttatatgatggtagattataatttaaaatatatctaggtaaccttaaaaaatattttcaatactaataagctgtcatgtaatataacaagctaccatttttatataccgattattttatatattttttatttgttattttaaaaactaattagttatcgtataatataacataatttaattaacaaaattctaaaatgaatgttaactaagattttgaaaaaaaaatttataaaacactaactaatcactatattagtaaccaaattattttttttttctcgaaatagcaaatatatgtttcccacatcttgaaatgttcacgttgaaaagtaggtcgcaatagtattttttaagctcatccgaataacgacgtgatcgtaaattatttttaaaatttcagagaaaagagaaaaataagaaagagagaaagatagtaacgcaagataaggaaaaaaatggaaaaagaacaagaaagaaagaaaaaaaagatataaataaagatattgaaacatacccaaacaaataaaatatttttgaaatttgacgaagtcacttttgacaattagatcaaaaacaggtaattttagacaatttctctaattaatatgaaaaagacacccagtatttctttacttttttttttcaaaatcagataatacaaaaagttcacctatgtaagttaaatttcaatttagatcatatgcttaaagaaattataaaaatgaccctatatttattaaaaaagtaaagaatagtcccctgaatacaagtttagtcaaattttgtttaaatatttttttaatttagctttagttacattttaggtgatttaaagaattaattattaaaaatgaacaacactattagtctttttaaaaaaaaatcaccaaaaaatgttcatggaactatttttcaccattttaattatgagagggttatttttattattttttacgacataggatctaaaatagaatttaacaataaatacataatgaaatggatcataaaatgatggacttatattaattatttgttttggaaaatttgagattttttgtttagtatttttggctcaataatataaaagatgtcacgatataattcccatatgacaatgatattttttttattccaaaatttctcccattcataatttttcttgtctctcactatgtgaattgtttatcttctctctctaatctatctcgtaagttgaaattccaaaacaactctaaaaaaccattaaattaaaggtgcccaaaatttagaaaactcattaaagtcaacagaaccataaatgttattgatgcattgttgtcaagattgtcattgacaaatcgccaaaaaggtacagactatgaaagttaccaaagacataattagtgattggaatgaagtcgtaacaaaatagttgtactggaaggtgagatcaccttctttttaggaagaatttcgattttttttctatttttttatttaaattttgtctttgttagtacatttgagattttggcaatttaattctattttgtatatatacatgggattgagttttttttctctttaatttttttttaattatgaatttgggtagtgttttgaattgttaagaaaaatttattttaatttttatttgttgtatgtgtcttgagattttgctgaatagagttcaataattattgaagaatacacttaacacttaacctcttgcttaaatcggggagagaagtcaatgatagtactaggttccgcctcggttccccttctggaatcacaaagagaagtaggtgaataatagggaccgaaagggagatagagagaactacgagggagagagaaagtggatttagtcggactggttagtggccatcagactggttaggtttagacagagagataggcagtgaaggaagaggtaagagatgaataggttagggttttctaaagttatcttgacataataataataataataatgtaattgtatcacaaattcaaaatcagtccctaagttattgaatttttaatatatattttttttgggacaacgtctaactatgttagactagaaaattttccaaaatatttttttagtccaacaaatttagacttaaaaaataggctatttttttaaaaaaaaaataaaaaaaaaatattgtatcatgtccactattaattttctagtccagcattgttggacatgataattttttttttttctagtccaacaataatggactagaaaactcccatataccttttcatgtcgaacaataattttgttagacttaaaaaagagacattaaaagggttttttgtggtaatgaaaataacaaaaatagatatcagttaatattatacactctaataatcaaataatactccaaacaaatacaaaacccactaaaaatattagagtagaaagaaaagatagagaaaataaataccctaaaatacaaatgcaaaataaaccaaaagaaaaagataaaaccaattgggctagaaacaaaaaacatagagtatgagtttggatattagattta

SEQ ID NO: 81773 - DNA, 911 bp, Cannabis sativa
tttttattgttattttgatgttataaacttgttacttttatatagtttttgactttttgtattgtttttatagaatactataaaagtatataaaaaaaaaatctttcagtgtaaaaatgtaaaaaaatttacaaaaaaaaattaattaatgtaattatcccataggccatattaataaataatatgttattgaagaaaaattaaagggttaatgccattttgaaatatgtattttgcacaacttagtaatttgaccatttattttgttaagtgatataatgaatcctgtactttttaaaataatacaaataggactatgaaatcaattttaaatatatttttaatataacaaacttgaagataattcttaatataaacagatacagaaaatgtaactgattttgtaataatacttttagatcgacttattattaaattttattttgataaaaaaaaattataatattatttgaaaaaatgctcagacatttagtattgatgtcgagaccaagatcagaaagaaagtccctaccaacggtacgagaaaccataaaccaagtacgagattaaaaagagctccctacacttatgtggaagagcaaaacccatgagaacgactttagcttcactagcgaaaggtgagcagggaccctgaataccaaaatcagttctgttatcctcttatattaaagaaggcgagcactgcctcccgaaccacattaaaggaggcaataagcaaagcgagaaaagacagtgggaggggagctccagctatgtgttatgctgctcccacaaagcgaactaagtgaagctcttagttgttcttatccgattagtaaaaataacaagaacaaaaactactagctgcccagctctttggcttttaccggtctgtagggaaaatgtgagaa

SEQ ID NO: 81774 - DNA, 1049 bp, Cannabis sativa
cggcccaaagtatttttgtaattttttttccttttttgtatttttttgtttttttccctaagttttttatggacaaatcttattagggaatatttgtgtaattattatcattttgggaaaaaaaaaattatacaatagcaacatttccatcaatatatattgcctcttactcaataaataaacaaataaaataaaatgcaagagcaaaatttctatccatttatctaatatgttgcttcttgttcaaaaaaaaaaaaagtttgtgttatttaattttcatttgttatggctcatagaataaatgtaaaagattgtctattttctttcaaaggtctaaaaaagttggtttgtgatattctttatggtgatttgtccaaataattcataacttattttcgttttaatgtttatttaattgtttatcctttaattttcatatccaatttagtgcccacttttcaatttctaactctatgagtgaaatccttatccatatagtaaatatttttaatgacttgtgaggataatgaagttgagacttttacttagcttatttctgggaggcttttatgtactattgtttgcagtaagaaggttcaagtttggtgtacacactcacaactctaaatttattaaaagtaatttatatagttcttattggtttgttactaatattttgcttgaatatttgtgtcattttacaattttgacttgagaaaatattatgttgacattattttattccgtttaaattgctagacactagcaataagttaattggggattgtgattaatgctcaaatttttatattttaaggctttaattgtgtgtataaaagcaatttataataaatattttgttggtttcaagtgttaagttattttagttgagaatttagttttctttaaatttgatgttacttttcagatttggcaagtgttagggattctcaagctcaaagcctaagtgatattatatacaaatggagcaatgctcttgggtgtggacttcatagaaagaaaatgggctcaaaaagacccaaattctt

SEQ ID NO: 81775 - DNA, 1693 bp, Cannabis sativa
  modified_base (47)..(49): a, c, t, g, unknown or other
tgtttatttcatcgttttagaaggttcatatttagggtgttaatcannntacttgtgagtagatctaatatcctggtaaaataattccaacaaatccccttgtcttttgaatttttaatcaatgatgtgagaccctccgcacatagaaggaacaactatggagacaaagggtctccttggcgaagaccccgagccggtgtaataggacccatctcacggccactattaaccaccatatattgaacagaagtaactgtgaccagcaccagattgacaaaacgattttcaaaacccattttaagcatcatggcttgaagaaatcccactcaattcgatcatattccttactaaggtctaacttcactgtgatataaccttctttccactgccttttgaagtagtgcataacttgaaacgaaaccatgatattatcggagatcaacctacccggcacaaaagcactctgtgtatcagattttacttgggggaggatgagtttcaagtggttagctagaactttggtaatgatcttgaaaagcacattgcaaggagatatgggtctcaaatctcccatggttgtaggatttttctttttagggataatgacaatatttgttttgcacaaagcattaggaagcataccagtattaagaaactctcgaacttgagttaccgcatcgcttcccaccacactccaatatttttggaagaatctcagtgtcataccatcagagcctggcaacttgtccgggtgcatttggaagagagctttgcgaacttcctctttagtaacatctcggagaaggtcttcattctgctaaaaggacaccaatagcaccacaccttgcacaatatcatttgaaatagacccactagacgataaaagattagtaacataatcaataatcaccgatggtagtccagtatcccaatccacccaacacgcacaagcatcttgcaatttatgaatcagattattttttgtgcctagaagtagctttcgcatggaaaaacttattgttttggtctactgcttctaaccataactatttagaccgttgacgccaaaaaacttctttttgagtgaaaattttgtggagttgctcctaggcctttttgtatcgagccaatatcactggcttttttaagcttccttatctcctttttacattcagcaatcagaagcttgaagttaccagtaaagtcttttccccacagattaaaattttttccaccacagaattgttcatgcctaactcccagctgtctttgaccacctaaagacacattgtctctttaagccacacattttcaaaccgaaaatgacgtataggttgagtaaagttcagcaccacaggttgaagaagaagaggacaatgatcaggcatagaacttcaaggttaaataactgtgctgatgtaaacatttaagaccaatccgcattaatcaacaccctgtcaagccgaacctcaacccacctttcggtgcctcgaccactttctcacgtgtatggataactcgataaatccatatcatgaagatagtagtcgttcaatgcttcttgaaaaccatccagcaacgcttgagggtacgggttgcctcctcttttatcagaatgtgagagagtgttatttaagtcaccaataacacactaaggcaaagcatacttagatgatagagaccttaaaagatc

SEQ ID NO: 81776 - DNA, 873 bp, Cannabis sativa
taataaccattaaattgttaatgtaaagagttgttatacatttgataaatagtcttagtaataaatattagtttattatttttatttatatacattaaattatttgttatttaaaatttatatgatccttaattttttaataaaaataaattaataaagtttctaaataacattaagcaaatgtacattgcatgcatattgcttgctattatatatttatcaaacactcctatatgtatacaactatacctcatcactattttctttagttaataattctagcttttctttacacaacctcaactcatcttctaacaaactcttctcggagtcgtgtttcgtcacgatccattgcaaataattaatcatttgatcatcatattctagtttatactccaccataagacgaaattgattagcttccatttctatggtgttcttctccctctgcagcctcaaaattaccgccattgcctccattgctgccgatgcagccgccattctctctttatcaagctcgtttcgagcttttttcgcccgttttctttcaatttttactaattttctcaatgaaattacccgaaattcttcactaagctcacaacacgaattaacttcccgttcttttacatctttatcttcgtactcagcttcattgttattgttgttcaaatcatcacgagtatcattacacaagcaagacacggtgatgttctcatcacgacccttgaaacgacaccgtttatcctttaaattcattgcttcaccgaaaaaacgactcaaaatttgtgtcaagttaagcaagtaacccattcttagaaactttaggcccaacaaaaacattaaaagcagcccaaaaaatccaagaacttg

SEQ ID NO: 81777 - DNA, 695 bp, Cannabis sativa
tggatatggaatgagtaaatagaaatttagttcaattgaaatttgacactaactcgaagagtgtattttagaaaatttgtcctgtctcaaaaagaactattatctaacaagttttcccttgacatttggtgatctcaatttgccctttccctttgaacttgatattattccttttattttataacataaaaagactgatataaaaggtttgcattaattatataattcttatatactaaaaattaataccaaattatacactaaaaatctgcaaaaatatgaatttaatttcaggatttcaaaatatatttagggatttttcatatatttatatgagtttttgttttgtttgtatattaatatttttcttaaaaaaaaatgtataaatatatttctcactatttcaaaaaaaaatctcacatttattacatcatgcttaccgtttttgtagaaccaggtggtacacataccaaacaaaaatacaaactgaggacaggaatatagtaactgaattttttttcttaatttcttcctaattaaagtgctttaattagttgtaattgggaaacccaatacaaagaaagattaaatcaaattgataatgacgatatatataagtctgaaataaaatctatatagtatctttcatcacatcataatatgctccactattaacagtcattttgtatagttag

SEQ ID NO: 81778 - DNA, 2196 bp, Cannabis sativa
gcttgtaacgtgccatcacagactccacgtaacacaatgcaatgcactcctttctaaaaataattttcttaacgagcaatgcattgctatagggcaccaaaattcttagcacttctacgacatgacgttatataattggctaacgattctctataatctttattaaattaaaaagtattgttactgtgcaccactgcccaacattttttataggtgacactttataattagttagtgatattctataatactattttgtcaaataacagtatgacaccgaggagagttttcggtacctgtagtacttttttaatatttttctaaattaaaataagtgaaatctgatattgaattacatgaataccgataatacacatcataatccaacggtcaaactttcccatccccacattttgatccaacggtccaaaatttccaactaatctatatataaaaagtaccatatttcaaggattaagacccaaatcccccattttctgcaacaaccaaaaaaaaaaaaactcaaagctttctctctctaaaacctccccaaaaccatggcttccaatccaaaaccccaccaagctctgatctttcttctccttcaactctttttcttcttagtctctacaaccaccggtacctcatcttcttcttcacctccggcaccgacggtcttcgacatcctcccccaattcgggcttccgagtgggctcttacccgactcagtaatcaactacacgctctccgaagacggtcgattcgtcgtcgttttgaacaacccatgctacatcgagttcgattacttggtctattacgataaaaccatcaagggtaagctaagctatggatcgattaccgagcttgaaggtattcaggtcagaagattcttcttgtggcttagtgtggatgagatcagagtcgatttacctccttcggatagtatttacttccaggttggatttattaacaagaagcttgatttggatcagtttaagatagttcgttcttgctattttgctgctactgcctctggttgtggtggtggtggtggtctccgttcgtggaagcaatttcttgaggtattgttatataaatatgtgtgtatatatattgattgattattgagatgttatgaattaggaacacttcgaagaaaattatcaatttcatgatcaaactcttgaaatagaaactgttctgttcatatttttagagtagtttttaaagaattgatttttatagttttcttgatttgggttttttcgtgtggagtttttaaatttcaaagctgttttagttgtttattgttttatcatgaaagagtttaaggagactgagttatattctagtggatattctaagatgggatttggtgaatggattagaagagttgaataaataggctactgttgactttttgacttttatgttttgtttgtcatcagtgacatgttacataatatgatctatcctaattaggatttttgcccttaaaattgaacatgtactaaattactgaatttttctaactattaaaaaattcctactgaactattgaaatccttgaatttaaggatttttatcaaattttattcaattttactaattcggtgattgttgaagtactaaattattatctatcaaattatactcttcaaactttgacatgtaccaaatcatgtctcttgaacttttatccatgtcagactttctttactaaaattggacaaaattttttaaatctaacaattataatagatcaggggatttttaatgactttaaaagttcagggtatggtttgttacatattaaagttcggaaaacaaaaatcctaattagcttataatctaagaatttagctcgttggattgttataaactcatttggagatcttattgaatcgatctgttcagctcaaatttgtgtcttgaaactcaaaattaggataaattttttgctgttctttcactagttctataatgtcaatgtgaagatatctcaatgaaatgtacttttggattataaatgcctataaatacataagggatctctctatattgttctaggaacatattatgattgaattttgtttgactgaacatttactctcattcttcagctgttgagtttgagcatttaagcaagttctcaatgccttggcctgcttaatgacacaaaattttctcttattc

SEQ ID NO: 81779 - DNA, 1534 bp, Cannabis sativa
aagaatttttgttagtcttgcttaaaaagaagaaagtatctctaccaatgttagttgctctgtactttattatactaacaaatataaaatcagacagcataaaataattaatttggtggtgtcatttatataaggcaaataacattaattattaatgaaattatatttttccattatattaaattctgtagtgggtctcctttaattagcctttaggtatatgaatacaattaatataaatatatataaaggtctagctatatatgattctttacatgcaaactataagattggtactttatgttatagatatagaatatatatttgcatctttctgtctatttttccattataatgaatcatgttcatttggtatttattatgactaatgaatagtgttattaaaaaagtttatcaagaatataataatgttgacatttctacagctatacttttaaatacagctgttaacatttagaacttgtttgagaatatttcattataattattgtgttgttgtttatataataagttaataaataaattaatgctgtttgttttttttacatgaattgaatgaggttcatcaattaaaatatgtaacatgatcattaactacataaatagaaaattatagataaaaaagaattcccaccccctcccccctaaaaaatgatgatacacatatatattattttacccgcaaaatccaatgcctataaattacttataaataatttttttttttctttcactgattgtatatacattattgagtgtttctataatgcaccctattaaaataagtatatttaaagctgaacatgatctaatctactctaattgaatcaaaccaatccaattcaattacaaaaaattggaaatatctaattagagttgggttggattgaattggatgtctaaaattaaacgtcaatttcaaaatctaattaaaaattgatcaaatctaattataattaatatgtatcaaaaaatcatttatgtgaagtaaaactatttgaaaaaaaaatgatccaatctaattataattaatatgtttagtccaacttttagctacttaaaattgtaaggatatgatactttttttttagaattttaaacttaaagggtgataattagttttaatgtaattttcttcatgtctttaagtttatacaaaaaaaagttagatgtataactggatatctaattacaaaattgatccaatacaattagtataaaataaaaagttacacgtgcaacagactgtttgaatcgtgttttcgatgtgttaattttttttttcaaatttcttaaaattttattagatgtcttaaataactacaacgtatatatacgaccataaaagaaatttagactaaattatttttagataccgaaataaataaagttgcatcaatacacttattttcccattttaaagaaatgtattgtagaattttcagttattactttgtacatggtagaataataataatttacgtttttatttaaaaaaaaagacaataattta

SEQ ID NO: 81780 - DNA, 1510 bp, Cannabis sativa
  modified_base (752)..(754): a, c, t, g, unknown or other
  modified_base (796)..(806): a, c, t, g, unknown or other
aattcactcgttaaagtttctcagcgaagataattcttacaacttctgttttgaaaatctaacaatatagatggttgaaaacttaatttacaatatggaatcctcactttcttaacagattgaatattaatttccttttaagtgttaattctaaaacttaattaagtgaatggaattttaaatatagaaataccctttttataggtatattattatttccatgttttaagttcttttgttttgtttttttttttttcagcttttaatatatttctctaattttttgcatttttctaatttagttagaaaaattctagatttatgtaaaaaaaaaccaaaatacttttacaaacaaacatataatattgcatataattgaattaaattttgaaatttgtacatatataaggtaattctttggtaggacttagcaaaagttccctactggtatgaaactttttttttaaaatcaatggtcaaaaaaattccttaccgttagaaaacttttactagatcctactataatcttaccatatatatactaacaaaaaaattataacaatttctactagagaaaaaataatatacccaaaatttattaattattgttatattatatataattattatttttttgcttggcaaatattgtacttccattatttaagaaaatttacattaaatacataaaatcatacttcttttactattttttttttgggattatttcacaaaaacataaaaacaacaannnaattacaaaaatatagttttacgaaattttaaacatttttannnnnnnnnnnattttatttacataaaatacaatctttttatgttgtaatcttgttaatttgttcttgattttttgttatctgtatgttattttttgttgttattatgatgttatttttatgtagttttcttgttaattttatgttgttttcgtgttattttttaaaaaaccgtaaaaatataaaaaaacatctttaaacgtaaaaatgtaaatattttacaaaaaatattgtcctatataattattcttttcttttttactattttcacattgctgtaacatatatttctgcaaggtgaaattaactttttatttaatataaaaaaattgtctgtatcatgttatagttagttaacaattctttataatttttactaaatttaaataagtaaaagttgatattaaattacaccaataacacctatttagcatttcacattctttaaaaaaacaaataatgatatgtaagagaaggtcaaaagcacggtagtttcgtaaaaatggtaattttttatttctcattttttggtatatatgaaataatccattaattaattcagtgactaatttattgcattttgggccggccacttgtcttagtttttgcgcccgaggaacttacattgtcttcttttatttttagggtaaatactattttgaaccctgtgttttgcaaaagttacaaattggaccctgtgttttgttaaatgacaa

SEQ ID NO: 81781 - DNA, 758 bp, Cannabis sativa
aacggtttcttcggaggcagcagttacaagatgaagtggttacagaggtgagacgtgggaaggaggtgattgatcattcctcaatcactaagtcaaagggtataatggactttgtaaatgatatgggccttgtgaataatgggactgaacccattaatagcccacatgggagtaatgttgaacatgctgggttgagtagtgttgggctgaagggtgttgggcctaataatcaacaaaacattgagtttgggaatgttacccaggaacaaaatcgtgaaaagctagatactgaaaagggtattcgaattagagggcatgaaaaagatggagataattctgcagctgatgatgaaggagaggctcgaaaaaggaagtgtgggaggaattcttttgcatctggtacaatggattgttctatgggagggggaacgctggtggccggggcggagacgggaagttttatgccggggagtggtgtggagattaatggtgaggatcaacagagtaatgggcgacggaaaagggtgtccattaagcataaagctcgaggtaagaataagatgggaggacttcgttcggctattcaaacctctgggatacaggcggctcaagcagatggtaaggaagtgtttaacatgggttgtgtcgagtcaatggagggggatagagtttctgctaatgtttctgaggtaggtgtttctagttctatggatttacctgcttcttgtattgaatctgaagcggcgagccttgatgat

SEQ ID NO: 81782 - DNA, 742 bp, Cannabis sativa
tattttaaaataatatatattttacaaatacatctcattagttatccacttatttacttagatataaattttagatttgacttttcaactcacttgctctttattatatacatatacatatatataatatttttttttaatacattacagaaaccaatagtcattacctatcatatatatatatacatatgttaattataatagtgtaaaattgtgggggggccaaggccaccctaaacttcccaatacctccgcccctgtagataaaggaccgacagggtcagtgttggagttataggaaaggagaggtgaatagtgacagatattagagagaatttttgtttttttagaaaaatattatgttatgatcataaattaaattaaagaggtaaagtaaaattcatttagctttagagtatatctaattaaagtatgagtaattatatctaattaaaatatgagtaatcatattaattgtacgcttgatacgaacaacgattataactctaataaaaaaaatataaaagactagaaatatatatatatatatataattaaatcatgaagaaattagagacaaactatagttggtggcttccatggcacttgcacaaaaattagggagtgacggcgggtggagcgacattgtgggcttaacttggtggaatggctcgttgagagagagataatgaaaagtatatttatcgtaatagttataatatatataagttaattcacaaca

SEQ ID NO: 81783 - DNA, 1889 bp, Cannabis sativa
  modified_base (1821)..(1851): a, c, t, g, unknown or other
agtgaaacttaacacagtatactagtaaaaaagtaaaaaataccgcctggcagtatttttgtaaaaaaatggcaaaagttagtataccatataaatttctcaattttcaatcaaatcaaaatttttaaaatttttatatatataaacacataaatcgtgggttgttgccaaaaaaaaaacagtatacagtattaaaaagaaacagtaaaaaagtaattttttccttacaacaataaaattgaaaaataaataggaaaaacagtatgaggtgtaaaaatcttttttttttctttttatgatatattttttaattaattcgggttatagacttttaacaatttttatatgtctattgattgaactatgttatatttttgtaaaaaaaaaaaaaactgaaataggatattttttttttcctttcctttgtttttcccttacaaaaactattattaaaatattaaaaagaataaatatagctctgagatgcaaagtggatattcgagttcctcaatcagtatagtgtccttgcttaatacccaagccttattctcttcattatcctcattcatttttctcttgtttttttacaaaattctaatagtttggaaccatcttcttgtgttttgttggattttaattttgttgttgttacagttttagatatatgtagttttgtattactgtaacgccctgatacttaggcgcgctacaataatttttcaattacagtgttacctttgctaattaatttttttttcttgaaaatcgtgttaaattaaaacttttgatttaattgctaaactttataaactttcatacaattattcacagaagtcgggatcccgtatttaaatttttacaacattatcaaaatattttttaaactggttgcacagcgactacaaaataaaatcctagatgtcccgagaccaaacactccaggttgcgtcgccatgacatgtacaaacaccatcctagctcaaagctcacttttgttcagcttttgcatttcctttacctacacatggaagtagcaactgtgagtcgacagactcagtaaggaaagcataatcattaacataacaaaaatccgaattataatcaggtgttcatacacccaaccataaccctttccccgtgtctaacacggtactgagtctagaacgttcataagacaatactatcgaccataatatcagcctatactcgacactctagtcatactctagtcgtaccgatgtgatagcgtcaaccataatatcagcctatactcggtactgagttcttcctggagcttttggcacaaattggatttgtccttggcctccttttgagcttccttcaagttcaactttgttggccctcttcacctcctcgacctctttatttaggcgagagatctccgactgagcctcgttccattccctggccacgacctcacgctgcccaatggtcttctaaatctcgctttccagttgtctcatcttgtcgagaccccgacattgggcgacaaaagagatgaaggtttgctgaaaataaataaaaagaaatgcataggtattttgtaaggttgttagaaggaaaagcaaaatgagaagggtaaagaaactaaccgagagaccaaaaggacactcctctcgagcatctcgttcaggctgccattgttgattagatcccagtcgttaggcaggaaggatcagaggtgacgccaacaagccctagcatactgcgtagaatgctccgagccagcgctcccactctcgatgggcagagtctcaggcacttggctcgaagaggctgctgttggaaatattttaccannnnnnnnnnnnnnnnnnnnnnnnnnnnnnntaacatcctaatataaatttctaaaacaatgaaataaa

SEQ ID NO: 81784 - DNA, 2141 bp, Cannabis sativa
  modified_base (1627)..(1632): a, c, t, g, unknown or other
tttggggattcaaatcaaccaatcgaccgaggatgattattggtactggtttggtgaaaaagatgggacttattctgtcagtagtgcttataaaatgacccaagacaataaagctccttctctgaacttaaccgaaagtatctattggaagaaattgtggtctctcaaggtgcctcccaaggccaaagatttgatttggagggcggtctctatttgtctagctacaagggtaaatttatccattaagaaggtgttgacagatagtgcttgccccttgtgtggtatctatgctgaaactgaaatacacctatttgtgacatgccaatttgcaagctcttgctgggaagaagctgctgttgcagatgccagacgaaacaataattctcttctgcaatggatgtccttcaatgcacacagcaaggacaatgacaagcttagccgaatagtcatgctttgttgggcactatggtcggctagaaatgatctaatttggaaggaccgtgttcgaaatgttagtgatgtagttgcttttgctttctcaagtcttgatcaatatgttaaagctcaaggtaaaggaaacattcctttacagtcacccctcaaagatggtgatggttcggagctttggaaaaaaccgttaacaggcatcaagcttaacgtagatgcagctatattcgatcgtgaatcaaaacacggatttggttgtgtggtgagggactcgggtggagatctgctctcggcttttgccggtgtgaacttcggcaaagtctcccctgagttggctgaaatcattggtataagagaggtccttagctggctcaaggaccacggatacacggacgctgcagtagagacggatagtttggtctgcgttgaagccattcgtcatactgcaagcttcaattctggtttcggtctggttgtggaggattgtaaaactttgctaaaaagtttgtcaaatgtttttttgtttttcgttaagcgttctgcgaaccgtgccgcacactttgttgcccgccactctattactttcgctgaatgtatgttctcaattaatagtgttcctctagagttgttatcccttctcatgagcgatagctcctcttaataaagaacacttttcttcaaaaaaaaaatatgtaacttacaagactggctttggtttctttctcatacttggcttcgtgaacacctaaagctggaacagagctcattttcagtgtcttctttgttatttgattggctactgcatcactgtaaaaattggaaagtgataaataaataaataaattgagatgtcaaataaaaatcaatgattgtcccataataattatccagtccaataaattataattaacaaaaaaaaaaaaaagcacaaaaaaaaaacacagaaaaaaacaaaacatacccctgttagcagaatattcttgttcgtcgatctcaatgctttcgccttcattttctgtgttaatgagaaaaatgaggtgcttcacttcttgttctgggtcctcaatacccctatgcttttctaccgctctcacatcttcttcttcttctttctactctcgctttctacattccaatacaatcttcgctgcttctggtatctctctctctctctctctcnnnnnntctctctctctctctcattattaaagttttgactttaaagattacttacccttttttttgtttgtattgatataaagtttgagccttctgtttttgtttcgaagtgtcagagaaaaagtatccagttttacgtgcccaatatctcgattacaagagtgctgagccaaaattaatcgattcgatggagtcgggaaaggaagattcgggtttgaaaagagagctttactcagttatagagccttacagttcggggtttttgaaggtttcggatcttcacacaatttattgggaacaatctgggaatccagatgggcatgtgagtagctttgaatgtggagaattcttgttaatttatgtcatgtgtagataatatagtcagattggattggagtgcattgaaaaatagatgagaaagataaatgatttgatcatttagtaaataaaataaattagaatcagagttagatgcttttttttttcatactaatgttaaagatggaggttaaata

SEQ ID NO: 81785 - DNA, 1295 bp, Cannabis sativa
atgcatggggcacctggtgctccgagtgctcaaaaataaaagttctctgaatctaattttaatgtttcagatatatttgtggtatgtttaatatatgtcccaatgcaaaatttgactcattttacgctaaaatggtctgagaaactaaaactttattatgaactcgagcgttggctcaaactctaggtgcccatgttagttttgaggtgctaattcgtacatttttaactctcgaattatttaaattatgttttattctatgtattatatatattaaaaatatatattatctaaatttcaacggagaaaatatattcttatagaaagaataaagaataaagttacaatttaaacgtgtgaatataatattaaaatatcctatatatattaaatgaaaaaaaaaaaaaactcaataattttcatatatatgtatttattatgctatcatattttaataaatacccttacatttgtacattgtaaaatataattaaataatactttttgacctataaattattatagtaatgtaagatttttctagtacaacacatactaatattgtaatgtaagattaatgtattgaaaataaagagtaataataatggctaatgtgacattacactttacacacaatgaatttaaaaagatctcactcctcctagattacagacctaaattcggatctgagcttcgagacccaaactcagaccccaactctgctcccaaacttgaacctagacccagatctggaaccctaaccccgatccggacttagacatggacacaagatttggacccagacccggacccagatccggacccagaccccgaacccttaactcagacccggccccgatcccaaatctcaggatttaagtctaagtccaggtccaagtctagggttcgggtttgggtccagtgtcgggtctaggtccaaggtcaggtctgggtttgagttttagatccgggtctaaagttcggtacgaggtgggatgggttcatgttatggaatagtatggtgtaaaatatatataaaaaaaaaaatctaaaaatagttttacaaaatttgagtcaaacaccattaaatttttaaaatgacaaaaaattattttctattcttatttttgaaaacacaattttaaaaattgaaaaccagccaaatctaaatacaaatttatattattagttgaaaaacaatatgaaattttatgttttctagcttttaacattattttcaaaagttctccaaatattttacactttttcattttaataaataacaaattcaattt

SEQ ID NO: 81786 - DNA, 1066 bp, Cannabis sativa
tgtaagttcatattggaaaggatttaaggggctttaatttatgattcacttttatattggttttcatacactcctatgttaactaatcaaaaatagatcgattcaagcattcaatatatatacataaacaagagctttgaatattagtataagaagaaatttgacaaataaaactcaagaaaaaagacttttctattgttttgaatctaggggtcaaaagtgatagtttgtgcaagaaacatcaactatatattttgaccatttatttctacttatgaatccatacatcttatgggctgtgatagatgttaattatacaatcaaaatttcttttagatattgtaatgacagtttatttactaaagccatttctatttatggtggaatagataatgattatgctctatttaatgtagctaatatattcaattttgtttgtgtgttgttgagtggtatttattgtattatcctggaaatcatatattagtttttctaatttatatatgatgaatagagcataattagattaaagtgatagatcgtttttatctgtaatgtttattagtccaattatatggtgtttgcgatttggactttttttccctcaatcctttttcttgtgagttactttgtctattatgataagtaaatgatgttttttattgattcatttgtttgtattggaacttttttcttttttctttctcagttaggttaattggccaaaaacatgtatccattcaacagtgtctctttgctaagtttaaagttttctttggagtgtatgattttatatgtgattacgatatagatattacatcaatgaacctgttgtgcagtaagataagaatttcaaaatgaaaagaatggaatagagaaaatgatattgtcacccagacacaatattttaagaccccacgccctaccaaaaagatacagtcaacaattgatgacaatcgaatgactgagctggagaagagacttcaagatactgatgaaatgtatcgccaaactcaacaacaattgaaggaacttctccaataattgaacactcaacatagcaacg

SEQ ID NO: 81787 - DNA, 1691 bp, Cannabis sativa
ctctctctctctctcttattattacaaattttcttcacacaaaatggatctataatgacgacattgaaaagggttatgggtattgtgaagagaaacatcaccgtccactttgaaactcaattatgggtattttgaagagaaacaagaaaattcaattagaatattgtgattgttatttacacgagaattaccatttgttgtttttcaatttattttgcagtcaaggtattaaatactgaacttttcaattattagttattgaattactttaaatcaaagtcttttgttcatatgcttttctgggattcatttcatttcagctctgtactgttctggttctgcacacgatagaacttgggctcttcattttggaagcgtcattttcatgcttcaggtttttgtccttctttattaacactccttttcataggttaggttctaattggtttcatttgcaaaaagtgttttttttgggtctatttctagggttttattgctcgtagaacgagacttctacaaaattttgggtgtttctcgaaatgcaagtcaagttgagataaaaaaaaaggcttttcatgcagtaagtttaacaaagtgagacttgtatagttgcaagaaagggttttatattaatgctctaaagtaaaccctttgctcatttaagttgagaatttgttttattttcatataaaggagtcgaggacaattatatataatttgacacaaatattatttactgtaattatttatttatgtttctaaggtttgttgagtttaaaattttgtgtagcttgcaaaaaaatacaatctagataccaatgaaaacaatccttatgcataggaaaaatttcaagacataagagatgcttatgaggtcggatattgtgcttttcattcttactattttattaagtagacatgtgttgctttctttggtttattgtaaatattaaaaatgtaattcaagtgaagcaacagaagattttatttgtatagacaatgttcgaacagaaggtatatatgtttaacaaggagttgagcacaattttatttgttgaatatatatattatatgtatacacacacattgttgtgcgcaatgtaatgatacgtacattatatacaagatggaaaaaccaatattaacttattttgatgttatcctttgttattgaaaatcatttaatattaggatgtctttttctttctatgtatatatgtgtgtatatctgcaattatattggattataggttgctctttatttaagtttctaaattaattaattgatttggtttcagagttagcgaattgaatttacccaaagcaagaattttttcatttgcaacaaagatagatttacagttcatggcttctattgttattacgaatgatgcatgacatttccacttttttttggattgcaaaacctatttatgtgggttcatactcttttcattcttcctattgtattaagtagacatgagttgctctcttttcattcttctattttttttttttttttggtttatttgtttagacaatatccaaatagaaggtatataacaaggagttgaggcgcaatttttcttgttggaattgtaagtattatatgttagacatttaattgtataaactgaaacatatatgattatgtataaattgcgaaattaataaaacatatatgcactata

SEQ ID NO: 81788 - DNA, 3628 bp, Cannabis sativa
  modified_base (1688)..(1697): a, c, t, g, unknown or other
  modified_base (2528)..(2534): a, c, t, g, unknown or other
agtggcggtcagggagtttgtattcccctaaatgatgcggtcgaagtaaaggccttagaagcagggcacatggccggggtgatgctaacccgccacaggctgcccaagctgcccatgatggggaaaaaccggtttgcagcaatgcaagccaagatcaatgaacaagatgaagagattcggcggttgagacagcagggtgctcctgcaatccctgcttcagaaaaggtagctcttgccccagctatgcaggtaggactagtcgctgcagtgaattgaatggaaccattttaaggaaagttgcgcaagcaagcacctccagtctttttaggaggtcccgatgttatggaagccaagaagtggctagcaattattatcaggaattcttaatttcatgggcgttaccggcaatgacatagtggtgtgtgccacacaccagtttcaagaagacgccctagtatggtgggacatggtatccctaactcatgatgttactacaatgacctcgggtaaaagtgccaactaatcttagcaaggaaagataagtacctggacgagttgcatgcaaagattagacacgacttgatgatcactaccgatcacaacaccacctttgctgatatggttggtaagacactatgagctgagggtgcagtagtgtgcactgtggagtcttgagagactcaggttgttggtggggtaggggaggtagtggctcgaccactgaccatgaaaagaaaggcacctactgtaactagttgttcgggtcagaacaagaggctccggaggaactagggtagaggcaatcgccagagtggcactgaaacccgatacacttacccagagtgccccagttgtaaaaagcaccatctggggagtgtaaggggcaggggtgcttttagtgtggaatgtcagggattacaagagggattattcccagctcaggactgaaataccaaagactgtagcgaaacccaccctagcaagggtgttagcgataacttagactgatgcagaagccaacccctcaatggtagcaggtcagctctcggtcaacaactcttattaatctgtgttgtttgactcttgggccactcattcttatgtggcggccagaatttttagtaaattggatagactgcatgatagttatgaaacacggtttgaaaccctactgcctggcggagagttagttaactccaaagggtggattaggtctatgccgatcagagtagaggatagggagttgagtgctgatttaatagagatgaatctagtggatattgatattatacttggaatgaatttcttgtccaagtattcggccaacattgattgtaagaggaagatggtaatcttccaaccagaaggccaagaaccgtttgtctttgtcagatcggttcagggatctcgaatcccggtaatttcggtactaacagctagggaattgttacgagagggatgtctagggtttctggccgtcgtattggataccactcgacttgactctattcggccagaagacatcaaggtggtttgggaatttctagatgtttttcccgatgaacttccaggtttaccacctcagcgagaaatttatttagtaattgacttggcactgggtgtagaaccgatttctaagccccttacataatggctccagcataacttaaagaattgaaaattcaacnnnnnnnnnngcttgacatagggttttctcggcccagtgtgtcaccctggggagctccagtattgtgtgttaagaagaaagatggatctttgcagatgtcgattgactatcgggaattgaataagctaacaatcaagaataaatatcctttacctaagatcgacgatctttttgatcaacttcagggaagactgtcttttcgaagattgatctccgatcgggctatcatcagtcgagaatctgagaggaggatatcccgaagacagctttctgcactaggtatggacattgtgaattcctggttatgtcttttggactgaccaatgctcccacaactttcatggatctaatgaatagggtattcaaggatttcctcaatatttgtgttattgtatttatcgaagatatccttgtgtactctcaatcagaagaggagcttgagtaacacctctggatggttctccaacgacttcaagaacataagttatatgccaagttcaagaagtgtgaattttggctatctcaggtgtcctttcttgggcacatttttaacaaagatgggatcaaggtggatccaggaaaaatagaatccgtcaggaattggccgagaccaaaaatagtgacaaaagttagaagtttcttgggtctggatggttattatcgtcgatttatagaagggttctctaaaatctcaacacccttaaccgagctcaccaaaaagaatcaacattttgtatggaaggataagtgtgatacaagttttcaggagctgaaacagaggttaatcacagctccaccttctgataaggagaggtatgtggtttattgtgatgcatccagnnnnnnnctggggtgtgtactgatgcaggctcatcgggttattgcctatgcctcccgtcagttgaaagattatgaatagcggtacccaactcatgacctaaaacttgctgcagtagtgtttgcttgaagatatggcggcattatctctcccgagagaaatgtgaaatttatactgaccataaaagtctcaaatatttctttactcacaaagttttgaatatgagacagaggcgttagttagagttggttaagaattacgattatgagatcctttaccatcctgggaaagccaatgtagtggttgatgcctgagcaggaagggtctcgggcaggtaactagcatggttcaaattttacctcaattagcagaagacatggtcagatcaagcatcgagtttgttgtaggaaaacttcataaccttatggtgcaatctgatctgttagaacgtattaaagctgctcagttaaccgatctagaattagtaaagatcagagatgaggttttagttagtcaagctgaagactttacaagtgtcaggtagtgggatgctgttattcaagaccacggtttgtgttcctaatagtatggaacttagaaatggaattcttaaagaggctcataccactccatattccctgcatcctggcaccaccaagatgtatcaggatttgaaaccctacttcaggtggagcggaataaagaagaatgtggtagaatttgcatcgagatgcctaacctgtgagcagatcaaggctgaacatcagaaaccagcgggtttgttgccttaaccctacctgagtggaagtgggaagatatcacgatggacttcttggttgggttacttagaaccacgggtctatttgattcaatttgggttgcggtagatcgatttacgaagtctgctcattttctactagttaagacaaccttctcaatggatcaatatgcggatttgtacgttaaagagattgtaagattgcatggtgtgccgaagtccatagtttcggatagagatcagaagtttacttcaaaattttgacagagtttataacgggctatgggtaccaagccaaaattcagtacagcttttcatcctcaaa

SEQ ID NO: 81789 - DNA, 1480 bp, Cannabis sativa
tagttgttctaagccaaaaccctcttctctgtccgtctctctctttctctcctccaatggattttgaaccgagagcaagctcccatggctaaggctgctggtacgagcgcgtggaaaagaaaacgtgggtgattaaactaagcccaacaacaaaaaccagtatgtaatatgggacgttaaaatagaatggctaaatgggtcaagttatttttgatattaagatgtaatttaagttgtctaaagtaattgtccctaaaattaataataacattattttttatatgctgaagggtaattaaatattaaattttgcgtccctcaaaaaaaaaatattaagttttgcattaagttatgtaaatgactttttaattattgctaaatatagtacaattttatattttccacttgagatggttaaagactctatggcaatttttatttatttggttatttataattcttgtattaagatgtttttaatgtttaatgttcttatttgttttacttaatcaattatagtttatatgtataataaatgtttagaatagcattatattataaatatatcaattaaagttatatgtgcgtgtgcataattataaagggtagtctatttattaaaaaaattaaaattatttgtacaaaaagtaataatattttagggttatttgcggcaacaaaaatttataccttttggttacggggtttatggagcagtgcccttttagttaaggccgttaaatgctagttaggagacatctgctgacatattattaggtcacatgctaaataagtttactttttttaaaaaaataaaaataattatttttcataacaatgttgtttgtggaaggaagccttttaagtatttttctatgtgggaatcacatcctagatatgctgaaattattcagcaacattggcagcaacaatgcaatgggactttgatgtttcggattgtgtctaaacttaagagtatgaaagtttctcttaaggctttgaacaatgatcattttgctgatatctgtgcccaggaggctcaagctaaagctaagcttgatgaatgccaatctttactttagcagcagcctttgaatgatattttacaccagcaggaaaatgatctcaggactcattatgctcttattttcaagaattacttgtcttttttgcagctaaaagcaaagctaaactgggcaaatgcaggtgatgaaaattcagctctatttcacactagtatccgagagagaaggagacacaatcaagtaattactattgtgaatgctgaaagagtaaggattgaagagctgagggccatcatagaagcttttattcgatattacaacgagttacttggcagcagtatgcaagagaggaagtcggttcagcagaacattcttagagaaggggaatttctatcccagcagcaagctgcttttctcttgagagattacactcaagaggaagttaaagaggtaat

SEQ ID NO: 81790 - DNA, 1041 bp, Cannabis sativa
ttttttttctttttcccttcctaaatgtaggctgacatttgccagttaggaatggatcagcgaaaagttaatgtacttgcaagagagtactgtgacgacatcaaaaggaagaacaaaccaattattttgtcacaccgtatgtatacacaatattcaattctgcttattttgctttcaaatgttgtgcatttgcagtttcatgatttattttatttttttgtttgtttaatggcgttgtgtagacatgttgcctggattacagcaaggacaagagaagatgtccaaaagtgatccatcatcctccgtctatatggaagatgacgaggtgagttatagatacaaagttgttaagattatttgactaggagtggctgctattagttgtactggaagtttttgaactgaggatgttacaatttcattttttgcaaatttgaattaatatttttgttctgttgaatttttgaagtgggaagatgttacaatttcattttatccaaatttgaattaatttcttttgttctgttatgttaggctgaggtgaatttgaagataaagaaagcttactgtcccccaaagattgtggaagggaatccatgtctagagtacattaaatatcttgttttggcctggtttaatgagttcactgttgagcgaagtgaacagaatggtggaaataagtaagtatcacaaacatgagatcaaatattgtactgcttgttaatggaacacgagatcttctcgatctcctcggatgctctcttatctaaacatgatatggtttcaccctttttattaaattcagaacctacaaaaactatgaagatataattgctgactacgagagtggggatcttcatccagccgatctcaaacccgccttatcaaaggcgttgaataagatacttctggtagttgttctctcctacacgatgagtctcttccactgaataaaattagttgttttcgcttttcagttttgctaaatccaatgtttgtttttattcacagcccgttcgagaacattttaagaacgacagt

SEQ ID NO: 81791 - DNA, 757 bp, Cannabis sativa
ccaaaacagatcactctttgttcactttattcacagctaccagcaccatttatgttctcatctatgtagatgatattcttatcacaggcaacaacaccaatcacatttcaaccctaatctctgatctcagtttcaagtttgccttaaaggaccttggggtcatggatttctttcttggaattcaggttgctgccacaacaatgaagttgttctttctcagcaatagtacattcaagatatcatctgcaaagcttaaatgcagggggtgaaactcaaagttctcctatgaacaatgggcttagattgtcaagctttggaagtgaacctgttgttgatgccactacctatagatcacttgttggtgcactgcaatatgctaccataacaagacctgatatagctagcattcagtgtcaacaaagtgtgccaatttatggaatctccattgcagtctcatcttgtggctgtcaaatgaattctaagatactttggctggcacacttatggtttacacctgaaatgtccaacatctatggatcttgaaacattttgtgatgttgattgggcggctgaccctgatgacagaagagtaacaacaggttactgcattttcttaggtggcaatctcactggctagcaatccgaaaagcaaactacaatctccagatcttctatagaggttgagtaccgtagtcttgctgctgtggtcactgaagttcaagcaatcactacaaaaaaaaaatgctacttttagtga

SEQ ID NO: 81792 - DNA, 1075 bp, Cannabis sativa
tttttttctttcataatacatcatttctggctttccatactgcctaacacaacatgacagttctgctaacaaaatcatcatcgaaagtcttcataatattctccaacaagcagctaaaagaagatagagaagttgtgtcatagatgattctgaaagcatttcagcaagacttggcaaagttacaagtaagcatagcatgtataattgattcagcatagttacaagtaagcagagcatgtataattgattcagcatgagaatgatagacgagacaagctgatgaaattttaacatgctttctgacaagctacaaacaagtcggcagacatccacggatggcacgccaaattaaattcttaactttaggtggaattttaagctgccaaagtctacgctgaaacccaaagttatcaacacctgtcccagagtttttgtgagactgcaaaagaagataagcgctttgaatagagaacaaacatattcgttcttcgaaacatgaccaaaaatctacaacagtagttgggcgtaacaaaatgcctaaaattagcaaagcttcgcagttagagaacatgtctttggtgacttcaatatcccaactacaattatcaataaagaacaaagaatttactagtttattaatcaaactaggaagagtagtggttacatacttgtcctctgaaaaaagtagcaggggatgaaatagaatactagtggtagctccattcccaatagttctagtagcccccaaatgaacctgattttgggcactccaaatattcctccaaataaaacttagattataaccaagctcagctgagccgacaaaagtcagagttgaaaaaagttcctagcttttaaaacctgacccattagagaatcaaatttacacagaagacactagccttattttgctaacatatagtaagattaaagtcatgtaaatgaggaaaacccatactgccttcaagttttgggcaaccatcctacatgacatccaaataatgccctttcctttgctagaattagtcttttaacaaaagattgccattagcttctcaatatcattacaagtgcc

SEQ ID NO: 81793 - DNA, 854 bp, Cannabis sativa
attctattccaactactttgttacctgttttggtaacggatttggttatctaataaagtttgattcaaaaaaaaaaaaaatataaaggatattatgacattttaacatttactgtggaatatcctacatttgtgagaaatgttactaaattaataaatgtgagctaatgtaggaattagttacatctaatgtcaacagagactaactccaatctaccaatttcctcatcctccaaaacagcacactcatcctccaaagcaggaacaccgctgacaacaaaaacacaaagcaaaaactcagagtactcaccacaccactcacctgcaaggttttctttcaagtataaataaatcaagattttacatacaagattcttaaaatcgataggcaacattatcatgttgcataattgtgagtggattaaaggaaacaaatttgtgtcaaatacataaaatcaccatcatcctaagaaatccaaagcacttgctcctccaataataagaaccattattttcccattgttactactgttattgcttccccagttttctccatcctctgtaattccatttataaagaaagtgacaatgaataaaaacttataaattgatgattaaaaagtaaaaactggtgttataacacaccagatatgctatgaggataataagataactcaggagtcttgtttacacaaatacaccacactcacagtcacaaagcttctatttccacatcatatgagtagtagttccattctcccatttgaaggatgtgaaacctcagattttttttttttgtttgtttgtttggagaaaaatggttggtatcgggtggaatccgaatcatattgcagt

SEQ ID NO: 81794 - DNA, 1518 bp, Cannabis sativa
acaataaaaatgtaaccattgaaacctcttccataataatatatgtattataaataataaaaaaaaaagtatattacgtcaatctagcgattagccacataattacaagacttttctacttcttaattaattaatttgtatatactagctagctttttacgtacgtataacaactctagctaatttttattaaatattataattataatttttataaaagaatatataattaatatttttttttgagaaatttaatttataattaatattaaagaataataattgatgacaatatgaaactcaaacttagaaaaaaaaaaaatttgtaattaaacttaataatcttaattacacaaaaaaaaatggttattacatcattatatataattaacatgatggtactttattataatcgataattttgacctaattcgttggtggtcgattttacagaaataataaatgcatgattttttaaaataataataataataagaagaagaagaatttaccttgagcaaattatcttaaattatttgttgatttaatttataagttaattagcaaaaatgactaaattataatcacattaatcaaaaaaaccatgcgtgtcggctgccttgccagctttctttattttttttttcttttttctcttaaaaaaactgttaattatggtccatatattttattttacatatttaattagacaaataaataaaaaaaaaatctattatataattaaatattaaaaaaagaaatagaaaaatcgctttctttcttcaacttgttaggacggtgcatacatatatataaaacttgaccacgaaatttcctgtcttttttcttttttaaaataaaaacacctttttgaaattaaaaaggtgaagaaattaaaaaaaaaaaaaaacattgcttttcttatcctcctcgtattaaaaggtgatgcagacatataatcaatataaatatatatgtttggcttcaatcaataatccttggcaaaatttggagcaaaaataatgtgtccaattccattcaattttactaacatgacgattgtctatgtactaaatcatattcctcaaacatttaataactacaaaatcgtactcttggaactttgacatgtacaaaatcgtgtattttcattcacgtaggcttttgttagtaaaattaattggacaaaaatttttaaattcaacaattttaatagttctggcagaatatttgtaaccacctgaaaaattaaggagacataatttaatacatataagttcaggaacaaaaattctagttagtctaattaacctaattattatatataatatagtttatttacaacgaaaatcttaccttgtggcgtgctaaaaaatttatttaagaatttaagtgcaacaaaataaaatttttaataccaaaaaatttatataagaattttaagtacaataaaattgaactagataagaatatttactactaaaaaatttttataaaaaaatttaagtgcaacaaaat

SEQ ID NO: 81795 - DNA, 717 bp, Cannabis sativa
ccagctttcagggcttgactataacttcatggtacattggcattgttattatagttatgttattctttatatacctctttcatattcacctgtttacaattctccaggcttcctttgcttcttttgcttccaatcgactactctctaagcggattgaatacttggagggcgaggctcacaaattattatcccaatgcaaggctgtgagcgagcaatgggacaacgcccaacgggaaaatacccgacttaagcaagaagccaagagagcaaaggaggaagccgagaaggccaaagaggaagccgagaaggcaaaaaaggaggtcgagaaggcaaaagaggaggccgagaaggtcgtcaaagcctaagccgatgagtttgaggagaagctcactgaaaagcttgttgaaaaaagaagttgagaccgtagaatggtgagataaggttggttttggcactatatatcggacctggctttggaaccctaatatggataccagcttcttggaatagcaggaaaaggaaactttagctctttgcgagaagaccaagatgaagtaagaagatggcgaggtcgaggaagaagaagaagaagacctgtccaagtctcccagcatgtagacttggtttttatttatctcccttttctcttttttgttttgaaaatggccttttggccgagacaatggtttgccccttgtggcactttttgtcaagaca

SEQ ID NO: 81796 - DNA, 525 bp, Cannabis sativa
tctgtccgggctgattggatcttttctttttgggattgggggtggtgatatggtgtcgttttggtggtggaggagggaagaaagggatggaaacgacgtcgttggatggttgtgaatgggagtagttcatagttagtgaaaatggatttttagtgaagagtgggaaaaaggaaaaggcaggaaaaagttggagtgtgggttttgtagagagaataaaaaaaaacggttatttggtttttttattccgtaacggttatttgcttgcagttattttgctattgtacaatgtataagcaggagtttcaaaaatcaattcttatcatttataaaaattaaaaaaaaaaagtagtttattgtaccagatctaatgtttttagtctatgcagattcaatctaattatatatgggatgatagatttactatccgatctgatctaattaattttagtcatccaatggatcaaacatccattaaatgttggatttatttaatatttcagtcataatttttttgaatcgaatcgg

SEQ ID NO: 81797 - DNA, 566 bp, Cannabis sativa
tttaggaggagcacgatcacgtttcgataactgaggaacaaaatccgagtcatcatcttcaccaacaggacgtttccccttagatctattagctacagattttacacttattttcgatttttttttttggcaatggggaaggggtggatgaagaacgcgtaatagccatatttatatatagattaacagtaataaaaagagaggaaaaacggatatggaaatcggttaatgtgagttaaaaaaaaaggaagaaaagaaagaagagggaaaataggttgggatcgtggagggacacaaattcagctatggaggttttcgttttcaaaaataaaaattgaaaagaaattgaagatcataagaaaaagaagagaaaaagagaggaaaatgatgtatggattgatagagtgtgtaagttgtaaaattgtaataaaataaagttgaagagtaaaaatgtaagcttaaccatgtggtgatattttagtaataaaatgtacattttatatttttggtgtaaaaatttcttaatttaaacaatttattacactgtttcattaaaaaaaaaaaaa

SEQ ID NO: 81798 - DNA, 765 bp, Cannabis sativa
agatggttgacatcaaagaagcattaagttggattgatcgtcacaattggggacaagtaattttggaatcagacagcttggtatgcgtacaagctattcaaagtaaaagtctatatgtcatcttcttttggtattttagtgcatgatgttcgtgcgttgcttttatctttagacaatgttgaattgcgttttgtcaaacgatttgcaaactagctggctcactatttagccagagattcttgtttctctccagatcgtgtgcttcagttggaggattgttcctcttaagcacgttctattgtttttaacgatttgattagttaataaagataccgatttgattaaaaaaaaatacatgtaaagtggtatatttttaacttttaataaaaatatcttaatggtttgagatttatttaggtgagagaaagttacttttttaatagggaatataaatgagtgtgtcaattaatataatcaattgcataccaaactgtatttttctcatcaacctatattcagttactataaaaatcctacatttcttgaaatcagcaataatttaaattagaaactaaaaaaatatataaaacaaaatcaatattaaaaggaaatttctttaattaaaaaataaaaagaaatattatcatatataataatgaaaaaaaataataaacaatatttatatagtaatactaaatattaatataacaataacataatttttcccgccatacaaaagagaaataataacataatttttcccaa

SEQ ID NO: 81799 - DNA, 741 bp, Cannabis sativa
agctctttcatgcatttatcatcataaatttttgattgtattttcttttatttcattgatttagtttctcattattctagtcatatttttgtataaatagggattcacccaattggaataaattattgagaaattctaatacaatttttctttatctattcatcatcatatctattttatattatttataataattttataacaatttcaataaataacatattacaaatattggttctgattatttttcatttattgcgttacattattctattaatttattctgattctaaatacagtatagcgtacattatttactctcaaatattgtagcactcttatattttgtcaattaaattttaaaaattactttttaaaatttaaccattgaagatgatcttacggtgaaacaaataatatgaaattatcattgctaagacagaaaaaatttgtgttaatatatatgttaaaaggtattagaaaatactaaataccactagtgtctaatagtaatactcgtcaataaaatggtgataacagactaattgttcacatgtttcacgacacacgttttttcaattttcagttatactttttccatttaagttagtgggaattatatcatcattaaattccttgtaacaaagatttctttatttatttgaggaatcaatttaatcattgttttcaattttgaaagtagtgacaacattaataattattagatattatgaatatgga

SEQ ID NO: 81800 - DNA, 609 bp, Cannabis sativa
tagggtgttaatcaacatacctgtgagtagatttaagatcctggtaaaataatttccaacagtaaggcctttaatcgtgttgaatgacactatgttgctcaagtaatattgaagatgggatttggaacaactgttgtgcagcttatactctgttgtttataatctgtcccttattcttttctattaaacggagtagtatgatttggttccaaccaggggtataaggcaaggcgatccactctcgccttatcttttcctcatttttgctgagggtttctcaaggctactatgtataaaacatcagctctttgcagggattaaaagtttcgagatcaactcgatctgtgtcacatctattctttggcgatgatagtgtgcttttctgtcgggcaaatcaaggtcaatcaaaaaagttctagatatctatagcaaagcatctggccaatcaataaatcctgataattgtgtgctatccttttcaactaatacatgacagcaagatcaagctttctttcaacatcttctcaatatgccaatacagccgtgtcatgaacaataccttggattaccatcctttgctggacatgacaaaatgaaactttttagtag

SEQ ID NO: 81801 - DNA, 793 bp, Cannabis sativa
gagcacaccaggccatttcttaacctgacattgtgtgcttatttcagagcttccaggatgtcattttgatactttcaaggttctagaacttgaggacaaggactcttaccctatttttgaccattttggattgaatggtcgaatcaaatttttggcatttgattgataaaaactagcaccaggcctttgggtttatggttctctctttgagtttacatgaatcttcattatttcggatgattgaaaaaattcatagaacacttttttgagaacttaattggaaacaacccaagttgacaatatgtttactagggcgctagaccaaatgccaagtgtcaagctgagcactggatcccaatttttgccatccaaaagttccattttgtcccaaaaaatagttgaatcttaatatttattgaaaataaagaacatgcttgaaataattctaaaaaaatatcataggaattaacctaggttgaaaacctaggtgttgggctagccccaagagttaacctgggctttgggccttgcttccctaaaagtacctatttccccattttttatgaagatgaagatgatgcgagatttgaattatcaatctgatacttggaaggtactcatattgataaatttttaacctgggtgttaggtgcccgggcacaaggttctttgggtgctaaaaaatgaaatttctctaaatctgattatgatgcctcaaatatgtctgtggcatgtctagttcatttcctaatgaaaatttttgcccatttttagaaagatggtcccaaaaact

SEQ ID NO: 81802 - DNA, 1166 bp, Cannabis sativa
ttggctctgataccaaatgaaagacttaagttgttatagttaccgagttcaattatcaattgtaattttgtttgttgattcaatttgattatgatatttagagagtaaaagataaagcttaaacaatctaaacgcagtggaatttacaagcttctcctgacactgaaaataaatttcagtcgagtattgcttgggttccccgaatcggggtaagtaacttcgctatatgattttcaagtttacaataaccagttcgtactaattgcaaaatcccttatagtaagcaattatcccaaatgacaaatcccttggcaaacttagcaagatccctttgcttcttgatcgttgaaatcccttcaacgaaatctaagacctgaacaccttcagatttgtttgcgaggatatgactggactccctttatctcacactcatcgactgtaggtcatattcaaaaccgtgaatcaccattaacaaagttctgagctttgacttgcaagaacacaagaacgaaaagagtgaaatagtaaaagatcctgatatttatacctagctgaattaggaaaataccagataacagacaaccgtaatagatttggcctaaaacagacgctgacgtgtacaatgactaaataataaactccagatataacaactaatgaccctagacataactggacataatttgtcataaaaaatactagaccttacaaatttcattccctccaatgttttagggatctaagaaaaagacaaaattaaatctatttaatgtcatcttttaaaaggttattacaaaaaggacaatatggctgtattaacaattgactttttctccacccttccttcttcacttctgataccaaacaacatagagaagtactattctatccctccatcgtattctacatctttcctaaattctccatccatgctattttccctttcaccaaacgtagcctaaaagtactcctaaatattttataagctagggatccacttaacatcccaaagtgtttgccaattgctatacgcaatttctcatttaggttaatttctaggataacatttgctcatattgactatctaattttacctaaatttgctgtatgctctattgattgagactttaacttacagctcaccatgtgcatatatatatatatat

SEQ ID NO: 81803 - DNA, 2099 bp, Cannabis sativa
attttttaaaacaaaaaacagaaaataataccaaacatgctctaagatgggctagactcatatctaaaatatacatactcaaaaccccaaaatattatacacatatatgaatttatatagaataaaaatgatagtttgaataatttgtaaaggacgccaataatattcaagcccattaacaaaccctttccatgcactttttttttttaattaaaagcccttaaatgatatatctataatctataagttataacttaaataaaatttataatattttgagctttttatcattaaattacatacataccccttagaagatatatataacctaacaatataaataattgatagatatatatagtctatctataacttaaataaaaatcacaatattttagattttttatcattaaattacatacacaccccttagaagatatataacctaacaatataaataaattgatataccccttaaaagatatatataatctaacaatataaataaattacatccaattaataatatttagagatttttatcttcattgaattgcatgctcccgtaataataaggtacacaactctttactgagtgatattgtgactgccattgactctatctcccattgttacacagattatgcctcttgttttttccctataacttaaataaaaatcacaatattttagactttttatcattaaattacatacacaccccttagaagatatataacctaacaatataaataaattgatataccccttagaagatatatataatctaacaatataaataaattacatccaattaataatatttatagatttttatcttcattgaattgcatgctcccgtaataataacatacacaactctttactgagtgatattgtgactgccattgactctatctcccattgttacacagattatgcctcttgttttttctctctgacggttcatgcggcttctccggtttggacccctccgccggatgactggatcaaaatcaactgcgatgtcaaaattggtggagaatccatgtgcttggcggccctggcgagagatcacacagggacggttgtttgggccgttacttccaggctcaacttcactgacctgttgattggtgaggcggcaacatgtcatcttgccttacattctgctcgaatcagaaatcataactatgtcttggtgaagagtgattctataaatgttatcaaagcgctgaaaggacttcactatatttggaatattgataattatgtctctgtttgtaaatcaactctctaagtatttattatcttgtaatttttcttttatttctagagtttgtaactttgctgcccataatgtggctagatgggccttgacccagaatattacaggtttcgtggagctatccttgatacctaaatctatcatttgtaatgaccgagaggtctaattgctcctatctataaaacgctttattttcaaaaaaaaaaaatgttatattttgaaccacactgaaccaaaaaaacatatatatatattttataaaaaaaaaaataaaatcacgtggtgcacatttgtttttctcattttgacaatctgatagaccacgtattactattagttatataaaagtcttatatacctcaacctattttaattaatcatttcaaaaattcttattacttgaaggccaaactttttttcaatccttttcaagaaggtatatatatttatagaatttccctagaaaaaacgaaaaaagaataaagttagttattatatatatatagtgtgacaaaatggaatgaaactagaagaaattagtcaaataagttggacaatttcacatcacatatataatatatgatatataacattggaaaacttatatatataaataatatataaaaattggtgtatatatatatatggaggggacatgaatatatggtgttcaaataaaacatggttatgtggtctttaattaagctctggaccatttacgacgtaagtaaattaaccatataatatattcttcgtcaattttgatacactatatatctatggtggctcatacataattattggacttttt

SEQ ID NO: 81804 - DNA, 1533 bp, Cannabis sativa
gctttcatcaaggcatatatcactagcatgaaccatccaaaccttacataaaacacataaaaaatcgttttaaattcatatttcatgaataataaatgataccatggctctgaggccagtttttagaaagcttgtttaatcaggatcttattttttattctaaacttaacatcctaatatggattcgtcaaataataaaaataaatatataaaagattaagaaatcttacattgggtttcataaaaaaattattgactccttccattcacttctcacccttgatcctttctgtcacaaagtgtgatcaagaactgaacctggattttccttctagatgtggaacactacacaatcttccacactatgctgaatatttctttgatatgagtaagcaatgattcaacactaaggggcatgaagaatattcaaataaggatttctagttctatatttaaattatagctattgtctcacaaagaaaatatattgtatatactgtatatatcatatgtatataaactttatagtcatgaactataaagttatacttttaaattaattctagggttaggtttaaaacaacctataatgagctctaaaacagcctcagggctgaacgctcactaacgcccatgagtttaaattttgtcattactttgtttttttaatgatctttttattcaaaaatatcttttatctattctaattatttaaatgccttaataattaaaattaattatgaaataaaattaccatataaatatatttgtttattaaaccctataagatctcttaattaataaataaatggtaaattcctttttttttttcttaaatatgtcattccttagtaaaatttattaataagtcacattcttacttgtaatcttaattgattaattaaaataaattaattgagactacaaagaaatattatctcagttagtgtgggaaccgtgaacctatataatcaagctcctaataagtagatttaaaatttattgagtaaatttcctaacttattaattcctcttgacattacaatagatttgtaattgcgctcctaattacataaaactctctatgtgccaaatttagatatgctgtgaattatccattgtctcaatcccaacaattattgatcttctattgacggtatacattgagtagggaaaaaattactattttacccttcaatatttttatcctaaaaatacataactacatgtaaatgataatttgagaaactaatataattactaaaataagtgctctatcatttatcgcgttaagaaaagctctaataaaaccataattttacttctaagtagttatagaaaatatagatttgatatctatgattagcgctcccactcaattttactactatattcccaagatgtaagtattgggcaaatcctactagtaaggtgtaacaaaaaagtcaaagaacacgtgtaatacaattgagctagaacctaacaattttaggagttagatcaaatgacctatgatcaactaattgatattga

SEQ ID NO: 81805 - DNA, 818 bp, Cannabis sativa
tttacatacacagtattgttctcattatattgtaaatatcgacattgcctatttctattgccgcttcaatcctctttctttctttcctttccatcttttcgatttttcttgtgtcctctaatatgtgtatgcatggacattttttgcaggtacttgatgagtcctgacatgcagtttgtgaaattttttggaaagaataatgatgttgattcacttactgatggtataatcgaggagataaagaactacaagaagtagaattcagttttgttcttgttgacagacacaaagtgcctttgggaattattcatttttggactatgatcgatatgccaatttcttggaccatttcagaagagtatgatgaaatggtgttagaaacattgaggcttataaggaatttaaaatattgctgagaaatattatgaaataattgttttattacacacataaaggagagcatccaatttgaactttcatttcttaataatttgttttattaagatatttcttttttgctttagaaaataagaataaatcccactactcttgaaatatttaacaaataatttgtgaaaaatattattgtttcaaaggaaactaatagaaacaatcatgtctctctagggaaataataataaatatatgtaatatacaataattttacattaagagtttgtttagtacgtcgtattgtatagtattatattaaattaaattatattttatgtaatatttttatgtaaaattatgtggtattaaattttatgaatacttaaatatataatattttagtataaattaaaatttaacatagt

SEQ ID NO: 81806 - DNA, 1082 bp, Cannabis sativa
  modified_base (43)..(57): a, c, t, g, unknown or other
tttcattgttttagagaattcgtatttaggatgttaattcaannnnnnnnnnnnnnnatctagatcttggtaaaatattcccaaagacactttcgatttcaagcaaatgcagtcttcttttaaccaaacgaatctttgaatctctttgccaatgatgcatgcaaatttcaaacaactaaaaagaaaatcacaagagaaaatttctaatggggatgatcaattagaaccgcaacaatagagcttacttagaatgaattttttttaacaaagcaaaaataacaaaaaaatgtaatgtaagtgataataataatagtaaaaacaaaaattaaggagaataggaggcacgaattctgtcaactatatcagcagataatgaaaacaagctgttaggagcaactcatgccaccaactaaagaatgataataatataatatataaatatagcatatatatataggctaaaaacagaccgaatatttttataaaaatataaataaatattaggttgtaggactcacccaaaattatctattaaagtttttctattagataataaagtaaaataaaaaataaaataactagtgaagaattttactagccttgagataaatatgtttctcttcttaaaactcttcgacaacggtgctaaaaacttattgtacacccaatggtgatatgtgcttttaatatttatactcgcaagtgcacgaataggatattgaatacattgttcatgtaagtatgaggtcgaatccaaaaaagttgatttacatctaagagagactttttaagctcaaaagtagttaaactctaacctacctctaaatatttgatgagatttgttgcataaaagaaaagaaaacaaataagattctaaaataaataaggtaaaaggaatttatgaataaatggtatagaaaaaattattaagactttggaatccacaatatatattaataatatttaatagtatattgactcccaagttttctggatagtcaacccaatcaaactatcattttcaaaatatattttccatttaagcacaagttattttcaaaatataggatttttcttcactt

SEQ ID NO: 81807 - DNA, 1214 bp, Cannabis sativa
ttaagatacaaaatatacacatgatacaagcataaatacgtgtaataaaacacactatgacaatgaaacctaacgatcattaattgttgagttagtagtacagcatacgtgcataaaaattacacaaaaccagattaatcactgtgtaccttctccagctgctatcaatgaaagggcatgagctggggaaagtacaacttcttcctttatcccttcaacaaacgttccctacagcaaacaattgaacaattaaaaaaatatatatatggaaaaaaggttaataaggaattggaaattgatactccccaaagtagtaaatatttcataataagagaaacggaaactttataatctttccttgctagaggaagacaggaaaccaaagagttgtctttatttataagaaagaacatccatcaggattcttcaaataatgtagcaattgaaaattttcgtaaatattttatcaatactgcatgatgtcatttcctgaagctaaagattacaaaattcaatctcattggaaatcattgataagtgtatcaactaagcatcaatatataatggatgagatgagataaagctagaagtgacatagacaaatctaactccaataatagtaacaaatcaacctaaaacatgaatcagaaggctttctaatgaatataggtacctgagcatcctctctaattcttaaattttgtcctgctggattcaacaaatcattaacaacctgaaatgaaaacaaaaaacaaaaaagtcttacaagatagtaaagcatctgaagtgcaagaaacagaataaccaattttgtttagaacagtgaattcagttagatatgtatgcctgggtccctgtacacgtgcccctagtctttaagtcaatatattagttagtttagttagtagtcaactaactatcagtagttagttaagtctgtcatcttaacggacgtatcttgatgtctaagtccattgtcaactgaggcatttacttataaatacctctgtttctatccattgtaatacaatagacatttttcagatcaataaagctaaataacattcagattaatttgccttgtgcattagtgcttttgttttgtgagttatgagtgttctcggattgttcttggtggccattcctggcatctgggattgagttcgagattcaacaggtggtatcagagcttggagattgaagaagaatcttgt

SEQ ID NO: 81808 - DNA, 954 bp, Cannabis sativa
attattttttaaaaaaattttgggggctaaatcatctcaattgtttcacttatatttaactttttatataagtttaaattttggcggtaaaattttctaaattattgaaccagtagtaaatttaaaatgtcatccgattaattgctaccatgagatacttatgtatatactcttgtacacgtgacacatttatatttgtataccgaatattattatttaaaaattatttttaaaattaaataaaattataaaaataaaacataaaatatataaaaaatattataaaatttgaaatattttttatatccatatcatgggcagttggatcggaatccgtgtgatggttcgagagtggttttaaatattttttaaataataatattaggtatactaatataaacgtgtaacgtgtataagagtatgtacatgagcagtctatggttagaatttaactgtggaaagtgaatgataccttaaatttgcaaacaattaaaccagtttggaagtttttaccgtcagtatttgaacttcataaagttaattacaaatagaatgatagtttaaagagtttattacactttattatgtttaaatattgaaactctatattaaattacaataataacatatatatatataccactttttatggattatggtgctttacacatgtccctaagcatttctcattattcacatatactcaattaaaagttctgttatatcaaacacacgtcaaatctttttacgagtctaaatataaattccatcattttttttaattccatgcatgcatcgatacttctcatatatgcacactgcatatgataattaaccaaattcacacatccccactagtttagctaataaatctctaatttaacgcaccattaatttttttaataaattttattaaaactattaatttctctgcactattatttattttttaaa

SEQ ID NO: 81809 - DNA, 1092 bp, Cannabis sativa
atttacttaacaattaacagtcgggtacctataaaagttttagaattataacttagttattattaccgctaaaacttaaacttagatatttatttacaactaggagttaaacttaggcatttatgcaacaaattactcaacgtaaaaatataatttattttaaaaaaaaatagtgttttatgtaattattgctaataaattagcagtttttttttttttggaacaaataaaattagcagttgagtggccaagagctgagctaccccacgtgattgatgaatgataaggcttctctataatataacaattaaagaaaatatcacattcccactactgtgtgcatcgatcttatgaaaactctccaaaagctgtgaagttggttctgatacatacagcaacaattattatccttccataatctttctactgccttataattgatgatacaatacagtaaaattaaaccaggagtaagaaaaagtattattgtttgtgatttgaagacatgattactggagaacataatatatgtataatatctacatatttgataatatccactagaaaaggaatcatcaaattaaatatataattatttgtaaaaaaaaaatctgaaaagaaaaaaacatttagagatatttatgttacatctagaatcacaatatacttcacagctccaagattcttttactgtaatcctttggaatcggaacattcccaccccacccatggtaaatatctacatggcttaaaaaataactcatctcaagtgaaaattgatattgaccaatgtgaaaaaaaaaaaaaacattcaaacatctaaagttacatgttacagttatacatacgagttatggtcacaatatatttattgaatgttactttgtaaaatgacatcatttgattattttttacaaagcaacctctcaaaaagatagggggtcgaaaagaatgtcatttgcaagagaactacaacaacggttaaggataccaaaaaaaaatacagattgggtactggtatatactgatttaaacaatgcgatttagtttgttgtaaaaatatgacaaacaacatatctcatgaaaaaatgg

SEQ ID NO: 81810 - DNA, 1145 bp, Cannabis sativa
tatcagttttaagcctggggtgacgataagaattgtgaagaacctaagaatgtgtgtggattatcatggaatggaaaaatagagaagtagttgttataacccagttccaccatttcaggcacgtatcatgttcatgtaaagattattggtagaagtataataacaatgcattgcttagtttctttgaactgctttcttgacttaataaaaatttgagtttctttgaacattgcaaacagtaaaaaaaataataatagcattttcattatgtaaaaagagcatattttatgagctgacaaacatgtaaaaaaacagtttctatcagttgaaaaaaatactaaaatgagcagattttaaaagctcccaaaccagcaatttatgtaacaattgagagctcaaaaaccattaaaaagagtagcaattgagatctcaaaaccagtaaaatgactgctgaaaaaccagtaatttgagtagtgattaaagctcaaaaaccagaaaaaaactgttgaaaatgtgactaaaatgagtagcaattgagagctcaaaaaccaaataaaggcagttgaaaatgtgactaaaatgagtagcaattgagagctcaaaaaccagtaaaaagagctcgaaaaccagtaaaaatactgttgaaaaccagtaatttatcaataattaactactggtttaacattttatttgaactactttgctataagaaattcattgctcaaaaaccacttaaagaatcaagattttactgtttcataccagtagaaaagggaccattttctaatttaacatttaaatgcttaatttttagatcaataataaacaaactttttaacttaaacaaattcatatatttgttcatcatttctaaacatccactacaacatcatgtacaaaaaagggaatcacataccaagcttaacattgtacttcaaaaaaaaaagttcaatacaaaggccctttagccaacacaatcatacccaacttaacattgtactttaccaaaataaaatgtaacaatcataactacgataaaacatatgtattaaaatgatcactacagggcattaggtggttgttgggatgaactagcttctcttgccatttgcttcattctcctcttatttctcttcacagtttca

SEQ ID NO: 81811 - DNA, 736 bp, Cannabis sativa
ctcttttttttaagtcatcaagtgtgttttctaccactctcatcattttgggatctgtcccacttcccctatacccctcttcaaaaatttgctcagtttctccatagcaattttggccttcaactccaccccattcttgagccctaaaatttagatagatagataacatattaaattaaactcacaaactataatatatatatatatatgttcatttaaagtcttgcataacaaatgaggctatgtttggtaaaataaaaaattaaatttaatgtatacacatacacaagaaccttattgggtattaaataatgtataactgagaatgtgggacatcatataaattccattgttttggtataatatttaaatgcatgaatacagattcacaaagatataaaagtaggcaagactagtacattttacctaccaagaaaattatttcaattattttgtcttgtaaaactaatgaactctcattatacacatatatacatacacataacatttaataaatgcatgatgatttaaatactaattcataaattactttcattagagtccataagagttttgattgtccctttaattactggatcaagattatgtaaaaaaaaatagttattgagaattttcttactccccaatcattattttattttttttttttttgggtaaataccattttattttgtaaaagttactaattggaccatctattttgttaaatgaaaaa

SEQ ID NO: 81812 - DNA, 1716 bp, Cannabis sativa
  modified_base (1685)..(1687): a, c, t, g, unknown or other
gttaagtttttaatattatcacggtttttaataattaattattctattagtatgaaactagtttataaaatcacacacgtggcgtccctatagtttagggtgttacatcgcatgtatcttggtatatgcgagtcttaaacccgatcttcggtcctgcttcatgcaaactatacgaatgcgactagactctgtcaaggtcatatcatcccgctgagtctagtttaggcgaggtttacaatcaagaggtctcctgctgacatctcagccctcctcgaggagagtgagtccacatgtcatttttatgggagcctggtctcgagtttttaggtgaaaaattatcactataacacatgcccctagtttcacggctgacagtcatgtcatgagggaaattataagcaagagccaggcgaaaggttgtcatgattgtagggattatcttcgtacttaaacttaatgatatcattctgaagtagtcaagtcctgataggtagttcagaaagccaaccgttcctactcggatagtctgccttttagcctgctcgggtaattagaggttatacatgtagatgtgttacttgaagtctgtttaagatattcgtctccgcccagatgtaaggaatgccggacacatgtcactcgtgtattcttccacatcataatgcaaaaaataagataacagtaagaattattttgaaataaaaatattaatacaaatttggtttaaattttcttgacatatatatatatcttactattattaaagtgtcataagggtgtgatattttatgactattttgccctccattgaatagaaagtttccaaatgtatccttttgttattttcttgacaatttatttcaaaataattatttattttttgtttcactctcattggtgaaaaaaaattataatttaccctactatctattataaaataatgtaattttatttttgtgtttcatgtatataaaatagtataatataattttttttgtctttttatgatttatttatgttcattaagttttatatttttttttcattttcttttttcatatatatattttaacatagatatattgtttttaattttattatttatctagatatttttttagaagactatcaccaatatatataaatttacgaactaattcataatttaaatttaataatcttttatatatattgaattaataacttttaaaagcttcttatattattactttaattaagctaagtttgattcgttgtaaaattatatcgaatgaaatataatagcaattaaatacactttccaatatcaagaagctcattattaagggtagcaatttaaattataacatgcatattttacataaacacagtgaattttaaattataggttcaatatgagatgaaaatttatgtgaatcctgtttttatctgtattttattaatttttcatgtcatggattgtgtttgtgtcaaccttatatctaaaataaatttatgaattctacatgaaatattgatactaaaaatactaatttagcttacaacacatctgttaattctatttttagcgtatttaattgacaaaaatattttattatttattgtatattttcagctggtatatataaatttggtgttcatattttgtgtatctaaacttgaaggaaagttgtctagctttcctnnntatggaaattgaggtaaaaatggtaagtt

SEQ ID NO: 81813 - DNA, 796 bp, Cannabis sativa
tagaatgtatattacattttgcaaataaaaatgtacattataattagaagttgtaatgtaattttagcaaaaaaaaaaatgtaatgtaatagatagtgtaaaatagtcattgatgaaaaaactaagtgaggcaatttaatgtgaataaaaagaaatagaggatcaaatttataatggaaacactacttttaatgtgacaggtaaaaattgttaattcttatggcagcactatgatgaaagttagaaacaataattactagttaattattaacaaaaatagatgagtaagctgagttttaccaaagtatataaattatattaaaaaagtatcacaattagtcactattctaaaatttatactaaaataaataatctaaagtaatttccaattcaatccatatttttgtgaattgaatttgtatttaattaaatacactaagagcaaaatagtaataatttgattggattaacacaattttaatttctattttatataataaaaagaaaaggttcaaaatattattataagtgattatcaattgttctttgcttatctattaaagtaaagaaagagaccaaagagacataaaaatagacatctgagccggaaaagaacacttcaaacagtacataaaaaagtactttaattattaattgtagacttaccaaattttttttaaaaaaagttatcaaagttagtcaccaatgaatttattaagtataaattgtcaatttggcctataaattattgattatgaattttaagatcaacagatagttaaatttttcgataata

SEQ ID NO: 81814 - DNA, 1572 bp, Cannabis sativa
tggaaaagtaatagtcgtattatgcaattctttgatgcaatatagtatatagatcatataaattattacatatagaacataacttttgggagtcgaaatttttgtattaatttcgcctgtattttttttttttttgaaaagtaaagataataaataaaatataatcttatttcttaaagtgaaaaactgtaaccattttagttttattttaattgatattctactattgttaataatattctactattacagttagaagcataattctataataaatgctaaatatgagtgtgattgaaatttatataaataaaatatatattctctcatacttttttttaaaaaaaaaaaattgaatatattgtaactagaaaaatataagagatgagtacatgttacaatattatatgtcaagatttggaacattaccattctattaacctctctctcaagtgctaaagctgttttagctaattatgggaacaatattaaattgcctagaaacatgatgaacagtagtaacagtaggaaaattgaatatatattctctcatacttacacaggcaatagattaattttttttagggtccatctctctctttttgtgttattttttttttttgatttagagctatcatctcaaaaggtacacgtgtttaccctacatttgtctggtacatgtccaactatatattatttaatagtattaattgattttatttgaaattttaaatataatattccatgttagcccctgaaagaaattgcatgatacacgtaatgcacacacatacacacaacataaatcttctcttacctatattcaatgattgttattagatgtgcccacaccacaataatatatatttgaaaatattcccataactttatgatgacaattaattctagtattctttattcactacgtacaaacattcgaaagactatggaactttcattcattaatgtcttttaactgatccttatagaggaacattctctaccactctatctatctatatggtattgttaatattaaagaatccaaacaatgaaaatgtgaacactgtcgatgccatgctgcatacaaaatttgtaggtatgtatatataatacatatttaaaaattaatatttctatgtaaaataatatattatttatttcattgagatccttatagttaacttttgaatgtgtaaattctgtatttaattacagtatgtaactatgtatatattatatacgggctgcttgataataaaataaaatgattaaataatttgacacactgataaaaaaaagttcttactcaattttgtttcatttagaatttaagataaggtgaacggattctatctcaaaaccaatgagaaaaataatctattcatcttatatgtaataatttattttcacacattagtatggattaactctaatatgaatcaaatcatcatttatctatttttggtgtttttttttgggatcttttcaataatatacttaaaatataaattatttacaaaaataccttaataaatctcaattacaataataccttgccacgtcattaaa

SEQ ID NO: 81815 - DNA, 994 bp, Cannabis sativa
ttttatgaatgtgatgtgagagagctggtctctcaactcattagcttgttaataataaaacaatagcattttgtttgattgtggcctttcctatggtctcaaatcaagtcgtaattcggaaactgtagatatttttatgattctcttctacaatatgaagaatagaataaattgtgaaaaagcaagtgtcgctctatctttacatatacgtgttgtattagcaaacataaattgtcgtgggttagtcaaaatacaatgagtgagtatagcaacattgtcatttagcactacagactacagattgcctaattatgaattagaaagtacgggagaattaaaaaatctgctttcacttttttaaaacagaaaattattttaaaaaacgagggtttacaatttttttttacactgataaatatcaaaaaacaccaaaatgttatttttcattttcataaacaacttttttttgtctcacatatttttttcttacattttttttacatgttcgggtcaagggcgcgagtcctggtcgaggatttggggccaggattggatctaggttcagggtctgcggtcggatctaagctggaattcgagtctttatccaggtttggggctgtatctgggatcgaatctttgttcacaattgtgttcgggtctagtgttcgaggttttagggccagacttgggttcgcgatctgagtctgggatcccagggctaggtccgtgatcgaggtttgaggtcaggtcttggtttggggttaggattcaggtccaggtctagattctaagttagtgacatggtgtggaataataaaatattttttttaataaaacaatataaaaacggattttagaaaacattagcataactccatcaattttttttttttttaaaaaatgatataaactatttttttattattaattttgaaaatacaattacaaaactaaaaattaaaaaacacacccaaacatgctcataggattcgaa

SEQ ID NO: 81816 - DNA, 1813 bp, Cannabis sativa
ctgatctaattatagagttataacttttttttttcttattatgtactgtgttttttttttttttgtggttgctttattaatttataagtatcattgtaccaaaatataataatactaaaataaattaaagttggggatgcatggatcggtggaatgaagtcattattagatgactcaaaaccttgctcactttatgcaaccatagtcaaaataatatttattagtagtaccaatatagcttagattctaaaagcattatattatagcacatacattttatagtttcacaacatttgttagtgtagggtagaaagtgaaaaatagttaggacaagtttatgccttaaaacaacatagataaaccctaatgcaatataacaaactcaactagaaataactctattccatccaccacctagttggcgtataggtggtggtggcatctctactttatcacggaggttcaagtagagacgatagtacaaaagaagtgtataattgtatatacttataagttatatataagtcattttcattcttctatttctgtggtggtatcggtctcccaatagtggtgttgttgtgactatcccttttttgttatgccgaatttcaatactttttctctatgggttgtgtcggaatgggaaattgtatatatagatttgggatttttttttttttgataaaaatatgtagatttgggaatttctaacatgctctaagcaatatatgtacacatcttgtaacatgtaatgatatttgaagaaaaaaaaactccattggggtaatgaaatgaaaataataaaatcaatttttatttcattactttgtatggttgtatttaaaatattaaaaaagaaacacgaagaaaaatcattctaatgtaagctataaaaaattatcgattccatgataaattttattccattaattaattttatacttctatttttattactctacttgtcatattttcaagcagtaaatgatcgcgacatgtgtacataaattcaaaaataagtaagctcgcatgttaaaagaaatattgtaatatttaatgcgtctcgaaaaatacccatacaattcagaatttaagtcttgccttaagccataagagtaagtcaaaaatattgattataagaatggaaggtgagcgagacctaagacttacacaatcacctgctcgagaaacactgaatgtgaaatatgagttttgaagactcatgaaatcaatgagaagaggaagaccaagctgattgcgagatggaatgatttcatctcaagaagcacaagaaatacaatttgaaaaagtttacttacaaggaaaggattctatcggttgaacctcacttttttagtgaccagcaagaaggaccaattcatccatgttatacgcgagaagcacaagtattaaatagaaatacggctcggtcaataatcgctcaaagataagatcaaaagtagcagttaataagtgtattattcaattttaaatagttacccattgttattcccatgtgttaaaataacataaaatgtggggaatgttcatatttcataaaccgtcactaagataaaattagaaagaatgtcatgaatgtttcttataaatagtggcagaaatcattgtaaatggggacgacctactctttccttgctaaaagaatatatgctaagttgtatcccgtaaatagaaaactcaaaaatacgagtaactcatatagtatgtagattttaacaacaaaaccatgtaaaaattcattatctttatagctatacaattaatttccttacattattgattttagatt

SEQ ID NO: 81817 - DNA, 1136 bp, Cannabis sativa
agtcataaatcatcactatagttaatttagttacaataaattataaattttgtgacttattttaagctagtaatgatatatttatgataatatttttttagttataaatttgttacttttagtgataatttttttttttttgttgatataaagatctttttgtacatagtgaggcctatatataagtaggtataggttcacctgaatgaatcatagaataaataaattaattaaataatttattaaattatactttagggttgaaacccattattagaagagcatataattgagattaattagctttaattaattatatattggtatgtattgggatcatataaccataaatggaatgatacctaacatgttaattagtgtttatgctaggtgttgtgatattagaataggtttcaaaaagtaagtgaaaatattaatccaaaaagatatacaaccaagtttttcacatgtattttgttccacaccaacactactaaatgcctttggcacaaaaaagaagaaactaaaagattttattattattttttggtatataagaaaattataatatatgaggattgttattaggcactaatgtgtgacaaccatcaattatggtcggacccaatatgtaagtgtggggactatagcccccactaataaaaatactgctttttaaaaaattaaatgtaacttttttaatttaataattatatattaaaataatagaaaaatcttcacaaaattatataaatttagtaagagtgattataatgtagcaataaatatttttttataataaacaagcccccacaaaataaaaattatgggtttatcatcggtcaacctaaatattttaaggaccttatgcaaaattttgaaattggactttttagaagaaaaaaaaaatacaccgtgtacattaagaatacagttctattactagcctttttttaaaaaaaatttgttcataaattttttatttatgtatatataataagaaaaaaaatcaatactattttgaactctgtgttttgcaaatttactaaatggaccctctattttgttaaataataaaatagaccctatatttttcaaaatggtaaaactagaaccctaaacttaatttttgacaa

SEQ ID NO: 81818 - DNA, 1338 bp, Cannabis sativa
  modified_base (1081)..(1091): a, c, t, g, unknown or other
  modified_base (1193)..(1194): a, c, t, g, unknown or other
tatatacaaatagatcttgggtatattattaatttttctaacagatctgacccatattttaaaagatcgtgtcatattaatatattataacgctaaaaattacattaaaataaatattttttatagacatacatacatataaatatacatattattattatttcttttttcatttctacttcctccaaaaagtagtaccataccataggtaaagaaaagagtcaaaattaatagtaagaatattttgtaaagtttaatagtaagaaaataggtaggtaaattttataagaatgtgttagtaattaaaatagtctcatttgcttaactaatactgcaccatatgctccaattcacacacgtgatgaaccaggacctcaatattaaaatggtgtttgttaataaatttatttttaaaaaattaaatattttatgtggtatagtttctttaaatgaaaaggtctctaatagtcatttttggaaaattgtttacttgtggaagccaatcctgaaaggcttccttatcattccgggaagggtcttcaagaaaagataacctttctccgagaaagagttccagatggctagttgttcctcctaaaaagacagttctagatagtcgactctagcagactttatcctattcggaaactccttccgtgagtccctttagtctgtgatcccggaagctcatatacattcccgaatgcactaagacttacgctgacgtgaaaatcttgctttaaggaaaatttgtttagttagttactaactaacttttcaacttcatttcttgcagccaccgactttaggatcttgatcctaagactataaataccacattgacctgacattttagaatacggttcagattgagattaagagttaaagagagttaagattgagaggtagagaaagacaggtacagagaaaagagatatattgcgtttagattttgtaagaagaattttttgtagatgaataaggttcttgggtaagagtgtgagagttgaaacactttgagagaactctaataaaacttattttatcaggatctagacttactaacatgtatgttgattannnnnnnnnnnatgaattctctaatacgatgaaataaacacatataaagtttatataaccttatattgatggcagtaaaataatatgacttcttccgcttagatctctaaccnntgttcctttctgtcgcagagtaataacaagatctgagcctggatctccttctctccttcgattttggttaacgaccgtctatcgcactatgattgagtacttgacttgctatgagtgggcatggtactctgttaggttattttt

SEQ ID NO: 81819 - DNA, 1068 bp, Cannabis sativa
acaagtacggagttggtactctagtgcatgtggtacagtagtcggccctaccaacacaagtacggagttggtactctagtgcatgtggtatagtggtcgtaattccgttaagaacgttcttaactatttagtgagcctggtaattgggctcagcggtttaagcataaagccaatgttgtattgtttatatatattttatgcgtattttactgagtcggttgactcatcactttgctaccttgtgtaggtaaaggtaaaacaaagctggaggagcaatgagttaggcctaagtaatgattgtacatatcgtgacagtacaacctggagggtttaagtcatactaacattttgatttatattttgttgttgtggttgtaaaaaaaatattattgtactttatatatataacacatgtattttcaacagtgtttctaaaactcagaatctcgatttacggagttatataaatataatataataaaattttctcgaattagtaaatttttaaatacgggcattacagtggctatcacttcaatttttataaaattataaaaatgtaattatgtagtaatgaaaggaagaaatagaaaaagaatataagaagtagaactaatgatgctttcattctcctcctcctttactcgtgtggttttcttcttatgtgtacttagttttctgtcatccttctatctgtaattttttattttcctttaatggaaattgagttaatgtgtaggtggctagtacttttctttcttatctctagggttaaatcccatcttcttagcaattcaaagacattttctttcttcttggcaatccttaaatcattttctaagcaaaaaaatagaatagaattagttaataattagatgggaaattcccctcctattagggacaagtcatatgattatataaaaaaaaaatggcatagaacaaagtatttattttgaagcaaactagtatgtaattatatattgtattgactaatgcgtacatggaaatataacttaagataaaactaattaattttgtaattaaatttgaagtattgattaattaatt

SEQ ID NO: 81820 - DNA, 2221 bp, Cannabis sativa
tgataaagattccctttgatgagagatatctttctttactctttttttgatttacaaaatcgttttggtttttccatagagagatatggggctttatttaaagaagccaaagatatggaattaatgaacacttctcatcaatttttcttaattattattattattattcttgtttgtttgtctgtttctatagatatatactatatactatactatatacatttcatttttctcttcttattattttaatatatatatcaaatattaaacatgtaaaaaaaaatatatcaaatattaaattaaatgtatacaagtataaaaaaaatatttattaattattaattaattaagtttctttcgtagttagtggtaaattaactttttagtaaataatttacgtattcaatttggtaacttattataatttatggacatgagttaattaattaaattaaccagcagctagcccccactcttgattgtttttatttatttaattatttattttggtacttttctttttattattcaacattctcttgtagctagtcatatgattaataatatatcactatttaacaataatcacaacaagtatgtatatatatacataaaaatatgaaaagaattaatgatatgtaactaatgtacgttgtatatatatacattttttatttttggcaatagaaaattcaaataaggtagctatatgggaatataatatatgtatatatatatcgtttgttttattcaatataaataaaacaatagcatacacatatagacacattttcttttggtgctactatatcaataatagaccaacaaataaatttggatgcgagtataatagcaatttaagatccacgggtaaatattaaaatttaaaagtgtagtactgaaaatgaggtttataagaattagaactaattatgcaagatagagtgagtgtatatggtaaatgtatcgatcttgatctcaaaaccaagtgacattttagtcgattaataatgcattttatatatgatattattttttttcacacattaatattaatagtgtaaaataatctaacatattatatataaaattaaaaataatcgtacattttatatatggtattattattatgtttcttatcattaatttgttttattatttttatgattttatattaataaaattaagaattagtaacatttaatgcatgcatgtttatttagagttttattaaagttgctattacataaaaaaaataatttaaataataataaaaattacactattaatactattaaattaactctaagcattagttttcatcattaactttaatagaataataaaaagaaaaaaaattaagccaacaatttctgtcaaatagtcatatttaataatataagagagacatactaattatttagtatatataatttaagaaaaactattatagagtatgcataacattgttattaagtacactatggtgctagctagcactatcatgagatggtgctctctcggtaattgtgagccattttttatagttattattaaaggaatattgttattgggcacaattttatgattgattcattttttttattaagttatatgagatttgatacttaattatatacatcaataacagtataacaccgaaaaaaaatagtaaataccaatagtattttttagtatttctcttattaaaataaaataagtatgacctaatattaaataacaatataacacttcatttagtggtattagatatgattaatgtctttttgtatttctcgagtctcgataaaagtgtgatctccgatcccgctccgttagtacatccttctggggcgagagggtataattgtaaaaaagagatggtatattagctagctaggtgagtttgcatgagagagagagagagtagtttgtggaagaagagaggcccccgtgaggaggagattttggagggattgacagctaaacaacctttgacgcttccctctcagctatcgagatgcctctctctctcctacctcccattctctctctctctctcctcctcacgtgtagattcccttttctctctctctctataaatatatctatacatacatgcacgtacacactatacaaacgcgtttcactatatatatagcctaacaacgcttctaataataactatatattatattaattattgaacaaatatatatat

SEQ ID NO: 81821 - DNA, 1358 bp, Cannabis sativa
tcctttaaaaaaatatttttattttttgtaatatataataaataattaaataaattttccaaaaattgggttgtacaagctttaacttttagctgtagcttttccataaatttttcaataagatattttttaactgcttattaaacacctttttgtcacaacttttttgagaagaagtttttaacttttccaaaaccagtgccaaactggcccttagactcgacagaacgttgatattataggttcagtagaaattttgataatatatggtttgttataggcagttattaaacaactggaaaacaatgaatgcccacactatttacaaagcatgaattttgtgatattacaaattgaaattgaataattctaacattgaaatttcaaaaaaaaaaaaaaaaaacaacgttaatacaacaattatccattgagagattgaaataataagtatattggataatacatgatttagattgattgaaaaactcgagaccaagtttagatttacatctttataatttgtagatttaatttacgataattagttttaatgcatattttcgttaactaattaaatatttttgattgctcttatgaataattaatcctctattcatattttagcttgcgtattatttttcaagacacattagtatctcgtttataatacatgctataacatacaagtcgttatttattcagatcgcatattgctttttgttgttttatgagaaaaaatctcatttacaactgctattttaattttctcttaaaaaaagattttttcaattcttaactttgtactgtcctaagacatgtcaatcatccttatatttattacgtaaaaggctatatatttagttaagaaaatctgtgttaatggtatggtgctttcattgagagccttagtgatgaaaactcagaaaaatccctccttgtaaacacaatttacaaatttatatttatggcggataataccccccacgaaggaatccatccagaggagactacccattgccctggaaaagaacctcaaggatctcagagaactaacacgattgaaaccccacgttttgggacgaacgatggaaaattttaatcccgctggtgaacatatcccagagaaaagaagtgaagatgcttatgatcctaccaggtatgtcccaatagtggaactacaaaactggaaacttcgacaatgcctagcttaataaaactgacaaaacgctgagttagagcgagatgccgcggtggctagcgcagcacagggaaccattcctcaaagtcaacctgatccatctgtaaggagaccacaaggaagacctcgagattccaggactaggaggcaagagaataac

SEQ ID NO: 81822 - DNA, 1189 bp, Cannabis sativa
  modified_base (26)..(35): a, c, t, g, unknown or other
aaatacctagcataaaatttagtatnnnnnnnnnncacgtaactttttactagtacatacatatgtataaatataatttatatatgtatgatgcagtaactagtttacagtcttttgaatggataagaagcagcaaacctcataattgggaaggctcagatccttgtggcaattgggacggcattatctgcaacaaatcacgtgtgactaccatgtatatattatatataaacatcttactggatatggatttaacttattaattaattacatgaattgttaagtctctttcactttagttttctctacttttctttatgatttgatgaaattctctgatttttcagaagaatacaaagcatggggttggcaggtgagctgtcccaagatattgcgcaactatccgaattagaaattctgtaggttttcttttctcacttttaaaagccacatatatatatatatatgatgccaatttatttggtattttttaccctggagaagtaattaaattaattttataaatatcaataatcaaagagaatcaaccaatacaatagaccacaaaactctagtctgatattaagccacatagcttaaagctagcatcataacatgcaagcttggtaaatgctttgactgtcatgagcttagaaaagtcaagacagagatatatatatatatatattaatgaccatactcaactaacaaactaacaaaacaagctagcagttgtacaattaatagcaaccacaccacattaatatttgacatcatcaacataataaaaatatacgatgagaagttaggtagaatataattggtcaatcatttttaacaaaaaaattttaaaaaataaaatagtaataaaataaaaaacctttaaagattaacgtacactaataattaaagaaatacttgaaagattgtgttatcattataaatcgaattcggagtatgaattgaaatccattgagcataatgttaactattcatttttctaacctttacaatgttgtaatataaaagaagttttatagttattatttttttattattattattaattatttgataagtaactaactttattcaaaacaaaacaaattaaattcaaatagtagccacaaagggggtcacttcccttaaacagccaagagcaaccatcttcttcactctagcccaacga

SEQ ID NO: 81823 - DNA, 1051 bp, Cannabis sativa
caactatagtaaatgtttgttctcaaaactagggtatttaattatatttttagtatttagagaaattgtaattaatttttttaaatatgacaactattttaatataagtatctcatctgtttattatatgaaattttttaatagattatttacaccgaaatttttaattttttttactttttttactgtagaggagaatttttttaaaaaaatattttgttaagttttcactgttattctacggttgttttttagttgttccactgttgtgtttttagttgttctattttgtgttccactattgttttatataaatacagtatttttgaaaaaatttctgtgtagcaatatttttgtaaaagttaacttaaaatttagtatttttgtaagttttccttttttaatttatgatactgaaaataaaattttaaatatgctaattcgtatttttaccgcctaaactttaacatgtaccaaatcatgccccctgaacttttctgggcgttaaaaattctcttgaactattgagattgttagatttaaagacttttataatttaatttcattcaattttactatttctgtgattgtttgtgtactaaatcatgctctccaaactttgatatctaccaaattatgtctctcgaactttgacatactaaatcatatccctgaactttcgtccatgtttgatttttttttttttactaaaattatacaaaagtccttaaatctaacaatctcaatagttcaaggggcatttttaacgaccttaaaagtttaagagcatgatttggtacatatcaaaatttggaagtaaaaatcataattagccttttaaataatcacttacacgtgtataaaaaaactaacatgtttgcaactgaatgtatgaattaatttctagctaaaaataaagaggtttctaccaataagaattaacagtagaattatttacacaatacacttaaaaatagattttcttttattatttttacagttttttatacatacaaattttcacttgttattttttagagaaaaatattac

SEQ ID NO: 81824 - DNA, 2294 bp, Cannabis sativa
gattaccatgacatcctccctcttcagatcacaatacaagtaagtttccaaactctattgaacttttgatttcacactagggtagatatttttgttcaagttgtgttatggattaactgtgcatgtgactgttaggatgagagtttaataggttattagttatgaaactgactaggactaagatggtcttcccataagtatgcttgtggtctctgggtaggttggttcgaaagcttcaaccttgcactgattacttttgtgagtttgggttgttctctatttatccattgggagtcattaaggcttccaagtggattattacttagtttctccttgtttggcagttttttgtgggttactgacctagtatttggaggtggcatcctacaagggagatgtttccaggtgatgggtctagaggggacctctctgagaaattttaggagaggttctccctaatacccttgccatccttaaatatataaggtatttaatttcttggatttcttttctttcttttcttttccagtgattgacctcaatgatgagtttaatcttgaaactatgaatattgaggatgtaagaattgaggtacccgcggggtccataagaacctacccccaaagctccaccaaaggcggaaagcatggaaagctaaggcaaagagcaaggggaaagccccatctccattcccaattgtttataaggattctgtctaggaaatggaccaaaatactaataaatgtatggcatacgggatgatggaaaacttgtccacaaaagcaggagtccgtaacattcctggactagtatggagtaggttgtcagtcgtataggagtacgcctccggagtactaacaggttcaacgcttagagatgggccagtatttttagtggggcacacctgcccctaaagacttacttcgtagagctttcagtaaaattgggatatctccgttctaattcattcctccatcttataagctctttccatggtggtatgttatgtgtaagatgcagaagctttaggttacatacccaaaggagatattgtttatgtcgtgaaaccccaacctttacacacaattaaagaaaaattagggtattacaagctaaagacatatcctgaggttcgttgccctaccaacttctccttgtgttctcctgacctccgattgtattagtttttctctaagggcttcacgttaaagagagtgccagacccctccttggacttcaaaatcccagttatagacttctttttgcttttctctatgtgacactcctttcctttttaaacttgtaactgatgagatctctttttgcttatggcagcacctatgcttcaaactccagagagtgaggagttgaagaaaaaatttgctttgtaccgctccatctcggacaaagatcttatggtggaaggcttggtcaccaccaaactattctatgaacacggactcatagccaagttccaaagtgtcaataacatcagcagctggatccttgattatgtctacccaaaggataaggaaaatatggtcgttgaggtctctaaaatcatgaagagggccctcaaagaagacgaatttttgatggcagattaggcatgctgccatcccaaccccatccgaaattgaaaacttataactctaatgccatttctaacaatgggacccacacataattaaattcataaataattataaaaataccaataattagtgctaattgcctttactaatcaaaattactaaaacggtcattcccattaaaagggtttcgtcctcgaaatctaatctgaatagctctggatattgagtcctcatgtcaaactctaactcacaggtggcttcctctaccttgctatttctccagggcactttgacaaaagcgatggccttgttccgaagaactttctcctttcgatcaagaatctggactggttgttcttcgtaggataagtctaattgtagttcgaaggcttcataactcaagacatgaatcgcgtctgaaacatatttcctcaacattgaaatatggaatacattatgaacagctgacatcgctggtggtaaggctagccgatacgctaccttcccgaccttttcgagtatctgaaatggcccaatgaacctagggcttaacttattccttttcccgaagagtcttatacccttaacaggtcaaacccataggaaaacatgttcccctacctaaaatgtaacgtccttgtgcttcagatcagcataacttttttgcctgttttgggaagcaagcatcccagccttgat

SEQ ID NO: 81825 - DNA, 1020 bp, Cannabis sativa
  modified_base (913)..(918): a, c, t, g, unknown or other
aaaaccgcctctaaatgtcaatttggaacatagcgggtattttcacaccctttagcttccctttttataaatgggggtgaaaaaactgcctctaaaggctaacattgtagtagtgaaagtatgtaaaaaatgaagaaaaaaaatatcactataaaatttttaaaaaaattatgtaaatatcactcatatttgactaaaaagtttttaaaaaaatttcaaataatgtcactccctatcttctcaaaataacatactaaaaatgagaaaagacagttccaattctacaataaaaaacctaatatagaattaaataaaattgcaacttcaaatctataagcaattgaaagagcttgaatctaataaagttaaaactaattaaatagtatgagtcaatatgagtcataatcgtattattcttttttagatatctaaactctctagaaattccaaaaataatagcacacaccaaataacaataaactcataacgttcatttttaaaaaaaaaaacctttttttttttgagtgtgattccaaaatttaaaactaagtacactttttatactacacaatggtaaagtccccatttaaaaaaaaaaaaaaaaaaatcgttcgtacgttgttttagatagttctggttgtctcgttggaagccacagaagaaaataaatatgcatgacagcaaggttttcatcagcaaaaaaaaccttaattaggataaattaatgagtttattactaatttcttcataaacatataaaataaacaattatacacatatattataccttaaacaaaacaactatatacattttttatatataaatacaaaatatataagttataccttttctatattgacataccaaagataatttatttgagaaaatataggggtgaaaatcggtcggttnnnnnnggtttttaaaattttataaccgaccggtcggttacggtttttattttacgaaaaccgtaaccgaccgtttagaaattataaccgtataaaaccgaccgtacg

SEQ ID NO: 81826 - DNA, 803 bp, Cannabis sativa
gtatgtcccatttttgttatgtgcgtgtgtttgtgctctgctctcccattttagtcactagtttttgggcaaggatgttgaaagtgtatgccttgatccattagaaattttacaaatgatcaatattcccctccccaatcagcctgaactttttttataggtaagttgaatttttttccaccatggctttgaacttaataaacacttcaaaggcttaagactttaagacaagtgggtaaatccaagtatagcgactgtagtcattaagaaagtgtacataataactaaagtcatctttggatttaatgtgtgagggtccccacagatcggtgtgtatgagttgaaaaggttgagaggctttaaagataatttagggaagggttgtttgtgacttttgcccaattgataggcatggcagaatctaagttgctgaatggtgtctgagtgagaaacaaaaggtgaaattttgcttaggacagcaggaaaggggtgtcttaacttattgtgccgtgtattgatgtcattaagatgatttatgtgaaaaatagtagggctacagagagattggtcaataataatatctttattgatatgagtgaaattacaatgagaatcacttgttacattggacaaattcaattgactgttacagaccatagctgaaggattacaatcattggacaaagactattttgagttatctgattgggattttttgagcactcttctagaacatacagactatctttaagagttcccatatatattaacaccttcccagtgtgtttgtccttgacaaagca

SEQ ID NO: 81827 - DNA, 888 bp, Cannabis sativa
  modified_base (860)..(862): a, c, t, g, unknown or other
ttattcttgaaatttcatacgactgctccctcatccttccttctttatcttgcagactccaaacttgatatcttcgtcttctaatagctggtgaggcatagaaatacttggtacttctatctccaagcttcaaccaatattctctagacttttgtctccacattgattctttttttcttcaatgtttcttatagagacagttgtatgttctgttcttctaggcagtatctcccgcatattggttgttgttggatccatttaagatgcctttccaaattgctaatggtttcgtccaaattgtcaaagtgtctttttttttccatacttgcaaggaacatcttgttttatcaaagtgctgtaacaagcttctagcattaccaagatcttccaactcccagaccttctttatttcttccctacaggattcttctcttgtccaggcatcataaaatctaaaaggtataaatcctttactcctgaacatgtgaatctccaaaaggattggggcatgatcagatattgatattgggaaattctagataccaacacatggcaattcagtgatccaattaatggagcctatcccacggtccagtctttcacgcactaaacctccattaaaacatttattttgccaagtgaaatgaaaacctttgaatctcaaatctgtaccccctgtgacttgacagaattcttctagccatctagtatctctcgaagtaacttcatggcctcccaactcctcagccgagttaaggatagagtttaaatcttccaagactacccacggctcattgcagttgaaagcgttcgaagaaagtcccctctaaaagacttctttgtaaagaccgcttagtttnnnttggaaattagcagttaatcacgttt

SEQ ID NO: 81828 - DNA, 1087 bp, Cannabis sativa
acatccttaactttccctatcaaaattctccattcacgagcaaacaactcaggcatacatgcaaggggcacattgttaatcgagatccaaaaggaatcatggtcaaaagtcatcttagaaacctctcctaatcccattagtttcacaaagcatattaattgcttctcaaacatccaaggtccaccaccaaaaacacgttttctatcctctttgctaccaaaaaagaatcgtaagacattttccccacttaattcctaaacctaaaaccgatgattaattttccaaatacttttcatagcattctcaattccttctttactagctggttacagactaatggccatccccaccaaacaaacctcgaatctccttttaccatcttcgaggctttccttgtttagtttgatcacaggtccatctatttcatctagttgcaacacctctaaaatacgacattgaatggaaataggaccgttggtaattgatgatagaaatgtccccataaattcccaacattttgcaatatttttataaaaaaaagggctccaagagacatatatatcgcttggagctaaaccttagaatccttgtgatacgttgaataacgtctagaaactcctattttgaatagtaggcgacatgtcgtccagtgcttgggagacatgttgcctggaccagtttctgctcaccatttttgagtttcaaagcccctctttgagccaactcaacacccaatgttctaaaactcatttaactgatgtaaatgaatgttttgacggtttcaaacacataaaaatatctccatttggttttttaactctcgtatacaattactcacttaattgtatatttatcaagtgtgaatcacaaattacaaactcatattcagatttgtaactccttagctacaactttatgtgtttgttacattatataccatatataacctccaaatgtataataaattattttcataataatacatttgtgacaatttaatgtatcaattgtattatcaaataatataaaaaatactggatctaaatatcccaaatattttcctttgatttagcttagaacaaatgtc

SEQ ID NO: 81829 - DNA, 651 bp, Cannabis sativa
ggaagaaagaaggctcaaaatagaatgacaaaaaattgcgattgaagaagaagatttggctgaagtcaagatgcaaatagattaatgaaagggatgctaactcaaagctattccatgagttgttgagtattaagaatttcttttcaagaattgagactggaagtggattaattttagagaaagagtgagatatagtagatgtgattatctctttttactctataatggtgcactcccgagagcgggtaatgatagaattgaagggattgagtggaaaaaaatacccgagtttctagacttaaaccgtgaaagaccttccgaagaataagagatcaaaaatgcagtttttaagtgtgaaggggaagaatgcccttggaccagatggatttacaatggctattaccaaccaaattgggaggtgattgtgaagaaagtattaatggaagtatttaggaaaacccaaggaggaaaactcaaggaggacatctttctgggagaaagaccctggtccagatggatttacaatggctactattaccaaccaaattgggaggtagttgtgaagaaagaattaatggaagtgtttaggaaaacccaaggaggacatctttttgggagaaagacccaggtccagatggatttacaatggct

SEQ ID NO: 81830 - DNA, 1130 bp, Cannabis sativa
aaatctgggggacgtggcgactagaaaaagtagatcgagtcaaggatggcaacgtacgccaactcatttgacttgaatttcaatgttgatagggttttcgagtgatttcacttgattttggataagcttttgaccaaaatataaatcggcagtacattttataacaatttttcaatggtttatgatcttttgagataaaactcatgaagcctaatataacatggattggatatttatgtatattagtgtgggtacgagaggtacctaatcggtcaaaacatgtaaattaattataatcttattttttattaattacatttaaataaaaatattgtgatataagttcttaaaaataatttatattatttgcaatattattttaatgtatgcctagatttttttctcaccaatgtattgataaaataatacaaaaatattaatatatataatataatatctaatttaatataatataataagattgtaacataatcaaaattactattatagtattctattttttttaatataaattaaaaaaagaactaatgtaataaaataacaatgtaatactgattacattatgtaatcgaattttattacattaaaaaagttatgtaatgaaaattttattaaaaatattaaataaaataaaagtcaaatgactgaaatattattttttagataagaataataattaaactatagagataattttgtgtatatatgagttattcaaattttattccaacaacaaacaaatatcttaatgatcaattctcattattattcttattttattacgttattattactatatcatcaaattatatatcacttaagctcgtataatttttatactattatttactaataagaaaataagaaaaaaaaactaaaaaaaaattaggaaaaaaaattaaaaaaaataaaaaagacaagagaaaaaatataggcagaaaaatattcaaatgatcaaatatatgttaaaaatggagtacataaaaggggttttttcttttttttttttaaaaaaaaaaggagatttttataatattttctggtattttttattataaaacaaataaaatacactaactcaatatattactaaaaaaattaaaaaatta

SEQ ID NO: 81831 - DNA, 1308 bp, Cannabis sativa
acggtcgttaaacataaaaatgactcttaccctttggaggtttcttagatttgtatcacataagacaaactctttaactttccactttcaactttggttacattcattcgtacatgaacaataatacatatttgtatattatataaatgaacctattatctatactatattattgtatgtgtaattactccattatgtaattgctatgtatgaaaattacaacaaatcttatcatcataatacaaaaaatgttctagaggtagagtcgtagacataaataagtaaataaataatagaagatatattatgtatagtgaaaggtattgtcaaacaccacagcaggtgacaaacactgcaagaaaggtcgtatagatttgtcagatcaaatctatgtatatatatttttttttttttgtgaaaaataaatttgttttcttctacaacttaaattcattcatgttttttccattttaaagtttgaccttttttaattattgaaaattcaactgttcaaaaaaatggagagaataatggagtataatgggggtatgcatagtcaattttgttgatattaattgaaaatggaataatgttttttaaggactaattgttgccacaaagatagatatagatggtccaagttgtgtcttaattgatttgcacacaatatattattattattattatattaatcactaaataaaatcaatcacattaagtaactaaattataggaattaagttaaagaaagtataaaatatgatgtggataagctatacgtgtgtatatatttgtcatagaataaaaaaaatgaaatataataatttagtattgctgatataattgaaagctactattaaatatatgaaataaaaaaacttgccatgaatcatgcaccaacttatttaacatgaatatatatatgaacaaatagtggctcctattcaaagtttgtgtactcgaaaaacaattaaagtctataataatcaatgtctttacaaaacaaattgggtggaattattctctgtataaaaatgccaactttaagaagttaacttaaatttttagtacatcatgtcacaagaaaagcatattaaaattattcaataaacattaaatacttagtgactttttattattgaaaatattgcgtgatttatggacgacatattcgaaattgatagttcctaaaaaaaattaatagtaataattataatatataaatatttttagaaaaaataacattttcttaagagaaggagggggaggaacatacctacttttctgtatgtgaggatccaaataaat

SEQ ID NO: 81832 - DNA, 1393 bp, Cannabis sativa
ttatagatgtgacaagattagaccactttggcccgagaaaggctatcttgttcagaagatgaaaggtccatcaagatgtatctggatactctaatgggttcatttggaacgggtaattgaagagacacctagaagaatgtggacaccatcctacatggcactttctagacacagagtcctaccatgtgaaaggtttgtcccctatgttagacctgaagagtgcgcgaaccaccaaaaggtaaccaattttttatccaatgtcatattctagacattctttgtactagaagcatgtttgcgcacaacacatgtcaccaccaaacggtccccacacgtatggatgatcattatcacgtaaaatgggccttagctaaccgaaccaaagtaaatatatattttgttttacccatcagtggtcctagttgacacctttaaaccctgctaggtccaggttcattcatactcgactctagtctataaataaaacattatcccttcatgcaaagggttggaaaattatttctcagaaaaaaaaaaacttgaacttaggcgcaagaacacgtgtaaaaatactttgaagttcttctagctcaataatattaactcgtggacaaaggctcactaacgccccaatcacataaaaatcattgattctccttctttaatttatttcttcgttaagcataatttattttataatagatttctaaaaactcagtaaatatttttgtgtattcattgagagcttgaaaaaagtcttactgtagttgtcatctacaataatggttgaaaccctaaaagtagttgtcaaaccacttgctcgagacagtagagataatgtcgccaacaacgacaagaaccaactccccctaacaaatggtcaggcgagtgtgaggatgggaaagcgtcggaggtaggtagtcttccacattgagaagaccagcactgtgtgtgaagaacacgtcaatgattgatgatcccactaacaaggatgagcagcaaggtcaagaagatgaccctaaggatgaccacaacaaggattatgaaaaagagtaatacaagtaagaccttgaaatagtacaactacatcaagagcttgcggatacccaaaggatattagcatatcaagaggaagtctagtcccagatgcaagaagctctgccacaactacaggcacaagctaacctccttgaaagaaaccctcctgctaaaaagtttaatcattcgggggttgggccatctactccagcaaatgataatagaaagggtgtaatggatgatccttcgagaaaacccacacacaatgctacacgaaacaatagaagagcagccaaccaaccccagtagaaagaaagggacgctcaagccccagggctaagccaaccaatcaatt

SEQ ID NO: 81833 - DNA, 1147 bp, Cannabis sativa
aacaataaggctttggataatgacttctacatttttcatgtttttgcatgcaaacatttgtagggttaagaatgccacaaggaccatgaatcatatgctttaaaacaagtgagtataaatatgcatggctgatcattttcattaggaatctcaactgatacgaacttatcaaaatctttgggttaacaattttttactttggctttagaataattagaaagtgtacatataaaaggcttctgaaattccacaacatacacgtatgtagccactattccaaatatttttcttttaaataaatcaattttagttcttctaattttgctctaaaaaggcatgctaataaattgggcctattttgtgccttatcattatcacttaattcttattttatttttgcccaattataattacatattactgctagaaagatatcaggtttcctaaatttttgtactatttatatcattgcatccatatattatttttgcatatatatctctaggtccaccaataaaaaatattggtaaaataattcttcaaccaattttagaacctctactttctcctaagtttatactatcaataattttttggtaaagctcaacacgaatttcaacttatttatttttaatgaaatttatttagtatatttgatttggaacgaattcgatatgtatattggtagagagatgtaacgctaatccatatattcagaatcaactttaatacttttcttaatattggtttttcctcttagcctttgtaggttttgctattgagattgacacttacttataaagactttgcttgatataagcttttagttattaatattgaacgcattaacaaaaaatgataaagcacctgaaccctataaaaaaacccctttgtacttatgtcgtgtttgttttatgtcaataataaggtggacatgtgactcttgaggaagtcagtccattgtttcgtgtgccaagacctttgactactcacaagaccaataaagattcctactcataacaaaattacaactgaagacaaagaatcattcaaaccacagagattcctctggtcaacttaaaaatttatctatttgtagttatgaataataataaaaaaaaagagtctggaatgccagaaattccct

SEQ ID NO: 81834 - DNA, 917 bp, Cannabis sativa
tttcttcttcttcttcctgctttgttttcaggtaaaccacacacagatataataataatcaatggagaacagggttgaaatgcctattgaaagcccaagcgtacctgagaaaacagtttaccagccaatcacaccaaccccagttcttatccaaacagatcaaaatactcacgactctcccaattctgggatcgacttgcgcaagcccaccaccccagatcgtcttaatgttcccaaggcatttaaatacccagaaaggtaactgattagattataatcattcttatatacataacattagtaactgaaaacttattctatttgttttgattttgtaggtatagaagccccactgattcgatgatgtcccctgtaacgaaaaatcttcttgcaagaaccagaaagggagcatcacttttgccaccaagtaaaaatcaacttaaggtttgtatatgtataattgaatcaaatgaataattatttgtatttcgtttacatagctcattttataatgtcttactggtacacagattcaggatttgcttctcccagatgtggctcttcttcagtgatttaagattttgggcattattgtatctgaaaggattgttctttttcaaagggggtgtttgttaatgtaatttaaatatattttctatttatttatcaataagattctgctcagcatgtccctatgctttgctttgtttaagaaatttgattcttagaaataaaagcttgacactaaagcagctcagattatagtttcactattattattattattattccaaacgaacttcataccattggactgaaccaacatctccttgaatttcaagctcacaaactgaggtgaccaagtaagaaacagcatcatcaatgctgtcaaatctagcaaggtctggaggaagaga

SEQ ID NO: 81835 - DNA, 1998 bp, Cannabis sativa
aaaaataaatactaaaaaaatttccaaactattaccaaattaacttgttaaaaaaaaaaattacttgagaactgctattgagcgaaacctgcctcactcgcactcgcactcgcactcgcactcgcacgtgataagtcgatatacgacaattaaattagcaaataataaaatgtactcaacacttatttttttttttcaacgaattaaattcattgttcaaaataataataataattaataaagcaaaaagctatttacacacgtacaaaaatggagctggtaaaggaaatagtacccactactgaagtagtcggagtaggacgatcctggattttccaactaagacactataaatattcgcatccaagactttatccctctgcaatatctgatcgtacgaagacgcccatcttgtgcttgaggtccaggaagcttcctccaaatcctcagggcttctttgttccatccatatcgctttcacctttcgggttggtcatattcttgattctttgcttatgttgttggtattaagttgtttgtggttcctgatttgtgagacgttgaaagaaaatggacttgaatttgattgcttttgtataaatgtatgcataggagactgattcaagttttcctgattgcacagaaccatgaagaactgtatcgctctatcctttagtgttttcaattgacttgtgttgttcatcataattgtgttcctccatttgatttttaagcgcaaaaatttaaagtgttaatttgggtttcatctgcaaaatgttaaggatttgtaatttgagttaagttgatgcaactttgagaatctttccttcttatatctatgtaggaaagggagtctgctgatgtaaaagcctgatagtttgttttgttctgatttttttttttttttttaatttttcttgctcttctgtatactcaaaacatgtttactaaggttttccataaagaaagtcaaaggatcggtagtttgagttttaagtaaatttagttaattatctgtgttgtgttaaaaaaaaaggttagtgttaaacaggaaatttgaattattgctattagaagttaatgtgggagttgcttgaagatatttaagggaaacattttacactttacatctcccaaaatccttaccctttacaattcgttttgctaccgattataaaacatgcccttggtgttttatgcatttgttgttttaaaaatattattattgggtgcttctataatgcaccctccgaaaaaaaaatacatctatgcatactttactatttcggcatctagaaaaaaaatatttaattttttttttcataatcgtgtacgatatagttatttaagacatcctgtaaaattaaattttgataaattcaaaataatatacaatataaaaagtaatgttcaaataatttattttaaatacgtgtaaaataaaatagttacacatgcaacagaatacaatgtacacaaccataaaaaaaatagacaaaaaaaatctcctaagttccgaaatagataggtcgtacatattcagttaaagaagtattttcgattattctcttaccattttggaaaattttacaatgcactttctaaaaggggtacacaaatgcacccctatctgattcggcatctggaaaaaatttttagttgaattttttttttatgatcgtgtatgttgcaggatgtcttaaataattataaaactatgaaaaaatttggactaaaaaattctattgcttgccgataaaggatgcattagtagtgcattcctcttaagtgtgtccattgtagtatcaccataccatttttatcttatttttaacttctttttcttttagaattctgatctctgcggtgttcagacttcatagtactgtcgtagagtatttacatcattttacagtaactgctcaagtaattctctgttgaatatttgttgtccagaaagaagaggcctaacaagaagttatttactggaaaattcac

SEQ ID NO: 81836 - DNA, 1705 bp, Cannabis sativa
  modified_base (566)..(569): a, c, t, g, unknown or other
  modified_base (1646)..(1676): a, c, t, g, unknown or other
agtaaaaaagtaaaaaataccgccagacagtatttttgtaaaaaaatagcaaaaattagtatatcatgtaaatttcccaaaagaaaagacactatattgacttttctagttgtccggcccacctatgtcatgatttggaggcccatatcatgttaaatataggcccatagctatttgatcatttttgcatcgtttctctttttgtaatcttataccagcaaaagatagaacaaaagggtaaaaccaaaatattcaaagaaaaaaagaattattgaagaagtctttccctagtccttttatgcataatttgatcaattccaaagtccccaagtgtacaacaaaaatttgatatgcactcaacctcaagacttggtctctaacattccaaccaaaacacaccatggtctccaaaatgcccaccatactagacaattttgggttggtcaaaacccatttctaacttttgaagacttccatcccctaatttatggagaaaattacattgtatatctattttattttacttgttttaattttaaccttaatttttatattctttaagatannnncacttttatagatgatgtccctaatattagattccttaagttaatgcaaattattatactagacttaaattagagagtgggagtatattggacaacccactcataaaaatgagtatattataataaaatataatatgagtgtatttttgattaatgaatattaaaagaaaatatttttcaacttaccaataatttatatattttttatttttttaaagaagagtaggcgtggaaatgattattaattatactattatgaatgtgaaatttgtgttaaaattgacaaaaataaataaataaataaataaataaaataagtccatgttatatttatttattagtataatttaagcattttcactccaatgtgggtaaattaacttaaaaagtccaaaaacaatttaattttattcgaaagtatataaaaaaaaattgtttcaaaaataaataaaaattaggagttataaattatcttaatcagtgataataataaatagaacaacgcaatatttttttttttttgagaataatcactgtaattataaattgaagtcatttacaacaacagagaaaataggataaggtatttctcctatccaacatatgtcatcattcaaccctaaagcaaatgagctgcttgattagcagttcttttaacatgggatactaaaacaccaaggaaaaaggataaaagacaacgaacatcgaaaataaagtttgaaaaactagataaatcacttgtagctgatttcaaagtagtggaaactctcaatgcatccgtctcaatatgcgttatagacaattgtaattgagatgcccaattgagagcatgaaaaagtgatttagcttccatctcatccgatcgaaaactgccttgaaccaccttcgaaagagcagccacaaccatgccatcatggtctctaagtatagctccaatgcctaattttttctgttcaaaattggttgctacatcaacattaagtttgaagccatttggtgaaggaggaaaccatggaatttgctgttgctggacagaattagttgttgactggtgagtaagtgttggaaattattttnnnnnnnnnnnnnnnnnnnnnnnnnnnnnnnttattaacatcctaaataagaactttcta

SEQ ID NO: 81837 - DNA, 576 bp, Cannabis sativa
ttctttcaaaaaaaaaaaaaagttcattttttaaccctaagtgtgccttaacacaatgatgagctaagttgttacactcttttagagcataaattatactgaacaacaatgaattcttcatacaacttgtaatattactaagaatagaactattacaataagaagaattaatgttatccaccacaatcttacaagctgattcaataacagagactgggagcttggctgcttgaatctaaaaaatcacaacaagaatagctttagcttcattaatttcaagaaaaatcacccccatcgattggaatgaccactcatcttttatgttgtcaccatcatctcgggccaccactccaaggccatgcctctttgatgtattatttatagcagcatctgtgttgattctccaaaatccaaaagtgagccgaggtacctgttcatctgtctctgttcttagaggacacaatttaaactcggactgatgagcattaaccatagtcacacaagtagctaacagcatgatcaagaagctccaaaggggagatgattcttttgttgtgaaatagattattatgctga

SEQ ID NO: 81838 - DNA, 1371 bp, Cannabis sativa
  modified_base (26)..(51): a, c, t, g, unknown or other
ctctttctctcttcatcttcttcttnnnnnnnnnnnnnnnnnnnnnnnnnntttatattattttataacaaaatttatttttttaacatattatgatttacattattatagtttatcatacatcttttttttaaaaaaattagaataattgatcatacaaaataaagttcaaacttcataataatcaattgcatatatatatgaaaaaaattaaaagtttactatttaaactttattttgaacattgtaaatccttaaaaaaaaaaattaaaaattggtaaaatgcatgctaggttttttataatatcgtcatataaaatatatatcattgaaatagtcgtcaacatggggtttgaataatgaataacatatataagaggactatataataacttctccaatttgtttaaagtcaattatcaataaacttctgtatatatatagtagttcattaatatataataactatttctctttctagcatcatgtattaaacaaaaactctagtatatgtattgccattgttaatatatatttcttactggtatgtattaattaatggatcagttcaattttggtgtataatgagccttaataatgtcattttgaggtcttatatattgtactatttttaatattatgtattgtccacgtacactgccaccccaaacttttaatttgctcatgtgaaatatagataaatatatcacacacacacatatatagatataatatattgaagtacatagtagtagtattttattgtgatacgccatatgtataaatttcaaagtctgactagtaaatgatagggccttcattatttagagacttgtggaaaaactttggtacgtaattaaatttaaactgcaaataattttatatatatactcggatttgttggtttgtcattttcatcaaacacttgctagtaattaatttaataatttcattttcagtacatgaccctttcatccacgcttgtaaaattacaactaattaatgtacatatattatatatgttgaaacattatcacatatataccaattcaatacgtgtatacatatattttaattcaaaaataaataaaactcaccaaagttattaagacctatacgcataaccataattttgtttattatttatatattgtagcagttacaattatttttctatgtgtttgactaatattattccaaagtttgatcatcaacaatatagcattgttatctcattctcagccgtcgattaagattataattaaggcagctcacctagaccatatatacacaattacacatacaaatttcttgttcacaacttggattttagtgtaatacaatatatatttatagtaattgagtttccac

SEQ ID NO: 81839 - DNA, 711 bp, Cannabis sativa
taatatcatcattgtgatatgaataactcatttatgataaacgacacattagtcaaatatgtgtggggtttatatgctggtgcaagtatcaattttttagttagtttttacagttgtatgttgacagttattactgttatgtgtgtcaggtgtttgtaccctctatttcggcctatatataaaggtctcgttgtaattcttttggagagagttgagttgagaacagagagagtacttttgatgtaaagagcatgaggattgataactcatgtctctcgagtgcctgagagttttctggtgtaggagcaagactccattaagttctgttttttgatctttcttgtaaactgactgagctccatccgagagtaataaaggcaaagcctcaagccagttcctcccaaggattagatccaagtgttgattcacttgtgattgaaccttgtaatctgtttgtgttcttttcttttactgctactgttttattccttttgctttctggtttatgagttaatgtttggtttcattagcttgtttgatctgttttatgttgttcttgaatggtgttgattcaccacaaatggtatcagagcacatgttgttattgaggaatcaagaactgtgaagatcaaagcttgaaacacaacaatggcgactgcaagattcaaaattgataaattcactggaatgaatgattttggcctctggcgc

SEQ ID NO: 81840 - DNA, 903 bp, Cannabis sativa
cctgttctcctcttctgtcgagggtctttgaccatttgtacctcctccattctgtggtgcttcatcaccagcgcctctgcctccggcagctcctactggcgggggaggtatcgaagcgatcagttgatggtcatcaagtcgtacctctacttcttgacagcggtgagaacatctcggcatttttgtggtaacttgtattagggaagaaatgtcgcttttagactgtcacttcccacagacggtgccaaaatgttaacagtcagaacttgttaacgatgtagataactttttcaactaataatattgataaactttaatagaacttttactttaatgcaaagaagaaaaaacttcaaaatctttttagtgtttgaaaataaactctctctctttcaatgatacaagtttttccttctggcccctccccccaaaaaatcctccctcctgcaatggaagggatagtctaatttatagctagcccccttctccttacaccttcagcttcccccatgcatcatatgatcgtcgctttcacctatcattacactgtccccgaagcaacctgccatgtctagaatccaatattacactaaaaaaactcatttcattttgtacctcgaacaaaccaaaatttgttcctgctatataagcatgttgagtcgtcgttgtcccccttgacaccctctcagtaaatctgttgatgtcagggaggaaaggcggatgggcagggtcctgaggctacgtacacgggtgcggggctggctgggcgcacggacaagctggctagctggctggctgggcgcgcaagtaggctggctagctagctggctggctgggcgcgggcaagctggctggctggttgattgggcgcacgggcaggctggctgtccacgggcgcgagcc

SEQ ID NO: 81841 - DNA, 777 bp, Cannabis sativa
ctcatccgaaataagtttgcaggccctttatttaagaatttctttagatttcacgacattcttccagaaccacaaatctaagttttaaaaagaacaattcaagaaaggtctaccccttaggtacttggcacttaagaccttacaacacagagattaatcctcgttaatgagaatccagccacatttaaccaataaaaccttatttatttccaaaatctaatcctaaaatatgtaatataatgtctaatcctaaaatatgtactcaattttctactcacaaaaaatgtcaattttatttctcctctattttccatcactaaggttggccaaccaccacaaagactactaaaacactaaccaccaccgaaattctgtccaaaaaaaaccttttttgtgtagtctttttatgacagggagagagagaaaaaaataaaaaaaaatgtatattttatcttaaaatagaatattaacatatttatgtttaattgtgaagtcacaataagtatgagtcaaaaatagaattattagtattttttgtccgtaaacattttacattatcaatttgttcttcttattgtatacggcttattaataatactcatcaaaatatcatttttagagtaacgtaatttttccattacactatattcaattttattataaaacaagttaagtagtagatgatagttgataaatggatacaaattaaatacccttcactttttttatgttaatgaataataaaataaaataaaaattatttttttataagaagag

SEQ ID NO: 81842 - DNA, 921 bp, Cannabis sativa
aacatacccttggtcgcacatggttgatgatgaagaatcactaatcttcaatttcaatatgtataacaacgacaaccaatctcaagcggtgctgcaactaaatgttatgtttgtagttttcttttcttttttcattattattttgtctctcctaattgtttttttggttacattttatatgtatttttgtacacacgtatagtgtatatatgtgtgtgacagagccttaattcgtggctgtcatttgtgttttccagatggatatgaatgttaagaggtgactgtcacataattattttgtcatgctagctagcaataataatgttttcacaattaattcttaaccaatttattttttctcaattgatttgagcttctgtgatcggttgctctatttggctatgatcagtttcaggtttagtgatatatatgattgtaatgtaatgtacatttattataattcctgtgtatattattgaaaaaaaaactacactgctatccacatcatttgaattattttgggttgaacttgttggtttacgtataatttatgaatatattgaggggttttttttttttttttttaaatattttcttttttaaaatgttttatttataattctacgccctaaaatttttgtttgtaaaagtatatttataaagtttcaaaattacaaaaatatattttactcggcaaaaagtaaaaaagaaataatgagaaatcaacatcacaacaactataaataaaatataaaacaaaaaaaaaaaaaccatcataataactataatacaactagttatgatcatgttaccgaattagaaaacgatatgaggttatttctccttcttcaacaatagatgggccatggcagggaaggagcgacctaaaaagtgagatattactaggaaagaaaaggcagt

SEQ ID NO: 81843 - DNA, 1158 bp, Cannabis sativa
aaatgagtttgagttaactgttctcagctcagtgattattttgtatttatatgcagaagaaagattaaatacaaggcaagaaaagtctgttaaactaattaattggccagttgtgaagagtaacaaactctatcctaaatgcacagttgtcataactaacataactaaccatattcactaatacccccctcaaggtgtatttggtaggctcaagatacaacttgttacatagaaattggcgacgacaaaggtttggttaatagatcggcaatttgatcttcagttggaatataacagacttgaagcttcttctttgtaatttgacttctgatgtattgaatgtttaactcaatatgtttggttcttgtgtggaagacaagattgagagcaagagcttgagcacttgattgtcacaccacagtgtaggtggttgtttgtgcaaagtgatgccaagttctgtaagtaatgaagttgtccacacaagttaagtaactgctaatgctaatgctcgatattcagatttcgtactcgatcgagctactgcttgctactttttagagctccaattgactagatttgacttccctattgagagaagagccgttgatgtataatatgattttttttttatttctttgttattgttgttgttgttttgtttgtttggtctaatttattttatagctatcttacagttgttattgttattgttctagaattgaagttaatacacacattttgattattaccttttcaaagttacttcttttgggcaataggattattaaagatatcctaactattttgactgactatcaaaaaaagttgttctctaaatctggttttggtcattttttgtgtgtgccaagtattcaatctatcttcaattgattcagtctgttgttgagagaagttcaacaagttttgggtaagtgttgttgggcaattacttaggtttagtattgacggcttgcggtggtgactggtctaaattgtcagattgagtctaatattttgggatttagccaggcgaaaaacattaggagaacatcgtttgaagggcaaagataaaatcacgaaaaattctattcaagttgcattgaatggtaagtactttgaggacaatgatgatctttttgtcaagttgactgtattgta

SEQ ID NO: 81844 - DNA, 1201 bp, Cannabis sativa
tcttcaggttatagtgaaggagttgaattatgtgatgcaaagatgtggttcagctagtcgaaagaacgaagaacaagaatccgacgaaggtcaatccctctgctctgtttgatcttattctctatatgtttaaagtttgacctgattgccatacatgttatgattgaaaatgtaagtacaaatacaaggagattgattttattttttttgtccgtttcgtttgtgaaaatttcaggccaaactgttcttgagaagtacaaaaaccgtctacacttgtggcaagtgtttttcgccaacccatatgaatggtgggacaatcgaaaacacaaaataagcaatcctttactccctgattttaagcacaaggatactggtgaatctctttggttaggccgaaatgatcctccatggattaagaaacagcttgaaaaagttgactcagctatggcagaacatggtccagttgatagaataggacgccgagctcgtgtttctgagtgggagtatgattcgtagccgtaaggacgaggtgttgaaaaagaaagagtggtagcattacagcccggcctaagtgcatgaagtttatgtccttgcttgctccattgatgaaggcaaactagctatcacagtacagtattttaaacactgtaaatatttgacaggtttttgtttatactgtaaattccttgtatactttttctttttttctttcttgtaatttaagttctttgtgtactaattatacttgagacatggagaagagtgtattactgatagaaacaaataactaaacattgttttttttttcttgttcaattacaataaagtttgaatcatctcacctttaaagggataattagatttttgacaatagaggagaacaagttttcattttttttttttttgacatgttagattatcatgaatttctcaacatattcactagatattttaaataactatgatgtatattgttccataaaaaaatagaatttaaacaatttaaatatcaaaaacacgagatctctgactaagtatactctaagttgtcgaatgaatttagattacactaaatctactcaattatggaaaaattgtttaatcacttagaataacgagtacttaaagaaaatagtaaaaatatatgtatttaaataactaataaaaagtacagaaattatagtggttcagctcgagattt

SEQ ID NO: 81845 - DNA, 1928 bp, Cannabis sativa
attcaataataacagtataataaattatttaaatagctataaataatttccataattaatcatgattaactgctaatttccaaattaactaagcggtctttacaacagttgtgaggaaaggtttggggatgatgatgatcttttcttgagagttgttgttctctagttttttcagtattttgtgttaagtgattcggacactaagaaattttctgacttagagctggatattattgatagttggaggtttaatgaatatgcttggggcaaagagtcttattctttatcacgtgatttagttagaggtgcgattggaaagaatcttattaaaattcataaaggtgataatggagacaaaattagtttttataggttgagaggtttgacctatgtttttcaagtttagttcaatgaatgttgtttgtacattgatggcattcattgtacaaatttgtatgatcatattcttagaactctgaactagtgtaatgattattctccctctattaaggatttcaagaattctatcttcaatgtttcactatcagttattattttttatgatgttttaatgttattttttgtttatattatgtgtttttaatgttgttttcctattttatatttgtgttagcttaaagtgaagaatttgttgccaattgaggaggagttgttgtgtctacatttggatgatttctttgtggataagaacctagaggacattgggaaagaaaaatctgtgcagattgatgatgttggtagtgaaggttcatttgatgaaaatagtttatcttttaaatatgaagaatttcataggagattgtaagatatttttgttaagtaggaagcattcgctgctgaagttgttgttttaaaaggagatttaaaaagtatgatgtcttctttggaatatgtgtataaaaaaaattaatttgttgttgtcaagacttgcttccatggtttgttaatatatttttattaatctttttatttttgttctttttaagctttatttattttttattttttttatgtgaaggattctcatgaggtaaatgatgatgaggaatatgataatgaggaagaggttgatattgagattgaggaggtttctcgtggggatgataatgatgacaaaggtgtgggcaatgatgatgaggatgagagtgagactgtgacaatcagtagtcccgtgatctgtaagggaaaatataagctaagttgtgcaatcccacgtcgcctggagaaggtcaagtgtgatgattctgagattgtgtaggtatgggaatgcatagttgaagatggcttaaatagattgatagcaatttcgagggaaccaaggcagaggtggacgccaagattattcttaaactgagtgcccacattgtaagaaacatcaccttagagagtgcaaccaaaaaacattgtgacagtcagtagtcccgtgatccgtaagggaaaataccgagtaagttgtgcaatcccacacctccttggaaaggtaaagtgggatgattctgagactgtgcaggtatgggactgcacagttgaagaaagctcaaatggattgattggtactactacaattttaacatgagaagtcggtcatgagaggtcggttttgtttaaactgacataacacacgctcataagtcggtttacacaaaaccgacctctcatgtatgtcaatagtaagcatgggaggtcggttacacaaaaattgacctctcatgtatacatgggaggttggtacacacaaaaccgacctcttatatatttaggaaacatgggatgtcggttgcttgaaaaatgtcttctcatgtgacatggtaggtcgtctcccaggtaactgacctcccatgttatttaatgtatataaataaattaattattaatcatttaaaaaagtaattaattatatatgtttc

SEQ ID NO: 81846 - DNA, 760 bp, Cannabis sativa
attgggcgggttgcacttaaattttagcaacccgaactttagattagattaaaaaatatataggataaaccgtccaaaccaactgatgtacagccctaaatactactatagctttcatctcacaaagtgtacttgaatcaaaacttacaagctcataatgtttagttttggtatgtaaaattggtagcacatatggtatacatctatatatttagttggacttccaaaacaaggatcgatcatggtgatgataagacatgaaaataatactaaaagaaagattataataattaaaaagaacttgaagaagacgttttgaaaataatttcatcttgtttgatgaattagtttagtggggtatactttcttacccaagtgtttggattggaatccttgaaaatataaatacacatacaaaaatccaacaaacgtcaacaaaatctaggctgacttttatttaattatatatatatatttatttatatactttcccaacaagtagagctgacttccactttctctctctctctctctctctcctcaatttattatttttaaaactaataaaagcatcctatagcaacccatcttttggaccataaattcttctatattctcagtccaataataataaaatatcagtggtgtttaatatcttttataattgttattttatgattgattaatgatataagacgtgctacttaattacattaataatagtatgacattaaggaaaacgtcatgcatgcactaaatg

SEQ ID NO: 81847 - DNA, 965 bp, Cannabis sativa
ctctctctctctatttttttttcttcatgttgtggggtgctcaactcagagatcgttgtagaattttgatattagtggagagcgtgagtgtatgccccaacccattgattgtgcttttaaagttcatgtttttagtcttttacttcttacccatttggagtattgttgtaaatttgccaacttcaatcttaataatgatattgttattgtatagcaggtattgatccttgtattgagaaagcttaaatgataatattgggaggaattgattgattaggcgatttatttatttttttaatttttatttttaatgtgacggtacaaagccgtcagctatagtgttttgctgactattttaaatcgtcgcttattctatctaattttgcaacggtaacaggagataattatagagaccattacattagctcactgtttagaacaactggaaaaatctaattttttattttcacaacataggcaatagttttggtaagaaaaaacacatttggtttcaatttccgaacacgtgtggagagctcaaaatgttctatcattgcgccaacacattcaaccaacttttatgaacatgcacaaccaagctatcaagaaccacccagtatatcctagtatatcttatttcatgcttaaagaaaatggttatttcttttttaaaaaaatatggttattttattttcttgccagtaattgtttttaattgttgatagcttagttgaaaaaaaaagttgtggttagcttagtttatttctatagatgataatgtaaaagttgatttatataatagtaacaataataaaaataacaaaatttagcaaaaaaaaattttgagcattaatacaaaaactttttagattttaactaaaataactaaattgttaaaatagagagcattttttcttaattttactccaatcatactttattttaactaaccttacaaaaaaaat

SEQ ID NO: 81848 - DNA, 1713 bp, Cannabis sativa
gtacagattacgcaatatgtacacttaaagtgataactttaattataactaaagagcattactattgggcaccagtggtgcccaacaccaattataggtggcaccctacgattggttagcaatactccataaatctttttttttaagtaatatgagaccaactacttaattacactaatagtggtatcgatacaagcaaggagggttgcctttagcatttctcacaactaaaatatcacattttttatacattttttcaattaagttatttaaaaaataataataacttttttgaaaaagaacttattaattaataataacataacaaaataataaattttctctaatatcttaaaaatgttaaaaaaatatttaaaattcgagatgaaatctaagattaatatatagatttgagaaatacagtagtgacgactacaagtgaactacggtaataacaagtgatgtgatataatgatgacaacaggtgagatacgatgatacaaataagtgagatacaatgagacaacaagtgaagatacaataataacaatagtttttctacaccaccttatttatttatttttataaaaatattttcttttaacaaaataatttaaaatactatatataataaattttaaacttcttaataaataattttaaataataattaataaaattgtatatttagtttttaataaataaattataaatgataatatgaaataaaataatatatttataattttactatatattagaattatatttttaagtaattatttattataatactaaaaaagaaaaaattaaatagcctcgcgaaaagactatattacctagttaaatctaaaaaatattttggaaaacctagaatagatacaggggtatcgtgagagagagaacacagtgggcgactccaccttctcagaccatgaacatcgatcattccatcttctccgaccacggtacgtttgaggttccatcttcttcgaccatgaccatagcaggctgagaaaaatggagcgatgagtatgtgattgcgaaccaccacaagaagtcgcgcttcgtacctcaaaaacggtgaagaacccagatcgaatgttcaagtgttaccgtattgaattgttgccccatttttttactccttttcgctgtccaattattctgggcttggattttgtgtctgtgataataatctgttttattgtggggtatatatccataagaatttggggtcagtttaaatttttcgttgagaacaatttaggaagggaggatgttggcagtacatggaatcgatggtggtcttctccagagaagatgaaatcgatggtctttctccttgaaggttgacgtcataggttatgtttttgttttcaggtttaatgtttttttgtttatgatttttttttcaatcaactttgtttttttttttttgaaatgtaatcattttgttttctcttttttttttttttttgaggaaacactattattattattgaatagaatccaaaacaataacagagtggattggagaaggaatttcccccaaccaagaacaattattatccaatcaaagagcatatttcactaattcatgtgctgctttattagcatcacgctttacatgcgaaattgaaactccaggaaagaaggacaataaaagagaaatatcatcaataagaacataaaaaagagaaacatgggctg

SEQ ID NO: 81849 - DNA, 1306 bp, Cannabis sativa
  modified_base (1144)..(1147): a, c, t, g, unknown or other
  modified_base (1272)..(1281): a, c, t, g, unknown or other
ttaaactccattttctctttatatatctaaattaattattacttttattactcatgctgcacttagactgtgttttgtataaatgattgtcatgctcaattttgaagatatatttgtgtgatcttatttgttttaaaagtttttggaaaattaaataaaaaaaaaatagggaaaatcctgatctaaatactgataaagctaaggaaaattctattagcaagtactgatatataactattaagcttgaatgaccatgcgtgataaagcttcttttattcaaacagagaaaagctcaacctatctcttgactaaacaggtctaattgtatatatagctataaatatatcatatatatataactacttatatatttatatgtatttcacttctcataattggtgtgtgtagctttatatatgtatagatttacttttatatatactgtactgcctagctatacatgatatttattgcatctataatactacctttggtaaatatactaatctgaatgacttaaaaatcatttgaattacacaatatgtattagtttcttaaaaagaatacatatgaagttgctgcataactttgaatataatagactaaattggtggttagatatatattcaacaatctgcagcccttgaaaagtcatttcatattttatttcttttctagctaattaatgtttgttcattcacatcgattatatatatagctaagccgggtcgtatattaggttggtacaattcaaagaaaatatgtaataattataagattaataattcaaagtactagctagttttaatcccatatactcgtgaaaacatggactagtgtatatagtacaatacaatactattcatatattaatttaaactctagctccctatacagtgcgtattacaagctatcattttgcttcttattataagctctgtttgactcatagtacgcatagtactagaaatattgataaattaatttaatgagtctaataaataagaaaatatataaagggtgcttcttttgtgttaaatatattgttttcattcaagacgttatgtcactacaaaaaacggttagtactttttagtgacaatcttttagtcacaatataattttttttgtgactaaatatgannnntagtcacaacaaaaagttacttgtgactaaaacatagtatatatttagttacaagttgtcattaatagagtttaagtcacaataaatattgtgactaaaaacatatttagtcacaacaaattgtnnnnnnnnnnactaatacttttagtcacggacctt

SEQ ID NO: 81850 - DNA, 1023 bp, Cannabis sativa
aaattactctaatgactgaaagttaagctttttacaggattgagtataaaagaatatcatccacacagagaatgagcaaaacatagaaccaacatgccagaacatgagacatttatgattcactactgctaatttatgacgaacatcagcagccaaaatgtggcaagaataactattatgtagtatgtaataggctaatagcagtctagatggaaatacacattaaacaccgaataagcaaacagtaaatgataaatggcagattaaatctgataactagctattttaaataataataataataagtaagaaactgcagggtgaacgtgtaggaagtcaataaatagtgaacgattattattgttttacaaggaatatagaattactgtatttaggaaaagaaacgaaaagattcttggtaatagttcagatgtcatttcaaacaagcctggcataaatagcttgaccaatcacacgctaatatagaaagaaattaaaacagaatagaatagtacaataatattgagaataaagtgcataagagcactaaggctccttgtcttagaagttagctttttagaaaataaaataagaggaaagagaagtgccgcaaaatgcattcgtatttcaactatgatgcttctttatcatggttatacttatttttttcatttagtggctaagaccctttgttacttattcccaatccccaccaaaaacaatttaaattatatagctgagcaccatcgccccagatcattgcacaaaaaattaaaactcaagccacaagatgaaaccaagtggcaagttataaacctatatgatatcagtgtaaccttgctttgtgcactatgtttctgtatcatttgttagaactaaattatgaaagctattttacctatgctaaacaagaaaaaataaaaagttgaatattgagaataaatttaaattttaacaaacaagtaacccactagcaaaatacaaaagaacttcccataccttaatctttatgcccttcgggag

SEQ ID NO: 81851 - DNA, 646 bp, Cannabis sativa
atccaccttgtgctgcatatttctgcagaagaaaaaattgtaaaagttaaatgattatcgcgcctatgaaatccgtgaaacaattactacatgctatgaattacatcaacaataatcttaaaacttgcaactatatataacctgaacaatgctttcgggacgccctcctagatcgtcttcacgcttgtcagatcttaaccaatcggcagcaaccatttgcattaaggtgcccttcgccttaacctaaaagtaatgttatcattttctatcaacacacattgtgttcacattaaacgaaaattatcttgagactgcttggcttgatagattagttccaattaaacaatttcgattcttaccttctgacggtcttccaaataactctttccccgaattaggaaagtagagggatctgttgttgcccagctgcaaggcaaattacaagttggatctttcggaagagttgagccataacagcagggaatactgttactgtcttccattgtcatatcttgtaagtctacatagccccttttctgaactgtagcatgtgataacaatgaaaaagattatattaacaaacaatttatttgccaatgaatgctaataccgaaatagacagagaaacgaaccggcaagatcatgc

SEQ ID NO: 81852 - DNA, 1572 bp, Cannabis sativa
gggggggggggctaatgaccattaaggaagtaacacaaatcatagcaatacaataatataggaacttagttccctgaagtttttttttttctttccaaaaaaccttttaaaaggtgactatctaataaggcacgtctgccagaacttattttattagaattttaatttactaatatgtatattgattattgattatatacaatataatctaatattctaaatatgtaaaacaataaatcacatataagtttcaaattacttacataatggcagtggaataatatgggtcctttagtttagtactctaactttttttcgtttctgttgtaaagtaataacaagtattgaacctgaatagcttccttaaaattaaaaacaacttcttctacacagtctttcacaaagatataagtattgctttgaatagtatgtgtaatatctcaatactaaaggtactcaaaatttgagagagaaagagaaacttgaatatcttagagagaaaaggaagacttattctttcttaattgttatgctatggtattgtgtctttagaatcaaagccttagccttccttttatagtatcttctcaaggtttagggtaaatgtataatggactatttaggaaagataatggccctaaaaatcatacccgtggccgaataccctatagggttaaatgggtttgatttttgctatatttatttcattcaatgaaactttctatctttttctgaaaatactattttctgatcctagttatgtcaataccaattttagtctatttaataattataattaattatcaaataaaattaccatttaaatatgtttattaattacacctataaagtgtcttaattaataaataaatatttttcttaatttttcttctcaaatatgtcatttcttagtaaaattcatatataagacagtctttttttagaattttaattgattaacttaatgaattaattaagtctacaaggaaatgtaatcccaaataatgtgggaaattgagcctatgtaaccaaactcctaataagtatatctaaatttaccatgtaaattttctcatttattaatttctcctgacttcactgtagattcatattgtactcttaatttattaatttcaatctaaatagtcgtcgaccctctatggacagttgacatcgagtagggataaaatttaccgttttatccttcaatgtattttattcttaaaatacttagatacttataaatgatattttagtaaactactatatttactgaaatgagagctcttctatttatgtcgttaagccaaactctaaagaaattatcgtttcacttctaaatagttataaaagctatagattacatataaatgattaatgttcctactcaaagatataaatataggctattcttacgggtaagctggtaacaaacaagccaaagaaatcgtatattacaataaaattaggattagtttcatttcgagcatataagtttgaaattaaagtatttttttaataatattataattgattattgtaattgagatttgttaagtttttttttttttt

SEQ ID NO: 81853 - DNA, 1097 bp, Cannabis sativa
attacttctttttatactgaaaaatgtatcaaaatctacaattcatgtattgaaagacctcaacaaaattcagtaacacattttcaatatggcctgagccttggcttttcaatcatctatggcctttgtttattggccatacttagtaaacacaacagtatacctcatagatagaactccaatccctttacttcaacataaaactcctttttgatttgttgcataacaaaacccctatttatgaccatgtaagaacctttggctacctagcctatgcctcttccttattaagcaaaaggcacaaattttcaattagagctcatgcttgtatttctattggctatcccaatggcatgaaaacttataccctccttaacatgtctaccaacaatattttctattctagagacgtcatcttttatgaaaacatatttcctctcaaaggttctttatcaatacgatatctcgagaatttatttcctttttcaccagatcacattgcagatattccatctgctttagatcctactgaaccagaccacattgcagacattccacctctttcaaatcttactgcactagatcttgttgcagatattccatctaattcggctcctgctccaatagataataccatgactcctacatctacaataccaccatcacctttaccagatgatgtcaacaccacggttcccatacctgttgcaatatcatcacttgtccagcttccaatcaccaaagcatggacacaagtttgcaaaccacctcacctcaaagactgtatgccattcatccgttgctcacccccttactgaatttctcaactatgataggtttacaacttcatttcgaaatgcgattttacatgcatacactaaattagagcctaaatcttataaacatgctactcaattaattcaatggctgaatgccatggataaagaatttttttctcttaaagagaataaaacttggactgttgtgtccttgcgtcttagaaaatcaaatgcaattccaaatgtgaagttgaaagatacaaagcatgcacccttagtagcaaaatggtatacgtaataacatggaattgactatgg

SEQ ID NO: 81854 - DNA, 1909 bp, Cannabis sativa
tgattcaaggcattttttggctcggccctaagtttagtcttatctcgacccttttcaagttaagatttataatatgagttactcatgctttgtcttcattatctttccaaccgacttctatagtttttctttaaggtgtcgtgtcataggcatttacattatcatttcatcagtttttttctttcttgtaggctttgttaaaaaaaaaatctcatttttttctcccaaaacaatggtattggttaactagacctgggtggaaaatgattagctaactcaactaacactttgactaggaattgtcagaatgtggcacatgttgaatgggacaaatcaccgacaaaccgtatgtaacatttttctcttcctcaattttttgagtaatcaataccttcaacaattgagatgacaaacagcgaagaaaaaaacacttggacaaatcttacatactttactgaattcaaggaaaaccctcaccatttctttttgaatacactacacaagacccaccaaatatatataataagaaacctacatgtaacacaaatatattactttatatggaaatactgttcggaatgcctttcccggtgagtccttcattgggatgacccgaagtgttgggatatagcaaagtgtagggtagtttcacaggcccaactctgttcttccatttcccattactgttcatctctgtgattctgttctctatttcccttagcctgtcaccgaatcttgtaaaagctttcaatgcttcttcgtccatagtccactccattgtgtctctctgacccagataaatctcatcccctgtgtgccgtgacagtacctcaatcaacgaaactcctagtagggtttgaaactgagcagtaatggttttcaaatacgccacatctgggtacatttccaactctttgtactcgggtgtgcctggttctggcatgaaccgccgactcacggttggccggtttgggaggtaccctgcatatgggtattgcccaaaattcactgccgcgtggagggcagatgcgatccatatgattatggtgcaggagtggatgagttcggatatggtctccattttgggccaccatggctcctttttcttgtctccgtggccttctgttcggacctcggtccaccatgattggagctcagtgtcttctttgaccattttatctgtttcgtagtagatgttgcagtattcggttacccaagtttggattgctgaccagatttctagtccatctaccgcaaatgggtaatcctcaataagaagttttaggccatggggactgttggagtcttcaaccgccactcctctgaaattttatctcagttgggttagattaagagtttgctttatagatgattggttttttgtttggtcataagggtttttatttttggctttacctcttgaggagatcagcaggcagagcgtgatccgtgaaaacccagttcttgtatataacagcagacatttccatggcgtattttcctgggaaaactgtcatttctagtataccaccggcattgatgagggtttgcctagctagtgcgttaatattcatggtatctctgaagtggggatggaggagcttgtatattgggtggagaacacttagttgtctatttgttgcaatgataaaaggctcaattacagcatgggtgttcagcctgtagaagtgaattgagaaaataatcaacatgtattcattggttgacaataacaaaatctaacctttttgtagccaaagtcataccaatggctaattagttgatggtaaccagagtcatttaccgcagcataagctttagctagctgccaaatggtttctccaatgcctttttcttctggagtgaaaactttgctgacagctccatgttcatacccttgaggatgagg

SEQ ID NO: 81855 - DNA, 2608 bp, Cannabis sativa
attttatataaaataaaaattgttaaaataaggtgtctttaaaaatttttaaggtgtaaataaaatttccctttttatatttatatttttatatatatttctatattataaattgtgtaaatcattattcattgctatgtgttagccacgtcaactacgtttttttaaaaaaatcaattttcttataaaaattaataatttacaaaatagcttaattattaggaattattatgtataaatattataattttttctttattattataataaagattttttctttaatttttaaaaagccttagaggatttacttattacttatatattatattatttgatgagaaaaaacaacttatatttttataactcattttttatttatttatacggtcatatgaaatttaattcacaaatacattttttttgcaattatacgcttattcctctacttccgcccctgacagccaccaccgccacaagcgctactttctcttttctcttctttcttattgtgtgcttccataagatcacttgcaagagaattgagaagaagaaaaagaagagtaataggaagcaattggattggtgatacaaatggatgaagaaaagagtgccaaaatgttgaataaaaaggaaaagagaaggtatgtgatggattggtggaagaaagagactatgaagagctagctaagaaaaagaagaaaagaatgaagcaacaacagaagggaacaacgagtttggtagataatggcgacgattggtgattacatgatgaggaattgtacataaaggggaaaagagaaacaatggtaggagtaagggtagtttagattggtggttagatgggcttagtggtgaactgtggcgaggttggcgaagtggtagtcatgactctggtagtggagaaatcccagagagcgggggctatagtagtactcctagtatgaggggaactatatgtgttatgttgccccataaacaagttttggtagaaatttatttgagaagtgtgatgtcgatagttttagctgggatgcaccctcttcaagttagaaatatttcacctatgtctgaacaccaacatacacaatcttttgtcatgggctcgtcatcttgctcgagctgaaaaatttattcatcttgttgagaagtctattcaatatttgctcaggaacacttcaatgctttgcaataatgtataattatgactctgtccaaatatttacatcacacaataattggctttgatacttgtccatatcaacactatttagtttccaactttgttcatgctgttgttgctttgctttggtttggcaaatataagacatttcgagtttatggttcattccttctattctcttcttactgtagaaacaatataattctggtgctatcctttacaagtttaaaatcatatttatgtagaccttattaggatagcaccagaattatactgtctgtatagtaagcctatcaacaatgatggggccattcactgggtccaagtagatcgaccaatctgcccataaataaagttgaatgaaacatttagatccaatagccactttctcactaagctaaacatgtggttcttgaaggcaattacacgttcagttgaaaattttaactaattaaataattttaaatttctccaatgcacaaaataaaaagataaaaaatgtatattataacctcacaaaatgttaaatggaaacaactatcatttaatcttgaaatggaaactatagtttgtgaaatataaacaattagcatttaatctcaaaaaatagaaatcatttaacttcaaaatagaaactataatttgtgaaatagaaacaaccagcatttaatctaaaaaaagggaaacaatttaataacgaaatggaaactatagtttgtaaaatggaaataactagcatttaaccttataaatgtgaaatggaaacaactattattaaaaaaaaatggaaacagttgcccttaattttgcctaaaatacgtggacctggatatgggtgatacgtggagccgaaagaattagcgtttatggaaatcaactaagtcttagacgaaagaggagtgtctcagggaaggtatctcccggaggagatacaaagagtatctttatactcccagagtcgaagacatgccaaggcagttccgggaggtactggaacctattgaacaatcacctcgcatttaatgtcgcatgggggaagacgtattgaagtcttcataaacgacatgacagatggcgtaactcccttttttggctactacactatgatcaataaggctagtgacgactactttatgaggaatcacatcaatcaagaggggatacaagattatatccacctaactcctaagatacctacggtataggtcatgtatttcctattttataactgctgggaatatgtgcccctatgaagcttacacagaaatacaagtgatccattcctagggatcaccccaaaaaaacactataaataccccacaaacagcctgaaaaagggacgaaggattctaggttcaaaggaatcaaagagagaaaataggagagaaatccaccaagaacattctctataataaatactctcat

SEQ ID NO: 81856 - DNA, 1890 bp, Cannabis sativa
ccttaaggaaagcactttggttttggtataaaagggggctaagagcctgccttatcctattaattagaactttagaaatgattttataaatagtggtgcaaaggctaatggggaaaaaatctctcaaggtggaataatccctcaacatagggataagagtaatgagggtggtattcaaataaaatggatcagcgccctggtttaaacactaagaactgcttctataaccatgtctccaaccggattccagctcatctgatagaggttgtagttgaatccatcaacaataaggaccttgtcagggggcatttggaagagggctttcttaacttcttctagagagaagcctttcttgaggaaaaaacactgattaggagtgagatgggggaggggcactggagaacaacctcaatgatggtttcttggggatgctgggaagtgaagaggcccgtgtagaacctttctactttgcgaaggatctcatcaacatttttaactctagtcccatcttcaagaataaggtggtggatcctattggttttcttcctgtcagaggcaaaactatgaaaaagtcgggtgtctttatccccagcttcgagctagttaactctagacctttgtcttcaataagtttcttctttgaatgaaagaatatctaaatttgattgaagctttttaattctaagaagggactcagatgagttgtctaaagagtttctagcaacttcaaggtccttttgggctttgatgaatttttgcttgaagccaaaaaaagccttatgcttccaatttgagagaaattgtgcacaagcttcttgggcagaggtaatgtttttggtaggggaattaagagcagggttgtgagttcagcattttagaagcacattatcccaattgggctcagtcaaccagacattctcaaagaggaatctctgtttgacttggtcagaatgaaggtgggaggacttttctaaatttaaacagatggctctatggtcagatccaaaaaagtcaaggtggttgaggcaaacattagggaaaaggttaatccaacgcttattgctaatgacatagtctaacctttcctgagcattacgatcattggcattgttgttattccaagtcatacgaggccctttaaaatcaataacctcaaagttaaattaatctatgaaatctataaaatggtcagaggggccattacgaatgttgtaactacttttatcttcccaagttaaaaaactattaaaatccttcataatgagccacgataaaagggcacacgaatgagcaattttatgcaagagttgccatgtgtaagttcaattcgaaggagtaggggctccataaaaaccaataaaatgaaaagcagaaagattagcactgaagacataacaatgaacatggtttatataataattgaaaataaaaacatcaatatccaaaatcttgaaaattaagaggccacccctaaaccaacacggggaaactcaaaaccactagcaaaacctagcttattcccaagtctatcaatagatcctttacaaagtttagattccataacaaaaaacaaggaaggcttgtacatcttgaccagcagggagaggttgaggaatgcttaatcactcccaagacctcgagcattccatctaaggcatggttgtaggtaggcatgctcttcaatagggcttgcctcttcactagaagccacctctactacttcatgctgtggctggcttcttatcctcttcaccatctctctctactctatacccactagtgtcagctgcctcttaaatctagcagcactggtctgctacttcttccttgtttgtgtcttgttagttgggccttctgatcttccagcaacgaaggctagaggattgggga

SEQ ID NO: 81857 - DNA, 715 bp, Cannabis sativa
attagaactatccaaataaaaaagtaatttatcaatatataagtccagtttttaggggtacactacttcttattaaataatgtgtaaaaatattaaaatcttcttaaatcttatctagcaaataattaatattaaataactattatttttggcaaaaaagtctcctaattagatccattaatttcttgtattaaaacgtgttttgagtggtatctttcttaattaggataatgcgatttaattaataatgtcataaatataccaattatcataatattcaaaagtatagagtacacatttttagcataacagttatacaattatacatatatttaaaatgaatatacttttatttttttcttaaaaaatgtattattgatcaaaataaatctgacatcaaaaacaaattaattaaaatggcatctcataaaaaagtcaatgaacttttcatcatttagctttattagtataaatgatctttagtgtaaaatcatcgttattttcattaacccatataaagttttgtaatgtggattaattaattcacctgaaattaaaataataaaaaataataatatcattttatattttttattagaattttaaataatatcatattttataaaaattatatgaattttatttataaaatacaaattagtgcgaattttgatatcaagaatacaaattttatatttattttgttgcaacgtat

SEQ ID NO: 81858 - DNA, 2507 bp, Cannabis sativa
ccaagcatggtctccaatcctgaaaccattctctacctctccgttagaagaacttccaggtcagagttggctttgtcttttgctgcaagggaagcctccaagatcttcacatgctcctaaaaagaatctgaagaccccctagagccatcacgagctgagctcagtttcattagggcctgaaaataaagaaaaacaacatcagtgtcaaacatcacaactttggccagccagtcccctctttggactgctatggtcagccaaccccccatataagcttccaaggccgaccagccacatgcaagaagccgcgtggtcgaccaacctatacaatgtcaagaagatgaacagagatgaaagtataactcaccagagaaagatcttgaagcctgccagagtaaagcctgagaggaagagccctctctatgcgcttgttggctgactcaggagccctctgtccagcaactaaccttgatcctctactgggcctccatgtaccttggctggtaggctgtatcataggttgtccgattagtgcaggccctggtgaagggggaggcagtgatggtccggtagcattctcaccacgggaggtcctgtccaccttggccctcacccgttcggtaggctcatttgaaggtccatctgcaagacctctcaacctgtaagacatgtctgtaaaaagaaagtagcaaagtaaaaaagcattcataaatattcaatacaagaacaaaagcatggtgttatcaactatcaaataccatcatcatcagaagaggaactatccgagccttcaactacagccttgcccttgccactagatgtaggcataggccatgtaagtctctcagaaacctggcctctaggcccaatatgaagggaagcatcacctgctggacccccactggccaagcaccggtggaaagacttctatctcctttccaaatttcgtgcaatatgagacaaatgtacttcatcatcatccaacttagggccttgcccatctccaggataggcctcatcagtagccagcactcttgcaggtccaggaacaggaggatacaagccatacatctagaaattatccacactggtcaaccagataatgtttctctgctcagccgataaagaaaggatgtgatttgccctctccctttatttgtaatgtggggatggaacgcttgaagaatggtactctctgaaagtgtcgatggaaaatctctttaacatctcaagcaatgaagtacttgttagcatgctcgtcaacctttggcatagatgagttgttggaatcatctagccattggtggctaacttggctaaaatagaagtattcagaccgatgttactgtgaaatagactccaagtcgaaatagtatccaatctcataagaagtgggctagggccagcctagctccttatataaaacgaacattgctgaaaggtacttgataccttccagggtgatttgtgttggacacatcttgagataagcgacaatacatgaaagtacaaataaagaggtagtacggatccttgatcaatgtggtactctgaacacaccatccagttgagagccaatccatgcgctagttggtccagaggatgtatcgtacaatggatactacccatatgtcattatgggggcctttcaatactataacaccatccagttgagagccaatctatgcgctagttgaaatttcattcaaattataattctttattgcagtgttccatatgtcattatgctaagcaaagaaaactttctttcatatcgaaccataacaattcaaaacattcttttgatttgatatatgtggatatatgtgggccttacaatactataacacctcggtttcaaatatttcatcactattatagataattgttctaggtacatatggatccatcccattagacataaatttgaaacataaattattattccacagtttataaagttagtgcaaaactagtttaatcaaaccatcaaaggctttacgtttaataatgctaaggaattacaatttgatatgttgtttaaagaccttggcatcatgcattatcactcttgtgttcaaagacctcggaaaaactctctagtggaaaggaggcatcgacatcttctcaatcttgctagagctcttctcttccaatcttgcattcctttatgttattggggagagtgtatagccactgctgcatacttaattaataggacacctactcctaatttaaaacacaaatctccctttgatattcttattccaaaccactagcttaggagcacttgaaagccttcggttgtttagcctatgcttccacattaagtcaatccagatcaaaattttcaccaagatttgccccatgtgtttttcctggttaccctacatgcatgaaggcttatagattacttgatctcaattccattggaatttttcattctagggatgtttacttttatgaacatatttttctattttttcattcaggtggtcttctagctg

SEQ ID NO: 81859 - DNA, 1444 bp, Cannabis sativa
atcgatggacgagagagatgagaataaagggagatcgagagagggaggaagacagcgagagaggagggcgatggtgccgaggcgtgggtgggcttttggagagttaagatttttcgttttaaatgaagaagaattaataggtgagaagaaataggtgggcatgtgggaaatagaaaaaaagttggtgggcacgtgggaaatgtggcgagaagtaggtaacgattttttattgggcccttatacccgatggtttaaaatcgtcgcctatagtataggcgacaatttggcccttaaaccgtcgaatataagggctcaataaatttactaattctaattaaaaccgtcgcctattcctgtaattactgttataaatcgtcgagaatactaatttttcccgaagattttaaacagttattttatttttttagcgatggtcccccaaaaattgtgtttttaagaccgtcgcgaattctgacttttgtagtagtgttgttttcttatacgggctcaaattcgtgttcgataattttgcatttctattacaatttaagagctaaatattgttataactattttgatatcttttttcaataatagttatacacaatcgtataaaaaataattataattattataatttaaatattactattatttttaattgataaataaatatttatcagtggtattattattaaattattgggtttttgtagtgtatcatgctttttaactaatctatccgtgcttacgtgcagtgctttcgggcttatcgtgcctaagcctatattttttgtgtcatgtcgtgcttaaattcatgtatttttcatatcgtactgtgtcgtgcctaagcatatattcttttgtgtcaggttgtgttcgtgcgtttcgagctcatgccagtttcgtgtcatgtcaaaaaatttagtccatattttcaacgcattagtcatattctatgggaggagtactggtcatgtgtgctgaagaccatgtaactagttcgtatagggcctatataattttttttaaggatttttttcatatatatatatatagaggaaaatgtaagagtatttactttttatatgacataaataaataatgcaaaaaaatataagattaaaaaataattaaagtttaaaatatgagaaaaaacaataaataaatttaataaaacttgtaataataagtttcgccggaaaaaccaccagcatcagaaaaatcactggtgccagaaaagttgacagaaaaattaacgtcactgaaaaaatcaccagaaaagtcaccatcaccgaaaaagtcaccatcgctggaaaagtcactagaaatagatgtcgcagatataactaaaaatagaaccggttttataacataataaataaaaacaaataacttaaaccggttataattaaaatataactggttttataacataatgaat

SEQ ID NO: 81860 - DNA, 623 bp, Cannabis sativa
taggtgggccctaggcacaggcctagcccgcctatgcccagggccggccctgggtatactaagcctctttcctgatagtgtataactatcaaatatactaagaatttcccacagttataattaaatcgtcgggttacttagtatttccgacaattataaactgttgggccacacttttttaaaaaaattgtatttaatattgtccacagttcttcatgatcagcaatagctatctcaataatttttttctttcggtgctaaactgataggaaaaaccttcgcttagctattctgataatttccataattactgtcttttttactaataggaagaccttttttgtaatagtgtgtccaactttgatgatcatgaaaatggatttttgtagtagtttaattttataggatcgaattcagtctaagttagctgagttgaatagatcaccctacattttgtgcaccactagactcactcattagtgtaatcttatcatacaaatacctaattttcttttatagttaatgactgtcatcaatgaactcacgtttaatgtctattgtatcttgtgattgactttgaatattattattattattattattaatcacatagatagtaatgt

SEQ ID NO: 81861 - DNA, 8554 bp, Cannabis sativa
tattttatttttaatagtaaatcattttatttttaatataaataaaaagtcttccacgaatttctcataaaccaagaattcggttatataggcatactttatatagaatagatatataacatcattactaaccctaacaatgtctgtataaatgtaagtacgacaaggagacattttgtcttaacactctattttgccatatatagtcattaccctaattaatgcaatttaatatatggataactcaacatattattatattttaaatttaaaatgagatatcccatatgaaattgtcgtaggtatatatatagtgatctcaggctgatggggtgtgaatatgaggcatctctaaatgtagttggggggaagtggtggacctattcttcaatatctgcgcctgggcttctgcctcttttttaagtttcttggtttgtttgatttccccatagaaatatgaaacgaagccccacaacgaaagtgcaagtgccacacctttctcggcttggaagttttctttgtagaaaataacagctaatatctctgtcacaggaagaagaaccgcaataacaattccagagagtaacgacgacgaacagaatattattcctattgctcccaagaaaaacccttgccaaattattgcactccatactagcaccacgtaatacgttttttctcctaattcaaattttttagattctttagaaatagcctgaaatagagttaataaaccaaataattattaattaaaattattccaaaatttaaacacttatattaatgaatattatctattgattgttattaaaaaaatttaattataaatattaaactattaccatccaataatcaataataaaaaatgaatttaaatttttatgtttaattaaaaaaattatattgaaaggtatctcttttaatgctaaataaaaaatgtattcatataaaaatatttaagttcaacttaattttttttataatcttatttttttttttgctaaatcaatttatttttactaattattttcaactagtgaacaaagtgatcaagcctatgcaatctaaaattgaacaaaaaaaaattaattaggtagaaaaattaataggaaatcacctcatatgttattttttaatttcttctttctatttttatgatttttttttttgttttattatttttactatttaaattgttatgttagctgtaatttaagttgctgcatcattgagactgagagttttaccaaacaagcaagagaaagagatagagaaaacagaactctgtgtattgatcaatgaatgaatattaacagagtacaaagagaatgaacttatatacagtgatgaattgagagacttagccaactgtaactaactaatttctaacaaactctaactaactacaccagctgtcataacaaccttcagctgtcataacaaccttcctaaccaaccaaggacacaactaactcatcttgataacttatgtttcaacaattgcacctgattaagatgatctgtatatttatttattggacttttttctgttttacatattcatacacatccgtattaatatcgtataaatactcttttttttcactctctgaatgtgcagtgtcatgtcttagtcacagcctctgatttcctgcgcttttctatccttctttttatgtggccttttgatctcttgtcactcacaccagccactctaatatatgttttaaaataactcactaacaatttattttatttattatatttacattaatatttttatatttttctccacgttatttaaataatatatatctttaatatttttaaaaaagcaaatttcatttctcatggttaaaaaaaaccttgtcaaaacttaattctttctgtaatatgtatagaataatactactttttttttctaattacctaacatatctttttatttaatttttctttgtctctatctttctctctattagctatgatttcttaatatcttgtgatttggacgtgaatttgtcattattcttgtgagaatagttaaatttttgtggatcttgtggatttcctagcttgtttatggtgaaatgatatttttacagtgctatcgatagattatcgatgggatctcgataggacatcgattatatcttatcggactgctactacatccaaggttatttaattctttagaagttttatgatttttcgataatttatctataggatatcaattgtatttcttaagattgtaagtttgcataagttaaattttcattatgcatgtttatcgatatgttataggtatgttattgattatttatcgatagaaaatgttttgtcttgattattatgtgtagttttgagtttctcaatacgttatcgatattttttttgtgttatgtttttgaaagaattttaaaattgtcgacatgttattgacatattatcgacactttttcgataatttttcttgtactttttttaaaaaaagaattttgagtttgtccataattttttgtgggttatggttttcaaaagaattttgagtttgtcgatatgttattgacattttttgttgagaatttttcgtgtgttttgattttcaaaagaatttttagtttgtcaatgttattgacacattatcaacattttatcgataattattggtgtgctttgatttctcaaggaattttgagtttgtcaataggatatcaatattttatctatggtttatcgataattttgcgtgtctttaattttataaagaattttaatttatcgatagtttatctatggtgaatcgataatttttcgatggtgtgcttatcgtagtctttattttatatcttgttttagacagctccacgacttatagtttcaacgtccaactatttcaccgaccatgtgacatataaaggtagcagtgcttttttgaaaatcaagaagcggtttgaggaatacgaattgaatgacacaacaaaggcaagcagtttcaataatttttggtatgtagtacctctcacattttcatcagtgctatttcaccaagtaatagtgcacaagatgaaggttgatgttgagaaagcagaggaaatgcattcttaaattgattcaaaggagattagatttcgagtcattgagttggcactttacaggcgtgaacttcatctcaggaccaaccaaagaggagaaggctgcataggctgccaagtcgaggtcacatcagttgatcaacaaatatttcaactagtctgatagtgtgaagatagaagcactccatgagaggttctcaaactgccagaattcgaaaggcatatacaagttaggcttctgcatgtttgttgagatagtgttactgggtcgtgaggctaacactttgattacgcctgccatacttagatatgtcaaagatctctaattcttcttctagttccttaggggaaatactcatttgccaggcctttgtactcccttcaaaataacatgttgaaaccaaaggtgaactatgagaagatgttgagtttagatgtttagcacgagtgcaaatacacatcgtattgcttcacacctgtcgtacaatattgggcgtacgaggccattttagaggttgggaagatgtatggcacaaattatgggattcaatttttaatgatgcttaattagctggacgagcaagagtgagatagaaaagaaggatcttagtacattattttggagacgggtatgataatttcttttatatttagagtaattattcaagagaaatgttttgaataaatgccaactcatttttattttatcttttttaaatcttaaacaacaacttcaagtgacgaaggggctatttccttgcccagatgaggaggagtatagtaggaccatcaattatgatggtgtggagatcccgattgaggtttgtgtggatgccgcacaggttgaggatgacacccaagaccaagatgtttttcaaaagccaagcaaaaaaaggagcaaaacatgtcaaaaatgctcctattgtcgagccaaagactcagggcactacattagagcctcagcccactagatcatcttcaagccttggtggtgctgagtacagagaattgatggggaggttggacaagatcgaggctaagcagaagggtctttacgcttctcatgctgagctaaaggaggcatatcaggctagccatctagagctgaagggtggccagaacctcatcatagagcagctctaatctatattgagtatattgtagggtaggtcagttacagatcaaacactggagccatcagcagatgtagcaccaccaccacctcccatggatggagatggattcatctttcccaacaggtactgttatcccaaattttgtctaactcacgtcgcatgtccacataagtcaagactaagaacacttggagtacaaccttgtcaatagtagaacaaagtccccttacaaggcatggaaaaacaatcaagtaacaagcgaaagcagttgagcaagccgtcaagtagctgcacaaccatatttggccaaccaaggagagtacataggtcgacagccaggagaagcttgtatgattggccaagatttgagcacaacctggccggccaaagggtaactatcagacaaaatagagcctgttcaaccaagaaagcctgacctttgcaaggaaagttgtacaaaggctggccaacacctactaagactagccaacagatgcaaaggctggccaagacttgccaaagcttgcaggcaattgatgttcacccttgaccctgccaggcatttggtcagccagcttatatcctagtaggcacttggccagccatcttacatcctaacaagaacttgacctaccagcttgaattattatccaggacgcaagctgggaatcgggcttcaactacccatgaaaataagagataaatatcatctatttacatattcttgggttttaattaacttattaattgtttattatataattatgtaacaaatatgctatattttctattttttagcgatattaggttattattcttttataagctctcaaatataaagagcatcaatctaaacctaatttccctaagtttaaagtaccctaatgctcttaatgtctaagtttgaaatcctaattctctctctccttctcttctacacgtccaaggctttgtagaagagaataggtctctttcagttaacttcttccacaatgaccccatggtcattactgcacaaattgagaacatggcggttgcaaggtgtatggaggactacagagccacctccaacattctttacagatcaacatatgaaaagatggggctccaacaaacctaattggaaccttgcacataagtaatatatgacttctttggccaaggcattatacccgtggggtacatctggctgcccttgacggttggagagaatccaacaacatgaacgctgatggcacaatttgtagtaatcaatgtgcattcagtcttcaatgccgtatatctcgtccagcctagtacgacctaaaggctgtaacatccacctacaacttttgccgaaagttcccaacaaggcatggggtaggatgtttgaggggagaccaacagtttgcccatcaccgttacaacttggccttgtctaatgccaagaaagagaagatgccctccaagagctctaatgaagagccaagcaaaaggcaaggaaggtcagcccaaagtggggaggtagacatagatcctcgctttggggatcctgcaaacaattttcatagaagaactggaagaagtggaggttgatcccagttttccagcaagaagactaaatattgggaaaggtttagctctagaaataaaattagtactgataaaatttctaagggaaaactttgacctcttcacatggtcatatggagacatggtcggattagacccctctgtgatgacccatgtcctaaacattgatccaaacttctgacctgtgtaataaaaaaggaggttgttggacaaagagtgcacccaaacactaagagatgaagtcgaaaggctgagtgcccatgactttatcactgaaatactctatcaactttgggtatccaatcctgtgtgggtgcctaagccaaacaacaagtggagagtgtgcataaattttaccaacctgaacaaagcatgtccaaaggactgctttctgcttctaaggatcgaccaactggttgcttactcaggatacaccaaatcatggatgcttactcaggatacaccaaatcatgttgcatcaaccagatcaagggcacacaagcttcatgacggacctaggcctataatgttacaaagtcatgcccttcaggctgaaaaatgtaagggaaacctatcacaggcttgtgaacaaaatgttcaaagatctcattggcccctatataggggtgtacttggatgacgtgccagtcaagtccaaaaaggctgggggcaagtggaggaaatagatgaatgcttcaagatcctctaagattacaatatgaaactcaacccccttaaatgttctttcggagtaggctcaggtaaattccttggcttcatagtcaatgccgggggaataaagtaaatctggataagacccaagcacttttggaaatgaagtcacccataataatcaaagcagtacaaagcttgacgggacatactactgcactaagcagatttgtgtccaaatccatacacaaagtacccttcttcaacattctcagaggaaacaaaaaatttgagtgggcatgggagtgtaaaaaagcattccaagagcttaaaaaacaactggataacctctgatcctatcaaaacctctggataatgaagagctaggcgtgaacctggctatcacaaaacattttgtgagtgcagtcttaataatagaagaagatgatatacaacatccagttactacatcaacaagagacttatcgatgccgaaagtcaatacccactcatggagaaactaacatacaacttactcttaacatctagaaagtataggccatacttccaagctcacccaataaaggtgtaaactgaccaaccattgcggtaggttctgtaaaaacctgaagcatctagccgctacttaagtgggccattaaacatggcccatttgatatcacatatcaacttagaatggccataaaaggccaagcccttgcagactttgtggttgaatgtaaaagcatatctcctaaaatcctttaagatttaggggaaaagtaagagtcaaagaataagcaagagcaagaccagttgcaaaaacctaaagaatccacacgaaaactacatgtttatggaagctgcactgacctactgtgcggtgtaggcattgccctcaaaacacctaggggcagtaactgcacggagcaatcaagtttggtttcaaagcctataataatgatgttgaatatggagccttgatcgttggcattaagctggcacatgaagtacgggctgaccacctgaacatatatagcgactctcagttagtcgtaaatcaagtcctgggtgagtgcacaactttatgtgaatgaatgatggcatatttgagcacgatctaagacttgataagtaggctcaggctatacaataaggtagatccctagagaacaaattccacagtagatgcagttgcccgtctggcaagcagcaccattgtcgataaggaaaacttggtgccactacagttcttgaaagaatgtagcattacatccctaaagaagtcgacatgttagacgatattccaacctagatgacacctattgtagcttacctccaaactggagccttgtctgaaaacaaaaatgaggcaaaaaagatgagcagaaaagatgagcagaaaagatgttaggtatctaatcctagatggaataaagtactgacgaggcttctcaatgccactcttaagatgtgtcactaagacagaagtcgagcatttaatgatagagtgcatgaagacttctgcagcaatcatgccaggggcaaagcctatctaagaagatattctgacaggggtacttttggccaacaatgatcaaggatttgatggactatgtcaaaaaatgtgactagtgccaaagattctcgaagatccctagagctccaccaaacgagctcacaatgatgcaatatccttggccctttgttgtatgggaaatagtcctgattagtcaactcttaaagggaaaaagaggtgtgtagtatgtcgtagtcattgtaaactactttaccaagtgggcagaagctaaacccatagaaacaataacttccaagaaagtcctcgactttgttgtcaagaacatcatatgtcggtttggactaccacagaagattgtgtcaaacaacggaaagcaattgacagtgacatgttcactgatttctgcaacagacatgggatcattaaaagcttgtctgtcgtggcccatcctcaagcaaatgggaagaaagaagtgttgggttttatgccctaaataaaactctatttcaatctaatccagattattcaatatcaat

SEQ ID NO: 81862 - DNA, 1123 bp, Cannabis sativa
ccaaacctctatccttttcttttccgacaaacatcttcccaagagagataacgtgacccattaatcatcttactacccttccaaagaaaatctctacaaacttgatcaatcttttgaataaccatcttaggaaggataacaatttgagacaaaaaagtaagtaaaaccaaattaatcaatacaattctgccagcaaaagaaagatttctactaatccaaaccttaattcttttggtcattttatcgactaagcactcccactcaacccttgtaatcctcttcgaatagattttcatacccaagttgtaacaccttagtcgtttaggcgtgttaatgtgatttttaacttaattgtgtagctcattacaaatcaacgagtttattaaaaatcgtgaataattaaaactttatataactatttataaatatcaaaatattatacttatatatatgaaccgagatcctgtttacaaaatatttataaaagtttcataatgcataatacaaaagttgttgcctagcgactatacaaaatacgcccagctgtcccaaataccgtacactcaaggcctaaccgtcccgatatgtcaatcttcatccgctcgctctcagagttgctcaacccaagccttgcccttacctacacatgcaagcaataactgtgagtcgacagtctcagtaagaaaagcataatcagaaacataaacatatattcaaaccgcaaccaggcgcccatacacctaatcataatcatctactaactgagtcatgaaagttctcgacaaagtatgactaactgcaaatctagcctatactcagtactctagtcgtactgatgtggtagcagttagttcatactatctgatagcctagcatacatctattggcatctccgtgcaactctatgtacaaacctcactgatgccctgatatgctattctgaaggttatagatttgcctatcctatatatgttggtatctcggtgcaactctatgtacatctcaccgataccctggtatgttattttgacggcaactaacatgtacgctaaacatgtatacataaatgcaaccattataccaatcttacctcgtttttgaattccggtgtgctggccaacct

SEQ ID NO: 81863 - DNA, 606 bp, Cannabis sativa
gagagctagaaaagtagtttgggaaaaaaagccagattgcattatatatatttagcaagtctttaattaatttggcttttctatggactttgtttcaaccaaataagagtggaacatgttgtacatacatatatatatatatatatatatatgcttgtggatttgcacgattattattgatcgattcaatatatattattgaattttgaagtccaattcttaacaagcaagaaactagactactatatatctctcctttagtaaaagatagcacaattaatgagttgagttgctctagtaatgcaattactttataaattgagcttttttcaagaaatatacccaacaacgtacgcttttataattattggagaaaagctttacatatatatgtggtctttctgtgtttgtggtggattagatcaaattataaatgcatggttttgtggataatccataatgacaataataatagacaaacacacttcattggaaaaaaaaaatgaagaaaaagcaataaatatataataaaaccctaaaaaatggggtccaaaaactcctcagcagaactggtttatatggggtacttaaattatgtctcattac

SEQ ID NO: 81864 - DNA, 902 bp, Cannabis sativa
gaagtcagtgggtagtggatgtacacatttataatttttcgacaaaataataatgtactcagctcagtcatcacatctgatctacgggagctcgatgtgacataaatgtcgggaggccatgattttaattactaaattataattacagctaatgctattttatatttattttttatttttcttaatggaaattcaattttattaatcacttacttcacctactaaataaagtagcaaattgatctgataattatgaatcactaatttaatagatcctttaacaaaagatatataaacatttcctaaaagaataaacaaaaatttacaatcttaaataattaaaccaaacaaataaattattttcaataactttgtaaaggtttgatcgcgcaaaaacaatccaattccacataaacatactgccatcgtatttctttgatccaactaaaagcttctttcaagcctatagcttcaacaaggaatggatcgactaaactataagaaaggaagttctaccctcaattagcatcattagaatctcaggccaaggccaatgccataacttcgatatccattgaacagtgccacaacatttatttttgttaattctacaacaaattagtaattaaacaattatttaatagattctacgggcttcaccatcctttgtacagttgtcaatccgcactatcattcaatccaatatgtaatattttacatataatgcattcaattcatattaagtatgtatattttcaggaccgtctcgaggtgttaagaggcttatggcgaaatttaaaacgggacctttttttatataaaaaattaaaataaatattttttttttatttttgctctgagatattatttattattgaaattttgacacaatataattaact

SEQ ID NO: 81865 - DNA, 1071 bp, Cannabis sativa
gggtgggaatagtgttaatatcacttgaaggactaaggctccaaagcacgttgcgtttcaagtttataacgcctcttaaaacaattgccaaccttaattgtgtccttcgtaacatttttttataggttttgtgtatatgccattttatattatttgataatataatttatagattaaaatgtgataaatatattattaggagaataatatgtattggagtgtttggtaaattaattgcataacatatggtttatttaacctacacattgtaatggaaatgagttaaaattctccttaatgtttaatggagcgttacatggcttttttgcatcacgaaggggattaaggcaaggagatcccatgtctcttttaatttttgttttgggaatggaatatatgtctagaattatgaaaaagattggacagaaagctggcttcaagtatcatgacatgtgagaaaataaaattgaatcatcttagttttgctgatgatgtgctcttattctgttatggagactatagcagcgtgatgtatcttcttcagggaattaagcttttctcaatgacatctggcttgttcccaaatgcaaccaaaactgctatatattgcagtaatatgcctaatggggagttaaaaagaattattacagcttctggcttttccaaacaggtactgccttttacatacttaggcattcctattggggctcagaagatctcgagcaaagattgtgcaatcctagctgaaaagatgacagggagaatcagaacatggagtactagacatctttcttttgcgggaagaatagtattgatcaactcagttttaatgtctattcatttttattggagtcaagtgatgctattacctagtaaagtgatcagggaaatagaagctatatgcaaggctttcctatgaaaaaggcaacacatgtttcaaggggctggtgccattgcttgggacacaatgtgccaaagcaagacagttggaggtattggcttcaaaagagtgaaagagtggaacatggctgccatggtgaagtatatttgggctgtagctaaaaaggaaga

SEQ ID NO: 81866 - DNA, 1031 bp, Cannabis sativa
aaaaatttcaaccaataaacaacacattaacatgatcaatatcagtgaataaacactatacaggagaaaaaaaaaatgtacttttagaactaatatttaagttaatgaaaagtactgtgaggaaatattgaaggagtacataccaggtggttgttaatgatctgtaagtatactgagattagcaaaaacataatgttgttaattagttctgaagatatgttggtgcagcttttctctgtaattaagcagccttccctacataactacctacctttctgtgtatatttcacttcacactaaaactagatgatggttggtaccaattttgtgacaattataataatggttttttttttttccttataagttaattaagcataataagatcatcaatatgactaatattaattaatattataattttataatttttttttggcttaataaatattgattggtaattcacatgcatcatgcaatatggcacgtgatcaaaatttaatatcacgtgatttgttgttggattgagtttcattgtgccaccacccgacatggcaccaacaagtgagaaagagataatttatattgaaaagaaaagagaaccaaaaaaaagtgataggaatcttgtgttcccaatatgagatctattcttgggatgtatggtatcatttttagaccacttgttgacttgtccctcaatttagctcctaactagttgacttttttaattcaacaattattaacttagctaggtatactataattaatttgttatatatgttatttatgcctagtgcctacacagatttttccttgttattattttctcagagagaaaatataccctatcactaatgtaagttataacgtttagtaaactcccaatgatcacagtttttaataactccgttgtcccaaaatttaaaaaaaacacgtggcaacgcttaagactgttccaagtggcaagggacccacctgccattactacaaaaaaaaaagtttgtaaaggtgtttttttttttttgcccttt

SEQ ID NO: 81867 - DNA, 647 bp, Cannabis sativa
ttatttttagctcaaatagagaatatgggtttagaactcattcttttgaatttacaatttgtattttggtatagattttctagttactgtaatatagattgaaaacattagaaattgctatgagaaattattttatttgttagtctaatatgatttaactttgagattttgtggaattgttctaattcctgaagagttgatatcgtgctcaattattcgaaattatatataattgtgtataaattgagttatttttatgagattttcacattatatttatatatatatatatatatatatatgcgtgtctgtgtgttttgggttatgggtatagaagaatgtttattaatttggctagtgagttgattgtgttgtgagaagttgagtgaattcattttataagaaacaaactctccatttaatttttcttttcatatttctttttggactaatgatcattattttgattgtacttcaaagtatgatgaatattattctattagtattttatataagtcaagggatctagtaacttggggaagcttattatggtgattttgatattcttatcaagtgttgacacttaaataaattaggagagaagcttattgtctttattgtctatcaacacttttactaatctttct

SEQ ID NO: 81868 - DNA, 934 bp, Cannabis sativa
aaaatgactaaatttatatttaggtgaaatccaatgctaaaaccagcaagcaaaggttttttaactttgagatcaaaacaaacaagagcacaaatcaaattcagctcacaattcaaatctaataattagttatgaaaataagaacaagaaaaacattgagaagaaaacccaatatatggcaaaagaaaagaacatggatttaccttagcatagtaatctttccagactctacgagcgatctggtgaccacccaaatcaaaagccttgaacttaatcttcccaatgctcaattcctcggaggtgggatgctgggtcggctgatgctgcactaatctctgaaacccaaccaaacccagttccaaattgtcaaataaaaaattacccagaaaaagaaatctacacgaaaattagagaaacaaacaaacaaacaaacctcgtccttcaacatatggagaagggttgtcttgccagcattatcaaggcctaaaaagagaatctttgcctccttttgccataggccaagagaagcgagaaccccgtagaaccaatctaacaaaaacatggtatgagaaagagaaacccagatcggagaattgatgaaagagatcgcttgaagcagagatcgaatctgggttgaaggggaaaaaggggtaggaggagttattgagttgttgagtagtaatagaatacaatagaagtcgtagaggtgtgattttcttctcctcaaaaggtatttatatatatatcgaacattttttaaaataaacttacctataaatattaatttattttaaaaatatcaaacaatctaattttaatcgaataatgaatttataaaatttgaatttctatatttaatttaattacttgattaaaaaaatattaaaaaatatatctttttacaccttatcaaaaatatttaactcaaattcaa

SEQ ID NO: 81869 - DNA, 1774 bp, Cannabis sativa
gtcacacagtcattctcattctcattttctttttattattattatttttttttttttttatattggtaaatagcggtataagttaccttaaacttttaagtttataagcgatataaattcaataattctttttagtgatataagtacttaatgtttataaaattgtaatttttctctaattttcttagtacagataatttattaaaagaatatttgtaagtaactaatattacatatttttatctaaacttaatgatctaaaatctgagttttatatatatatattgtttaagacaataataaagcttgtactgataaaattaaaaaaaaattacaattttacaaccattaaatacttataccattacaaataaacattaacactttagttctatttaaccttcttatatatatatatttataaatataaatataaattcacatatataagtagctcaagcccattgttttaccagttggtaacatttaagtgattagtcctattcaactccaaactctctttttccattgtaatcaccagtaatattgtttctatgcacaaaaataaaataaaataaaaaaattaattgtagaaatttaagaatatagttatgaaaagaaaatgtaggtaaagtactacacaacataacagggttattatttttgtagtaaaacatgaaaatagaacataaacaaatagagacaaaatatatagtgtaaaaagctgatttggttactaattagtggaaggaacactatactagatattgtgtatttgtctgtatatgtaatgttttatctgtttttacctaatataaatatttatatatatatatatttatattggttgggttcgacataaaaacattcacttttgaacttcacttgtgtactgagtggaagatcattaatggagaaaaagaattaatatttgaacatgaatatcctaaaaaaagctacacacaaaatttatatatatacataaatgtcactttttttttttaatttactcacaaaagtggaacttaatttaaaatgtaaaggtaacattatttttcaaaaaatttgatgaagtaatcatcctacttaatgaacatacatacattcatattgtaaaaacataattgtgttttttttttttttgaaaagaaaaacataattgtgtttgtatgtattttatactcgctacaaatttttttgaaaaaactataataaaatttataattaaaagtaaaaaaaattgtaaatgattatattttattatttttatatatgttgtgattaaaaaatctgtagctaaagacgacaaaaactaccgtttattatgattaaatatatttttagtcacaatttattatagataaaattaaattagtgataattgtatattatcactaaatataacttttttttttggtagttaactactctcttcataattttaacataatttaattaccgaaataattggaaatttcaattatctgagtggttgatttattaattttgtttggaaattaaattttggtggagaaagaaaaattatgaaaaatataagaaaaaaatatgaaaaatattaaaaaaaaaaattacaataaagaaataaattctcatgttagtatggaaagaaaattatggaaaagaacttgaccaatcaacaaatatttttacactaaattaacatgaaaattaattgatttttctttttattcttcacacttactttctacatttttaatctaacttccaaatataaccaaggattatacatagt

SEQ ID NO: 81870 - DNA, 951 bp, Cannabis sativa
  modified_base (48)..(48): a, c, t, g, unknown or other
  modified_base (728)..(729): a, c, t, g, unknown or other
  modified_base (810)..(815): a, c, t, g, unknown or other
tttatttcattgttttagaaattcttattaggatgttaatgaaacatncttgttagtaaatcaagatcctggtaaaatatttcaaacagtaccaccatgtctagccaaccaaggggaatctataggtcggctaggatgagcatgtatggccaaaaaaggcttgggcacaagttggccggccaaaaggtgactttcagaccaaggaagggttcgtgtgaccaaggaagccttacctctacaagaaaaatgtgtacaaaggctagccatcacctacataggctttcccccacctcccaaggctggccatcacaatggttggccatcacatgcaaagaacttcccaactcgacaaagttggcaggaacatgacctacgagaccctggcaggagcatggccagacagacctcaacctgcaggcattgtatggctggccaggccgcatcctataggtgcatggccagccaacgtttccctggtaggacattgatgtacaaccctcgttcatggatagcaagccaagctacgagttagtccttaacagaccacgaaagcacaacaaaatatcaacaacttccctattttgaaagaataatttagtcatttattgtttattaatttaatatgtaaatagtaacatattttacctatctctaaggatattaggcatgtaagctctattatataaagacaattagtctatctctaaaaccctaagtcattaagcctnnaagctccctaagctctctactctatgtctaacaaccctaactctcttctacacaccccaagggctctctctctctctctcnnnnnntctctctctctctctctcacttgatacttacatacttagttcatacattgtaatcttaagagagctactacagattccacaatacttatgatccgagtagtattatttttagtatcaatacaacaaaaagggaagt

SEQ ID NO: 81871 - DNA, 959 bp, Cannabis sativa
tgtatattccaaaatataataatttcaagttgtaaaattcttttttgaagcagcttattatatataatatattcctttgaaactgacaattgagttgagttgatttgaatttcaaagtcaaggctaatatgttatgtagttcatagtaagaaaaattcttggcctttcttttatgtaatgtgtggtgatcgactatatatataatgttcaccaactcatattccagtcaattaaactgtttgaatctacaaaaagattcagtcacagtgtatgtaaattttttttactgtatacatatctctatatatcctaattaataatacatttacttttttatcttaaatctttttgactgctaatttcaacaagaatatcgttgaatacacatatagctgtatatttaaataaatataataatatatgtaatgttgatttgaattcaagccctccaaattataaggcttcaaaagaacacaaaagaaaagaaaatcatatatttcattcaaggaacttattaagcttaagcttgaaccatacaactcttttaaatattatacctatagctagtctaagattaggagacaatttttgtctccattttcaggtgttcttgcaaagggaatataacatataataataaatggagaatatttttagaaaatatagattgaactattcatttaatcaaaatactaagcaaatatatacatatacctctatatatactcttttatattccatgtaaatcaaagatattgtgtgtagtatatggtgtttttactatgtagtctcaaaaagaagtgcatatatcaatgcactattttgtgttttgaatagttataatttttttttatatgatggtagatatgataactatttaaaatatttacaaagttttaagaaatttaaaataaattataatacaaaaggtaggtttttaacaatctattttacacgta

SEQ ID NO: 81872 - DNA, 668 bp, Cannabis sativa
agtgtttcttaaatcttaggtaaataagtggggatgaaccatttctctaagaacaccatgtatttggaaggtggagtaggatctaaacatgctgttcggatttactttcacttaggagatggattgttttgtttgtctaactggaccaggtatttgagtccatacttgatgggcttctatgaatgatgacgtgacattatttcgaaaatacagattaaagtaaggaaaagattgaagaatatttaataaaataaatcataaatattatgtgggtggaatataaatggctataaaataagtgatgataataataataagtgatataggtctataggataaaagccttaaaataactatttcaattaaaattcagcaaaacattgctttcaaaaaaaaaaaaaacaaatcagccataaaaaatactaattcaattaaatttctcagttgagttttattttagtggctaacagtgatttctggctggaagaaaaaaaataaaattatattaaaaagaaagaaaagaaaaatgaacagtgacgtgtcacgttgtcggagactgggcacacaccatgtattttctttttcttttattttttatttatttatttatttattttgaaggaattggcagtgagtgggaaaaggaaaacaaaagaaagaaagcccta

SEQ ID NO: 81873 - DNA, 636 bp, Cannabis sativa
tttgtttttagaagtattttcatgtaaaaaaaaaattaaaagattagattaggatggcataattaataaaccacgcgcgcgtcagcatcgcaatcctcacattcatttctctctatattttttcttcttttttcctaggttcagctctgaattttaattagttaatttattatattatagattatactttttaattttgggatttgggatttggtttcatatttgttgtataaatatagttgtaatgcagcgacgggtttggtcattggtgtggaggttgggacttagaagcttataggtgaccaattctgtctattttgattttgtaatttaattaagacaagtcaaggtttgaagaagacccagattgatccagagagagaaattcaagaatttcaagaatatggatccgcgaaccgtccatagccaacaaaattccaagagttcccatttggctttggatattggaggtaattattcatatttcaatctgtttttgcttcaatttcttgataaaattttgttaatactactattcattcaccaattatagaaaccaaccttgtttcttgaattttgctgatttaatttaattcctttttggtctttcaatctgggtattattatattgtttgt

SEQ ID NO: 81874 - DNA, 1630 bp, Cannabis sativa
ataaaactttatttatcttaccatgtaatattttcttaatcacacttctaagtttcaatatgttaagagaaagtatgtatgtcatgcatgtgtatggcatattgtcatatatatgtttgaatctttttaattttctcccaaatttcatcaatttcagttataacattgctatctataatggtcactaattaaaagcttacaatattgtggttccagtccacatggatttcttagatgttgaaagcataatttgactcctaaaaggagcacaaaaacactatagtagcattgaatgtttacactacatttttccttccttttttttttttttttttctttttcaaataataagattctaaatcaaatttaataacattaatacaaaaatgacatatattctacctaaatggacccatcttaatagttcttcatccttctactttcttacaaaatcacttttgaatttgagaatccttcacatcgttattattactttttgaataaaattataggaatttaattctatgtatttattagattaaaattatttctctaaatttaagttcttacattaatagaatgggctaatatttcataaaactcaattctactcttcccatttcaaacacctaccctctctcttcctcccttctctctctctcgctctctaaactcaccccaagaactcgacccacaaaccacaatctcgttcctttctctctacgactactgcgaccacaaacccaacgacccatgaacccaatccgcagacccaacggcttccccagcaaccacgacttctctatcgtattattttttttttgtgcatgatttagggttgaaatatatgaaactattaatatgaatttaggattaaagatctatgatttttgagtttggattagacttgggattggagtaatcggatgtgttttggagaaaatttgaggtttttgcctggtccgatacatgctcgatgcaagtctgatatatttttgttgttggaaagagataaaagttgaagacgatagcccgatataggcccgatgctgggcccaatatagggtctgatagtgtgcctaagttttatgctttttttgtaaggctcgattggatcgatgtatggttcgatatgaggcccaatgtatagtcacaaaatagcacaaaaatagacacacttatcgagccttggccttacaaaaaaaagcataaaacttaggcacactatcaggccatatattgagtctagcagcaagcctacatcgggctattgtcttcaacctttatccctttccaacaacaaagatacatcggacttatattaggcctgcaacgggcctccatcagactaggccaaaaacctagattttctccaaaatacatatccgaccattctaatcctaaatctaacccaaactcaaaaatcatgcaaaaaaaaaatgatacttacctttgacgacattgttgatggagaagacgttgggtctgtaggtcattgggtctgcggtggtcattcagttcgtgggtcattgggtctttggtcgcggtgatcatggagagaaggaccgaggttgtgggtggtgggttgttggttgagtccttggggtgagttcagagagagagagagaga

SEQ ID NO: 81875 - DNA, 708 bp, Cannabis sativa
taaatgtaaataaattattttgtattatattatgtaataaaattatataatttatacaaaactataaatttccctttaacttattaggaaacttttatgaagaagctatactaaacttgacttaaatttctcttaaaaaaaattatttagagttaaaagttaaaaatgaaagacatggaacaaaaaaaagaagatttcacgtgatttttaagtaaactcaataacatgttttctaaatatacttatacttataaatttcctccgtcttcctaaagaagttgttgctctcataatgaagcgaatcactttctctccttatatttcttgtcctttttcttaagatcaaatatatttttttttttttagtaatttgtggcataaatatttaaatttaactttcagttacaaataagtatttaagtttaatttgacggtaataatacttaagttataattttagaacttttgtaagtatttaattattaagtgttaagtaaattgtcacgtgtcaatccctaattagtgtaagtcatgaatttttattttttttaaaaacaattaatttaaataaaccaacaaaaaaataacacgtggataatgacttgatatttaatagctaggtacacagagttctataaatataacttaagtattattaccataaaaaattaaacttaaatatttatttacaaccgaaaattaaattta

SEQ ID NO: 81876 - DNA, 1518 bp, Cannabis sativa
cgagtggaggcaagagccttagttaagagatcagcaatttgatcgagagctggagtgtgacgaacttgaagtttctgctgcataacacgttctcgcacaaagtaaagatctaattcaatatgttttgtacgagaatgtagaacggggttggcagataagagcacagtactctgattgtcacaccaaattgtgggtgttggcagctgggaaaaaccaatctcagccagtaaggattgaagccaaatgacttcagcagtagtatgagccaggctgcgatactcagcctcagtgctggatcgagaaacagtcttctgtttctttgaactccaagaaatgagattggagcctaagtaaatgcagaaccccgttgtggaacgacgatcatcgggatcagacgcccaatcagcatcacagaacgccgtgagaacaagattggagcaaggccgaatatgaagaccataatcaagagttcctttgagataacgaaggatatgcttgactactttccagtgaggttcacggggctgatgcatatattgagaaactttgttgacagcaaaagatatttcgggtctggtaatcgtggcatactgcagagcacccactaaacttctgtagagatgaggatcaggaaataaatctccatcataggcatttagtttgtctccaccaaccataggaataggaagtggattggcattttccatcttggctcgacaaagaagatcaataatgtacttttgttgactgagatgtaacccggttgtgcagtgatgaatctcaaccccaagaaagtaatcaataggccctaaatcttttaaggcaaaagaggaatgaagctgagatattaaatctgatatatgcacctgagaacaaccagtaacaaggatatcatcgacgtataccagtacaaatatcatgtaagaggatgtgatcttgaagaatagtgactgatctgctttggaacattgaaaaccaagatgacaaagtgcagttttgagcttatcaaaccaggcacggggggcctgtcttaaaccatacagtgtcttctgtaacttacagaccagatgagggtgttctttgtcaacataaccaggaggttgagtcataaatacctcctctgtgagatcaccattaagaaacgcgttgttgacatcgagctgtcgaatactccaacctttagtgactgcaatggttaatatagttctgatggttgtaggcttgactacggggctaaaggtttctttaaaatcaaagccatattgctgcaagaaacctttagccacaagccgtgacttatacttatcaacagaaccatcagagtgttccttgatacgatggacccatttgcagccaatagcacgcttaccagggggtaaaggaacaagaatccaagtcccttttgttcgtaaggcatgcatttcattgtccatagcaccatgccaatttggatctttaagagctgcagccaatgataatggagttttggaaaccaatagtgtttttggtttgtaagtc

SEQ ID NO: 81877 - DNA, 4068 bp, Cannabis sativa
  modified_base (529)..(552): a, c, t, g, unknown or other
ttatagtgtaataccacaaagtttattgaaattttgattgttgtagcattgaaccactattcattgataacaaaccaatgataacacacatacctttgctatgttcacttaagaaccttatggattgtttttgcaccgttaatggccatgtgtacaaattcaatttgtggactttctacagaataactctcgattctcataagagatggtaccactcctagtccatataggtggagttttagtgtctcacaacactttagacactttcttaagcttaattgagttttcttaagcttaagctccattaaaaacttttcgattttaaccctctaattttcactacatgacctcatccattgatgggacaattgggtaccacattcactctattgacttgttattacctattaaacttaagacttgatttttaatagtgttaagatagtttcccatcaatgagcaaaacactaagcgagtttatctcccatccctcaaaatttatgctttaatcttgtatgaagattaagcnnnnnnnnnnnnnnnnnnnnnnnnttccaaacgaatcatgctagccaaatatagtattcacctttaaggtgaccactattctccttatgtactttagctttgaaaattcaatgttaaaagattaattttcaaacaacttaaattctaaataattttgatatcaagctgttatacctgaaattcgctggaacttcagaaggcaacatgtgtcaatctcagggaagatgaatcaacgaacatattgattattaaattaataaatattgaatggaataactctttaaatgctgaagtcaataggatatatttataactcgcggactgcacagtctttagcgagacaaggatgtacgaactattgactgacgtattaacgagaaacaatttcgtgtcaaaagaaataatcgcaaggatgacatcaataatacatagcgaggcatctacctcgcaatatgtagagaggtgctgacaaggcgaattggttgttagaacacttagcatataatatacattacattacctaagtataatagcttgaaggacatagataacgaatagcatggcatccatctcgctatagaaagacatacttctggtaaactccagctcgctgccaaggttattgttgctattgagaacccccaagacatgattgtctagtctataaggtcttatggtcaaagagcagtccttacgtttgctcagtacactagtgctaatgacattgctggaagacttatgaataaaccaagttattcatgtaccaagcgagacatcccatcgagatatgttttccagcatgtcttaatcaacgttagcattgacccttcaaaagcggtgtaaatcacagctgtgtgaatttcaaataataactgtatttatttacgtggagcataattatagcccacaattttgggaaagtatcattgtgggattcgaatttgaatgtaattaactacaaatctatgttattaaaaataggggcagaatgtatgaaaaaggggttaaaaaaaagtcttgagagaaaaaagaatacactgactgtgaagaaccatagttctatatcagaaaagtttgaataagattgactcgtggactatatagagttaactgcaaaaccacataaaaacctggtgttatttctactttattattctttcttaaatttctaataacttctgtgctaaacctatcatgaaaataggctcattatcgttaacaaaaatctgcattaacagtttggtgctttcattgagagcctacgtgagaaaagctcagaaaaatctcttctaaaccaaaagatgttttttttctccatggctgataatggggaaaacaacaacactcatcctgaagagacgactcattgccctagaaaaaagccagcgggctcacggaggccccccaattcatgaacaacgtgttcaacacgatcaaaacattcgagaagaagccaacgtgatggtgaccaaaacccaaaaactaggaatgaaaaacccaagacaaatgctggtggttctcttatgagtgagggtgcctatgaccccaccagatatgtaccgttggtcgaattagaaaatcatcaactccgaagatgtttggaggaggtaaaaccaacaaaacattgagttggaatgggaggcagccacagccagggcggcacaggaaaacaacacacagaaccaacctgatcctggagtgaggagaccatgaggcagacctcgcggctcacgaaccaagaggcaggagatggctcaagagcaaccctaaaacactcaggaggagtaacctggggaaactggagatgcacctgaagatgaggaaccagatgaccaggcacctcgttaagaagtgcaacgcagaccctagggattaacaacccaggggaatggaaaccgtgatttaccagagtcctctcacaggaatgcgagcagaaggtacccccagaatagggaataggaaatccctcgtggtaacgagagagatcctgggactcaacctaggacaggtgggttcccaccgagacatcattaatgtccttctcgaactaatagggaaggggcacgtacaaatcccaacagggggcatgtatcaacctgttcctaaaggagaaggtcggtacgtgatgaggtaagttctagtttgagatgtacaagatccctagatcatagttgatctacgcgaggaggggatagaacttgtcgcaataatgatcgagagagttagtgcacaactagaaccgaaagttactcaaggacaagctttgtaagtaactatgacccacaacgaccggatcttcttgagcaattaaactagaagaagccaagcttacgtcaacaactcaatcaaaagcaagaggatcctatccaattgcgaattattgagatggaggacaaattcaggagataccaagatggggaatatgggaaactgcctagttatgactcagacgaagagcccgagcctttccatccagacattatgagtactaaattcccccaaggatttaaaaacccccacatctcgtcatacgatgggactaaaaatccggtcgctcacctcaataattttaacacaataatgtgagccagcaatgttacaaataactcacgctatattttattccctacctcgctagttggggtagcgagcagctggttcaaaaaatttacacaacactcactactacaaaaatcattttcagttacacacttagagtgactctaaaatattttagtgacacttcaatgcgcatcactaatgtgggtgattgtaaaagtattatttagtgactctgcattcgtgtcactaatactttttagagtttctcaaagcatgtcaccatacccttttacagtaccacgtaaaaataacagctacacacaaagtgtgtcactgtatctattttctaattcatttttttaaaaatatattcaatcaaattaataattataaattttaaataataatattcagggaattggattaatttttttttttgttttgatacaaaaaggtgaaataccagtccaattttccaaacaacttatgattcattcttagtgtggtaccaaaaaaaatctgaaaaacttttatttatatttttacaagttagtttatgcgttacagattggtaaaattaaacaaaattattaagtgtaaatcaaatgtggaataagttacaaacaaattatatgacaaaacgtacaaaacaaaatatacaataattttccagatctatatcgaaaactaaacaaaaacaaaaatttagaaactaaatactaattaagcacataaaaaacacactatagactaatcaaaatagagaaaataatgaacaaggtagccaaaaccagcagcattaacaaaaaatcgaaaccaaactcaagcccagtaaatcccgatctacccaccaactgcttttgtaacccgaactctggccaacttcgcgaaccccaaagcaagcctctctgttgaagatctacaaagaaaagggacaaaaagagagaaagagaacattatcgagagagagagagagag

SEQ ID NO: 81878 - DNA, 1093 bp, Cannabis sativa
ttaaataaaactaacactacgtgtcttggcacgtaacaatcacctagtatatatatctaagtatctaaattattttattattgatctacattgaatatagtgtgtttgtgtgttgcttcaaagtattctttctaataatattttaaacattctataattatattatttatttttagtggttaatttacatatactctcaaaatatattttgagttacagatgttaactttagtattcgctcattcacataattttattttgagttaaaaggaaatttatagttgtgttttcattattttgttttatctaagaaaaaaaaatactaaaaatatcaatctaaaaatttaattttatgtttataagaacaattaatgtttattggttttgttaggtctgaccctcaaaatagaagcaaatctgacatattgttatacaagttgtgccagatttttattataaaagtgagatttagtaaatacgagtcgggtcggcctgtttatatatttattttcatacaagtcaaagtaaaatcatatgaaagataaaaattataatttatttcatatataatttaaatttttttaaacattcgctgcgaagcgcggattatttactagttagcctaacaaagaatatttaatctgtaaataaatatgtagtacataggtatataagtcatttacaccgcaatttgggacccatagtccaaatatagattgagattgtggggttagtaggagagtttgatgaggttaataatgagttcccaaataaagcccccactattctccccacccgcttgacagttaatacaatacaatcagttctcatatcccatcttaattttatgttattttatttatcttattcatcaaattttattaattattattattatttcacttcccatcttcaccatttgcccataccattcttgtccctgcatgcaacaacccttcctaccatcctttccccacgctctcattctccccgtgtatccacgcccacaactatccaaaatttattatgtctttctctaataattctattaagacaatagaaatggaaatatttagaaaaatagtaatagttg

SEQ ID NO: 81879 - DNA, 2633 bp, Cannabis sativa
gaaaactacaactgaagaagacaacagccttaatgaattgtttaaatcgaggtaattcttcagtcgtattctcaagctttggaatttagtctaaaatatagcaaaagagaataaagttgctgaatgtgacagctctacatttttgttgtaaaaatgctagaaataaccgaaagaaaaattgagaaacttaattctgaaacaaaagttaatttgaagataaatcaaatataggatactatatctttcaaaaaaaaaatatagaatgctatatggcttcacaatgaccctgactttaaggagttgaacctttcttgttttataaggaaaattgtcttgtgtattgtagtaatagtaacttatgtttcaattcttaattaacaaatgatgtacataagcaaatgcaatgacatattaatgtcaaaactaacatagttcacttgagctatagacatgacataataaaataacattaaataagaggcaaaaacaaactgcattgccatcaaaagtttctctaattatcaacacattaatcatcattatgtacaaaacttcctgagatgttaatgttaatggacatacgttttaataagcaggtgttgaacatagcacttacacaaaacaaacaagaaatcaactcagcaacagtatccaaaataatcccaattcttctataactttgccatagttgagtaaatttgcatatcgagacaaaagtaaaattcatatgccttccatttaaccaaaaaatcctatttatttatgtatgtattttgaaaaggacaaacaatcttattttgaaatacagtacaatgccaaagcacacaaaacttaaaatactcccccagaaaaagaaaaaaacttacacttgggcgaccagttttgtcataatgcactgcatatctttttaagtccccaatttcagagaaaagttcctgagttgcaagtcatatttcaagacaatgttacaagaaattcgggtatagaaagctcttaagacgaaaaagtgtggcttgagttgtacccttatatcctcattggtcactccattgtccaagttggagacatatagttttgtgccaatctcaatgcctgttattccagcagctctgatactatcttcaaacaaatcatgctgccatgggaaggccttggttctgcggatagactgatgaaagcatggagaaaagaggccagatagggaaaagaagaaacgtcagcttataacaagataattctccactcctcaaagtgctcagaaaaataacggcacaaatgcactgaggacgacagagctttaggggatgagatgagacagacatattgagcttctccatcaattatttgtcctctttgaatttgagtttcaaatatttgggtttttaaatcatatcagattgtctagcatatcaaaaagcatctacagatttgagcttgccttggcaatggtgtaagcagatggctgagcattcaccctgagagggcccctacgaactggcccattcattcttccagcagcagcaccaccaccaccattaaaggacccacgcgaaccacgtcctcgacgggctctacctctttctctaattctctcacgattacccttgctgctctttatcatgtcatcaagcgacatatccaaaggagtagtcattgatggggaacagttacagaaatatacacaataagagatctttaaaaggacctgcaattaaaacacaattcacatcagcatctgcatcatgatgttgaatcgccacacataaacaataccaaatcacaatattagcatatatttcaaaaccactaatcaactaatttcaaagaaaaacaagaacccaaggagagaaaccaaaaatttatgaaaagggaaaaaaatcaatctctgtaaaacctccacacacaaaaccctcaaacccgtacgcgttagaaaatccaaacaattttttatacatgaaaataaacctaatagtaaatagaaaccaaaataagatctcattcacagaagaataaaaaaaaaaagacacgagtcagagacccaatgtttgggaaccaatcctcgtcagcaacctcaaatccatacctgtgagtgaaacaattgtttatccgggcagtgaatgaagcgcaggtagtaattaaccggagttctacaatcgaaaagcctatactcaacaaaaggaatttctcctctcggatcaggttagtgaaggaagttgataatctatgtagagtaggtacagctgatgaattagtgagagaagaaacgaaaaagaaaaggcgagagagagaagttgtagtaggagattgagaagctagggtcaggttgcgtgatggaaaatgctgaaaatcatttggagacgaaaccctaataaatatgactttggttttgggtttcctatcataattgggctttcctattgggctaagtcaacacaatcactcgggggtattctcaatcggaagttatatttagggataattaagcactatttctttaaaaaaaaaattatacttttatgtttaaaaaaattttatattcttacagttttgtatagaaacaacacaaaaataacatgaaaataacatttaaataacaacaaaaataacatacataataaaaaatcaacaacaaa

SEQ ID NO: 81880 - DNA, 880 bp, Cannabis sativa
attattcctgatgatgatgaagatgatctgacgtaatccccatgaacagactctttgttgtccatcattttcgctaaatctgatgacgagcctttggtagcagccaagataagatgatgaggatactgaccagcatgatcgtaatgagccaataatggctgcttccacttgttggattttggatcattagcagcaccaaaagacttatagggtgaataacacaaggatgaattaatagatgcagtgttataaggaatcaacggtgggagcctactgctgaccatgcttgaaatagttgatgatgaagaaaaggttggattagggctagggttagggttagtgttagggttgtgacttataaacatggcagtagtagtagtattagcagtaggaggaagagttgcagtcatgatactatactgaccagtacttattggaggagactgtctgagcctagcccggtctttcctgtgaacgttcatgtggccgccaagagcttgagcggatctgaattcccttttgcagaagctacatgtgtaagatcttggaggccatgaaaaaccattcatcatgttatagttctcttcttcttcctcatcatcatcatcatcattatctttatctttatcttcaccgtcttcttcttcttcttcttcttcttcttgattatagttgttgagtttccacgatggcgaggagctactgtagtgatgaatatctgtaactttcggcttaatgttcttgatcatcatcgtgtggttgtggctgtgttttggatctgatgatctgattgtgtgatcaagggatgatccggcattactactcctatctttcatccttttgttgttgttcaaacttttcctctccattataacgatat

SEQ ID NO: 81881 - DNA, 973 bp, Cannabis sativa
tactggaggaggatcgccactacacagacaaggaaattgaggaggcccaaccctcatactattaggaaaagcatgctctgatgtggatttccccccctctgagctgaccaagaagaggttgaggaatttagataagaagagactgcttagaaatatggcagtcttccttcccgttgacagacaattggaaaatgaccccagagagggcttgtgcacgtggtccggcctgcatgctcaacagggttcccttcagccactttatccataatttgtgaagtaataactattacaaaatctgcccaacgcagttcttgttgaaggggattaagtacatggttgcgatgtacatcttgtacgcataacaaggatggggggagccttcgccccatgatataaaatggttctttgatctgaagtccaatccgggccacgatcgttcgggctatttttatttttctcaacttgagtgcctgtggctgatcggcacaaaccactcctctatctcgaagattggcaagtttcttcgcaaatactatattgtacctaagatggaggctggtcattttgccttccagtatgtcaagacttacgattggccaagttttacacttggattacgggttaaagcccgggcaattctaaagatgtcaacatttttttagaacataccactgctaacaataacagaaaaatttatcaagtatgggctctatagagataccgaggaggatgatttggtggtcgagaaaccacgacctgaggttgttagttttatggtacgaaatcatgtatgcagcgaaagggttttatattatctagttatcattgtaccatatcccaatgaatcttcagatgtgtgtacattaaatcaaaataataaaataataagtctagagtatacctcttgaaacctatcaaggtatcctcaaaacttcttgtatgttgtatcccttaatccagatgatgaggaaat

SEQ ID NO: 81882 - DNA, 567 bp, Cannabis sativa
taagtgtttcattatattaattatgaagttaatggaaattgtgttatgtttgtttgactaaataaacaggacccaaagacacgttacccagttgtggttcgattcagcaaggttaactatgccagtgtatctacaaataactatgcattggatgagattgaagaagttaaatgattttagtgtttttccaatgtaaattgttattattatcattattgtaattctcacttctctctttgctctatattttctagtcttttttcttcttcctctaaggaatgtgtatcatactgtgatttgtttcttcttcttctctttctcccaagttaatgagaatatttcttaccatccaattcaggagagtcttagcttaattttattgattgtaaaaactatacaaaatctatattttaacacaagtgaagaaactctaatttatagcactttcttcaaaaccaagtaaaaagggcaacataacagcttcttcttctgctatggattactctgatgcattagtttgaaaaacatgtatctaatccattgaagaaggcaatggtatatcaaaaa

SEQ ID NO: 81883 - DNA, 1505 bp, Cannabis sativa
tcgatcaccatcaactttctctctaacaacatcctttctctccttcaagtttttctttacccaagcctttagacccgtcctcttacattcaaccatattatggccatatcttttataattattatactttttagggagccattcatagtcaacaaattagtcctgaacttgacctttttaattctcaaaatggatgatgaatgggggatcatcagtaatctccattttgataagcataggagcaaatctaatcatcattctatcattagtaactttttccaccatgattggttttcaaatggtactcaccaaagcattcagacaattgataccccaatattgaagacctaaattaggtaatctaatccataaaatacagagagaactaacctcactgtgtcgagatcttgtgtccatggcctaacaatctccaattattatcaaattgcacagcgccagacacaaagactaaatcacgagtttcctcatccttaaatgtcacaattgttagtgccatattcatcctaaccaccctttcaataccaagatatccccaattacgtttcacaaatccttcaaacacaacaaaagggggactaacccccatcagcatacatataacagctgagctctaattatgtgcttgctttgtaatctcttccaaatctagctttgcaactcttataccagacttgattataggttcctcatagtgaagcttggccgcggtattgatttgttgtccttccttaagtttcgcccagtgcttttgtgcagttaattggaaatcttcattctcaacttcctcagcccaattcgtcttcgaagcagtctcaaaatcactcttcgcaccattcactgactttgcaatcgacctcaaatctttatatcccaacgaattgattcaaccacgagtatcgtcgttcgttcttcttctcatatctcagattcattaccaatttgacattcttggtttgaagggggctcctcaattcgaggtcgagatgcaggctttcgagtcactttctatcatcctcatcgagagaatcagttccgacgcacgtctctccattcaatgttagcaatattgttattttagttattctaaattgttaattgtattaaacttgaaaggatgatatcgttatggaatataaaacttaaatgaatgatgatattatgtatatttttttcttcatgtttttaggctaatattaaaatttagatatgtaattggtattcaattagaaaactaatccaatcccattagtatttaaattagattagattttgaagtctaattaaattggttcagataataattttttaaatccaattactaattacattggattgaattaggagaaaaatgttaaattgaatcttcgagtactatacgcttattactattgaaagatgtgtatatatatatatattaattattatagggatatattatagctataatatatttctttgactggttttggagttgagaactatat

SEQ ID NO: 81884 - DNA, 1490 bp, Cannabis sativa
aattataataaaatggcaatcaaaactgaaatggcatgataatgcaatagtaaagccttataataatttctggtcatgataatctggtcattaatagtataacatgagaatttttattataggcctctgatcaaaataatttcttcacagataagtagagagagagccaaaaatatatagtatacctagtataatataatcaacgaagtgatattttgtagctaattaaaccaattaatttatcacaatagactatagataaatgccatcagagatatttactagaaatttcataaacatagataattcattaagaaccaatcacatcttcaaggacttcaactacaatcgtcaacagtaaacaaagatattggatattatatgaacatttggaaaaaaaaagaccatacagattttatagtccaaaagatatgaacatattagtctacttgtgatacaatcctatgttatcttagacaaaaatcttttcaaaataattttaaaacagagacttttttctacactcaagcatataaccatgattctcattaaaacctgtttgcgtcatcatcaaccaatagagagagatagagaatgcatagaaaataaaatagaataaataaataaaaagatgatcttgttgccaagcaaacctggaaatgtttatgataaaaaatcatggaattatttgatttgaaactaccaatattttcatcactgggctgatgaaattacaatcttgcaataaaaaaagagaaagagataaacataacttcaaaacaaaggaagaattatacattctacacttgagattagtacctaatctttagaaatattgttcacatgtaccattgatatatagcctaagaaaacatttttcagctaccattgaaagattaggatctagaaataacatgtatatttaaagagtagtaaacaacccatcaagacgagtcgggttattaagaaaaaatgagcaataacattgactagaataaaagagttgcaaacttaaactgcaacttacatcaattgtcaagccataaagtagacaagcaacaactaaattgcttgctgaatcatcaaggttaaggcccaagacgccatcaacaatcgtcttcgccatcctgaaaaatggcacttttataaatataaataaattcacaaataaccaattaccagtagagagtaatgcagtgacataaaatcaagagacataaaatctggaataatcacagtaatgacaaagaatctttctaaaataagaagagcaagggtttaccttgaatcaaatcaatacaacatctctaaaatctgtccaaggttccatttctagttatatataagattctaaactcataaattcatctgataaacaacgaaataaaaaatttggagcaaccatttccatcttaaacaaacccccacacattcaaatttgaaatttcaaaaccatttccatctaaaacaatcccccccccccccccccc

SEQ ID NO: 81885 - DNA, 1044 bp, Cannabis sativa
  modified_base (1001)..(1018): a, c, t, g, unknown or other
aaaaccaaaaagttgtaaacttgtttttttattgtcattattaatgttataaaaactaaaaataaaacaatatacacttgttgagtgaaacgaaatagagaaacgaaagaattgaagagtattctttattgattgagaaaaagtttgttatagagagatttatatacaatgaatccacaagactaaagttggttacaaaccgttagagcaaataacagaccaatggaaaataactaactggacaaacaaaccaattctaaccattcgacagctcagcacactgagtgtcattaataggccccctcaaacttagtgtggtagaagagaccacaccaagtttgtccctaagcacagcaaattgagaattggaaatcggcttggtaagggagtctgcaagttgatgagaagcatggacatgatgcactgagatttcttttcgactgaccttctctcgaacgaaatataggtcgatttcaatgtgtttagtgcgagcatgcagcatgggattggcatcgaacattatggtgctgacattgtcacaccagatgagaggaggtgtagatagatgcacatgtaactcagtgaataacaattgaatccagctaatttcagagacaacagcagcacaaatctgaaattcagcttcggtagaggatcgtgatatagtgctttgtttcttagatgaggagatctcttgtcatcgggatcaacagcccagtctgcgtcacaataagcttcaatgtttaaatgaggagatcttttgatgtgcaaaccataatccaaagtccctgcaatgtatctcaagattctcctgactgccactagatgagattgaagtggattgtgcataaattggcacactttgttgacactgtaggcaatgttaggtcttgtgatggtggcatattgaagagctccaacaatggatcgatagaatgaagggtcatgaacagggtcactgccaaaattcgagagtcttaaactgttggaaattattttannnnnnnnnnnnnnnnnnaccaagtatgtttgattaacatccta

SEQ ID NO: 81886 - DNA, 2839 bp, Cannabis sativa
ctagacacgagagaataagaagagggtaaaatgttaggattaattatctaaggttataattatagttttatcatcaatttttttatctaaatagctaatttgctaaatgcttataaaaaggaacatttcctaactttatttttaaatttaaggtcattttatatttcagcgcaatgtttaaaggacagtccgatagtattttcctatttttttactattacttataatagttattaaaatcaaaatataatacctaaaaaaaactaattaatttagtatgtatatatgtatatatatatacaaccgtctagcgccgcatttcctcggaatctgactggactaacacccatggtgtaacctgccaaaatgtacttgaatgggtttattaatccttcgtcaaacaatattaatataaataaattgcacaacacttttacgcttaattgatgaaaaaattattgaagaagctatataataatattatatacacacatgctgacatgataaaacagttaagattcttctttaactgatcttattttcgtcgtcctcaacattaagctggtgtttgtttggttagatgtaataaaataaaatggaatgaaaaaaaaattattttattttttgtttgatagtattttaaaatattaaaatgttatttgaatagaataatttttccattatttgagtaaaatgactatttaattttaaaataaaaaaaagactatttcaatacaagataaaaaaaattaataatctttctatcaaatttttatatattttaaatttgattctatttcatttttattctattctatttctattcttatttttatatttttatttctttaaactaaaatttcgagtacatacaataataagctattatatgcacatattaagtacacatccacgaaataacttcacattgttgaaattaaagaaatatagggtgaaagaaaattaaaaaaaaaaaaaaaaaacatgtacgtccactttctatgttgggtattagatgagttagtgattctcatattgctatatttttataggtgagacataaactagttggttacttggagatgacgcagcatccgataaggaagctttaggcttattagctcaaaggcttatggtctccactatctgatcattacttacaaataattgtgatgtgatcgtgatcaaaattaattataggaatgcaacaatttttttcttaataataaaacatgtccgtctaagacttcaacagtcaaaattgaagctagaaagtccctattcatacagacatccacatagggatttagaggtaaatattatcccaatttttatccacatgatgtggtgtgtccataaaagaaagattgatgccacacagagtacagcttgtcagtaaaaagaccaagtcaccatgcacaacttaccacttgacgagaaatccaaatacttaaacaggacaaagagacaacaaactggccaatcaagggtgtctggccagacccctagccgaacctattggcaacataggccgaccaacctcctgtacagggaaggcaggaactttttgtgtgcctctacggctttcagcctggacaatacttccagctacaaatcgtgcttcaacaacccacaaaagtaggagattaacttcaattgtttacctattcttcgagactaattaacatgttattttttttttattaatttaatgtgtaactaattgatgatatctcctcattcttaagtcatagagttcaagaactcatagtcctagctcaccctctcttctacacgccattagcagtgtagaagagactaagtctccctcatttcatctacttgatattttcctcttattctcactattgtaatttcaagagagccactctagaatccacaatactgtgatctaagtggtattatctctcatatcaatacaactaaaaggggagtaagtcattacccgctaactaagggggccaaagttcaataaaaatattttttccttttttgtttggttgttctaattgtgtacatgtggtgatttcaatcataaatatgactccgttgtcggaaggtcaaatttgagatcaacataactgattataaaaaatagcacaaattaaattatcttttgaaaataatgagatttcaaatataaaaacaattaaaattataattccaagcacatacaataacaatattaacaaaaattcccaaatctaatcaacatattgaacatatagagtaacaatacaaacctaaagaatggtagaaactaaatgggctgatataagagaaagatgatagcgctggaggagtcagtagagagagcgaattgaacaagctttctttgaagctcaaagggagagaaggtggaggcctcaagatcacttgagtgttgctttgtggtccacttgccacaagagctcttgtaaacgaaggtgaaaagatgttgacttctctagttttctggatacgtttttggctttagcttcggagaatagaaagatctttgtaataaccatttaaatatatatttagaggagggggagatccgtctaaatattttaaatttgaatttaaatatgtttttaaaaaatattaacatgattttttttattttaatttgttaaatcaataaagtaatttctttatataatatatctacacgattttttttttttaaatatatataataatattataacattaataaagaatattatgttaagtaatactatattttgttaaagccaacgtataaaatcaaaaaaacattgttaaaccaaaaattctattacatagatacattttacatagaatatatatatat

SEQ ID NO: 81887 - DNA, 1039 bp, Cannabis sativa
aataataataataataaataggcgttttgttttgttgcttttaagttttgagtggtgggtggttggcccaccaaaacgacagaccaccgccataacttccttgcgttttggtttttgtagttacacggcatctcctcctcttcttcttccgttatatgttaacatcaattcaattaattactattgttatcattattattatcgaaattaacaagttttattactttcataattatttttagaaacattcaaaaaaaagaactagaaaataaaaaatatcccctttctttttattatagcaatcactaaaactaataatctacaatggattggatcacacttgaattacagaagtaatgaaggttcgtgaggcccttagcaggataaaagaacatcaatagcaatgtgtcactttcaaatcagattgcttgacggtaatacaaactttacgaagttttattcaaaagatctccatctttgatcaagtgattaataattgtaattttttgattagtaatattcttgttatttttgttgaacgattagctaatatggtgaatcgtattattgttagagcttttatattttatcttaattgtcattttagtttagatgatatttcaactaacttgctatcttgtttggtggcggatactaagatctaataaaatctggatttttcattcaaaaaagaaaaaactaataatttgcaatctaattgaataaaaatcttttcattcaaaatttaatcataattaaaattaaaaaaacaagttaaataattaataaatagattacaacattcaataataagggaaataggaagagatcggagggtaatatggcctccaatttttttattttctaaagaattacaattaaaaaataattaaaaataaaaatgaacaaatttcttaatttttattagcatataaaaaagagtaagatcaaacaccaaataccaactaccaagagtcaccataagctcaaatatcaaaagtaaaaagtatattaaaaaaataacacttgctattaataa

SEQ ID NO: 81888 - DNA, 1538 bp, Cannabis sativa
aatgagaatatttaaaattaaatagaaaacggttcatagtgtaaatattacaaaaataaaatgatttttttttatttctcatctatattaattgtatataaattatttaaatattttttgttgatatatactataaaatttagattatatatcctgaatatattaataaatatctatttagttaactctcacataactttttattttatgtatgttaatacaaaaatttatttttagctatttaaattgaaagatgaaaagttaagtcgttatcaacatcgtattttatttgctttctccattataaaggttattctaatcactgtgttttacttgtagtcgccactacattcaaagctaatattatcaccgtatctcacttataattagcagtatatttaaacttattgtcatcatcatatctgactgcatcgaaaattgaccaaaatcaatttaaaaaaaataattaattaaacatttgagtcaatttttaattatatgaagaaatgttctttttttctttttcaattatatatagaaattttacatagtatttaaatatcttatctctcaacattatatatatacatatataattttttatatacatattttatttttctagtttttatcaaataaagtttattaatagtaggaaaataaataataaactatccatcacttgtaaacatctaaaaaagaatatcaataaacatcaatttaaaataaataattaattaatttttttctttcaatttaaacttccacaattaaacatttgcataatatatttgaccctactgcacgctagtttttttctttttttttttttaaaaaaaaaaaagaagactcaaaattaggtctacgatcacttcagtgatgctaaaagatttatcgttttgtagtattgatgttagaagaaaatatgttatacatattaaaagtgtcattcttgaaaaaaaaaactatataattatattaaataatttcttttagtctgattataaatacatacttaatatatattaaatattagattaatataattttaattgtatttaaaaacaattatatatatgtacatagataatgactgttatatcaatttttcttactcaaaaaattatattattttgtgaagtagtaaaggttaaataatattaattatatgtctcttgaatttttttattagaattaaaaatgggtacagtaaatttaatataattaataataaaaaaaatttaaaaaatatattaatttatagtatttaaattaatttatttacatgagcattttaaaaacttataaatttataatttacataaatttatatcctatcacatttttatttctctattcttatcgatcatgcaatgtatctaatcttaactacaatattagtatgtatttaaaaatagttaagaattctacaaattattaattttacttttcataaattatcaaaataaatataaaaaatttagtgctaaagacattaagaatttaaggaatgctaaagacacatcaaaattgcattg

SEQ ID NO: 81889 - DNA, 712 bp, Cannabis sativa
catttacgcactgagaaaaatcatttttgtcagcgcttttcattttgtgctggcaaaagttctaataccaacgttcatttgccaacacatcagaagtaactttcattttaccatcgcaatacaagcttttcccagcacaaaaatgtgctggcaaaagtgacatttcttgtagtgtgaacacatgactcaagacctggacctagacccagacccaagacttaactcggatctgggactgaacctgagacccaaacccaagacccagaacccaggactcagatctaagactgatcatgggacccacgacctagacctgcacctgtgatcgaactcaagatttggacctagaccgaccttggaccagacctaggatatggaccacagacccagatccctaacccaggacctaaactgacctaaaatccttatcttacatggacctaaacccaggaccgaacccaactcagtccccgaccccgagtcttagattatactaatagagaagtgataaacaaattaattacaaaacataagatgcaattaatattatattatgtaattatttttttaaaatgattttgtaatgaaatttaataactaagtttgatgtttgaatattaattataacaaattaaatttgcattttgctactctacctctactactagatatacaaaatttgactaagttaggcggcaaccatgaatgacta

SEQ ID NO: 81890 - DNA, 1301 bp, Cannabis sativa
  modified_base (41)..(42): a, c, t, g, unknown or other
tataatcctactctaatacccacttaatcacatatttaatnnaatatgtccaattaaaatatcaatatattttttgggatattacaaaaagtgtcatagcaaagtcgatatataaattgcttaactttggggggaatgttctgcatccagagcgacttccaccaagtattgaggagatcagagtttgaggcagaaggcttgaaaatattagccatggatttggctagatggtaccctgttttgacagtgtagtggctagagttggtgtgctgccagaaaagagtatcagggtgattagtgtcaagagggggaagagataggatatcatgaacaatatcattaggaaagtggttgtttaaaagggtaatgttccagtcaccatcagagagaagcaagtcagagacgtggataaggtggttaggtagggatgtagggagaaagtggcaatttgggatccatttgtcatttaggattcgggtggtggcaccattccgtattctccaatgtagtcctactttaaggagagattttccccaatgtagacttttccagacatacgagggagagtgtccaaggggagcattcagaaaggatgacctggggaagtatatagatttaaaaagtgtggctagaagagaagtttggctagtttagattctccaagcctatttagcaagcatggcctgattgtaaagggcccgccatttattccagtggatttttagttcaccattattcgatccccaccagaatatggccatttttctttcaacaaaattgtaaaaagaagttggaagtttgaagacagacatggcataggtaggaatagtttggatgactgctttaagcataatctctttgcctcctttggaaagaaattttccttgccatttagaaagataagaccgaattctatccttgatgtgattgaaagagtgtttttttgattggccaaagcattagggcaatctatggtacttgtcgaggtgattagtggagggaatttgcctgtaatcctggatgagattttggtaggtaaggccggtattgggggagaataggatggaagatttattgaagttcaccaactgacccgagatactctcatacttgacaagagcctctttgatagcattacaagcctggatgttagaccaacaaaatagtatgctatcattagcaaaaagaagatgtgagatttttggagcagtacatgcaatatccaaaatttgtttttagtgttttcaaattgcttaagaatagtagagagaccttttgaacaaaggagaaagaggtatggt

SEQ ID NO: 81891 - DNA, 1947 bp, Cannabis sativa
tcgattctgtttttccttaaaaaatatttctattacctgtcgttgtcgattgtctgcatggacacttatgtatatatagcatgttttaattgatccacttaattttaattatttaaataattaaaaaatattttacatcataacaaataattttaaatactaaaaaataattttaaaacgtaaaaaaccctaaaaactaattctctctcttctttttatttctctaaccctttccaaaatttaatcccgattgtcctctaacgctagagctccgcccatatccaaccatgtccctcattctctctctcgattgcctcgttttcacctatagaaaccagagacgcaaaccactcaaacattatgtatctctctttcttcttctttttatttgcttttttattcacagattttcatatttgaattttgtgtttgttatacccataattcggctacacttcaaaagctaacacgtgtcctataaaaagaatatgaatcaactttaataatataataaagttatatcattaaatataaattaaaataactcgttattataaaataaaagaatgatagataatattcaaaactcattagttgtataagtctcaagcgagataaggataataactattgaactgatattgacaagacatacatctacctcggaatacatggacaaaaaaaaggagattcttctattcaagtagaataaatgtacacacaacagcctcgggttatacatgacgagacaatcacctcgaaatactgaatcaactaaaggaatgcagcgaggtgaacgacttaccaacacttagtatttttttcttatgaagatgcacaaggaggataactcatatcaagcgagatacaatctttcaagtcaataataaccatctaaaggataaaaacaaagaacggttgagtagttattttgtattatctcacatgtgatttaaataaaacgtggggattgtccacgtttcattaacagttattttgaattgatcctaaaagaataactggcaatctgtactcctataaatagggacaaatttcacagaaaaagggacgaaaaattaagagagaaaatatcataaattctgatattgtattctgtattcaataaatatcctaataagaaggactcgtggagtatgcagattttaactgtacaatcacgtaaaaatatatggagttattgatttttcattattattaattttcgtcaagtatatattactgaaaggctaattattttttgttaacgaaaatctgcgttaacagtgtttatgcagagaagacgatcggcaccacagatcttcgtcatcgatggcaaagaaggtcctcctaatcgtggtggcaacttgcacgcgaagaacaatagagaaagagtgagaccgtgataaagaaagagagatagaggacattgttcaccatcttggtcaccatccctaaactcttaggccgttaatggcactttccgctcacaatggatcacaagcgacttttttggaccggtaacactttaggctcacaataaatcacaagtgattctgataccatgttagaatttaggataaaataaatggaattctatttcaaaactaattaacaatgagagaagtatcccaattattttatatataacaatttatttttacacgtaaataatgtgaaactaactctaataaaagttataatatttagttattgcacactataattatatttaattttcctaccgatcatgcaaattaaataaacaatattattattgaataaatacatcaattttaataattatttttaattatatctgtagatttccaaaaacacatttactagggtttttttttcctattattttcacagttaccatgttccgaaaacaaaagttatactttataaaaaattataacaatttatctacatgtctttaataaaaaa

SEQ ID NO: 81892 - DNA, 3288 bp, Cannabis sativa
taatcacttagggccttacaattttggtattatagctgccaggttgttcttcaaagaccatcaagatatgtacaatcatcatcagagataagctcgactcacgatttagtaagtctttacatgttttaagtgttttgatcagttgagcatgattaaaaaagcgtgataagaagcatgttagtagtttaatttttgaacaagagcatgtctaagtttctatacatcggtagtttgaatacaattttgatcacttcctaataggttgacttatgaatttgtaggcttgtcctatagaatggacgcttggaaaaaataagaagccagggcaatatggttgaggctggtagtggttaggaggttaggatttccttcgcccctataaccaaagaagagtctgttggagggttcatggtgagggttatgttaattcaccacaagatctgtaagactgagagcagaggtttgtaaaagtgcaagccgaagtttagaggcaagacaagtaaatttaaaggttgttgcagcagggttcttttgttgcacatcctcctctggtacctgttgcttatgctccgttgtttccagcagaacaacatcttgttggtaactggatggagccagcgtataaagatttcagggaaaataagttcaagatggtcagcatgatggctttggaggccattacactttcttgaaatgtcccaactataaaatacatcaccaggggtgagtgtaaaggtaaagcatgttgtttttagtatggtgtaatgggacattatacgagggattgtccactatcaaagacgaaagaataatgtttttagtgtggacttacggggaatttaaagagggattgtccccaactagttagggaagaactgaaggaagaggcaaaagccactccagcttaggtgtttgtcattgctcagattgacgttgcaactagtttgtctttggagataaggtagcttctcgttaaatactctttctactttatattgtctgactctggagcctagagttattgataaattgggtaagccttgtgataattatgagatagggtttggaaccctattacctatgggagaattagttatctccaaaaggtggatcaggcctattctggttagagtggagaatagggagttgagtactgatcttattgaattgagtatagcagagtttgttattgttctcggaaaaggcttgactaagtatgcaactagtattgattataagaggaaaaatgtaactcttcaactagaatgtgaagagccatttgtatttatgggattggtttagggttttcgaatactaatcattttagtattgaaagctagggacgtattgcatgatgggtgcataggatttctagcagtggtgttggacactagtagacttaagacaattgggcctgaggacattagggtggtaaatgagaatctagatatattttcttgaagaattacctaggatgccaccgtagcaggaaatatatttcattatttatttagcaccgggagtggagctagtttttgagcccccttatcagatggctccagtggaacttaaagaattaaagttaaaactttaggggatgcttgacctagggtttacctgacccagtgtattgccctagggagctctgatgttgtttgttaagatgtaagatggaacgctatagatgtgtatcattattgggcattaaataagttgataatcaagaataaatatccactgcctaggatcgatgatttgttcgatcaacttcaaaaaaagtgataagtcgatattttatcttacaagtattgtcaatttatgtactaaaattcttaaattgattctttaaattattgattagtgtgattttaatttgttagattattttaaagactaatcatgtatttggagtcatttgaaggaatttttgcacattttggtagaaaatggtggaagccggcgagcttaattttacaagacaaaaattaattgcaaatttcgataaccttggaagcagaactagacttggagctaaacgtaaaagttgtagatttctttctctctttttagaatatcttgaatcgtccaattttgagttgtattgaaaaatttatgaccaaaatactaatctgaacatgcgatagaaatttttctacagcaagtcatggccgtaaatgagcacttctcttcgccacggtgagagcatgattccacatttttccaaattttatctttttttaaatcttaggattttttcgggtatttataggactattagggttcatttttcgggacttctagactacgttattgagaaagaaactcaaagaaaaagagagagaagaagaagaagaagaagaagaagaagaagcttgcggcatcaattgttcatcattatagttcttttcttctccttaattctttactttttattacgattttcattataataattagtttgaagtagtttctttctagttaagggttattttaaaactcaagacatgaattcttgatttgtgataatgaatgttattcttgatttctctcatattaagttgtttctatatttctacttgaatactatgaatattatgaattcttattaggtgtatagctaattgagatttttcattattatactatcatcttaaaattacttctcacctaatagtttaggattctaagtactgtgataatttacaatcaataataatgtcaaaggtattattaattatgatgaaaaataaaacttaagttaaatgagttatatgcttcattgatttgttacctagattaacttatctccatagaaattaatacttttcctaggttacatagattgcatgtttcgtggatctattacttagtaaaaatatttaattattgagcgatttatcttaattacttgtaatagggagattgagaaaattgactactttagcgttttttacggggttaacattttaattgagaaatcagaataacttttgttattattgatcttgaatgattgttgagggtagagattgactcttaactatttcttaatagcttaatctctatctttatttgttttatgatatcagagccttgacccagccagaagtgtggtcgacgaggatgtcggaccccgtaaggggggtgattgtgacagtcagtagtctcgtgatccgtaaggagaaatactgggtaagctgcgcaatctctcaccgcctggggaaggtcaagtgtgatgattttaagactgtgtaggtatgagattgcacaattgaagagagcttaaat

SEQ ID NO: 81893 - DNA, 1406 bp, Cannabis sativa
taatttttgtaactaatacctttagtcacagaccttttagtcgcaacataagattgatgatttataattacttataatttttttacttttagttacaaattttattataactaaaagttaaaaaaatttgtagtgttttacatcaataatattgcatatttagaagaagaaagaaaagttaaaattcatacattacttgaatgtatatgtgtaaactttaagtataacttttttttttttttttacatgttttacttattacttatttatttgtgtttggcctattcggattaaaggaatacccaatattctctaaattttaattgtttacaacacgggcaaaagattttgttggtttgaaatatttgatacatgttaatcatttaatcttttatatattattttctcctaccaaaatgtttctagtctatataatatctctatattattttccctcctttgccaaacatgatatgatatatagatatgattactttctttcctatcatctcaatttttattccaccaaacatataatgattaagctaataattaataaataatataaataaagatacttcaactgttcgaatcttctataaccactattcgtatattaacttctagaatcttattacacttatatattagtttgagataatatatattattaatcatgtatattatataatacaactatatagtaaagtctgatatggttgcattagaaagtgtcaaatgacaatatgtacactataatattgtaaatacatacccaattttttcacatgacaccattaaacacggaaaaatataaatttgaagatgggtaaggaacaatactataaattaacacgacatatacaaaaaatattaaatacaacatgatataacaaacttgaaaaatagtacgatatgcataaaaaagatgatatatgaatagactaattaacgacaagcacaaaagaatacgatacaacacattaaaaaaagcttataataatcataataaatatatatttgtcaattttaaaataataatacttatttcaaaaaaaaaataaaataataataatacttaaatacaacactaaatatcataataattctataattaaaacggttattaaactaaaattatatattaaaattttacacatttcataattacaacgtattaattaattaattaaagaataataaaattgatattgaaatagatattttgtagctatagactagaaaactagtaaagaacaatagtgcaaaaaaataaaaatacacaaaaatttaaggctaattaggatgtttgccccctgaactttgacatgtatcaacactacaacaaaatatactaatagcggcggaccccctccgccgctaataacaggggtattagcggcgga

SEQ ID NO: 81894 - DNA, 1550 bp, Cannabis sativa
tttttttcaaaataacttactaaatagtgaaatcactacaatgttaaaaaataaataaaatgaaaaaaaaaatgataaattataataaaactcatacaaaataccatatcaccaccctaaggtttctcctttacacatataagacacgcatttatatctattctatataaagtgggctatgtaacagaatgttaggtttaacacaatttattgatttctacgttaattttaacagaatatcccaattacttaacagtataaattttataatattattatatatatatttaaaaataaaaattatcacatatataaaatatatatatttaaatcttaatttttttttattttaaaaataattaatgatatcttcgctatataatataaaatgtgctattgctattaagaaaagaaattcctcaattaaaagaatacatcgattgaaatttttaactcaaaaatcctaatttctttttctaccatagagagtatcgattgattgagcaattacttaaacccaaaaatctcttcttcttttttctacacaattgagatcttaaacccaatcaaatcctattttggatcatttgatcaattactgaaacccaaaaatatcttcttccttttttttctacgattgatatcttaaacccaaaatttttattttgcaattctaaatcaaagtaatattatatattttttaaattattaattgtaatttcaatttctttcctctgaaaattcattccttcttcaattccttaattgatgttatcatctatgttttacatacacaaaaagcacgtaaagataaacaccatgataccaaaaaaattaaaattgaatgtcttaatgattcaagaatatactaactgaatctcctgcttaaaagtttcaaaaaccacattacttagtacaagtatgtggtgcaccattgaacccttccacacacgtcgaaagattcactcgcataaggtatccataataatattatatattgtttaaattaataattgtaattccaatttcttttgtctaaaaatcctaattcccatcttcaacatgtgcaattagggttttcttttagtttttattttttgtaatgggttttgttataatggatttgcttgcaaaatattagtgatatgcgattggagatgaccaaatttcaaagattattacaaaatattaactatggcagtttctggtcatttattgtaccaaataattcattgctttcacaacttaaatttctagaaccatattacaattccaacaacaggtgtatctattgttcttattagatttagttgcttacattttcatttatgtttatttattcatttgtctttgtgggtctgagaaaatatagtatattttttttttcaaaaaaatagtatattttataaggacatctaaagcattcctttgatatacatcaaagtattagtttttgaaaacagaacaatatttgagatttttcagtatatatttatttatgtattattattattattttttaaaacaaaactacaaaacagaacaatatt

SEQ ID NO: 81895 - DNA, 1766 bp, Cannabis sativa
tgattatattgaaatgggtttaatttagggcacaaaacccaacactatcatcggcaaacagtaggtgtgtcaatcttctttccaagttaccaaaccgaagcccatgaatcttgttggctcggcttgcttcattaagtaagcaagacaatccttcggagcaaatgagaaacaagaatggtgatagagggtccccttgacgcaaacctctttccggaatgatgtggccccaatcctctccatttagcaaaactgagaaagtgaccgtctttacacagcccatgatcttaccaatccatcgctcatcatatcccaaacacttcattttttcttcgataaagtcccactcaacacggtcatatgcttttgacatatccagcttaagagccatcttccttccattcccaaaccgacccttcttcaagcaatggagactttcgaaaccaagaatggcattatcttgaatctgtctccctttgatgaatgcactctgagtctcaaaaatcactttgtccatgcttaatttcattctattagcaagacatttggagatcaccttataagtgacatggcataaacttaagggcctgtagtctccaaccatagtcggatccttcaccttggagataaggcataatagagtgtcatttaggcagctgcagtccctatctttgttcaagatctacaagcaagtagttatgacctctttgcccacttccttccaatgattctgataaaacaatctgggcaacccgtctttccccagagctttgagtgggtgaatctgatcaatagcttctttgacctcctcttctgtgaactcctccaaaagcatagcattatcttgatgtgtcaaccggtttggaacacactggtttagagtgtcagtcaagtgcggattaggccctgaagaggaaaaaagatccgaatagtagcgaaccagaatatcttcaatctcgctgtcctttttgcaccatctcctttgttcatcatataaaccgcttatcgtgttcttcttttttctttgagaggccctatgatggaaatatttagtattacgatccccgtgggcgagccaaagagcccgacttctttgtttccataaaatctcctccttgtcctccgcaacatttagatctctctcaattatccttcgattcttccaatccgtttccccaactgaagaagaaagatttttcaattcctctttgagttttttagttctagcccttaattccgccttcttatccttgttcaaatccttaaggacctccccacaaagattaatccgccccctaagcccttgaggagatccccaattggtaccatcaagccaaactgattcaacaagttttccacattcctcctcctcggcccaagcttgttcatagtgaaaccaagatctccaactaggctccttgttggagagagattttgaacattgttggcgctaagaatcaaggggcgatggtccgagttccgcaagggaaggagggtgactgaagatgacaagaatcttttgaaccactccgggttagccaataccctatccaatttctcaaaaaccaggttgctttgccgcccattacaccaagtaaactctcccccttccaacctaatttccttgaaattacaataggaaatggctttttaaaagacacgcatctgagagtcttgtttcaagctaccccccttcttctcactggccttaacaatctcattaaagtcacctcaacaaatccaggctccatgtatcatatctcggagtc

SEQ ID NO: 81896 - DNA, 3651 bp, Cannabis sativa
  modified_base (192)..(202): a, c, t, g, unknown or other
aataattaaactatcacaaagcaaaacttgttagaataccataaggcttgaaaatatatataaagaaaaaatttaagtgtcaaaaatacaataattagtggactttgaattgaacattcacatattggacctaaataaatataaaattagtatttttataatgtgcaatgcggtgcggtttgaaccgcatannnnnnnnnnnaaaccgcaaaccgcaccgcactgcgaagtttaggaataattcaaaccgcgactgcaccgcaaagaatttcaaaccgcatattttttgcagtgtggtgcggtgcggacagtttcagcggtttgggcggtttgatcaacacccctactgtcaatggttgaattggggaaaggaaaaatcagccttactactatttacagagaagagaacactgtaattatatatactaaaactaaagacgttaaaactaagaatgttttctattattactatctcataaacgaaaaaagagaaaaaaacagttgtaaaaactcaaaagcaattcattaaatagcaaaaattttttaagagagagcaatttgttgagaagcggaacaaatgaagatttttagcagcagagagaattgaggtgcaaagattttgagcaatggcaaaaatttctgattgaatgaaattgggctttcttgaagatgatgatgatggaggaggagaagctttgagaaatgggaagatagtagtaatgtgtcagagttaggaaggaaggtttgttttgaggtttctgccattgacgaagaagatgagtcgtttggaattgaatccattttttattaactcggccagttaactcaccaagtctctcactaagatgtcacaatgtatatagaaagtagacagggagagagagataccaagcggctagggcaccaagctacgaagagagtgtttcaaagttaaggctgacttttgttttagatcataacaacaaaatcacaacaataataacatagacaaattaataaattatagtaaaaactagatgggtcaaaaaatgttcatcgtccgtgaaacaaccctcaaacaaagatgcttcgttagaggattcacaaagtgggacgacttatgattttgcacactctttgagttcacgggcttttttaaaaacacccacaaaccttcgatatgtgcaaatataaattcatgcataagcgtaaaacaatacagaaaaatcaatacaaaatggggggaaataatatgggaaatagggtgtagtacctaaagatgaaattgcgtcgctacaaggtggctacaaagaagagagaatgagaaagagatgatcttcaagggttttaggaaaaagacttagagcttccttggtatcaaatcccggattcattcaattttatgaatttgaaaatcaattaatcaattaatcaaataatcaatcaatacatcaatttatcaatatcaataactagcggtattgtttaacttttatctttattttattttattttttatcaaagaattagattgcacaaaccaatctttacatcctactagcaccctataaacagagcctaaggaaatctatacaaattcaattgcctcttgctatacttttgtattgtatacactttataaagcatgaaaccaatctttatctacactcttgattttctttggcaaaaacatagaaattcgaagctttaaactccacctaatgtcttcgatcagcctggtggaatttaattgactctcctgccaaataatggcattccttgacccccaaatgttataaaccagggcagcagttgctgcagcataaacttgcttcctgaatttggtgatttttgccttgccaatccatctcaccaattgaggaagactgttggttcttgcattccaatccaaccatctcttaatctccatcagacagtaatcaacaacactgcattcaaagaatagctgctggccattttcattttgaacattacaaaggctgcaactttcattcatttgtataccatatttaaccaatctatcgttggtttttagtctattaagcattgccaaccatagtattacactatgtttaggagtattcaatctagcgcacacttcgtgactttagactaatttgattagaggtgatgtgagcagattgtatccagctgcaatggagtatttctgcttctgaaactctacaacattagttagagtttttatctggtcttttagagctaccagcttcttccaataccagctggaatggaatgcagcagagtagctccaccaatcttgctttttgatgtatatgtacccatgttaaccacaagctttcctgtttatttgatatgacccaaacatacttgcaaatggctgccttgttccactcctttagctttttgattcccaaaccacctgctatttttttactgacaaacattctccgaggctactgcttcagcaccatggaacattgactgccctttccatagaaaagctctacagattgcttctatggatttgaaaacttttcttggcatgatcatcatttgactccaataatcttggatagcaattaaaatcgagttaataagtgtaattcttcctgcaaaagacaggtttctagagctccaactcttgatcctagctgtcattttttcagccaacaattcacacttttcccagaaattttccttacacaaattgggatccccaaataggtgaaaggaaggacatgtctcgagaagccaaatagctgcagcacctggtttacagtgtcctgctgcatattactacaataaattgcagtcttgcttgcattacgttgcagcccagatgtaagtgaaaatagctttaaagcctgcaacatgtatactatacttttgatatccccattacaaaatagtagcacatcgtcagcaaatgctaaatggttcattttagatcagagcacctgtcatggtagttgaaatcttctttctctccaatcttccccattagcctagaaagatattccatatccaaaacaaacagcagggggacatgggatcaccttgcctaattcctctcttagattcaaagaaatcatgtaaggttccattaaacatacgagagaacttaggggttttaatacaattcataattaactgtataaaaggtctcggaaattttaaacctaccagcatctcctccaggaaaccccactcaatggtgtcatacgctttttggagatctaagttgatcatacaacttggcttgttagatttcctactataatgcctcaccaaatcttggcatatcattatattgtgtcatataaatctacctttgagaaaaccatcttggcagtgagatattatctcaggtaggatgtttctgattctagaactcaaaagcttggttgcaaccttataaataacattgcaaaaagcaattggcctaaaatccataatagaattagggcatttaatcttgggaaccaaagtaataattatggaattaatttctttaagaatttcacttgactctaaaaacgataaaactgcttcacatatgtcatctcctataatctcccaattatcttgaaaaaagctactggaaaatccatcagctctaggagattttttcatagggatactataaaatagcctttttcacttcttttc

SEQ ID NO: 81897 - DNA, 1085 bp, Cannabis sativa
cgaagtaacacacttcataattaaattgcaagctttatcactgaagccatttgcctttaacactctgaggaggaaactccattcgattctatcgtacgctttactcatatcggttttaatcgccatgacaccttgttttcctttcttgttcttaaaactgttgaggacctcttgcgccaaaatagaacactcagctatccaccggcctggaatgaatgccgactgggtaggagagaccaacttatcaattattcctttgagacgatcagtgagaatcctcgaaatgattttgtaacagaaattgcaaacacttataggtcggtaatgatcgaaactacaagcattagtaatttttgggattaaacaaataaaggtatgattcaaattattgctaaccgagatatgagcgaagaactcctagaccatctcgcagacttgggctcccacaatgtgccagtactttctatagaatatccctgagaaaccgtctggcgctggtgacttcagcggatgcattacgaataccacatgtttgatctcctcagaagaaggcgttttgcatagatcatcgttttcaccctctgtaacagctggggtgaagagcgattcgaactccctgcctatctccggttcgatcgacgagaaaatctgagtaaaattcttttggaaataatctccaatttcttcacggcttcggagccacctaccttcatcctcaacactggaaatagcgttcctccttcttctaatgatcgttgaagcatgaaagaatttggtattaccgtcacgaacccaaagttcccgagatttctgtttccaaatcctttcaattttagcctccaactccaaaatttccaactggaccgaagcttcaagttctaggtttgagggggaagaagtagcattttgaatcttcaccaagtctgactttagtcttttaatcttgtgctcacaatgaccaaaggaatgtttgttccagaacttcaagtcatgcttcgtagtcttcaagattttcaagagaattccctcgccattgtcaccactcgccctattccacgctgtattaataaccccttcacagtccg

SEQ ID NO: 81898 - DNA, 1190 bp, Cannabis sativa
aataagtatcaggtttgagagaaaataaaattgatttttcactctctctctctctctctctctctctctctcttcaacttacacgcactacacacattagtgtggtgtgagttttctaatcaaccttatctcatcacaatatctcatgagttgagaatatactatggttgtatacactactacaaattacactatttacgtcagtcaacactactattcatagcgttgaccgacgttaatagtgcccaaataattagacttgactatttaaaaccgacactaataatatatgattcacgtcttttgttaaatgatggtaaaaagaaaactgacgcaataaagaaaaaaatttaaaaaattgctttatatttcgcgtctgttggtaacactcgccaaacaatgtttgcgaggtttaaaaaatgacgctaaatacaattgagagagaaagaaacccacgcaaccagtagaatccctaaatcccaaatcagatgcgtgtacttttcacacttcacctaaccctctttgaccttgctctggcgatcaacaggcagccccttcgtcctcttcgaaaccatccactcaagccttcatcctctttgaaactttccacttgagcctctcgagcccatctcatccacttcaaaaatccttcaacccattctctttctcctcttcttaattgggcggtgatccaaccccggtgacctcctcaactcttcttcgtcttctgcttaatcgagcggtgtgttcttctccagttagtttttagcatgtatatttcttttgtatttcaaaaaaattagtttgatattgtgttctgtgtagttttttatctcatactacaagttctctctccatcacccatcctctctctctctcggctttttttatttttggtttcttctctcaataattcatcatctacagctactctgcatagattatcaactttcttcactaactgattcaagaggatgaattatttttgttgagtataggcctttgaattgtagaactccggttactacctgtgcttcactcacaggtatggatttgaggttgcaaaaactgcactgcaaaaaatagttcagtgcggtgcagtttatgcggtttttgcagtttggattatcattaaataattaaactatcacaaatacaacaaaatttgagcaacacttgtcaaaaatacc

SEQ ID NO: 81899 - DNA, 717 bp, Cannabis sativa
acaaatcgcttagagagttaattacaaatagaaatataattatctaaattccaaaagcaatctttcccgttcaacgcattgataattatctaaatttttaagggatttatcaagtgacaagtatgtgttaattcataaaaaaaaataaaaattagcaatagaaagcatataatgtagagtcattcaactacccaacaagattcattcttcttctatttattcatttataatttcaattttgtttaaaaaagaaaaatattcccaaaatatttacttatgtaaatttttttcataatgaaaaaaccatatagaatattagaattacagtttttattttttaaaataatattgatcgggtcaacccgctaacccgtgacttgccaacccaaccctgtcgtgggtccgggtctattttttttagacccggaacctgcgaattgaaaaccacggacccaaaacccgatcaactcccccgatattcagcccttcttataagtattatatttttgtattttttttatcaaatctcatatttcatgtaattttcaacccaataataatttccataacttgtaaacttaccaattttatgatttcccaatattttacccggttaagattttcaactacaagtaaattcacatataattccaaaagctacaagaataacaccaaaataactatttatcataaaattcacataattgacttatcacc

SEQ ID NO: 81900 - DNA, 615 bp, Cannabis sativa
gagatagtttttattttctgttgagtagctctatactcctctgtaagcgatatatattgaatgacgctttctttctctgatatctcattttttattagagattcactttcctcttcttcgctaatatcaaaactacaaaaattagtttttgcatcagttccaatgttggcaaaatttaaaaattgacgcctttgaagaattggtaaattttgcatcagttatgcaatgtcgcaaggttagcatcagttgtaagactatttgcgtcgattatgcatcgacgctaaccttgtgtcggtttataattgacgcaaaaattgcttcgtaaaaaaattaaaatcaacaaatgggtcaagcccatttcacaaaccctaaatatatataacctaccactttcagcctcccccatataccatttaccatttcggaaaccctaaatctaactctccctccctctctctctctctcaccaagcctagcaaccgaccacaccctaacgacgtcgaaccaagcctagcaggagcgacaccccaatcgacacagcgcgcgagtacatttttcactctcatctctttctctttttcgatctcaagcgctccttctctctctctctctctc

SEQ ID NO: 81901 - DNA, 860 bp, Cannabis sativa
ctgtcactctctcgccgttttcctcactcaaggtacagttcttatgtctcgtactcttttcccatgattcaaataagattatatatgttgatttagtttagatgagaagtattcattgtcactgctctgaatggttgtgttgaacacatttatggtgtatgaaaatcttattctttatctaaaagccgctcttttaagtttggtattggattttgagtatgattttgtggaaagtaactatttttcttttttttagcagagtagagttttgggaggttttttaatttgggtatttgggaggaatcatcattttgaactctgtgtttgaattaggtattctatataagtaagggcggtcattttttttgctggaagaaactcaggcaaggcttacatagaacataaatatggatatatatatatatacacacccacacgggtgcttagtttagtttgtggtatgtatgattctggacttttttgcccttttttttggcatcacaattctcttttactgaaggaactagggaaacaaatatgtttttgtggattgctcaatgatatgtccattatttgtatgtcaactccaatgttgtgaaatattttttgtcttttgctactctgaaaacctttctgatgaaaacagtgttggagtctacagttgtaaatgtaaattaggctttgttgcaatttagttattgtatacataggttaagaagagaagtaatagagttgtacattctgaagtataagctttaggcaagaaattaagtagacttcttgctccctttcttgggaagggggatttgatcagggttatttgtgttaaatatctttaatttgtgctgtgatgttttttg

SEQ ID NO: 81902 - DNA, 1167 bp, Cannabis sativa
tgtacctcggggtctttatgcacgtcatcactagatgtataaattcttgtggaaagtcaaaagcttggagaacctcttcaataaaatctcattccatagtgtcatatgccttcctaatatcaagcttgatcatacaattaggactcgagcttgctcttctgtagtgtctaacatgatcttggcaaactaatatgttatatgcaatgtaacgtccttgtacaaaaccactctgattttgtgaaatcaaatccgacaacacagttctcaatcgagagcaaataagctttgttgtaattttataaagaacattacaacatgcaattggacgatactcacttacattagcagggcatacagtcttgggcacgagagtaagcactgttgtgtccagttcttttagaagtttccctgtgtgtagaaaatcaatcacttccttggtcacttccttgcctactagatcccaattatcttgaaaaagtaactaccatatgcatttggaccgggagctttgattctaggaatagcaaagaccattttcttcacttcttcctgtgtaaattcagccaataacacctgcctatgttgacttgtaacagtcttcccctgtatgatgatgcttgctctcacagctcttcttccttccaatttcgagcccaaaagatccatgtagaaattgagataagcattacttgcctcctcaggtttctctgtccaatttccatccatatccgtagtagaaaaaattctattagtggttcttctagcccagattgaagcgtgaaagacagcagtgttatcatctccatctttgagcctagttactttggctttttgatgaagaaaagataacattgccttatgaatggtttggtaattcttctcgctcttgtctccttgttaattagatctgtctgaagtggtgactcttgtaattttttttggctctcaatcatctcttgataggctttagcatctctctgttgaatgcctgaataacccgctttatttatctcttgaagaacactttttaatctcttcgacttttgcacaagacagtacattaatgttcccctaattggtacttcacagttaatcttgatcttctcttgaaattctggagctttattccacatacgaaagtactgttggagtatattttaccaggat

SEQ ID NO: 81903 - DNA, 992 bp, Cannabis sativa
taattagcattttcatttagtttggatgagtaattaaattttatattattatacgtaaaatatttatgtatatataaaagttaacattaaaattttactctttttttcctggaatgaatggatccaatccaatccaatatatactggacctaaaatattaggcctaaaaatattggatgtggtccaatgaacactcctatttattatattgattttttttttctattcttttaatcatatttttgtataaataagggtccagcctatattgaaataaactactgaaaaaaaaatctatggagtctcttattttattcttctctttattttctttcttttcctactctttatctattcaatattattttgtagtataactatattaataataatatataacacaaataattagtgttatcgttatactcgtaagaatttttctagaaattattgcatggataataacaatatttaggtaataatactagctagtagtgataatacttataattattataataatatatgacaataatgtaatgctttcaataaagacttgcactaaataataatccccattttcattcatcacattgtcaagtgtgttatgttatgttctagtaatgatatgtagaatctagcttcaatcatatcaattgtaattttcaacgttcataggtattattttatgccatttaataattatttatattactttgattttatttttaaacatattgcattattatttctttttaaatacttaagtatatactttaacttttggttacaaataaatatttaaatttaatttttaatgacggttaactattaagtaaattatcatttggtaattcctgattaatttaagttattaagttttttattttttatttaaaaattaatttaaatatactaagaataaataacaattgaataattaagttattccctccattgtgagttttgttctcaatatagacttgcctata

SEQ ID NO: 81904 - DNA, 554 bp, Cannabis sativa
tttttttttttaattttgttataagtagttttttttttaaaagaaaaaaacacacaaatatcatgatctcattaactactatttttttttttgaaatataactagtgctactattttttttaccattagaaaagtaactctatttttaaacctatggttatcacgtgcttcgcacctgaccgcataaactagtaattagtataattattaattagataagagttgaggttgtaggaggaagggttccttaacaaaagaaaagagaagtaaaaatgccggtgaaggtgttagacgcgagcctctccaacttcgatagcgtgtttgagaaattcaggtcagaagcatcctcacctaaattcatcctcttcttggctgacaatgatccctctacctctcttagttggtgtcctggtaacttaatctctttctctttaattatttatgcacactttcatgtttttcaaccaaccccatttaatcagattcacaaatctcctatcctatcaataccatttgtattaggtaccatcaaatttaagttttgacttagaata

SEQ ID NO: 81905 - DNA, 1041 bp, Cannabis sativa
gaaggccttgcttcggagtaagtttcgtgattttattttaatgacaaagctgataattaaattggtccattaattaatttttgtagctaatttatttgatagagctatataatttgaagaatattgttataatataattggggttaattaatgaatttttacagatacatagatccaaaaccggaaatatcgatctttagagaggctagttttggacatgggcaactagagttcttgaatgggagccatgctcagtggacgtggcaccggaatcaagatgacgtggcaatcgcaagtgactcagtttggtttacaagcctctcatttgacccttcttgtaaattgtaaacccaattttaatatatagctagttatatataataataattttatgaagctttattagatttccctcaaaaaaaaaaaatgaagctttattagattatatagactatagtagtagtgcatgtatttgttttggaccacttttagtttatttcttttcttttctttatttgatttttttgctgaaacacatttagtttatatttggttatttaattatttatttacgtccttttgaggaatgattgattgaagaagcaaacaatttaacattattatatgtttaacatattcgattgatctacatattgatagcaaaataattgggtgataaacttataatattggagagaaacaaaactaaataaaaacgtattttctaagatttttttcccctacaatcttagaaaatttataccaaagtttttatttttctatgtaccacacataataatataggattgctttgtacaatttgtaatttgtaattacaaactccaaccaatctggactaaggattattcatatactagtttttattttttttatttttttttttaatttacggtttgaattgtttggtaattcctatatgagttgttatatggatttataagaatattttttatttaaagaaatatatttctatttaaagaaataaataaataattaattttctgataaatgaatatttta

SEQ ID NO: 81906 - DNA, 1514 bp, Cannabis sativa
cgggttgaaacaggcaccaagagcctagtttgagaagctaaaaaaaacccttctcgggtggaactttgtaaattcagtagctgatacatccttgttctttcgcatgacagacacgaccataatctttgtcttaatttacgtggacgacatcattataacagggaatgatgccactaaattaagacagtttatcagtgacttaaacaaacattttgctctcaaggatatgggaacacttcacttcttcttgggaatagaagtctttcgagatgatactgggatgtatctaacacagaggaaatatattactgatcttctccacaagtatgatatgctgaatctgaaaccgtgtcctacaccaatgatctctggaaagcctctctcaaaaactgatggtgaacttctgcagaatcccacagcctacagaagtataattggggcactgcaatacctgtgccatactagaaccgatattgccttcgccgtcaacaagctcagccagtttcttcaaacaccaaccaccagccactggagcagtgccaaacgggttttgaggtacttaaaaggcactattgatcatggtcttcacattgttccttgtgacagattgtctattgttggttactcggatgcggattgggcatgttgtccagatgataggagatccattgctggttattgtgtttattttggtgatacattggttgcttggtcttcaaagaaacaagctgtggtgtcaagatcaagcacagaatcggagtatagagctcttgcaaatgttgcctccgaaatagcatggattgaatctctgttaaaggaattaaaattcaaactcccctgtacctcagtgacttggtgtgacaatcaaagtgcaagtgcacttgcatcgaatcctgtttatcacgctagaacgaagcacattgaattggatattcatttcatcaaagataaagtcttgaagaaggagcttgaaattagatatattccatcatcagataagatagccgattgtcttacaaaagggctaaccaatcatcgattcagatttttcattgacaaacttgggatgaaatcatcaccccttcgtttgaggggtggtgttgagaattgctaattcccctgctgcactgatctggtgtctctgcatcacaggcaatcattgcctctccaaagttgttggaatataatccacctgtgatttcatttgttgcttttcacaattctgttagagagaatattctcttttcatcatgtaatgacacttgtcaatattttcttaggtttattgtattcctcttctgctatataatgaaatacactcctcagacttaattgagctgagttttcccaaattgtcattcttcctattttctcactatgagcattagtattcatatccctgctataacaaaagcaacgcgaaggctagaattaaaggacaaagagtttttaacatctacaagcaaatcatcaaaaacactattattccaattacaattattaagtttatccac

SEQ ID NO: 81907 - DNA, 1242 bp, Cannabis sativa
  modified_base (491)..(491): a, c, t, g, unknown or other
cttctctcacgaaataaaaattcatcgaacaacaacaaatataaagttatatcattcaaagtttcactattaaagcatcgacatagcaacctcaagctcttcttacatacaaaaggaggaaacaaaaataggggaacttgatgacaactactagactattttccacacaatagacaactaagaaatcacagtttgtttttcatacataaaaagaaaactaaaaaatagtttgtatactatttgattgctctaatctaaaactattactctgttatataacagaatcatggaacctttgttagtggtactttactacaatagaaaatttgtagataactatttgtacacagattaccaagtcacaggtacactgataccaagagctttctcataggacgatctaatacattacctacatggacagagtatgcactcacagttgctaactacatcacaaaaaagactagacaagcactcaactcaagctgggnaaataaaacaaacatcatcaaagagccatggattgacacaataagagatgggaaaattttccaagacaaagaaacagtaaagcttgccatgagtctatatgcaatcaaaatgaatcaacaacacatggtaaaaagatcatcaacaatagactacagcctaatgtgtgttgatataaattgtaaatggtatttcttggcaacaaaacaaggaaaaacaaatttgttcaaggtcagaaaacttataaaggatcatacatgctcaatagaatgcaaccatgacgatcaccctcaagcaacaagtaacatcatagctgactgcatcaagagaaaaattagtaatcccaagcgaaactacaagccaaatgaaattgttgatgatgtagcagaagactatagtgtgtcaatctcttaccaaaaaagcttggagagaaaaagaaaaagctacatgcaaggtaataggctgcccacctgattcatacaatgaaataccaggcattctacacatgattcaaaaatgcaacctaggtataaatcacttcatctaatgtcaaatttatacttaaaaagaaacatattaatagctctaacatactctcatgatcttgcaggaacaaaaataagcttgtccaacatgacaatgggcattttaagtacttatactttgcattaggagtctcaatacaaggatggaaacattgcacacccttagttgtggttgaagcaactctctttaaaaatgcatatggaggaa

SEQ ID NO: 81908 - DNA, 3018 bp, Cannabis sativa
ccctactgttctgggcaatcccaccacaaaatccatggtgatgtcttcccacttccattcaggaatcttcagaggctgaagcaaacttgccggtctctgatgttctactttgatttgctgacaagttaaacatctcgacacatactcaacaatatcactcttcatacctgaccaccagtacaaggtcttcacataatgatacattttagttgtccccaggtataaggagtacggtgtggtatgagactcatcaagaatctcatgtctgatatttttatcgactggtacacaaaccctgcccttataccgcaacaacccatcagataaaagtgaaaagtcttttactgacctgactataaacttctctttatacccctgtagctcgaaatcattctgctgagctgtcttgattctttccaataaatcagactgcagggtgatgttagcaagctttcctgactataaattcaacatttgctctaatcatatcttcagccaactctgctgaaatcttctttaattcatagacttgccctgaccccttttgacttagagcatccgctactacatttgcttttccagtgtggtagagaatctcgcagtcataatctttgatcagttctaaccatcatcgctgcctcatatttaagtccttttgagtgaaaaagtacttgaggctcttgtgatcagtataaatctcgcacttttctccatatagataatgacgccaaactttcagtgcaaaaatgacttctgctagttcaatataatgagtaggataccgctgctcatactctttcagttgcctggatgcataagcaatcacttttccaggctgcataagaatacaacctaaccctatttggatgcgtcgcaataacttacaaacttttcgtcactgaccgataaagttagcacagtagcggtaattaatctttacttcagttcctgaaaactactctcacacctgtcagtccacacaaacttgcagttcttccgagtcaactctgttaagggcatacaaaacttagcaaacccctcgacaaatcttctataataccctgataaccccaggaaaattctaacctcacttgctaacttaggtcgaggccagtcctgtgctgcctcaattttcaccggatccaccaagatgtcgtctttacttaccacatgacccaagaaactcacctgagacaaccaaaattcgcacttcttaaacttagcatataagttatgatctctgaggcgttgcaacaccatccgaagatgtctttcgtgtgtcctttcagtatctgaataaattaaaatatcatcaatgaagacgataataaaatcatccagaaagtccttgaacactcagttcatcaagtccataaatgctgacagggcgtttgttaatttgaaggatattaaaaattcatagtatccgtaccgggtccgaaaagctgtttttggaatatcctcttcccgtatcctcaactggtaataaccagatcgaagatcgatcttggagaagacagtctttccctaaatttgatcaaataggtcatctatccttggcagagggtacttattctttactgtcaatttgtttaactcacggtaatcaatacacatccgtaaagttctgtccttctttttcacaaacaaaaccggtgcaccccaaggtgaggtactcagtctagtaaattttaaatccaacatcccctataactgaacttttaactcttttagctccgcaggtgccatccagtaaggagctcttgatacaggctctgctcctggtattaaatcaatctcaaaatcaatttcccacttcggtggtaaccttggtagttcctctagaaaaacttctataaattctcgaaccactggaacatgctcttgtcccgttggtggttccttagtagtatccactgcactcgctaagaaacctcaaaatcttccaaatttaactctattaggtcaaccgataactctcttccttccacaaatattggaagggatcgaacccacatgctagagataaccagctctctagtaggcagtaaagttccaaagcctcttgaaagtacatcactaggcctactcaagttgtcaattactctacttgaaatataagaatgcgtcgctctaaagttaatcaaaacagtcaacatagtaccagcaatagaaagctcaccagtaacagtggaagggcgagcatcagcctcggcctgagtcagggcaaacacccgagcaggaacaggtgtatcatccttcttttgttccggtcgctgcaactgtgggcaattcctcttcaagtgacccactaccccacattaaaaatagcccctggcctgatactcgccccggtggtgcctcttgcaccttggacattcatgaaaagcctgccagttgtcgttcccaccacgacgaaaaccttggttaccttagaatctgttgttgggcctggagctgatggttcattagaccttttcttgcgatcaccaaggtcattacccctactagaactagcaccagatgtctgcttccatgaatctcttctcgcaatattttcctttcgtatatgatcttctgcaccctaagcagctagggccaactcaactatctgtgcataagtccgaacaaacccaagttgtttggccgcaactatcacatcccatgtaatatgttcgtccaatccctgaataaaattttcttttctagcagcttcagtgaccacttcatttgaagcaaaaatttgccaatcgatcgaacttagtggcatattctgtcaccgtcatgctggcctgagtcaatcgtataaactcttctacttttgctgcccggatagactcattataatacttctcgtaaaacaatgttcggaaagcatcccaggtcatgttattcaggtcatgaccctgagacacaatctcccaccagaatcaggcatcttctcgcatcatgtagatagcacatctgactcgatcattattctcaatccgcatgaaattaaaaatggatgttatcata

SEQ ID NO: 81909 - DNA, 1421 bp, Cannabis sativa
gtcttgacaaatctcataaattgtttttttctaattcaactactactcacaatgcaccattagaatgactttcaaatttgtggggccctgctcttataaattcttgcaatggttacaggtatcacattagttttatggatgcctattctaggtttacctagttttccttactcataactcgtgatgaggctctacttacttttaccaaattcaaaactcaagttgagctacaattaggccaaaaaaaaaaaaaaatatcaaaactttacagtttgattggggagtgagtatagagctttcattagtttacttgagagttctggaattgtccataggttagccctccctcgtacccctgaaaaaaatggggttgttgaaaggaagcataggcatgtagttgaaaatggatcaactctaccttcccaagcttcacttcctctcaaatattgggatgagtttttcagaactgcctattcctactcttaagaactctacaccccttgaggttttgttccataccacaccagattacactagtcttaaagtctttggatgtgtttgctatcctaatctcataccatacaataaaaaaaacaaaaacaaaaaaaacaaaacaaaaactttaatacagatttatacccctgtctttcttggatatagtatagctcacaaagggttcaaatgtccatccaaaagattttacatctcttgagatgtagtatttgatgaaaacacctttccccatgctaatagctctattgcttagggtatttccactgagttttcatcttcatctctgattggtgttcctcccttgtcttccctgcttcaagtcaacaatgtttaacctccaacaacaccactcattcgccctcctctcttataaacacctcatgttgttccaacttaaaccttcccaaatgctcttgtcccagaatttgcaactcgatctatggctctcacttctcctcctagtccatcaaatatagttgccacaaaaaatcttattgatgtctcagtcaaattttctcaagctattcctaactctaatactgttatcaatgttcctattatgcatgttattactaatgatttgcctgcagccatttcaacagtgcaacctacatcaactcactgtatgaccaccagactaaaagcaggaataaggaaacccaaagctttaatggctatctgtgaacccaaatcagtgaagacaaccttgcaagaacctcactagtttgaggcaatgtccacataaatgtttgctctcaagaaatacaaaacatgggtgttgattcatcttcctaacaataaaacatttatacgctgcaagtgggtcttgagagtaaaacaaaatgttgatggctccttcagcaagtacaaagcaaggcttgtagcaaagggattccatcaacaaactg

SEQ ID NO: 81910 - DNA, 1202 bp, Cannabis sativa
cctaaaattattcttaaatatcaatattttctcccaaaaaaaatatatattaagtatattttaaataattatacagattggtttggtttaaaccgctactgaaatttctgaaattgtgaccgaactagagatttttaaacggattgaccaaatcattcacaccggattcatttggttcggtcttttggtccggattggttggagtttggaaccacagagtacggattaaatgatcatccttaaatatatccccttgaaatgggtgcagtgatgcacccttacctatttcggtatctaaaaaaaaattttatgatcgtaaacgttgtagttatttaatatatttgacaaaattttgaaaaattcaaaataaaattaacacgtcaaaaataagattctaaaagtttgttgcacacgtgatttttttttactttatatgcaaataaaattagcagtttaaacagagaatatatttttttttaaaataaattttaaaaaatactttaaataactatatcttacaacaaatataggatcattataaaaataccaaaaaatacatgtacaagacatttattgcattgtggaaatgatttaatacatcctaaccacccactattggccggtcctaacatctaagacaaaatcaaattttggaaatagttgaattgttattatttaagagaaatgctaaaggaccagtagtcctatgtgttaatatcgttattggtccaactaagacgcgatatatcgagatccaactaagacgcgatatatcgagaaagtgctaggcaccgctagttcctaatagcaatgctcattatttaatacaaataatactttgattttgctagtattttcctacaaaatttcattactaatattcaatgctatccttagctataatccgataatcagagagcccattacaatggctcatgtctcatgatttaactaaagtttgagatacacttaaatagagagatgatttaaattggagatgatctacatccacttagctttttcgaaattaaaaattaaaaacaaaacgtatcaccctaattttcgtttttgtttaccaaaatgaaatttcaccattgatttgataccaattttgatcatatctttataactattttatatccaaaaaaaacaattacaaaattaaacctttccttctcccctccataattcacaacccaaag

SEQ ID NO: 81911 - DNA, 1601 bp, Cannabis sativa
aaatataataattttgtcaaaaaaaactaaaaaatgctaaaagcaaaaatctaaccaaacaactcatgaatattaaaaaaaatatttatcttatcttacgattttgttacaatcgtatcttcttttagccatcacgtgtcaactcaaaaacacatgacgatatattattagactatgtactaaataagctaaagaaatatatcgtcacgtgtttctgagctggcacttaatgagcttaattgatacttaacagccaaaaaatagtacaactacaacaaaattgtaaaataaagtacttttgccactattttttttattaaggtcatatatgtaacaattacaaatattaaaaaaaaattagcgcaaatatccctattaaaaatcataaacatggcttaaaagttatagatcccactactttttcatttatttgtaatttatgataattatcacttacattatataaatttgaagccaacttttctatcaagtaagtttgagctaacatgttatcaaataaatccgatacaaatgtaatgtgtgtataatttaaaatataataataattcgttatacgtgtctaactaattcatagtataattatcacaatttgatagtgaaatactatcaactaagtctttctttctagatctctaaataactatcgttcgatttagctacgtacataattctaattagacttagtctgctcatcaaaaactttaataaactaaaaaaattcacacttctgcttcaactaaacttaatacacgtagatattaaatctattagctattgatcacttataggctaatgcaaaataaaattatccaacaattcatattttaataaaaacaataaaaataaatataaactaaaataaaaaagtctaataaacttttcaataaagtttaagctaaaatttacttatgcattacatattaagcacccaccaccaagttggtttacatgttttctctaaattaaatcaaggttacatcataataatattattaagttattagagaactttatgagtaagatggttagtaaaatgtaatgagaatgttttatttctcaaatggggaaattataataaccaagaaaaataatttgaaatattgacactaaaataatttgtgtgaaaatgtatgacccacttaaaatagacaactaatcacattgcaccaaacaatacattaaaattagaagaactctttggtatggcataaaggtgatagagaaatcagatgtagtggtggggtctaatgcttgagactgatgttataacaacctttttttgtatagttataggatgatacatcactatcaaagggatcaaaaacaataagcaatttttccattttttttatctctctttatatatatatatatatatatataaatatttagatacttatgcaatgcactcttaagattcatccatgcatttagtatttattttgacatttgagagaatattttagtttaattatttatcgtctatgttatagtgatttaagacattctgtaaaattttgagagatttagaaaaaaaatataacacactgaaaaacaaagttaaaacagtttgttgtacg

SEQ ID NO: 81912 - DNA, 1445 bp, Cannabis sativa
gtaggaatcataaggacactagaactgataggtgatcctaaaaacgaactaggccctatagtagaattcaacaaaccagtgaaagtatacgattgggccaagaacggatttagcgtcctttgattaggagggatagaatgcggtggcaattcagagatggataaggcaggaggatgagaatagtcaaaagggccagacttatccatagatttttctttccccctaagaaggatggtataggggctagttggtggaacaggattttcatcacattcttgtaaataagcttgacaaaaccttctggtatgatcaagcttaccacaataaaagcaaaaatcagggagtctttcatacttaaagtccaaccatttggtaaattctctacccatctttaggaaacgaatgttaatacccctcctaataggtttattaacatccaaaagaaatctaccccttagataaggcccagtgccttccttaatagtatcctcatcaatttgaataagatctcccaaacccgaagctataagcttggcaagatcataggacttgcagcgaaaagggatgccatacacttgaacccagaacgggatataatgcagaaggtcagcagtaataagaaaggagtgatttggagatgcaaaaccagtcaggctttgagcatagtgccaaggctgcccatcaaggattctcttcttgtcaccctcacaaccaaaagtaacaagaaacaatccctctgagtgctcagaaacaacaacaggaaatcgacactgagaagtccacatttgcgaaagggttttcatgagggagggatgactaaagggacgaatggtaaacaaacgcatgagaagatttatggaggggtgagaatcgtcaggaatatcaggaagagtgaagacatcactctcatcgggagtaacaagggaataggagctgagttgggagtcatagccatagctagaaaaagttgcagaaaaaaaacagataagaaaagggaataaagaaggagatacctggagttgtagcctaggatgcactttaaatagaaagaaccaggaagtccacagatcagcacctctacgattgcaggtcagagcctccacttcactaggagtagatctcatcatgggatgagatctttgagcttcacgaaggccatctttcttccttgccgccataaatatgagataaaagggctctttgagaagtggaatgatttgatagccaaagattaagagaatttgtgagagcagagaggaagataatgggggctgaaaaggatctaagtgattagagaagtaattaatgtagtcagaagggaaagaaaaaacaaaaaaataaggatttaatagatgaaaagcattaaagacacatttaatgctctgaagataatcataatagtatttgattaggagatcggggcaccagaaaccaccacacaactc

SEQ ID NO: 81913 - DNA, 623 bp, Cannabis sativa
cgctattgtcgacaccacttttggaggagtacgtcacattagcaccgtcccccaaatctcttcccacagttctcaggtttggttgggaaaacttcaacgctagcagccaccattagtcatttcccacaaataacaccaacccataccgctgagagtatggtgcaactgacaacaacacaatactcaacaatgtaggaacagatgcgagctctgcaagctgaggtcgtagggatgaattagacctagaatagcatcccaccatgggctcttgccaattcacgatgtacgaataatgaggtatgtaataacactagtagacgtcatgatgaatgtgttattgtattcaatggtcgcgagtattattgggttggggtaagagttttttgggttggggtaatttatatgtggattatttgggttgggattagattttttgggttcgatttttaggttggagttcgatttctggttggggttcgtgggggtggggggttttatttttaggaagaacgaacgaagaagaagaagaaacatgattaagaaaaagaaaaaaaaatatattaattattttttaaattttttttcttctgatttttaaatattttaaactatttttttaatat

SEQ ID NO: 81914 - DNA, 1279 bp, Cannabis sativa
  modified_base (1179)..(1197): a, c, t, g, unknown or other
atagagataaatgattgaggcatcatttcagtaattaaattagtttactgaaatattatttttaggaatctaagtgttttaagaataaaagacattgaatggtagaatggtaaatttatccctatactcgttgtagatcatctatagaggatctttgactatttgaattataacaatagataattcatagcgtatctatatcttggtacatatagagcgttctatataattaagagtacaattctgaatctattgttgtaatgactacataatttagatatggattattgagggctttaaaaattaataattattattattgataattatatgtgaaagttcatgttaaatgcaaaatgtattatttttataattctagctcggtggcgatggaaaatacaacgaagtgttattttagtcacatgggtaaatatagaaccttttgttatagagaaatatgttatgtaagctcaagtggtgagtttaggcggggttgtggtattagaccttttacgtattttcttaacatgaagacatgaaatacgttacatactgcttataatgctagaggcaagactagacgatactctaccaatctaaccttttcgagaatctcaaaaagcccagtgaatctagggcacacttgccatttcttcctaaaacgtttaacccctttcattagggatgcctgtaggaaggcatgatctcctacctgaaattccatgttttcgcgctttgaatctgcatagctttattgcctgctctgagaagcaagcattttggccttgttcttctctattgcctcattggtccgatgaactaattccaaacctaggtgttttctttcttcgatttcatcccaataaattggagatctatatttcctgccatacgacatctcaaagggagccatccttatcgtactttgataactattattgtatgaaaaatctatcagtggtagatacttatgccatgagccttcaaaattcattacacatgcttgtaacatatcttcgagtatctaaattgttctctcagactggctatctatctgagcatggaaagttgtactgaattttagctttgtacccatgcctcattaaagacttttccaaaacttagaggtgaacttagaatccctatctaaaataatagacttatgtgacagtcagtagnnnnnnnnnnnnnnnnnnnaaataccgggtaagctgtgcaattcgacaccgcttaaggaaggtcaagtgggatgattatgagactatgtaggtatgggact

SEQ ID NO: 81915 - DNA, 1177 bp, Cannabis sativa
tttacaaagttataaatcttctctagtagagcttgaattattatagaagggtttttacacttttgtaaaacaactcctccaccccagagtaaccaccatctcaaattcttgattgagttggggtagatataaggataactaatatacagttccttaatatctaacatatagagcactttcataaatcttgcttgagtatctcctaacgttccttatttgattacatctcagatagctcccactctataaaaaaattgcaatcatacacctttgaaacgttgcaagtgcattacataacccaaaagatatacgtcgataagcaaaagttccaaaaggacatctaaaagtggtattttcttgatcctcatgtgctatcaagatttggttgtatcccaagtaaccgtcgagaaaatagtagtagtcgtgaccagctaatctttcaaccatttggtcaatgaacggttaggagaaatggtctttactagtgaggctattcagttttttatagtcaatgcacactctccatccaatttagattttagtgggaatcaattcattgtttgaattcttgactacattaattccatacttcttaggaacaacatggatcggactgacccatgaactatcagaaatagggtatataatacccacatctaattatttaagaatctcttctctaactacctatttcgtgtttggatttagccttctttgacactcatgtgatggctttgtattttcttctaaatggattcgatgcatgcacaccaaaggactaattcctttaatgtccgccatggtccaccctatggcttctttgtgactcttaagaacttgtaccaatttctcttcttgtttcttgtctaacgcagatgcgatgataacagggaaggtttctgactctcctataaatgcatattttagatctttgggtaaaatctttaaatctaactttgatggttcagggagtgactgtgattctaagtgcgtaaaaggttcaattgattcaactttggtgttccactcttgtgtgttttaatggtttagactctggcaaataatttacactatcaaaagaactttcaaaattcataccaaaatgacttacacaattttcaaaagaattatctttgtttagcatgaaatcttgtgtgacagaatcaataaaatttac

SEQ ID NO: 81916 - DNA, 715 bp, Cannabis sativa
ataaatataaatagaaataattgcagcatagatctaatactcactttttttttcttatcaaactctaatactcactatgattgcacttaatttctaaaatttaaattttagcagtaaaatttcaaaattagtaaacggttaacaatttacacttttaatgttattttagatattaaggtgtgatgttagagtatacatatataataattttaaaattttatttaaaaaaattaaaaaaaaattgtaaataaaaattaaattttatataatttaaagtaataatttaagacatatctccatacctccaaaaaaaaaaaaagttataaactactagtgccaacaatgctctttctcaactatttaaatctgcttcctagaaagaaaaagctaccatgtatagcaaaacatctgtttatagggaaatgtgctatatgatatggctcttcctatagtatacctccctctctttatgtacatttatttaaacatctatgtgtctctctgctttttctgtgtcaggatatatgcctttgtctctgcacacttttacccatgtacaaattaacatgtactcgtgtgtgttcaatatttaatagttatatacgtatttcttagctgtatgtatacatatttctttttcagataacagaaacagatacttataattagtaggatactgtatacatatttctaatattttccaccatcgaaattt

SEQ ID NO: 81917 - DNA, 752 bp, Cannabis sativa
  modified_base (157)..(158): a, c, t, g, unknown or other
atatgataaaggtttctatgtataaagttatttggttatggttataaaataaggtgtgtcatattgctaaaacttaaaaaatacattaatggtatgtgtgatattatgtgttattgtatgataagtatttccttgctgagcttttagctcacccccnnactttccccctacaggtattagactggaaagtatgtatatactttgagcggctacggacgggaaaataatctagaacgccggtggtgtctgttttattttaaagcagttgataaatctaaacacaatggaaatgtattatttaaaatgatttacttatcgtattttgttttacaaatgaaggatccttctctattgcattttgatttctaaaactcattattgtattttaaggattttttttatattctcaaattatgcatttaaaatagtatttttgtaaagtaaggaaaaaatatcgggacgctacagttggtatcagagtcaatcgttcgttagctcgaagaatacccacagtatacatacagaaaatcgaaaaagacccctctcactatgtcgtcgtaagtattctatgattagttagaatttatgctgataatgttgtatagctttcttgaactagtagcttcttagaattagtgctcctatggatgttttacttagtgaattacaaaaaaaaaaaatcttctacgtatagatagcttatgtagataaaggaagggtagcacataagaattgtttggtccatactcaag

SEQ ID NO: 81918 - DNA, 569 bp, Cannabis sativa
tcaatttttttttcatgaatcgaatgagatcgaaacattcagctgtcgaaggacaaactatcattcccctttacttgaaagaaaatgcagtgtacgttttcataattatactcaagtaaattcatgaaaaatgcattatatttgttactgtgattcagttttgagcaatctcatttatcaatgagtcatatcataaatatctcaatgttaatatgcttgaactgaataagaattgaagaaatttttgtcaatttttcaggtttgtttggaaggaaataaaacttttttcatataataaagtgcattagtaattaaatgttaataaacatatggattgctatatttattggcagttgatttttttaaacttttcctttaatttaataatcatacctttttgtctaaatttaagaaatagatttagggcgtgtttggaaagccacggtgtaatggaatttgtgtacacaatttgacatgtttgtttgaccatgtaattacattataatagtgtaattggaggtacttgaggagttctaatcacactcaccaatttttatgaccttcatgag

SEQ ID NO: 81919 - DNA, 675 bp, Cannabis sativa
  modified_base (27)..(41): a, c, t, g, unknown or other
tatgatatataatccaattcaatatannnnnnnnnnnnnnnatacgacttaatacggcgttccaaacgagcccaataaataacacgtattagtttattgtattataatgtttataaaaggtctcgggtcaaccctgatgccagccccaaacttcagattcggacccatacatggacctggatcccgacgtagacctagacttgaaccccgaccttgacctcgatcctgaactcgaatttggacccagaccacggaccccgaccccgacctcggatctggacccaaactccaaatcccaaccccgacctcggatctggacccaaactcgaattttgatccagacctcgaacccatacccaaactcgaactcggctccaaacttggacccagccgtccgggtttgagtccgggtctggggcatgtttcgagtccagtgtctccccaagtctaaattggggtatggatctagtttaattataccttactaatgttattgtcttttatctatttcaaaattcacaaatgtcctcattccatttgatcttatgaaattctttcaaataataaaatactatatatatatataaaataaataagttactcccaaattttaacacttttttgggaaatgataagactttttttatagtacacctagtgggatataattatatg

SEQ ID NO: 81920 - DNA, 1908 bp, Cannabis sativa
cccaagccaataagttatggatgaaaacttcttggtttttcaatattacttacatgtggcattattctcttagtttgtgaagattacatgcatagggaaagcacgtgaggcctgtatttgtgaaatggcaattgatcatgtcagcaagtacctcaaggcgaatatcatcatatcaattacctcgattccacacatctattaaatgctaaccctttcgattcctagattgttcgatatagttatatttcctaagatgcagtctaaataattgatttgggagcgcgtggatcaccattttctttataaataaggcgaaaatcaacctttaccattttcgctcattttgcattctgagtttaaattttctacacaaagaagaagagagaaaaaaccaaaaccatttaccacttttgatcattttgcattctgagttagaattttctactcgaagagggagagagaaaaaaaaaacccaaactagttctggtgaatgttcatttattttgacgagtgtctttgtcttcttctttgaattctctaacgattgaacccagacgcatcacacccagaccttacaattgatcgctcaaaaccattgagatcattgtaattcaatctagagttggtcatctcgaccaaacccctactgccataccttcaattcagtcaacacacaacatcctaattcctaaccaagtaccttctctttcaacacgtaagtactcttttgcatttcttgaattttttggattttttgaaatatggtttgatttgtgtaagacaaataagttgcatgctagtgtattttttcaattttgattttcctttttatatttgcatgtctaaggtgataggttacaattaggatttaggcttatttgagcaatttgaacattactcgaaataagaatgttgatttatccctatactgcttgtaaaataccttacattttgcaaacattgttttctttttgtaaatttttgttaagtaatcaaattcagcaaagtgtcttcaaacttgattgagcttaacccatttgtttggtatccttattgttttggatgaagtattttgtgaactttaattaatctcctgtgttcccgatctgatcatcttgaggcaatgttccctgagaatcttactcacagatgtaggggccagtggggacatcttaaagcagtttcagggaaggactcttccgtaccatttctatatttgttagtgtgggtattaattgcttggattttcttattctttttcagtttcttggtcgatgcaatccaagctgacaaggtagagattatgtgtaataaccaaaaatattttgttattattttctactatgttatatgtatatttattttattattatcattagttaactcgatgtggaaatagttgattgcttagaataagttatgtgttccttaaatagtattttcttaaattatgaaaattttgtcattttgataaattagacttttatagattattggcttagtccattaggtgttggacttatagaattaggatgtaacattactgttattatcacaagttagtattaagtaaatattaaagatagtagcatatcactctaaattgtaagagagtagtcatagtagtagtactaaggtcgtacaatgacatatatatgggattgggttggtctcaatatttcaaatgatatattatatgaggaataatatttaattacataaagtgtgcatgctagtctatacctaaagcaatatatcacttaaagtaagtttcataggtatatatgttatgaaggcaattcaaattttgaaatttgaattttgggaacgtctagtactaagaaatggacttagtagatatagaagtttggtgaaactagttatagctagaatttgttggagaatttg

SEQ ID NO: 81921 - DNA, 1554 bp, Cannabis sativa
tgaacattatattctgaaacaatttatgcacttgcaagtataaatattaaaacactcacttttgggtacaatttgagacttaagtcatttagggcctatttggttggccaataaaaattcaatctacaagttatttttctgtttttgatttttttttgaaaaaaagtttaaccaaacaagacccttgtgccaaatctaaaagtgggacagaaagctttcatcccacattttatttttgttaaagtataaaaaatgggatgaaaagtctaatttctggtggtgattgctcagaatttggcaattcaagttgctttgaaaagattaaagaatgatctataacttttattgacaatgcttttttctgaaagggaatgcatcatagttaaaatttagcttaaagcattagagttgattttcgatcccaaacggagcgtgttaagcatccaaaacatagaatttttcacccatatattatatcttagaactccacattccatggtaaattcattatatattattcttatttaatatgttttttctcattttcaattcatataacaaattttaccatttaaacttgaaacaagtagaaaacaaacataattttgcaaaaaatgagcatagctaactgaaatatatctctaaaatacttcataaaattcaactaaaactagcttgtcacactcttcaacccggtgaaagagctagggaccacagggtgccatggtcccacaatttttgttatttttcaaaaaaattacatgtaaagctcattaaaaatgaaaataaataaatttttactttttttagtgtatttcccccctttaaatttttgagttggcttcgctattggttcaaacaacctatttcacatgcgtttaaaataaaagaggcatgcatgcaacaaattgtgtgaaccttgtttcgatacgttaaatttttctgaaaaatgtacacgatcatgaaaaaaagtagagtaaaaaattctcctaaatgtcagagcaaatacgtgtgtatcagaggtgtaaaaaaaaattcttaaaagtttttggttagtgttgcaaattttttattaaaaaaaatggtcacaaaattaatatacaagaattttaaggttacctatgttaaatgccctgacatagttatcattatttctctaaattttgtctaaaaaaaaaaccaacaaaaagttcaaatttcttttgctccaagaaaagttcaaatttgacttaaattgatcgaaagaaacgtatgtgagtgagagactctagaaagtgaacgagcaaaataacacaatatttatggactgatgtagagatgagcgaaacaattggtccacacttgtactggttgtcactgaaccaaactgtatcttttcaatttcacgtaatccaatatgcatacgtatgagcttacaccaccaaattactaataaggcaatttggattggagcctatttatacgaatttctcaaacaatataaaagggcatctcgtatactaaagttttccatctctttctatcttttctgaaattcaatggctacaaaaaaca

SEQ ID NO: 81922 - DNA, 1093 bp, Cannabis sativa
  modified_base (800)..(812): a, c, t, g, unknown or other
ataatatgaattatagcaatgctgctgaaaaaaagagagaaaaacaaaccaccgccttggactttagcagtttagctccaaggttggtgtttagaagcacctagatctccttaccataaaaaatagccaattaatactgatataattaaatttacaaaatgttatatttatactaaattgccaaattcaacattgaacacaccatttttcttttcttaaacattgaacacactaattgaaccaactattttgtgaaatatatactttagtctttagcaatgtgtcaatgatttgacactttataattaggaatgctcttatatcgtttctaattaatgctaaattaatgtcaaatttaacacaaattaaacgagttatatatttccttttcaaaaaaaaaaaaaaaagttatatatttagcttgtggacctgtactacaatgcatgcacaatacaaattaagtaaaaaaaattgaaaaaaaaatcaattattattcatacttatttatttttgaaaatataccatttggaaaattctacaatccactctttttaaaaaaaatatactcatgatacatctccatttatttcgacattcgagagaattttttaatttaattttatttttatagtcgtgtacaatgtagttatttaaaagagataattacacaaagtatcattttttgtaaaaaaaattacatttttacatttaaagaatttttttttacatttttatagttttctatagaaacatgaacaacaagaagattatataaaaataacatgaaaataacatctaannnnnnnnnnnnnaacaacaaaaaataacatacagacaacgaaaaatcaacattaaattaacaagagtataacataaaaagactgcattttttgtaaataaaataaaaaatatcgtaaaaatatttaaaattccgtgaaaccatatttttgtaatttttttttattgtttttgtgtatttgtgaaataatccatatttaaaatttcttgcaaaattttgagagatttggagaaatttaacatgctaaaaataggactcatgatcaaataattgttgcgcgtgtgattcttttat

SEQ ID NO: 81923 - DNA, 2838 bp, Cannabis sativa
  modified_base (729)..(733): a, c, t, g, unknown or other
tttgcagcctatttcattgagtacctgcttcatccacacgatcaaagtgctccaaacgaacaccaagtcaaagtttatggcagcggccataccaagggtaaatatttttattcaatactattcttttttgttttggggtaaatcagcaccaataatattaggcctgtaaattaattctctattacatattctcaaaccactctgtcaatcaagctcaaattctttagcatcaccactcctattttttatatcttgctgtatttttttttaaacgaactatagtagttaattacttttgattccacacaacaatttcgacatgcccacaagtactataccacctctgtcaatgtcaacacaaccacctgttttctaaatttagatagatttacttgtatgacaatcaaaaaataagtggtcccttgactcctttttccagttcaatactattcttgctaggcttaggtttggaaagctatagactaattggattttggtgtaattaatagaagtaattatacaatttcatgcatttgtattattgtgtacttagagtgtaactactcttcaattcttatagctcgcatgagagttagtgtatctactacaaaagattcattttaactaacaaagttctatttgcagacaagtattacacatctcaatattttaaaaaaaataagtttaatataatttttaaaaattactcttaatatttttaattttttnnnnnaattttaattttaatatttattttaattatattttcaaattttaaatcatgtgtaattttttgtctaataaaatttcatataattttttattttattttctgtaataatatttaaaatataattttttataagtatactttttaagaatattaattagaaaataaacttaaaaatacaattaacataatcaaagatatatattttatgtaaaataaaaattattataatatagagtgcaagtattttataaatttttggttgtgtacataaaacttttcttcaaagcagttgttttttttttttttattttaacagaattttacataacaatacagatagtaactaacagaacaacttatattgtaagccagattcacataataacccacatggaaactattagaacaaccaaacctataaaaatgatataaaaaaaagttaaaaattggtatatagagtaattcccttcagtatgaactactaatatatatattcttgtgtaattactaattattttaccaaataaaacactaaattttatatttaaatacatttttttaaaaaaaatatagtataattaccactaccatatatatatagttaatttaatgtacttacactcttcaattcaagaattgaatataattttatatgtaaattgtaattattaactatttatcaaacaagaaataataatttatataaaattaccattttaattatatccaaaatctaattatataattacagtaccgacctattaattacacttacttactttttaagcaaaaccaaatgatatgctcaaatatttttcaacaaattaaacctatacatttcattgttcatataatattcactacttcatttttttttattttgaaatagacaactacctaattggctatatatatacattttctatcaaaaaattgactatatacatatcctagatgatttttacatgggacaagaaaattattattgtgtactgtaacttactagtaaaaaaatgaaacgaatatgaaaagaaagttccatcttacaagtaaaattatacggctccttgtttttgactttgaatttttaataggataaagattaatttgaaacgatttcattctcttcttattaattaagtttttttacaaaaaaataaattaaattaaatattataagtttataaaatttaaaacgattataaaattgtaagacaaaaatattaaaaatattttttattaaacgtatgacatatattctcagaaaaaattattacatgacccacactgaataaacaaacaaccaagaacaatgcatatacaaaataataatttacccatctaattacaatatatttatcataaaacctatttcaggatgaatatctaagatatttaaatatttttatattatacgtaaacatattaatagtacaatgcaattttatatactactaacatggaaaaaaattacaaacttttaaaatgcaagaaaaaaacaaagactttagcgggcagcagcaaaacaagacagcaatatatgaactaattcacaaaaaaaaaaatcaaattaaaaagataaacacatatatatacacaaaaaaatacaatgacataaacacatatatacatacactatatacatatacacatacttacccacacaaatatatatatatatatacatatacatatataccaacacggggctgattcagtcacgcctaataagagtatcatgttactctgccttcatcataaccattcattgttatataattatatctaactactgggaacacttataggagaagtgattttatttttaaaaaaaaactctaacatgcctatgataatttagactagcaataggggtagtctatgaactattgcatttcctcctattaacagtcatttctttgacactttcaattttttatgggtaattaacaaaaaaaaaaaataatagtaaaaaagcactaaaaaatatcacaaaaattatttagtaaataatttattgtaatggtgtctttgcttgcctaccttaagaaatagttgttgggttttgtaccctaaataaaatttatttcaatataatcagattt

SEQ ID NO: 81924 - DNA, 2711 bp, Cannabis sativa
  modified_base (313)..(333): a, c, t, g, unknown or other
atttatgcctcaatattttttgaaattgatctccattttttttttaaaaaaatattataatcggttttatgaggtattatatgttatgagatttttttattgaagaactagttttgtttttaatttatgtttcagtgtttaactgatttctcctttatttttttaattgtaatcggtttgatttattgtgtgttacttgtttgcattcattatgttatataactagttctattttaattataattggttttgagttatttcgtgttattggtttttattcattataacactgttatagaaccgattctatttnnnnnnnnnnnnnnnnnnnnnattttatgttatttatttttatttattacattatagaaccggttacatttcaattataaccggtttgagttattagtttttattcatcaaacgattatatttttagttatatctgagacatctacttctggtgacttcgacggtaactttttcggctacagtgacttttccagcaacactaactttttcggggccgacgacttttccggcaaaacttattgttgttttacaaatatgaaatttctacttttttttttttacaaaaagtatggcataaaaaacccatataaatgtaaaaaaaaaaaaaaatccataaccatatagtggttactttaatttatgcataaaaaaataaattataccctcaattctcatatttataaaaatttcccttggaaaaattaagtgaagacgtgttgtagtgggctagatttgaaacaaattgaaataagttgggccatttgtggaagagaagaatgcgaggtgacctttcattaaatggcacatgctctttaatgatgtattgtttgggccttttatgtgaagaaatattggttaaatgggctatactaggatacccattggacctgcccattgaaatgatgagtggaggtaagggttttgtttaggtgggccaagtttagtgggtttggatacgaacaaagagttaatgaattagaccttgtatgataaggctttgagaagtttgtttcaccaaagtcatctctcgcaggcaccatcttcagcatcatctcttttgcgtgaactgtggggtctgaccttgacgatttctaactcatcccattcgaccgctggtgatggaactgcctctagcgatcttttctcctccaacgccaactccttcgctatcaaatcctgcagatatttcttggccagcgacgttttcctcaactggtttttctctgacatcgtatttagcccattttcttctttggccatttgtcttcttctccgttagagatgatctccgcagtgttcttctcaggcaacgacactgatggaagggaatcttctacttctatttcctttctgtatacctgctggacctcctcaaggagctcaatcacggatgaacatgagcgaacaaatgatggctccgattgaactgcaatctcattaacctcagcgtcgctatcatttaagaacttcgattgtataactgcctcatcaccatcaacatctaatacccattgtgtcacacctagaatcggtggtgctactccctgaactcactagctgtaggttagagaactagtgacgatttctctaaagctatcaagtctagcaaaggctcgtttgtgttctcttattgccatttccatctcttcatcactttcaacatccgtctctagtgttgaaggaggtccagaagttagaatcggcgcgttgcgactctgaattccctcttggttgcgaacccatactgattgcacagcttggtggatccactcattgagatcgttgtgctctgatattgttgcgacacgacttcggagatcgcgagaaaggcggagtaaccttactttcctgagaattacttgatccaaaagggaagcaaggtcctccagtatattaaatttagattgataataatatgactccgatttccattgttcctctaatttttcctccattcttattatcggcatccaaagaacttggctctgataccaattgataagacctaagaactctaaacccaaacacacaatgaaacaatagcatgcaactaaaaataacagcaataataacaagagaacagtagcaaaatagtagccaaacactaaaaatgtatgtattatatgtttgagtagagcaattacaattagtgggagcccctaggcccgttcaatagaaaaagtgatttactcaatacattacatactctctctactctcttagtcacctacatatactattgtattctctcctaaacactacccccaatacaaaaactcaaataaccttttatttaatatatgctagcccaccatactagcctaataataggtccttacacagcatacttacatgtgagatgcaattacataatcatctattccgtccagctttaaatacataaaagtaaaagttataagcaaatgtactagtaatttaaaggtggaatactttgttcatgcctgaagaagttatcagtgtcaacttggctcttcacttgcaccaatctcttaaagttatcctttttgtaatacttaataccccaatgatcactacttgtcaaagttaacaagttggtgtttttctcgttaatccccaaatcaagatctctgtaattgacataagctagtcttggagagttggtaacataaggagtcatgtactcatacaactcccta

SEQ ID NO: 81925 - DNA, 1473 bp, Cannabis sativa
acaactcacaaccaaacatttcagctcgaaaagcttatagagataaaacatctattagctacaaaatgttgtacaagaagggaccagacttgtcaattgaagggccaattgagtttccatcaggtgccaaaccgtcatttgttattgctgttggtaacagtagcaaagatggatttgaagaagcatcagttgaagccagtgaagctaaaaaaccaaaaatgccatatactggaaaaagtgcagacatttcaaaacgatttgtccgttccaagcacagaaacactaggggtaatcgtgatagatcactcgacttcttggatggctccaatccaaaagtacctagaatcaggaatgcttcttgttgacagaacaactgcacgaaagattcaatatcaggccccgaggtacatactcatagatggaaaactatacataagagggttattaatgccatacttaagatgtatagctggaaccgagataaccactgttatacatgaaatacacgaaggattttatggagatcatacattcaaacctagtttgtataagaaaattatccaccaaggatgcttttggccaactataaagaaggattatatcaaatatgtctgaaaatgtgaacagtgttagtgttattccaaagttcccagagcttcactaacaaccttgatgagcagtctgtggccttttgttgtttgaggaataaacttgataggatcacttccaactagaaaaggaggagtcaaatttaccattattgatgttgactactttatcaagtgggtagaagtcgagcctattaatatggtaacttccaagaagaccttagactttgtcatcaagaacattgtacatcgttatggtcttccacacgaaatagtgtctgataatagaaaataattcaacagtgatcacttcatcaatttttgtgtcaagcacgaaatcatcaagagctttttagatgtggccagaccacaagaaaatggacaagtggaagttataaataagattctgaaaataaacttcaagaagaagcttcagacatgaaaatcacactggctggaagaactcccaagagttctttgggcatacagaataacaaaaaggacttcaaccgaacacactccatattcaatggcctatgtatgtgaagcattaatcccaatagaaaccacagtaccttttcacaaaagagagatttacgacccaactcgaaatcatgtattacttcaagaatttctagatttgattgaagaactttgagaacagtcacaagttcaactccaaatgtactaagaaaagatttccaaaaatttcaatttcaaagtgaaaagtcaaaggttcgaacttggagatttagttttgagaagagtacttccagcctctcaggagccagtagtgggaatcctaggactaaactgggaaaggccatatgaaatttaagacaaagtatgtgttggaacctatcgc

SEQ ID NO: 81926 - DNA, 1307 bp, Cannabis sativa
gagagagagagagagagaaataacctcacaggatgtatgaagcaggggtacaacatgtttgttagaagttggaatcttgtaccctttgcattctttttcctcattcaatttttgacaatctataacacaaagtccctttgatgatatccatattgtatgttcatttgaagtttctagggcagcacaataacgagcattcacatgtttgacacttaagggaagtttaggcagtgactcaagcttgctacaacgatttaaccttagttctctcagctcagatagttgacaaatgctatctggcatgctcctaaaattgttctcactcaaatcaagttcctccaatgaacataactgccaaagatcatcagggacagctccttcttgtatgctgcatttacttaaatctaacgacttcaaagacaataagcccgagaaggaattaggtaacatcaagccaacaggttcagagccttctacagcaaacaaacagttacataagttcaacaaccatgacttattaggcatgccactgcatccgcggaaagataaatgcttgaggttctttaggagtgaaatggaggaaggtacttctctaatggcggtttcacttgcatcaagttcttccaaacattccaaatttccaaggttctctggcaactgatcaagacatgagcagcctgagatgttaagatttgtaagagtagtcaaactacaaatgatgtttggaagagtcagaagatttttacagtctttcagattcaacaaagtaagactacttaagcacttgatggactttggtagctcaactatagcagtcccatccaaataaagttgagtcaactctttcatgtttcccacaatctctggaaacttgctaagctttgaacatcccgaaagaattaaagtttcaagagattccaactccatctccttgcaaagtatctgaagagattcacaacctttcaaattcaataaaacaagtttcttgagaactccaacggatggatgaatcattgatagtcttttacagcctctaagaatcaacttttcaagatttggggttgtattgaagtttgggatcttggtcaagtactgacaattgctaagattgatcatcattaacctttctgatacctgtttattaaaagggaacaaaagaaaattatgtcctcaaatataaccaaggaaaacttgaataatatttcttataccgcatgattacagcaacaaataattcttaccattgctttcaaaaaaaaaaaaaaatcttaccatgttctctctccataatatcttctcaatgcgac

SEQ ID NO: 81927 - DNA, 2246 bp, Cannabis sativa
  modified_base (2154)..(2161): a, c, t, g, unknown or other
  modified_base (2211)..(2221): a, c, t, g, unknown or other
ggacttcctattgggcaatactttgccccttgtccgaacattggccggaggaattctcctttttgatcttggtcagggcaaggttatagcattccatgcaatcttctgattccctttgaggcaccttaccccattctttgttgggaacttgatgcacaaatgaaaaactgaagtgatagctatcaggccatataggactggtcagcctacatgatgttgaaagctaatggaacatcaattatcaaaaaattgtgccgtcacagttatgctccttgtagcttgcccaatagtgaagggtagacggccccaaaggtgcgacactctggccagaaaaaccataccccaattgggtacaggggattagatctttaaattggagtcccatcttctcgtatgttgtcttaaacaagatattcgaagaggctccattttctatcatggtctgacccaccattttgtttgctatctatacttccactcatttgtgtcgtggctttagtctgcatgaaaatgatagaacttggacgtgtctcttttacttacgtccttcttcatgggagcaggttttttgtacaagaccataaacggagttcttgcatacatcatctctaggtcgtcatctagcatagagaaggcagtgaacttggaggcattttctctaggggtgtgttcgacatttcctgtgaactttccctttttcccatttccttgcctgccattgttattggaccttttttcgcttagggttgagctgctagggtattgtgtactctaagcaggtgctctttgccgaggacacatgtggttggcccttcttaggttcgatgacgtctactcaccgaatagcctcttcaagtttgataaacccattttctcagtctataaactctgccatagacgccacagggccacatcttttaatgtccttccacagttctccaagtggcttgatgcccctagttaatcttgcaacttccgtagcctctgtcattaacctacttatgtaggctctgaggggctctcctggtttttgttttacttcaaccaggtattctaggtgtgatgggagttgacgagaggaagagaactgcccatgaaatcctgaggaaaaagctttctgtgaattaaatttccttggtggtagcttgaagtaccactgttgggcagcttctgtaagtgtagcagggaataccctacaccgcacatcaccccgtactccttgtagatcaatttgcttctcaaagtatttaagatgtgcaagggatcttctttccgtgtataaatcttccagctcggcatcttgacctttaagggaagctcaaggacgtcgatctctagggtgaagggtgatccgcgtgctcagtctagctcgagattggtgagttttgtgttggtcaggccttgaaccatattttttagttgatctaactatgcttgaacatatggatgtatcggttacgcctcttgagcaacctgtgtcacgttaggatctcttggagctgggtcctggatgcagatacctagttgagcggctggttaaacgtattgttcgtccaaacctcttcttttgttctgatcagccctgagctcatgggctgcacccgacctattgaatactgatgaatcaggtggtctcagtgtttgacaagttagcccagtgggttgactagaactatcattttggatgaaatcattaggtataactccacctgaagaacggtcatgtaggatttggctatctactgctcgacccaaaggcgggacctgactggggattgaacagttgttcattatgagtctgggcggcatgcctagtagtcatttcttctgtactgcccagtgagatacttaacatggcatccagttgctggttagcaacttgaaaggccctccctattagtatggttgcctacctagttcggtcatcgatgactacttattgtgccttcaatgttttaatctgcctgtccctccactcaatgaattggcatcgctcctcatcaaatgcaaggtttatggcagcacggagatcctcctgatcatggtgcaaggcattagtatgaccttgcatgagtccaaagcatcatggaggttttgaatcttagtatcatccccctgttggtttttgagacctaaataaaactcatttcaatnnnnnnnnatttactaattaataaagatcaaatatcacattttatgttgcatggttcnnnnnnnnnnnttcatgattatgtttaatgtataaa

SEQ ID NO: 81928 - DNA, 973 bp, Cannabis sativa
tgagtccattgttgggtcagctttcttcgtgccgttaaagttgtatagacgatcttggaaaatagtgcaatgtgccactccaacagtgtgaccacctatataaattataatagtattagaattttataatgaaaattaagataagtttttaatgataatattaacttaaaattaatttgtgatggttagattgtcacggtataattatagtattttctctaaaaaaaaaaaaaaaaaaaaccagcataaggtatctggttacccaatggtaggtgacattgttgtttgggccttaaaaaaataaattttggacccttgttcaaagaaaatataataattttgaaaaataccaaaaaattatatacatttgtgcaaatatacacatatatatatttatagttatatacataccaagaaggtaaaccatgtcattgacaccaagtcctttcttttgaaatgctttaatggaattagagactgatattgaaggaggtggcaaatcaacattgctagctttagatacttttccatccaaccttcctccttctacaccataattcacttttcctccctgcacacacacatatatatggtatttattataatagtgattgtgtttttttttttggtattttggatatataataattctattttaaatgatcgtgtataatataattataaaagacccctataaggtataaggtgctttcaaaaaattacagataatcaaacttcaaacgtataaatatcaaaataaaagcacaatttacagtaacatgtttgaatcttaattttaacattatttaaaaaaaattgaaaaatttatgtgcacatttcgtataacaaaattatataccatcgaaaaattatattttatattaatgtactaaaatacttaaaatacctatagatagaaaatttggataagttgaggttaagagattaaagtaataatttaattacgtacact

SEQ ID NO: 81929 - DNA, 1110 bp, Cannabis sativa
taataaaaatatataaatgaaaaagctcttaaatattttacataaactactaagaagaattaattaaaagaaaagtactaattaactagtgtaatataaatgttaatttctcaatatctaaattttgagattaattttgtggttctcattatatattaattaacaatttacatattcagaaactaattatttggtgttgcttcttgagtagttggtcataaagtcatttattaaaattattaattttaattatttttttttgaatggttaattttaattatttaaggttgaggagtactagcttattaataaaaataaaaataaaattggagtaataataataaaaaattataggtcttaattcaagataaaaaaaaactatactcataccatatattatatagagatctagaattctagacaaaataactcaatatttttttattatatattattattattattattattcaagtgattatatctatttatatatatatatatatatatattctaattaatacctaagttcagattttgcatgcatgatattataatatgttgtattgagcatatatatatacaatcatatatgtgaataagcacatccataaactcagataacatttaatattattttcgaccacaagtaaatatattttatcaaataaaatttgatggttctttctgcatgggcaatatattagtggatttatttcatatataatctcaataaaattgaaatcattcaaaacaaaatcaatacaatattgagatgagatgtcgtttgggttaaatcagtaattttttattttaacaaaatcaaagatgtatcatttactcaaccagaataatagtaataaataaaaagattatcgtcataattaaacataaaaagtgatcaaagtaatatatatatatatatatatatcggttatatatagtggttgagatctctacatcgtgattcgttgtcgtgaaggaaactcaagaagctgtagtactactatatactaccatgccatccactaaggattctatctactatatatctatatatatatatataaagagaaagagtagtatatccaatccaagcaatatatatat

SEQ ID NO: 81930 - DNA, 576 bp, Cannabis sativa
tgttaactgtaatatcatggcaaaaaatgttattgtggcgagaatctaacagcttggggtcgtgattatacgggtaatttcaaggaacgaatttctaaatgtaaaaaagaaataagacagtgaaagaaaggtcgtgatctatattcaattcaaaagtttcgtgagcagagaataagttaagtgaaattttgaatcaacgtgaagtcttttggaatcaaaggtctaaacaactttggctttgcgtgggtgaccaaaatagcaaattctttcatgccaaggcgactacatgtaagaaacataacacaatacaaagccttcaagataactcaggtacttgggttgattgtctactgtcattgtgaattaatatttccagaatttgttttcttctttgaactctaattgtaatgaggttgttatgggaatggaaccttcaactactgatgctgaaattgaatctcttctttacccaattaccgatgaagaagttaagaaagctttttttcggatgcatctagacaagtctccgggaccagacggaatgacaccgagtttctgttagaattattttaccag

SEQ ID NO: 81931 - DNA, 776 bp, Cannabis sativa
cacaatgttgaataagctggtttgaaaaaccgaaaagggagtgaatttcaaatatggcaaaggtggtcttagtcctccttccaattaataccaaagacaaaccagtttcggtttttaaacattttttttttaccttaataagccctgccaaactgtgtacatcaatgtcttcaggtacaactcctctgtttaattgatcccgaacgatctcctcttcgatatttccaccactaattctaaagatcccttctgtctaaaacatcagaaaaacaaagaacaagtcccaaccgaaatcaaaatcaacattatcgaatgccttctacttagttttaaacagagaagtcagtgtatcataccgttaggcctccttgagcatataatcgacgttgtatgagcaagagaatcgtcggtacactattccctctagaatcatatgatagctgcatagattccgttgaaactccaaacacagttatgctacatttaaggaacatcaaattagaaaaaaaaccagtaaaaatttgagtaattaaacacaacaaaatcaccatttagaaaataaagcattgacataataattgtaattaagtcaattgaacattaagaatcaaatcaaaatcaaacccaaaaatttctgaatcaacagaaacaactcacattagcattttgaatcaaaatctcaacaattattatcaacaacaaacaaaagccattgaataattgtaattaaaatcactaaatccactaatattttgaaaagctagaaaaatgtcatc

SEQ ID NO: 81932 - DNA, 1204 bp, Cannabis sativa
aaatattatgctgttatttcttacttgttcttctttcctttctccaatatttgaaaaagagtaacataacactgtaggcatatatttttaaccaaactaaatttactagtgtagaacatgtattttgagtggatctaacattgttattagacatactacattctcattggtaaatttaatataatattgagtcttagtcaaattaattttctgcgacattaatacgaactcggacttagtttttacttatttgatagaaacgcttcacatattgtgttagtaagaatttttacaaggaaactaagaattatatttcaattttaaaaataaaataaaataacaactttatttgctatttaataattaaggctagaaatttaaagcatatttaatggtactctttgaatattttaactacgctttttaaatatacttcagaccgagacttgaaaaactaagctccaaccatatcaaaaaatagttagagtttttaaatgtaaggagctccttaaacttttttaatagtattttaattaaaaacactattattttttcattattttataaaatgaatttatatttgacaaattcaaattataaaatattattaaaataattaaatactaactatattgaacaacaacaataaagctctttattttaactttttaactattttagtttaaaaaaatagagtatcatgcatctccaaccatgctcaataaacacactctctaactaaaataggaagtggaacttaaaaaaaatgagttccaaccatacaaaaaaatatttctctataatagaaaatggataagagcttttcaccttttttgctttaacttttttattagtattttaatcaaaatatatttgacaaattcaacttataaaatattattaaaataatcaaatactaattaagatagagagtatgattggagcaaatggttttctatttagctgaaaaaaataaagagtagtattctccatttttaagctagaatagttaaaaagttaaaatggaaactctgtttaccagcatctcaagcgttacccaccaaaaatttgcgtagaactaattaaaatagtaccactctaagataagataatgaaaacattagagaaagtatcttcagatcaatgagtacgagaaactcgattttctaattgggaagtggaacttcaactggtgcttccacca

SEQ ID NO: 81933 - DNA, 666 bp, Cannabis sativa
tcaaagcacgttgaaaatacttaatttgaacagtcaaagtttcactttcgttaccagaaccaataaattaatttctctttatgcaaattgtgggtcaagaaaactataatataatattaataagtttaaaaaaaatacaaaactttttatatcttataaaatcatgataatttcatttttcttttagttttgcatgaatcttaattagggctagatatccaattaaattcaatatttttcttttaatttgatcaaatttaattagtaattgaatttaaaaaataatcatccgatccaatttaattaaacctcaaaattcaatacaatctaatctaatccaattacgaattagattggttcgattttttaattggatccaattaaacatctaatttttaatattaacttaaaaacataaaaaaagtacatagaaactacataaactttcatttaagtttaataccaaataaatatatcatccatacaagtttattagaagttagttagctagtttgttagtatgttattcgcttatattagttagtgtaactaattctttaactgtattctcgagctctataaatactctattctagtatttttcccattaataaaaacagttcagtttctcattcattctctctgcatctcctctctctctctctc

SEQ ID NO: 81934 - DNA, 528 bp, Cannabis sativa
tatacacactcttccaatctaatttactttattaaaagtctttatttagctctattataatgatcatgagcaggagacccacataaaagtgagggggcatttgccttaaaaaaaagatatatatatattttaattaattataacatatatatttataataaaatataatatttataaaaataatattaatgttagtatgataattaaactaaaatgtatatatgataaatgttaagagttcaaatttcataaagaatatttttttaaattttcacttttacttctattttacaaaataaataaataaataaaattacagtccctcactttaaatcttaagtcatccactgaacataaacaactataaatcatacaaatattaatgatatataagagagaaaatttaacaatccatgcttaaaataaatttatgatcttttagtttttagtatatccataaggatttaatactctaaaagtccttaaattccaaaatactctgttcattcaaactctctctctctctct

SEQ ID NO: 81935 - DNA, 1047 bp, Cannabis sativa
ttttttattatacctccaaaaattaaataaatcataggtattaatgcggaagagtatgattaaaaaaaagtaaggataagtgagtgtatgtataaggttttatctcaaaaccaatttataacaataaaagtagtagtccatacattttatgtatggtaattagtttctccatattattaatgtaagactctctaacactttaattttttgaaacatgaaaattgaacattatgactttttttggatgattttttttttaaggttcattttgtcatttaacaaaatagaaggtccaattggtaacttttacaaaacacagggttcaaaatgatatttacctttatttgaataatgcactaaataaaaatataaagatgcaaataaataaatttaattaagttgacctggttttttatcagcgaatttaaaaagatcgtaaacgagaaagatgaaagggtaagttgaaaaatgccctttttattaatcaatttatcaaatttacctttaattttatatttatttgaaacatacctcttttcatatgtattgtacccaaaatactctgacataagagagtaacatggagagtatcttgaagtgacagaggcaaaattggtacaatgtttaaaaaaaaaagataaaaatgatagactttaaaaaagagtgtaaaaataaaagaggacaatataaaaagggtatgaagaacatgaacccaatttaagacctcatgtgatgatgttaggtagggtgagaatcttgggcttgggcttgggcttgaaattgggcctagaaatagccattacgattcatgatgctactatacgtgaatcaacaaagtttccatggtttgaaacttgaaaatggtttcaatcaagcagcatgcaagcatttccatattccacaagtttgaattaggaatgccactaaaaattcgaatccaaaaagaaacttaagatagaaagggctgtttgtgtagtaatgtgtccttagttatatcccttatttagtttatttagtagctaagaatcatagcttaatagaatatta

SEQ ID NO: 81936 - DNA, 1414 bp, Cannabis sativa
  modified_base (1385)..(1388): a, c, t, g, unknown or other
caagtgcggcgtcgggcccatttatgatttgttatttgattatttttattttggtcttatactactattttattttctttttctttttctaaatcacacactttttgtatgtctatgtccatttagttttattttagattcagaaactataaacctaatatattctttcaagtttcaacgaacatttgaccatttttatccaaaaataaaaaaaataaaaaaaactatgttaaagaatttttgagattaaaaaaattcacaattatatgcacagaatattttgataccccaatttatgtacattttatatacactaatataaatagtgtgtataaaatgttatgatttatcccctaaccaactttgatatttgaggaaaaataatttacaaaaactataccaaaaataatgtccaaattaataatatcatttttttttaaaaaaatttcattaaacaacaattacatagaattaaacacgtcaaattcaatagcttcaggagcacaaaagtgatcaaccccaatccaaaacatacaaactttgtgaaaaagcttaattggctaattcacgagatactttggattcacggaatcacggaataacgagataccatcaacacaatcaaataataaaagaattatttttaatgtgttctattaagccattgatgcagctatttttctttgtttagattaaacggacagttttaaggcaatcaaattcgatgttgaaacgtattcgcctctgaatttcagtctacagcaccacttgaatggccatcactcagcttgcaccggctaggcttcctgctggagccgttgaagaagcaaacaacacctcccctcaacacccctcatcatacataggagtcaatttacaaaaactactaaaaaaaaataatgtccaaattattaggattttatacgacccaaaaatttattttaaagaaggttttagttggttgagattccgaaattcttatgtatagctcatgttgcataaaataaacctattctaagattctttgcttctagattttgtgtcaataatatttatggtatatatcgtcacatataatgtttttttttttttgagcaataatattgcaattatgtgtattattcaacacaattaattttatccgtggccgtgagcatgcatgctttctctttttaaaatttaataaaaaataatagtcaatggtctagggtggtcgttaaaaataataacaatagaaattatatattcatgttcaacgaaagacaacaaaagttatcatgccacagtgaataagacaacagctgtgatgtaaaagcacaaaatccatcattttaaaaaaaattatattaatcatttttaaaaaaaattatatctttatatattannnntgcctatctaacggcaattcttggtt

SEQ ID NO: 81937 - DNA, 1064 bp, Cannabis sativa
ttcataatttggtatgttgtggagctatctaagccggttgatatctcatccatgaacatcaccgctgttggtccaacaagcatctcgcctgagacaaaagcatacatttttttaactggaacaaacaagaagttaaactgtatatattgatcaaagtgcacctgttgtaactcgttttctttgtcctccagagataccccttattaagtcatcccctattatggtattagcacacacatctaatcccaaaatctgtaagcattgcaaagtaattttgtgatgatctacaatcaccaatcaagaacagagaacaaaaacaaaaccaaaagaaatgcaagctaatcgaagaataaacacagtacaaaccaaaaatatttacaagaatataaactgtacaaactaatcccaagaatatttacaaggtttcatagactaacatcaacaactaattaattcaaataactaaagactccagagctgttacagcagactatccagacacaactgtatcaagtatctcagatcacttaactacaaatttcaatccaattactaagaaattgatgttttagatgctaacctttaaaacatactcagtcacaacactcgtctcttggccttctgttgctgctgcctgtatagattagacagaaacaagcatagagaacatctcaggcatctactccagggttgttagtctcttctaaattttatcctgacatataaaagaaaagaagcttcacagttcaagtaaataattttgtcacaagggtcaccttcatgaagacatcaatatcaggatcaggcttgatattggcttctttctctcgtctagacaactctgctagcaactctgtgagaataaatagccaaatgaagatgaattccaacccaaatctctaatggatgttaattaaggtgtagggagatattcacacataccataacgccttgtaactccttggcacctagcagaaaagtctaaggtttccctcacagtcatttctttaatatgataatcatactcacttacatatgctgctgttctttctgggataaactca

SEQ ID NO: 81938 - DNA, 670 bp, Cannabis sativa
atattctgttaaaccaagaattgcggttagataggtacttttaatatataaagatacatgtcctgttcctatagtactgaaacattttttaagttgaagttgttttattggcctggtttaactttctattccactaagatagctctaattttacaaagaaaacagtatatggaatatcttgctggagatttttccctttcaagaaagtagatagtaagtatatgtatacaacattgtataaacatagcaatacttttacttgtaatgataaaagtaataaacatcaatccacctctaaagtgattggtgataagcacgtaaatactagttatagattgggatttatgagtaattataatcaaggaaatagacctgctaccaagtgaatattagattgttgtaaaaagtgaatgaggttcagtctcgagttgctcacggttcctataacataaatttgagttgaattggcaaatctacttacaaaaaagtacgtttcacgttgtttcttgacttttctatatattttgttagttatgatttttaattgcaaatttatgttcttcaattaaaaatttatataataaactaaaaatttcacaaaaaaaaaatatatataaaaatacttcaatgtatattttttttatttttactctttaaaattttttattta

SEQ ID NO: 81939 - DNA, 963 bp, Cannabis sativa
gaaaacacattcagaaaaatacagtaacacaataacattagcattttttttttgaaggaacaataacactagcaaattaaagttaaaattttggtccttacaaaaaaaaaaattgatcaagaaattcaattaattatgaaaaggaacaaaaaaaagtttacttgcaagaacagtctcctgggcatttttgatggcgcgctcgagaagatctgggttaatggatgccaacccattgggatcttgaagctttctctccagaaacttagccaaggccgctgccttattcgtcgtcaatggtccaccaggatgagccaacctattccattttttattattattatttcgtttttgagaaataataactagatactgaaatcaattgaaaaaccctaaagaaaaaaaaagggggtttatatgaaacctggtttgaggacgagaagaagaagaagaaggtggtaatgatgggggaagaggtgcgaatttgctacctctaagagctttcttttcttcttcgctcaactcttggatttcttctctttctttcttcttcattctctcatcaccgctcccaattttgaaattagggttatgtatatagaagactaaacgacgtcgtgtttggaggaccacattttttttttttttttaagacgtggtgatcaaaatcaattaattagacttggtagaataaaaaataatctgtttcgttgagtttttttttttttttttttgaaaataagtgtttataaattaaaataagagttagacctcattacatataatgttgtttcatataaaagaaagttcaaccatacctgtaatatttttagcaaaagttcacttagttacattataagtcgcaaaattacaaaatttagaaataaatgaaaaattacaacttaacaaaaaattaaaaacattgatgcacatagttaatactccaactggaacatgttcccttca

SEQ ID NO: 81940 - DNA, 804 bp, Cannabis sativa
aaaaaaacagtataaatgttgtttccagcgtggcacattataaatgtaataaaataggaaaaatcagtagtgggtgtaaatttcccaaaaaaatatcatcagcctaatataggggccttagcccaaataagctttatactacagcccataatcataactattggacttttaataaaccctcaataattcataccatctttttaaaatttacaaaataatggtaaattaaagaatgtttttataaatgtagacaaaaaaatataagtagttgaacaaaagtaaagtttgaaatatgaaatattctcttagaaaaaatatgaactatccataaatcattaagaaaattaaataaaataaaataaaaaaccacacacaaacttacttgattctcatcttcatcttgttttttatttcttaattagttgtttctctatctcacatccttcaaaccaaacaacaaacaagatgatcaccaagaaaaatggtttttggagttctttgtcataattgtaattaagtaactagttactatcatgatttgaaacttaattattatcagggtgggattatttgatatgggtaaccaattttcaaaaaaaaaaaataataataaataaaagaaattccattcaaaaatttgaaagaaatatttgcaccaaaagtcgttaagttatgttaggttttatgtccatgctaaaaaaaaataggctaattaataacttttccccttgaactttgacatgtagtaaatcgtgccccctgaacttttttggccgttaaaaattccccccgaactattgagat

SEQ ID NO: 81941 - DNA, 1534 bp, Cannabis sativa
agcaaagaactatccaatcaacccaagttttaataaaaccaataaaatttaatgtaagcccaaataaaagtctaacatgagcaacaaaaagaagagttatttgatgaaggtgaaaaaaatgtgacattgaaggatgagaaagcttctggtatcattgatttgaattcattaatgatatttatttatacaccaccaatggatccatattttctatcaatactaccctcatcatgttacatcctctatgagctaccaaagatttctccccaagctcatcctttgaaatcttgtgttgttggtgctaaacatggtacaaactcgtatcaagccaaacttgagggcattcatgatggcaacttccaagtggtatagtatgacgcttattataggcgtcaacccctcattgatgtaacatgtatttgaggtaagttctctctctttgattttattgtcacatttgggacaatatgcatttttaatttgggggggacttataaatttttacttttatttgtttttttttcaatttttgttgtcttgtttttcttaaagtatttggtttgtgtaaactgttaagtcataattattgtatgttgctgctttgtctttgcttgtgaaaaagaaattgtacttaactgtgtgcttggtttaaccgttttagaatttaattgcaatatttgtggaaaatttataatatattttgtaaatgcaatatttttggattctatttttatatgcttgactatggttagagatttgctaatttaaattgaataaaacttgtattatttcgcctttgaggcaaaatccttgatgacatgtgttattgaaaacaatgatcaatatcattgaaaaccaaatagtgtcgtacaagctaaaagactatacaatccacaagaaaaaaaatcatctagtcaaacaagttgtctattcatctcaagaacatgcatatctaatccatgtgcagccgtattgatcgcccgtcatatatggattaggaacattcttgaaaatttagaaaattagcttgcaatattctctaacagttaatgaaccaaagtcattaaagtaagaatatctattattaaataccatatacaactgctaagcaatcagattcaacaacgattatatttcaaatcatgaagagacaatgcaatccacagccacaacaattgcgttacattctgcttctataactgtaaaacttccgaacataggctttgaaaggcatgctataacatctctattagagctcctaagtcctaagtatggctccaattccaacaaattacataaattttctataaaagaaaaaagttaaaagctttataaaacatcacaactgggatgaaaaatctgcacgcattattcacatgcaaaaaaaaaatgtctttgaaattaaagtttagtacacaaaaaagtttatcgaaaaacatgcacacatttatcaaatgatagaaagtgtatctttgcaaagtttattattacacataaaagtttattaaaagactgatttaaatacaccaacttc

SEQ ID NO: 81942 - DNA, 1070 bp, Cannabis sativa
tagacagctaaatgaggggcttatattgttggttccacattggttatgagatatcttatactttataaatgtctcctgttggttccacattgtgttccattatttctacgttggaccagagtagtgggatgtattaagatctccttgatttttgttgggcttaccgatacattgcaggtatggattcattggctgtagctcatcaattccaactcagattgttttgctctatccatgtttgcactctatttgaagactacaagtcagaacctactgtctaaattacattgctcaatgagacaattgacctctattctggttggttagctgaagccaaacctgttgtctagtataacaagcttgtctgctatgttgatgtgttccaataaatttgtttaaaccatgttatgtccattggttcgacaactcatgattaattacagatttgttaaagggatttagttgtgtggcctctcctgggtagttgcctttgagtgtatgtgtatgcttcatattaagacttgtttctttcttctaaaaaaaaagacaaccctattaaatatacagagaaaaaaatgatatataaagctcctttggcaaaaagtgtatattgtttaacaaaactaatggcatcttttaggtgggctttattagatactacgggctcatatgcctgatgggccgacccattgtgtcaggcccatagtaactatccgtatagaaaaataccactggtttgatcaaccaatatatgtctgaattttgtgcaactcttctataaatataaataagaataatttgtggtataaatatctaagttcaattctcggttgtaaataaatacttataagtttaatttttgacaataataatagctaaattataattttgaaacttgtgtaggtacctgattgttaagtgttaagtaaattaacatgtggcaattcctaattagttcaagttattaaatttttaggtaccgttaaatgttaagtaaattatcatgtgacaattcttaattagttcagttcatcaaatttttattgtttttaaaaaattaatttaaatat

SEQ ID NO: 81943 - DNA, 1723 bp, Cannabis sativa
gttgggatgtcaggtggtgcgtttgtgatatgtccttttgatgcagaaactggtgcaatatgctgctgaactggacaagttgctgctggtttttgtaaagctggtgtaaggggagtactctgctgaattggagaatctgcagcaggagatggctcgggtgtgagagcgattggtggctggagagaagatgtatgtgtgtgtggatctgcaagtattgttgctgatttaataggctgctggcagggaaggattagttgagaaaaacaatgattaatctcatctgaagaagtagtagacatataagggaaaatgtcttcatgaaagaggacatccctagaaatatatgtttggtgagactcaatgtcaagcaagagataggctttcattccttgtggatagccaatgaagaccgaagcacgacttctaggggaaaatttgtgcctttttgaaggtaaggttgaaccatatgctagacatccaaatgatcgaaggtgatcataagtaggtgtcttattgtgaaggacttcaaaggatgtgcttgttttgagcaaaattgatggggtacggtttataaggtaagtggcagtggcaatgagatgaggccaataaaccaaaggaagacgagattgaaatcctaatgcacgagcaacgtttaaaatgtgttggtgttttctttccacaacggaattttgttgtggtcgctcaacacaagaatggtagtgtgttactcctttagatgcatagaaggatgaaagattcaattccttggcattatcagatcttacagcctttatagtgtgagaaaattgagtataaaccatttgaaaaaaatctgggataatcttttgaacttcagacttagtttttaacatgtaagtccatgtatatctagatttatcatcaacgatagtcaagaagtgtttataaccttcagtacttattatgggaaatggtccccaaatatccatatggattaagtcaaaaatcttagatgcaaaattgttaatagagacaaaaggtagtcttttttgtttgacaatattgcatatatgacaatgtgtatgagaattggaggtaaaggaagaaccaatctttttattgaatatgtttgagatatacaaagatggatggccaaggcgtgtatgccattggtctacattggttttattgaaagctaaactagaattactagcagctgctataggagattcttggtgtatgaggtacaactttccttgacgtttagctgtcccaatcaccacactccgagaaggatcctgtataacgcaatttttagtgttaaatcgaacatagtaatctgattcatcaaccaaggcagtgatagaaatcagatttatatgaaatgcaggaatgtaaagtacattgtgaagggtaaggctattattaatgcttaccgtgccaatgtttgagacaaaaattttgtgtccactaggtaaaataacatactttggaaaagttgaatctttgaaggaagtaaagcaagaaaaattagagcacatatggtgtgtaacaccactatcaagaacccattgaaaagaattgaaatgtgatttaccagcctggtttgaagctgcagcaggttcagcacgagtagattgagtaagttgctggctgagcaacgaaattaattactggcattgtgcagtaagatcagtagcaggactagcagtggctggctgatcatttgggttgctagtggatg

SEQ ID NO: 81944 - DNA, 1056 bp, Cannabis sativa
ttttgaaaacccaagattctattaaagggaaagagaaaaaaaaacaccacaaaattgttctttttctaaatcacttcattaaacctataatttctaaagcaactacgagtttgtttactgttactgtgggtaggactgactaaatatttttcatcgagttttattgctctattttacatttatttttctggatttttcttgacatcattacaattattttggcttaataggcagagacaaatttgggatctgcaattgaactttcgaaacatgcagcatcaacactgagtattcttaaattaggatcagcagaggagcaatctagttatgtatctaagtggtctaaaatagtcaatgtatgtgctcaagagctgagacatggtgcctccatttggaaacaggcattgcagaagaatgtccagagtcaaatgttatctaaaacacaaggtacggtattgacaaagatgtattgatcataaaagccttatttatgctacatttaaaacagtatccgtatgatataatttctctactgtgataatatacaggcaggcaatatatcatctgtcttgctgagatttacagagtagtccaggttcttggagtttctgctgaactttacaagccatggatattgtcagatattgaagaacctgttggcttgtttcgtcttctaaatgaatgctctacactctggtcaacttcagggcttgatgaagctcttcagattatttcacaacaatatgcttcagagttcggtgcaactttgaatgcactactggagtctatgaagtgcatcaatgatattgatgcacttttactccagaaccatgctctctctcaagaacaacctatctgtcaactgtcaatgttatccgcaggaatcgtgccaggtatgaaggtctttttcttttttctccattgttattggtaatctgaaaaattcagggtacatcagttctgcaaaagattatgtgtcttttgaatcttggccatgaactttatattttatctggtttctagcccaatgcttttactgaaattttctatatttat

SEQ ID NO: 81945 - DNA, 1442 bp, Cannabis sativa
atttgagatatttagaataccagagattagcggggttatgatttttgaccattttgcccctaagcctattaattacttaatttacaagtcaaagggcattttgggtaattttcattaatggattaggtggctgaatcctacgttcgcagctggccactaagtttctaaagcctaagtattatttgatttaatttaataaaaaaaaaagaaaaaagaaggaaaaattagataatcctaagtctctctcttgtttttggctgcctaagaaccagaaaaaatcaagctcaactcatcaaatttgtgggttttcagcaaggattctaagtgattttagtggagacaaaaccctaatttgatcctattttagtttgctaagttattgtagatttattttgaatttttgtgtatgcttggggatttaagttatgtgatgtttagggtttcgagtagggttgttttacatagatttaattggtgttttaggctagttttgagctgttgttgctagttgattttgggttagtttgagttgacccaactatggcatgttgtgattttatgcaaaattattaatgttgatgcttggagaatgtttatggatgatatttcaggtgatctggaagttttggtgaggtttgggtacgaattgagattgttgtggattttttaggttttcttggtgcaaaccgattaaccggttctacatgtcccgtagaaccgattaaccaaatcaggggcaggattcccaaaaaaatctattttgttgattccttttattttcagagccttagttcattgtttcctcgataattaggatatttccatgctagttatcgataatagaatttatagttgtgggtttaggttcccggattaggttttggcacgttatttacccatttgcgtaaatgtgacataggacatccatttagcacgtgattttctgtttaagtcggctagcacacttggattcgaatacgaggtaagaataacataaaacatgttatataatgtgattgtgtgtatgtgttatatatgcatgttatttgtgattcgtacactaccaacactagtacggtagcggtacagagtataatggtatagtgtacgatgtttaaagagtacaatacggtgttaccaacactagtacggataggtacggagtgtatgtggtataacacttaagggtattcgaggtacggggcaaaccctaccaatactcgtacagtagtggtacgtagtacatgtggtacagtagtcgtaccttagtaaagaacgttcttactaatctgataagccttgtggataggtgtatgtacgcctagatgcaagtaattattagaatatatgttatatgcttttcttactgagtctgttgactcacaatattaaaaagttttgttgcatcgatgaacaaggacttgtacgctaagaatattttg

SEQ ID NO: 81946 - DNA, 1397 bp, Cannabis sativa
gcaaatatttttttaaaaaattgttcgggggttgggtcccaaccgggtatactccattagacgaatttttgcgggttaattaggttttaatgttcaccggatttcgggttggacccaaacccacccgccaacccactaaataatatatataattctattttttttattacatttatttacatattaattaaaatatatataaaaaaatcctacctaattattactaacctaaaccaataatacctattacctcagcttaaggttaattttagctcaatggaaacacactcactcaagaaagtttgagccactactggctccctctgaaacttttgatagtggcaagcgttggacgaaacctgctgctcacaagctgaagattaatgtcgatggtgttgtattagaggctgcaaatgcatacaattctagtgttgttatcagagatgatagtagttctttgatcaaagctttctcggtgtataattctgggggtgttcaactcgagcttgctaaaataattggcatcaaggaagccttaagttgaatcaagagaaaggttgttattgtatagattgtctactagctcttcaagctttggatagctctgttcgtatgtattctttgtttggttaattagtttatgagtgtcaattacttttatcttcttttcataatgttaagatttgttttgttaaataatctgctaattgagttgcacactgtcttgctcgaaactcttgttattggtcagattgtatttttgtggaaggatcagctcctgctgttcttcaaacattgattagtgctgatttggctgtttaaaaaatttgaaaccattttcaaaaaaaaaaaaaaatactaattatacctattacctaccagttacaaccagcacctatactttaaataataaaatcctatcactcaccactaccatccgcacgcaccagacaggcagggaccaccctattattcaattttttggtttgttaaaaaaatgtgaatttgtaaaaaaaaaaaaaaatatattttttatatataattttttattaaaaaatttatatatattatataataataatatatttatattctgtaatatatatttaaacataattttatacattatataactatttattttgtataatgtatatatacaattacacaactttttttaattttatataactatttgaccaaataaaatttaattttttcaaacagttgatcgggtcaactcggttaacccgtgacctgccaacccgaccttattttgggccaaggtttatttttttggatccaaaacccgcaaactcaaaatctgtgaacccaaaacccgaccaacctgcctgatgttcataacttaacaaccctctcaaactaagtgaagttct

SEQ ID NO: 81947 - DNA, 767 bp, Cannabis sativa
attattatatatatatatttgaaaaaagagacaattgaatccattactaaattttaagttttcaaggaaacaattttgtgagcttgaccattttgattcttcaatggctctaatagctttggttaatcctaatcccaaagatttgcttattcaataaaataaaactacgaaagagaaagatggtcaaattatatttctttgtcctcaaacattgagatttataatcaagatggcaaacgacatcaagtcactttagtttgatgatgtcgttttcttgttttggtaaacttaagtattgtgtgaaacaatgccttttttaaggacactcaacacacctaacattctttctttcctccataacctttacaatcattcattattggttcattacaaaatatatgggaaaaaaagaagaaattacttcctacatttacaggctttacgataattttttttaaaaatatatatatatagtaactcgtcacatatttctgaatattagctgttaatttttttttatggtaatagtagatttgtcatgccatctttacaaaaatatgaacaagaaaaaaaaaaagactaatttctatgtttgcgggaataaaatttatgctacaaaatatagtaagtctagtgaaaaaaaatatatagtaactcaataaattataaaaaaataattatcataaacaaaatctactctctttcttttatatattttgaaatactgactttctattttctcttacattaatggtaatccttttatg

SEQ ID NO: 81948 - DNA, 574 bp, Cannabis sativa
tgaaactcttgcacgttttattggtaatctcattggtacattttttgacgttcatgaagactctcttagtgagggttggggaccattcttaagaattagggtggctatcgatgtttctaagcctctgcttagaagacagttggtcacattcccatggattgctgatgaattgtggctagagtatcgctatgaaagattattagatttctgctatgactgtggtattattggacatgttattgataaatgtccttcgtttagagaaaatagatgatggaaaggaccctcatctcacctatggtccatggatgaaaggttctgctctacctaattctggttataatcagtacatgcaagacttctctaaagcaggaccatggcttttcattacgcgccttgttcgaaacaccatcacccctatcattcctcacataagacaacctcctacattgccatcttccatatcaaatcgtgagaagggtaaaggcattattgactatctcaatctctcaattgacccacatggtactatggctttgatggaaatatcagtctgtctcatttttctactaat

SEQ ID NO: 81949 - DNA, 1452 bp, Cannabis sativa
gttctgcttatccaattttgattccatctcaaacgtttgtgtagttgttcatgttaaatgagagctatgaactcagataagtcaaattcacaactttatatttttactttttcaacagtgactaagtcgcgaataagacaatttagagtctgtcgattctacaaaatagaaacatctttgagaattggtgaacggcttcaccagaatacaaaaactagccaagtgatgtcaaaatatgacttaggccataaaaatacatcatcaacacgttttcccttggcttagcatcctggttgacatcatatgtcaacctgggcaccagatgtcaacttgggcgctggtagtagagcagccttccataaaatggccatacctcactcaatattgatttaattaatgcgattcgacttgacactttaagctatttcaatgctctacaaagttatgtctgacactccaatcacagttcttaagttatcaagtccaaatttcgtcctcaaaagagttatgaatttaagctacaacttacccaaaaaaaggtcttgcgaacacaagactccaaaaattgaagaccgacctccagagtcgatttcaccgttacatcatcatcagcagtcaaaaatagcttaaatgtatttttcatattttattattattttaatcggacctccttccctataaaaggagcggtcttctagtttgtttttaacattcagagaagtacccataaggttaggttatctctctctagaaattagaacttttagacttagctatttttcttgtgatcattctcgtgagattaaaaattcgaagtagacgtagctctattactatcgcaacacaggtagtgaactacgtactataaattattgtgttctttctattttacttaattactttaacttttatcttgtctatacatacaagtgagttggccagatttattcatcaatagataccacatttagggccagtttggcacaatttttgaaaaaacaaaaagttgctttctggaaaagttatgctataaagttatggagaatgtaaagttaaaagctaaagttggtacaacccaactttaagtataagttgttttgataaatttgattaaaacaataaatttatttgtacttaaatatatgtatacttaattattatacattactaaaaataaaaatatttaaaataaataaagggtaaatactattttagaccctgtattttgtaaaagttaccaaattggaccatctgttttgttaaataacaaaatagaccctgtattttccaaaatgatacaactaggaccttgaactaatttttttgtcaaaataaaatttaataataatccgatctacaaatgttatgacaaaactagtcacattttctatatttgttcgtgttagaatttgtcttaaagttgattatattaaaaaataaaattttaaaaaa

SEQ ID NO: 81950 - DNA, 1127 bp, Cannabis sativa
gattcatccttaaaacgtatgcaaatcaagatattggcaatattaattgaccatgattatttttcccaccttcaaaaattggcacgttccaacttacaacatcatacgatatccatatgttaagggctactattctagtttaccaatgtttgaaactaaaaataaattatattagtaaatttctcttatataaacaagttcacttaacacactattgtcaccagtacttctagccaaatagaactttaattggtattgaagttctaaggcaaaatgatttccaaagtgactaacatggctcttgtagtgctggtcctagtgaccatgctttgggcaaggacaatggctcaacagagctgcaccaatgtgctgattagcatggctccttgcctgaactatgtcactggtagctcgtcgaccccatcgtcttcttgctgctcgcaactcgctagcgttgtccagaaacagcctcggtgcctctgcatggcgctcaatggcggtggggcctcattgggtgttaacatcaaccagacacttgctcttgcactccctgctgcttgcaatgtggaaactccccccgttagtaaatgtaatggtaaattttgaaacataatcaactcaaaattattagtactactactactaatagagcttgtaataacttaaactttgtgctattggaacaggtggaacactggctcctattggttcccctgatggttcaccaggtaacacttaaaatttggactagttaattatcaattagttaggtaatttgcaaagactaacagaatttaatgttgtctatacgaatgaatgggtgcatgctatttaactccttacgtcaactgtatgtttcgtctataactgatctttattagctcaagttgttatgtagtgtcaaatcagtcttaattatgtacctacaaaacggttattttaagaaatttaaactaaatgagaaaaacaaaaaatacaaatactgaaatgggacaaatttataatatgttgcatacacttgagcggatgtggactgaataatgaattatagtgattgaatattatttgttttttctaccttcagtctttcatttaacagtaatttacatgttttgatcgatgttttt

SEQ ID NO: 81951 - DNA, 949 bp, Cannabis sativa
tgagtacccttccaaagaaaggacttacaagttgcttcaatatccttcaagagcttcttgggcaaaatgaaaatctgagcccaatatgtgtgtatggcaagcaaaactgagttgatcaaagtgaccctgcccatgtaagataagttccttgtaccccagcttcgaattctgctagtcattttttctaacaaacactggcattccgctctagatatcttccttgaacagattgggatgccaaggtatcagaatggtagtgagcttctcttgtaattggatgcctcaagaattctggatacttcattttatggcattcgtgaacagtaaattgctgtttttttatcacaagtaattttttgttgtgactttacatttagtcacaaaaaatttatgttgtgactaaaagattgtcactaaaggtagacttttttttatagtggaaagtaatttatgttgtagtgagaattaagaatacacactaatgttaattataaacatttcaataagcttcaaatcaaagagagttctttattaataataattttgttgaagacaacaattattaagcatcatacaagtacagcaaaaggctcatactcatagcacaaaaattattaggaaacaaaagaaagacaaacaaaacaaacataactttggtaacacaacaattatgagaaataaattaaagaaagatgaaaaaattagactaatcaattatgaagaagaacaacacaatgaattagactatttttagatcgagatgctattggggattcccttagccgtaatccctggttcacttgtaggaaagagcaaagtgtatgggaattgaatcggaccacatcgatttttctcatgattttgattcttagtcgtaatgtcatcttcaatgtcacgaagttgtgcttgaaaatttttgaaagcatccaaagcttttttatccgaagtc

SEQ ID NO: 81952 - DNA, 1569 bp, Cannabis sativa
tgcaataccaggaggtcccattgcaatcaaattccgctcatgggccctcaactcaatctcgagtttgtccatgtcagaggagtgagaattgttcaacaagtaatacaatggtggagactagaaaccacacatgttagcctcgtcccccccaaggtcccaaagatctgggagatgaagaagcagcttcgcgagtagacgtagaagtggaaaaacaagacaaaacaaatgatgaggaatacgaagaaaactaagaaaagtatgacctctatgatgatggcagttacactaaattatttattggccctaaggcaaaatgcgggcggctgatcatgaggccgaactggccgcatagaatgagcaaaataggaaaatacaatataatggttgccatgtagaaggctatggtgacggtaggtatcacgtgcatccacaagacatgcctcatgggccaggcaaaaaaagggaagaatcttcaccaagtacccaaagacgcaaaatttgggaaccaagccctatctgataacccttagaaggatgtccaaagaaaaatcctacgtctttcctagaaaacaagaaggctcaggatccgcaaatgatttcccaaaaagaaaaggtccgtagagacaagctccctaagaagagcactggccctcaagatcgggaggatcgaaaaagcgtatctatgaatgaagagcccatgggaagaggaaggaaaaatcacaaacatccccctgttgagttaagataaaagctcaataacaggcacggtgacctcaagaatcacctggagaaaaagaaacaagcaataccagttttggagggcaccttgaatgaaggaatcctggtcgaacttgcaatcctcaaaaaagacatagccaaggtctctcgtaggaaaaagggcgatgattcaaaatctaattgtgatgaccgggagccaatgtggatgatgatgtatgtaggggacacggaccctaaatagtttgaaatgcccgaaatgatgatgtatgtaggagacacggaccctagtgatcacctgtctcgattcaatcgagtaatgacagttatgagggtcagtaatgaagcaaaatatttgtgttttccactaacattggggagatccgctgagtagtggttcaaaaagttagaaccagggtccgtaggttgttggaataaattacaagttagcttttgaaggaaattcgtggtggctaggaaaactaacctaaatatatatgttaaaaaaattaatgtacatacaacttttattcacagagagatatagttaatattaactaatataatttatcaaaagaaattattaactaatataccaaaaaaattaaaattctaatgattatgtttatcacatcatctcccctcacatagtaaaagtaagtactaatcgatcattgtttaattcattttatgtacagaacaaatctaggtattaataatgattacaagtgaaataaggtgatgacatcaactttaaatacagtggtgactacaaatgagatacgatgatgatagttgttttgaaattatatgatgagttttctataaatttat

SEQ ID NO: 81953 - DNA, 1992 bp, Cannabis sativa
taaaataataattcataactaacatgcaagtttcataattaaaccctaattatctgctaatttccaaattgaagttaagcggtctttacacaaaataaccaatgcattcaagtatttgtttatattgtataataataatctattattaatttctaaggcaccaatcatacatatctcgaagaagtatgtctccacattttagagatgtacatattacgcttataattgcttagttagggtcaataagacagtttctaaaaatagaccaacaaacaataagaacaatgctatcggcatataaaattaataaaagatacaaatctagttgcataaactaacttccacgtataataaaatctacaaatagtataagatccaaaatacttacaaaattttggtgactcgctgattggcaagtgtgctacaataagctgagagtataacttgaaacatagaaaatttttgaagtataaaagatcatacaaaattaagttatcttcattaattataacttttttcaagtcaaagtagacataaaaaataataaaaaataaaaataaaagaaaaccaaaaaaaaaaattattgctaaattgcacctattaaccaattgtactcacctcaattacttgtatatagtgctatctgtagaaattataccattctttcccccggtttccacaaccatgttgcacaatgtcatcctttcttccatctaattaaagagaaaattaggacaactaaatacattttccatcaagagaaactgaaattgaagacatccatgagtattcatgtgtgcttgagtgaatataattttttactcacacttacactttcaactattgagctgacaaattccataactttgtatgtggtgccagcaacagatatttcaccaataatctgcaagaatcaatagagctactaatacagctcaatgatttgaaaagctttaatatttaagaaatgcactaacaaactttaactaaaattagtatcagttcattaaacattattacttgaaatacaaagaagatacatgattcgataattttacttgcataataaaatcttaggcaagaatatactctgacatttcaccattcataacaaacttcatagtaggtgcctaaaaaaaagagaaaaagaacagagaaattatataattatgatattgatataatttaagcttttttgcaattgtaaacattaaaaataaaaagaaatctaaattatgactatacataattagggatacgattttgtcccgtgatgtactttcgcggaatgtattccgtggtacattagatgggtctcagggtacattaaatgagtgttagagtacgtttctactttttaaccctaattacctctagatcaatctcagccatcagatcaaataactccctcatctgacggctgttgtacatcacggattacaatccgtgaaagtacaataacgggacaaaatcatatccctatattcatattactttaagatatttttataataccttttatataatagaggatattttaggtattgaaaagtaagaaaggacattttctttattattttaaaaaagaaacattaactatatcactaaagttagaaatatgactatttatttacatttcttttttttaataaagtaaaataataaggacttgatattaaaatgtacaaataaaaatactaatattacacttgacaagatgtttttagcatttctcaaaagatagtaaatatttttaattttttagtatgaaacctgttaaatgctttctaagctaattgaagaaagaaaaaaaaatgtatattttcactaaaagggacgcaatccttaaattccatacccctagttaaatggccaaactagttattaaagcattcataacaattttttttttttaaaaaataagctttaaaaaatttaaagcattgtactaaaaaagcattacagtaaatgttctaaacttttttattttaa

SEQ ID NO: 81954 - DNA, 1278 bp, Cannabis sativa
  modified_base (61)..(62): a, c, t, g, unknown or other
tagaataaaaaatataaaggatgccacctaaactatttggtgctttcctttatatatatanntatatatatatattgatattgatgatttgaagtcttttcttcttctacttctattgtagctaagccagaatgggatgggatcatttgggattttgataatttgaacttaattgatattcatatatcagccctaatatattctgtatgaattattagtgcaaggacatatgtacaactcgacgatgataccgagttacaagatgttgtgatgttcgaagatgtgcagaatatatattgtcatgtattgcagtttaattaaaatcgtattcggatgagataaatttaaacagttaaatatatataatatatttttgcaaataaaagtgtaatgaatcttgtcttaatcatcataaaaaatatattaaaaattattctttcaaaaacataagttgtttgttcaaaaacttacagagaaattatcggctaaaacatggataatctagctgtacgtagattcaaaacgttcaaagtacaatcaattcaccattcaaacagctgagccgatagaagattaggatgaagtttcactatgctatgtttaatttttctaatcgtattctatattcagattttatttaataatttttttccttttttttaagatgtcactttttctttaattttcgctacataatgtttttagaaacaaataatgaatgttaaatgcatacattgttccttttaattttttagaaacaaataataaatgttaaagtcatacattgttatgacttatcataaattattccttcacattaaggataactacattatgattatgtaaatattacgattaacatacttttatattattaatatcaatgtacatatcataattttatatacataactatattttactaactaaatacaatgacacaaaaattattttaataaaataaatcattcattaaataaaatacttttagttacacaaagattactaaccaaatatttttagttattgaaatataaaaaaaaaatcaaaaaatccaattttacgtggctcgacacgtaactttcatctagtatatgtaatatatggataggcaggttgtgaaaagtaaaaaagtaaaaaaaaaataaaaaaaataaaaacagtacacatatgtagtatataaaaaaaaacagtaaaaatgtaatatttcccttacaacagtaaaattgaaataacataagaaaaagaggaaattacacttactatggaattttaaaa

SEQ ID NO: 81955 - DNA, 1088 bp, Cannabis sativa
taaaataatttccaacaaattgcaggaagaacctctgtgccatgccctttggctttgccctgctattcacaacatatggcagtaagttagtttctctcaatatatctctccatccttcaataaggctccagatttcctctggctgagcgtctctcaaaagatgaaatgatccaatttattggtgtatcttggctgatttggaaatggcgaaaccaatttgttctctaaaataaaacccctgctgatgtttattagattccctaggcgctggaggttttggacacccatctgcggagagagccaacgaaaattaatttgcagaaaaacgagcagtcgtgttcttggcaaccccctcctcttggttataattcttaataaacactcatgcatctatcttgccgggtaatttggggtgtggtataggggcgattagggctgagcttaaaatccaaaaaatcgaaaaatcgttcaaactgacctaccgaacactgccaaaaccgaaaccgccaaaatcgaaaatcgaaaactgaaaaaaccaccaacaatttaaaccgccattagatggtcaattttttttttttggcgacaaaccgaccaaataaaccgaaaccgactattattttttatgtatatatttattttatacattatataatatagatatttatacgactatggaggttagattcaaatcaaggaagatcaatagatcatgcttccagttccaatggggtctggcgtttgtgagatatggagactagttctattttatttgtcttttttttcttttcagcttgattctttttgctataatgtttaacctgtgagttagcttgaactactttattacaaatgtggtagttatatcatatgcaatgattgcaataacattttatcatcttataaatataaactcttgacattactcttttttatttatttattttttttttttttgagataagacattactctttttatgtctaaatatgctcactttcattatttttattttctcagttctattattttatttttggtgaacaacatttgttattactttgctcatcataacgtattacaagttc

SEQ ID NO: 81956 - DNA, 947 bp, Cannabis sativa
atctcctcatgcttcttcttcgcctcttgttggttatgagcttcctctttactacttttagtgcatgcttatccttgctaactttcagaagctcagtaatcatcttctcatatggtgcaaaatcggcaacttcccttgtaatgctctaattcttaaggacgccacgtgtggttttgaaacgtagttttgtaataatagattaacaatttaataaaatttatgataatagtaaaaagttcaccaaaataaaatcatagcaatgaacaggatgacgtcgctaaaaatttaattcggggatcctttattacaaaagttttacaaaagggctatatgcaaaagtaagtcataatacacattagatgcatcacaaaatatctcctgacaacttgactatacaagtcgaataagtcgatatgtacatttgtcggagaagactgtcatctcgtgactaccctagttttcttttacccttacctacaccacaaagcacctataaatcacaaagactcagcaagaaaaataaagataaatacatatcaaacaaatagccaatcaaagtaatataattaaaccataatacacaagtaattgtctaataagacaagtcatatctattacttcataaagtaaccatttctattgttgcctaataaaacaaccatgatgccctaacccgacatctactcatctattgttgcctaataagacaatcctgatgtcctatcccggcatccatatacctttgtcattatctaataagacaattgacaagtgataggctagttttaggtacattttataagtgttttagaggtatgctgaaactgattatattcattttgtgcagaattatacttgttttttacttgttttaggtttaaatggtaaaattcataatgtgaatgtgaaaatgaaaaaaaaaaatgttaaatgagatgaatatgatg

SEQ ID NO: 81957 - DNA, 1814 bp, Cannabis sativa
tgcattctgaatccaaataaatcatcataaataattaatttaacattaataaataatttttataattaaaccctaattatctgctaatttccaaattgagctaagcggtttttacaaatttgctcaaaatttgcaactatgttaagggtaaattttggacttaaaattttcagaattacgatatgggtgtgacataaatttatctatcttagaaatagcttcgaaacacaagttgaatcacgtcaatctgatcaatattgagggagttatgatcattttactaaaggttgtttagcaccctgcggccaggttgacacccagcgactaggttgacatcctaacgtcaacctggacgccaagtgagtgaaaaacgtcccaaacttgtattttttgatgcttaagtgatgtgttgacaacacttagtcaaattctgtattctggtgaagctgttaaccgattcttggagatgtcgattttttgtgaaatcaagaagactcaaaaatctctgattttgttaatgttccacctggttgaaatggtgaaaatcaaagtgtgaatttgacctgtcacaagttatagttctcatttactataaaaaaaaaaagttgaatgctcaaaacgaaattggattctcataagcagaacccagcgcactaggtcaggtgtcaacccaggcactgggtgcttctcgggtgccttcctaaggctcgttttgatactgctatggcatttgagattgcaaacgaggtatcctaccccgtttttgaccatttaaagaaaaaatttcagagcaaaatttgtgtttgaggagcagaaacatgcaaacgatgttgcatgctaacatgggtgcatggcccagtgtgatgtcaacctgggtgctgggccctattctggctccctgaaatctcattttctccccgagatcacttgtatctttgttatttttgatgacggaaaaaatacctagaacactttctcaaaaatttaattggaaacaacccaggttgataaaatgtcaacctaggcgctaggcctggtgccagttgcccacctgggcgctaagtctagcttttttttttccatcagatgactcagttttggttctggaaacacttgtatcttaatctttgcagaaaatagagaatatgccaggaagacttcttaaaaaaactccttggaaatggtcaaggttgacaaagtgtcaacttggcgctgggtcccagttctgacccctagacaactccatttgtttcccgaaagcagtcagatcttaattattgatgaaatcagagaatatgcccagaagactttatctaaactgctgatggaggtggcctaggttgacaaagtgtcaaccttggtgctaggtccctattttggcctccaagttgatccgtttctttcaaaaaagcacttgtttcctcgttttggatgaagccgaagaaaattcttggaatacttctttaatattgtggttggaagcaccacaggttaaaaatatgtcaaacttgggcactaggtgcctagggcacttggtgccttaggtgctcaaaactaaaagtgttctgattttgattatgttgccttaaatatgtttgtaacaggtcttattcatgtatcagtagaaagtttgagccatttcccctaagatagactcggaaatcaaaaccctagttggaatgtcaacctgggtgcttggcacccgagttaatttttgaggtgttgtttcgtgtatttttagcttccagactttggatttggattcttcttgtcttcatggtatagaatactgaaagtgttggaaattattttac

SEQ ID NO: 81958 - DNA, 1392 bp, Cannabis sativa
ccactactgaattgtcaccaccttattcatttatggcattttccaatactaattttctcttggtcctcatattatgaacagattaaactatcaaaatgcataaattaacaacgtaaagcaaagtaataagaaaaatgaaaatcagtaaaacgcaaggaacaatataatcagatcaaaatcaaaccaaacactattcctctgagatcataacatcaaataaatagagcaactatgaaatcggcaacatcctcaacaaatgctttgccaacgtcagtgacggcgatgccggcgccattcgcggcaagcgaaagccttcctcgtgcatctcgtcgaagagtccggttgagataggtggatgttggtagatcttataaatatattatttaaatattaacaattaataaaaaaaatattttagcattgtctatagtgtctatagacaatgttatatatacaataagttttagaatgtggttggaatgaatttaataaaaaattcacaaattaattgagattttagtatttttggttattgaaacttgaaagtgctcttaatcattaatatcgtagcttcattccatatttagctgttgtgaatagaatacttgacaagtttggtatcatcaatatttacaaaaaaaatatatatatatatataagtttgcaatgatgagagagagagaaagttcttttggaagcttagtcaaaataaataaaagaaacctacaaccaacctaaattatctccaactcattaatttactcatacaccaaataaaacattttatagctttattatttgggttttttttacatgctttagtttaactttattactaatataaaaaaaaataataagttaaataatagataaatgaaaactaatttaatttataaagattataagatcatccaaaagaatcaaataggaatcatggacatttagtttaagtgaatgaaaggcaatatcaattaatgaaccttatattataaatcaaacaataatctagttttaggaatatgggtacaattaattaacatttccaattccaaatatatggctaaacaaagaaccttatttcaaagacctaaaacgaaaaccaattctttcaacaacattcttaacactactctcaataaaatgaaacagatcattctgaaatattcaatagaaagttgaagcccctcctaaaagacattttgccaagaaaacaactaaataaatcccacctttactacatatgtaatttttttaattaaaacatttaagaaaaaaaaaacagaaaaaggcaaaaggctcattgatttccattatttatatcaaactatggggtgtaatttgttaattagtcaaagtttaacctacatttttttttatagaatgcaattaatt

SEQ ID NO: 81959 - DNA, 1298 bp, Cannabis sativa
agttcaagagaaatttttaacggctaaaaaaatttaaggggtatgatttagtacacgtcaaagttcggggaaaaaattactaattagtttttttatttttgtaagaacagcctttgttgttgatattattaggtgttgtcctggttccaattgaagactcaacaactacataccttttgttttaaaaattggacaaaatcccaactttgtcgggttcgaataagacatacccaaaaagttttactcttctccaacttttgcaatgatccccgcaccaccacaaccccaatttttaatatagtgttgattgatctactcctcccatactaaattaaaaggaatttgatgttttgatgggctattttgatagaatttgaagagtgcatcaagtgaaactataaagttttaacatagagattggtgaaactggtgcagtcggaaaaaccttcatattatatgaatttattaagttcaaacaacagggccagggtggttacaagactgctttttatgggtaagacacattttcttcttcaacaagttggtgtgtgtgtggtgcaaaatagatatgaataatgaataatgaataatgaataatgaataatgaactcatattataaacatatactttaggaatgttgatcttgccattgagaagcatataaatgataatgaatactatcactttctatggaaatacaactgtccaataaaatcaaattatctatttacccttagtaatatactcaatttcaaattaaaaaaatacattaaattattatttatttgacaaagaaaagtatatcatccggtcacaaaaattagttttaccaagttatttcactattgctacagtatcaattcctttatcccatttgaaggatctcaaacctcctctatattttacataacactcctaaaaaaaaaaaaactattattttttacacaattgttaaacatggttgtgtttaatgtgagcatatacttaatacatgaattatgatccgtgaaggcccccttactattacattacatattgatacgggagtgtttgtagtaagggggaagtattgtgatggttagaaatttgaattgtacattatagggggttagtaagtgttcaaaataatttgatcaaatgattatctataaatttaatatattaatatatatttttaatatattaaatttataatattgagattgaagatttagataatatttgaaacccgcatttaagggatttaagattggcccataaaaaattaggggaaaaaacaaaaaaatacaaaaaagga

SEQ ID NO: 81960 - DNA, 613 bp, Cannabis sativa
aatggaagagtgtagcgtagagagagatgattggtgaatgagaaagtggaccatattatcattttgcttatcttggcagtgaaagaaagtaaacgtggtggactccattttatttggttatatatacttttactcttttctttccaccgacaccctattaataaactcattctttttggcatctattcattttatcaaactaaatataaatttagttatttaaaaaaaaaaataaaccacaagataattaagaacaaatgtagtagtattagtgaaaagataattactaattaaaaaatgaagaattgatctacaaggatctattgttatgaagttttttaatctacctcagcaaccagttgttatgtatggagcttcacgtgcatcaaaacaaattattaatttattttaaaaatatttaaataggaccccacctcttgtcttgtctctttccattttgttttttccaccaaaattcacttccttgcaaatttagtagagtgaaaaataaactcatgttagtatgtatttagatatattattattaattcatgtaagtatgattggaaatttctttagtacacatattattcatatttgttagaagttggtt

SEQ ID NO: 81961 - DNA, 696 bp, Cannabis sativa
ctattagcctcttagggcatttttaatgtgtttacaatatatttggaggaaaccctaactctgtactctaagcttcttgtgaagaagacgaagagtgaacttggcagaatttcagctatattcattatgatcctcccttcatatggaaatagaaaaatatttataggctaagtgaaggatatggacatgcccatgacccacctagggtttctgctaaaagtccactaatgaggtaaattacatgcaaagtgagagttgactgttgggtcccttaaaaaatcattgtgctcatgcgtgctgcaactagacaattgaggaccaattgtacgaagcgaacacgtgtcatccaaagatttaacctttaatagtaaataccacgtgtcgcccaaagctctcttttaaaagcagaggtctataatattcatctggcaaaaaggtggtagaagtgttcgcactaccatgattggacgcaagggacaaaatctgatcctacgtaagaaaaaaaaataaccatcacttggtgacctgacttgtatcaaaggtagacgtctgcaacactccaaggtggtcaacatctgcatccaggagaggcaaaacgccttccgagtccgggaagctaaggcaaggccaagtgagcattcgtatatcttctcattattgacttgttcctaattccaaattattaggctgatccct

SEQ ID NO: 81962 - DNA, 744 bp, Cannabis sativa
ttttctatattaactatttcttagcattaaattcatctatatatatttataattgaaaatgaccaattaatatagttgttacaattaaaatccgttaattatataaaaataaaatacaaaaagtaatattatatttatccaaaatatgtattttacaatattatagtaataagttaataacatgataattttttttaactaatcatgtttatttaaatcaaaacacactatattataaaatactaatatatcaccgtgtgtaatattatagacgatcgaggcaatgtctcacttgtgcattgcctcggttgtacgagcttgctcttttttaagggtgatgaagttgtgccattgtaactaaatttgtttcaagtttttgattatttagagtttttaaagatatattatctatttttttaggataattcactcttatgttagtcataattttatattaagtcaataaattagtttaacataatttttacaataacttttattgacttattctatattgtattttttttttttactttttaaagtttgtccgacagaaaaataattgttaaagaaaataataaaatagtttggtaataaaattaaaatggaacaatttaactaaaaatggggacattgtgagactgtcaatgtcatctaacaatattagttagcaacaaataataaaatttgtttatatatatatatagcattacaaaatgaaagttggtaattacattgaatttt

SEQ ID NO: 81963 - DNA, 1415 bp, Cannabis sativa
  modified_base (41)..(49): a, c, t, g, unknown or other
  modified_base (1385)..(1389): a, c, t, g, unknown or other
ttagaaagttcatatttacggtgttaatcaacatacttgtnnnnnnnnntaagattctggtaaaataatttccaacatccgcaaccctagatacacaacacctatcactgaccttcttgctgtgagcaagaaattggtccctcatttgggcagggacttagccccttttagcaccaaagtttttgaggacattactggcagcttaacggagctaaccacggagaagttggccattggcagaagttctgaccctgtactcttagcaaatgcttcgaggcagcaggcacccagggtattttttatttctgtctttgtcggtttttatttcttaacaccaaatgctattgtaatttcctgatggtttccaattggttttagatggccttcttcgtggaacaaacatgaagggaagtgcaaacaatggtagttcaattagacctttctctagctacccagaaagagtaggagctccaaaggaaggaagttgagtctcacttcaaggaggcagaggagacgaccaataaaaagtatttacaaaagtacaacgactataatacagcttttgcatctcaaactgaagcaaaatacaaggctcgtcttgaggtcttggaggctaccaatgctacccttaccactgggtgaaataatgccctaaaagccaaaactgaccttgagaattaggctgtgtctagaagccttgagctttgaaacaaaatgggtatcatcaaggggttagaagctcaggttaaatctactcaagcatttcaaaagctcgtagaagaccaagttatagctttgaagggtggtattgcagaaaagaacgagcggatcgagaaaaaatccaacaccatctaagaactgaaataaattaagatctcgtatcagcaagaccttaatgatgctttaaaggagatttcttttctatataaagaactcgaggccgagaaggaaaagtgttgtgaggagcaagagtctcatatagcactttaactagttccgtgaaccttgctcatgtcattttgctggcccgcctctaagagactatccccaacattagtagccacttgggtgatgatatcgaggacttttctaatagagtcaaaactttcaacaattctatggacgagtaccttcaggattacgatgggggagtagctgctggtgatgatgagggcgagataacggtcaaagaggtagaggacgcagaagatacaaaagatgctcaggtgggcgacacccaaactctagaagttgtggatattccctcagtaaaggatgattctcttccccaggctgtccttaaagcactgcctgcagacccaatctgtaacgccctaaataattaggcacgctacccaaaatgcttatgaaaccctaatcccctnnnnnggattactaattaaaatagcgcagaa

SEQ ID NO: 81964 - DNA, 2476 bp, Cannabis sativa
atgggacggggatgggggtataaataggtagcggggatgggggcggggattgcattccccgtacattaaccgtccaatttccatctctagatataagtgggttcttttagttcgacattttaaattagagcattgctattaggcatcagtggtgtctagcaccttctcgatatatcgcgttacgattgactagcgatactttttaaaatctattatattaaattatataggactcgataattagttgtaccaatagcgatattgacacataagaaggtgctagacaccactggtgtcctttagcatttcactttagattagtagtacttttcactcagaacaattttttttacatctttttagattgatgacacttgttaaaagtaccacattagcaacgtggtgttttagttctaaatgggtcgagcttctaggtactttatcataaaaaagcaatggccataattaatgtttactatttactcacccattcactatttattataatttattacaactaattaagattattatatattggtattaattgactgtaaaatctgcatctggcagtgatgatgatgatcgacgttctagatgtattataatgtattataatggtaagcaaacattacattattaatttttattttattattttttatttatcttcatcttataatattaataatgaataaatgaagtattatgcatatactgacaaagtggccaccgtttgtcgtgtctggaagaaagaatcgaaagattaaagcacaaattaggtagaaatttatttccaacttaattatttatatatatttgagggaatgaaacatttttggcttagatcaatgagttaaaatccgtggactttctagaagaaagatcaagatcgtttttttaattataaaaggaaaatcagacaaatcatgacttcatagttaatttatttaagatatacttagttggcaaggaaagcaaaacttgatcttcaagttcagagcaaaggcatgcaaagttgatgtctaaatatattatataaaatattattaatttgttccatcaaagaaaaatgtattaattatgtgaatgttcgttggactggtgcataactatcccagtattttaagtattaaaatcaggtataaaaataaataataataaagtataaaaatctgacaaaaaatatttttattgttttttttggctgaacaaatttctttttattgtcattacttataaatgaaagaaatacagatatttacggatttttttagtgccgtttaatattatcgttaggatcacttcactgcatacgtaattgcttactctatatttttttcccaataattataaattataatctgcatatttttagttaataaaaaaaaaaagccatcataaaaaataataataataataataaatctatcgtcagaattattattcttttgatttggaagcattttcttgttattattaaaattgttgcaatttattcttttatttttaagaaaggttaatgtgtagaaaggcaataaatttaaatttaatgaacagcctccagcgtgtggtgtacaactactgaatttcgaataattatgaatgtgtatacagtaaacagtatatatgtataactgtatattaattaagctatgatataatgactctttagaaataatgtatattagttagttcagcagttactttcattgagacctgggaagcttctaatatttggtgtgggatgtaaaaactaaacccagatgttatctatcaaaagtctacacaatgggaactatatattgtaatgtaaagtccaaagataacacttttaaggataacaaaataatttgatgaaagaaaatgtagcacatggtaataaattaatgtgagactctataggcgtgtttctcagttttctttatttatttttttgaaagatgtttttttttttgaacttcaaaagtgttgacctttaaaaattactaaatgtaaatttgaagatcacaaaattaaaagaatgtaagatcccaacatgtcctaaaaaaaagtgtgtaacaaaaaagagaggatcacttcgtaggaggaggtacccgggcacgaggggcatcagccacaggttaaggtcccaaaaaactactacttttggtgacaactttttagtcacaacataaattttttatgactaaatgtaatttttggtcacaacaaaaatttacttgtgactaaaacatattatttagctacaagttgtcactaatttagttttagtcaccataagttgtaatttttgtgacatacttttagccacggaccttttagtcacaacatagaaatcataatttataattagtcacaatttttgttatgacgaaaagtaaacttttttgtagtgtccccgcacgaggagctccccacgacccgcccttcatgcacacggggcacaccccccccccctcctctctaatttttt

SEQ ID NO: 81965 - DNA, 2097 bp, Cannabis sativa
tttcatagacctttttctttttttttttgtattgatgagttttttttcttttaatgaaaaataaagttaaaacaattaataggcctgcaaaaaaaaaataatcacgtatataataaaatatttacattttattttaatcattatagcttattcgaaattttcatatgaacttaaataactacaacttataggagctgcacaaattatataaatgttaagtatggaaaaaaggagaaaataacacaatatgcttcaaatcatcatacttgtccatttatatatatttagtggtgagggatggatgagaaaagagtgaggtcatggttttaactcaagacttttaagctaaacactattcattgattgtaaaatactattacactactgcactaacaaaaaaaaaacaaacttctaaaacaaggtgagttcagtctccagtctaaaattacagtacatcagtgagctagtagccaaaaagagtcccaacccaatggacacgtacgcccaatttctaaagcaagtcatgaagaccagtccaaaatatattccaacatcaaaccaacgactgactcctacaattgcactctcaaaatatccaactttaacgttattagctctctttgtgctgacttgttcaaataacaataattaaaacactgccatctattaagctttacttgaaacatatcttcttttggcctaaagatcgctgaccaagttgttcttatttatagttaattaattactctgctcattataaacggagaactcatcaacatggtatttcattaattggcgttactttaaattaaataatgttatctttaatttttatatacatatatgtcataatcgattaaagctagcttagagactggttggtttggtttacccatttctcacgacaaaattttctggtccaaagaagacaaactcaataacatatgatatatacattaaaagaattaatcacaatgaacgttttaatcgtcagttgacttttacttattagtactacttgtcttgtattatacaatcagtaaatatcattatattacacaactttcacagatcacccacataagttgaaagtttatctctataaagtctctaagtagttggccagctttacactttgtttatctcagcaaaagctctcaaaataaggtctttctgttacaaccccatatccacttctcaatacatactgataatagagagactagtttcttgttatctatattctgtatagaaaaagaagaaatgggtttatgctattcttgcagatcattatcattatcaacaacctcaaacaatcgacctgaattcaaatatgtaagagtggttcacttgaacggttacgtagaatgcttcgaacaaccaattccagtgagccaagtcttagaaaagccttcaaaaaacttcgtctgtaccccaattgagcttctctcgagtggtttcagaccccttaaaccagaaaccttgctccaaccaggtcgaatctactttttgctaccttacacaacattacaagctgaggtttctccaattgacttggctactctagtaaaacggctcaacgcagccgccaccaaaactagccgctccggctcaattaaatcatcatccagcggcttattggctagccctttgtccagccaacttattggctcccctagctcgatttggagctcgccctcttggagcccgaaccggtttgcagaacccgattgtatgagtgatttggcccaacggtcggttagagctcggtcctggaagccaattttggacactattagagagaagtcctttcatcgaaggagtgagtcagagttgcaatttgagtcctccaaaagatttgaggtttgattaggtctacaaatatatatatttatttatgaaatttgagaaaaaaaaaattgtgtaatatagtgtagtaatggggtgttgattaagttcaaaaaaaaaaaaaaaatggggtgttcagttatgttacaagaaatgagaatggaaatacagctcaatttattagttcaattttacttgggatggatttttattaaatttagtgatgaacatgaatgaatctttgttttt

SEQ ID NO: 81966 - DNA, 872 bp, Cannabis sativa
cactagggtggtttttccatccctgaacattgggaccgtttacctgagtacctggcccattgttctgcatgactctacctcgtagattgattggttggccaagtcctaagcatgagtgtccctttctttttgctaagattggttagttgtgtttctattcttccttggaacgttgtttgcaggcttttgcgaagggggacccatgacaccttttcttttatcattggttcgggcagacgacccaacttcaaggtggttaactggtggagttgggaagttttcctctggcaacttagattgtaactgtgcaatttcttgcagttttctagaaaaatcttcctggtttgtcagtcttttttgtgtatcggtgagttcttgtcccaaatctttttgtgatttggttagtagtactcttcttcgtactatttgttgtaacttttgttgtggccatctttagtgtcatctctatgaccctcctgctcctctttgtcaatagggtcatcaacgtgttgttcttcacggtgttgatcctcttggtgtaggcggttgcccacctttgatgtttcctcgtcccccgcaataactacctaagcagttgtaggggagttggttctcgttgttgttagttgaattctccctactgtctcgagcagttggcctgaccactacctttctcgttgcagccatcgttgtagacgaaaactttggtaaatctttcctcagctctcaatgaaagcactaaaatatttatcaagatttttagaactggttataaattcactaagcttaattatgtaagaaatgaattaaagaagaagagacaaagatatttatgtagttcgagtgttaataaactctagtatacgagtcaa

SEQ ID NO: 81967 - DNA, 1601 bp, Cannabis sativa
caaagtacataaaataaagcatataacgagatgcattcaaatccattaccattacatatgagatcatatttatttttgttcgggaaaagaaaaagaattataggacttttctaaccttgaaaacccataacaagtaaagtaggaaaaaaaatgttatgcaatatgaatagtcttatgatgtgtgatgcattcaaataattagtagtagttacataatcatatactatagaatatttggggtatgaactaacactactactacaaaaaaagatttttttattggtttagaactgattgtattacttttttgtcggctcacattattgacggttatgttcgccccataaatttgggtgtctaagccgtgtgttctcaactgatgctataaaaaaatattgtcagtgcaaaactgatacaacaaaattgttggggtatcaacccaagtcccacattggctagaaatgagaagaattatgggtatataaggatggatactattccattagtatgaggccttttggaaaggtgcccaaaaacaaaactgtgagggcttaggtctaaagcggacaatatcatactaataggggagtcaaggtgaggtagcaacccgacaaggtgaaagaacggggccccaacaaatggtatcagagccaaaggttcaagcactgggatagtgggctacatttgcaatgtgtggaagaaactctcaaagtgataacctcgcgattgaagatctatatggtgccttgtatcgaaagtctatctgatatttaggtagttaggtagtgtgtcccgttgatgattacagaagtagaagatggagatcggtgttaggacctgtgtcgaaagtcttcctaacaaaagtaatggtcaggcggcaagttcccttggtgatagtggcggcataaggtagtttcgctgaaggggaggccacaagtatgtggtccttggtttgaggggaggatcgttggggtatcaacccaagtcccacattgactaggaatgagaagaattatgggtatataaggatggaccctactccattagtatgagaccttttgggaaggtgcccaaaaacaaaaccgtgagggcttaggcccaaagcggacaatatcatactaatgtgggaatcaaggtgaggtagcggcccgacaaggtaaaagaacggagcccaactgatgctataaaaaagtattgtcagtgcaaaactgatacaacaaaatctgtactacgggttgaatgtacattctccctataggatggcaccccacaaggactcctccccctaatcaggtcaaccttgagtataggcagactaggcttgtacttagggtccacctagctcaaggactcaaacaaatttgttcccttttaaaagtacacattttgtttttattgattttaaaaaaaaaactatatttttttctaattaagggtgcaatttttttttttctataacccactaaattttagatgggtctggagttctccatctaaatagaagaataaagcaggaatgaagatcaatttttatcctaaatagggcagggacggagatcactccctatatctgtatgtatttttatttgggtaaatactat

SEQ ID NO: 81968 - DNA, 1313 bp, Cannabis sativa
gactgtcacagaactgcggattgtctcacagatgtggaatgttatgtcttcaatagcagaaatggcgatatttttattatcaacctcgaaaaggcatagaaaaagcttcagctcgctctcagggtcattgttgctatcccggtgaggttactctgggagatacactttggagcgtgtttaaatcacctgtcaacattgacccggtaaatgcggataaatcacagctgtgtgatttttcagattataacaaaatttaatttacgtgggacataatcaaagccaacaattttaggggataaaattgttgtgggaaatcaatctgattgtaattcactacccgcctatgtaactataaataggggtaggcacactaaaaagggacagaaaatcctttagagaacgacccctagttttggattagaaatctaataagatacactcatggactatgcagaattttaactgcaaaaccgcgtaaaaaagctttgtgttatttcttttccttttactactattatttctgtgcaaatccatcacaaaatagtctttaatttagttaacaaaaatttgcgttatcagttgggtgcttttattgagagccttcgtgaaaaaagctcagaaaaaatcctcctaatcaaaagaaaaacctttctccatggccgagaacggagaaaatgttgacacttatcctaaagagaccacccatcgtcgtgccggaaaagtgccaatggactcccggaggcctcctaactcacaatccatgtggaccactcgttctagaagcacccaacctgaaggtggtccaagtacacggtccatacgttcaaggaggacttagcatgaaattggccagaacccgagagtaggggataaagaactcgatcttggaggtgctcaacctacggaatatgataatgatggtgcctatgatcccacaagatacatgccaattatcgagttggagaattgccgtcccaagcaccgccaggaggacacaaaccgaaaaaatgctgagttggaacaggaggcatctgcgaccagggcggcacaggagaacaacgcacaaaatcaacctgatcctggagcgagaagaccacgaggcagacatcgtggctcacgaaccaggggcagaagatggctcagaagaatcctccaaatgcttaggaagatcaacctggggaaactgagggtccttctgagaatgaacaaccaaatggtcaaccataaccttctcacaaaaatgagaacagaaggcagccaaaaacaagggaataagaaatccctcgtgggaacgagggaaatcttgggactca

SEQ ID NO: 81969 - DNA, 1915 bp, Cannabis sativa
  modified_base (819)..(821): a, c, t, g, unknown or other
  modified_base (1230)..(1238): a, c, t, g, unknown or other
ttcttataaactaatgctctttttgtggttagcttaatttttttgaatattttcaattttcagttacatatgcataaattattacgagggccaattgttaaataacatgaaaatttgtgagtatgtgatagtaaactaacaaagttttttttaaggacatttgaacaaattatttgtaaaaagttcctatttaattaattaccggccatgaccataaatattattatttatttctacattaatgagtcattgaccactatatatctctttttttttttttctttttttttttttgcccctttactatcctcttctctgttttttttcattcctactaagacatataaaaatagaagcagtttctcactaaaattaatctaatcgaacacataaagctatcctatatatgagattactacaatatctcattattattagacatataaaaatagaagtagtttcatatatgaaaagtattttaggtcatctttaataggatattaaaaacttaaatttattattatttttcactcaaattaatctaaccgaacactgacggtttattaaactgtaattagaattagaataattaatgggaaaaatgtatcggtttaaaatagaaaataatcagaagtaatttattatgctgtttactaaattttccgaaaagaaaactcgaatcatattattttgtttacataactagaaaatgtaatcggaatgctttaatttaataaaattgtcattattagaacatgtattttattttctgtttatagatttttaaaggcatatttgtctttttcatttttaattaannnaattaaaattaaaataaattaagatagaaaagggaaaggtattccctatgaaaatggagggagaacctttccctttgttttctccctgggtcccactattttttctcttttcaaaatttagtaaataattgtatgagaatcaatagcataccatgcattcccataccctttaagtaaactaaataatgagagaaatgtatcgatttaaaatagaaaataatcgaaaacaataatttattatgctgtttacttaactgtctggaaagaaaacccaaatcatattattttgtttacataactagaaaatgtaatcagaacattttaatttgacaaaattatcattattagaatatgtaactattttctgtttataaatttttaaaaggtatatttgtcttttttatttttnnnnnnnnnaattaaaattaaaataaattaagatagaaaagaaaaaggtattcatatagaatcaaacagtttttgtcatgtaatcaatctcaatcacaagtttatatatataattatttatgataaaaattaaacacatatttttgtgtgtaaaagaagtgttacaatttttttgatatctctaacattactcaatttgtacttacatatccctactagttggtggaatcataccctaaaaaagaagtataagttcacaaatctccaatatcaatcaattaaaacccacaaaactattttaaagggcattaaattgctacattgtttttttcttaccctatactctacaagtacaaaatatgtcaatgactcaactataactaattaaagttttaatcttcctttttttttcttgtcttttgggaataatgaccaaagtctaaccgttgaagaatattgctaaaagagtacatacatacatacatatttttatatatatatatatatatatatttaatggtagtagtagagtagttgttcaatatttaagctattctcaaatggggtattttttttttttttcatttgatttgttgtctctccatctatctatccacatgcacttcctcttgttgcgctttataatatttgtttttacaaactgtatacatacatacatatatata

SEQ ID NO: 81970 - DNA, 1014 bp, Cannabis sativa
ctataaattactttgtaaaacctactattgcatagaaattgataatcggaagataatcatattaagacatattcaatagatataattgaattatagagagtcatatataccatattgaactaatgtaataaacacattcaaaggcaaggaaatgaactaaagagagactaaatggctccgatgtcgagtctgcttactattgtaagagcgtgaatgctatagagactaaatctcttgtgtggattctaattcttttccccaatttttagtctctccgagtcttaggtttgcgtttctctcccccgtgtgagtcttgtttctttgttgtgttcttttgtgatgggggaaaagggcaaagagattcaggtggtttctgtagacttggagaacgaagagattatgaaacgagatagcaatcttgagatggaaatgttggaactttttgaggatattacactagaagatgtggtggctagcaaggcgtgtgtaggtaaggtagtgggctgtaaaaacatgccagcctctgttgtgaagaagattcttggaggagtgtggcgcaggctgggcttttggagaatgaaaaagtgtgaggatggtgttcttgggttcttttttgatgaggaagatgattaccattttgtaatggaaagaaggccttggatcattaatggtgtcctcctcaacattaagccaaggccggatgagggggaggttcacagtggtgagtttgaagtggcaccgttttgggtgtaatgcgatttttatcgaataagaacattcccatccttgctaaaaaagttggcaacttaattaagaaggaagagaaaagtaaggaagaacttgttcgaagaggttatctgaggagtaatattgagatttggctttctcatcctttcccttctggcttctttctcaaggcagatggcaagccgaattcttaggtacaattcaaatacgagaagttacctcatttatgctttagctgcggaaagcttgcgcattgggaaaaagttt

SEQ ID NO: 81971 - DNA, 1980 bp, Cannabis sativa
  modified_base (1819)..(1837): a, c, t, g, unknown or other
actttgcaaactatgatttcgacacaattttccaagttaccagcacccaagttgacatcaaacaatatatcaatcacaagagtatcaacctggccacaggctaccgaattatccattagtaaaacagacttatttcactcgttacaactctgtttggcgtgattccaagtgctttggaaatctcgcttcaagttttttctatgcatatataatagtaagatctcaaatatgaagttttcaattcgaaaatcactccaaattgaagtgtgattttcaacgaaataagctaaaaaccaacaatcaccattcgaattcaaatataagcatctcaaccattggatcaaaattaatggtcaaaattactccaaatgaaatattcccaatttcttaatgtttcattattattttattggacctccattcctataaataagaggcctctagctcattttttaatctttgaaatctctccataaggtcataatttctctctctaaaactcacttgtttctctctttagaacttgtgagtgagagctctccttagctaattttcttatacgtaatttaagatatcgtgaataataaacgctcaaagtagacgtagctccattacaattgtgataaggggaatgagctactataaattgtggtgtctcttttactttcttttctctctaattatttttcctattgcttatcagaatatacagagttggccatttttcaacgtcaatattttgatattttcattgagagctaccactcgagtcctttggttgccttagagtttttagtattttgctaggtgctatgttttgaaaggaattcataagctcaagaactaagaactcttatgaagatggtcactacgagatttgctagtgtcggtcgagactcttttggcacccactttggtggtgtgtcgagagcccctgcctcaagactacctcctaggctgtcaacaagcaccagtattgttgctgcagaatgcatcccaccacatgagacgcatgtggacctaggcgagtagtaggcaggcacaggcctaggcaaggaggacaagctgaaccttgagattgagcatctgaaggaaaatgttgctaacttgcaacataatttgcgaaagtcattggaaaagaagctggaggagtttcaaagttagttccatgaacaatggaccattgtagaaactcagcaagctgctcgagagtaaaggagagctagccttgctcgtgtcatcatctctctcttcttttttcttctctgtaacaccttaaaagctatagttagaatttacttggtttaacaccagtaatctgtatagtattatctccacataaatacaactaagattggagtaggctattaccattatcaaaatgaccgaatctttataaaattattgtgttcttaattctatttcactgttcataattcacagccattgattaatttggcgtttattagactccgagtgagttggctatttcaccagtcaaccctctttttttttatttttcttattttttattctttttatatatatttattaatcaaaaaatatatttacatacaaataatgttaagtctgtgtgcaatttaatattgtttatttatttaattttgatgttattttgtttgtcaataatgcttcaaagatttatatattaagtatagatttaataacatggatatttctaaaaaattaaaattttgatgcttaattttttaataaaacaatttaataaacatgttttttgaaaatatttttgctattctaatcaaaaaaccaattaatttaataataataataatannnnnnnnnnnnnnnnnnntaataataataataaaaagaaatgttacaaaatgcaccctatatgaattaatgcatacatttcttttttttttttttttaataacaatgacaatatattttgtgttactgttttatgtttgagcttataaaaaaaaaaaaaaa

SEQ ID NO: 81972 - DNA, 512 bp, Cannabis sativa
gctacctcataataagtttttctttaaaagagagaagataatggttaaaaaatacatcaaatgagctattttacttcaaattttaaaaaatattaccgtacttatttatatgtagagaaacactattcatttttgaaataatattttaatagtattttattcatactttattattgtatattttatatatatgtttaaaaaatttaatatttaattgaatgtagagaaaaaataaaaaaaaaattaatatatggtgtattgtaaaagtttgaggtaaaataaaaaaaattaaaattttggtgaggtattttaaaaaatattgtgaaaatgtgagtgctttccaaatatatagttgcctagattgctaataaaatatacttagatatactcataatttaggataagtccaccttgtttctgcccctaaatgaaagtcagtactcaacaattgcaaaaccagctcacaatttcatattctacatggcatttatatcaaatcattcaatcctctg

SEQ ID NO: 81973 - DNA, 1149 bp, Cannabis sativa
aaaaaaaaaaaaaaactgaaaacttaattcaaaataaacaataatatcaatctagagatttattagggatttattatagatggtgccgaacgtcctatttgttttttttttttttgaatatctgttgataaaataattttgtatgtatatattatgtaataaatttgttattgtatgatttacaagtatagtataatacagagaaagagaaagaaaagggaactataaattttgagtggtttatatatgtttagtatatgtagtgcatattaattacaaagttaattaaagagagagagactatataatatgcaatcacaaatgtaatttcaatacaataattttatattaagttctaaatatatcatgttagttatatatcaaacacacatgcatatatataaagttatcaaattagttgtattatatgtaaacatttattatagcactttctaaacatgtgttcatgatgttgatcttgatcagcctaatttaataatactttaaaagttctaaaaaaccttaaagtggttttaacaattaggtttgcttcgtgtatatatataattacagtattactgataaagactaaacctatttttttttcaactaaactaatacctaatcccactgtttaatccatatatagatttatatatacgtcactatactataaaaggcagaattcataacggtcctaaaaatattttttcttgagaactgtcgctataaaaaaattaactgagtgttgaaactcgttgcttataacactatagtatagacgacggtttaaaagtgcggagaaaaaaaaaataaaaccactattcccgacggttctaggcaaagtattagcacgattcataaccgtcggcaataggggttagcaaataaaacccactcgcgatatcactaataacccaactcgacatcaaactccctctcgatctcaaacccactcgaataggggttacatttaatttttttttttatatatatttttactgtgttttatggaaaaacaaataaaaaaattataaaaaaatcacatgaaagtaacaggaaaacaatataaggttaatatataaattacaaaaaatcaacaaaacgacaataaattgacaagaatacaacataaaaacattaaaagat

SEQ ID NO: 81974 - DNA, 1028 bp, Cannabis sativa
ctgagttctttataaaacttactaagaaacttaacttgatcttcctcgactcctcgcccggttcgggtttgacttggagaatacagcttgaactcttacttcaaacttaaaaaagaacttgactgatgtttttctcaaatgttttatttgtatttttttaactatcatgttaaattatttgtaaggaaagttactggttttattataaaattatgagttttaaaatgcgtttgaggcgtactaaaaaatatgttattcaaaaggaaaatgtttttttttggggggcctctggttgggtgggctctaggcgcaagcctaacacgccttagcctagtcttgaccttgtgaggtgtatgccttgaggcttaaccttgtgtattctaccaacgccaacctcgaacaatacctgcaagaagaagaaacagaagaataagaatatgaggaagcagtgagtgagtgagtggccacacataggcatcaaagaaggcgaacagaactttgaagacatttgagatgagaaactactatgaatctaaatcataaaatttccaaataaatttcaatcataaaacgcttagtatttggtacaatgatgtaatattgtatatgacacatactaagattgttttgtctagaaagattagttttcaaataatatttgtgttagtgtacttaccttggaacctcagccctgtctaagcaaggttgggacgaagcggtaccttgacaacctttccaattgacatgggagcatttttgtgttaatcagtataatattgtattttttgtattctttactataatagatacaaccttgttttgtcaaaattaaacaactcattttttcttagaaaggtctttggttgaaaagtttgatgaaccctacacacttacttgataatcctgaagatttctcgtaagtaagttgtggaggtccattctaaaaacctccaaagtaacctgggaacaagttgaacaaaaaaaattaaatatatttaaaaaaaaaaaagcaaacaagagtggatgag

SEQ ID NO: 81975 - DNA, 969 bp, Cannabis sativa
acaacacccactcacctccttcatccccctttcttgaaaaaccatacaagtcagcagccactcatgacacaactgccaaagaaaatgtttaatctttagcggaaccgataatcaccacaccttcctccaccattgttcgactccccccatatctgacccctctataatctctctttttttgatcgacacttggtatccgctttgcacagtatactccccactagtattttaatgttagataatacagtccacactatccaagtcaaccgaaaccactccaagaataagatcgacatcctccttacaaaagtgagcccgcaagaactcagtatcccattccccagaccccaaacaaagatcaactgctcttaaacctgagggaataactggcttgacatgaaaagaaaactccgtaggcctcggtattcatctatcctccacaatccaaacgttatctcccgatccaatacgccatctatacccttctaaaataatttctctaccccacattacactcctccaaactaccgaaggacttgaccccattttagccgataagacatctccatttcaaaaataatgatgtttcaacacttgcgcaaccaatgaatcactattccgcatcaccctccacacttgtttggccagcatggtcttattaaaaagctccaaatatttataattcagtccctcttgcaccttccttttacacaaatcttctcacaaacactggtgtattttccgtttcctctccgtcgaacaccaccaaaacttagcaactaggctatgcacactattgagaaaatattttgagagctgaaagcagctcataacataggctggcataccttgaataaccgcagtccattaatgtcaccccgagcctcgccagccttcactaagcaagacaacgcctcaccacaaaaaaggaaaagaaaaggggagaaaggatctcccagccttaaaccc

SEQ ID NO: 81976 - DNA, 777 bp, Cannabis sativa
tgtattgtacatgttcaggccatactagaccatgatggttgggtctactagatgaaagatttcgtattctagcttttgccgcttaggtcggcgtgtaaaaataacttgtaatattttgcaaaagtttttacgtgatcccggaactaatgtaatattttggaatatttgtaaagttagataattataagttatgattttactccgtaatggatttaaagtttaaatttcccgtcttatttcttgtagtctcggtttagtgggattagcttatatttaatggttgttcgtagcgtgccttttgttagggcgttacactagtagaatgttgttcttctttagatccactccgatagtctaataaatcaagtcaatgcagcctactattaagtaagtgaaagatataaaagagccatatcacttattcttttgatttgatcttacggagcctgttcatacatgacattgaatagagaaagagaaactgaatgagaatttcttagtattttattttaataggatgatcctttatttatacgaatatgtgagccataaattaagaaactaaggagagaaatagtaaatacaattaatggtagttaatataaaaaatttgagagattaagtgacttggacatccatataaataatattttataacaagactataatattaaattatttttatattattaagagtaaaatataaaattttattagaacagttacttattgttgcccctaattttgcccaatatacgtggaccaaccggacaatga

SEQ ID NO: 81977 - DNA, 751 bp, Cannabis sativa
catatcgctaaatatgtcgctaatgtatcgctaatatatcgctaaacacaaacaggacgataaaaaaaagaatcctaggtacgactgttgtatatcgctaatcttatcgcatatcatcgcaaacatgtcgccaaacacaaacacgtcgacaaaaatcatgaaacctacgtcctaaatgcaatgtatcccgaattatgtcgcaaatgtatcgccaacacgtcgagaaaaacacggttctaacaaaatccccaacttttttaagacgatgtcgcgatatgtcgtgaacatagtcgcgatacgtcgcaaattgataaaaaaaaaccagaacacagactggcgtcaatgaaatttaaacgaaatcaataaaaattgaacataaactaaatacattactttacaatgaagcacaaacaattaaaaactaatcaaaacaataaaaaagtttagacaaatacctttttttatgatttcggatctgggttttgtttggggtggtgtcgcgatttggggtttcacgatttcgtcttggtctggtcttagtctattgggtttcacgatatgtgaaatactttcacgatttcgtcttcgaaggtttcgcgatgggtctggtggtcgtctggtgtgatgggttttgggttttcgcgatgagtcagaggtggtggttttgttggggtttcgtagatggcctggtggggtgtcgttggtggtccggtgagtttctttggttctccggtggggtttcagtgttttt

SEQ ID NO: 81978 - DNA, 2414 bp, Cannabis sativa
catatttcaatttaattgtgattagttttacctataaatataattatttttaaaattacttatataaataaatattaaaaaaataaaataatgatatattaatctatggcatctttatcaatacaagatttatatccttaattaatatgaatgtcatcattgcttttcttttcaataatgaatatgataattgttaaagtagttgtttattaccacattaaaatatatatatatacatatttcttaaaaaaaaaatcacaaaatattgaaatcttaattttgatacgttgattattaagaattttttaaaaatttataaataattttaaataattataacatacacgttaatggagaaattatattaaaactttttaaatgcataaactgataaagagtgtcacaaattatttgaatcatataattgatattgtaaattattcataattttttgaaatttataaataatcaataactacaacaatgatcatcaaaaattaaactaagaaattatttaaaaataaaaaattttaatttacttaattgataaatatagaattgtaggaaaaatcatttcaggaatgtactataaaattactcaaagttttatcaaaaatttacttattattattttggaattttatttatacccaataaagacacccattcaaataattttttatttcttataaaatatatatgtttagtttatataattttattctcccttttatattcttgaaagatatattttaaatattaaaataaaaaattacataaattttaagaaaataattttaaaaattatacacaaattaaaaatattattattttttaaaaataattattaacacaaaataatattttttttatatcaaaactaatttttttaaaaaattaatttacatttattttttttaatgttaagatgtaaatatataatgaaaaatttacctaaaccaaaaatttgaaaaaaaattacaaaaatacatcaatatgaaagaaatttcatttttactctttacacttttttatttacaaaattacctctttagtaaaactaataaactattttttggttgttttatagtttatttataattgtattatagctatcatgagattatttttctagttattttataatttatttataattgatttatggttgttataatgttgatttcccgttatgtttatactttttgctaaacaaaatatatttttttgtaattttaaaactttacaaatatattttataattaaaaactttagaccataaaattataaataaaagagaaattttatttacaccctaaaaacttcaaaagacaccctattttaataattttaattttatataaaatttatatctttaattgtactatgttttttaaatttttttcttccaattcatattattaaaaaatatatttatgaaataaaaataaattatatttaaaatattatgacaaaaaaaaaattatgaattttttttaggaaaaatatacacatggttagaaaaaatatgaaaataaaatcatattgaaattaacataaataatgtgatgaaaaaattaaaaaaatatattaaaactactttttaaaatttatttaagtttatttttttaataatgagatataattatcattttatggtatgcaaatagaatttcccacaaaatataaaagaaatgtatttttaaaaaaagtgttcttattggcaccaatggttcttagcatctttagatatgtaacctgatacctaattaaatcaatagcaatattaatatatatatataaaaaaatatatatcttttatcgattctcttttaaaaattattgttgggaggaaatatatatgcaataaatgtatgattattatttatttatcttttgagaacaaaagcaaataaataaatggtattcaatgcgaagagttcttcctaatataatcttcttcttcttctctactgattctcctcttctcttctcttctctctaatggaggaaaccttttttcagactccaaaactcaatacataaacctaactacatcattcaatctcttcagatttgtatagaattctaatatatatatatataataaggtattatggagaactattttctcaaagatttttctgtcgagtccaagcatccatcgcctgaggctcagcgcaaatggagatccgccgttgctcttgtcagaaaccctcgccgaaggtttcgacacgtcgctgatctcgttaagcgttccgaagctcagaagaagaggaagagtatccaggttcagttcttactctctctctttctctctgtctcataatatgaatggttgtatggttgattttgtgtgattgagtattgttagatctgcgattgtgttttcgtcgaaaaaatttgagtttctt

SEQ ID NO: 81979 - DNA, 571 bp, Cannabis sativa
acaactgaaattaactaagtcatctaactaatagcagaaaacagttttattggttaacatgatcttttaacactttttccatctgtgactattttagtgggtcttcaattgtattctcggcttgattatgtcaatgttgaagttaagacgaactcccaagttgcttctaagttgttgaacaagaaagagtcgtgtttggcaaattatgattgaattttgtaagatatttatatagtttgtaattataattttaatgtttttaagattttgttctgtaatcatttagtgaactctattatttataaccttgccgaattgactcttttttgatgacgctagaatttggtggtcgaatttatttgagtttgtgtaagttttttaaacttattttagcattagcctaatgataatttgttgaaaaagttgacttagtcaactattttttaatgaatgaaagaattaatggaaatgtatcccacatctttttgaagtaaaattgttggcaattccaaggctatatatatgagcctttttgctttgttttaaattacatcaaatcttgttttaataa

SEQ ID NO: 81980 - DNA, 589 bp, Cannabis sativa
cacttaccataccaaaatcctgctcacaccagtcctaaattgaagggtattatgttagactccaacttatctaaatcctccctctcacccactgtgtctattgtgaagaacacaagcaaaactaatcccccttccttaattcctccatccgcccctttgtcctctacttcatccgatgttgctgtgttatcccatattttcactcctgacttgggacacatgtctttaaatacctttgccacttatcccccatccactaataccttgcagtcaacatctaactcccacatcaataataccatctccaccaaaggcaaacaaattttcactacgactccacccactatacatacctccatccatattgacaaggaaaacattgctcctaacccagtttgtaagaggcagaaggattccttatccttgcggaacaccttgaaacgctgtcgtggactctcctctgctactccttcttcttggtcagttgaagagggtgctgaatctgttgtttcctcctttgctgaggattctgctgattgttttgactactctgcggaggttgctatgcaaccccgctcctcgccatgaa

SEQ ID NO: 81981 - DNA, 1258 bp, Cannabis sativa
gtatatgtatctcctcttgggatggattgggatgatttgagaagagaaaataccatttttagatttttaagttcaagcaaaatactaccatttgttttctcaatttaaagaaaacaaaaggtagtatttcacttaaaacttaacaaagctaaaaatagtacattttcctactttgagcttttcataataactcttgattatattgaacatgtatgtgtagctgtaaatacttgtcaacttgatcaaaacccttttatttcacttatagaaaaatgtaatcattgatttcaacacaaaagaaaaaaaaaaaggttgtccaaaataattggcttgccttttgagtatattaattgactcaattattgcaaccaaatgaatatacttcttgacttgactaatgttcttcctcataaaacaaaattgattagaaggtaatataaagaattggcattaaccaataataatgaaatctacaattgaatagtagacaaagagaacaaatcatccataagggtaggaaggaagaagaagaagagaattgtttgtaaactttattgaaaccaaaccccaattaccattactaacaaaactttgttaccacaacgctttatcttatataataataataaaaaaaaaagaagcaaatcttggaaactcaaaacgttttctttactaacttaactctctcattacttacgatcccccaactagaataaacaacacacaccatatatagaaacaagttagaacaagtggcacattggttagtgtggtttccgatgatgatgcagcgatgcccgtggcacgggaaactgctgtttgtttttactggctgaaattttcacacacaattaagctctacaacaagagcccttaccccctcccctggttttgggccttaattttcatgccgagggtgttgttctggaatggagagaccgagcgagccagacattggagaaccctcctttagcattgctagctctggcagctgttgtttcttgtagaaatggtgggattcgtcctgagatcaaaatggtaggaaggtgtaaagacatgatggaggaattaccattggcctgagtagatacgagcatcaattaatgatttcaaccggtaactctgcctcaactagaatatgtagaggctcattcagatgctcgtacccacataataaataactaacatttttatgataaaaaaactaaagaaggaaacagcatgctagaaaatgttattattacccgagttggatcct

SEQ ID NO: 81982 - DNA, 1159 bp, Cannabis sativa
  modified_base (537)..(547): a, c, t, g, unknown or other
gcaactagcgctgcaaccagtttaaaaactcaaattgtaaatttgaaaagaaaaaaaaaatagtatatgggtaattctccttaatttttttttataaaatatctacataattttatttttaaatatatataataatattaaaaataaataaaaatattttttttaagtaattgagatattatattaatgttaactaaaaatttaaaaaattcaattaaaacaaaaattctgtaatataattatattttatatagaataaatatgtgagataatgaagatttgattatatgcagaaattaaggggtaggtctggtcttttttattttgtaagaaatttatacataactatagaaccgttcttttgtttttttgtttctttaagctggaagattatgtaatcaaacgtgacatttttatttctctaatcaattattgtacgattttaatatttattaaaattgctatcaatataagaatgtcacagcttgagctgatccagttattaagtaattacaaaaataaaataataataataannnnnnnnnnnataataataataataacaaacaaattaaattgtacacttgagcattaaattaaatatatacagaaaatgatattttatttataaaaatcatttgtatagttgcagtaatcactaggtactaattaattaatgaaacttgacctttaaagattatttttctttcagaaccggctgttaagtagatatggatatcatagcaatttcaatagaaaattagcacaacactattatatatctagtaaaaaaaaagtatggatgaatattaatagtagagtaatttgcagttaaatctttcaaacttttattttactaattaaacatctaacgattatttttaattttggtgacaaattaaagtgactaatttatacttttattggtaaatttaaaatgtgtcacaattatacagaaagggtctttaacttatcttcagtgtttagcatggttatagttgatcttctgttaaaaaaaaaaagtacatacatagtacaattaaattcttataaaagttaattccaaaaaaaaaaattcttataaaagttcagtttcttttgatcatcatcatcatcaaatctctatcgaattgataatatatcgtacaattttttttat

SEQ ID NO: 81983 - DNA, 993 bp, Cannabis sativa
gtttaggaaaaattcaaactgcggtcgcaccgcaaagaatttcaaaccgcatttttttgcggtgcgggtggtttgaacggtttgatgaacacccctaattctacccctccctttataacttacgctataatatgatctagggttattttggtcatttcctaattttcctagttcaaccaactcctcaacatttaacctagtccactataattctaatacaacacaacttaattatcgtgatatttctgaccacttcgtccagtttccaaggccgccgaacccgaaaatattttatttcacaaatggtatttaattatttatcatacccacacaatccgataaaatctttgtaattaataatttacgttttatttaatcatttattaatttcacaataattaccacacatttagcttaagtaagattataatctcactccaatattagcttaatcacatatttaataaaatatgtccacttaaatttcataatattttttaagatattacatcagatatgcgaccctgaacgaaggatctttgccgatcggaaccatggttgtgcaatgactccaccgacaacgacaatccccaaacacgtggccctccatccatccttttagaagggaaacccttcgaacaaatcgaaaaaaaggaaacaccttgaagaaaacacacctccgacacagccacacaccatccaaacccgtactatatgagactcgatctgtcaatgaggcaaagaaacatagaccaaaatctatttcaaacaacgaaaataagagagaacttgaatttccctacagtgtgaaatcagcaaacccgaccaaagtttcacccaaacccaaaagaaggccaacaggccctggtcagagacaaagaaaaaccccacacaactgcttgttagggttagggaagttaacaagagagaaaacccttattcccctaatgtatttattttacttaaggatatttaaaactttttaggtgggta

SEQ ID NO: 81984 - DNA, 2248 bp, Cannabis sativa
tttgagaattaattagggtggatttggaaagccatgtgagaataggaatttgaggtaattacatattttgatgtgtttatcttgtctagccacgtaattttatatcaattgtgtatttggaggtaattggaagtcctcaatttttatatttaattctcatactgtcttaagaattgaatgtaattataatgtgtaattacaaacgaaagtattttaattatttaatatgatttagtccttcatttttattttctattctcaaatacataattttatttttgtgatgtaattttataaaattttttaatataatttttcttgtattagttcactactacaaaattcactaatcacgtcggtcaacacaactgtaacgcctgtacttgaaaatttactaatttaaaatttaaacatgttttattatatttataaaatttcgtaatcgggatcccgagttttaaaccactattggaaaattcatataccataatatagctacatatatattttttaaaatccacagggcggcaacaaaatatgactcaaaatacagtaagaccgaaatcctctgggatgcactactgcgatatgtacaatccttgccgagccccaactcactgctcctccagccaagctttatccttacctacacaaggtagcaaactcatcagtcgacagactaagtaagataagcatataacaaaccacatatagtcgacttgtgtctaggtgcccatacacctattcacaagactaatcgaatgattaagaatgttcgtaatggttgatgatatatattgacaatgatatcacccactactagcactatgatcgcactgcgggaccgacactatgttcgtaccgctatgatagcatcaatagcacccaagagtacaattagccatgatattactcttaaccgatactatgcccgtagtgccgaactgacacactagttgtgtctctatgataacgccaattaatactctctgggaagaatatcactcttaaccaatatgatacatgtactgtcaaatcgacacaatggttgtgtcgctatgatatcaccaaaaaaatatacaatcacaaacacaacatgcatatagcgtatgttctacacaaatcttacctcgttttcgtgctcacgtgtgtcggtcagccctagtggaacagcagctcgacgctttacagggtcctaagccacaatatccaaacttctgatgagagacacgctaaagtatttcctagggacttaaaatcaaaactagaatttttttttattgatggataacatgacaatatcctaaatatcacaaaaatatgaaaatctagggtacccaaaactgccacaaccggtaaaccgaatcccagcaggacaatcggtttccaagcttactgccaggagaaccgattgacctgttctactgggcaatactgatacagtcgataggttcagtacaggaaattctaaaaatttcaccacatgcccaaacttaccccaaatcgtaccaaactctctagaacaccagtatacactataatgaaccaaattcaagcaataaacctcaactcaaattaccttaatctaacctcataatacatattcaaacattaattctcaacacagaaccctaaccaagaaaatcacacactaaaatctcacagaagcttaaggaaatcaaattgagagaagctaagagattataccttgatgtaaagcacttaaaaacctactagaattcctcaattagagctgagaaaaccacaattcctgctggctttttctagctcgagagaaagagaggcaattgatgagagagagcttctaggttattcttcaactttctacacctcttcttcttcttcttttttttattttataaatataaactcaataaatccctctaatatcagatcattaattccctaatgaaccacaaaataaaaggaattttctagcaaaagattattttgcccctaagcataattcaaaggttaaaagcttctaagggtagcttggtcattcaaaatcccgtctaattctcgatactatcaagtcaattatattaccccgctattagtaaaatttcaaaccatataaaaacgtgattctctaatggcccaacgtcgcgttccactgctaccaaaaacaaccacagaaaaataagatattcacatacataacataattaatacatgctgaaattaaataaatctccagaaatatgcaaatcataattaataatta

SEQ ID NO: 81985 - DNA, 1482 bp, Cannabis sativa
  modified_base (1411)..(1411): a, c, t, g, unknown or other
aaaaaaaaaaaaaaaattagataacttgtaatccattcatttttacagataaatgtaattcattcatttttacagataacttgttcatatagcataatacaactattccaattagatggggaaaaaacattagatataaaaagaaatatatattttttttaattaaatatatttttttttgattaaattgctgaattaacctcaaaggactgcccggtaactaacagataataactggtaagcttagtgtggtttatatcaaaagagaaaaatgcatataaaaatgtggttttataaaaatattaaattttaagcgaaagtttataattttattttaatgtcatgtagaattttttataaaagtaccgtctttttataaaacaattgtaaaacaattaaaacaatagtgaaacaattaaaaaacaactgtagaacaactgtgaaaatttaacacaatactcagtataaatttacacagtattgttaaaaaaaaatacagtactttttaaaaaaattccacctcacagtaaaaaaagttaaaattttggccgtaaaaatcctataaaaatcattaaatatggaaattattaataagaaaaaacaggttttttaatccttaaaaagtaatgtaagaaagaaaaatgtacactctaatacatgtttttttttaaaataattacagtagtcctatatttttcattatttgacataaaagtgatatagctaatgtatttttgcaattattttttactctttaatattcaattctatttatttggaccttgctagaagcataagaagtccatatgtccaattttttatggcccatactcaggtccataaatttagaaattcacaaattggaattatgaatgaattcatagcagcatactcagcagaattgagaactagctagtagtagcaaataatccaaacccattgaatattattctaataacttgtctaatataactcgaataaacccaacgttttgtaatttttaaaaatactagtgaagttatacgtgctaagtggagcaaaatattcatcagcatataaatattgagaaaaaatattacttatactcaatattattacaaaataatattcccactcaaaaatatatatataattatagaaaaattaaaaatatactctaaaaaataattgtacaatatatatttatatcatatttttagcacataaatagttattattctattatgtttgtaagacaatacacactttaattatttagcttctatatatattaattctaaataaatttagcggcaaagatatgatatgttatagttgtatttgttgtttttaatactcctgtaaaacatgttatttaaatcttatttttaaaaatattattgctcctgattttgcccaaaatacgtggacnaaccggatgatgacacgtggatgggaagggtttagcagttaaataaaacagctaagtcttcttgaaagcaa

SEQ ID NO: 81986 - DNA, 739 bp, Cannabis sativa
tttttttttatcctattctcataattactttatcgcatatttcattattgtttgtataatatttttttctctcattacataattgttcagcaacttcttctctcttattcttaaccttccaacaattctcactatctcactattttcatcaaattctgtatagaatatttaagaatttcattgtctaagatttctacatccatgaaatcaacactttatgagaaaaatgttaattgcatgcttctctcttattattttctttcacgtcactctcactgcacactttcacttattttgttctttgttaagttgataagaatttcattaattaactaagctttattaacttcttgaaatcaactctttatgagaaaaaggttttgtaaaatgcttatttgaaatatttgataaaattaacaaaatatttattatgatattattttctaaatattgaatgtatttatttttgtgtgaaaaagttttcggtttttccaaatttattaataaaataaatatgtatttatatttgtttttgtgtgaaaaggtttaataaattggtttaaaactatgctggaagaattgaattttttttaagaacaaagtttggattcatatgcgaagagccttgtatatatatatatatcaatattattgttataacgaacaattacataagacactattttttgtaaaatatttacatttttacgtttaaagaatatttttttatatttttacg

SEQ ID NO: 81987 - DNA, 998 bp, Cannabis sativa
agtgtttcgtcaatcggtacgtcgccgttttggcatttaccctttttttttatttgctgtagtaacctttaattatggtgaatttgattattacgccttttgtgtaatgttattttgtagaaaagggtatgtttgtagtttttttacaaaatagtcctttattttgtgcattatttggtaattactttggaaaaagtttgatcatgaaatatactaactttcaagtatagaaaatctgttaattacacctttatgtatagtaaattagtgataccacctaggaaaaagtttgattctgaagaaaaaaactagaagcccactttgaaagacttcaactttagtcaaaatgaaatactaaaatttacaaaatagtctgaggtaatttactctatgcgtgaccagtgtaaatctatggcccataatttagttaagtgggctttttcccatcagaggttcggctccgtgccaatttcctctatgtccaatattatattttgtaatgacggcgatgtctaactgcttttgatctaatatatgcacgcttttcttaaaaaaaagaaaagaccagtgtaaatctatggttattttgtaacataatacaatgtaatttatggttgtttctgtgagcatataaaattgttttactaataaatttttttgtaaaattattttggcaatacaaattttcataaatgctattttcatgtaaaatgatgatgtttatattttggtttttgacttctaatataatgtgactttaaatgagtaatttttcatattttttaataatttgctgaaagggtaagtttcaaatttcctttattttttcattttttgggcacactatgtatactaaattagtgatactacctaggaaaaagtttggtttttttttttttaaataaagacttcaactttaagtatctaaaattatgtcatgtcatgtaaaatgatgatatttgtgttttcttgttgatttccattttttacatattaaa

SEQ ID NO: 81988 - DNA, 1043 bp, Cannabis sativa
aaaataaataagaaaagtaatcgtaattctgttctgaatatctagaggctcaaataataaattggtatttctctgatgtaaatataaaagcgggctcaacttggtcatcataattggatcgggacaaaaagtgtggcaggataacatatgggctacattataaacggatgggcccacaaaattttcactattattttttagtgacgaaaatgacaacatacattctttggaatttttttactccaataccaagatttatttacgacaaaataggcctagaaattattacagaaataataacttttaaaataagtttatccatacgaaaatatatatatcttaaaaaatttacgtattatttcaagaatttacacatattctttacccatttttgaagggaaaaaaaaacttaccttggtaatatgggaattttcctgctccccgtgcaaaaaggggagaagaaaacttggtagatggattttattatttctttcttttctgtttttcttttgttcttattattattattctgaaaaaataactacttattgttgtcttttaaacaatttagtatctaattggttaccagttaaaatatgatttatctttggttattttcaaaatctatcttcaaatattaatttagtatctaattggttaccagttttttgtagtgaattccacctattttggtaaaatataactataacttgagctaaaaaaaataagtaataacaactaaagaattggttgttccatcaatcgatgagtacccactactaaaaacaacttttagtgataattttttagtcgcaacataaatttttgtgattaaatgtaacttttggtcacaacagaaaactacttgtgactaaaatatagtatttagatacaagttgtcactaatgtacttttagtcacaacaagttgtgactaaaaccacatatagtcacaacaaattgtaatttttgtgactaatacctttagtcaaggactttttagtcccaacataagaatagtaataaataattagtcacaacttt

SEQ ID NO: 81989 - DNA, 720 bp, Cannabis sativa
tttttttatagccataaaataaaaaaaaaagttattgtgtaactaatagtttgaattctatttatatgttaatttattttaaattttttaaaaatttatcttaaataattacaacatacacgatcttaaaaaaaaaattcgactatatatattttttttaaatagcgaaacatataaaagtgaatcgtaaattcaaaaaattaaacaataatatatgagataattattatgatatatgaatatgataattctttttaaaaattaatataaacagtttctagttaaaaataaatctcaataaaaatagataaataaataaataaaaccataaaaataacacaaaattaaaaatcttatttttttatcaaagaaagtcatttatataatttcatattacttttaagtagcatcactaaatggcaagtagatgagttacacgtaaatatgatgtgtgtatatatataaatatataaggaaaaggaattttatatatgtatatttatgggattaattaattgttgtttctcatatagattcaattatacataattattaagagtaattaacagctgataaatatattggttgtgtgtggctataatttgatgagatgtcattatataattttatattatattatggttagatccatagatcttctaattaattattgagtcctctaattataaaatgatcttaatatcatgagattttaatagc

SEQ ID NO: 81990 - DNA, 1265 bp, Cannabis sativa
tcaaaccattaaaaaatatatattaacatactaatgtgttatatatttattttcttatattatttattaaattaaaattatataaaacagttaatattaaggactgtcaaacaccatttaagtatgatattgtccgttttgaacttaaatcctcacagatttatttttgggtatcttctcaaaacgctttatttcaatagagatagtgtctatctttatatatcatccaagatcctttagccaaccaaatatacaataacaatttaatacttcagaaatgaattttcattcaaatttaaataaaatacatgaaataaaatttataatacaaacctgatgagagcgagtagatgaagaagtactcctcattaaaagagaggagtcaatattatttgagctaaggctcctattacaagaattggcgggcgccagctgagttggcgccggtcgaacaactgtcttaacaggaacgacacgtggtcgatgatccccgacagcctcctcctcctcttccgacaacaacaaccaatcttcactcaaaagataacgagaagagccagaagaaggagtagtagtagtacctttcaaatcataaatatcagctgagctttttctacgtacctccttatcattttgcttattattattattaaaactagaagaagaagaagaagaagaagaagaacagctttttctagtcttttggtgttgatcgtagtgcttgtaagttttggggttaagtagaaatagttgattgtgaagaagccggtgatgatgatgagatgtggtttggtggtggtggtggtcggcggtgggtggtggtttatggctgcggcggaccattgaacgttgatctatacttgagcatatggctgtggatgccggagaggaacacagaacatccattcttttcatcattattattaattagatataatttagtactatgttttgtgtgagaatgtatgtatatatatctagatgaatatccagttacttgaggagaagagaaacatgatgtgtttgagtctactttaatagtacgagttaaaataaaagaaagtagtggtatataggtcccacaacaataacaattataattatatagtgtagtgttgaatatagatagagagatagctagagagaattatattagggtgatcaatttcacaaatgtacacacacaacaaaaataccgttttacggaattttaaatatgtttacgatttttttgattttagttacataaaatacggtctttttat

SEQ ID NO: 81991 - DNA, 1227 bp, Cannabis sativa
  modified_base (26)..(27): a, c, t, g, unknown or other
caaacctaatcgttaaatttaacagnntattcttttatttttaagtatataattgcaatattggaagagaagaaaattagaaacttttttatcttttaagggggaaagagaaatttgaatttgctatatatgttgaaatcttattataattaatggttgtccaaattttccagtttgagttttgaaataaaatatagggtttagcagccaaaaatttctgactacgtaaaccaacgtattacaaaagcctctccatacatatagtcaatgggcaaagatgattaatgtcacatcacttgggtaattagtgttaattaagtcaataaaaatatcacttgtaattatcaccctcataaataccaatcaatttctttaaattaccatcaataaaaatattactccaactttttcatgttccagaaagttgctagagataccaaacaaaaaccttaattacttgttgtaaaacatataaaataatagagacaaatataatttcatttcattctttacgttaaaatgttccaaacttagctacttttattttattagtttaatcgacgatcgagaatttaaaatctcaatatgcacaatcttgtacagcatttttgtctaaaatattatatcggttaatagattgaataatataatattattataaactatgggagagacaacaaataataataataattattaacagtggtatttaagaatttgatgaaccaaattaaaacattaacataattttgtgatctaacaaatagggggattttatcaaaacaatgatgtaatgaagatgataataatatataataagattaaatatttgggtctcatatcatatcatatccaccgacctcattttaatacaacccaactgggaattagaggtagatagagtactagtagtcggttatctcaaattaatatattatagattaattaataacttaattagcttagatgaccaaatactaaattggaaattgctttttcaaatatatatggataatttctttcaaaaaaaaatatatatatatggataacaatttctaataattctctaacttgtaacagttttcaatttagtttataatattattcacataattaattaaaagaaattgtattattgtaattgtttccacattttctaaatttagtattttatttttaaaatacttggtcaattttttcaaattcccctattattaaaaataaaaa

SEQ ID NO: 81992 - DNA, 1117 bp, Cannabis sativa
  modified_base (833)..(833): a, c, t, g, unknown or other
  modified_base (1060)..(1086): a, c, t, g, unknown or other
tttgagcaagctttgagtttaagaactcaagcttggctctttaatggtgaattttgaatatgagcttgtttagttgttttattgcttggaatatgtttattcgggtatattaagaaagtctggaaggtttggtttgatttgggtacgaattggtcaagtttcaaaattttttgggttacgtggtgtaaaactgattaatcgaatcagcagttgggttcccaaactttttgtgttgtcgattcgtgttagttttagagctttggttggttaattccataacagtttaggatattgccatgttaacgttcagtaggaaaacttttggtttacaacctaagtccccggatgtcatttagcatgtcacttacgcgtgttacgaatgatgtgattaggggcctgtaattgaccgagcagtttttccacttaagttggccgacacacctgaattcggaaacaaggtaaggttagtataatgtcatgcatatgtgtttacatgttaagcgtacatgttatttatgcatgtacattgatagcactatcagtatacatagagttatcccgtatactgatagatgtatgtatggctcaaatactgattgatgctatcacatcaatatggctagtgtatgactagcatattgagtataggctgatattatcgtcggtagtattgtcatatgaacgttctagactcagcaccttgtgagacacggggataggattatatttcggtgtatgggcgtcttattataatctgagttattattaagttgttatttatacttttttacttagtctgttgactcacagttgctatttccatgtgtaggtangggcaaggctaaggctgagcaaccatgagagcgagcagatggagattgaatatgtcgggatctccattagtatgtaaaccgattgtataccaccactgataaacacccaaataggcgatattcactcggccaagagcaccccctcgagtaaaagcttccacagctggttggccaaaatgaggatcccaaattgcatgggcaataggtgtttgaatttattttaccannnnnnnnnnnnnnnnnnnnnnnnnnnttattaacatcctaaataagaactttctaaa

SEQ ID NO: 81993 - DNA, 638 bp, Cannabis sativa
gaaaggaagagaatgaaagactgactgaatctcttatatatcaaatttaatagaatgcattttatatacaaataagaaatagactaagctaaactaacacgagctaacaaactaactaacttcagctcactaaaagactgatagaaaggtacgtggttagaattgtaactaattaactaactacgaaactatatcggtgcttttaacactcctcctcaaacttaaattgatgcatgcatcttcaagggatcagtactctgcttcaatgttagaccttaaaagtatattttgcttctttgatgaccaagctattaaattagagccaaagtgaataggatatcgtgatgtagagcgtctacatattgatacgagaaattaacacatagggatagggtgttttgatatgcaacccaaagtacattgcacgacttattgctattcgtggatacgagaaattgacgccctcaattatcaataaacgggacgtgttgacatggccaaagttccccaaacaaacatcttaaaatgcatgaagacttattgggtttatttaatatacctaaattcagaggtacatcattttaacatattattttgtaaatctaaatggattaatccaattaatctcttttttccat

SEQ ID NO: 81994 - DNA, 1520 bp, Cannabis sativa
tggccgagtgacattcttcttggtcatgaccgagtggccctcttccttaccttggtggccatgtttcttctagggcttggtcgagtgactttctctttgtcatggccaaatgacatttcaagcacatggtcgagtgacatctcaaactcatggccaagtgacatctcaaggctcatactgagtgacatctcaagcacatggccgagtgacatctgaagcacatggttgagtgacatctcaaagcttatggacgagtagtcttttgtcaaccctggccaagtgatcactcgagctagggtttggtcaagcagtcctgggtcatatgcgtcgactcagtcattcctcggccaactcttaaagttgatgtatctcgcttcttaagactaattgttgactaatctcaataatcaaccctaccaattcgtgctattaaaacttaagaaagttcatgcctagggtttctctctagggttcaagagtcattcactgccaaagttgttttttatcctctccgaccatggctcaccgacctttctatgggtttgttcgtggccatggttaaggggtttttgtacatacatttgaagaatttttttgatggaggatcgacgccatttttcattagcttttagggtttcttcttggtggtcgagatcaactttggcccggtctagtgtaggtaggtaccacagggagggtcatgatctggggtgaggggattcaccaacgggggtttgttcattattgtttggcagccgtatttggcttccgtccattggggaagtcattttcgcttcctatggggtagtagtcttggataggcattcttatatgtgtgtgtcagagctttgttggacttgggcttaatattggagatctaggagggggtttcatctgagttcgtgtttggtgggtctctcgtgggttgtggcattgtcccctgggtttatggtgttggtggtagggttgttcctcgtggtagtggtggcgtcccaaaatctggtatgttggtgtttggttcttccattaatcttcttttgtatttttatttgcctaattgatttttgagtggttatttattttactgttttatgcttataacaattgtggttggccaccattccattgtttcaatatgagtagtagtttttattcttagtaaggtttttctactctggggtcaaatttgggggattcctggattgttaataaccacttactctatggatcgatctttcattaggtttgtctttggaatggttggttttgttattctcctttattctagttttaatagttagggtgtccctacgtaattttattggaagatctttggttaatatctgtctataggtgtgatctgtcacatgttcatttaggatagaaatatagcattcttcgcactcttttgatgtttcacagctagcgacttatgggttatttgattgaagatgttgttaggttttttttctaattattgtaaacgtcttggttatcctattattattgatcatgtgtaa

SEQ ID NO: 81995 - DNA, 2263 bp, Cannabis sativa
aaaataatttccaacacttttctctctcaaattctatatccctttttctgtggaatttacccctatttataggaatataggttgacagttatttacacttgggatcagtttaaaatataatcgttcatgaaacgtgaaaaattcccacgtttcatttaattgcatgtaggataatattcgataacagctttttgttcttatcattttcgatggttaatgctaatttggataattgtatctcgcttaacccgagttattctccttgtccatcttgatgtggaaaaaacgctaagtgttagcagatggttcgccttgtaaagtctctttagttagaatcacgaggtgactgtctcgatgtacataacccgaggttgctttgtgtgattgtattcattctacttcgaataaatgaattatcttctttggttgtgtacttcgaggcaggtacatgtctcgtcaatataagtttcaatagcctttattcttacctcgcttaagactatttagtcagcgagttttgaatattttttattaaacctttgttaacgagttattttatcttgtatttaatgatataactttattatatcaggtggttcatattccactgcaagacgaatataacatattaagtaactaatttcgggtgaagccgaatttcgggtataacatattaagtaactaatttcttaattttacattatgacttggttgtttcaggtaattagttttcatgtgttaatttttaatttaatgcttcacgtaattgagttttaagtttcagttttgtagaaaacttatttttatctgctactttataagaaactagttttcgtgtgttgcttaactaggcagtttttaatttgtttactttacgtaaataatttttttgtgttagatttttaattgggtgtttgatataataattaatttttgtgatttaattttatatatatttattaaaattgagtttatttagttagtgtgtttatgataagtttatttgtattgtagatttgtcttttgtgtttatgaaaatttggtaaaggtgaaagagctcaaagacattttcaaagaagaagataaacactgtcagcttgtacatttctatttgatttaaaaagtatacattaacattgtttaatttgatttaaaattgagaaaaaaacaaaaacaaaacaccacacagtgaagttctttttcatttattttttttctcctaccatttcactaaaatcttctcttacattaagaaactaatattttgattatatatgggagatgatgttacatacataatcatctcattgagatccaatatagtatgggttgggatctaagtgtataacatttatctagtaattacttatcatatcttagtctttaatttatttattttataaaattggtttccttatgttgtattttaattagttgtttacgtcattttgttaagaatttttacatgatgtcttattttattatatattttttaaagagacagattttatgtgggtcttgtaattgattttttaattggtttctttgctttatatatttttaattaattgtctaatgaaattaatttttataatttaatttggtaagttatttgttaaaaaaatgggttataaatatatttttgaataactgattttatattctatgtttcattttttttttattattatttaggtgtcttaggtaaatagtttttgtgtttaattgttggttggttgttatatgtaattgaattttaagtttcattttttttttatttggttatttcaagaaactagtttctttgtgttagttttaatttagtttgtacgtaaatggtttctctgtttaagattttaactgattgtttaatataactagtttctgataatttaattttataaactatttgttaaaaaaacgtgttatgttttttcagtaactcgtttttgtgttataaaatatcattttattattttaggttaatttcttatatttttgttttaattttttagttcattgtattaagtaactggttttcgtatttaatttttatttaagttatttaggttattagtttatgtgaattaattttcaatttaattattttacgtaattagtttctctctatcagattactgcgaagttgtttaatgtaacaggcttttgttatttagtttataagtcattgttaaaaaatattttatggtatgcattttttttctttcttaagtatctagttttgtaattgatatatcttttc

SEQ ID NO: 81996 - DNA, 798 bp, Cannabis sativa
caaatatatattgatctcgtttcttcttattatatataataagtcattaatcatgttgtaatatgttctttgatttgatttacgaatcatcactatccgttccatttcccaaactaaaataaaaataatcatgatcgtctatagtgctggaaaaaaatcactatgagtagaaatatattagatctggttttaatattttaactaaaatatatgatggctatctctatatgtaaatgttgactgaaaacaacgaaaaagaatttaagtggctctctaccctcctagctattttttctgttccacaatttatgattttgttttgtgattttaataagataattttaaattagtattattttatgtaatattgtgcatctggatttatttacaaataatgatagaaaaataaataaaaaagatgaagatgtacgtagtgtaaatacaataataatatgaacgaggttggataccaaaatcagtttttagttgaaaattctccctaattaatttaagagatcaagactctcaaattcgcacataagaatacaattgaattcataatattaccagataacattaatggcgctgaatgttctaataaattcacgtgagagtagcttgtttttttgcacagaaaactatatatatatttgacgattaaattgtccattgattattgaggatcgactaggggtgggcatcatccaatccaattgaatcgaaccgatccaatccaatctaattacaaaaagttggatatccaattacaattggattggattggatactaaaagttgg

SEQ ID NO: 81997 - DNA, 1862 bp, Cannabis sativa
tttgaactctgcgtttgtttccaaccaactcctttgagtggtgcatttaacttaatagtgcacatttgtgttacgaatactcttgtcacaatgaataatgaggagatggattcgttttgtaagtcgtactatattaaataacaaataacattataaataaaatattgtattatattaatcattacgaccttatattttaatacaatgtgaatcgtattatttaatacataacaaataatctgtattaacttgtaccataatatttacaaacttaaaccctcgaactcgaaccgagacttggattcagtcccgatcccgacttgggacccaagcccaaactaagacccatacccaaaccctagcccagattgggtctcgggtttgatattagagtctgaggtccaaagctagttctgattcccaatccaagtttggatctgattccaaatccgggtttggggcaagattgaggtcaggatctgaatctcaaatctgagctcggggtctgggaataagattcgagtccaagtccatatcgaggtcgagtccaatttattgtaatgatatattataattttatacaacttattaatacaaatcaataccaaacataagattgtataaaataatacttcaattcaacacaatactatacaatacaacactgtataacaaacgagcccataatgtaaaagactacaaagaaaaatataacttaaatctaattatgattaccaaggtagacttaatctaaaattttacaaataaattaaatttcaaaatggcttgtattattcagaattatcttatgtaatagcaatttataatatgtcccgtataactcttgcaaattcaaagttgaagctacactctttagattgtccactaaatttctttaacaacaaaaatatattaacagaaagtatacataagtatacttaaagcatatgtagagacatcatatatatacacatacaaacatgcatctcacattaaactatttgatttccatgatgaattgtggtgagtgagttatttcagacctaaagaatatttgaaacagttacctacattttttaccaatcttctatttcatcctcagaaactacactttcttgatcatccaaactcatcatatcgattctcgagtctagactttcatgtgttcccctcccaagccatttgaacacaggtgtgtattctgtggctataaccgaaaaattcgatgaactcattccgctacaagtatcgtatcttcgttttatcatctctttctgcggtgataaagaaagaaagaatcaacataaagagaagccattagatatagctgactctaacccaatacaggcaaataatatataccttgttggacaatgataattgttcaacctgccagagctttggccgacgaataacatgccacctgcagactcgcgaattagtgttgtgtgtaatgcagtgctcgatgaatagttaaaaaaaatagtacctcgaaggcattggatgatgatttccaaataggaccccacgaacagcgactgaagctgcagctgattgtagaacattctctgcctcgttgcgtctggcaagcattccacgaaaagtacctagaagcaaatcaacatctcccaaatatgaagccactgtccatgcatcatcgattgcctcctcgctcaagaagtctagaactttatatacagaaattgtatgcatgaaccgaaattagcatagtttggcatgacaagagactaaaagtaccaatatgattgagctcgtatgcgtgtaagaaacaatgcaagtgttgaattaccattttcattaagaaagtcaacaataggcctagcttgcccatgagcttgaca

SEQ ID NO: 81998 - DNA, 585 bp, Cannabis sativa
ttcttttttagaaagatttaaataattaatagataatttatgttttattgatatttttgtgattttgttttgtatgtgatatttatatgggttggaaagtcgtctctatttcttcaaagactaaagcttataggatatttgaaattaaatgtggatgctgcaatagatacccaatcccaaaaaattggagtaggaactagtcttttcccaacccctcttcttcttcttgtgtttttttttttaatggtcatttggcagagtagtgattgaaccctttctcatcattgtctctgatcttcaatatctcaactattactattattgatggtcggtgttgttcattgtcactagctacttacaagtacatgtatagtattgttattgtttttaatgatttgttgtgttgtattatgttttgtttagttaattttgtttgtataagtaataagttgtaatattgacaggttcatcaaatccaagagtactttataaaaaagtttttttatatatataaatatacataaataattttaatttctttaataaaagtagagtttcatttgaaaatttggaatgttttttttt

SEQ ID NO: 81999 - DNA, 881 bp, Cannabis sativa
ttagagttataatttctcaaatttggagattttattaaactctaggagcattatttgtgttatatatgaattatgcaatttttattattttgctcggcgacaacggaaaatgcaatggatggtcgttagagtcacatgggtaagtctagaacttttttcttagtgggatgaatatttgagataaatagaataccagggttaggcaggattatggttttggaccattttatccctagactttatttagtttaaatataagtgacaagggcattttgataatttttattagtgtgatgtggtggctatttggaggcttgacagctaccatttgattatcttagctgaagtaattgttttagacatttcatttagaaagaaaattaagaaattaagagaaaaattaagaaatcccttctctctctcttctttgctcgaccaccagaaggaccagtaagatcaaccctaaccctgacaatttttctagatttcagctggaaattgaggtgtttccaagtggaggtaagccctagcaccatgattctctaggtacttaagcttgaagtttagccttttaattcaattttgagttgtagtggctgttagggtttgaatgagttgtgattcaatttctaggttcaatttgagttaagattgagttttagtaactgattttggtgagttttatggtgaatgatcaagtttgagattgaaaactcaaacttgagtcattaatggcatgttttgattctatgtgtatttttggattttattccttggaaaatgttgttggatgttgtactaggtgttttggaaggtttggcacggattgggcacgttttgatcaaaatttgaattgtttgggaaaacttggtgcagattag

SEQ ID NO: 82000 - DNA, 788 bp, Cannabis sativa
catttcattaatatgcgactccaaaattttgaggaggtaagtttgattataattctaagtttatttaaacgatctttgagctgcatattaaatatttctgtactcctattagtttgctagatcttttaatgactttcttaactgtttttgctagaaatttatgaaattttcaaacatatcaaattactagcataagttaaatatcaatattaactgtctaagaaattgaagaattactcctaaccacccctggcttgtacatccctatgtctaaggacacctgaatataccatccaagtggttatgtagtacaaatatctctttttagtgagtaatcttgtcaaagccactatgacaagatagagtgcaatagataatcgatagtcattatcattttttgatgtatatgattactaggtctagttacaacaaaaagttgcttcaataataatggatactcggtcttagaatatcaaactcatgttcatacataaacacttagtttgatccatggaaatggatatctaaacttgtgaaagttaaacacagtatctacgtagtctagaaattcgttactattctagcttggaccaccactaagacattgttaaacattaaggtcagcttgcgaatgcttaatatcaatttcaaaactataactcaagtatatgttcaatcgatgttaagtagaaatttagaaaggagattcaatacctgaaaacatgaggataatcatcatttcttggatagaatatctttaataagtcatccacgctactcaatttctt

SEQ ID NO: 82001 - DNA, 998 bp, Cannabis sativa
gtagtcttctaaagtatacactttaaggttccaaagttctctttcctatctttggtccaagctttccaatacattttccattctgctgactttaattcatcgatttttccaaaaaaattatcgtgtttgcgtgtagaacttatgttattgaaaaggagaccatgttgtgacattacaattcattcataatcgtatttgtaggttccacttgaacatgtgaagtttctagaccatccagatcttcaggttcagcatcacacacatgtattactgctgtttgatttttttaacttgaggagtctatgatttgatatgtcaacttatcattaggatggtttcggcaaaacatggaatcatagtcttttggctaagattatcggagaagaagttaacgatcatgatattgacttcgtaagattcttgttccaataagtttaacgtttctcctaaattctagagaattgaaagccgtttctaatctttcaaattatatttttatcttcctgattctgaaattctattaacatggctttatttcagattattactttcgataactatggtgtttctggtcattgtaatcatcgcgatgttcatgatggggtaaggtaagtgaatctttagaagaacaagaaatcaacatgtaaatattgtttctttacttttatattcagttttgtaccgaaagcatctaacttcaccattttggcatgggaatgtcgagtatgtagtatgtactaggagataaacagctgaagggacctttcggaactttgcttctgtttagctgactatatttctcaaaagaatttattcagctttgtaaatgggttctaaaattttccttgaaaattgaaaaacaacaacaacaacaaaaggattgagaaaaaattatttctcggattttataacaaccatgagtacataaatttgatgattatcatgctttttttcaatcagttctttctcttaattatcttctttgtattcccatattc

SEQ ID NO: 82002 - DNA, 1334 bp, Cannabis sativa
atatatatatataaaccatagcatctttaatttggataactattaaaagttgtattacaaattctatttaattagcttttgaggaaaactttcaattcttcaaaaaatgtaagtgtttgaaattattagtaaattaatgaatttttttaatttagtttgcagatacactttgaaagctaatggaagctagttatgaccaaagatttttgaagatattgaggatattagagactaatttgtttggtggaggagttcaattaattaattggataggataaattactatccttcatgttttgaactagctagatttggttggaaattttttatgatgagttgataaattatttgttttactttattttatatcctcattacaaaagtgttttgttttattctatatcttcattacaaaataagttttcatgaaatatgtgaattattctttttccaattcaattttgacattatcctatattttaaaaagttatagttaacgatgtagatttttttttaagccatgcattatattgtattctatttaaatatatatttgttatgtataatccaacatttttatcttacctcttttttataaatttattgatcgaaaacacacttcttttttaggatgaatcgaagatatgctcttcaaagggtaatatttgcatatttattgcatcaatttgtgttctatatttttaattttcttattattgaatattttttttttaagaaaaaaaaagcgaaaagaaataacaataaattattatataactcttagttatatttcatatttattttattctcatcgttaataataataattaaaacaagaatttattcaatacaaaaataactcagaaacaattgtatagagatagagtggatttatcatgtaaagacgtttaattccctattttggttgcaaagagtctgaggtgtaatttattcaagaaataagtagctaattaccaaaaaaatcgatttctttattttcattgtttaaaccaaggaaaaaaaaatattaaaatctatattttattattttgttgcaatgatatatattttatttttcaaaataagaatatgaaaagatggctatatatattttaaaacatatcatgaataacaatacaaattactcacaactatctaatatttaagggaatcacctcatatactattttttaactttttttatttttatttttacggtttgtgttgctgtgtagattgttatgtgaatttgggttgctatttaggttactacatgtatttccatataaatacaaaacaaaaaagctgctttaaaatgtaaaaataaaaacacc

SEQ ID NO: 82003 - DNA, 604 bp, Cannabis sativa
aaatgaaattacagggtttctattatgatgcattttatggtgacttgggtttgaatgaagaccacttcaaacaaattgaattcagagcaagcaaggctgttggggtatgctcctcatttatgttgcaaaagataaattatttgttgtatttagtcatttttttcaattttaaattttgctgtaattagttgaaactagcttaggtgcttagtgcggttgcaaactttagttttacctaatcctatttcatagtatttgattgcttttctcaagatgaaagttgatagctaatcttttgatacatgtaacaaaatatattaagtagatgatactagtaaagagtgacgttttaatttttgttttcaatggaaattcttggtttattttacacgtacagaaatgatttttttgttacaggaaaagcagccttttgagcgtattgaagtatcaaaggatcaggcgcttgaaatgttttctgacaataatttcaaggtaacactgtaaaccttttttttttttttcggtgaatatccatcaagtgattcttagatgtatctcttatatgtattttaaagcattccttgtattaatattttcagattga

SEQ ID NO: 82004 - DNA, 964 bp, Cannabis sativa
tttttttttttttttctaatcgtgatttcttaatcatatatatttatatatgtatagtagagaatcccaaaggtctccctcttctctccaaacacataaaccctaaaaattatatcatctcatctctctctctctcttctctcctacatagccgagcttttcatcctctctctttctctttgcgtttttccattttaactaaagaaaaagctcacaactccacactaaatacttccctttgatcttcatctacaaagaaccaaagctaagcggaagattagtaactaaaggtctttcaagtaagtaaaacaaactcttctcttttctttttcttctaaacccgaaatgcgtgttcatgtctatgcgttgatgagctctaactcatgcatgtccttttgaatgattagatcttgtgtatcgtttcaaaggaatcttcaatcttggagaagcttttggagttttgagaaacaaataggtaaaaagctatgctgcttgattaatctaccatttttaaagctgtataatctttaccctaaccttgtaattctgttcttgggtgttggaggtcggttttgatgtgatatagcaatcttggttaggatctcagagagttctagaaaagtatacctgaaatctcaagcttaaaaggtaaaaatctttaagagttttacatagattcctcatgcatgctttgatctggtttttcaatgagttattttatggtttgtaatgttattcaagtagctattagaaagatttgatgtgtaatctttccttgcatgcatgcatgaagtttttgataacttattaggatagtcaaaaagattggtaacacatttacagaatcaaagtcatcaataaaagaaacgaatctctataaaataatcgaaaaatatatattttattaaagtttgttgcgactaaaccctctcatctattattccactacacccttcaagttaaa

SEQ ID NO: 82005 - DNA, 1385 bp, Cannabis sativa
gtagtgttttatttatttatttatttattttgggttctcccttctcaattatgagtcttgaaactacttcagcctatctcaaaatccttgttaattgctcctatgtaagagctccaacacatacatttttggaactatataggcctataattgttcaccagcacataaaataagtctgagcaccctccctgcataaggcccatctgtctcccactctttattaagaaagttataccaggtctgttgcttgcttattgtatagctactattcccactacttttttgagttctatacagcctggtttagtcttattcctattttatcatactttttatatctggattagtttcccaaccttcaatatttgagaaacaaaaatttacagtaattgtcatatagatttccaccttttgatgcttattgggtagcattagcatatcatgataaatacaaccaattcatcatataccaccctttgatgcttttatggtggatttgaaatgaacttacatagcatcatcagaattggttgatggatctttaacacaaaagaaaatatgggccttacaggatcttcatgggtgatgctaacaagaccattccttgaattttgtgtttggggatgggacaaccttccccggactctacttatgtactacacaaactttctgtcctcaaccgaggggtacttccacacagtggtctgtaaccacaaggattttcagaacacaacagtgaatcatgacttgcattatacaaggtgggacaatcctccgaagcaacatcctatgtctttgacagtcgagcatttcaatgacatggtcgaaagtggtgcgccttttgctggaacttttgccaaggatgattcggttcttgacaaaatagacaaggagcttttgaggagatcaagtaaccagtttactcctggtggttggtgtttggggaaatctggttcgcataaagatccttgtttagttcatggtggggaaaacccaaatgttgtcaaaccaactctaaattcaaagaggctagaaaaactcttactcaaacttcttcatcctgaaaatttcaggcttaagcaatgtaaatgaatcttttttttttcccttttcacatcaatttaatttattcattttgtaaaattttcaaccctcaatgtgggttatagacttacaatcatagtgtttttttttttttcgaaaattattatcatagagatgaatgtactccaagtagtcaattttttttttttttttaaatttcaatgtttattgtccaaatacaaagataaatgcacgtgtaatataagaatagtaatttgggttatttttgctggtcgggtcagatcctggcccaacaagctgactggtccatatgattcggg

SEQ ID NO: 82006 - DNA, 1354 bp, Cannabis sativa
cttacccaagaatcttctacaaagattcttcatacaaaacccaaactcaatatctcactttactctttacctttctctctctacctctcaatcttttctctctccatctcgaaactcaatttgattgttgttgtatctaaaatagtaagtattggtggtatttataggcttaggatcaagatcttaaagtcggtggctgcaagaagcgagattattaagttagttaggaattaaacaaattaaccaactctcctagcgagaactccacgtcagcacaagtaaggtgcttccgggaacatgcatgagagcttccaaaaatacagactaaagttactcgctgaaggagcttttgaataggatggagccaacttgagtcgactattcgaaactcttttctaagagaaacaactagccatctagaacttcttccggaaaaaggctaactttcttgaagaccttttatagaaggacaagaaagtcttttaggacctacttctacaagttaacaacttaccataaataataatattttttagagatatttttatttggaagtactatttaaacattaatgctcatttaatgcaatctttttaattaattaaattataataatatgaagaagttccaaaatgaaagggagagagtacgtgaataaaaatggtgactggtgagtgaaaaagaaaaagtaagcaattccttgtatgaaaataaagaaaattaccacaatagactggacagctgtgggaatgaaaggaataaagttagtggtaatgattaaggccattgggcacgcaagtgtgaacctgggcacatgccttggcagttggctggtcagttactttttccttcttcttcttcttattcttatttttattattattttaattttaaaaaataaaaaaataaaaacgaaagaaaaattataacattgattgccttttggtctcatctcagtatccatccacaatttggaagatcacatttttaattcagggatcagttgtagtagaggaccaaacagtgacaccctcttaatctgggaaccttttaacgttagtgcactgcttgctaattaattataagtagaaattacaccagcaaaattataaaagtttattttttatggtataaataaataagggcacttctatagtggagacccttaaaagagacacaccaatgaacactctttttgttctcattttattggcggttaaatagatcccatattattatgttgttgctgcacacactaaattggtaagaagaaatatttgttcttgttctggactcttcgactgtcttctaatcgatgctggtcttcagcgcaatgaaaggctaaatgtttgag

SEQ ID NO: 82007 - DNA, 1314 bp, Cannabis sativa
  modified_base (27)..(53): a, c, t, g, unknown or other
tttaataataaaccattttatttttannnnnnnnnnnnnnnnnnnnnnnnnnntctcataaaccaagaattctgttagataggcacactttatataaaatagatatatatttttattgggtttctgggctgggtgggcctaagcgtaggcctagccctccttagcttaagtccgaccctaaagcctccttaaggctatagcaactgaaaacttaatattgatgttactcacaattgtaaaacatgttttatgtagtagttgatatgttaatagtttgttagctattctataacttaggtgtttctttaactattttgtgccaagctagattagggctagatcaatgatgtttctgtaattgttttttgctaactttcccaaattctgatcttgtaaagcttccctccatttgtgattgcttattcagtaacgaagatgctctctaaaaaaatgtgtacttttagaatggtctatatatggagctctataaataaaagttgactgattttcaatgcccgtcatgaagtactaagacagattaggcttgtgggtagaagtcctccccaaaaaattcatttgtgaaagcgtacatatttttcttctatttttttcttaaaaattaccatatatattccctttaaataagggctcggtcgatattttttgtttttcctagttgccctcaatgaaagaggttttctaattgacaataaggcttacaatgtttcagtaatttgagaagtaactgaagttgtaagaattcttgaggtacttaattggattaaagatcatacatggcatgaatattagaatctaatgtctgactgtggttcaagcttggaggagttctattagtatataatctctacttttggtcagattattaatgattgtaataaggattcatttgttgcttttagaaatgtctctgttttttttattaaacgatcagttaatatggtagtttcataattttacttgagcttctatattaatatattctagtgtggtcgttttagtttgaaagatgttccaactgattttgctaccttacgtgagattgatggttaataaaaattttattttccattaaaaaaataaaataaaatcagaaccaccggaccaatgactcttccatgaaaatattctcttgaatactcttcttattattccgaacacattgattacttgtattttttgttggtttgccataaaggtcttctgaaattgaaacaagatatattggagaatattgtcccacatggatcaaatgtaagaatattgagccatatataagaatatgggctactccac

SEQ ID NO: 82008 - DNA, 2214 bp, Cannabis sativa
  modified_base (487)..(488): a, c, t, g, unknown or other
  modified_base (523)..(524): a, c, t, g, unknown or other
  modified_base (550)..(551): a, c, t, g, unknown or other
ccagacccaaatcgggacttggaccctgaatccacacccgaaccacaaatcttgcccccaaacccgaacaccgtaccccaaaccccggactcgggttcgagtctggagtccaaggtcagggtttggggttcgggtcaaggtccaagtccaagtccgagtccgagtccaagtccggagtccaaggtcaaggttcggggagttcaggtctgggtctgagtttatggtaagggtatggatccaggtttgaggtctgaggttggagttggcgtcgaggttgacccaaaccctttgtaaacattataatacaagctaatacgagtcatttattatgtattaaataatacgacttatattgtattaaaatttatggttgtaataattaatacaacacactattttatctgggagtgttcaacatagctaacaaaatatatgtataaagaaaggtttaactttactttaaattgtatgtaatagaaaaaaaaannaattgtatgtaatagaaaaaaaaaattatatatanntagaaaaaaaaaattatatataagannagaatatacatttgatctattaagatttaaaatatatttatattatatgtattaaatttttaaattattattttatttacattaaaatgctaattgtatatataattttttaaattattttataaatatatgtggattggattggatcggttatttttgcatgtcaattaacattcaatctgcagaaataaaattttgaattttctaatccaatataatctgcacaagtgtgggtatctacactttgcggattgaattgagttggatcggttagtttatgaacatctttagttttatccaaatatagtattatttgttatttaatataataggacttttatacggtctaccaaacgagcttttggagagttattttaaaaaatagagtagagacacttatgaaagtgctcaaagataaaatcaagaaattttaaaaaatttaaacaatgtagcttacagaaaatagtgtaatgtacatattcaaattgaatgcaatttttgcatacaatatagtatttattcaattttcgttatatatatatagttttaagtttaagccacatcattttatttttttttttttgaattcaagagataatttttataaagagaaaagtttgccactacaataataagttattcaagcaataaattattagaagtctgaaaattaacacaatctagagataaacaagagctacacgtcaaccaatcgacaactttatttgtagatcgttcaataaaatataaaaaaacattctaagattatacattattgcgtgtatttgaaaaatattcataatgtgattagttaagcttaataggttgaaaatttgtcaaaggcttttttcgtttggagtcattgatttgtggcaatcacaatgaggatattggtcatctcttgtgctagtacatccatttgtacgtttgcaacaagctccattaatggagaaactttgttgagtttgttgtggcatgggaaaggggatgtccaaagttagaagaagcgtgtttttggcggtgatagcaactcttgtttatcgaatttggagagaccgaaatgaagctttgtgagaaagtaaatttgttagaattaagtgtatagttaagaaagtaatctcttgtatagataaagattggttgacaaccataattgtatataagattttagggttgctctattctttattttcttttgggagttttggttgattggtggttgtaaaagcttagtgcaataatatgttttgcttacaaaaagaaaagtgtataatttaagtgtttgaattgaaatctaaatgaaaatcaaataataagattggtaagttaaaaagaaatttgtgcatgtttgtcccacacgttatttatatttgagtaatttgggtgtttatattacacttagtatagctaccaagctttaattttatgatataattttagtaatagaataaatattatgtttggtgtgatttattaaaaataaatagtaagttaaaaataaataaacaaataaaaaaaaattataataacaccatatataaatgcatggactatccgattgattttgagatagaacatcatcgactttaaccaataaccacacacacttccaaatgctaaacgatataaaaaatgatcaacaacctctcgtacctaagaagag

SEQ ID NO: 82009 - DNA, 877 bp, Cannabis sativa
aatattaatttgtaaatttatataattttttaaaaaaattattaaaaaaatagtaaaatatagtagtaaaaacgtgtaagactagcttgtctataaagatacgcacgtgtatatttgattgtgtacatttcttattattgttataaatttgactagttctatatatgatgagaatgtggacgtgttttggaccaccctaaagaagacattttatgttttggcgacctcataagtcaaatcaaggaagttttatctcatctccctgcggcttaggtttctcacgttaactggtcggccaatacttttgcagataaactggcaaattggttctcggggctagacgaagtagcaatttggatagacgatgacccttgcaatcttagtgcttttctttctgcttagtggcaccctttccctaaaaaaaagaatgtggacgtgcatgttttatttaattagaaaaaattcaaaacctttttatatcaattttaatttataaaacctgacgtggaagtggaatacatgccccagctcttctctcccccttctctgacaaaacatttcaactaatatttaagatgagtctcataaatatatagctaaaataaaacatgtaaattgggtcaaatatatatctttctttctttattattattttcttaaaggaagctcacatatcagataagctaaaatacgtgtgtactattacaatgcaaaatcattagctaactgtagctaaggtattgatataaagtaaatatgttttaattaatttttattcatttctctttccatatttaatatcacatacatatatatatactaggtgaatctacgtgccgagccacgtattgttagtttcatttaagattttggtctt

SEQ ID NO: 82010 - DNA, 2159 bp, Cannabis sativa
tattccactttgctaacatcttccgggtattcccaagcttggacaccaattgaaagcttttacacccccccccaccgtaatgttccaagcttctttcactacatccttacaagcaggatcccgattccaggcttccagaaaccgaaacgggcgatagaaaccttctctcaccagtaagagatctaacaagacaggcgcgtgatcagaatccttaatgggaaggaccttgaccccagccttaggaaaatcaataatctaatcctagctactaaccacacgatcgagacattccttgacgagattagagaatttcctcttattagaccaggtaaaaaattccccaccgaacccagatcaattccaccagagatcataaggaaatcagacaaatcagagaagtcaccttgagaacacaccactcccccgaatttctcctgagaattagccaaggaattgagatcaccaatcagcgcccacggtccctgagaagtactaaccgaaagagcaagctcttcccagaagatttttctatccggttttgaagggggaccataaacaaagaaatccaaccatttagcacatctcagaatgttcgaaaaggacacagaaatcagatgttgttgaatgtcaaccacctcaatatcaaataccagccttccagcacaaacaaaggccaccagccgaccccagaggatcatacacaataggattgaaaaaacccaagcgtctccaaataccacccaggttagaactatcaaccttagtttccatcaagaacaacacatcaggatcctccctgataaccaaaccctgcaaggcattaactacccgggcttgccccaagccccgacagtgccaagataagagcttcatggggatttggggggcatgataaggcccgcctcctcggccatctgaaaatcctcattccgaaccacactatagtgtgtcactcgtcccttctgaacattagcatccgaaataagagaagtagaacccgagatttccaccaggacctcccctgtgacttgatcagaattttccataaaggaattgtcattagacacccccactgaaacctcatagagaccatcatcatgttccaaggccaataagctctcagatttaccagcgttcttcttgattttcctcggacgagcaagttcttggaactttagactatcatcactcttcctttcctgacttttctcgccaaaatccctcgagccataagaggtgggatcataggtacccccttgcttactaggactcccaataatactcacttcggcaaaagcatccgggacgcccacctggttcaccactgcaatatcggatggagcaatagaattgtctcctaaaaacggatagcctccatccaaagtcccagttttcttgtgtttagatccaacctgctcaatgagttgttccgagttaaccccaaacacaggattttttggaataccacggggccccgtcatctttagaggaccaaatctggtcttgttgcgggcctgagtaaacccagagaaaagtttacgcttatccccctttgcccgagaatggcccataatcgaagcccccttagattcggattgagcattagacaaaggcccattaccaaacaacccaaacaatctctcatcccccgtggaaacacaagcaggattactactaacattaggaggcccattaccattcaaaatactataggaattatcaccaccatgtatgaccaaagtcggagcatcagacgacccaccagaaccctctccatgctcaacaccagcaactacttcctctttttccatttgaatacgtttctggaagtcttcagctttcaaaacatcaaacccgttctctaagcgggatctgactttaagccatggaccaaaaagaggcacacttctaccatcatccagaatcatcattcgtttcttagctgaacacccctcctcagcatgaccaataagaccacacttatagcaaaataggggaagccattcatatttcagataactccaaaactttttcccattttcatcttccaatcccaccctagcaagaagaggtttagcaaggtccaaacacacccgaaaatgcaagaaattgtttctaatgacaccattaactcttaccttattagcttccaggaaaga

SEQ ID NO: 82011 - DNA, 888 bp, Cannabis sativa
  modified_base (684)..(692): a, c, t, g, unknown or other
aaaaataaaatgaatacgtgtaacgtgagacacaagaacgtgttacgtaccttaaaaactaattttaaattctataattctatatagatgttttgatgtttttttttttcttttaattattattattttaattttagtgaaagtgactagcaatatatatattaatactcgtaatttgtccttattaccaatcaagagtccactattatttttttggtcttgaaaattctttatcattgactgtaatgttgttatatagaaatataataaaattaactaattaataattaattaaataattaaaacgtattttagggtgaaataaaagtcaaaattaggcaaccaacttaagcacgcttcttacttttgttttgtctttctccaattccatctttaattatatgagtcaatttcttcatcaatattctctttttttaattctctcccaaaattaatattcactctatatttatatttatatacactacaaggtagtgggggctctcttgcctacgctcatttttctttatttttcttaatctataaaaaaattaattatttagaataaaaatggaattcttctacaatgcactatttacttatttatcggcatctagatgagttttttagtccaattatttttatattcatgtacattgtacttatttaaaatattttataaannnnnnnnnaatttaaaataatttataatatagaaagtagtgttcaaatatatagtctatttcacatgcgtataaaataaaataatcacgcgtgcaatatactatttgaattctgatttttacgtgttaaatttttctgaatattttaaaatttggcaaaatgccttaaataactataacgttaacgtacatgatcttgagaaaa

SEQ ID NO: 82012 - DNA, 1632 bp, Cannabis sativa
tccatgcgcacaaaactgggtactccttggggccctaacccatataccaaagttgcacattatgtacacttctaatgaaatgttcctatcccttgtgagactcaatgcactcacacacttcacttctcatacaataattttgaaattttttaacaaaagttccaacatgatagaccccgcctaggcgaaagagagtctcgattagacgaacgagagagatgacatagcgttttgctccaatatataattacaaagcttgatacaaaatttaatatttaagtaatgtttttattaaaaatatataaaaaaattataacttcatcattaattttattatataaaacaataaaaaaataaatgtaaaaaacttataatttataatttaatgtaataactaaatttaatagtaaaatattaaaaaacaacataaaaagtaaatattagaggtgtttacgaatctatttggtccgaatttttaattttttcaaaccaaaccagtattacggtttttaaaaaattcaaaaccaaaccatattaattaaatgatcaaaccaaactactcaaaaatggattggtttaattgaaaacatagtttgtattttgtagttgttctaattttttttacaataattttttattttttcagtattttttttacttttaataaatttataatacataaataacaataaaaaattattatcttaacaatataaactcaatatcaatattctacctaaagttgttcccatataacaacatttcgttcaaaaaaaaaataatattaagtatacataataattatacggattggtttggtttgaactgctatcgagatttctaaaaccgtgaccaaaccagagaatttaaaatagtccggattgatcaaatcattcacaccggattcatttggttcggtctcaaatggtttagtccggattagttggagtttggaaccacagattgcaaattatataaacacccctaataaatataatagtatgtttattgtgatataaattttacatatgaaatattgtatgtgagaaatttgcaacttttagcacgctattaaagcaaattttttgtaccataagctatattttagcaatagatctccaataataaagatgctctacaattatcaaaaaattaatggcatgctactaactaatattattgaaaaaaaagggtaaatccatgttataaaggcaaatttagaagatagacgaaataatattcatccattaaaaaaaaacaaaaacttcatgaatgaaaaaagggtctctactctatccactaatgtaatgtgtacccattaaggagaagtatggatcattgactaatgattaaggtccaagctaaatccaaaaagaacatgatatggtttggactcgttttgctaaccaaatccgctctgtgagaaattttacatgaagatttgatcagaatattggcatatagcttcattggggttcgtgtttcctcactggattgggataatgatatgactcgtcttgaaattgttggggtgctaaacactgtggatggatgagaagagaggctcatcatatgatgatgaaaattagttacatcttagaaaaaggaatagtaaaataacaaataaaacat

SEQ ID NO: 82013 - DNA, 2449 bp, Cannabis sativa
  modified_base (1538)..(1549): a, c, t, g, unknown or other
aaaaaataaaaaataaccgagttgcgggcgagttcgggtccaacccgaaacctgatgacaataaaaaatcaacatgcgaacccgcctaaaagtttactgggttggacccgacctgcctgaagagaatgagtttttctaattttacgggttgaccgagtcgggtctgggtgggttggctgggtccgagtctaacccggtcaaactgtgcagtcctagtttgtgtaggatcatttatatgtgccaattgtattgtatttaatatatttaaaaaaagaagataatggtctcagtttctataactgtaatttgcaaagttgtcattcttaaacttgtgcttcttcttccaattgagaccatgcaagagaatcaacaattgtaatgtgataatctcaaactcattctctcgtggtaaaacacacagtcacaagccaaatattgaccctaaactcaattgtgaaaataaaaactaatagtatctttatcttatagtatgtatgtacttctaattaatattaaaattcaatatatatactgttggttagttatctttaattttataggtttttgacatttaattaataaaaaatagtgataagtgaagtataggttttgtttcgtcttccctaaaatgggcttgtcttgataaattgtagaaatggcagttgctactactatcttcttctcttctcttgttggcattgcctatgattttcttatctatcatccatggcttcattctatgctctctctctctctcaagtgctacccttagtctctttcttactctcaaaaaagtaaaaaaaaatagtgttgctaggcgttaacaccaagttattttcatttgctcatagcttagtttcttatatagtaacaccctaatttataggaacgccacgtgtgtgattttataagctagtttaatattaatagattaattaattaataaaaaccgtgaatatattaaaaacttgaccaaaaataatactaaaaatgaaaatcataacgacagtaaaaaagtatttccagggatccatgttataaaaagtttacaaaagactatatatgataataatgcaaaacacaaaatcaaaatacacagcagatacaaccaatccaaaataactcctgacactcaggctgatgaggttaatatgtacattgctggagaagaccatcatctcacgaatgctctaacttttccttgtccttacctgcaccatagagcacccgtgagtcacatacactaagcaagaaaagtgataagaaaggatacattcaataactaatcatatatttcattatcatataataattacactataatattcagcagtaggtaatataactatttatatacacaaaaatagacatgctcatatatttgtattgtctaattagacaagcccgtgtcataatgtaatatcatatatatttgtaaacgggctcctgaaatcttataagtataatatgttatgttttaactaaaaagccaaattttaattattcacgtttttctaataacctcgttgattagcaannnnnnnnnnnntacgttaaaaatcacgctaacacgtctatgctagttagggtgttacaaacacacctaatctagtagggtgttacactaccctcaattaaagaaagaaaaaccaaggaaagaggcaataactactctacctcgagtgtttgcaattactcaggttgacgctactgctagtccatcggtggtgacaggtcaaattctcatcattaactccttttattctgtattatttgactttggagctacacactcgcacgaggtggctaaactaagttaaatgagctttactcccatctttcggttccatggctgccctttaggcagttaatccttaaggtgtttttgccatgatcctttgtaggggaccattggccctattccttttcatggtggttgcttgtcacatgtgggtagtgttagcctcatgagttttctcgacctcttgtgtgagctatcaatttgtttgagagagcttttcgacacttgggctttctgaacctctttctggtgtaaccttatcgtggatataggggagcttgtggcccttaggcggcgctcaacttttcttaagatttaacattttattgatggagcttgtggcccttaggcggtgcttgaccacttacgttgcattattcgtgtcacttaaagtgcgttttaaatgttaaatgatcagtactccttggatataagagagcttgtggcccttaggtgacactcaacctttcttaagatttagaattttattgagggagcttgtgcctcttaggcggtgcttgacctcttatatatattgcatttgtggcacttaaaatgcattctgaatgaatgttagaagatcgatactccttttagagaggcctccctcctagagtcgtatttgattcctctctctctctctctctc

SEQ ID NO: 82014 - DNA, 3220 bp, Cannabis sativa
  modified_base (30)..(41): a, c, t, g, unknown or other
tagggtgttaatcaacatatttgtgagtannnnnnnnnnnntggtaaaataatatccaacagtaacaccattcgaagatgataacaaaatcatccatgaagtctttgaacgcttggttcatcaagtgtataaatgctgcaagggtatttgttaatccgaaggacattaccagaaattcatagtgtccataccggatccagaaagtcttgggaatatcctcttcttgaatcctcaactagtgatatcctctttccctgtagctgataaaataagtcatctatccttggcagaggatacttattcttcaatgttaacatattcaactcctggcaatcaatgcacatttgtaaagttccatccttcttttttacgaacaaaacttgtgcaccccaaggtgaggtacttggtgttgtaaattttaaatccaacatctcctgtaactgaactttcaactctttcagctctgcaggtgccatcctttagggagctcttgatataggctctgcccctggtattagatcaatctcaaaatcaatttcacgtttcggtggtaaccccagtaactcctctcgaaaaacatccaaaaattctcgaactattgggacatgctccggtcgcgatggtggttccctggttgtaacaactacatttgctaagaaaccgatgcacccctcacacaacaaatcttttgccttaagcactgaaattaagggaattcgggatccctgcatcttacccacaaatgcaaaggggtcctcgccctcgggctgaaaaagttaccatcattcttttacaatcaatagtggcgttgtatttagaaggccaacccatgcccaaaataatatcaaagtcttccaaatttagttctatcagatcaaccaataactcccttccttccacaaatactagaagggatcgaacccacctgttggagataaccagctctcctgtaggcagtaaagttttgaagcctctagaaagtacatcactaggtctattcaacttttcagttattctacttgaaatataagaatgtgtcgcaccagaatcaatcagaacagttaataaagtatcgtcaaaagaaagctgacctgtcatagtggaagggccagcatcaacctcggcttgagttagggcaaacacccgggcaggagtaggtttatcatccttcttttgttctggtagcagcaactgtgggaaattcctcttcatgtgacccactagcccacattgaaaataggccctggccttcacccaggtagcttcttttacatctcgggcattcaggaaaagtcttccagttttcctttccattacgacgaaaaccttggttaccctggaaccgttttggcctgcagctgatggttcattaggccttttgttgcgatcactagggtcagtacccctaccagaaccacaccagatgtctgcttccatgaatctcttctggcaatatttttctttcgtatctgatcttttgcaccctcagcagctagggccaattcaactatctgagcataagtccaaaaaacccaggttatttagcagcaactatcacatcccttgcgatatgttcatccaatcctttaataaacttggcttttctagcagcttcagtagccacttcatgtgaagcaaatttttcgagctgatcaaaattagtggcatattctgttaatgtcatgctaccctgagtcaatcgtataaactactcttcagccttttcggcccgaatagactcattatagtacttctcataaaataaggtccggaaggcatcccaggtcatgttatttagattatgaccctgagacacaatctctcaccagatgcgggcatcttcttgtcgcaaataaatggcacatctaacccgatcattatcctcgacccgcataaaatcaaatatggatgttatcataatcatccactgctctatcttgagtggatcattgccaccctcaaacactggcgggttctgcttcctaaaccgctcatacaacggttccaaacagttccctgcatccggtggcactactagaggtactggaggatcaagattagggtttagagcaggctgagcttacttctccctccattctcgaatttgttcaccttgctgccagatcctctcttgcatcgcgacatataactcttcccattttggtggtgggggagggagggttctcgccctcaccagcaactccgagcccaactagctcgcagctacctctaccagtatgcctcgagtgcataatttatacacctatagtcacattctaggtattaacaatactaataagtatttccatatatcataatccttcccacacatttccaatattaacaaaattcaaataatcagataattaacaaattatctattaataaaagcttactgaaccatgagtcaaacgagtcctcgcagccaatgtacatatcaaaccaatctttaggaactaaaaaccttggcgctctgataccatgttgtaacgccctgtccaatagggacgccacgtgtgtgtacttttataaatttcgtatttatatactatataattataccaaaagtgtgggtaattaaattttgataaaggcagattcggtgcgaggcataatgaagaacataaaaaacaacaagagcagttcaacaacgagaagaagcatgctgaaagttttaatagctgggctgatttatcatatttgggaggctaggaacgatgttctatggaaccaaaagatgaggcgcatccaggcagtagtgaagcacattcaaagggagagcaagcttaggatcatagaaattattcccaagaaaactaaagatgtagatagagaatggattgtgaatatctaattcattgatagatagattgattcggtgtaattgtttgcatagatagtctggtgggtagattgaggaattcggatcattgtaagtaatcaacagttgtaagttgtgaaattgtaaatgttgtttgagcaatacaagtaccgtattcatcaaaaaaaaaatttgataattaaaatcagacatataaaacttctttataacaaaagataagtaatattaactatggggtccccctgttttcaaaatttttacaaactcgtttaatagtgcttttataacataaacattgcattcccaaaataccttcaaaatagagcatcctgttcactgggtcgtgccactgcgactgatatgtacattgctactacg

SEQ ID NO: 82015 - DNA, 1752 bp, Cannabis sativa
agtaataaaagaaataaattatatctccacaaaactaaaatattttacaaatgatttaataaataaaaattagaatgcatatttattacctgcagagttgggaggcaatctcggcaaccacttactaatctcggcaaccactaaacttacattcttgtactttataatctcccctatatttatatcatgaaatagcataataacataaataaagttaaataataaatctataaattattgaaatgataaatgagccaaataaaattaatcttactcattatgttttcaaaaggaatggagtcccagtccaattcaagtcctgtgtgaaataaaaataaattgattattaataaatatatatatataaatatatatatatgaaacatattttactcaaaatctaaaaataacactgtacgtatgtcatacctcgtatcgattcaaagataggtgtcaaccattcgcattgccaccactgccattttccatcgactctggaaaagtgttcaatgtgtgctccagcactttggaagatgttaaaattttgtaacaccatgaaagttgtcggcaattccatcaaattaacattcttaaggtttgttaattgttggaatccacatgacacctccttaagctgtgggcaatacccgatctccaacgtttcaagattacataatgcttcttcttcaattactatcaaactcaatttactcaatgaaaacagttcaagtttcttaaggtttggaaaccctcctttctcaaactggagtttctctccacaatatccatctaatgaaagtcccaaattcaaaagattgtaaagactttgaagcacattcagtggatcatcttccagtttcgaccatactagctgaatcttaacaatattattaagttttgtaatccacttgggcaacttcctcaaacgcccttctaaagtgagacgttgaagatattgaggaggggaagaaatggattccaaatcaattatctcattttcagttattgaaattactgaaaggctttcaagatgactcatcttctgaacacagtcacaaaactctttattatcttcacttctcaacatagtgatgcataacgttctcaactctgtcaactttttcaactcttcaaatatgttaaatcccacaacattcacctgaatgtaatataacttttgcaaagcttttagctgtccaattcctttctttacttttgctccttttattgtatcaaaagagaaaaggccgtccttatttaattcaaattgaacaacaaaaagatgtcgcaactttttaagcttcttaatctcaatcggtaactcaaccactagtgaccgcttcagatccaaagtttctaaatgttctaactttccaatagattttggtaactctgcaacctttgtttcacgaatgcttaagtatttcaagtgaaagaggcttccgatattcttgggaaggtgatctaagtttggcgcatcttcaaagtcaaggacttttaggagcttaaaattgatggagatagcacttacaacattatgaggcaatccttcttcaccaaaaacaaaaagagatcgcacttgggcaagttctgaagcactgttttgaatagagtcgtatctgccattgacaactgacatgcgtcgacttaatattctgcaatttgaatcatttccagataaaacttgacaaaagtctaattcttccatttttttcatgataatgtcacgcagaagatcatgaatacgacaag

SEQ ID NO: 82016 - DNA, 1125 bp, Cannabis sativa
aaaaaaataattagtttgtgttagatattttttataaaaaaaattattaaaataatagtaaaatatcactttgtagatttatgcactaataaaataataaaaatgagaaaattaaagagagaagagaaaaatagctttgaaaagattataatgtgtcatgtcaccgctctattccttttctttatatatatagatatatagattaataccgttaaaaaaattaaaaaaatatgatataatttatgttttttttataatatatatgagcatttaaaaaaaaaattgttgaatttatatttaaatctgaatctgaattaatccgtatatattttaaaaaaaaaaagataaaataaaactaaatttactttttattattataatgtaccttaataatttttatcacctcatagaaagaaatagcatgtaatatttgttatactagctgttataaatttatttatatgacaagataaaacatatgaatgtgtatataaaatacagaattaaacgaacatatacacgatataactaaaagatcgaagcacctccaaacattaattttttgagcttcaatcccatatgagctttggatctggagaagaaaaaggaaaatgattagtgtgggtaatcacgcttccaagctctctctacactctttagatggatatactgtgtttaacagaatgagtattgagcttgtggaccaaaatcttacatttgtataagtgagaccttttatcaaagtctctgccacaattaattgttagattaactttttattattataatgtaacttaataaattttatcacctcgtatatacaaaagataaagaaataacatgtattatctattatacccaatgacgaagttgttagaaatttatttatatgacaagatgaaatatatgaatatgtatttgaaatgcctaattcaaggaacatatacaccacataactaaatgatcaaaatacttccagctattgattttttgagcatcaatcccatacgagctttggatgtggaaaaaaaaaaagaaaactaattagtgtgtgtaattccaagctctctctactctctttagatggatttactgtatttaacagaatgagtagtgagctcgggg

SEQ ID NO: 82017 - DNA, 2239 bp, Cannabis sativa
ctctctctctctctctccatttttgcaagtggttggtggtgcatggtccgagtgataatggttggtagcgcgttgtctgagagttgatggttggtggcggcttctctacaaacgtttaatttatgtactacacaatatatgtctgatattttttatgtaatttatatatttgttaatatttgtatttatattgtgtaatatttgaggtctggattttgatttatgtttatttttatttttaattgtgctaagatctaagtttgtatgggcttagatctgaggttttttgtgtgtgtctattataactgtcgggataagtgcaaaaactactttttataattgtttgcaagtgttaaaaactgacattaataatttctatcgtcagttggtaaccgatgcaaatacacatatttttttctatctgcaatatacacgtcgattgggagaactgatgataaaacttttaatgtcagttaaaaactgatggcaaatgagctttttatagtagtgaattagagaaatttttatagtcattcttagtgaaagatgaaattttttttgaagcaagagccttaccataagtctatcgtagagataggagaaaaatatcaaaatttttaaggttttagaaataggtatgtgattttatgttaaatttgtttttaatgttaattttattaaagtatattgttgttttgttccttgtatatatatttagttgtgttttgtcgatttattggttaaaaaaatcaaatatgcattttctgtgtttctctcgtttttttcgtaaattcgatgcttacacgattattagtattttgagaagttagggatgatatttcaatagtgtttgatagtttctcaatatagattagttatattacttgttcgattgttacacgatgcatattcgatatgggataagttgtgtggtttattcgagtgccttatgatgcatgttcaatggtactcgatatgtgttcgattatgtgtgtttgatttatacattttgtagatgttttcttgtggtatttattttactttgttttaaattgatagggttaactcaattcggctatttaatgtacaatggtgttgggagcgtgagggaagagattggattttcaatggcacagaaaataaaaacgttctagttggagtcagacataagttgagcatgcactgcttaaattaccgtttggctgggcacagagtcagacataatttgtaacgccctactagcttaggcacgttactatatttttttagttaccatactaactcttgctaatcaaaggatttaatataaaatcgtatttttttttaaaaaaactttatattcataaatatacatcataaatgcaaactgtttacaaaaccaaagatcccgaaatctatttttcaaatgtgaacacaatgtgttatcccttgaaaaatcaaaggatgatggcgttaacttttcttttgtatacagaagaagtcatatcatctcaacaccattttgagaacttcgttcaagcttcatcagttcatcaccttggcatagcaatggtgaatcatcttggaccaagtcgagatgtatcaccaatcatcatctcgaccctagccaagatgcacaacattaggatcattttggccctagacatggagctcctcaccacaccatcatctcggccttacctactttgcaacaccaaggcatcatctcggcccaagccgagatgaaaactccaagattatcatctcagaccaagccaagatgacaacctcaatatgctatctcaaccatagggggaagccaacaaacatcacctcgacccaactagcatcttcttggccttacatcctcaacatgcatctcgaacctcggagggaagggaacaagcatcatcccgaccctaaatgtcatcttggccccaagtgggatgctcttcactttagcacgtacttctcacgaatcgctagaatcatgagttcaacatgtgctcttgatcaacatgtatgtgcttctcgtgatgaaaataagctagcacgtgtggattaaagtatcttcaataattttcattttattagacatttatattgaaatatgattttgttatcattttgtattttaaacctaacccgaccataattacgggaaggtgcgtcttgttgggttttatgccctaaataaaatcctttacaatctgattagttatcaatataagaaatttcaagtgattgatgtttgcatgaa

SEQ ID NO: 82018 - DNA, 2055 bp, Cannabis sativa
aaggttggaagaattaagtcaaattgaactgcttgtaatggtgaaaggattatcataccacgaaattgtcgcaagtgcagtaccaaggggcataatagaagcatttgcaactatcgaggttaaaattaatgttgaatataatattattatgtgttgtactgtcatgtattcttggagaattatttttggactttgttaaatatttgtggcaaaaataggttttcatatagttcttccctatatcgaacctatcgggttatatagaaaccaccattaaaagtgagatgattttagtgataagtagattgttcaaattgaaaatgctaaaaataaagattattcaacaaatataataaataaaacatccaaagttcatgaaaagttttggtagaataaatctaatcccgatctctaacggaagagcgacatatggtcatcatctactccaacaaatggtcgatccaatagcttatgctcgatatgctctatgacataagttccgtaatcgccactgaaatagtagttaaatacaaaaattaataaaccatagagaataataataaaattttttatttaattagtaatcatattctttaaaaatgcatttaaattacctcgattttgtctgaggtacaactttattgtccatgagatcccattcgaatgttctgaactgtctttcagaggctgtcatttgatggaccatcaccatgttatggttgtcacatacaccacactagtccacaaattttggtaatgaaatgcaccaagtgtccatcagcgtcttcaattcgtcagtcgtcagagttccaatactcgaatcaaagacaaatcgcttccacaactcaagattcacctccatagcgatccaatgtttctatctgtccaagaagatgggcatgtgtatgcactccatatccttccaagacggcatgaattggtttggatccgcacgaacaagttccaagatggactcatcctagacaaagccatcatgataagctttggtcttccaagcgtcccactgaccctttaacaatgaagcaaaccaagatggcatgaatgtacacttacgtgggtacaactatgggaaaaagtgttgctgccttctcatcatatggaatgccgcatccaaatgttgtacaacacataaaaataagttagcacgagcacattagaatattaaaaaaaataaaacaaataacaactttaaataacaacaaataatacttagttaagaaacttacatcatcagaaagccatttttttagtaagtagcctctggaaccaagccacgccatgtacactggtgaagatgtccctcggatacttgtttccaatggttctcactaaccaatttcgaaactatacagtagcttctcatcatagggccaaagtgggtaaatattcacatgagctatcgatggattcatgttcttcttcatttcggtgtactcgtcaaaccacctctgcctcttcttctccatcgttgttggagcggtctctaaaacttatacctctgaatcttgcgtatctccaatggacgtgattgacatgttctggggtgtatggagtacatcttccacatcataatgtctgtaatcattaggaagaatgaactcatctcctgaagagacgggaactggatgtgggtctacctctgcattgggccttcttggatctcccatgagtaccaaaagggtcttcaagcaacccataatctctgtttgccctttcagaatatcagtctggccttgcttcaaagcaagtttttccctctcaacacgctccaatcttgcaaatatggcagaatatattagttcctgacgctgtgaagtgctgggaatagatgcagactggggcatagatatggaatgggcatcgattcagacggtcgaatagaacgggcccctgatggtggagagtgtggtggtgtatctgttgggttttctgccttaaataaaactctgttccaatgtaatccagattattcaatatcaataaaaaaaagaagtatttttcattcatttctgtatgttttggttcaccttatca

SEQ ID NO: 82019 - DNA, 1002 bp, Cannabis sativa
gtaacagctgatttgatttgatttaataacatattttctttcaaaaaaaaaataataatgataatattaaaaaattgataccaaacaatattcaaaatattcaaataataatattagatactacaaaagggattgtaaaatgtgaaagcaaataaattgtaataaatatgaatataatttgaactgaaataaattgggtataataaatacgacagcatatcatgaaatttggttattttaattaataatgttagtgattgggtatattaaaattaatttgttaaaattgtaattaatttcaataacttgcatgagaatgtaaattttcctaaaatagattatgtaattttaaaaagaatttttttttttttttgttaaactgttgaattaagtgggttttagacacaaacttaatctgcttgtatttatagctgggcctgtgtatagagacaattttctacacgttggattaaagaagataaaatctaatggtggtgattggtttcattctaacagctcacatacaaacttaagggtaactaaatttttgaaaagtgctaaaatataaccatatactaatatatttgcattttattgaaaatgatcttagtacaacaaagctcagtgatggactgtatggatttatacaaaaatattagattttgaataaaaatttataattttactgtcacataaaattatttacaaaaatactatctttttataaaactactctaaaacaacaaaataaaataattaaaacaatagtagaacaactaaagaacaaccatggaagtgaaaacttaacacagtacacagtataaaaaatacacaatattttttaaaaaaattctaccccacaacaaaaaattagaaatttcatggtgtaaaaatcccaataacagagcttggacttcaaccaattatgccaaaaataacaagaggaaattatactctataccctttttatattgtcatcttttatttttaccctctttttta

SEQ ID NO: 82020 - DNA, 931 bp, Cannabis sativa
  modified_base (47)..(76): a, c, t, g, unknown or other
tatgtgtttattttcattgtttttgaattcatattaggatgttaatnnnnnnnnnnnnnnnnnnnnnnnnnnnnnnggtaaaatatttccaacagaaatgcactttgagcaggggatttaatgcgattgagtataggcttaagccggttcaccagtactctagagatgattttgtacagagtcgtatagagactgatgggacgatagtcagtgacttgttgggggtgagaatgtttaggtatgagcactatgacagtgtggtttatggcaccaatgtttccatccccattcaaaaaaccttttgcagccaagagaacgtcatgcccaattatatgccagttttttggaagaaagtgccattaaatccatcagacccaggggctttatcattggcaagttggaaagcagctctttttatttcattgtcagtataggggcaattgggggattcaacttcagactcggatattcggttagtgatgccagaaagaatgcggtcaatgagctccttatcaggattgtggcttgcaaaaagttgatcaaaatatttctcaatagtgctcacaaaggcatcagtgtctgtggccatagagccatcaggacgcaagagagagattatttggtttttcgctcgccgtgaggaagcgaattggtgaaaatatctcgtatttttgtcccacagcctaagccagtttacacgagatctctgcttccaatattcttcctctttgtatagaagattatcaagctcatgttcgaaatcccccagtcgatatgctcttgggtatggaattgctgattttgtttgtttgtccatgtgaaagggttgccagtaaaactgagagcatggagagcaaaagagtcaaggaaattttgaaactggccagatgggatgcgagatgtgtctcccccaattttatcatccagattt

SEQ ID NO: 82021 - DNA, 1033 bp, Cannabis sativa
acttgaaatttatcgtttttcccaacacaatttacaaatgttgttcatcatatttcttggagcctatttttttaaacttccttgcaaagataatgggtggttactgttcatcgaaaaaacatggctggcttctacactcagataagtttcttaattgtcattttgtttttcaattttcaagtataaagggatgttgaagttgcgaacaaacaaaaagatgtgatgcacttaaggatccgtactccgttatagggatgctcaatcagttgtcaagcaatttcagatttactattgtttaccttatttatcacttgtatataaagcagtgtctcagatcaactaagtttacactttggtagaaaacaagtgtttaaagcgggtctctttaataattatttttactttttcatctatttaatataaaattagttttgccataatactaatatgatgatgatggtggagaattgacacgaaaaagtacaataattataatataatgcttacgaagatgattgttcaaattaacttgtgcttataacaactcacatttatgcagaatatgtatcaccaactaagtacagcttttgaccatcattgatcatgtcctcttcaagtattttacctccatcttctgataaaatacaagcagcactcgaaatttccagttgatctgctgctgtgttaataagctgttcaatagagtttgggacccataacacaattcctggtcttctaagttctttgggatcccacgggtggaaagggaacacagtgcactttcttcggtgcatcttttctgcaagtgatcaaaatatttgattagaaatagctatgaatataccctaggctacaaggaaccatttgttcaaagagttgttttttgaaggggaaagaaagaataatgtgataaaatgttgcattaaatataaacagcaaaccctacaggaatgaaaaacttcaagggaacgttcagtagggaggtatgaaagattcaaaaataagaatggaaatgagaataaaaataaaaatg

SEQ ID NO: 82022 - DNA, 912 bp, Cannabis sativa
gctctctaaactcttattattaaactcttattattttactggtattattttactggtttattttactggttgccgaaaacctcggtcaacagttagaaataatttttagtttagattaatttacgtaaagtaataaaattgaatttatcttaaatggatttgaaaaaaaaattaaaaatacaaatatttacctctgttggttgtaatgttgtcattaaatattaaatattccccatcttaacaatttctataactccaagtggtgatgaagaggcaaatggatatgtacaactttttataattataatttttatttttttatttattcttgtctgccctaagaaatgttaaaataatatattgttattataattaattattttttttgttatttttttaaattttatttattctataatataagtaattatatttatttgagaaattactattttttttattgttgttgcttgttgtagttgagagttgattatgaagttagtatttttgtggttgacaaaattaagccttaatataaaattaataaattaaatgaagaaattattatctttaaaaccaatggcatacatgtaaaattttgcttcctgtccctacgctatttattcaagaaattattcaatgagtgttttttcttttttcaacgcataattttgcttcatgtccctacgctatttatgattatgattatcatgcatgttttcctttcttttgtttgattgttgtacagttgttttgctatgattatttatttgacgtcgatttcattgttttttctcaatctcattgaaattaatggttgttttttgattgttctgatgttcctatggtggttctgtccgtgggtgtgaaagatggaggcctcatttgtttttcggtgtttacagtataaaa

SEQ ID NO: 82023 - DNA, 1389 bp, Cannabis sativa
actgattttcgcaaagccattttggctgtcctcaataataactctaacatatctctcatcaacaacattgttattgttcttatccctaagaaaaagaatgcttctaaacttaaggatttcagacccatcagtctatgttctaccctttagaaagtggtagctaaagtcctagccaatagaatcaaaagggtgtttgattctatcatttccaacaaccaaagtgtctttctgtctgataggttgatctttgataacattttcattactaatgagattgtacatgcaatcaattgtaggaagactagaaaattggggtggaccgctcttaagctgcatatggagaaagcctttgacaaagtggaataacactttgtggtggctcttctcaagcatgttggcctccccccagatttgtctcccttgtgcttaagtgtgtctcttctgtctcttccaaaattctggtcaatggttgtttttcagaggtgtttcatcctacgaaagggataaggtaaggggaccctttatccctttatctgtttctcctagtggctaaagggctctcggctgccattcgtgttgaagagtcaaacaaggaattttaaggtctctatatgtagaaatgcccctgttatttcccatttgctttttgtcgatgacatcattgttttttctcgtatcaatgttcaatctagcataaccatcagggacatcctacacacctataattgagctacaagttaattggttaactttaccaaatcttccattctgttctcccctaataccaattctgaagccaaagaaagtttttacaaccctttggggcttaccaatgagggttttgttagtaagtgtttgggagttccccaatgtgttggtaaggttaacaactcggtcttccattatttggttcaaaatgtctcttctaaaatgaatgtgtggaatgctaagttcttttccaaagctagtaaagaaacacttatcaaagttgtggtccaagttttcccctcttatgctatgtcttgttttaggctgcccagtagcacatgtaaaaatctccaaaaacttatattaaaattctagtggggtacctcaaataacaaaaaataagatccattggaagaattggcctagtccttgtgtctcaaagttctatggggggttggggtttatatctcttactagtcacaaccaagcccttcttgctaagcaggcctggagagtctgcacaaactccttttcacttttgctttgtctcctcaaagctcgatactttaaaagcaatgcttttcttgaggcttctaaggggcactgctcttctattcctggagaagtcttctttggggtagagatctcctcatgaaagggctggtttagaaagtgtgaaaa

SEQ ID NO: 82024 - DNA, 978 bp, Cannabis sativa
tacatatctaccttgaagatcccatggctcaattttatagaggtcaacatctttgatcacgtcaaggtcaacccttcttgaagtaatcttcttacgaaggtagtaatcaacaagctcttcatcagttggatgaaatcggaaaccaggaggaacatgtgaaaatgcattcatgatagctaagcctttgagagagatcacctgaaattcattacaataattttttatcaaatattaatttttacacaaagcattatgtatgattttttatttttatctttggcgttggaaaataaatttcaaatgaaatataagtaaatgtacttagtgaattaaaagttgtgagctttttatttatttattagtacaataagttaatttaaaaaaaaaaaatgcatacccaaaagctatatgtatatgcatagcaaaggcgacaaaaaatcatttttctctagaaactaattatttgatatgtttaatttggtgatattagaactgaatatatgtgtaaaatatttattaaatatatataaattcaaccatgatcaagtatatatttttcttttcattttttgtttaaaaaggctttatatatatataaatgaagttgtagcatgctgatcacatgtctaagacttatcaaaaaaaaatatatatatatatctgtcctttgcacaattagcttaatgatgcacatgcgcaagtcatgtccatggcattatttccatgacagaacaaaagcagtgaacatatataaaatatattatatatatacatatatctaataatgctattatatatgtattatcacatatattaattgaatgatatatatatatatatatatataattgagtacacatctataatttaagcagtagtaaatcgcatttcaacactagctaaatatgcagattgaaagcctaaactaagaataaagtgcacgtttaattttttggaagctaaagagttctaggatta

SEQ ID NO: 82025 - DNA, 734 bp, Cannabis sativa
tttttaaagtatataatgtcaaatttttctccattattacttggagagagaataatatttgcttagagagagaatattgatagctatacggattaatggtgcaaatcaaatttatactaatattattattttcaattaattattaatttgttagatagagaaaataccaaccaagagaattgagttaaatgaggctaacgttaaccgtgattaattgaatctgttaaggatacttgagtgaggtggctttgagttattgttgacacagggtgggaatagggtattggggacagcagatttttttctcgtgttttagagagttaaatatatatatatctgtgtatgaaattataagtgagcgtttcaaataaagtgtttaagtagtaagtatgttgcatgtggtcaagtattgtatataagtcttagtataattacttttgtaacaataaagtaattttcaggtggtgttgtgttgttgaacacaaatcacctatttaacaccatataaatgccaatttaatagaaaactcattgttcacttttgtgaaacactagttcaaattacttgttgtgtagttagaaattagaattttgtggacaatacattagtctttagatgctagaaatgagatttgctaaatcaattcttattagtatttctaaagtttagaaagagttcatgtgatcagataaaatgattttccagagtatttcttcttttccttttttttttt

SEQ ID NO: 82026 - DNA, 1495 bp, Cannabis sativa
  modified_base (192)..(193): a, c, t, g, unknown or other
gatgagtctgcaacaccctcctcagcctgaagtgaccatgccaacgagtagccactcttaacattatagaccccatctctaacatattgtcagcaccacccatcttctgtcgcttgcctcgctgacaatcatcacatattttgtaagacatattttaaggaaaaattttatcattatatatttaatattaannaataaaataaaaaataaataaaagtcattacccttaagcgcattccttaacagattagttcttattcttttattccttatttaatcaagtcctccctttcttaattttaataaattaaataaaaaagtattagggaatgactaccttactattctcattatttattagtaaacatgtcattaagtcatttggtgagatatttgataaaaatataaaactgatcataatttgtgcccaccgaatttcgacatataccaaatcatatctcctaactttttgagttgttaaaaattctccccgaattattgagattgctagattcaagagtttttgtctaattttactaacggaagcctattgtggataaaaattcagggaacatattttggtacatgtcaaaatttaggggcagaatttaatatatggacaatcgtcgtgttagaaaaattaaatgaaattagaaaaaaaaatctaacaattatactagtttggagaaatttttaacggcccaaaaaatttaagagcataatttagcttatttgaagcatatttactcaaatactctttaatatttatccaaaaaaaaaaaattactactaaccgtatttgggtttggtacatacaaccaaaataaattgaataataagacattttgcaattaattaaaatttaacatcaaattttataaatactattttaaagtattaagtttaatcacctactaaatgcatgaacactgatggacctaaatatgttcatacagtttattcagattcgttagctttagccttgttggttggtcttaattgggctcatttgtgtagtctttctattcatgcagtttattcagattcgttagctttggtgacagctatcaacaacagaaagatgtatttcaacgagttaggagcgttgtttgaagatgttataactttattgtctaaattttcaggggcagttttgtcccatgtggctcgctctgagaatttagcagcccattgcttggcaaagcatgctctgcggttagacgatgagctattctggtcgaggaggttccagcgctggtgacgaacgtgggcgttataaattcatgagtaattctaatcattttgtcaaatatatatatgttcatgcagttgcccaccctcaaaaattgtctactcattttttgttcaattttttataatctcttaaaaaatattttttttactttttaattctctatttatcccttctttatatttataaaaatgtctgtcttaatttatactacaaaaaactgttacttttagtgacaatttt

SEQ ID NO: 82027 - DNA, 2102 bp, Cannabis sativa
tctctctctctctctctcaaacttgaaaaacacttcttaaatcacaccattttgcaaatgataaatattgtggtatttattgataaaggaatatatggatcccaaagtcggtggttgcaatagtgaagttattaagtcaattatgacttaacaaacttaacaaattcctcgtaaaaataactccacctcaacttaagttaaagcttttccagatgagagacatccttaaaagacaatacaaataataaatattttaaaaaagttatttctctacaagttttaaaatgaaaaaatatttacttatatagtgctatttggagtcattctttataattttctatcttttatatgtatgaaataagtattttttttttattttgaacaaagtaactatatattattaaaatacatacaattattttgaaataaagtcttttttttttttttttggaaaagtaactatatttgatatcttatttgtatcaatagcaatgaaatgttggttttttaaaacccagaaaataaaaaaattcgagaaacaagactttcctatttttggtacgaattatttcgaatttggtttggcaacacaacacccgtttttagaaaataaaattgattttatgtatataattaaaaaaactccaaatttttgggtgttgtttaaaaaaaatatggaactctatgagattgtaaagaaaattcatatttagggtctttggacttggtgtgccctaggcgctactcgagccatatgcaacacgacacgtgcataaaactaaaaattaataaaacaaaataaaacttaattatgttatataatatcacacgatggacacaaggattacaacatggaggaacaactcataataataattaagccctaattatatcatcatgagcttaattatacatataaatattataggtgtacatggaatcaaacagattcattattatgcaaaacaggacacactagaggacacaacatttacatcaaacgtcgacaagaatgagcttgacagcctcggtcaaggcgggggctgatgcattgatacagtcctggacagggcgttgggtaaaagtcttacagtacatgccgtttgccacattttggtacgcagtgtagcttagtccatcaacagctgaaacgaagagcgagtcggttgtgggaattcccacagcttcggcctgaatccagttgtctgtgcgatcaagcttccagaacttatctgtcccaacgcattgtatgcgcacacgattctgcccagcgtcgatgatatcaaattgcgtgttttgcccatttgcactcggcaaaaacttcagatacgtgtgtccattagtttccactgctgccagaacataattatccgagcttcgaaggaagttcacacgtcttgtagccattttgattgtgtttttcttctttgctcacttcacttcaatgcattcttcatgatttgttaccctatttatacacaaaatattgcaatttaaaaaatcaatacttgaataataatacagaagatagtattatatattcaaatgagttagttaaacaaacaccattgtcgacactaacctttcaataaaaaaaaaatggatatgtgcagagaagtctttttatttcttttgtgcatatatataattaatggatgcttatattataatatgtagtttttctaacttatgttaaataattatcattgtctgggacacctaataacatttgatttaataattaattaccgatattaatacttaagattatccataggtttgaactcaaatacttagttttttaatttgacccataaatgtctaccatttaattttttttttttttttttatgaatcagtgaatgttattgcaaattaactattttatacaacctcaaagcaccatgacaaacaagccacagccttcatttttctatacaattcacaaagaataaaaccactcactactagaaaaattcagccacagccttcatttttctatactatcaaagtttagatttttaccttattattgaaatttgaccactaataccgaccaaaattcagccaccatgcacaaccataagaacacaatcttaaca

SEQ ID NO: 82028 - DNA, 2326 bp, Cannabis sativa
cgtaaactgtaggagtcataaaggcagttgtttgagggaaaattgatggaccagtcatttgtggagtctgggcagctgttgtgttggtggaaggtgctagaagtactccataagcttgggcgtaagcatcttctgtgttgatggatccttgggctcttgttaagaaattagtcaaagtctttacttttttgagttggagatctcccaatagaaaagatccaacaattagtcttgatgtcaaagtcaccatcttcatatcgttagtaacttttgattttgctcaacgtccatcatacgctggatgtacttcttaaggctttctcatggttattgtttgacactagtaaaggaactagcttctagatcgaagtccttcactgatacaatttttttcttgaacactgcctgtaggtccctctagctgttaattgatcccaaggatagccttttccaccaatcttctacggacttagtcagagttagtgaaaagcaaagacatttggcatcattgttggcctttgcaacttgcatcatgtgattttatttagacaagtggtccttgggtctttcttgccttcgtacaattccatttgtggcattctgaagcactttggcagaagttcatctataattcttttcacgcatggttatgcatcctcttcttctaaattgaacaggactccatttttctttctagaaatcttctcagttggcttcattgactcttcaactttgcattgcaagcattgagttttatcacttgaatattcccttctgcgaatgcaatcattgatatgatttctcaaattgtccccacagggcttgtctttttctgttctaggtttttctctcttttcatttaatcttctgcgaagatcatttgttgagagacttccactgttgccatctaaagttggatatacctcatcgacatcatcactttgactattagagtcattgcgacaattcttttccttctatgaagtagacttcttgacttcgacatcagtcttatctttctgtgcagctctgcctccagaattagtttggtgaccctaccctaaagtagggtttcctttctttttctatggaggttggttgacacttttagacctctttttttgtttagtcgaaggagccttctttgaagtttcacctattctcaatttccctttatccttgtgaggatagaggtttcaggatctttaggatcaactcttccaagagcatcagttgttggagttgtttttacattaaggttccttttggttagggctatcatcacggcttccattctcgtcatttttctagtagtatcccattgaacgatcctatcaagataacatgattttagttaattgaaattttctagccataatgaccacgagatctggcccatcaaaatttccttttctctagcatcattgtcagtggtcttgtcctggtgatcatccttcaatgtgtcttgaggatcatcttcagcatcattagaactattatgttccaattcatcatttttgaatataggagcatctagatttatgtctttgccaagtttatccttgtgatggctactcacctcattctgatcttctgtattccctgccttagcattaggatcagtgaagtgaagaccaaacttgtttcaggtgagtaccatgattactgagcgtaatcttcatatggtatcacttcttccttcaactctcaatgaaagcactaaaatatttaccaatatttttaaaaaactaagaataataaattagaattaaagaaataaataattcaaagaaataatttagaacaacacacaaagtttttatgtagttggggcgttaacaagccttagtccacgagtagatactattatgtatctattagctagaaaagcctttgagaatataatgagaataagttctctaatttttcttaagaaaacattgcaagagttcaacccttaatctgaaggattttttgggtatttacactgttaagagaattatacttagtttccctttttccttctaatatataagttaggttgttatcgtaaggctcgggccatgaggagactgatctactgactaggcagatagacacaattgagctgtcaattatgtgtcctataattatgggtaattagttatgaattaattgcttgatctccattttaggtagtttccctttttatattaatatgatcatctgtcgagatttgaggaacatttaattccttaatctgtgtgcttgaataaaaagggacgtcagacttatcttctaggaatacactatctggccctctgacatcgctataatggaagtgctt

SEQ ID NO: 82029 - DNA, 1016 bp, Cannabis sativa
ttttttttaaaaaaaacttaaggaagttttgctatatataaaaaaaaaaataaagagattaagtatataaaatcaaatcgtaaggggtttcgacgctaattaccttttattaaaggctaatttagattttgtcctttaaactttgacatgtactaaatcatgtccttgaacttttcaggtcattaaaaatttctcttcttgattgttgaatttaaatttttttatctaaattactaaaaaaattctgacgtagatgaaagttaggggtacaatttgatacatattgaagttcaaatacataatttaatagatattaaagttcgaagagcataatttaatacataaacaatgatcacatttgtaaaactgaataaaattaaacaaaaatctttaaatctaaaaatttaaatatttcaaaaaacaaatattaataacttaaaaaatttaaagaatatgggaaaattttaattagctttgttaaattatgaccttttttttttcctgaaaatgattcctttttcatttcagaccctttggccaatcaaattcaacctattccttccccttagatacaacactttttgggaatcccaataacataatttgttttttatttttttaatataaaaaaaaaaagtcatatgtactaccattttttgggtatttactcaataagggcatcctcacctacccttcggctgagccttcatgcaattttcttttacaaattatttctgatttcttttctttgtctgggtccttaaagggtcagcttttttgaccattgaggcactttttaaagactgaaatttaattcacctatcttagaaagagaaatgttaaaagttattattttttttacgtgtgaatattgttattggtttaaataaatatcgagtttcatatagtttaatataataattttttgagagtactgttatccaatcactatgtgacatatctaaaaatattaaacactactggtactcaatagtaatactcattttgaaataaaa

SEQ ID NO: 82030 - DNA, 1359 bp, Cannabis sativa
actaaaaacgacgtcgtcgcctaacattgtaaaaaccggcttacatacatacaaacacacagcctgtgtccaatcattgatcgccacgtcactccaaattcagtaacgtccaagtccaactctgattatcaccaccaccagagttaaagcttatttcaggttgagaatgaggaaactcttcttcttcttcttggtcggagctccgcctccttctcttccgggtccgacccgtattcttaggcgggtcggataatccggcctccaagggaaaattcagaatggccttacgacccctcatcttgaatgcagcacagtcataagccttagcagcgtccacgtcggtatcgaacgtccccagccaaacccgactccccttacggttcgggtcacggatctccgcggcgaacttcccccacggcctccgtcgaactcccctgtagtgcttcatctcgccggagtggtcctcctccttcttcatcgtcgtcgtcttcttcttcttgttcgaattattcggcgatggtatatcgagaagagggtcagtttcggatttgggttccataattaagtggaggaattgatgtgggttgttgtctggaacaggggaattggactcggattcggattgagaatactcttgtttaacggattgaaagtgataagaagatgtagtggtggtaatgataggtttatgagtcttgtaatgattttcagaaacaatttgagaattcaaagtgttgatgaaggaatcagtagaggtaaagtcacccaatagatgttggcgaatgagttctaaagctgagaattcctctacttctttcattttttgtttgtttgtttgtatgttttgcctcaaaatttgatactagctactactctcaagtttttatataaatatatataattatagtgaaattaatttagtttgtattttagtgtatttagatgggattgggatgtatttaggaaaattaataaatgaagatgagagcatattattattattattatggggtagatgcaactaacaatttaaacagattctaataatgtccaatcatagaagccgacatcaaatttttattcacgacgtactaaattaacgccactgtgcccgctagctgcccctatacacaaaatatttaataaaatgtcacgctaaatttgtattagtttgctaattatatgtatggaaggccacaaaaaaattttagggtgattctacaatgcactatcttaaaagagatgtactgatgcaccttccacttgtttcggcatccaaaaatattttttagtttaatttttttttcatatctatgtacgttatagctatttaagatatcctacaaaattttgagaaat

SEQ ID NO: 82031 - DNA, 1833 bp, Cannabis sativa
ttactaataaattagttatatattttcttaaaaaaaataatgtcagctgatgtatcaacttatcatggtagagacgatggtggtacagatccagaccctagtagggtaccgtcgacatgtgagtcaggtctaccgctaagaaggaaaggatgtggccttcctactaaccttaatgctgaacaacgaaggcacaatgcaggaaaaccattaccagtaacacttgattaagtgacaggcaaagtggttggtacggagaaccaaacttttgtacgtcaattgggtgttgaagtcacaattttgttgccaggacactacttgaattttaaagatgtgcctcaacactttaaagatcaagttgtacaaaaaaataaaggtaaaataaattaacaagtttaatgttgtaaatttttaattttaatgaatacaattaacaaatactattcgtttgtagtatttgtacgatattcatggtcatccagagcctaaaaaaagtgatacaaactctctaccatgagataaagagaaggtattctgagagaaagaatatcagacacactcatttcaagaacattattctaggaatttagatgatttggaaagtgttattaatgttatacctgatcactactctatagagagctggaaacaaaatgttgaattatttctgagcccaaagttaattgcgtgatctaatcaaaataagaaaaatagaaaaaaaaaatgaagtatatgtccacgcaaggcataaactcgatggtagttagtgactcgtaatgaatttgtaagtaaaattattaaactttctattagtaaatttttttacacattacaaaaaataaatctacttttgaacagaacgtctctgaagactatgcaatttatgcttggaaaaaaaccaccttaagaaaggaatagaagacacttggattagcgagacatgccgagatctacatgtaagtttcaaattttcgttttataatatttttaaaatgaatgaatgaaggtaacattatgtttctaacattttatttgatcaggagcaaatgaatgaagaggttgtctgcatgacgggaacagaaaatgattccagcgatggatcttctaccaaatacaaacaatttcatgctattaataaagttcttgggaatcggtcagactatcaaagagaagtgggttataaattgaaagacaaatcggtaacaagttctcgtactcaaagtcaagctcaatcacaaggcccttctccatccattagtccagaagatataggaatctttgctaagtttgtgttaaaaatgcgtgatatgattgatcaaatctggtacctctagtgacccttctctacatgacccacacagtttgaaaacgttttttacaaatttttttaccatcacaacagcaaggtagtgcgtctacttctaccccacgtccaatgtcaatgccacaacaacaagtttttcaacaacacaaaatatgtctcctaacatgtctggtaactcccctcagatgccccagttctttcaataacatcaataaaattctcccaacatgtctgttggctcttcacagtcgcttcaattacattacatgttcgggcattcctcacaacctcctcttatatattttccggatgccacaggagaatctcagacacaataacctatggctggccattttagaggttcatcgcaacaaccataataccctatgtatggtcaatttgggtcatcacaacaataacccgtgtatggtcaatttgggtcattgttgcagcaacaacctatgtatggtcaaataggaggatctccacaacaacctatgtatggttagatt

SEQ ID NO: 82032 - DNA, 668 bp, Cannabis sativa
tttttttatttaaaaaaaaagtcacccaataatttctcataaataaagaattctgttatatagccacaatttatatagaatagatatataacatatatacaatgaatacgagttgtatacaacatgtgaaaaaaagaaaatgataaagagttggaatttacatattcaacacatatacagtatactatatatattaaaaggtaggtctcacaattataataaaatagtaatattataattgtattatacttatttatattaaattaatatttatattacaccacccttttttattgtctctgaaaaattgcaagtaaatgttaaattactatattattgaattacaccattcttaaatattaaattaatatttgttttacactattcttttttttttttcaatataaaattacaagtaaatattaatcttgataattttaaatcgaatcccttacaccactcacattttatttttagcttaattatttgatttatattttctaaaatatttataaaattaaaaactattaatattttctccaattgatatgcactctcaaaagtgaatattaatcaccgaaatttaaaattgttgtatatgccacctaatattgcctccccatactatttaattctagttcctgttgaaaattattttaccaggatct

SEQ ID NO: 82033 - DNA, 797 bp, Cannabis sativa
gagggttgtttccagctcttgttgaaacaacttccaaaagagctgttccattgctagatttataggcttctcagattcgatgagaaagattttctcttgtttagcatgttgaatttcaatgttcctccaatgttccatgaaccaggtttggaagtgttcatgtttttttatcaagagactctcagagctattgttgtaagttagccactaattggcaaggttgttcaacccaaggatcgacttcctcgaggtcttctaactccacgtgtggctctctaggtagaatttggttggttgtgtcaatgccagtaattgtttgtggtcttggaggacgagctaaggaactggttatgagcctcgacctggcatccgggatgtaggtgtcgtcccatcaccaactcccacaactggcgttcccctagtgggttgaccagttgtggtgcttctttcaacacttattgatccaatttcaaccatcttgattaggatcttcagttgtggctctcaaaagcaccaaaatgttgaagcaaaaatctggccaccattcactcgcaagattagcgagaggagaaataagtttaagtaataatagagagacacatgcaatttatagtagttcactctccgtgtcgcgacggtaatagagctacgtctacttcaagtttttattgctcatgagaattacaagaaaattggctaaggaaagaccactactttctagagagagaaagtagagagagatcctttgaccttttggggacttagaagaatgtgaaaattgttggaatttattttac

SEQ ID NO: 82034 - DNA, 775 bp, Cannabis sativa
gagtgtttaggtgtggaatgtatccatcccgagcacccctccttcgttcaaggcagctcgaagatccactctgacatgagggcacattctggcaaacacagactatctgggcacctagccagaacatgtctgatcattcctaggtggaacattgttgttgtgcccagaactttaggctctctgattagtgcattcaccacttgggtgactagtgccactatcctcgttggggtaagactccccactacgagacctgctttggccttggtgggatgtcctccattctttttttgcccttgggcaggccatggaatcgatcagccctgccatatgatctgtcaggcaagacctggccatcattggctgacaggatggccttgtttgggacatagttgacctttctaaccttgaggtctgcccatgatccattggaggctgagttccctttgggaggcagggaccttttccccaacagggatccctgacaagggaaggctcttcaacttgaagtctatctctatcgttgaaagacctaatcaggttgttagccttcttattctggtggttcaactctacctgctgggcttggaggatcgcggcctactgatccgtccactcctagaatttgcgtcttgatgggcaaaagcatcccccatagcagagcatgtttcttgttggtcgtggtgtaggaggttagtatgaccccaaacttgctctaaggcctctcttagtctggcaagattagcataatcccccaggtccacatggggctcgt

SEQ ID NO: 82035 - DNA, 913 bp, Cannabis sativa
ttactgaaatttacaaatttacaaatttacaagatgttacaggattgttacaaactgatgcgtatttttgtaatttattttttttacctttaaaaaaaaggtaaaaatgtaaaattttcccaagaagaattatcgtgatctttccccaaatatttagtccagtttgagtttaagatttgcgtttttagttattgggccaaacatatttctcatctacggttcagcccactcactgatatagagaagtatcttcacaaaaatttagaaaatattacaaaactaactcacatttttatttacaagtttatattataatgtgtataccaagttttattgagtaattatctcaaaaaaaaaaaagttttattgagtatattttttttttttttgaaagcatatttagtatgtttttttaacacatgatttcagtgttgtacctaatttttgtgcaaactacctttgttccctcgaatttgtttagttatcagatcattctctcctttctttacaattatttccatctcttcacggcaatatgatgtacattacatgtacatggtcggctatctctccctcattctcttcttctacatcttctttcattttgtttatagatttgagctttgtttaatatattctttaattttatttttatgtagattcagataatattaatgttatttatctatgatttttgtgttatttcttttctatagtagataaatagttacaaaagataaccaaacaattttccattttataaatgtaatgaaaatgataggttacaaggtaaccaattaaagacataatgaaaatcaaaaagtaaacaaagcaataaagaaattcttgatcaataattacgaccactaacatcatatgatttaaaatacaaaattttaatatatttaaagaa

SEQ ID NO: 82036 - DNA, 991 bp, Cannabis sativa
  modified_base (36)..(46): a, c, t, g, unknown or other
ttgatgttgaataaaatggattacattgaaatggannnnnnnnnnnggcataaaacccaacagtttggacgtctccaaatttgtgaccacttgtttaaaacatagtttgtgcaagaaacagacacgtgtgtttttgtgcaaatttcttctattttcatttcattacacctgaaggtttacattagggaagaaagtttacaaaaattcacagtcaactgcataggaatgtcatatttggatacccccaacgtattttttaataacaatgcaaatgatctacattcgaggcgttagggatttctgatccatccattctcttgaggtgaaatgttctttctcttactttgtgttgtatctcgtagggtccttcctagttaggtcctaagacccccactcctagttgttgcaaagttgggaagactcttctctcgacgagatcaccaatgtcaaatatatgacttttgactttagaattgaagtgcttggaaatcttgccctggtacattttgagttggacttgtgactgttattgaagtttttcaattaggtctaacgattcttggagtagagaatggttccagattgggtcataagtgttttttctatgagaagggaccgtggtttctacttggatgaccgcctcacatccataggtcgtcaaatatggtgtatgctccgttgaagttctctctatcattttgtatatctagtggactcgcgaaagctcctctggctagtgggctttacaagcttggagtttcttcttcaatgttgtcttcaagatcttgttcacagctttgacttgtccatttgcttgtggtcaggccacagctaagaagctcttcacaatttcatgttgattgtagaaattagtgaagtgatcactatcaaactacttcccattgtcttagacaatcttctacaaaagtctgaagcggcatctatatttttgataacaaagttgagggccttcttggaggtaaccgtattc

SEQ ID NO: 82037 - DNA, 1227 bp, Cannabis sativa
  modified_base (102)..(106): a, c, t, g, unknown or other
aaactaaattagtgacaaattgtaactaaatattttgttttagtcgcaagtaacatttagttgtgactaaaagtcatatttagtcacaaaaaattatattgnnnnnaaaaaattgtcactaaaagtaaaagtttaattttaatagtgactatatgacaaacttttttatgccctaactattgttaaacatgcctttcaccaataatttagcatatatataattacattcaaatgacacaccaatataacaatagttaaaaaaaaaataatttaagatcaaaattttaaactccatttcaaaaatacacgcctaattaagaaaaattacatacatatattgtatttaatataacctaattaaatttaattaaaaaaaaattaattttacgtggattctacgtaacattaatctagtatatatatatatataaaccattcaaatccacatatacacataattaattatttgttagtcaagccctagtgactaaaagatcagtcaaaatatattaaaatgcttaaacgtaacaaattaaggaacaaagttttttacatacatataaaacattcaacgaagacacaactgcccatatatttaaatcacttatatattacaagttttctttcttttagaatattatataattttttgtttttctgtaagaatattatatataaagttgttcaagtccttagtggggtttttgtgtttaaataataatatgtgcaataattgagcatgtaattattttatttatttttaacttaaatttattgttgtaatcttgtacgtatcttaataataaatattaattgtttgttctttaaattaactttatctcccacaaattttgactagccctgcaaattgtaagaattatttatttattattttatgtgtgtaaaattaatataatataatgtaaaatcaactattatatgataatgcatacaaagtatgctctgtaataaatactattattaaactataagtaaattaacagtctttgaaaattataattatatttccttaaatttaaatataaaactattgatcattactgtatataatatcgtaaacaaatcatttaattatatttaagcacacaaatcacttctcttgtcgtattgtttttcatttcccatgcataactttgactcgttcaaattcaatagtgaatatattattatatgcttaattattgtactataaatatacctagctta

SEQ ID NO: 82038 - DNA, 950 bp, Cannabis sativa
atttttatactctttcgtacactattaggaataggattctttcattatcaataaacatacaaactaactaactttcatttaaaaaagaaaacattgaaacattggacaggaaaatgtcaactttaaccaattcaattgtttaatatttcgtttttatatataaaataatatttgagtggaaaaaaaagaagacaaaatgatcactataaatgtacctaatcgatcctaccaattgatcatatcacctactaattatattcttcattctttcctaggtactattgctttctctcaattttaaggtttttctcaagaaaaagaaaaattatatttttttttgtgtaaagtacataatacaaagcggattctgaaatatgttgagctttaaattttttttaaatatgtgtatttttaaaaaatatactttttggggtctttagactaggtgagctctaagtgcgggccaaacttacctcagcctaaagtcgatcttgtatatatgtaatatgttgtatatttatagcaaatatagcaaatataaaaaaaaaaaaaacaaaaacaaaattgacacatatatttgtattttttgtagattctagacagcaaatatggaagaagtgaaattgatcggttcgaaaaggagcttattttgtacgagagtagagtgggcattgaagctaaagggtgtagagtatgagtatttggaggaagatttgagaaacaaaagtccaattcttcttaagtataatccaattcttaagaaagttcctgtttttttacacttgaacaaacctatagctgagtctttagtcattcttgaatatattgatgaagtttggaaagagaaccctttgcttccccaacacccttatgaaagagccaaagcacgattttgggccaaatttgttgatgagaaggtacattttatatttaatatgtattttattcaa

SEQ ID NO: 82039 - DNA, 1293 bp, Cannabis sativa
gagatcattataccataatcaatgaaaactcaataacagagccataaattttaaacaaatatatatgtataaataatttaaagccttttttttttcttaataaaaatgagcaacaattcaaactaaaaaaaaaacataaatataataataacaaacacaatatgatcatatattctgatcattttgaattttctatctacaaacactatatatatatataaatcattcaaagccattttttttttctttttccttaaaaacaatgagaaacaattcaactcaaatcaacataaacataataacaaacacattgagatcattttttatttatatatataaatataaattctctgatcaatttgaatttctatcaaccaactcaaaaacttaacataaaacataataacaaacaaacacatagagatcataatcataatcaaaatcaaaattcaacaaaacctgtttcttcttcctcgtaagatgccaaatacgccaacacatattctccaacctcgagcttcgttcgcgcgtgttgcgcgtagcaacaactttgatccatgtccgatgaagatcagattcatcaacccctgtaacgacctcttccacaaaatacttagtcggattgaaatgaattccagtattattactactctctctcaaattcacagtactagtactacttatttgcttctgatcttcattaatggctgaagctccactgtctaatatggcttctaagtacccattaatccactcgttccccgccattttttttctttccttaattttccttcactttctcgagaaaattttgttgagaaaaagattgaatgaaagaaaagagtttgtattatgagtagttatggaatatacgtgagttatggagagactgacacgtgtcactaaatatatacgtgttaataggatctgttttttttcactatttcttttcaaaatatattttggattcgatttttgatgcgttatttaagttttttttatcataaaaaatattaaagataatacaatattaaatattaaaaatattaaaaaaaaaggataattttaaaaaaacacaaaaacaacgaaaaattataaaaatacaatctgtacaaaaaattttaaattttaaacattttttaccatttttttgatttttttgtagcaactattttttagactttatttacataaaatatagtctttttatgtatttttatgttgtgttattattattttattgttattttgatgttgttttattattacttttatgtgatattcttgttgttt

SEQ ID NO: 82040 - DNA, 580 bp, Cannabis sativa
aaaaaaaaaaaaaaaaattttcaagatgtcttaaataactataacatacataaccatgagaaaatatttgactaaaaaattattttaagtgctaaaataaatataaataagaatgtatcaatatatttatttgaaaggatgcatttgtataattttcatttaatatttatacacacttttgtttattttttatttttacatcccaaaattgagtaaagaatcttcaaaacttccaactaattcttcttctccaattccatgatctgctaaacccaaatattgttcttccccaatttcataccaaaccctaaattttttctctaccaccccaacccacttcaccacttctctgctctctctgcccttcgtcgctgcacggctgccaggtatctcaatcattgattttccatttctatgtgttgattggaaattgataaatgtaataataccgagcttagattcttgcaactaaaaatgaaatcttgattgtcattctctatacttgtttatatatcaaaattattccttggctgttgaaaagtatggttttcttgttttggctgttgaaaatgtaaagatc

SEQ ID NO: 82041 - DNA, 878 bp, Cannabis sativa
ggaaagaggatcgaagtgtatgctgaagggacttcttggataggaaaagagccatctggagttgactatctgggactctcttccttgatggaaaaaggtagtcaaccggagaaaattatatccaattggacataatagaaattcgggaaagcccttccgaatgataattatcattctacgagactactaccggatggacaagttagccttctgcgaacacttctgggagacaactaactttcctaaccagtacaatttatgaagatcttttcatttagagaaactataccacaacaagtttgatgaatggaagttcatggtttggagtaggtgtggcctctcgaaattatataggtcatgtcatgtggtgactgctcgaagctctttcttctttaagacatgttccgttattgacctgagctccatataaaggctggcctcacccttgcccataagctgaggttgaagaagtttgtgaatgaattagattacttgagagctatcaatatgactagacaacagcagagtggcttttatgataatgattctattcttgctgatattcactaccttgctctaatatcatattaacattgtatctaggaatgtcaattgggccgggccgggctcgatctgtcacaaacccggcctggcccgacatcactttggctcggtccgattcggcccaaccccttcttttggcctagcgggtcaagcccgacccgagataatcgggtcgggttaagcccaacccgtattttctttttttttaaaaaaaaaatcagttaatttattttaaaagaaaaatatttatggaacttggaaattattataatcttcatttgctccccactttaggccaaaacttgtctaataca

SEQ ID NO: 82042 - DNA, 2645 bp, Cannabis sativa
cttttcctttttgggtatagtttttcttttacaattcgttttcatgtaagaataaatttatcattttttcttctaatcttttatgggtcactctcaatctcctccttatcaaaaatataataataatccaaatcatattttgtgagtggatacaatataaacagaccatagaaaattcaacaaattgtaaatgtgaattaacataatgagatagaaaacgaaccagacggcagcgatcacaggtgaagggtaagaaatcgatctgcttgcattcgtcaacggagcaatgcttgcccagatcagggaattccggagttcccatggaaaatcccaattgaaaacaaaattggattgaatccaattaaattcaggaaaacttgaaaggcctggttttaattggtgtagagaagagagtcctttatttgatgggtttttcttacgcggatatgtatgtagcgtagcgtagcgtagcgaagaaggagacgaagactccaaccccaagaaccaggagtcgttcaaacttcaaactcaccaaatatttttgtcactatttttcttcacaaaatataatatgtatatcttttttaagattaaacatatgtacaccaatactaatgagaattatatcttaagactagtaatgagttgagtaattatgtaaagtttaatctaaaattcataaaaataatgttttttttaacaatgaacaaaattttattgaaaaaaataagagtttagtaagttgaaaaagaaaaaaagaaaattttatatccaaactagcttattatccattctaagtacgtgcacaactaattcatgagcagctatattggctgaccgacgaatatgaattaggaacgcctcaagaaaattggatagtaaactagaaattctaaagagaaccaaggtcattacaatgagaagatcttttagcaaaagcagagatcacaattaggcaatcagattcaatagaatggagagggagatcaattccaagagaccaatccaacgccaccataatagttactgcctcagcttggataactataaaattccctacaaaaccatcgtaaaacataataagattcaccttaagatattaaactaataaaaataataaaagctggtaaaaaattaaataaatatcgagtctattttggacagaagggaaacctcccttcgtccgtacaaaccatataaacattgaacctaacctcatactttatttggaagtatgagaaacaacatcataaaaaattcttaaatcagcaaaacattaataaaaaataccattaccaaataaagatttcgacatgcatgccatcactaatctttgtgagtttcgaataattgctctaattctaattgtatcacttttatcatccaatgatgcatccacattcaatttaaaagtccccaatggtggagtaatccactttgacattgatgtacaaatagtcttctcttttaaactagtggtaagttggatactattaaactcatcagaaagggattgaatacatgaaactataacttcaggagaacaaatttggtgtctatgcactacttggtttcgctctcctcaaacataccaatctgccacaaggaatacttcaaattctgactgtgataacacttttgatgctttaatgattatttgttgaaaataaacttcgatagagagactatttaagagtttgaactttaataatttccacaccttcttaaacatactatacaaaaaaaaaaaaaaatagcatggctatttgtatccagattgtaaccacatagaggacagttggaatggttaataatattccttttcttcaaaccaacattagtaggaagtatctcatggaagcctcgccaaacaaagtttaaaatctttttaggtaaatgcattctccaaaacctcttccaccaaactgaaaacacatctttagaaggagattgattagacaaattaaaagtagaggctacaacatagcaacttttaacagaataagaaccatcataaaaaggattttaatatattaaaaaaaatataaacataaattataaaatataaaataaaatactaaaagagtcccatcagggcagagagtgtgatccctgtgtcccgtttaacattcagagacaaaaaataatcctcatattcgctccattctctatttaaatgaagaaaccctacttcattagggacgagtctttgctgggctccatcctccatgacaagaatgtgcatccctagtcataataaaattgtgtataactctctttggatcaattggggtttgtaaaatttatccactttagtatcttggtctatttaaaattctaatattctccaactaatcctattttaatatttaataatgggttaatgtaaacaattatttttgttttagatatttacagggccagtcttatgttaatttaggcttttgtcaaaaataaaaattggggccagtgaaaaaatgaggccattagtatttgagccctcaacctcatagttgatatactaattaaattaccactaggctacaacacatatctaacaatgaaagtattattatttattttattactaactatattttaattttttttttcaaaatggggcctgagcggtggggggcctaagg

SEQ ID NO: 82043 - DNA, 1155 bp, Cannabis sativa
aacaacaacaacaacaacaactttattactaattatcgtcaataatctctttccaaattctttgtgcttctcccatttggctgaactctgaaaactcaaccaacttaacgcggcttccatcaatttcttcaaagcttctaattttttcatgccaactcttcctcttcactttactctcatcattctctgatctgggttatctttacttctcattcagatcctaattctcacaaagattttcttatcttggcttctgttgcttcactttggaactagaaagaagccaatttggttcttgggttattcatggttttcattattagagtgttcagtctatgtgaaatctgcttttaaggttagttttatatctattttctgtttctgtttttgggtttgataactattcgattggaagttggataagcatattttctattgatttggtattcaagaaaagtatatattatgtttgttttgtgaaagttttgttctcaaattgtgggttcctcttgatcttgaacctgaggaatggaagtaatctattttcttcagaatcaagagtagttccgcttagatttgattaaaatactactatatcaatctagagtgaatcagcttaacacataaaattttgggttcaactctgtttattagatattttaagaatccaaacttgagattcatcactacggattcacactgttattgtctgaggtgaagctgcaatgagatcgtctttgttttgaatgaaaagataattcgtgttcttgttttctgcatagttcatcttgagtcaatatctttgtataatacttttggaatccattttaatccatgttctttctttccatgccataatctttggttccaatttatatatttcgtgtttgatttagcatgcttagtattgattttagatttgggaatgtacgttatcaaatattcaagataaaaagagattgaaaaatgattcagtgctttcatttcattataaaaatacatttttatcttggcttgtgctcctgttagttttgattgaatttgattaaatgcccaaacccttaaaattgtatattatatttaggttacatatctctagttgtgttgtgtcatttcttctatggtgaaatgatgttgttctcactatatcctcat

SEQ ID NO: 82044 - DNA, 799 bp, Cannabis sativa
acaagctgaatagattaaggggcataatagtatagtgtcataagtacaggggtaaaaaagataattattcaataaaaaaagtaaaggaagcagcacaacccgacccatggatcaattgacccatcatatcactaagacccgacccaacttttatagtaaactaatagcacctcccgccctcactaaccgggccaattggaaatgtttctacaactgtgatctttttctctgagacagagtgcagtgtagggttttgcaccagcccaccttacctaatctctctcttctccatcctatctcactcgctccaggtactgtgtgtttttttttttttttcttggcattagaactcttatcattgttttctttatcttcttagcttgaattcccctgcactgaatcaattcttacaataaataataataataaaatattgcaaacatattggttttaaatgcttccatttccctcaaactcaagattattgttaatgggttttctttgcttagctctatcgactgttgtgttccatttttttgttgttataagggtttagacctttttcaccaccctgtaaagattgaaggttaaactcatgtgttatagaacattttacgaatagttatgattcgtgcgacgtatgttatcatctgtttcggtaaatgtgctcgtgtgacagtagatggttgtgtttttttttttgttctgaaatttgggttcttgctgtttggagtgttcaattgcaatttggtttaaatctaattgtatgttttgctgtttttattttggacttttggtt

SEQ ID NO: 82045 - DNA, 1490 bp, Cannabis sativa
gaaaatagaaataaaatttataaaacacgcttttattatttattttttaaattaaaaataaatagtggttctagaacacatttaaatttttttaaaaataaatattacttctatttttgtaattaaaaaatttaaaaacaaaaatattatcaaacctgattctgatattttatttatttatttatttttatgtaagaaagatattatttcttcaaacaatatacaaacaatgagtctagtctctaaaacaggaacctatagaaacacaaccaactcttccataaaaattcctatcattattaatgaatcaatcctatacaaaattttcattttcaaaatggaaactttactatcaatacaagataatgaaaatgaaggggcttagataagccatgacctctacaaatccatctcacaagataattcaagttattaacatcctcatcatgtttatctccaccaatattgcaattcacatcattagcaaccccaaatttaaacaatatgacagtagttttaagtctttccaaatgtactatagccaaagaataaagaaatggggcatatttgatcccacacatcactaggataaaaaagaggttttataagtaggggtggcaaaacgtgtcttcgtgtcgcgttcgtgtcatattttatgtgacatgcttctacatttcgtgtcagacgtatcgacccatttttttgactcgtgtctaattttctcaaccctaacctgatctgtaaaaaatcgtgttgtgttcgtgtcgacccactatttttcgttttgctattattgaagctggagatatagagaaaaattatagatttagattccattagaaaacttatatacatttatatattatataatttattatatatataataaaaattaaaatttttaaaatattttcaatttcatgttaagaaaattaaatttaaaattttttaacttaacattaaatcactaaatatatattttatataattatgttattattaattttttattttataatatttaaaaaaatcgtgtcaaattcgtgttaagcgggtcatatcgtgtttgacccgtttttatttcgtgtcgacctgttttcatcctgtgtctaatttttccaatcctaacccataaaattcgtatcgtgttcgtgtttgtgtgccgtgtcgaaatctgttttgccatccctatttataatttcatcaactaacctttttatacactttctttactgcccttagtgcatttcttgctcatgataaattaatttatttagttttgttatctagtgtcactgctattcactagacattatttaaagagagttttactatctagaagttgttgtaaggtgatgcgtgtcatttaccacaacaaatttctatattacgaattgcttcaatatgacagtaaatacaggttgatcccacaaagattattatcaatttattattcaaaaataaaaaacaagaatgaaaagtgggaattt

SEQ ID NO: 82046 - DNA, 1164 bp, Cannabis sativa
gagtttgcatttgcaaagatcttgatcttactggtcgaggtttattactaaattttccatctttgtggtactctgattcaacccttgcccaaaacttattacctatttagtttctccctataattggatcttgagaaatgtcaacatagacccgcacaagtacacatcttcctctatgattaaaaagacccacgaatggaagacatttttgaagaaaatatagctacttacaaaatatattaaaaatatgtgatcaaattgaatgagaggaaaatacactgcaatggttgagatcgtagtcaaataattttagcagccaagattaaatcgcgagatttcttatcttctaattttagattcaaaaaataaggatgtggtgtgacaatacactacaaaagttgagatcgtgatcaaataatttcaatgtccataattaaattgcgaaatttcttatctattaattttgaattcaaaagataagaatgtgatctgacaacacactggaacggttgaaatcgtgatcaaataattttaacagccaagattaaaccgcgaaatgtcttatctcttaatttttgattcagaagataagaatgtgatgtgacaacacactccaacagttgaaatcgtggtcaaataatttcagcagccaagattaaaccacgggattttatatcttctaattttaaatttaaaagataaggatgtgatgtgacagcacactgcaacggttcaaattgtagtcaaataatttcgacggtcaagattaaaccgtgagattttttattttctaattttggattcagaagataaagatgtgatgtggcaatacactgcaatggttgagatcatgatcaaataaagggtgcgacccatattaaaccgcaacatttcttatcttctaattttgaaatcataagctaaggatgtgctgtgacaacacactgcaacggttgagatcgtggtcaaataattttagcagtcaagattaaatcacaagatttcttatcttctaattttagattcagaatataagaacatgatatgacaacaacacactacagttgagatcgtggtcaaatatttttagcagccaagattaaatcgcaagatttcttatcttctaattttggattcagaagataaggatgtgatgtgacaaca

SEQ ID NO: 82047 - DNA, 732 bp, Cannabis sativa
ccgatcagatcatctactccggcgacccgacccattttctctgaacaaaggtacgtcttccaagcaaagctttgctattatcatttatcttatttatagacaatctgaaactagtgttaggtttagggttccgggtgggctgctcccatttattgtaagaaattcccaattcttttggagatgttaatatgtaagattttactctgatcttattggttaaaaaatttggtatgtttaaatcattactgaattaattctataaacatgtaatatgtattgtttatttgttaattttgaagcggagttgttttgttgcagttgttgtccccttttaagttttcacttgtttcgagcttttgtgattattttttcttccctgctacgtaatccctagaatttacatcaaggatgtatttggggacaattagcttaagcgttgttgggtttcatgaagctgaagagcttcgaagtgagtgggatttgttatctcgataaatttttctgcgtaacttcgtttataaatattctggttaaaatttattaggggatgaatggatatctctttcccattagtacatttcctggtagtagatgaatttctttgttttgttgaaaaaataaataagacccttttgcataagtgggtaaaattggagaaagacaaagttggatgaggtgcctcagtgcttctttattgtttaaaggtccatctacttgtatcatattttcttc

SEQ ID NO: 82048 - DNA, 563 bp, Cannabis sativa
agaatatttattatttcgtaagcctgtcttaggatatatttatgatatttgaatctcgttttaaatgatcatattcatagatgcaattttgcttcaaagcattgacttcaagtcttgtatacattagctatacttacaggcttaatattctattgcacatcatgctatatatattagatagaacaatgcaaagataagtccagtgcagtgcacagtatgaccaaaatgacttgataacattacaacaaaaaaaaactaatcatgatgaacaccttatatttattttggtgagtaaaattaagagaatacatagaaagagaatgatatttttctagaatgatagaagcaattggttacttcttcgaaaccattattaatatgctttcgaagtcaatgacttattgtccactaagcttgtaagttttgaaaaactaatcatggttgtcaaactaaggccatgcatggtcgaacaaccatgagagctccattgtaggcaccatagactcgtttatgtgctcttgtgattcaagtattcttgataatggaagagatccagcataaaa

SEQ ID NO: 82049 - DNA, 1226 bp, Cannabis sativa
atctgaattctaatttgtgtctatagtatggtcgggtattaggaaagcatgcacaaccaaatatttttaaagtggaatagtctggttctttgtgaaaaagtttgtacaggggagtatcattggcaagaacgggagtgggaagtctgtttatgatgtaaaatagtgttggacatgaaaaatgttttggaaagttttttagtctaacattgttggacataaaaaaatttcataatgtccaacaaaatttgacataaaaaaggtggtggacgttataagttaaaaattctaattaaaaaaaaatcattcttttttggtagagcatgggccaccaccaacaatggtggacgtgaacagctaggacgtggagcccatacttaatatataagaatccataagaattaattatgttattattgatcattttccacaatctcatctcagcccatctcctctcttcactttctttcttcattttcgaactagtatcgaaccagcagagcaaaccagcgcggctgagatcaaatttcagccgaaagtcacaaataaaccgcccgaaaatcccagccagggccagctatacttgtaagccatctctaatctccagagtttttattatttcttctatgtaaactttttctctgtttgtttcaagatcactgtaaatgatttacatatgtttaattttgtttgcttgtagtcttcatgaatcagaccattaattatctttctctcttttttctacttccttctctattctaaattatttaattattttgatgacaagaatgtatattatattattaattactttattttctttcttattttttttaaaactacacattaatttataatgacagaagatcatcttatcttctcgtacatatattaattagatcatattataatatatgtatcgaagtgccctcgaattcttcatttcttctgaattatatatattagatttcaccatgatcactttttttatttcatcaaagtatattatgttgaaaagtattttatattgtattaaactaatctaattctcacaagttaaataacttaatttatattaaatatgccgttttgtttgactcaattagctatatatacacctactcttttttttaaaaaaataaaaaatataaaattattgaccgtgtcaaatttagatttgtttaatacactattttttaacagagttactttcctttcttcccaagcag

SEQ ID NO: 82050 - DNA, 594 bp, Cannabis sativa
tatacatatatatttgaagagagcttctagaaagtcaaagacatgggcttgggcttttgtttattttattattctcttcattttgatggaattgtttatttttattttatttgatgaaatcatgcaaaatcttggtcaattatggctaggtctaatataaaaatataaacttattcgagaaaaagggaataaattagtagctgtccaagttggacttttgaccgttttacatatagttgagactcaagtaaccaaataccatacaacaaataacggcaaagcaaagcaattgattctgacgtctcatctttagaattcacaacaaaacttatcataatttatcttttccaataattaaattaatagaaaagaggggtttctatgaaagtttttatttatttatttatatgggaatacacaaaataattacgtaaacaaccaacgaacaatttaaattataaatcaaatccatatagcaacttatctagtaatttagactataaaaattaaaaaaaaaaatatatatatatagagtgattttcagaagaaaaaaaatgacattatacacgttttataaatgtagttatagaggat

SEQ ID NO: 82051 - DNA, 705 bp, Cannabis sativa
tttttttttttttttttcttgtgagtaattcctatttcatatatatacatttatatatattaatatatttataatattttttttaagtataccattgtatcaattaaataaaactgtagaaactggttgtgatattttttgtgaaggtattttcatcatttttctatatatatttttttaattatttagatatattataaaaagtttttattattttttttttttttaaaaaaaaactctgaaatgtttctctcatacctaattgtagtatttaataatctagagtcattcatcatagtatttttaaattgcattcgttttttccttcttcaacttttttttttttttcattttctttcttcatctacgagtagcttgtttcatttgatcatggtttggtgtaaccggttaccataataagaaaatggtatttctcaaataccatttgctttagtgatgcactggtaaccgattgcctctatatattagtactttttatacttttagtaatatggttgccactatatcgagatattctttagtaatgtggagataactagttactacaattaaaataacaaaacctaaaaaaaaattataacctaaaccgattgcgatagtaactatatagttacttattcaaatttgcgaaaatatcaatcgtggtggcaactggttacttagttagtgatgagtgtatatttg

SEQ ID NO: 82052 - DNA, 2263 bp, Cannabis sativa
catttctcttagacattaggtaattgatgaagaggtttgtcctaaaaaaaatatatatctccaaaataaatttgttcacaatttgcctttccattttgtaatttctacctccgtcactagttcattgctcgaaagtggatcataaatatagttcgaatagaggtttgcaaaggatcacccctgggctaagatggaccatgccagcatctagggttcatcgagataatgagctcgaaagaaaaaaaaaaacttttataaatacaaacaattttttagtaactttttttttaaatattacttattattttaagagtaaatagtgttataaatatttaaatttttaatttttaagcgatttaaacttaataatttttttaatggcataagtactaaatattagtaaaagataatttctttaatttcgctagtacaatcttcgctaatatcttaagacctaaattctaaattattaaatctggacagatatatgtaatatgagtcacttcaaaatcttcttttaataaagctgagtctgcattacgaaagtaaacaaaacttacaaaatttataattttactaacattgaatacttatgctactataaataatcataaaatttgtgtcatttacaatttcaaatataaaactttaggtacttatgtcaaaattacatcttattttaataatgacactaaaaattctatctttccaaaggtggaacataattcagagcctattattggtcttaagtttatatattagaatcactatcacaaacacaatagtttcaacaaaattaaaatttaaaatttattcaccaaaaaaatttaaaattttaaagtcatgtaagtgtgaaggtgacatgagtataatagcctcatattttttcaagctgtgaagcactaattacttagccgactctctctctatatatatgtatgtatatatagatatagtgtgtgtatatatataggtgaagtttgacgtcttaaaattcatgattttgaaaatatttctgataagtattacagctgcaactactttattatgtatattgattgattgattgtgttaattagtcgaatttcaatcccattttaagagaatttctaagtcaacatgccattgatcaaatatgccaaatgtagaattttttatgtgctactttgaatcatggaatttgcaatatatgaaataatttcacacaataattataaagttttaattatttggcttctcttagctaattgaatttattttcctaatatataactctcttatattaaattaatgtgattatttaactaaaatatttttttgaaagagatttaactaaatttattagtttaaagatttttaaaactaacaccattatgcttgttcaaaatgcattcggataaggctccgaggccaaatggtatggggccaagtttcttttggaaatacgagcacatagtgtccgatgttgttaagtttggttcgagatttcttttaggtattttgtgtaaaaataataataataataaaaatttaaaaaaatattctcaatgttgcataattctaattggaccaaaatgagataagatgtaatgtaggaaggaaaatttgaagaatacccaatttattatttttaaaaatacctaagattttgaaaaataaaagaataaaattacagaacatggaataaattacaaaattacgggaagaacataattataaggaaatttttgttattgtttttattaagaaagtttgcaaaattatggatatttttttttttttaagaaaaagttattttatgggaaaaatttgaaaagaaaaaagtataaagtaactagttatcctaaagaggtaattagttaccctaaactattctttccatatttttttaaccttaagaaaagtttccaataatttttttttttcaaaaagaatactaatcttttattgtattaaaactcataaaatatataatttcttttaattataaatacaaattttatttttctctaaaaatattcataacaatacaataaaagtataaatttgtaactatatgttccaattttataaccaatatttacaaatcaaacttttctatgtatttttgtaagaaaaattttatttgtatgcttaaaaaaatatcccatatcaaaatttagacttccaattaatttatacaaaataattcttttatttacatattttctttatttcacccttggctaataaaaaaaaagtaatcactctctctctctctctc

SEQ ID NO: 82053 - DNA, 2110 bp, Cannabis sativa
  modified_base (1775)..(1779): a, c, t, g, unknown or other
attaattataattgattattataaaattttataataaataataaaatataataaatgaatataagaagaaaggaaaagaaaccctaatcaaaatcacttatcatctatctcttttcttccgcctccctctcattttctctgaaattcctacgcccttggcctccaccagcagtccgaccatccagccttacatcatccgattgggctctaccaccagtcgcaaggggtctcagaacctccttatcttctctggccatcttcaccgccacccgctcaacccttctctttttgtcttgtctctggccatctgctccacaagctaagcaaccccacgacgagcttctccgacatcaaaatcataaagtcaacacaatctatctctctaatctatttttttctttctttcctaaaggttcttgtctctctaaatgagatgctgattttttattttattttgcaaaaagatgtgattttttttcctaaagggtttgatctctctacatgagatgctcattttttattttattttacataaagatctgattttttttttctgtagtgaatgttttgtatgcaattgtaaaactaaattaatatattatattgttattctaaatctatttaacatttccatttaatgatagtaattttaatatatttagtaagaattatcaattgagaattaaagcaaccctataaattaggaaaagtatgagagaaatagttataaatgtgctatattaaagaataagagaaataattataaatctatataaaagatgaagataatatatgatagtggagatagagatgtatgtgttatatatatagagatatgtatatatatatatatatatatgaataacagtggcgagatgctctcttttttttaaagattttttttctgggttgagtgacacaaagttcttcttttccttttctttgatgatcttctaggtttgagatttgaataatgttatattcttactgtttgttatttttatttcgcttcttatggtgatatttttttgtttattattttccttcagatctctagaaaagaaaagagtccttccagagattaggtttccaagtccaagacatcatgccttccaagttctaaatttcgtttagattattatcaaatttcatatcatgtacaaatctctcaattgagaaattaacttgtataaaaaagtcagattgtatttcctgctgtttcgtaggttgtaattaaaaataaatgaatgagaaatttactttcaattctttttcctattttaatttcaacaagaaagaatttttatttgtactgaaaagaaaaaagataacattaattaattaaagtggctaaaaattaatatataatctgaattaaaataattatttattatttttttaaaaaaaaaaatgatacagtggcatcttttgagtgtcactgtaaaataaaatgattaataaaaaaaataaataaatggatatagtgacacgcatagtgtgcagttgttatttttacagtttgacaaggggtgactctgaaagcctatagtgacgctcagtgagtgactctagaagggtttagtgacccactatgaagggtcactaaatattacttttccagtcacccacaatagtgacgcgcagtgaagtgtcactaaaacgttttagagtcactcaatgtgtgtgactgaaacccatttttgtagtagtgaacaagggttagagatctgcgtggaaggaatcattatattccactacaaccaatgtaaggtttnnnnnactttatatgtgtttaagttttattgttttagaaattcatatttaggatgttattaaacatacttgttagtaagtctagattctggtaaaatatattctaatattttgaacttctcgtgcattatctattgactttgtatgaaaacgtttagcccttacaatgtacgcttcatgctttgctaccacaaaatttgcttcaagagcaatatgactcaactcattggatactccatgtttagattcgttcaactttgctagcatggtattccttaaccacccaatgaaagtttggtgatgctcgtctgttatccatttttgtttatttttatga

SEQ ID NO: 82054 - DNA, 754 bp, Cannabis sativa
tactgcactccacattacagatcctacacctcaaagcattcttcaccttagtactactaggtactttgtatggcctactcttttcagtatctttcccatcattcccatgctccataccgagtttatttttccttctactacgtcgagacgtgctagttttcggctcctctttgtgttcattactaaactgattgcttgcagttgctttctgtttcgaaactttgtcggatttcttcgggattggaggtgggacaatcttgagcaaagatgtcaagttatttgctttcagtgcctcatatgcagccttgtgttttttccctctaagatgggaatttttatttatctcagtttcagttgtcaccttacatattaaacaagtccacttgttgtggactacattagaagcagagggaaagtctctaacagcagcttgatgttgaacaatcttttgtttagtctctgaggctacaaagttcttgttctctattagaagctgagtaggctctgcttgcctcaactgaaaattcattggagaaaatagaacataagttcaatgattgaaagttcatcttaattttctatgtgatgagaccaaaaagagtaacaatgatcagaagaagcattagagggtaagatcaacaatttaaatttcaattaaaaacaaatacacaaaaaccatcttaagatttgaaccagtttacttcaaatctcaacaatgacctagtattacttttaagaatttgtgatttggtat

SEQ ID NO: 82055 - DNA, 686 bp, Cannabis sativa
tccacgtgtccctgtctgattggtccacatatattgggcaaaattaggggcaacatgtggtatcttttttgttttttttttaaagaataaataaaaataaaaacatttttttgtttcccttgtaagttgcaaatcatttttgaataaaaaaaagggtatcctcttggcagatcgtgtgagttgtgtacatgggtttttgtctccttttttggttcaaattaaaaaaaacaaaaggaaaacaactttatagtgggttaattttagaaagggaatgtcttgtcttattaatatgttactcatttactctctttttctcacacgagctgtacttcttcattgtattttttcaaaaaatcgagtgtgagtttcagtttttgcaaagaggaaaaatagtgaagacccgaaatcgtccaagggccctactgcaactaaagtccgaccatcaccatctccgttggcttcagttttgacttcacttccacctgcgtcagctcggacggcctctgttggtcgcaccaacaagaccaaggctcgaaagaaagtgtttcctctctccaatgagcattttatggtgtttccagacatcacctttgaccatggagtcgatgcaccaccatctgaagtggtggtgccatctcgagtcaaaaatgttgactctttttctattgaaccctcggtggtggcta

SEQ ID NO: 82056 - DNA, 869 bp, Cannabis sativa
ttccatatatgtagcctatcactgggaatggaatttgtaaggtactaaaatctggaaatccaaacttcaaggaaggagatttggtctctggagtgacagggtgggagcaatatagtattattgagtccacgaaatatatgtctaaaattcaaaacactgacgtgcctctgtcttactatactggattactaggtaagttttctgcttataagttaatcataatgagtttcatgtcaattgactatcaataattactcaaataaatttctagaaaaatcttattggcacggcaaaaatcaatcagatcaaatatgttgttagaatcatagaaaacgaaaaaagaagatgttagactactttgatttatttttatgcttttttctatgtttgttggatgttagtaagttattctcttatcatattctgtctaaataaggaatgcctggtatgactgcttatgctggcttcttcgaggtttgctctccgaaaaagggggaatatgtgttcatttctgcagcatcaggagcagttggtcagcttgttgggcagttcgcaaagctcttgggttgttatgttgttggaagtgctggaaggaacgaaaaggttcccaactattaactaatattaaacatatattcttatattcctgttgtctagtacaaaatgcctatgaacgtatattgggacataaatgcaattggatatttgtagtagatctacaagggaaagaaatacgtgttacctaattaactatgttgtgattatggttatcttttcttctttttttctagttacgattttattttacactccgtacatttataccagagtcaagagcactatgagcatgtggctaacatggtcttaat

SEQ ID NO: 82057 - DNA, 1333 bp, Cannabis sativa
  modified_base (674)..(674): a, c, t, g, unknown or other
  modified_base (1138)..(1181): a, c, t, g, unknown or other
aaaatacacaaataccactacacacactttcaacctaggatcaatgcttcctcggcaaccatctcgcaactatcacgcaaccacacagcaacccaacgccaccgaaacaaaaatttaaccaccattaattctggcaacttcacttgagaagacaactagaatcaatcaaaacaggggctgtttcgaattcatgaaaaaaaaagtgtagaaaagctactgtgaaattaaaattcaatcagaaatccagtttaatttgcataaaactaatgtcttgccttcaattttcagatgcatgaaatgtcgatctcaaaaagttgaactggagtacccaaacaatcaaactcaagtataatccaaacaaaattatatcaatactatagtaaaatatttatcctcgtatacttggttattttccaaatttctaatggtgaacttgttcgtattaaatcatgaagagacatgtagatacgtagaaacagtctgatttttaatgtttcataacagttgcattatacagttgcataaacaatttgctaacagttatttcgtctgattgaaatattcgtctgatgcaaccttcggccaaccaccaagcaaccttcgtttaattaaaaccttcgtctgatgtaactttcggccaaccaccctgcaaccatcgtctgattgtgtaattnatagtgtaagagatattttggtaattaaaagcacataaaaaatataaatgttatccacaccttatgaaaatattttgtaaataaaatgtcaatttatatttttcatgtaatttttttttttttttatttatcttatgttattactttctttctaatttcttttgccaataatttttttgaattcggctgagtctatgtaaattaataatttttggggccactttacttatccacactttatgatgaaagcaaaaaattcatattaaaaagagattaagtaagaaaattaggccaaaatggtatttaattaaagtaattgtttaaagcttaagtattgacattttaattatattttgttgtgtgctttagaataaggttgaatatacggtggattgtatttgcatccactacctactatcatagcacaacattagtatactttgaatataataataataataatnnnnnnnnnnnnnnnnnnnnnnnnnnnnnnnnnnnnnnnnnnnnattattattatatattattataattaaataagaaaagaaatattgaataatataaaagtggcgtcattaggcgcatatgcgttgtcgtttgtgttagattaaattttagagatgaggaatctgggtgatggattttagtaataattaaaaaa

SEQ ID NO: 82058 - DNA, 1642 bp, Cannabis sativa
aaaaatataatgtacaaaccaatttaatataatacaatacaatacaatacgatctaatacgacattccaaacgagccctaatagtattcaacattatcgtctttgtgatagctattttaatttggatcttatctccacttttagattagggatctttcccatatcccttgagtttcacccaatcttggggataatgtggtgatgattctttcccattttttttttttaattttgcacaatttggaggatcactttgccagttataggaggctcttactacattctcttttgatcaaattttaagagttttcatcctattaaaaatgatactgccacaacaagttatctatctaaaatactaatcataattcttaagaagggctatgatatgtttcaaaccctattcatgaaataagaaagaataagggtgaagacatctttactactataccacacaacacgtgataaatgtcatctataaccttaatcgatacattgagttcacctacacaacacatcttcttacaccaagttatttgtgttgtgcccacaaatatcctatttaactaattgatagattctccattttttccaagacaaaaaaaaagtgcaactaatttcttgaatcaaatatgttttaacattcaatttgttaggtatttggaatacaattattgaaatgtgaacaccaacttaaatggaaaagtatgtaacaattaattactctctaatttatatcaatttaaagaacttgaatggaccacaacactaattgaagacaaattcaattactttacactactacatatacatatacatatacatatacatatattttgggaatgaattttgtcattttattataaaacaaaaaacacaaccaactaaaagttttatttgatgtattttaattaaagtacaatgtacttatcaagattgaatgtattttcgttttcaaccgttaaatcaactaaattttaatccaaatggttatagtgatcacgggacatgaccgaacaaaatctaattcataatatatatatatatatagaaatttatggtataaatatttaactttaatttctgattatagataaacacttaaattttaattttaacgttaataatatttaaagataaatttttagaacttcaataaatacggctattaagtgtcaaattaatagccataaaacattctccaattagtacaggtcattaaaattttatttttatttaaaaattaatttaaatatacaaattaaaaaataacaaataatgactttacatttaatagttaggtacctacaaaagttatagaaatataagttaagtaatattactataaaaaatacttagttatttatctccaaccgatagttaaacttaagtatttacactatatattactatacatatatgttatagtgtgtttttataatgcaccctcttaaaaaggtgacccactatctacctatttcagtataaaaaaaatagcctattatatagaaagcagtattcgaacagttcacacgcgtataaaataaaatagttacgaatgcaacagaatatttaaaccttatttttatagtattaaattttttcaaattttatagaatgtcaaataaaaatagataaaaat

SEQ ID NO: 82059 - DNA, 1491 bp, Cannabis sativa
aaaataatttccataaataaaatattctaatataaatgaccttcataaaactaagtgaagaagaaggcaacgatagaaataagcattcaactcgagcgaagcgattctaaatcgcctatacagagaaaaaaccctttcgcgagaacctaaaaaaatccatttcttgagtagtcccaaaacagatagcagaaagaggtagtagaacactcgttagaatcacgaacaaatttgaaaaatccctacctttgcttagcagaatcacaggagaagcaatcagttggatgtcgtattgagagattttgaaatcgcctataccacctatacagagagcattttttgaaatcatctatcatgaaaattgacccaaaaaaagctaacatatagttgacctacattccatattcttaaaaaagtaaataaaagaccaattgtccaatacaatataaatacatactccatacatataaagttcaaacaacttcagcaataaaaggcaataaataaatatacatacactaaataatatattctttttatgtataatagtctcaatactactaaaaggtgtcattttgtaaatagttagtaattttttttattataactattattaaattaaaatatataaaatcttataatcaattctttacaccaagataaatatgacatcttgtaatagtgttaggctccactaataggttttaccatctaacatttctctttacattatgattgtcaacaaaagctaaaggagggaagtgaaatttaatacatataacactggtattttttgttttataagaatttccacacttgaaaataaacgtacctttgatttttatgtttgtgaaatgaaatccaaaggacttgatttataacaacaaatacaatacctaaactaataccttattttaaattacataacgaatctttgtctgattcaatatctgattagattctccaaaccaaacaatatgctcgaataatagtatttctccttttattttttaggaaaaatacataaagcaagaaaggttattaccttatattaatttagtgataaagaaagtgaaattaaagagtatgatgaggtaccacaatttaatgtgcgggaaacacggatatatccctgtgaaatttgatgggttaaagagagaagatcacaatggtccacctaaattaaaagttcgtacttaccctattcatctaatggcccacattaaaattcttttatatggccagagcccactgctaaataattacgggaaatttagacagattactgtttttttcgaatttatttcttttatactgttacacgctcaaattaacttttatactgtttttttttttcgaaattaacttttatactatttttttttccagcagtgtactgccaataattttatgttattgttttgtttttttttttattgattgggacatgggctcaagttatttatttaattttttattttaatggatgtaaaa

SEQ ID NO: 82060 - DNA, 1023 bp, Cannabis sativa
gggacttaaaagtaaatgccaagtggacaaccaaattttatttcagtcattaaatattttaattaagatatttgtttttaaatttgatatatattaaattatgttctctaaaattttcatacagttaaaaattctcactaactattaaaattattaaatttaaagatttctatccaattttactaatggaagcctaatgtggataaaagtttaaggatttaaatttgagagcacagtttggcagatatcaaaattcgggagacacagtttagtaaataaatatagaagtgtagatacacttagctagtgcagagcaccaagaacacgaaaacagagtgaaaaattcaagagagtaataatgcagtaaaaaccacaccctctcaattagactagaactttatttataggcacacaatattgttccaagataacagaattaccagaagaaaaaaaaaagactaactaatacaaacagacaagtaactaactttaaccaacttgactgttaacaataaaccattgtcatgttagtaaaattaaacagaattagacagaaatctttaaatctaacaatttcaataattagagaataatttttaatgacctaaaaagttagcggtcataaaaaaattactttggtggactcaataatggaaaaaaaaaatcataatcactgataaaaaaaactttaaaagataaacaaaaagatgatgataacattagtgttcggatattagtggcccaaaaaaaatataaaaatacaacaaaatactaacattcgttatttatgccacatgaagaagccagagttgtgatgataacaatggtaagataaaacttccggctgacagtactatatttacgtggatagagtgaaaaacctctagttaaaaatgagagctacatcaatagaatctttgaatgtgtgatcctattcatgattcattacttccttaatggtaacaaatcgacctttttctattgaaagttgtgctgcaactcctatggcaactgagattaacc

SEQ ID NO: 82061 - DNA, 3831 bp, Cannabis sativa
tatgacaacttctctactattttgtgagagttcattcgagcattccaaggcaaatttaactgaatcacaattttctttgaacttctaatgtttgtagtagactaaaatctagatatggtcatgctatcaaatggtgtctgttgtttattaagggaaaacaaccattaagcctctccaatggagttggaaaacactatgatctacatcctacagcaaaaaatatccttgcgaatttaaccaatcttttctttatcaagaaacattaagaagaaacccaatttagaaatggatattaagtaaaagaatggtggattaataagttttgttgaacttgtatggatgtatcaaactcggattattttcaatgaaatgttcattcttagaaaaagaataagttttggttatgaaaatttttcggattttcatttttatcttcttacaagtacataatatcttgcatgacagtgacacttataatcctgttcctggagtgatggaaggggtgccctcttcaaggaattatgatggtggctttgcaactaaacttatggttagtggttaagattaattgttgttgtaagaatcgcggttcttatactgtttaaaactcaattcataaggccatattgcagttctaatatattcatttgcagttcatattaactcagaaataagattttttatttttcttataataatttcattagtggtaccaacttcactctagaataattaaagattttatgaacatttcaggctaaggatctaaatcttgctgccacttctgccaaagaggtcggccataactctccatttacataccaagcacaacaaatgtaagtcttctcaaagctttggctattgcacataacttttagatttcagtattattcagtgaaaatcattgaactttgtttgttcatatctattaagtacagatagcgtttatagtgttagatttgctgagctcgataatagcgaacataattcgaaactaaacatgttgattcatagaagaaacttccatctcttatgaagtagtgaacaaaatttacgcattacaagttggttttaaaattcttcaacaacttacttgtgtcataagttattgctaatttaacaatgataacattgtttcttatctattattcatgaaagcttagggagttagatataattttagtatctgtcaaatttcttatctttgtcacaatatgtcacactgcctgttagaaaccaaggaaatatcatcaaatcccatcagagggcataaaatggcttttacttctcttaaggtgtaacctcttattattataattaccaactcaaaagaatatgtttagtttcttgtacttgatgaactgactattttctgcagctatacagatctatgccaggatggtcatgaaaccaaagatttctcgtgtgctttccggcactattactctggtaaagatgagacatagtaaagaaaattcttgtcattagttgcggaaggcgctattgggatatttgattaccttctttgccacccaacatttcatggaatttcttaagccttcacttgtattggatttgcttcatgatctatatgcatgttgtggcatgtttgtacagatttacatgtgtttaatactatgctttatgttaaaataagctctcatagatggagctcaaagcacaagataatctcaaattgaatagcaaaaaaaaaaaaactcaagttttacttcataaattgttgaatcttcttatcttttcaattttcattattaaatgcctaaaaaatgttaatttggttttcagcaataactttttaaactcaaattattcccaacataattaatttacatcaacgttgggatctaaaataaaaatcccaatggtatcagagccataactcatactatcctatggacgagtctctacttttcactatggctaactttgacgaatcatcaagctcactcaatactcttctttttgcccctcttgcacttacacctttgccccctgtcgaaaatcaactttcaataagttagacttcctttacgagctttcttatgttctagatgaacataaaattaccttcgattctcttcctctcttaaatctatatcaacctttcaccaagactccttcctcttttactagatccattaaagcacttattaaaccatccttcaaagctccaaaagaatacattcaagcctccaaattcagcagtgccaacttgcaccaacaccagaagtccaatttgtgactcttgaaattccacctgaactccctccacaatggatggcacaaggttatacctacatccactttggtgctattcgccttgctctaaattatcatggcaggaaggaccttccagttagcgttcatattggtcttcttgatattcgaatgaggaaatatcaccatgcaagtatagctactattgaaactaccttaaatgcaggaacaatggtcgtcactctgtttcccgatttcaacatgtctctaagagataatcgactgactgatgcttttaaagtagaagtacagacagtaggagtggatcaagacccaacttatcttggcgccacactccattatcagatggcatatcgacttcaggatcatgctcttgatcttaacatccctcaaacacaagacactttactcatctctgtcgattctaaataagtaccgacctacacagggctatttatactcacgaacaaattctctccaaacttggaacttattttcaacataattttctaattcacccaaagtatacttttgccaatctgctccccttccaaactgaacttttcactccaaaatccatagctcatcttttttggtacctaacatgcctctgtacaatggctgtcgaagtccaagctattgctcttcacactgttatacagtctttcctcgaacaagaaaaaaataaatcagcctaccaaatccaaatggatattttgtcttggtacgctcctctagaggagtggaaaaaatacttaaggatgaatgagaaaaagttcgcaacaataggcacgtctttgtttatccatcagcaccacatgtagccaacatgatggatcgctacactgtcttctttatcagtgttaatgcaaaattggatgagaatagaaaaatagtttgcaatcccacttttgaactatatacggctcccaagaagcacctttcagagaaagttcagagtacagggatctccaaaaggttatttttgagaaaaactagactattccaccagaaatttggccaagaatagaagatgatgccccatgggaaatgtttccctcagattattcacgatgcatagcaaaagctctagaaaaattcaaattttttgaaaatagtcacaatcaggtccaagcccataaagcaaagacgaaaaaatcttcactattcaaagaaacacactgtaggggtcatactctgtaagacaagcatttatgaggattcataagatccatacatggaccaagaaatcgtaaaaggtacaggatccatatctctttcagtacaatggactggaatgggagattgtttattttggttatgatgcgtgtccaccagctggaagtgatgaagatgatgaaccatcaggttggcacccatttcaggaggacccaaattatgactcacgcttagggctgaacatatcgaccgggtttgacccaaacccgaccaacccgcccggacctaacccggttaacttgaaaattttaaaaaatctgttttgttcgggcgggtcgggttcaacccggtacactttcggggtgttcgcgggttggttttttatggtcacca

SEQ ID NO: 82062 - DNA, 2292 bp, Cannabis sativa
aattaataaaaaaatattttaaaaaggggataaatttttttaaggcccttagattaagtagacccttagcacaagcctaacccgtctatgcttagggttggacttgttaagaatatcacttttgacgggtatttttacttgaaattagaatttatcattatatatatattaacaatgtctgtatattatagttataataaatatatctttaaaaaatttggaaaaaaattatagtatcaaatatatagttcaaataattagttgtgtatacttattttttatacactaaataaacgttatttttaatacagtaaattatttatttaaaaaaatcaaaacttaataaaatatagaatattattattaggtatcagtggtacttagcaccttctaggagtgtcgtcttgtgattagctagcgatactctctaaaaattattatattaaactatatgtaacccgatacttaattgaatcaacgtaggaaggtactaaacagtaaaccaacttatacctattacaatttctctaaaaaaaaatatatatgttatgttcaagtataaaattaaaatttcttaaaagtatatattaatattaataatatgataagttcaaagtggttgactagtagttagaataccaactttgatgtaatttaagtcaacatatttggttgaccacacgctctgactttgtagagtgacattattattgcatgcctttcttttttgttcaaagtcaactcaacagaaatattaataagtttattgatttttaataaaataaataaataggatcttaaaacatgaggcctataactcaagactcaagatgataccccactttcagctcaagttaattttgcttttacaatttaaaaataattattatgagtgtttttttaaactatatttataaaaacataaatgggataattcatttttacaaaagtgataaaaaaatctttttaaaaattgtaactgatatcaagttaaaaaagcccacaaaagctaaaaaaaaaataggcaaagtaagaacaaatactttttcaaaaaaaaaggacaaacaagatatatatgatattttaataataataataaagaataagtgaatgaataaaatagtaaccatcacaatctgttataatggtaaagaaacaaaataatagataaacaacaaaaatttgctgtaaagtagtataaaaagcatttatttatagtagggagatgaatttggtttctatatatagatatatttgaaataaaataaaataaaataaaataaattgatttattagaattgccaggccaagttatatatcttttgtttgattctcttgttgtttgtattgttgatgtacatacaaaaataatgtggctgatgaaatcaattaagaataatcggtgtaaaatttgcttatattttaatttttatatatttaatatatatatatattttttgggtaaatcccctgaattctacttttttatacacttaaagcgtcagttaaatattattattaaatatcactatatacctgtaaatcttcaaagtcaatacaataataatccattaatgatattcagttagcaaaaaaaaatataaaaagattttaccactaaataaagataaaaaattatgtgtaaaaaatcaaaagataaaaaagagtttcaccgcaattaacccatcaattaattaatgttttttttttttttgtaatttaaaatttgaatataaatatatatatatatttaatataatttttgtggggtttaaaaaatgaattaggatgtgaaggagaagcatgcacaatggtgataaggactctacattggatagttccttcatattggatatggggactcccattcttcttgttttattcaacaaggtcttctcaatttcttcatcaaaccccaaatcaaacacttttcaaaacctttttatgcctccttttttctccattggtaagtaaattaatcatatgtatctcattttttttattaataattactttattaatcatttttatgagctaataattaattgcaaaaaaaaaaaaaatttaataataaggtgagtgttcggtaaaatatgatatttgaagaacattttcatacctctttttctcttatgataaataaatcttatagcttatatcccaatttatttactaattactttatttaagttattaattaataaattctttgtaattacttttccaaaaaaaaatatatatttcgacatcctttaaaattaatagaaatatttggtaaaatatttatttcga

SEQ ID NO: 82063 - DNA, 755 bp, Cannabis sativa
tccgttttctatccagtttttctcccgttttctatctctccgatctctgttccatcgaaaatcttattcgttgatgattttggttatatatcttgatgggcatctgggatagttgaagctctcaaaatccaaaggcttttctgcaagggggtgttggtttctgctggcaagaagagaagataaagatttaaggtattaattaaatttctggtttttataacgttataattgaatcatctgatgaaaatccaagctctggcatcagtacttttgactcaaccttgtccaagtcaacagcctgtacagtactatcatctatcaactatcttaattgcatctttgctaatattcttttacttttttgtttgttttttctaaattgtttgataatggaaagtgatctctcctatatataacacaatatctatgtatatataatgtgtgaacttaatgggatcccagttttaatgtcttattcaataattcattagttttcaaaatatatgtatgtatactattaacattaaaatcaagggaaacaaagaatttgtggttgaaaatttatagctattataattgaatttcacatttcaatatatagtactattttttaaaaataaataaactgatttgtaaaataataataataaaaaaaaaaaaaaaaaagggccgggtctaacctggtccgattatctcaggtcgggcttaacctgctaggccaaaggaagaaattgcgctggatcgggccgggtcgg

SEQ ID NO: 82064 - DNA, 1788 bp, Cannabis sativa
tagagatttttcaaatgacttctatttttcaggtttttggtttgtgtgccttagccattttgtgctttgaactgggaaaattcgcaatacacgttctttttttcttgctatttaaatatgcatgtatatgcctagttttctttttccaggctcgtttattatgtttttatgaaaaattgccttttttccttcttcgcttttacgcttcgtgttcttatttttggaaaccgtgtgttcagcacccgataccttgtctatatatttcttggtcgctggtatctagatggggcctcttctcggtaattagaggatcccattcctatatttattttttgagtttagtatgggggctaattgatgggtttctttcatgttcccatatgagcaaagcacttcgggaacttcacgcccacggattttactcctttgatcaagaaattctatctttatactcgaacgaaaaaacaaaatggtccacctaggaggcaagaagggttccaagcaaatggaaggggctgcgggacccccagtgatcacattggcagatgtcttgaatggcccgattttgataaggaatcatgtccaccaagctaccggttgggaggcagacgggagacactcttccttgaagtgcctgcaccaactccaataaatcatagagaagggcggtatcatacaccacggaaggggacttttccatcggttgtcccgagactcggagactccaaatcataattatgaaggttttcggagcgtggagctaaacacatttgatgtctagagatactctcactctgtcgcgtctcttcttgttctccccttcacgattctcggtcaagagataaacgaagcaccatcggctttcccaaggcccagaaatctcaatcccatctcttccccttgatcatccgtccttcgccgtcctccgccgctagctgccagtcacctgcgaagaagaggaagagcaaaagaaagaagcgtgaagattgaaatttagattttagggttatatttatttatttagttttttttaatttaaaatatttatttaggtttacacatattttttatcatttaaatatttgtgaaaaaagattgaaataattaaaaaaaatttggtaccaataagaatatgcaatatgtacatagatgtacatggtgacagtcttagttggcgtcctaattggcacttaattagaaaatttaaatgttattttaggtttacaaatagaattaaactaaaggggttttcaccactaaaaaaaaaatagggttatgtgtatacaaactgaaacataaagaggtttagccgcaaatttctcttattattattattagagaaatactaaaacgaacttgcctcactatatttttacatgttaatattattattgattcaatctatatctatattctatatataaaggaaacttattgagagttgatggggcattacataagagctttctttcaaagtttctattttctcaatttttctattttttctaatttttaactccatatatcatacaatgatttgattcattagtaaattttattaaaaacaaaaattctacatggtttagaaacttttgtgcgtgttgtgttatagcctatatatagtttactatttgttccactttaatttgtcttgaaattaatgttgcattatttctatgggtgactaaagaatttagtcttgctcaattaaatttttcattagttatttagtagtaatttttgtaataattacttctaaattacatttatttataaaataatttaagt

SEQ ID NO: 82065 - DNA, 802 bp, Cannabis sativa
taattaattaatgattcaatcaaaaataatttaattaattaatgatcataattctttttgtaggagagcttaaattattagaaataaataactaacaagaatatatttataaacattttaagattgttgttctataatttagtgtccaaacatattttacttatttgaagaaaatatattttttgaagataattaaaggcactaatgaatcgacaaatggaaaacagaaaaatattaaggcaaagtaaacaaaataaaacacaaaatgatgtacttattttggatcattgaaactacttttctaagaatggttacaactaacaatatgaactgaaatattaaacagtcgtttatgtcgtcagccataattgtcatatatttctttatagttttttaattttaattttatgtttatttgaaagggatatttctagtaagtaggagtgtttattggattacacttcaatgtttttaggcaaacccaagtccgatctaattatatattagatgttagattttatcatccgatctgatccaattaattttagtcatccaatcgatccaacacccattagatgtttgattgaatcagtttctatccgttggatgtatttcatatatattattggtttaatttaagtttattcaatattttagatttagtattttttttattttttggattggattgtatccatctaatattgtaggtccaatatggatccaatccaagaaaaaaagagtaaaaatttaaaggattatttcacaaaaacataaaaacaacaaaaagtttacaaaaata

SEQ ID NO: 82066 - DNA, 979 bp, Cannabis sativa
atatttaaaattccgtgaaactgtatttttgtaatttttttttgttgtttttatatttttgtgaaataattcctcagttttaagcttaatcgttaaaagcccaaaaaccatggcccgatccaaaattgaagaaaaatgaatccttaaaaaaaaaaaaacagatatttataatatttctgtaaataaataaacgaaataacgattaaattaaaaattaaaaattaaaaattacaaaaccgcaacagcggaaagaaaaacccaatccatcttcctctgactcggagctccattttcatggttcttacctctccaggagaagaggcagagtgagcaagcaactgaaactttgaacaagcttccccaaaaccaacgaacctccgcccaacaattccttaagctctctgtttcgagctccgctgcctactcaatccctcaccgactttaaaaaaaatgaacactgtgttaccgcatcgaccgagcttggtcttgtctccggtcccggtccctgaccgaacccagaatccagttttccgtcgaacccattattttggattggcgcctttatctaagcccggtcttcgtggttctctcgccgtagccagactcgggttcaaacccgatttctttcctgaccctgatagcactgaggggtttgttagggagctttttggtagagcggaaggtcttctctacacggttgctgatgctgctgtttcgtcttcttcttcttcggacactgttactacagctaaacaaaacagtgattggttcactgggattaccaattatatggagactattttgaaagtgagtttcaattcaattgatgttgaatgttgactatcctatttttttttatataaatatatatatatatatatataaacatttcctttatattgggtgtttgattaatttcccagattttgaatgatggactaagtgctttgcatgttccctatgcctatggtttcgctat

SEQ ID NO: 82067 - DNA, 3301 bp, Cannabis sativa
tttattttaattttaaatatttattatgtgtactaattaaactgtgctacgtgtacgctgtgtatacgtggacattctaacctggcacttaacactaaaaaatagatgaaaatggctaaatgctaatagaatttgagtttaggaccaaaccaaaaaaattaattttaatttaaaattaggggttagttgcaaaaacttcgctacttagagaggttatgccgcaaattactcttaataatatgtcttggatcactttgggatttgttgagaaaaaataattaattagtcaaagataagtgcaaacttgaataaaattcatacaaacaaaaaaaactcgtattaattcgcatctttatgactacttaaagctcaagtttgttccatatgttttgaacttctaaacccattgtttccttcataaaatccagtttattttcatctttatgactttggacaacagcaaagcaacttctatcctcagctcgttcatcttcaaattcacatcactcaatttggtcccaaacaaatttctgagatgagttcccatagataagtacacctcatctgttaacaccataaccaccgtaatgatagagatcagtaggtgcaaaaacaccaccgtaatgatactatagtgctcacaatttcatattactctattctaaaatcattacatggtttaattaaggattggaattaatataaagagaaaagaaaggcaattaattctgttatatatggtttatgattttgatttaatatttttggtaaacaataagttgttaatcgcaatatggaatttattatatttatgagcgctattaattctaaaaaatattagatctaaattttccagtaaatttggatttgttatcgagattgacggttatactctagagctccttcttcattgattttgttgatgcattatctagtggtcattgctctactgcattcttctcgtcattcataataaggttgtacataaatttttgttaactgctcaaccctaataatctgtctaaatcaaaccgagagataaccagacgaaaaatacaaatcaaaaaactcgacaaaattataacctacccaatcattatattgggcgagttgaaaataatactaatctgcccaattaacctaaactaacccggccaatccaattaaaaggattttttttatatatatatatttatatgtttttattatataattttatatatcatataatttatatgattatttataaaaatataaagtttaaactaatatgttttgtatggtggttgatttgcactttaaattcaatctatatatttttgtctcattattacaattaaatatgttaggcctttttttggcaatttagttgtcaaaatatatttttaattaatgtacatttttatttagcatttaaattggttttattacattaattttactcctataattactcttttcttctaaggaaagattctttcacagatggtctgttttggtttagaaaacttgttgtacgagaagaaattttcttatgaaaagttgtctaattttggaaaacttgactttctctttttctaattgatgatttagattttgcctttattagaacagatcaaataaattttattttgcaggtttgaagtccaaattcgttatgttggtccattttgaaaagtttccattctggtcctgatctgctgctgtagagctcgattttgatactgaaaattaggaaattttttaagaaagttttctacaactgggaaattatttttgtggctgtttttagggttactatgttctataaataggacctagagagcatccaaacaattttatctcttctagtctcatattttcatatcttttcttgtgagaagagtgtttaatttctaaaaacctagagtgttcaactaggttttggttttcttgttatgaatatctcatactattcataaaatagattgaagagaaacttcgaacaagtgtgggtcctcgcgtgcatgagaagacttttccaagtctcatttcgggagaaagtgagcatatatcttcgggagaagatttatttaagtcttacttcgggaggaagtaagcacacatcaatagttgaagggagttcactacttggtgtgtttcagagattagattagcaaggtggaatacaaagggttgcgacaaatcattagagggagtctaaatttgtttaagtcaattgcttttgtaatctttgatactttactaattgatttcattctctgggcgtggccccattgactacaagtttttgaaagaacactgataccacgtacaattctcttgggtcaagttttaaattttgcactgttatttcttttttttttctttactcatgttattaaagaaaattattaacatttgcaaaaacataattttttaattggtatcagagcgagacactaaactcttagtgttagtgtggtcctttaacattttcttgtattttctgtgcaatatgtcattctttgcaaaaagtggctctatatctcgttctccaaaggttggcaacaagaaaggcatgtctaagtcatcgagaggttgtatttattcaaaatattttacatccaacaataaaaatgtgtacaatgcagaaaatgtcataattttggatacatgcaatctgaatgtgcaaaaaccaaaaaagttagaatgatacttactctaaaagtagtgatgaacaggaatctaataatattgcactaacatctgtgttttctagtgttccatgtcatttgcaggaaaataagaactttgtttgtcttgacaacactgttttggtaaataaagatgttgatgatggtttagggacaaattgtgatgaaacagatttggatgaggattctttgaaagaagcatacacaagtatgtatggtgagtgattgaaattgtgttcgaagtatcgtttattgataaaagatattaaatctctttctcaacgtaatgaagagcttgaactaaatgttaaaatttttgaaaatgatattgttgagaaaaaaaaaaattaaatgattatccaataaacttgaccatattgagaataatgcaactatgttttttttttttgaacaataatgcaactatgttaaatccaagttcttcaatttttgaacaggtgcaggatataggtcaaataaatcatgttcgattgggatgtgttgaatatcaatctaaattagacactaaatttgttaaatctgaacattgccttctagtttttctgatctaacactgtaggaatttgtttctatatatgagcctt

SEQ ID NO: 82068 - DNA, 683 bp, Cannabis sativa
attaacctcaacataataaattaaaggtgagaagtgaggactttttagtaatttaatatgtggaagcccaaaacaatattctcacttttatagtagttatagatataaatttcctttttcttttttttattattattatatatatatatatatatattcctacagtaatatagaattccccactctcctcattaccatgaattccacatatatattgtttctttctttttgagaaaagatcatattagactattgctatttgtattctacgaagtttttttgttttcgcttattaaggattctattctaccaagtgttgtgactaagtttatttgattaaaggtttagacttttagtaaatataaataaatgctggtataattttataaaaaaaaaaaaataacataaaatcttattaagttaatagcgaaatataattataacaattgatatgatcgacaaaagtatatatgaataggaactcaattgcagtaatgttgatattattaattacagaaataaactctgttttgtatatttttcatttttttattctccacgtgaattttgatatttttaatttaatctaaactaataatttgtggtattgagacaaaaataaaatttgtgataaaaaattatataattttaacctaaaattttttattataacttaagagtaa

SEQ ID NO: 82069 - DNA, 1101 bp, Cannabis sativa
ggcctcagaaaaatgaacagtagtgaaaggtattgtttttctagatgttgaaattaagtataattaaaagcaagggtatagccatgcttcttgaatttccaaagtgatatttggatattagattacaataaaagtataaaaattagctatatatattttttaatttggcatgttctgtaagggttaaacatgtctcaatcaatacacaatttcaaatactaaactattatgtaaatttcaaaattcataactaaaacaacaataataataaaaaaaaaccctctgtttttctcaatatatgtttccaggtagctagaagtagtagttcatattatgagcttcttgtttgttgtggtatattagagggtttttcactactctggtatatataaactatcctaaataagaaaattaaacatacatatatttatatacctgaagacttgtgttgatgaagaggtgaggaagacaaagcaaaaactactacacaaagttgggggacaaagatgaagagtagtactcctattcctttacttcccattatctcagtcacttttcagagtgtttcttccccttttgcagtttcacttcaataactatattcctttgttcaaccctggtatgtaacctaccttcatgtgtttgtatggatatatatatatatgattatttcctataattaaatgggttggagaataaaaagtacacgggatttaaagtgaacaagatatgagttgtccttatcttaacaaatcaaatgggtcaaattaatgaagctgaatttatatttggactagagaaagagaggcatctatctctgattgagcactcatttcttcactttttttttttttttttataaatagattattaaaactttatttctctattttacttttttttttttaaataattaactaaaaatttacttttttttttcttcaaattttaatatattttatttattttaaacatacgagtaattctacaataaatttctttaaaagagatatactgatgcactctctacttgtttcggcatctagaaaaattttttagtctaattttttttttttcatatttatgtacgttataactatt

SEQ ID NO: 82070 - DNA, 1408 bp, Cannabis sativa
atattacaagtacaatcagaggtatttaaagcagcagtagcaagatgacactgcagagtggttcttgagtgacttgagggatcaccaagcaagtatagaccgtccctagccttccctttgagcagcacagaccctgttgtcttgtccttgacaaagcaacaatttttgtgaaattcaacaaaaatgtcattatcttcaattagttttgacacactaacaaggttcttagtaatagatgggactgtgataacagattgcatatgtaggggacaagatttagagacagaaggaattgaaatagacccaacatgagaaattaataatttcttaccatcaccaatagcaagagtttcatttccagagaaagactttgaatcatcaagatttgtgggatcaaaagtgacatgtgtggtggctccagagtcaacataccatgagttatcttcaccaaagtcttgaatcatagttgttgcataggcctgtggatcatattcacagtcaagttcggttagaaaagcacgattgacattgttacccggtttgggagtagaccagttcttgtcgaatctataatggcaaatggcagccgtgtggccattcttcatgcacacttggcacactactttctggttggaaaacatgtaaacacctctgccacgtccatttgagaaaggcagctgattattggtttgggaaaaagatcgaacacctgcagatctaccctgaccaagaaccatatttgcctgcatcttgacagaaagatcactcatggttacgtggtgttctatacgactttcatgagaaagaagtaaggcctgaacttcctccattgttaagttgtcactgcgggaggtgatgccagaaacgacagagtcaaactcaggacctaacccgttgagaacttgcagaataacatcttgatcatcaactggagaaccagcaattgcaagggagtcagctatggcacggactttgtcgatgaattcagaaactgagagactgcctttgtggacatgagagaactgtcctttgagttggagtttcctggcttttgattgagaggtgaacttctgttcgagagcacgccataccgagaaagatgagtcgtaatttgcaacggaagctaagacactttcagacatcgaggatcgtagccaggagaggaggagttggtccttgcgccgccattgaaggtattctgggttggaattgccattaagaagtgttttcggaggaggcactccggtgaacaagatctcatcgagatcatgtccaatcaccgttggaacaacctgggacttccaagaaaggaagttgacacgatcgagtttgatcgtgagagacgaagatagagaatttgagaaaggattccaagatccagcagcaggggtagataccgggggagctt

SEQ ID NO: 82071 - DNA, 1937 bp, Cannabis sativa
aaggcacatgttggagaggcttctaaataggaaagaaccagctaaaatgactatctagaactgccttccaagaagaataactagctgtccggaactcctttctggaggagggctagctatcctaaagactgaacatggagtggacttcttccgaatacaactatcattccacaagacttcttcgggaatgaacaagttaggtgtttgggaacaacattcaagaaatacctaactttctggaaacaacattcctagagtaaaattagagacctttttcatttagaggaactgtaccacaatttattggcagtaagaattagttattcataaattattcacgagaacttcaacttttacaaattaacatacacaatgactcataaacaaaattagacaaaattagaagattatttcagaagagacaaatatttactataaattaattaaaataaaaaattatttcaacattctattttttttttttttgttagatcctcagtaattttgattctaaagtaaatatttttttatagaaagtaatatttttataattaccattattatttttttttatcacgaataaggtacttcagcttgttacaccctcaagcctcactagaacaaaactgccctcaagccaaaaacaaagaaacaaattaattacattgtattctattcaagtaggctctctcatgtctagtaatttgtttattatttacaagattcaatctatataaaactatactcttcacttcagcaacaacccaattgacagtttttgaacaaccttcaaaaacacacttgttcctatttacccaaatacagtagcaggtggctgcaaggatggctatattgatgcttctttgtaaccccgatggcttgagagtgagccattttttccagccctcaagagagatcggtcaggcagtgtatccgagccaaacaaaaattctggacagcactctttgcgaaaggctacaagtaaagaaaaggtggtcatgagttttcaaatgatcaccacaaaccgggcagctccaggtaacaatctcaacatgaaacttcctgagattgtcacgagtaagaagaggagagttcacaatttgccataacacaaatctgtgtttaggcaagtttaagtagttccaaattgccttatagtagctatcacaatcctgcttaagaaggctattatacagtaaggccgccctgaagtaacctgttttacctgccttcattatgtcctcccttgggaaaatacgccgcagcttgcaaagcttcttccaataccagctcgagtctggtttttgaatgtgagactagaagggattgtctttgagatagatgagattgacccatttaacccaaagaagatccttcttttccgcccaaatatacttggaaagcatagcatagttccatttggttccttctttgaatccaaggcctccataagctttgggaaggcacactttctcccaagaagtcatgtgaatcttaagtctctcatctttagtgccccataaaaaccctctgcataacctttccacttcttttgtaacactctgagggaggacaaaaatactcatccagtagtttcggagcccaagcagaactgaatgtataagttgggctctacctgcatgtgaaagatgtctactagcccaggtgtgtaagctttgcttgattttagataaaacgataccacaatcttcaattttccacttcgttggccgcagagggactctcaaatatttgagagggaaagtcccttcgataagagtcaaatcagctgtgatatcatctttttctctatctttcactccaccaaagtatatgtgggacttttaattttattattatattattttattttattattttattattattattattttgaaatagtaaacaaatagttattatgatgacagttattt

SEQ ID NO: 82072 - DNA, 1462 bp, Cannabis sativa
  modified_base (31)..(72): a, c, t, g, unknown or other
atgcaacataaaattttatttctgatctttnnnnnnnnnnnnnnnnnnnnnnnnnnnnnnnnnnnnnnnnnngggcataaaacccaacaatccctgcttttgctaccaccctagaagtgttaattggattgagatagggagtggggggtctgaaagcttggacccagaaaatggcctttgtcatattcaccttactccagatgccgtcttctggccattccctgatgattaagagtttgccattgattagccacggcctattgtataggatttccacgcagttctcctcttcatcaaaaaatattccccaaagccccgtgttaagagtctttatcctccagttgcctttcaacttccatatcttgctgaggatatccttcagtctgtttcttgacaccccaacgtcaccgaagaacttggccaaaactccagtgctggtaatatcttcagttagttcgaagtccggttcaagctcaagagtcattgagtccaagaactcttttctaagttcttcaacttcctcctctctatcctctgcatcttcctaaaattcctgattcatagcctcgttagcagggtttccctgctcattcactggggcttgttcttgttgctctggccccgtttcttgctcattccttctgtcatctgagttgagttctttgatattcccatcagccatgttcatctccatcgtagataataaatattacgacttaggttgacgtgtaaagaaagccttttagaatttaccaaccagaaccgttaaaaaaccttaaaactgtaggagaaataaaagcttttaagaaggaaagaggtagagataaattcaccagaaaaaatgattagtaataactacagggtgagaaaaaacctcacagttggactcccagcactctcatcctagagagaaaaaacctcaagaaaaaacctcacagttggactcccaacactctcatcctgaatgtttatttaggtgaaaaaattgggaagagtaaatggatatttaggtgtaaattgtgggataaaagtgtgatatttagacttttgttgttgtattttcggatgggtgcaattccaattaatagccatttttttcttctttttcttctgcaaatgccacttggcgcgacttgaatggagaggaggctgacgggctgttgcgtggcgcttgctggttggctgggaaagctgacaaggcaggaccagctgggaagaaagactatagataggccccacgcttgcaggctggagagaagaggaaagggagctcacgctcttgctgtcgaggtgagatccactcgccatctggaccctccgatcatccatcgacggctcagatggatgctgtttgattgaaagtgtagtaccctagaattaaggaatagattagcaaaaccctaattagataattatgactaattgaggaattatattattatataattcagtatatgtgaat

SEQ ID NO: 82073 - DNA, 651 bp, Cannabis sativa
atttatgtcacaaattatttttttggtttttatttctttgtgtttgtgaaaatgattggttgtaattttacattaacagatagttaagaagacatttataggagaaggagatgaagcaaagaaggcacctaaccaagtggctggggagattctttcattctttactcgtaataattttgctgttaccgatagaggagaaaccattacgtaagtctctcaattctcgagttttgataattggataaatgcttaaaattctctcaactatcatttcaccactattgttatttgttacgaagtttagttatgttttagttactctttatattagtggtgaaacttctatctatacttttagataaatacctaaacttttttataggcatcaaaactatacgaggagttttacaaaaattgattaacttaaatattaaagcaaataatatgattgtttataaattacattatttgtttgaacacatgaatttaaaaaattgttatttgatattttaagatgtctaatactataccgataagatatcttataattagttaagagttttctatttaaaaatgtgtgaaaactgatattaaaatgtacgaataacgttatataaactcttatagtacttgtcacccttaccaattttc

SEQ ID NO: 82074 - DNA, 991 bp, Cannabis sativa
tttcattgaaggggttcgaaccttccaaatttgctttttttttttaatatcttgaattgaaaagcagagctaaatgtacatatggctttgaattctgtcttagttggtgtcaaattcctttatgttatatcggatggttgtgggtggaaaagaattgcccaaccaaatctcatttgggaggaaaatgcaaattggctaaccaaaataaaccatttgaaagtgatttttttttaccaacttttcacaaaatagtactccaattcagttatgtcatttgactagtactaaaaacatcataatccattacaaaagaaaagtttaagttttgtgcattattattttatgcacgtaactaacaataaatagtgtaaggagacctatgtttacaccggaataagttgaggaatatttattttttgtattcattaataaaaaattactctcatattatatttcattgaaatgtattcacttttttgagtgtgttatttaatatatcctcaccctttactttagtgtagtatataatttacattaacttaaggtataatggacaagttatctataaaagtgtgtatattttaaaatatgtaaaaatgtaaaacaaataaaataaagtgtgtatataattttctcaaatttataagtacactccatttcatttacataaatattatttttataaatacaccattttttattactaaattgggtttctgttaaaagaaaatacaccttatataataagtgtaaatctttctctctttttttcctttttttattttcagttctgactttttttttttcttcttttgtattcttttttttttttttttgaataattattacttttggagatgaaaatatgcatacttgcatatacttcacgagatttttttaaattattattattaacaatcaattaatatctttatatacataacatattgtatgataaataaggactatgttcttcaaaaaaaaaaaaaaa

SEQ ID NO: 82075 - DNA, 1262 bp, Cannabis sativa
gtcgccacaagccgttcttgaagtcctctcctttgtttctagggctccaattctgaataattgtccaaaatcctgaactcctttctaattgagccaagttttctctttaaaattcgtgaaattacaaaattgcccaaaaattcatcatgaaggcttcgtcgcgacgaagcattttgcccgtcatgacggctggagcatcaacaaaatgggaaaactttctgccaactcccgtcacgacgaaggattttgcccatggcgacggccttaggcataaaattactttgtgcactttctttttaactctttcatctcttgtcctcgattcttgtgaataattcctttaaacacccgaggacctgaaataaaagaatcaagcataaaatagtcctaaaaatagaaacaaagatcgaaaacgtgacccaaaactaaatctttactcgccctcgagtaaaactaaaaactaagacaaagaaacaatggcacgacagataagtaagcctccaaataattaaactactgctaccacatgtgtaacttcaattagttggttaaactagaatttcaatccaacaactctaaacattaactcggatgcacaagttataaaaaatcatatatagatgcaaaacacttcaatttgaaacatatcacaatcattctactcttactaatgttctaccgaccaatgttcaatatgcttgcatgacctacctctctccactgatgtcgacaacccctgctcggaattaaaaggtctttcccggctgaaatgtcatggcttaggtgaaaggtagataaaaggatttaggctacattataccataagcacattttaacccaaacaagcacccatataaatcgacatatttacccaaatcaacttgtaagagattgagaactttcactttatgtgtccaccatcatctttttctacgaattgatacttttctctttttttcttttcttttctttttgatgtgttcttcttttttttttctttttgtatatagattattttttccttctagtgatgatgaagacactttcacattacataacttccctcaatctcccacttcccaaaatagtacccactcataacacttaattcccccaaacttatttaaaagcttatggcataataaagtgtattggaaattaaagtaaataatggaaactcattaggctcaatgaagtggttaaaacaggctaaggctcaatttgggtatactaaggataaaattttacaggtaagcttgaaa

SEQ ID NO: 82076 - DNA, 1005 bp, Cannabis sativa
aaaaaaaaaatagacacatccatattgtaatatactaaactaatgagaattgtaaatattatttatgagatattttaattcgtatgatatgaattttggaatcaaattgaaaaattcggttaaagttttgaaaagatttgatctaggactgagctaagaacctaaacaaaaattagtttgaagcatttagaattttcgttaaataatttaattatgatagttattattttgggcataggaacacttgttcttgtatgtggagattttgtttgctaatattttaagatgtagagcctaagttaaaaatttgacaaaatcattattttgcttaaataaaaaatggcgcaaataatatgtggtggaagatgattatgatctatgttgttcaaggatttttgagttcactaaaccgttatggataggagatatccttgtagtacatcaatttaagtgtacttgggcatttttggaaagaaagaagtagggtcaggcctagtctaacgcctaaagggaacataagtaagaacattgccaaaatatacccatcataccaaaatattaatttttaattttctctcttggtatttttttttctacaaaaggtgcttcaatggtagacaactccaaaaattacatactatgattctacatatcacattttaaatataaaattaatcaagtttcttggtaaaataacaatttttcttaaaaaataaaaaataaaaaaaaaaagatgacatggttattgtctgttttgggcaacacttaacatctatattctcaaaatttatcttagaaagtttaaccacattatatatgtggcaagactactctaatagagaacccctattagagatgctctaaggggaatggtcaatttcaatcagtgcatagattgaacccccatctatattctcaaaatttatcttagaaagtttaaccacattatatatgtggcaagactacttcaatagagaaccgctattagagatgctctaaggggaa

SEQ ID NO: 82077 - DNA, 1426 bp, Cannabis sativa
attgaaaagccaaggttgcttctcaagaacctttttcgcatctcctcggctgtgaaaagataaaccaaaatagctgctacctttatcctcttccataatcttcactttccactctccaaatgctttccacattcgagtgaaaatcgttctaaacaatcctacactgaaattttgtttggatacaattctccctaccaaagatttatctccaaactcagaagcttgctcttcatttacttcccattcctcctcttgatccatacccaacttatcagtcaattgcacaatctcatcaatagaactagtggccattacagtagccatgaatccacagatcaataccagattactcatcaagagttaagtcccaaagaccattagacgttactcggagtcacaaagaccataatatcatagtaagtttgatgagcacacaaaaaaccaaatatttaattactttgatgatataataaatatctattaaaaaaacttctaaaaatactgttattttaaactttttggagatacataattaaaatataaaatttattaaataaaaaaagattcacttaaaatattacatataattttgtattccaaattcaatagcatttttcttttatggaaatattatttgtaatttttattatctactgccacataaaatgatatttttgatttccagacaaaaaaaaaataaaaaaaaaatcttttgatctagaaaaaaaaaaggggtgaaatataataactttaacacttcccatgaatattatagaaaattttgactaattaattattaatgtatattgaaaaatatttaaaaattttattataattattaaaaaaattcaatgttaaatattaattattatataatatgaattttttatataattactaattattttgctaaacaagacaatgaaattatctcttttacatcgaaatatataatttattttaaaatataatataattattaggatgtatgattaggaaattaatatcatagtaattatacaattatatctactccttattaataatttttgtaacgtgcaattctataaaaatattttgttttaataattggtctccctaaatatttcgtcctggctctgcccctgaatgtgtcttaggtatagtttggttatttttgagtcgtgtttttagtatttttaatgagcttagtttcagttagtctaattttacattttaatttgtttgtgttttcaagttttgtggatagaagagaattagagtaaatgaagaaaaactggtttaaaatagaagaaaaataaggttacattaaaagattcttagttaataaacgcatattctctgaactatttactttgagaacccaaaaaaacaaaaattattaagggtaaacttggaaaggcataaagggtcccacctctattag

SEQ ID NO: 82078 - DNA, 751 bp, Cannabis sativa
ataattcaccaccacatcactaagtccgttatcccagttaacacaattgccgtgactatctctaagctcagttatttgattatttcgcttccttgagctagcagccacatgaaagtaccgactattttgatccccctccttgagccaaaattgtttcgcacgttgcttccaaaagctttccctttgatcaagtatagcaaacaaggatttcttcacttcatcatatcgttgcaccgagtatgtatctctctttccttgaagtactttaagttcagttttgcaagccttgattctctgcttaaaattcccagtaatactcttcccccacacccgaagcttctcagcacaagcttctattttctgtttgaaattatgcccttcactattctcccagcagtctttaacaatttgaagacataatggttcctttagccaagcattctcaaatttaaaccggtgagagggaataaaagagtcttcaataatcggtttcaggaatagaggattatggtcagatgaggtgcactcaaggttgaaaagtttagcaaaggggaatacctgactccaagccgaattgaccagagctctgtcaagacgagcttcgatccatctctgtgtcccgcgccctttctcccacgtgaaacgatgccccaccaagtcgatatccattaaagaacattcagacaaagtttgttggaacccctcaatcaaccaacgggggtaaggattgccacccttcttctcttcatta

SEQ ID NO: 82079 - DNA, 673 bp, Cannabis sativa
  modified_base (26)..(30): a, c, t, g, unknown or other
aattaaataaagaattttaactaacnnnnntctttctgaaacttacttttattagtgggcttttgggtggtaaggacaattggttccataccaatgatttatcccctattgtgggctctagttccagttcgaggaaaaggaaagctgttgggaatgtttctcccttaattattcagaaccaaggaaataaatcgggtggtaaagaatctaatcaagttttctctgtgggagtttcttctccacagtcgaagactaacaattctaagagacctgggaatcggaaaaaatcttgcactagaagcagaggggggcaaggcaacaaaaaccatgattctccgaatccaggtaacatcacttgtcctatctctgagttggggaatatgttcattgaagttaacattgatcaaaattttcaagtgggcgaggaggcggcccttaccaagccccccacgatcccatgaaagccctctcgtggaattgccgaggtctcgcgagacctgcggcaatccaagctcttgtagcttgggttaataaatggaaggtggatgttgtgtttctaatggaaacgaaggttggggaagttgatatgcggagaatttgcagaagattgtagttttaacatgggagttatatagattcggtgggcatagcagggggcttttgcattttgtgg

SEQ ID NO: 82080 - DNA, 1145 bp, Cannabis sativa
gatcatcattcaaagcatccgtgacggtagtgggtaaaaggtcaaagatttcctgattaaacacgggtttactagaggaataaacagacttgaagtttttcgagaaatagttaccaatatcaagccagttattgatccaatgcaccccctcctccgagatcgctccaataaagttctgtttccttctaacgatagtggaagcgtggaagaatctagtgttacgatcgccatcccgattccacagctcctgggattttcggaaccaaatttcgctttgacgagcagttacttcctcaatctccaagataatatccgcttccagctgggaattttcgaccgagggaactctctgctgaacttccaagagagccttttcaatcactttcaacttgtccttccagaaaccaaagtaatcctgattccacttggcgagccgttttctagtgttggcaatccgagataccagttgaaagcttttaaccgtagacagccaaattccaagcctcccgaatgacctctttacaagtagggtcccttgcccaagcatccaagaatctaaatggtttatgataattgtcttggtcaaacagtaagtccaagaccagcggtgcatgatccgaggatcggataggtaaggctttcacaccggccttggggaaacgaattagccagtcagtagaaccaatcacacggtcgagcctctctttaacaagatcaggaagttgtctcttattagaccaggtgaagaaattcccaacacacccgatgtccactccaccagaatgaagcaagaactcagtgaacgatcggcattctacagcaatcacttgggaccccccaaatttctcggactggttgaccataacattcaaatcccccattaacatccatggttcattaaaagataagacatggagagtgatatcatcccagaaagctcccctgtcccctcgaataggcaggccatagacaaaccacccgatccaagctggacaattgagagtattctcgaatcgaaccataatacccgccttactcgcactaagattttcgatctccacaccctgtttccaacatagacaaaggcctcctgccgaccccatagcttccaccacgatcgcattaacaaatcccaaatgacgcca

SEQ ID NO: 82081 - DNA, 931 bp, Cannabis sativa
aaaaagtttactttctcagaataacagaatggaattattcagatactcctccaggtatttggataaattaaagcaaggacttgtgtctttagttctccagcacctaatcactgaacaatgatgcctatccatactagcctacaacataacaaacttgaaaaaggcgataaattttttgaaggcatggttttaagaggtgatttgattttagagcagtaccataaatttgaatccaggtcactccataatgaacttccaaaatcctttaaaagtattcatttgtacagcttttgtgtgcaatctgagcatgctactaatacatgaaagataactctccaaacaagcagaaatatactttgaaatgatttcctttttattaaactcaccagccacgatgtctcattttgaaaatttggcttgatatccaaattttctggtcgaatgaattgctgaattagagccatcttctcagataattgattatcgtgttctacatcatctggcagtgaagcaaatacacgaggaaataactttgtcatgacatacttctctagtccctgtattagagagaaattgaaaggaaaagaaaaaaaaaatcaacacaataaaagacaatttacactaggcgttaaataaacagatgttctgatgatttaaataataggcattaaatataaccaagaaggcaacggggagggtctactcttcataatttcattgcatattcaacatagaaccgtactagatttcatttatattaatatttatttacttattttagagtggaaactgcaaagattttcttgtcatcataatagtgtgctggttctccattcacttataatgtgaaagttgacaacttttctctgcaatcgttttataaaaaagattatcattaatcacacacgtcacagaagaagaaactctctca

SEQ ID NO: 82082 - DNA, 654 bp, Cannabis sativa
cagccaaagctcctctattccattagtttggagaattttttttgggtcatccttcattgaaacgatcgaatcataataactaattatccactcaactatattttgtggttgtcttatctgttagccatgagtaatcttatttcttactgtccatattgcccatgaacaaagaattaattttgcaaaagtatctctttccaccacttcagaagcataaagtaaaacattcttgaaattaatctctttttttacttcatgcagaaaagagaattctagaaaattctaaatgccttgtaaaaagggacactaaaaaattgcatgagcattcgactctcctccaaaaccacatagttgacaagaagtactagaggcgatattccgtctaaacaaaccattacgcgtaggtagaatttcatgataacccctccacacaaaatgtaagattttccttgaaattttcatcccccaaaattatttttaccataatgaaaacacatgactagtagatgaagattgataattatcaatagtcattgctaggttataaccactcccaacagaataactaccatatttcgtataatgccataaccacgaatcctcacgataattatctatagtattttgttgtttgagttgagttaatgacactaa

SEQ ID NO: 82083 - DNA, 1660 bp, Cannabis sativa
  modified_base (26)..(34): a, c, t, g, unknown or other
ataatatcaaaacaacaacaaaaaannnnnnnnnaataacaaaaaatcaacaacaatttaacaatacaacataaaatgaccatattttctgtaaataaaataaaaaaaagatcgtaaacatatttcaatttctgtgaaaccgtaggtttgtaatttttttttattattcttgtgtatttgtgaaataatcccaaataaaaacccctctcttcaaatctgaaattataaaaacaaacatatgtaataacccaaaacatagaatctgccatagcatttgggctttcaatatcgaaaaagttaacaagagagaatagagaacaaatggcaaattaaaaggtaaatgatagaaatttaacataccctttttgattttgattttgattttgtagggttaaatatgtctttgattgaagtcaacgatgaaggagttggttacagcagcgactgcgacaaaggagaaggaggcggcatcgatggtgttggtggaagatgcgtcgatcacaccttatcagtgttgaacgattatgtggaagagatcaatgttcgacctcaacgagagaagaaacggataaaaaaaagaagagaaaatgaaataaaagattaatgtttttaattttttaatttagactaataaaatttcaacgtgataattttaaaataaacaaacagattagttaacttagggactaataaatttgcaaaaattgtgacattaggaattataattacttgttaatttttgaagttgaagacctatcaacatcaaatatattgagaaagacaaaaaaaaaaaaaataagtaaatcggcttgagataattacattatttatttgtttgtattattaatatttgtgcttggacaattcagaattccattcattattatcttaatttaacattagccgctagtgtacgtaccacttcccttaatcaaaacctaattaaatgtctctctctctcttttttttaatcaatttgccttataattaattaattaataatattattattcgttaatttgtggttgatgggcattatctatattggagcttataagcaaaattaataaagctacaaaattttacaaggattaattttttaaagaaagaaattgttcaaattgaattggctaagcaaagtcgtcatttttctttcgctctcattttattattgaaatacaagttgaataagacgtgaagccaatatctaagtaaaaaagcaaaagtcaaatcaataaaataaataaaatgtcatcaaattattaataagtggtttcaaccttcaagtaaaatacgtaatacatctatggaatatacatggtcaaactaatagaaatcaggttattatacttttcttttctttctttgatagaaggttttaaaacatgattagtcatatgtatgtaaagtctaaataaaagtttgccaatgaaaaaaaaaaatgtctaaatatccaaatttttagggctttttcatttagatccctattgcaactgccagtaaaatacaaattttatttagaaaaatacaaggctacgaatgaggcttggatatttcgttttttatttatcattcccgcatgttcttggctcgtttttaccatacatatataattaataatgtagtttattcttttttctcctcaattctttcatttttt

SEQ ID NO: 82084 - DNA, 2760 bp, Cannabis sativa
  modified_base (45)..(69): a, c, t, g, unknown or other
ttttcaaaaacaattttttgaaaaacaaaaattttactttcattnnnnnnnnnnnnnnnnnnnnnnnnnaagtgttaccaaacggcaccatatattagggttgttcatccaatacccaatacaatctgctctattttgttcatagtatattcgatccgcattaagtgtggattttatttttttggatccaatccaatccgcataatagctcaaatccaatccaatccaatttgattgattattttagattggttactttatttaatatttatgaaaaaaattatatataaaaatggaatataaatttgatctattaagtttgaaatataattgtactatatgtattagatttttaaattattattttctttacattaaaatgttatttgaatatataattttttattttttttataaatatatgtggattggattgtgttgaccgagattttcagtaactaaatcaaagatagtttaagaagagtaaatgcaaatgtttttacatggttgggacattaatgagtcttagtcctcgagtctctgttattaataggtggatatttcttatagagaatgttcttttttttttttcggtctcccttcattaatttggttgaggggtatttataatagttgtcaagaagaagaaaggtctcaattgtcctaaatgcttgccttggccatgcacaagttcccaaatctacaaagtagggcatgcacaacctacgtagtaggttgcgtagggtttaggtgggataagctctcatccttccttgattgatgtgattgttcataatggagtcgtcacttatactcttgattatcgcgtaattgttgaaggatgggtttatggcgtctgacacgtcctctcatatgtgttcacaaacgctttctccatgatgcattaaatgctagctgacagttcatctcaggtaccccaaattcgaaggagctagacgccatcctgctctcggagatgaagtcaagcaggacttctccgaatcggggcctggctcccagagtagttattgagttatctcgagaggatttgacccatgtaattaactttcctttaattatctctgagtcttagagcctgaccttccacgtgtccaatagtgagattgccacgtatattgggagaaaattagggcaacatttacccccaagtcttatttagttcttggtaaataagacttgtttattactttcgatcttagggagtgacgtggcacgtacttcacgcacatggactattttaatgcttgtaatcattcctccttatttcttagcaggcaacgattttctttcttcctgttgacagatctcttcattaatgcaaatgtcagaaagatactcaaaagtttcaaccgcccttttctcttcattctgcgtttttatcctagtcgttggatcaataggatttaaatcgttgtgaacctccaccattcgatgtcactcattcgatgttgcctcacaccgcagaggcctataaaaactagtacctctagtgactggttcacttacactacatttcgactctcaggctttcaaacccgcataacaaaattccagacttctcccgatttcctcatactttcctctgccgtttttcaggcgaagtactaccgttgtatgacgtcctaagatgttagaataaaaaatggcgatcatattctgagtgttcaagatgcaaaaaggcgttatttgagctaatgaagagccaaatcttgttattgtggggtagtgggtcatctaaaaagaaccttcccacaattaagaaagattgatgttaaagaagaaaagtgtacaggtcctgcccaagtgtcagttatgattcaaggggacctaaatatcggtccttcagccgactcaagttagaatttatggacaatattataattactattagtcttaaacattgtactctaaataggggaacatcaaaagatctaaatggattgtgtctgtatgttattcagtggtcgttcatctaacaggatagacagattagaaaaataacagtatgagttaaaattgatggtattcccaagtggaatataggatatgagaagttaatggaggcattaatccaattgattcaaataattttttttttgtttagaagtgatctagcgttagcaaaggtgggacaatcctacgatgaaaattgaaaaggctcatcgcgagataaataacctataggtcattcaagaaaacttgagcttacccaccatagtaagatcgcaatgagggaaacatcctatgatcttatgaagggacttcacctaaagagttgcgtgctgggagtgtcatgcccgctcgcccctcccaagagcaaagaaaatgaaaagcattattcttcagccatgctgggaattcacacaatgatggaacaagaggagtccctctcataagccatgtgcaccacacaaagaggatccaaatcccactcgctaaatcccaagaaaggatgggcagacggatgaaggagcagaaacggagatgcaagacctacgtcataaattgctacccccttgaagggaaacttggataatgatgagtttgatgaagaatcccttttctcaagggaggatcaagttgaacaacttccaccaaatttcaaggagccatgtatgacaccatatgattgtccaattgatccgttgaaccatcttagaacctttaatgaactaatgaagatgaaaaaagtgtcatgcaagggaaggtgtcaatgttgggttttatgccccaaataaa

SEQ ID NO: 82085 - DNA, 1326 bp, Cannabis sativa
aagataattttttaatatgtatataaattaaaaaaaattatacaaatcaaaatgtacttagtgtgaaaatatatatatttttatttttcttgcctaatttttatatatatcacaataatcataaataaagaaatttctctgtaccaattttattatataattgacaaaaaaaatctttcaaattaaaaaacactaacataaaattactatattataatatttagaaaccattgtgaaagctgtcaactcctctatttgcatagctaaacacaataaaattattaaaaaaagtactgctataaaatacttctttcgaaatactttttaagaatatacaatgtgtgcctttaattaaaggtttaaaaacactcactaacaatgaaaattaagtttttttgacaccctttttaaaaactcgtggtggtcaactctataagggaaatttggtatttcatgctaaaacatcacacatggcgttattttgtactcacaaaataaacataggttagttattctttagtttcaatttagttctaaaaatacccctcattttatttccccccaatctctctaacgtcattctctctcctctttctcttccaatctcggttgtcttctcaccaccgtaccaaagccaccccctccatcgaaccactttgtcaattctaaccacccaccctatttgaacctcttgaccacggcaacactcagcctaggagacccacgaaatccactcgacccacgtgggaccacaagacccacgcgaccaacgagacccactcaaaccccaacgacccacgagacccagttgagccagtcttcgttcaccgttgtccctgccaccgtccacaaacccactcaaaccaggtttggttttttaattatttttttgtaatttatccttcaaatttagaatctgtgataaaactaaaatatgttgttgattaaatgttcgatttctaattttttatgtttggggaagaatctaggttaggggatatagctttttttaggtttttgattatttgtgcgattttaggcgatttatgtgagattttgtgtgattacttagtcactacaccctagttttgtgtttgtatatttgcgatatttgtgcgattttgtgcgaggttcctatttggattttgtatgcgatgtttttgcaatatgtatgcgatgttttgttcaactttttgtcagttgctagtataaattttgtctctatgcgatttatgagatatttgtgtgattttgtgcaatttgcctgtttggatattgtatcttaaatattgagctatgttttggcgatatgtatgcaatatttgt

SEQ ID NO: 82086 - DNA, 1098 bp, Cannabis sativa
ataagaaaatttcaactaatttttgattttttttttaaataatttattacaaccaaaattagtttcaattggttttaagtagccctacattataattttttactttcaatgaatttgtttattgtaaaaataaataaattatttcacatgcttataataaaataaaaaaaaaataaaaaaaaaacacatttttgactcttattttcaagataataaattatttaaaattttcaaaaattgataaaaattctactataactatttttttgaagagaaattctactataactataatacaaatggttattaaaaaaaaatataaaaaggcactagtggtacctaataccctcctcagtatcatatcgatattagtatgattaaatatcgaatctcatataacttaagagatagccaattatagtgcatcactgtaggtgatactagacattactgatgttcaataataatgctcaaaagaaaataatgttataactttcctcatattgaacacaaatataaagccaccaatagtgatgttgattttctatccttattaactcctcttgttcaagttgctcttaaatggtgtgcaagtagtcacaatttgaagagtggcattatgtttttaatgtaataaagctgtttagattcgtattattaacaatttcaatgtttaacaatttcaatgtattttttttgtagcatcttttttttttttttttttcagaagacaaattaagttttaaacaacattaatacttgtaagttacaacaagagaaacattaataagagttaggtatatcattgaacagaagaattgagacaagaacacaacaacattgtttacaaagatcaaatcttgacaatggaaaatgtcaactaatcttagtagtcgtagtgggggactactagtttctcttctgtgcatataattatatataaatattacaaacaattcgaccctttcaatatttcctcttctcatattccaaatgatacttgggagagttgactatcagcttactaactgaattaagactcaagatttgccttttaacaataataatgatgaatattaatgacccttttattataca

SEQ ID NO: 82087 - DNA, 641 bp, Cannabis sativa
acaaagaagccaagtcaagcagtataagtatgtgatttttacaggtgatgtgaatcctctcttatggtgacctattactgctattggttcatttgatttaccttcttatgggaagagtcatgagattggttttatatatagtgctctttataaattaagatatggcatgaaagaaacaaattaaacataatcatgaatgtcgttatttgtatcagatttggcataaaatggattacaatgaaatcattatttatgcataaatgaacttatgatattgatatcattatctctgagataggatttatccattccaataattcaaagaacttgaaattagtgattatgatgtgttggattcttgctaaagctaatgatatgatcttcaagaatcatttgatttagaagagagaagtgtgtcaagcgtgttggctgagttttgggacctttttcggttgggtgtccaaagaatggtgtttattttcctcagctttacatttctgtttggactcatcttattatcttctctggtagtggtagtacccaatctacacacaatacttagtccaaattattatattgattacctttactctctaacacactcatcatattgtgattctctaatttcttattttgattaa

SEQ ID NO: 82088 - DNA, 798 bp, Cannabis sativa
attactattttttaaatcatatttttattgaaaaaataaacttttttctcctattttttaaaaaaaacaaaaaaaaaaaaaatctgaaaactaacggaatatagctataaatcaatatttattaataaatatattaattaatataaaaagttatatatactataattaacctaatatacctaattgtatataaatagacgtaaacaatcttatttttaattatcataatcaaaccctaaagtctaataattaatatcatctatgcttcccttctttctctctttctacccccaatcaatttattttttctattttttataagaaaattattatatcctttttattttttcgtcactttcgttagtattaatattcataattgaataattttatacatattaatttagttatgttttgatttatgtttataatgtacatataagcacaatcagcttgaggctataactttttttttcttgcttaaatccttacaggtatggaccgtatggtggtgtgcggcctcgacgacggatttttttccatatattttttttctcttaaaataataaaaattttatatttttctctatgataatgatacatcaaaatcttttgaacatctccaaaacattgtgcaagtcgttttggtgtgttcattaaataaacatgttttatttttagataaaacggcctcattaaataaaattgttggtatgtattaaggggagagaatttttcctttaattctcatcttttgttcttaatttttatgaactgatgttctttcaaaaaaaaaaa

SEQ ID NO: 82089 - DNA, 1626 bp, Cannabis sativa
ttttgtgtgacaagtaagatttttttgtagtgttataattaacattgttgttataaaatatttttgaggattattgaatttaagtttaatatttgaataatttttcccatttaaaaaaaaaatctttcaataatttcacatttagttaacatttgagatttcaaaaaaaaaaagataaaaattatatttttaatttgtttgtcggaaattacatttgaacgaaaaactagttcagtgttgtgtatgtatgttttgttatagtagactcctttgacttggtcaattctatttagattatattatatatatatatacatgagtcatcaaaatgccacgtatcatcaaacattcggaggatttttttaaaaagatatatttaattttactaatctaagttctaaaaggtataggaaaattcattcaaaaaaaaatataggaaaaggaatcttgttaaataaaatatcttaaatttatataaacacgtaaggaaaaatggcctataaaaggtacttagaagagagaaattaaaggtttaaattacgtatagtaaacaaacacacttgataaaccataacacactcataataaaccatacaattacgtacaaatttacaaagaacacttcatcaactttcataatggccgatcaaagtttagtagttaccaagaaaattgttgaggatccaactttaatgtctcctaatccaaattcgatcatattcaacggtgaagaagatcatcacgacaataaatcttttacaatacctaattgtaatagtttaaagtttcatgatgaaaaatactacgcttccagacgagcttttcttcaaagttataaatttacgaaaaaggaagaaacaatgggaacaaaaacaaaaaagtggctcaagaataagcttcgaactcttgtcaagaattaaaccaattgcagatccacaaacaatatcaccatagccggatagatctcttttatattgttattaaaaatttcaaagagtttttattaattataagctaacttggttgcttcttgataaactgaaattaaaagtagaagtttagtaaacaaacatttattttattatttcttatgtaacgggttaagtaatttattttatttcaatttaacaatttcattttatattgtttatgaacaatcaagtaataatgtacagcacagaaaactaaagaacacaagaaaaatgtaattataaaactatataaataacaagtatagttattatatatttatttatgaatgaaaaaaaaaaaataaactaggagtgataacattttaatccaaataaatgataaaaatgtcgcgaaaataattcacataacacattaaaaaataaacagcacatctagcaaatataaaaaatatatatatatttttttatctttttctattcttttatgaaatattcgatatatttagtttaaaacatagagaatggaaatggccgtatttttgataaacaatgacactcaattaaaccaaggaatttagcttgattttgagttgagttagtgaggtacttcaacgtatttataatatcttcatctctttgaaatctttggaagatcatgttggtttgaagtatagtttttcacaaattttgttat

SEQ ID NO: 82090 - DNA, 2219 bp, Cannabis sativa
tgtatttgaaattctcgctcctttcaaacccaggtacaagtatattctctttattaaaattgtttcaggtcgatttcaccctgcttctttttctcatgagattgaagatcttctcttcttcttcttttgcaatgatcgtcgatctcgttcttttctcttattgatttttatttttttattgacaatttttttgtatcgtcgagttcgcaagtggttgggttgcgtcggttcacaaatgcggtagacatttagagaagtggttggagctcgctgggactggatttatttttattttctgtatttttctaggaggtaatcttcttaattggagtaccaggaagcaaaaagcagtggctcgatccagctcatagtctgagtatggagcctttacttccccagccactctactggtatatatggatgcactctttaattacttattgaacttggcatcaaattgcacaaaacaccaccagtcctatggtgtgacaattagagtgctcaagtcttggccttgaatctagtttttcacacacgaacaaagcatattgaacttgatgtacactacatccaagatcgaattgcagaaaacaagcttgaaattcgctacatccctactcaagatcaaactgcagacctatttactaggtcattatcttctccaagatttcaatttttatgtaacaagctgaatttagaacactccaaatacagcttgaggggggtattagtgaagagaattagagttattagttagtttatattcagttgttaacttctctaactattttcagttatattgtattcttgcttttctcagcatatatataatgaatatcaagagctgtgttaagttaacacacaagctcatcttcaattctcatttctcaacttctctaaacctaaggttttctagttctctctagaaattattcatcttcaagatattgcttgacatgataataaggcttaagtcccaaaatttatctatgagacagaagtcattagaaatcctaaaagaaggcttggaataaagtttcttggatagcattaaacctattgtggcaaaccttgatttgatatctcaatcgaatgagcgacttctgtcgaaaaataaaaatgagtgaataagaaattcatgcctaagtccattgataactgctaatttaatgcaaatttagtttaggatgcaattaccgaattaacaatggtgaatattttgattatttatttttttttttaaaaaaaaaaaactggttaatattttaattaattttcaaacatcaatttctcaaatcttgtgggggtttgggggtattaaatattaattcacttgtgttttcaaacccctatgaagccttctggtttctcctttcattctaaacacaccaaaaaatagtgttacgtacacactttttcttcttctttatttttctcatattctttaattactattaattgttgttcttctctttcttctattttgtcaaacaacttctaaagctaatcttctttcattgtattgtgatatatctcctctcaatccttcttctttgaactcattgctataagcctatatcacattgttcttgtgctcgaattagtgatgaaatgattgaaaaaacaatattaataataataataaaaaaaactaaatctcatgatcaattctattatattactttaaacctataatatttgattcaaattttataatatcttttaaaatttaattttagattattgtttacatatagggttattataataattaatatcgttttttttagaaattaaaaagtattacaaaacagttggctgttacaattttttttttttttttttaagaaacaatatctcaaaaaataaaatatatttctatatataacaacatattaatgaataaaaaaagttttatttatatactaggttaaattatagaagttaagtgatatataggttaattttttttttaaaattattattattattttacaaaagatgaacatctcataaaattattcaaatttaattttgtatcatatttaaattttaattttatcatatatttgtaaattcaaattaaaattttatcatatttttgtaagttattttatttgtatcatatatttccataataattaatatagctttttcagaaattaaaaaagcatatctgttacaatcttaaatatttaaaacaaacaaaaaatctgaaa

SEQ ID NO: 82091 - DNA, 1658 bp, Cannabis sativa
  modified_base (51)..(52): a, c, t, g, unknown or other
aacataaaacgatttctgatcttttattaattagtatatctgattatattnnaatgagttttatttagggtacaaaacccaacaccaagctcttgcctcttacgccatgtcatgttttagaatctcggggtctattagcaagaaaattaagagtcttatggctcaattttggtggagttctttgggtaataaggagaaaatccattggaaagcttgggataatgggttggggtttcgttcttttattcatcacaaccaggccttacttgctaaacaggcttggcgtatgctcactatgcctgattcccttgttgctaggttatttaaagccaaatactttcgtcataattcttttctctctacttttaaaggtcattgtgcttcctttactcggcaaagtttgctttgggggcgggatcttcttaagagaggtcttctttggaaagtaggcaatgataaatctatctccactctgcattcatattggattcctagttggagatttatttttataaaggtaatgttcaaccccaaatccttctgtttccttttttattgatggtaacgggtgttggaataaggatcgtttattggaattctttgatcgtgaccttgtctcttccattcttgctgttcctattgctgatcctactcttaaggatagtttaatctgggagtattattcctctggttcctttacttttggttctgcctaccatttagctaaatcgactgcttcttttcccgccacttctaatagtcaatccttggtttgttggtggaaagttctctggaatcttaaaattcctcaaaaaatcaaacatttcatttggagggctttccaccatgctcttccaaatgctcttaaccttttccatcgaaaaatcttgtttactccataatgctccttctgtgctagaggtccggatcattgtctcatgctctaatagagtgttccagagcttctcttgagtagagtgaatctaggttggagactttttacttaaataataactgtcatcatgtttgagaattcatgcttaggggttttgaaaaactgcccaaggatgatttaagaatctttttatgcattttgtgggaaatttggaatcgacgtaatgttgctttgtttgacaaaaagactataatttcttctactgagtttcaagttggggctttgttacaagactatgatgatgctcaggatcatattgaaaatcaattagttcaggatataatttctggtatggatgtaactcaagctggtttcagtccagttgatggtaatacccttgcaccaggttattataagctaagcgtggatgctgccatggataatagcagaagtaaaatagggattgtggcaacagtcagaaattttagaggagaggttgttgcagctttgtcttctccattgaatggtaacttgtctcctcttttagctgaagcaaaagccttggtttcgactctcaactggtgtacggctgttaagtttcctttgagtgttgttgagagtgattataaagtgttaattggtaaagttaagcataaatagaaagacaagtctgctcttttagacttggttagtcaaattgggtccattctctctaactttcctacaattattgttcatcatgtatctagacaatttaatgttg

SEQ ID NO: 82092 - DNA, 755 bp, Cannabis sativa
  modified_base (31)..(34): a, c, t, g, unknown or other
aaaagtgtaggccctaggcacgggcctagcnnnnctatgcctagggccggccctggcttgttgctcttgttcttattcagattataattttgctgagagtcgtgctttgactatccttcaatatattgtaatgacaaatttagctgtataataaaaaatctcttttctattaaaaaaaaagacatagatcaatataaatgtatcataaatgtgtcatatatagtctaggtaaagatggagatttaactttcaatctcctctatgttcaaaaacaattagcaaagcactagactatactataaattatgagggtatgttattattaaaaaatcattcactaacgttgacatgtattaaaaaataaagtcaatatatatactattttttttggtaaggaaatatattataatttctaatcaaaagtattcgaaattagaaatgagagtaaacgaaatgacatttaaataataataaaggtaatagcattgcctaaatgaaatttgtagttataatattttatatgacaaattaactcatacctatttttgtttaatgtattgaaattgatgtttaagaagtagttagagttttataaatacactttttttttttttgagggattttataaatacactaacacttagtacgttgaattattgtacatcttatcatattcatttatatgtctcataatcgatttaacagtaagaactaacccgaaaaaaatataaactcaaaaaaacatattaattaaa

SEQ ID NO: 82093 - DNA, 1378 bp, Cannabis sativa
aaaggcttggtaatccatcatttccttgggctttgaaaaggttcaagttcttaactaccaaatcaatgtctttcccagtaaaattagagccaagaaggtcatttgtatggctagaaattttacggccaatatagttggaatggaagattggaacaagttataaaagtaactatgtataagatcaaccacctttgtactgttatcatgccacaccccatggtcatcaagcaattctttgatcatttctattttttctaacagatgcttttttctaacagatgctttgtgatgaaaaaatttagtatttttatcctcgcctttgagccaaagggctctactttgttgtctccaaaggatgtcttatttttcaatgagacaatttaatatttccccctcctccttgatcttggaccaaaggctaggatcattagaatttgagaggtcttcaattttgtttctagacttagcatcaatttcaattcttctttttcgtattccaatggggaagaccagagccaacattgctaattttctctttgatacaatgaaaattcacacatggtcaagtcatattccattgagtagtaatgatgttattacaatcttcattatcgagaaagaatctttaaaatattaaacatgatatttaggaaggcatttacaataatatgataaatctagcccataaaaaagctaaaaaaaatattaaataccagacaaagttaaatctgtcaagtaaaaagcttttaaaatcacatattaaggataattttctctatataaaatataaaaattataatagttgtgttatttttacctaatgcctaattattttttgcatttagagaaattataaacttgttttttttcatacatataacaatatacatggtagatatattagatattttactagtttttttagaaaattttaaataatttatgatactgaaaatagaatttaaacattcaattgcacatttgcctgcatttcttttatacattaccagtatatttttaagttcaaccgaataatgatgtgatcagaaataatttttaagtaaaaaagagaaagaagaaagagaaaaagataaataggaagggaaggatagtgctgaatgtgcagaggagaaacgttagatgcaattaaaatagggtattttttataaatatggattttttatgagttgtttagaaaaatttggataaataaaaaagttttataaaaattggaaaaatgaataaaaagttaataatatgaaaataattaaagaaatttttacatgaaaaatccattttgcacaatttattacctaaatacctctacacgcctatgtctacatttttacttacaaagttggttttattacacaaatac

SEQ ID NO: 82094 - DNA, 1323 bp, Cannabis sativa
tttttctagaaattagacgaaaaattaataaatttaggcttttacagaacctaatttggattttttacgaattagttatgattttttgaatttggattaaaatatcttattttgggatgcaagtgtgcgggcgcggggatgtggcatcacttagagagcacgcgtctttagacaagggctgactggcgattcttgtacaaggccctatctgaaggcctgctcacgctgagctccctcggccaacacagcctgcacgcagccttgtcccttgcccatcccccttcatctgcgcgcgcaggggtatatatgcattgcatacccgtttgcccaattttatttttgtgacatcttttgattcaaaaattatttttcataaaaataaaattcaaattttggtagaattttttgtagaatatgaatttttaaatgaaaatctaattatcataataaaattaattttattaattttttaattaattaaaattagttttagatatttgtagcctttgaatttgacaatttgatttttccacaaacgagccttatgcttaattttaaaatttttgattatttttgtttattttatttattttaattataagatcacatattacttattttaatattaaaaatttgaaatggtcatattttgatattaaaataataataaaatttataaataatctagttaaagtttcaaaattggctaacgatattagatttcaaaatttgttatgtttgaaatatattttattcaattaaattataatattagaaaaatctttttttaatatcttatcttattagatatttattataattaaaattttatttttcgcaaaataacatgaaattttgaaaaaaaatttaatttttgtttgaatagaaattttagggtttgctaattataaaattttcaaacttaggatatttttttttatttacttattaattaaaattgataatttcctaaccatcaattatgttatttctcaaattgtttattttggataaatttaattcattaaattataagattaagaatataatattagaaatatgtaaattttaaattaagatattatattataatatcttgttagatatttaattaatttaaattattttaacaaactgaaaaattagttagatatttgaattttagttcgagtttaggatatttaggagatttgttagattttaaatagtttttaatattctctgacagcctaaattttaaattatagttaagatataatgtaaatattttaattttaaaatagaaatatcttaacctactttccaattatctgttacatgttt

SEQ ID NO: 82095 - DNA, 673 bp, Cannabis sativa
ctcaaagtcggcctccaactccagagatgcttcttctatgaactgtagccggagttcctccatatcaccttcaatattctgtgcagaactagaatcacccatacttggaaaccactccagatagccgtattgactcacgcttcaagaacgtagctaagagaaaacagagtctcaaagttggatacccaacatgatgaaataactatataaatatcatatactaatatatataacttaaaatttagatcatgggaaacactacaattaagcatatgtactatatatgcttttatatattggtcaattaattaaattagaagggaaaatattaaagtgatgaacatggacacactctcaatatctatttttgaatcagctgatatctgatcattaatttgaccgattatttctatagattgtgatatacacatacatataaacatgtttatatatcattaatcctgctgttcttggatgatcaagtagtcatactatatcatcatgtttatatatatcatcatgtaaggatgattcccatgatatttttatagtacattttcaaaaattaataaatgtacccctacactattatcatgaataattataattttgtttacgatgttttttaaattaatattttagaatatagagagtagaattcaaaaagtatatt

SEQ ID NO: 82096 - DNA, 1401 bp, Cannabis sativa
aaattgtcatatttcttttgtgtgctccgtaacacagcttaactacagcctttcaattattcaaaaaaaaaaatcataaggtttacatgattattgtaaattttcttaattctgatatctatttttgataaaataaattgtttttcgaagtaataccgtagcatagtcacttgctataagatgtgcagatagtaagccaccaagaacacggatggtagtctcaaaaacagaaactgtcttattctgcaaaaatgttaacaaataactcaataaattaaaatttagaattttataacaggaaaatatgattgatactaaccagagaagcatattcaaatatctcaacttatttataaagagattaaaaaaatatccatagacttagccaaagatataccaaaacacaaaaactctgaaagtcatggatgctgatggaaatagatcaggttgaaacaaaaaaaaaggaattccaaagtcatggatgctaaacatgtggcagaaaccagtacaataaattatgtctttacaaaaaaaaaagggtcctgtcctcacaatttttatttaaaaaaaaacctcaacttacattaatatagtgaaataatacaaacaaatgtggatgaaataaccactaaagacagaaatattacagaatgaggaaaacattttcataaaatactgccattatctatgtgatttcatataacacaagggaatccctttcggttctcacaaattgaatatgctacagtaaactaacaactgtgagttctaaaacaagtttaaaataattaaaagaaaaaacatcactcactatatcaaaccgaagatttttaccaatccattcaacagatgtggaaaaccgatctcgatcaccaagtaaagccagtgtgtctaaagagtcaatctgagacaatgtcatgatagaaacactaaaaataagcacttgaacaatgtgaagacttgttgttttagcttgtttgcgttagctttcttatattttaaaataagcacttgaggacatgatttgaagattttaataaagtacaacagatcaagaggatatttcaattgtcttaccaaagttaaggcataaccaccaagcgtatcttcacccccacatgatagaggtcttaattcatcgagtggaaaagcattctccatgtatccatcaaaagcatggtaaaacatttctctcacctacattgtcaaatcattaaaattgtgtagctacatacatacatatatgttagccaggccgacatcggcccaataacattagattcaaatgcaattaaagaaagagtcaaaagctgggcggataattcaactcaagagtccagcccaaacaaagatactgctacaattaccaaggaaagaaacaaagagaagttgaatgaaatc

SEQ ID NO: 82097 - DNA, 972 bp, Cannabis sativa
aagacaaaccgaccgatgtacagtcctagctggaacatagagaacattatagagtgttatgttggaatttaagattatggtgcctgatttttcaatgttcacagaagtgccattgggtagagtaacatgtttattagttaacatattggtaatagaagagaaacatgtaatatggcaacaaacatggtgagtagcacaactatctagaatccaagaagtaggagaaagaggatcaatgttaccagtgatgttgttgactgctggttggtctgatgtagaagcatcagtagtaggttgcaactgttgggtcagcattgaaattagttgctgacattgtgcttgtgtcaactgggaatctgttgttgaaacttggtgagtttggggacgagatgtggaaccagaatcttgttttttgtgaatttgattggtggagtcagatgttcttggttttccatatccaggtagaaaaccatggaggaaatagcatttgtccttgtaatgccctggcttttggcaatgggtacaatgaggacgaggccttttgttcttggatgtttgatttgcagcaggatcaatgctgagtgtggatgttgtggctgcagcagcagcaatgtggggaatgttgcaattacccaaagttctttgtctttcttggtggatcaccatggaattgactttgttcaatgattggcatggatcaataagcaaaatttggtctcgaatggcatgataagactcatgcagacctttaagaaattgcaagacttgatcatgatttatgtgatcttggttttgggcagcagcagcacaaacacatggtattcttggtctgagttgattaatctcatcccatatagtcgtgagtttagtgaagtaggcactaacagattcatcaccttgatgaagataaagaagagattcattgagttcaaagattctagggccattaccttgattgaatcggttgttgag

SEQ ID NO: 82098 - DNA, 1215 bp, Cannabis sativa
attagctcatttcactcaaagtacattttatctgtatatattttttgttttaataaaaaaaaatactgagaataatttgacaattcattatgacatttgacatttctttatcttatattatctctattttatggagaataaatatattaatttttcccaacctttgcctttttctctcctactaaaaacacatttttactttttctttcatttttttcctctcacttttctacctactagacatggaacaaaaattgcagtttagttttgtccttaattttttttttaaataattttaaatatagttttctattgaaatagtgtgttaaaattgaccaaataatatttatccaatctatgctattccaaaaagatgaaagtaaaaaaaatagaatacatgaaaattattattttctttatacatttctaatttgttgttaataagattgatttgatactagaggttcgatataaagttttgatttaagtttttgaaaatgattttctttaaattaatgaaagtaatttgatattcataataatattttttttctcctccattttcacaggccatatatcaatttgtttgtactcaatataatttctcaaccatctccttttttttcttcaaccaaacaaacatatattttcactttatcgtcactttcttctcttaattttttccaccacttttctattctacctaacaaatgctaaatttaactaaaattacagttttgtccttctttctaatatttttttaaatagttttctcttaaaaattgagtgtgttaattttttttttttttgaaagcctgagtgtgttaaaattgaataaataatactggataagtttactatacagtatacaacccctcaaataagtgtttcggtagacttcctatctgtttcatcacttaagaagtttttttagtccatcttttttttcataatcatttatagttgtttagatcacttgtaaattttcaaaaaatatcaaatagtctataatgacaaaaatagatttatatattttgttgtatacacaattgtttttttatatacacgtggcaagtaactatttaaatcttatttttggccgtgtaaattatttgattttttttttttttgaaaatttataaataatcctaaatagatacaatgtatgcgactataaaaaaaaaaaaaaaattctgaatggcaaaacattaaaca

SEQ ID NO: 82099 - DNA, 1017 bp, Cannabis sativa
aaattggattaaaaaagaaaaatgggacgtgtactacacgacaaggatatatatacttgaggcacgattgcttattgaatttccacattaaaaaccaaacatgttccctagcttgattttcatttttcttagatggtatttgctactatataaaatatataccccagtccccaccatgaaaaacctattaaaattttcactgacttgaacccaaaagttccatagtgaacggactacattcattagtgtaaacttagtggattccctttcaaaattaaaaatgttattatattatttttttgaagaaaaaaaaaacagtaatgattaattcataaacgggatttatctaacttggtgcatgtcccaaaggccagatatatgtttgaagtgggaatatgcctagaattttgaaagagcacatgataaaagggtgagaatatataatataataatttgcgattgtcatagatgattagaagattatattattatatattaattaagataattattatatatataatttttctgttaattattgaatccaaagttgtccattggtgttgtctttagtgatggaatgtagtaatgcaagttgctatgctatcaaatattgtttaataaagcttttttaaccataacacgtgaatccatgtgaagagggaccttcttgtttttttatacttctatgacacttcaattgctgctaagaacatcctctgaaaagaaaagctaggtagtttctattaaacaaattaactaatagaaccgtgtgattttgtactttttctttttacgaaaagatttactattataaataatgaacatttgtttgcaattacagagtgtacagaggaaataatttcatcccatcaatatcctaatttttatcgaactcttggtggttttctgttcggtcatgagaagctatactatctattctatataaaatgtgactatagaaggtttatgaaaaattaatgggtgactttattttaaataaaaaaaataataaat

SEQ ID NO: 82100 - DNA, 1777 bp, Cannabis sativa
ccacttccttagctctggcatccacctagttgaagaagtcattgaggatactcatttttaaagtgagtggccccctgcaaaagaaaatggtacaagattaaaatatatataaataataaagaatgcatggaaatcaacaaaaaaaattgcaaggctctagtttgggttcaaccattaatgtgttgtacataggatcccttgcacaaatagtgttatgtcctcccggtctaaaaaactaccatattggaagaagcccgggtatttcattaaagtagaagattctactctaaagcactacgatggtcggatgaagtgtattggactctacaatttcatcttccctaataaggaaatggctgacaggatacttaaaatggtctaactccaaaataagggtcaaaacctccccgatcagcattgactaaatcttccagacaaggagcatgaaatagacaaaaaggagaattacctcttctagatgtactggaacttagagtacccccatctggaaatatggcagcaaagttgacctccagttccccatcctcattcatagattctgaatgaattcgtgcccactcctccagccatcacttatctttcttaatgaccttctttacctatctagccattaactctgtgatggcttctttgaagactatgcggtcagaacgtatcttggggtagttatgaggctcaatgctctcataaggagcaattaggcccactttcctgagattttcagtggtgacaaagccctccacttacgatacctctgagtttgtaatgttgtacaatttcaccttcttatttagaaaaggagtcatcatgggacgaggaggatcatctgcaaggccaaaaagagacgccctattcagatttttccaattttgatagaatagtcaaggaaagaaaaatcaaaaatttctagtacttacccgcaatatagaagtctaatgatagagttgggtgcctctttaatggaaatcaagatgttaaccagtgctcccaagtcgtgggagtgcctgcatgtactggttgggcaggccacattgggatgcttcttcagtgaatagaagcccaccttagacttgttcttctgcatgaaatttaaatccaacttatagaaataaggaatttcctcttgagacaggatttctacatcctggtccttacaaaagatgtacactcccaacaacaacttgtatacatgtgggatgagctagagaagagtcaaacccacttctgcacagaagcaagcaaagtagtttcagagggaaaggtgtgctccatctttgacgtgagcccagctccaagcttcgaagccatctacaacaataacaaggagactcgtccttcaattccagcctattccagaacaaaccatggatatgcttgagtcccatcttctcttcataggaccgcaatatcagataattacgaaacttgtttgtatattgatccatcttccattgagatgggttggctactatttctggcttcatgcctacaacttcttgagccaattttccttcatgatccatagtcatctcttcatctcaaatttgtctgcttcagccataggagaaactaggaaaaataaaaaactaagtagttaatacccctaacccaatagacttaagtaaggccaagggagagaactcccccacaactgcttaaagaggtccccgtcagaactagcagtcagaaacaggttctctagggagcaagtctctagaatagcaagatcacgaacacaataatatagaataaagcc

SEQ ID NO: 82101 - DNA, 1142 bp, Cannabis sativa
tataataaaataccttcaaataagagaaaaaccaaatgagcatataatggatgttgtgtgctgaatcatggatcgtacacaccttatagtagttttcattccctctgtgcgttatatatttattattctatatatatcatgcatatgcataaatgcatgtatttcatgtacatctctcaaaatatacttaacacaatggtagtttaattgtaaaccactttaagaaacaaattttaaagggattattggaggactaatgatcgactcttctatatcatcataataaattgactacatgtaaccttacaaattatcttgttataaccaaagatgtcatgtaacctatatatattaggcaaattgagtttttaaatttaaatatatactactctctccctctctttaatcatatatttattattagaaacttagtggccttacacgagatagatttattgtatatatgcaagcacgttttgtttctatgacaaaagtttaaaaggttcgttactctcgtttctaactaattaaataaataatatatatattttttcagcaactatatatatatatatattcttaattaaacataatcataaaagggtactttatttagggcaaagcatggaagtgtatgtcatcaaactaaagacactttcatcttaatttaaacttactaggcgttctaatttaaatgacaagatcgtcttaattaattgctcccaatatctaaaggcactttaaaaggcacatttagatatttaaaataggtccgatcgatcgtgattgatcgaagaattggcaaattaataaccattactttaacacttaccaattaatctttccaatgtatatcattaattttcttcccactttgacttttatatatttttagattataacgctgtttgtctcagtcacgaaatacctatatatcagattgatttagtataagtagtaacccatttctattttctagtatggaaaaacacttagtagcctagctagagctagtattaacctgaaatatatataaccgttatcacaaatcaataattatatatttaaaataaaaagcataattagtgttaattagcattaatttatagacaaatcagctgtcgttttcattttttttcttc

SEQ ID NO: 82102 - DNA, 1843 bp, Cannabis sativa
tttgtttatcattactgctgccaaacctgcttcgcctttgtttatcagtacaaatgatccaaggaactttctgagagttgcaacgactaccttccctgtgtaatggtaaaagttgcctctgatctgcttctgcatctgcactgtcattactgaaattcaagtaacaatagtatgagttccgaattctactctgaacctcttggacttgatccttttttccctccctgcacaagcggtttctgtatatccagagatgatcaataatgcatcccagatatgttaaaatttcctttcttcctatctcaacatcagagagactcctgactagattttgcacgaacgactgaatggtatcccctggtattttgtctatacgcaaaggaaacacacccgagaaccataagattttcacaaagctgcaatccctgaaaaggtgtaaacagctttccaaattaacgttgcagaggggacactccttgtccattagaaaaggcagtctttcctttacagggattgcgttattgagaacacgccacaaaaaaatcaagattcttgggtgtaaatctgagtgccaaagccatttccaaatttcctgcacctccttaaacctgtgcttctgattaacaatgtaggcactcttaactgaaaactgtccattttgtttctatttccatataattctatccttgttaggatatggaagcctaggaatttcaagaatcctgtcccccaaatcctttccaaaaaactgtaaaaccacttctctattccaagcatgccctgatgagagatctgcaagagttctcgccgtgtatcgtcttggcctaaagctgtccattaagtttttaaattcatcaaattccaaccaagggatccaaggctggttccaaatgtcaatcgtttctccccccgccggtaaagccaaagagcctttgagaattatgtttcgagtatccaggatgcacttccataaactagaattagtgctctttttctttactgtccagaacgattcgtgcttgcagtatttacttaagagacaatctatccacgacttccttgtgccttgaactatactccacacaagctttgcaattaaagctctgtttgaatcctcgcatcttctaatcccaagacctcttgactcttgtggctggcaaattgaatcccaagattttagagctaagtatcttcctttacccacactcccttgccatcagtagcttctaatcatcgcatccagatctctgcaagttgaaattgggattttgttggtactcatagagtagatcggcatggccgaggctactgtcttaattagagttaatctccctgcataagacaataacctcatcttccaaccctctagcctcagcaacatactctccctcagcttcatgtagttttcctttttccttctaaattgaagacaaaaggattgcccaagtgtctttcctccccttgagtttggttaatattgagtacatgcagaatctcattttgtctttcagcagagagattattggagaaaagcacacttgatttggccttactacacacttgtcccgaccatttcttgtacttactaatacaatccatcaagttctttgcctcctctttatttgctcgagcaaaaagaatcgtgttgtccgcaaacatgagatgagaaagtgggattgcagctcttgcaatttgaattccatgaatcttattctccctctcgtgcttttggatgatcttggaaagaacttcttggcataggagaaaaataaagggagacaagggatctccttgtcttaagcccctccgtggctggaagttcttcaaaggagtgccatttagg

SEQ ID NO: 82103 - DNA, 1096 bp, Cannabis sativa
  modified_base (29)..(29): a, c, t, g, unknown or other
aaaaacaaaatttttaaaaacaaaaattntactttcattttgtgattaaaaaaattaaaaaacaaaagtgttaacaaacggcacctatatactttaagaggtagaattaatattgtcaaaattttaagaagtaagattactattcttttataattaaagataatttaattattatgcgattgaaatatctactacctaatacctatttttaatctattcatatgaatatataaaagatttgaattttataggtttttctaattaattttgatgatattaatttaaattgtcaattcatgaggtgattacttacttttctttttttttttttttctaatctagcttttattttttattagttgttaatatttttaattttgaactattttttgtcaattaattttgttaatttaaattttttaaatttgttattgcctcattagaaattggattcaactcatttacatttacctcccttagttgttacattattactattcaataattattatatattttattagttattatctcaattattcttcaaatttgatatcttaatcctattatatattttaattttaccaactcaaaagatcaatatatgttcaaaaatttattttttcaattctcatctctcatggaaaaatgaaaaactttaaacttagaatttttctcaatttaaatgtgttaaaaataattatattatatgtttggttcgtatataaaatatctctagaattacttattattagctaaaatagtaccaactaatttgtcaaattatctcatcattgcaaaattaattttaacagattttgactcaaattttcaacaatataattattttttaaaattttacgcaagaatttatttactactctaacttaaacgagagagtgtcatcaatgtctaaatatgtatgataaacatcaaacatatgagatcagaatatcaaagtagtttaaacaataaaaagtgatagattttgattatctagaaaaaataatataaaacaaaataacataataaaaaatagaaaactaaatgaaaataaataaaacaataaatgatagaaccagaagcgaagtaatac

SEQ ID NO: 82104 - DNA, 2008 bp, Cannabis sativa
cttaactacaatcctcgtgggatcgacctcactcttggtgagtctattacttgtaaacgatacgtgcacttgcgtgtgtaaaatatcaaaacacctgaataaacataaggtttagggtttattcgcttaagtatattgtcacataaagtacattgttgataatgaatatattgtaatacataaaagatattactcgactcataatgaggacatatcgctatgattcatatgtttattatataatgaggaacgttgggtttgaatattttagtctaaatattgaccaagtgggagaatattagaatattttttattatggaataaaataaagaattgattttgagtaaatgaataatttatattcattgaatctagacaaattaattacgtgatattctacatatggttagatttcaatattcattacctgatttgatttcctaaattaattgtcaaaatattctgacaattaatgtggcgtagagtatctcacctataaatatagagcctcaatccccgagctcttcactcatttcgtgcaaaatagcaaaatttcatctaaagagagtcgagagagagaggaagcccgaattctcataccgaagctatcgtagggattaaagctcaaacatcaatggctgaaggtatttcagtcctttcattgcatatattatttcgatatgtctgtagttttttttttcgctttacatatcgtttatatatgctttattttcattctacatttagtctaacatttttttccttgttcataattgtggggtagggtcggccttaggcataagcgggctacgcccattcctagggcccacactttttgggacccaaaatagaaaatgaaatgtctcattaggtttttattctagtaaaattaagtgtatagtaaataaataacatttacagctttgttggttggggtgtatgacacattgcctaaaagtatgggttcgaatttcatgatactctttccaaaatttaaatgaccttagacacatatattctcagggccagccctacgatggtgtatattgttgtctaaatgtactatatgctaaatttaacacaaaatataacatagactaaatttataccataataaatatcacttttttatttactttattgctacttagtaatataattactaacttttttatatttttatttatatatttaatataatatttatatacttttaataaaaatttattatttttgttgacttttttacatctttctattaaagcatctctaaccatattttttaaacgcgcttatttaaatataggtgagtcttaaaaaaaatgagctcgaatcataaaaaaaatagctctctataatagagaatggatagaaagctctctaaatgtagggagctccctatttttttgctaaatttttttaatattattttaataaaagcactataatctttttcattatttcaacaaattaatttacatttaataaattcaaattataaaatattattaaaataattaaatgctaagagcatctccaaccatgttttctaaacacacttcttaactattattttttcaaaaaaaaaaaaaatagacttcttagctaaaatagggagtgagcttaaaaaaaaaaccagctccaaccatacaaaaaagtggctcactgtaatagagaatgaatagaaagctctctacttttttgctaattttttaatagtattttaaaaaaaatattattacttttttattatttaattaaattaatttatatttaacaaatttagattataaaataatcaaacactatctaaaatatgaagcataattagagcaaaaataataaaatgactctttattttaactttttagctatcttaactaaaatttcgctaaaaaataaagagatagataaactgaaacatatatgattatgtataaagtgcggaattaataaaacatatatgtactataactaagaatcgaaatacctccaaccattgaatctt

SEQ ID NO: 82105 - DNA, 3717 bp, Cannabis sativa
tcagtccaaccacagattgtagtgagacttccacttttttattgacttcaatggaatctaactcagatgtgtcatcctttacctcctaacagtcgggctcaaataattcagcatcactctcctcaaacattagcaccacattgagttcttttttcttgcaatggtggcgtggtgcccacttatcatgatgaaagcacaaccccttttcacacttttgtttcacttgagtcggtgtcattctcttaagctctccttattgccgaggggttaaagtcttatagttattaaggctggatttagggtgattggacttgaattgttgtaggtacagtcaaaaccagttggcctttgacaggtcacacttgcagctctcatttttttctcaataccttgagcaatgtccatggcctcatgtattgttggagtcaatccattgaaaaaaaaaaaggtgctcatttgatcttccagaatgttgccgagaggtgccaataaccttatgaaatttttcttgtattcagccatggtgtcctcttgtcgaataaataagaattgatcataaagagtcctcatttcagtatctcgaaaatatttcagcaccaatcatttcatctcctaccaactcaagatagccctcttcttactctcatatttgtaccacaataaaacgtcccgaaaatagaaatgaaggctgcctcaattttttcgtgttcatcgtagttctaacatgagaagtaacgttcagcttgcataatccatccatcgaaattctacccatcaaacagtggcatcttaagtattttaaatcgcttttcatggcaaaaattattgtcagggtaccctctttcaaaggacgcccctagtgagaactgattagcatgcatttctccagttgcctgtagctttgctgttgtctggtggatttctgttgctatataagactcaagaagctcctgggcttttattttttgtcgtttcccgagtgttggagcgttgaagaacttcctcaacctgctcttggatgtttcttgagtgttcttggacacttcttgatcattctaggacaattcttgcgcatcgagaatgagttgtggctgatcttttgagttgtgcttgcaactgttgccccatctcaagaacagattcaataattgacaccttgacaatatcttggactgactctataaccgattccataatagataccttgacagacaccatctctggcttcaaagcctctaccttgtcttcaaggctgagatccatttggatcttctccgccggtttctttaacatgctccgcagctcaccacaccaaattgatagaattttcttagaatagaaacaatctatcagctattttccacgacaaaaccagcaataaaattcctcaaatgatctttattgtgaaattagtaacaaggttacaatatcaagctttcgaaaggttcatctctcctattcatactttcgagaggattggtctctcttaaagagtctactcttctctaattccaagcaacccttacaagagaaaccctctcctatttatagacattagttactataactaatgccaactagaatccactagagacaagatagctcagcctacttattaatatattgctaactgtataaaactcatcattgcttcggtttcctcttgtacacccgaatagtggcttatcatattcatcgagtaatcattggtcaaaagacctacacatgttaatttgttaagatataataaacaaagtacctgtgtattggatggcaaaaatggaagctccgattttccaggatacagcgataagttggccaagtagctctctacaagtacatttaaaatgtttgatgttaagatcaagaacctggtaccatgtagctgaaaaattgatgtacaatttcatctcccagtatactacttacgagctcctgatttcattacaccttgacaaagcgatccttgcatcaatttaccagcatccacagatacagcctttccattgtctttcaaatattcagctgcacagccaatttgaaggatacaactgccattgtaaaccacaacaagagacctgcagcaagtaacatctgaaaaagattcccatgtcctgttaattgcaagaagaagcaataatgaatcatcctatactcacaaagacctgccaataaaagcaaacaggttttcttctgtagggaacacatacatatcacattcaactttcctgcaacagatttttcattactctaataatactaacagaatgacaaaattctgacactatttacaaatagttcctgattgttgggtcactggatttcaagtttatttttgatgttaacaaaactaaaacaagtaattatataaatcaactagacttcagagtacaaactactaattgtgctaaacattaaattttgtggatgtttaacgtagtgaatcttaactgtatcagcattgagcaataaatgaaaaaagccacaaagatgaaacatatagtaatagtactctgcacattaccatagtaattctgaaactacagaatttgggagatccggattaactacacggcattcgattccatcaggatttacctgatattaaatgcacaaaaattaaagttgtgtgatcggaaaggaacaacaaaagacctaccaaattaaattggctcataataacatggaaaaagcaggaacagaccctcaccttaaaaacaggtttcggtctgatagagagccataccagaccagcaagaatattggttacagccaatccaagcgtcaataaatcagcccttgactgtgaactacatatataaccagtaaaaatttacaaaatcaattatagaaaataccttataatttttattttattttttttaaactcataactaattaaaaacgaaaaagttcgtaatgcacttaacatggaactgtaagttaatcctgcaaattttttgaactactggagtgaatataactagagtttggaagtgaaatatattagagcttagaattcctcgatccctatctacattcttgatccaaacaataaaaaatcaaagtatatacttaacttttaagttgagacttaacaaattttgaactacagaaatcactaacaacgaaatttgaagtaaaattaatcataagcaagcattactcttttcctcacctgctggcatcagcgactggagcaatccccgaaactgttcggttaagtagaacagccaagagagaaaatcctccggcgtaaatgggaaaactccgaacaacgtcgtcgttattggagacccactcggcgacccagtcccttcccggctttggccctctataacgtccctctgaattcgcagaggtagaagaagccctaatgaagcgcgggaaagttctatggagacgatgagggagagggcgtttaggattaagactccattgaaatggaaggttggtttgaaggaatgttcccgcttccattgaaatttctttttaattaaaaagttgttgagcttgtactttttatgtatgactatcacatccacataatccatcaaaaaatatcatatccacaggttgtgattccatgcgctcacgagtataatttaccatgtggaaacttacaaaaatactgtttttttaccaagtgttttcaaaaatactgggacggtaaactttacatttttactgtctaaacccatttttatttcttttata

SEQ ID NO: 82106 - DNA, 1039 bp, Cannabis sativa
aattaattaatattcaattatataaataaacaaaagaattattaattattaatactactctacatgacttgactagtactatcatcgaattttctgggaagtactgatcagttaatatatatttatattaatatatattatatagaagtcaactgtatctatatattatatatatttatatatattatattagtatatttcatctccttctacttcaattaaattttcaatgacagcatctgtagctgtttgtaaaaactccgaccaatccctgaaattattagagaaattttataattaaaacttaattaattaataataattaaaaatgttattaactataattaattcatttatttgcttacccattaatggtgtcaaaagtaagaccaacggtgaatttagcttcttcaagtgctttctcatacctttcgagctcagatttcgaataattcccattagggtttttcgaaaccctaagctcggaaggcttaacatcacaaaagacgggaataactctcttttttgtctccattaaaagagataattcatggagacagaaaggagagtcacaatatctaggcgaaaacacggccacaccaatcttacaactgcgaattcccgcattgattttgtcatacaaactgtccccgggcttcatgttcttgctatcgagaaatgggctaaaccctaacccagatagatggtagtgaaggagccccgccgcagttttttttgtgtcaatgccacggtggtttatgaaaatgtcgcacggtggttgtagtggcggtgatgatgacgaccgaggcaccatcaccggggatgatgatgaccggctaattagcttgtttcggttagccacaaaagtactattcttggctagggcatgcaccgcacgctgcatggctatataaattattttcttagggtttgatatgttatttgttatatatatggtattaaaaaaagaaagaataaagaaattattttcttgtttttgtgttgtgttatatatttttttagtgagagagagagagag

SEQ ID NO: 82107 - DNA, 1379 bp, Cannabis sativa
agttcctggtaaaataacttccaacacagtgtacaactctcgatggtatcactaattctttcaactctcaacgaatgtaccaaaatattttttctagtttttttggaaaccaattaaatattaagtaacctaaagaaatatatagataacaaagagataacactagagttgttacatggttgggccgttaataagctagtctatgagtcaatattattacattaagattggtaaatacttagactttacagaagtgtttgaaccttagaaattgagaaatgagatttcaaacccttgcatgggttgttgcccttatatttatagtgctagagttcttcttcatttttactttgcccattgatggggcaaacacaaataacatattgacttaggcccatctagtgcagtcgaaccatgaggcgttgatagtaggctgatgtggctgatacatcatgttgatagttgtccagtatgtgtcttgatcacggacaataaaggcacattaaatgcttgatagtcaattactatctttccatattgggaatatatgatctatgagcgagatcttgggagttacattctgatatcgtgggatctggtaattaatgagtatgatacgaaactacatgcctagacattatattattactcccctggacgctttgggtaagtttttcaagatgtaggctatgttggaggattatctcatctagataagttatcctgtcatcatccgaaaaggctaattaaagttatagatttggttcagcactttattttagctgctgttgggcctaaaataccttagatgtaatttcttttggaatcacacgcgttcccatctggaaacacgaatagtagtatttttctatactttttatggaatttgtttttaacatttttttacttgtattttttttagaaagtaactttattttcacgttattttcatgtagcagcgacgtgaaaaataataaaaaatatatgtttgtatctttgtaaaagaaaagaaaaacaattaaaattgtaaaaatattaatttgtacattagtgtatttttgtaaactttatatcattttttagtatcggtaaatattttaaataaaaaatatatatttgatatatctataggaaataattaggggttcttacaaaaatactggatttggggtaatacttgtaaattttactgccacacggaagaaattacatttatacagtcctctcccttttttcttttatactgtaaacaccaaaaaaacgagggctccatcttccatacccacagaaaaaaccaccaacaacaccaggacacccggaaaacaactattaattctgacgagattgaacaatagcaatgaaatcaatgtcaaataaat

SEQ ID NO: 82108 - DNA, 1747 bp, Cannabis sativa
catcacccctattaataatagtcagtaacaaatcaaatttaaagttgaggcttgagggggtatacttttttttttctttgcgagggaggggcaaaaaagtaaacaaaatattaaaagtaaagatacttttactaggatttgaactcttggcctctataaaatgtgtaaaataacttaaacaacatgccaaagatattattatatttacatttattatgtttagttacaaatatattttgtaactaatcaaaatacatttacattttttcccttcttcttttcagtaatgactgccccctcacgcgtctaatgtgggtccgcccatgctaatagtacaactaattttaaaacaagttgctctagcaatattatgatcaactttgtttgttgattgctttacaaacatcattcaacttagataataactgcttacaatcttgaataagtaatctatatagagacaccatacaggttgtactctttattgcattaacaacattcaagcaatttgattctaatattactttagaccaaccttatcttgtaatccaacttagtgtttccttgctccttacaacctccaccatatcaggcttaaatcttcctctgaaactagattggaaagctttaataaattcccccctcactatcacgagctaccatattatatctaaattatccctcactgtcaaataaggctccatctacattaactttaatcgtgctaatttgcatattcgtccactgctctaaaacctttacgtcatcattactagaggatttatgtagctttttcttgagtggacctatattgattaagaataagttttgttaagagattgccttattaacaaccagatttatcttgttctaaactagctcatttcttatcttccataacacccaacacaccacccccgtttctatctcctctctatgccatttctaaactgtctgctgccaccaagctgagatgtcatttctacacttgctctagcagtcccaaacaacaaacgccagcaactctgtgcaaaattgtagtccaccagtacatgcaatcatggccgtctataatttattaatgaccaatttacccttaaaatattattaaatcgcatgttttatggtgggggcaaatctataatttccaaggtattaactaaataagtttttagtttaactgaaattttttatcattatcttataattttttaagagaaaaatatgtataggttagaaattatgtagaagctaggcaaatacaacacaccaaattaccttttttctccttctatctttctctctttttcggctcaaggaagaaaccaagaggaatctagattttcatatcaaaattctctcactttcttgccaattaatcaatcttaggagctgtgcaagtttagggtaagttctctttattgttcttagtgaatataagggtttaaagttaggttttatggagaatattggtaatttcgggctggggtatgttggttgtatcaggggcagtttttattgtttgtttagcttagaattgagataataaaagatgtaactctcatagtctacttttccttatctcataaaatgagataataaaagatgtaacttttcaaaatctatcttttattatcttataaatgtttaccaccaaattgaaaaagaatttaaaaatattctttattcacaaaatagatgataatactcttcacatcaatagtaataaataatattatattactat

SEQ ID NO: 82109 - DNA, 2500 bp, Cannabis sativa
tgatttttaaagtttgtatcatttttagattataattttttgcattgtgtttttttttcaatatgatgttgatgaaacttgttttatttatttttttttatactgcttttagtgaaataattagtttattttaatgttgatgaaactagtttttaaaattggtatcgtttttacattattattttttatataaaacttgttttagtttgtgattcccttggagatatttaccccatattgaatgctcaaatcaactatgattttttgtcaagcaagtaagaaattaaatgccaaaacagagtatgaagttagaaattaaggtattaagtattcatataaatttatatgtcggaaactaatcttaaagtttgtgtcatttttagattatattttttgcattgtattttttttcattatgttcttgacgaaactggttttaatttttgattccctttgttatctttaccctattgtgtatgcttaaatcaactctgatttttttttttgactaaagaaaaaaattcattaatcaaaaaacgaaccaattacacaccacggccacaaccaaccggctcccaaaaccaccagcaacaactactcaattaggcgcaaatacatgcctttttcagcttgaataaacctcctattccttaaactatacaacctatattttattatttctttaatatcatttacaattttcaaaatagtataacaacaattattatgcacacaagaattcctgtttttccacagcatatgcacagttacagcaaacaaagagattatcacaccaggatttttgcttacaaactagcatctccaactgttgtagtccaaaggccaagcaacaaccccacaccagttaaaaatttgctgcagtacaacctttgagacgatgcaattgaagaacagatggtggtggctctcttcttcaaggctacacaccgaacaatagcttgactcaagaacaatatgaaacttagagaagttatctctagtgagaaaatgaccatgaaccagctgccatacaataaaccgatgcttggcagagttatatttcaccagacagatttataaaagctatccgtgttcaactgaagagactatacagacgaattgcaatgaacttccgtttttttactgtagcagccacattaagcttgctaaatttctccctcaaatgacagatttttctccaataccaactaacatcccctgtcaattcgtactctcaaagatcagcacctttcatataaatattgttaacccatttgactcaaagaatatcatgcttatccatgatagcccaaatgaacttaccaaggatagaccgattccaagtaggacaatttttgaaaccaagacctccaaaaggtttaggtaaacaaaccttatcccaagaagccaaatggattttgcttttctctcccttaactccccacaagaaacctctacaaagcttctcaatctctttaatgacaatttgaggaagaataaaaatgttcatccaatagttgcaaagaccaagcaacaccgaatgaataagctgaacacgacctgcataagacttgccatttggagagggttctttcacatgtcttaagggttttgtaatgaggttgctccgttttatgatattattgtatattttgattttaagttcttttttattattttatttctaggttcgaaactggttttcacacttaaattttatttttagaatattgttatgcattgtatgatgttttaattatatttgtagagtttttttttttatttttttttattttgtatttttgtattttattgtgtgtgtgtgtgtgcgttttctatttggttaactgaagaaactagttttaatgtttttcatttatgttttattttcataatctcaattgttattgtgtgatgaaattaattttgtttggttttcataatgttcattgttgttgtaagatgaaactggtttctgttaatttttttattttttgttcagatagaatttgattcctccaataaggatgcaacgaaagatgttgctaaagattcaagtgctgactttgagaagaaacttcctctaattaaacttaaaattctaaggaaggttattcacaagaagaaaaaaaataaatctcatccaaattttaaggatttatcttcggtatatgtatttttccttaggtaaatatatatatattttttttatcttgttatgtatatgttcaattttttagttggttatactagataattagttttcgtatttaattgttgttttacgtaattaagatttaaattttattctttcttttgttattttaagaaactggttttactgtgtcagatctatgtaatttgcttgctttatgtaactcgtatttctgtgctaacttttaattggttgtttaacataactggttttagtaatttaaatttatttatatgttaagaattctcttgtattttttttaattaactagctatttcgtgtttc

SEQ ID NO: 82110 - DNA, 614 bp, Cannabis sativa
aaccccaagagaaatcaagcaatttcagagcaattcttcatcattcaacaaggttttcagtgtgaattttcaagagatttttagaatcaagatcaaggccataagctcttagttcctttctccctttgaattttcaagaaaaacttggtttattggtgtaattttgagaataagtggtgttaagttttggtagagttagatattgttttggggtcttaaattatcaattatgtttgataaacattggagaaaaagaatggactttattgactgaatcaactctttacaaattgagttgtatagctcacatatggtgataccaccaattacacaatcctcagacacatgtgatattgagttgatctcaaatatcgagttgaagtgtctatttataatcagaagatcaactaatttaactatctttttcagatacataaaatcggtagtgctgatatagataatactaagtacattaaatccgcaacattattaataattagttgttagatatgtagccaaaaaagtattatttattacactcacataagtaatgtacaattactatcttaataaataaggtgattagtggtagctaagatattaataatagataa

SEQ ID NO: 82111 - DNA, 1526 bp, Cannabis sativa
cccaaccaaaccaacactttgagttgctaaaaactgtttcaccaattattgtttgtgctggttattgactcctcgaacattccaactcactattttatccattgggaagaggaggtactccccctcctcctggttccccaacgttagatctgtctcttcctccactttcctgctgctgtgtatgtttggataaacccgaaccaattgcagtcaggtgcactgtggcttcctcaaaaggctcctgtagaggagaaaaggaattaaccacttgcacttcagtagctagtttattttcattttctttcaacactttcttgacaggtatgaaaccatttttgtctgctccttcctcccgcaccttggcagtaacagtaggctttttaactacccattcagccttctttccctccttgtttctgcagtccttggtctcatgacctattcctttgcaatgtgcacaagtcgtaggtttccattcataagaaacaaagactgcagtctcctcatcattctcatcctcaaaccagatttgttctcggaattcttgctgcattgagacttctatgagtatgcgagggtacgtcaatttctctctggtcttagtgaaagcatccaccataaccggttctcccacttgactaatgatcttgaataagacttgctctccccaatacttcaaatctaaattcttcaattgaacccagattggtacagaatgaatattttcctttttaaagttaacattggggtcccaagctcgcataatcaccgggcatttgttgaagaatatatatcctcctgataaaacctgatcacggtctgcaatactcctaaaacgcaccaggaacacaccatgagaaatgatccccactttgttaattttatctttccaaacccgcctcacaaagccttccagaattgacattgggggattagccccaagaacatagcagactatcgaagggctccaaaaatctacctcttcttggatatcttcctttgtaattttaattttctgcttagatggggagccagcaaattttgaatccaagttacgaactatgttaccagatctcagtatgggaggaattacatccttacctcgtgcgactgcaatagcagaaaaattctgagcttctctgtattgcttagcctctaggaagtgcgaaaagtccatccgtatctcctccctcctaatgctattcaaatccagagcaggtgagtatacttcctcagcattcaccagaactttagtatcatcttcttcctcagagaaaagaatgggctcgattccgaggacctcatccatggacttggtcttcttcacatcaatagatgaattaggacctcgtttcttctatttctttgccggagatttgggtttgctctgttttgccctcgtctttgccatggcaccagcacaaagggctgagagaaagctagagagaaaaaccccaattagagtgttatttcaataaaaacaattatttaataacttaaaaacaattattaaataatattgtcat

SEQ ID NO: 82112 - DNA, 790 bp, Cannabis sativa
tttttttttaaaaggaaaaattattaacatttacattacagttccaaatttcaattaacaaaaagttagtgtctaagctggttggttggatttgcagctagtcacatgccttaatgacttttagttaaattaaattaatttaatcaattaaagataaaaataagactttattataatgtctccaaagtatgaggcatggtgtgtaaaaaaaaaacatatcaaatcaaaggatgagatcctatcctaggtgcaatatttatactcttttcataattaattagaatatttgttactttattagctttaattaacattaaaatttcttgataatcaaacccaattccatgacaaaatctttaatccttaattttttttatagggttaatgatagaaaagggtgagagattcaaggtgtgaaatgaatcttcttgtggatttgctcactttaattgtttttaattaattattattaataattaattaaaataaaacatttttaagtagtttttatagtgcatgcttccatatctctttgtctgaatttatataatgataatcatatatattgtttcattgaattcttgctatgagttaaaaacaataaacaactcaaaaaatattagttaatattgcatgtttttttttttgaaaggattaatattgtatgttgtaatgtgtaaatactcgtttgtaacgccagtccggccgtattaagtcgtattgtattgtattttatgcaatttttttatataaaattatatgtggaattaacttttatggacacctaaat

SEQ ID NO: 82113 - DNA, 619 bp, Cannabis sativa
  modified_base (356)..(363): a, c, t, g, unknown or other
atgcaaagtgaaaattagcccaccgaaattgataataataaagttataaacatttagttatttcaatgttttcttgtagcggtgttaacaattttttagagtatctccaaagagtacactgaatttggtgtcacatatcataaaatttagtgtcaaaactatttccactccaaccacaacaccaaaagttataataaaaaaatattcgttattattatattaattttttaataaaataaaaaaatatattaaattaattaactaaaatgatcacaattgttatatctacataaaagagtcacacgtacaataaatagttcaaactttattttcgacgtgttaaatttttttaaatnnnnnnnnattttgcaggatgtcttaaatagctataatgtacacgaccataaaaaatagactaaaaacgtagtctctcgaatgtcgaaacaggttggagtacagtagtgcataaaacttttaaaaaggtacattggtttgagtgtgttaaatttttttgaatttcttaaaattttgcgagttgtgttaaataattataacatacgtgactataaaaaaattagactaaaacagtccaatgggcgttgttatccacgtttccgcg

SEQ ID NO: 82114 - DNA, 2185 bp, Cannabis sativa
gggtacccagttttgcgcgcatgggtgaggactcacacactagaccaccacacgcgcgctagccgctgccatccgtccgaccgagccgggctagcgagcgagtgaggtatcacttaattttttaaagaaaataatttaattaaataaagatttaatttttttatttattaattaattaattttaacattatcaaaattatctttttactgccatgatccaactcctccacgataatattactgttgtttattcttggatcaactactctaaactcgtatcagaacaacagaagaatatatctctttcaacatcaaaaaaaaatttcttccttacgattttcctcaaagcaaaagttagggtgtaatagaatgatataatttagtgcagaacatatcgtacgtatacagaggttgttttatcctagggacaccgtggttgctagacggtcgtgcacacttcgagtagaaccgcgaaacatcttaaagaaagcgacattgtccgctattgttttcaatttcagtcaaactaatacttttggaagtggtctctaatgaaaacaaacagctaataaaataaactgaaatgagaaaaaccactttacttcaaattaaaaagaaaaaaaaaccatacaatacgtagaccaaacttcttttcttttttgcaaagtaatacgtagaccaaactatataacaaaaaaatttactacaaacaagatttcagattaaaaaaaacaaaaacgagaaacgaacttcacaaaaatctaatttaatttttccttaaaaaaaaaaaaaaaactaattattgggtacggcaacagcaccaccttcttcagcatttttcaattgattgtcgtttcgaagcgctttctccttttcaaactcctttgcgacgtcgtacgaagcatgtaacccaaagaagaagtaataacccaaaataatcaaagtccaaatcccaaaccttataaacgagtctttatcaatcgaccccagaagaaatatattgatagcaatcgaagccgagggcaaccacggcaccaatggaacaccccaaaggttaggaaacttcgcctgaggaacaaagattcgaatacccaatgtccccaaaaaccaaagtggaactgtaattgcatacccataccaaccatcgctggtgccccaataagcagaagtaccaatagaagaccccaaaatcactacaaggaaaaagatcagcttattccggttagccggagtagttactccggcagcatagtatcgccggacgagaagggccactgcaacgagcatgaaaatgaaaagtgtcgatattgaaagtagattagagagaatatccagctttgtgaataaggcaataatagcagtagctgtgatcatgacaatggttgcgttgactggagtaccagtcttcgcgttgacttgtgcaagccacggtggcatcatgtgggtccgagctatgtgtgttaggtaacgagcctggcccactgcgctaacaagcaaaacactagtcattccctttaagcccccagccgcaacgaggtacttagcccaacccattccaacagtttcaaacgcaacagagaaaggtgcgtcttcgtcgattagtttgtatggcaccattaagcaaagtgttatagctagtaaacagtaagctacagttgttatgaccatagacccaactaacccaattgggatgtctttaccagggtttttggtttcttcagccatggttgaaacggcgtcgaatcctacataggcgaagaagagtacagccgaggctttgaagaccccacgtgggccaaagggtgcgaaatctctgtagttatcgaagttggctttggttagacctgctatgatgatgaagaggatgactaggatgtggacaattgaagcgacgtagtttagtcttgatgagcctttggtgctgagcacggctaggatgcaaatgccggccatgactactacggctattgggtcgaggtggccgtagttttcggagagagcgcccacggcgttgatgcgaaaatcgtctggtttgtggttgcatagcgtggcaaagtaagaggtccatgaccgggccacggctgcaccgcctattacgtattctaggagaatgttgcctgcggcgatgaaggccacgaagtctccgagctctactcttaggtaagcaaaggaaccccctgaaagt

SEQ ID NO: 82115 - DNA, 675 bp, Cannabis sativa
tacaacttttttcttttctttctgctgttcacttctattttattctcatctgtatctgaataacaataaatcctggtcgtttctttcgtttttgtgaatttcttctttcacgctccaactaatatataaatatcatattatatatcttggggctaaatccaaaatttatacccactatttttgaaaaaaataaaataaaataaaaaaggtaccccaaccgaaattgttatttttaaaatgaaaccaagagtaaataacattcagatcaaatgcataaaaatatcgtcaaaaaagaaaaaaaaaaaaacctttggcttatttatatcttcttaaattattttcatctctcttcaattataattttaaaattggaactttcataatattataaagattttttttttttaataaaatcacactaaatatgacatttatctaattactaaaactctattatagggttaagtgtaatataaacactactcacacacatatgaagaatgtgggacaaatatacacaaacaaacaaatgagagcttaatttacaaattaatgaaagcatcttaaggtgtcatgtaaggtgctttatagcaacgcataaatgtgcttgaaaaaactacacataaaaatttcaccttatagtgttggacaccttaagcttatttccaattcaaa

SEQ ID NO: 82116 - DNA, 651 bp, Cannabis sativa
atccataggtgatctcgaacaagtgccaataaccctagtcacaattccaagtttaaaacacaatagggttaatacctaattttataacataaatattcacatttaggactctaactctatatgaagtaatagagctcgtaatgagttttccaacgatataaagaatattaaaaacagaattcggagttaaaagttatgaccaaaacaaaatggaaaaaattaaattgtcgctttggggttgccacgactaattgtcaccgcgaccaaactgtgtaggggctatctcctgttttatgcaagggctcgccgtggtgactgggttcgaaaaacccaaaaaatccaattttagagctttgaaaatgtacaaaaccaaaaccgattttactcatataatgtacttggtttataagcccaaaacagagtgtatgtaagtacaaaatctcataaaataagacacgcttaaatcacagctcaataatcacataattccacaactcaaaacttaagagaaactagttcaagctaaagctcaaactcatgctcaaaattcaaaacttctgcttctaaatacataaaaccaaaaatgaccaagaatgacaccaacaagagtcatatattgattttatgccttaactcaattcaccacaaaat

SEQ ID NO: 82117 - DNA, 1699 bp, Cannabis sativa
actcttcttttgatattttttttacatattttttagggccctaaaatttaattcgttttgggctcatatattttcagggccgaccctgcaagtagcctatataaggcaaatcttctttattatccagtgaatactctttagaaacacgaatcttgagagagtgtgcaagaagattagatagagagagtactatgaaagagtttaagaattctaaagggaaagggttttaattttataatgatctacatgaatgtacgaatgtgtatgctcgagtgagagagtgtgagtaaaatacttgtgagaacccaaagattgagaatttatactcattggtgatgtactcaatgttgctcgataaaaaaatttaagattgtgttccaagttagtgtagaccaagtttacattgaactaattagaatctgaactaggataattccttgccttgtctctacgtttacaatttgatttttgtttgttcttgattgtttgtcattactgataatcttgaattgtgttttattttgaatttactaatcagtactttttgagttagatgtttatattttcaaccaatcagaaattcaacaatctaaaaaaaaaatcataatcatttatgttataattgtttaaaattacttataaactttttttaaaaaaaaaaaactccaaataattcacattgacgaaaataaaatttaaataattatttactgagagtataaaataaaataataaaaaaaaaacaaaataaacatgcatgcatgtgtgtgtgcgcaaccaagtatctaaattttattttttgcattataaattgttcaaaattttctaaaaatttacagtaaattttaaacagctagattgtacacgtatgatcatgaaaaaaaaaataaactaaaaagttatcctaatatatagaaatcgatagagtataccaaatcgtcttttcaatcaagaaagtatattaatgttaaggatcatcaaacaccaaccatctccactctaggtatgatatttttcgctttggcctaagctcttagggttttgttcttggacacattttcaaaagacctcatactaatagagatacgtccatctttatatacctatgaaatctttcccatttctaatcgcaatgtgaaactttatttgaattgccaacaattaataaataagggtaagtttataggacaccccctaacagagtgtttcaatggactcttttggcatattttaggaaagttttttagttcaatttttttttatcgtgtacatgcatagttatttaggatagcttgtaaatttacccaaaaatttaagtagtttacaattaatgcctagaacaagatcacatattttattgcacgaccaactattatttttttatatatatgaaaagtttaaatcttattttcaataatataaatatttaaaaaatttgaaactttacaagtacttttaaatagtttttttttttttagttgagaatcttttaaatagttaaaatgtatgcaattataaaagtaaatttagattatttcttctcaaaaaaaataaaaataaattagattaaaatattttattaggcgtaaaagaaattgagatttaccaaaaccatcctttcaaaacagaaatttaattaattccaataaataaatagatatacttggaagtggaatctaaaatattttgttggattttt

SEQ ID NO: 82118 - DNA, 1519 bp, Cannabis sativa
  modified_base (1466)..(1470): a, c, t, g, unknown or other
aagaatttagttatataggcacactttatatagaatagatatatttatatatttatatatatatagacctcatgttgaattgtaccaaaccattgatactgacttattaatgcatacgtagtagtggagctagctatgtcactcttcaaaaaaatgaaattagttttaataataatatgtaagtttacacacgttgctattgtctagtgttgtttgtctataaattgatgttaacttagacttcatttcgtacacttagagaaagaaagaaagaaagaaagaaattaaagagagaaatatatatatattctctagtttcatagtaaattatggatcaagtcctcctcatgatcaagccttataattccatgtttagttccattgccctatttttgttttgtatcttattctcaagccctatagtgtcatctcaacttgactatagatattatgataaaacttgtccaaaccttacgaagatcgttcgtaatggtgttcgtttagctatctccaatgatacaagaatggctgcctctcttttgaggcttcaatttcatgattgttttgtcaacgtacgtaatggaatatataattattattaatatatattcacccacatttgggccgagtcgggctaagggcccagaagaaatattttctttttataaatatacatatttttttagtaattttttaaaaacaacatatatcttttaatatttctttttcttaaggcctacccaattgtctcacaaattgaaattatggtttttttttaatagggttgtgatgggtctatattattggatgaaacaagctccctcaagggggagaaaaatgcagtgcctaataaaaattcagtgagaggttatgaggttattgacagtatcaaatctgatgttgagaaagcttgcccatcaaccgtttcttgcactgacattctcactcttgcttctagagatgctgttgttttcgtaagattctaaacttttattaataatattggtatttttgtaattttggtatttgacattgggcctgtgtataggctggaggcccattttggaacgttcagttgggccgtagagatagtagaacagctagtgatgaggatggagttgtgaagcagttaccgtcgccttttgagcccttagctaatatcactgctaaattcacttcgaaaggttttgactcaaaggacgttgttgttctttcaggtttgtttatagtcactttaaatgaaaatgttattattcaaaataaaaagttttgtatgccaaaagtgttgacagaaagaaagtaaatttcctcgtacttgtgaattataatagtggaaattgtaccctatattcttttttggttaacccattttatttttacatttcttttatatgtatttaatttatggggacttttatttacatttcataaaattataaatacacctcattattaaaaaaatatannnnnaaataatttttaaaaattattcttgatatatttttttaatttttttcct

SEQ ID NO: 82119 - DNA, 731 bp, Cannabis sativa
ttttgtcatttaacaaaacacaagatccaataggtaacttttgtaaaacagagagtccagaatggtatttacccataaatatataattagtaaatatcacctttagatttttctaagtcttctaagtcatcagttggacagactgaatatatatgaaggtcgactaatattacaaaataattgactttaggaaaattaattagttgtttcattatatagaaaaataaaaattctatcatattaggttattgtacatggccaaaaaagaaaaagggtctaatatattttttggagaaattctacaatacagccccttaaaatggatatattaatgcactctcctatataaaaaataaaaacaaaattcattactgctatttattattattattatttcagacttttcataattttttttctatcattttgtattgggttcaataaaattcaataaaataatttgaatttttcggtattttgtaagatatataactgtatgataaattatttaaaaatatcataaattgcccttttttcttgtattagaagctcaatttttaaaattaaaacatagccttcaaaatatttaagacagccctattctctattttaagagtttagataattcttttttgtgcaaaatatttgataaatttaacatgatggcctatgttattaaaattaggggttttctcatatttatattttaaaatagcttttttttttttttt

SEQ ID NO: 82120 - DNA, 970 bp, Cannabis sativa
tatttgcgcaagcatgttttggaagactttcttgtccttttaagaaaagttcgaaaatgagtttcagatggctaattattcttcttagaaaggagttttagataatcgactctaacttactcttttctaattagaaacttagaaagttcttttggcaagtaccttggtccgtgattctagaaatcctcataaactcttttagaagcactcatacatatgttgacatggagatctcgctctaaggataattagttgagtttgttattgcataactaacttaacaacttcgcttcttgttgccaccaattttaaacaaatttgtttttttttttttcatataataataataattaggaaatttatgactttacgttatgtccctcatttagttgtctttcagaatttgagtccccgtgatagtacttatcctgggctttaaaagtggtgatcatttgagagtaacgagtttctttgtactttattgggtaaggtgttcatccaatgcaatttaaaattttacattttggatcggcacagaaattttcaaaaatattatttcaaatttatctctcttaaaagtataatttcaccacattttgagtttttttgcagttaaactctctcatttatggttttactttcacttaactctttaagtttaaattttagcggtaaaattttcaaaactattgaaatgttagtaaatataagacgtcatatggttaattgctactatggattgcttatagaagaaattgcgtggggtacccactttaagttaaccattttaatttttatcctctttttaatatttcatttttttttacccacttttatagttaatgttcctataataccttttcttcaatccaaaacagaaagacttaattttcaatctttaatgttaatgtgggggtatattaggcaatctccttataaaagtggatataatttaaatgaatatagtttg

SEQ ID NO: 82121 - DNA, 1851 bp, Cannabis sativa
  modified_base (72)..(83): a, c, t, g, unknown or other
actttatatgtgtttatttaatacttttttagaagttcatatttagggtgttaaacaacatacttgttagtnnnnnnnnnnnnctggtaaaatatttccaacacgggcatacttttctcgaactttacccgagtctctagcaagatgtcgacccccaataatgacctgtaaatgcccgtccactggtggtggcatcaactggttctggttattatctgcctgggcggccctttggttctggtcagccttgacatacttctataaatgcaggttattatttctgataagaaatttaatttctcattcaaattattacatttgttcatgctgtggccgtagtccacatgaaaatggtagaacttggatgtatctcttttatttacatccttcttcatgggagatggtttctcgtacaggaccatagactgatttgtcgcgtagactgtctctaggtcatctgttaggactgagaaggtaataaattttgaggcattttccctggggtgttgttcggcattggcagtgaattttcctttctttccactaccctacctgttacagttgtgagacctcttcccatttgaatttgagctgctagggtactgtagattccgaacggatgttcctaccaatgcgacgcgttacttgcttttcttttgcctgatagtatccacacgctgaacagcttcttcaagcttaatgaatccatttgcttgatctaaaaatttagccattgaccccacagtcagcctttagatgtccttccacagctctccaagtggctcaatgcccccagtattgttgcaaaccttcctttttcagtcaaccccttatcttttgtagctttggtcataaacctgctgatataagccctgaggggttcccctggcatttgctttgctttgaccaaggctttgagatgcgggggaagttgacgaaggtggaaaattgtgcatggaattatgaggagaatgcattccatgagtcaaacctccctgtaggcaacttgaaataccattaccgggtggcttctgcgagtgtggcatgaaatattttgcaccagacatcacctcttaccccttgcagatccatctgcatctcaaaatacttcagatgtcgtaaaagatcttctttccctgcatacattttccaggctgggatcttgaattttgggggtaattcgaggacttcaatctccggggagaaaggttatctacatactcggtcaagttcgagatcactgagttttgggccggtcaggccttgtaccatgtttttaagttaatccatatgtgcttacacaaatggatgaacttgtttagtttgttgaccaacctgtgtcacattgggatctctttgaactagatcctgaaagcggatacctggctggacaattggtgggacgtattgttcgtccaggccccttcttcgattgaggtcagtcctgaggtcatgttcgatgcccaacctatcgaatactgaagtacaaggtggccttggcatctgacttgtttggccggcaagttggccaaaaatttcaattggggtgaagttggtgtgtgtaactccacccaaaggacagttcagcaggctctggtcatctaccgtttagcccacgggttggacttgtggtcgtggattggacgactgaccattgtgagtttgtgcagtattcccttctaaatttcccaagggaatactagacgcagtagccagctattgattggcgacttggtaagcccttcttatcagtatggtggcctgcctcgtgcaatcatcaatggcttcctaatgagccctcaaagtttccatctccctgtccctctattttataaattgatgcctttgctc

SEQ ID NO: 82122 - DNA, 992 bp, Cannabis sativa
  modified_base (957)..(961): a, c, t, g, unknown or other
gactacagtttccctatcaataaatagcgtaactaaatcctaaatatcgagaaaatattgaaaaatgagatttcatgaagaataccccaaaaaatggcagggcgttttcttgagttttcagcctagaaaaatagtagactgttttcccataaacaacctgctgtttttatagcataaatgacccaaaacctcaaaacttaaccaaaacgattccaaccttttccaaactgtccaaaacctcaaataatgttaaaacaaacacatttcatcaaacaaacacaaccataaaactatgaacgataacctaccattaatgagctaagcttgagctcaataccctaacttagctcaaaatatagcaaactaacccaaagcttctagcaaaagcttaaacaaacacaataaacctcccaaagctcagctctaaaaccaacaacacaaaacataactaaaatccccaaaaccctcaatgaaaccatataaaaaccttaaaacttaagagagatagaagaaggattagcttaccttaaccttctcaacaattaatcctcaaaaaccttagctgaattctcttgattaggtctgaattcagagaaaagtgggtgggttttccttgtgcttccttgtagccgaacccaaagaaagagaaagggaaaagagattttgtttggataattctagtttcaatgtatttttattcagctactataaaccttaattaacctaaaggattttactagaaaatctatttatttcccacttaataataaaagccaaaagacaaatctacatggcagatctattcacaaagatgctactagtaaaatcttttgtgagtcatatatataatgtgggacaagggagatgcccaatttgcttttagggcaagtgggagattattaggatttatatcctaaaaaacctgtaaagatatttttgattattaataagagttgnnnnntttgatatatgcatgaatgttaaattattaa

SEQ ID NO: 82123 - DNA, 1460 bp, Cannabis sativa
gggcataaaacccaacaatatcacatttaaaaatatcttttcatcattttttaggataaaatcaacgaagaaggaggtgagatcgtattagtattactgaatagcatctgttattaataagttctgaatataattaagagaactcgaccaccaaacagtactagaggatgctgtaagaacgactttagttaagttgtgagcaataacattaaaatctctagaacaatataaaaaagaatcatgaaaaccattacaaaaattactaatttcattcaagacaagacccaaagagaaaattagagatactttgttcaccattttttgtgcaacatttaagcaatccatttcaaagatgatattatcatacccaaagcaaagatattggaccttggaattccgtagcggcaaagcctccattacttcataatcaagacaaccttctaggcgccaaacagcaaaagcaagaacagtactcaaataatcacgcaccaccatgccaaggtaactacaaatgtgaattttatcaatagaagcattactattaaccttgatggatccaactaacggaggagaccatttcgaaacaatcttaacaaaaggcaaagaggtcacctgtctaatagagagagaaggcttagttcgagcctggctatgttggaaattccaaaaaaattcatgggccaattccccaccaccaagtcacgaggtaaattagtattgttatgcaactttttatttttcttaaactagatacaccacataatgactaggggtgagcaaaaatattcgcttaacagcaaaacctacaaaattcacactgcattttggattggggtgtggtggttaattttatttgtagtgcaggttaacttttttaccaccgctgaagtgtggtgcggttaagtaaaatatattttaaaaagttgtcatacctgcaccacaccacaccacatcagggtcggcccaaccaatttggggaccttgggcgaaaaatcaaaattgggccttttattgaaaataaaatcattaattaatacttcataaatttaacttaaaaaaataatacctcataaattcctttacatttatttagtaaatttaaatattctaaataaaagtacaatcaaaatattattcaaatttccaatctataaaacttaataataacattaatttattcaaaattattagaaaaaaataacatagattgtgtcatctaaaaatttatctttcttgcctttttggaatgcaaatttattaatcaaatcattgtattcaagtttatctagcaaattattttcaattgacaacatagctaatccactcaatctcttggaacatagtcgttcttaaataagagttgattaattttaattttgaaaaacttctctctgccgatgcaactgtaactggaattgttagtaatattctataggcaatgaatgcatttggaaatgaat

SEQ ID NO: 82124 - DNA, 1278 bp, Cannabis sativa
  modified_base (49)..(70): a, c, t, g, unknown or other
tatgtgtttaaattacattgttttggatattcatatttaggatgttaannnnnnnnnnnnnnnnnnnnnntagatcctggtaaaacaataatccaacagagagctgaaaacacgcgaaacaacaccttacaattcaactcgggcgcctacggtttcacccaacgcccaggttgacaacccaactagggttttaattttcgggatcatcttagtgcaaatggatcaaactttgcactgagatatgaattagacataccacggacatatttgaggcatcagaatcaaattcgatgaactctcatttttgaaaacctggagcacctggtgcctaggcacccagcgcccaggttgacaatttgccaacatgggtcacctccaagcatcggatttgaaatttaacttatgcatcttcttcgtcttcattaaaaacggggaaacaagtgcttttcgggaagaaacaaaccaacatgggccaattctgatgaggttttttttttttggaaaagtctttccgtcgtattctctatttttgccaaagattaagattcagttgtttacatggagaaaatggaaattctaggaggccctaaactgaaccagcgcccaggttgacacctggcactaggctcagtgcccaggttgacatattgtcaacatgggccgttttccaatcctattttcaaaaaaaatgtatcgagcattttttttgttatcaaaaaaataacaaaaatatacaagtgtaaacttgaggagaaaaccacaattgcaagggcttcaaaactgagcctagcacccaagttgacaaacaacctagtgcactgatttctatcactaaaatacaaattttaatccaagcattctctctgaaatggtcaaaaactggagaagaggcctcatcctcaagttcaagaaccttggaagtgtcaaaacggcatcccagaagctcttaaataagcacccagcgcccaagttgacaaatggtctggtgcgctaggttctgcttatccaattttgattctatctcgaccacttgtctagtttttcacaataactgagagtcatgaagtgagaagagtcaaattcacaacttcatattttcacttttgcgacaaagtgacttactaaaaaatcgagttttgagtctcccatttttgcaaaacagcaacatctccgagaactgatgaccagcttcactacaacacagaaacatgccaagtgatgtcaaaatatcacttaggcatcaaaaaatacatccccaacatgttttccaactcatcc

SEQ ID NO: 82125 - DNA, 547 bp, Cannabis sativa
  modified_base (98)..(103): a, c, t, g, unknown or other
  modified_base (518)..(522): a, c, t, g, unknown or other
gacaggggcagggcaaaattggtattggtacaatatttttaaaaaaaaagtaaaaatgatagactttaaaaatgagggtaaaaataaaagaggacaannnnnnaagggtatagagtgtaatttcctgataaaaaactctttgtagcatgtatttgatgctaacaaatcattgtagcataaattgatattctggttagataaatacttaagtttaattttttttataataataatacttaaattatatttttagtgctttcgtaggtatctggccattcaatgttaaattaatgaccacgtgtcagtctccaattggtcaagtttattaaaattttctttttttattcaaaaattaatttagatacaccaaaaagaaaataacacgtgaataatgacttagtacttaacagttaggtactaccgaaagttttaaaaatataactattattacccttaaaaattaaacttaagccacgcaaattacttttatttatttatgggtaaatagcggcataagnnnnnaaagttttgagtttgtaagcggcat

SEQ ID NO: 82126 - DNA, 845 bp, Cannabis sativa
ttaattaattctaaaaaagaaatgtctacctagaaaaatgtagccatatagttacaataaaaatgtaacaattttaaatagttacctatatatatatattttaatttcttttttgtctcctacctactacaatttgttatattttattttgaagaaagaaacttgatcaacaaatatatagaatttctttaatgtgagcatttatatgtcacccttaattaacgttttgatatttaattatagacaaatgatcaacaacaaggtacgcaaatgaagattactagctatatcattcttgttttgctttgttttggttttttatttattttttttatttaaaaaaaaaaaagagatataatatattatatatagattccaaaggaaagcttcccccgaaaccccgagtggtacaaaaactagtcatagcacagagacaattaattaaatcgatctaacaactgaaatttccagctgccctgtgtgatcactcggtcatctcactgatccacagcattactcaacattcagaagaatatttactattatatctttgaatacatatatatatatatatagatatttgtatatattgctgttcaaactaacagtctattgcaggatctaataaatgtaagtttgaacaacaataagacataaacacattgacatgaacaacaatataataaatggatattagccctaaaattgttaaaatttattataatgaaagaaaattaaaacaatacaattccattacaatataatataatataagaatcaataaaaaaattaaataaatgttacagcaacatatattatactatatatagatatttatatgtata

SEQ ID NO: 82127 - DNA, 1248 bp, Cannabis sativa
aacaacaataatgtcaacgtcaacgagaccactgctccgcccaacaatggtggaacttcaagtgtgaacctcgttgttgacacatttttggagaaattggacgaactagcactgtcaccctgaatctgttctcaaaatttgctagagccgcaggagatatgatgactcctatggtgagtactggttatttcccaccaattacattgctcacaccatcgagggtatggtgcaattgacaaccatacaagagtagatgtgagccttacaagctgaggttgcaggaatttccgcgtaccgagaacattctcctaccgcgtgaacctgccaacttacaaagcactaataatgaggtacataatcatattagcagacgtcgtggtgaacatgttcgcagatattatgcaagggagtgatcaatgaatataatccagatgctcccaatttgaatcaaccaccttaagacccccacgtggaaagggactcgttgtccctgaggatgaacatcgacgagatttaagattctgtgcaccatgagatatcggcagaggtagaagggaagaaatgtatcgtgacgaagatggtgatgaacgccgcaatcctagaagtcacattgatcatagaacccctgaggagtatgattttgagccatttagatctgatagtcacactcctagtgtgtatacaagatcgagatcgattttaacgcgtcttggaggtagataccacgtccaaagaggagatctacgagaccgacttaacgaggctttcttggacgaatactcgaggtagaaaactgcgaaaacaacacatgtcgacgggcaagaaaagccttgtttggtcagtctcatagatctcctctttggacatggtatttgcctccaagacgcgtgaaaattgatcctgatctggtatatacactaggagtgcgactatcaaatctaaatgactcagaatcatactcctcaggggttctttaatcaatgcgacttctaggattgcagcgttcatcgtcatcttccttgcgatacctttcttcccttctacctctaccaatatcttgtggcacacagaatcttgaatctcgtcgctggtcatccttggggatagccaaagttatagttgtagttctccttattacagccatggtgattgatcagattgatagacaacgttcttaatgaaagtaccaaaatattgaccacatatttggtcaagtgacacgaagttttatttacaatcaaaatcatc

SEQ ID NO: 82128 - DNA, 1922 bp, Cannabis sativa
tacatggtagtaaatctagatcctagtaaaatatatccaacactaacttgggcaagcaagccatcagacacaacttaatatgaactcaagaatcgtacctcacttggtgaagcctagagatttcaagtaacaccactcaaaagaagtagcacaaccattaccaaaaccatatcacatttaaaaacctagttatcctttcatgttagagcaccaaatacaaaaaaaaaaaaaaacaattttctatactggttctttaattgaatcaatctaaaattccagtatatctcatccctattcttaatttatgtttatgcagtgaaaaaaaagtgcaagttccccttattattattgcgaaagatgtatcttggatcaaataagatgtttcatgtaagagcaccaaataatgtcattcatgtacaacaattactctaaaaatttcaagtaacaccactcaaaagaagtagcacaaccatcaacaaaatcatttcacatttaaaagcctagctatccttttattttatagcagcacataaaaaaatagttttctatactggttctttaatggaatcaatctaaaatttcaatatatcccatccctattcttaatttatgtttatacagtgaaaaagaaatacaagttccccttattaatattgaggaagatgtatcttggatcaaataagatgttttatgtaagagcaccaaataataccattcatgtacaacaatcactcttaaaatttaaagtaacaccaatcaaaagaagtagcaataccatgatccaaaccatatcacatttaaaagtctagttatcctttcatgttagagcactaaatacaaagattaagagagatctttctcttttcatgttacaccaccaccacatagacacacataaagtaagggtgagatctctgccgtccataacatttaaaactcatatatttatttttaatgcttattacctattacacaattaagtactttaaaatgatgtgaaagtcatttacttttgaaagaattctaatatttaaaaatgaaacaaaacaaaaagcattcctagaatttagacatgaaacacaacatggacaaccaacaaacacatatgataagtaacttcaagactttttatagattgataaatattttactaagaagaatgtcaatctaatgctttaatatcaatcaatattagtcaatcgaccatggtagttactttaccagagctggaaaaaaatagatttttcaacccaaaaaaaagcaagaaaaagctccacatatgacaagagtatactaatctattattacttattactactacaaaagtagtttttctcgacgtttttaaacagtcgtttaaagtattcatgtcagtttctataaccgtcgcttatacgaccgtcacaaaatgtgcaaaataggcgacggttaaaaactgtcgctaatgtggactttccaacggtttaaatctgtcgcctataacagggtacaggcgaatgttttaaaccatccagaatgtaaaaaaaaaaagaaaaaaaaatacattttaaaaatctgtattttccccatttcttatcctgtattagttttataattttacctaaaattaatataaaacaactaattaattttattacaataacaactaactttaaaacacattaaatttatacaataataaaataaatatatataataaataatataaacaaatatatttatatcaagctgagagagagagagagagagagagagagacgagaggtggtggtggtctaacgtatgagacggagataaaaaggacatcgacgagaggtggtggtggtccgacgtatgcgatggagaggagagggagaccgacgggaggaggggtgggtcgagatcgatggacgagagaaatgagaagaaagggagatcgagag

SEQ ID NO: 82129 - DNA, 839 bp, Cannabis sativa
ttgggaagatgatagtacaattgacaccatcggatttcaaagtagcacgatctaattcaaaaatttcacctaattgcgcacgtctagcgtattttttcacagtagcaggatcactataactgataccacaacagtcaatgatgggaatcttcgaacaaatatcataaagtttactatcttcaatgaattttttcttgtgggcttgatagaggaaatgggcaacaagaattgtcaaaacattcttctctgctgctacatatttgtatagcatgcaagcataatcacaagccaataatggcttaacttgaacaatgtttgataaccattggctgattcttggaaatttcatgccttacaagagacttctgagtgtcatttggcaaaaaatatacattgttaaaacaatcaaactccatgctgcacattctcaaccacatgtgaatctctggctctaaagcatacctaactgtaacttcttttgtggtttggtaaatggaacacagtttcacattccctttctgatcagtatacctcacaagtggtatatgctgaatatacatggaagacaaaattctttcattctcagcaagaaaacttagtacctccatgtaaacctctgtcgagccttgtgtaacaagattacataattgtatgcaagatccataccaacctggaattgcgtatgccaagccaagaaagtccagaattggagcataattttcaaggtccaacaacgagttcaaaaccttttgatatctatgcataccatccaaggaagccccttccttcacagatttagacaagaggagacgaaagcttggtagaattctaacaacctg

SEQ ID NO: 82130 - DNA, 1061 bp, Cannabis sativa
aaaaagaagaagatatataaaaaagagatggaaaaatagttgagtgtgattgttctacaatgacattcgcattacatgtattatgtgtgcaaatatattttgataaataaaacattaaaaagggtataaatgtttataccacggtgtgaaagtaagtgtgtaataaaagttagtttttgtatttttcatgtaaaattttttagaagaattttcaaaaatactatttttttatgttttatttataattttacggtctaaaatttttatttataaaaatatgcttgtaaggttttaaaattacaaaaatatactttactcagtaaaatataaaaaaaaacaactaaaatcaatgagaaatccacctcaccaactataaataaactataaaataactaaaaacaacctcataacaacgataatataaatataaataaactataaaataattaataaaatgacttattaattttactaaagagatattttataaataaaaaatttcgaagagtaaaaataaaaaaatttccatattaatttttaaaaaattcttagtgtattatctaaattttactcatatataaaaagcataaaaaaataaataataaagtcagaaaatagtaaataaaaatgatacaatttatacattattagtcaaattttacattatagagcactaaaatataaaacaggtaagataaaatatctgattctatacatttttttggcgtatttttctaaatgtaaagatcttcattgcaggttttctaaatgtttgtttgtttgtttcgtaacattaagccattcagttaatttcggctctgacggattggcaagtattttgttgtgaggtgtgagattcattcattgttgatttttttaatttaatgaacttaggccacgtttggaatgtcgtattagatcgtattgtattgtattgtattataatgaattggattatacattgtatttttatataatactatgttaaactttaagttatactaaaatattatatatttaggtgtccataaaagttaataccacatatagttttgcataaa

SEQ ID NO: 82131 - DNA, 694 bp, Cannabis sativa
tcgaccctaacaacggtgattattctacagtcaatcaacacaataaatcataagatccagatgaacactggcaatatatccactccagtaaaaaattcacacataacacaaatagagaaaaagttgtaaaaattcatgcaaagaaaaggaaatgaaaacttactcactgttcgacttgaaaaatcttgaagaggatatcctcctaaatcttgtctgcgcaaggaatgatctggaaaaacttcaaaatgaagaacatagaattttttgctctgaaagtttgaaggtattaaaagtttgaaatgaagcttggaggagtatttataggagaaaggcagattgggaaaatattttttagagaaataaattcaaaatgattactttttcccacaaaaatcctagaaccctttctttttattaaaactgtatcaaaaaacgtgtaaaagtcagacacgttcccctatgcactgaagttaaagatcattatgaaaaaagatttgaaaagacgtaggaaggattcgcatcaggtaggcacgaagccttaagggacaaatcgtgtaaggaaagatgcgtgtcacttggccatgcaaagatagaagctgagaagtccacgtacgaccagacgctcatacgcgaacttagagggcaaatattatcctaaaatgacacgtgacggttgataatgagttaggacggt

SEQ ID NO: 82132 - DNA, 613 bp, Cannabis sativa
atgccacatcacgttgatagttgttgaaactttgtcctacttttgtagataataaagacacattaaatgcttgatcatcaattactatttttctatattgggaagatatgatcctcggacgagatcctgggagctaagtcctgatgtcgtgagatttggtatttaattgatgtgatacataactggatgtttggatgcttgttgattacttctctggacgctccaactgatatctttcgaattcatgttgtgctggaagattatcttgcctggacgagtcatttgtccatcatctagaagagctgacttcgctaatggatctagtccattatcttggttgggcctgaagtaattaagttgtaatcggctttgaaaactacacatgtcctcattcgaaaatacggataataatctccacacacaaaacaatccaaatccagatattaaatacaaatttcaatactaaaacaacaaacaaacctaaaataaactaatttattgcgaattacttaaaaaaagattccacaaacaaacctttaattgggtttcttggttctcctgggtcaaatgggtggtggcggagatcgggcggtgatttgagcctcgattgacc

SEQ ID NO: 82133 - DNA, 1530 bp, Cannabis sativa
actctgttgtaaaaaggatgactgaaaattacaagtggaaagcatagccaataggggtgaacaatattaaagtaaaaagctacacttacagtgaactgagtaagtggttcaattcctttcaagctctccaatttgttctccgtgactgataacaatctcaaatttgtacacagcttcaaaccctgaaatcaaacagaaagtacccctttcatctcagtactagcttacataactttcactctaccacatagaaataaggagatttgaatgacacacctcaagagaagtgagattgttgagccaagccttaggtcaagcctctcaaacatttttggcctttcctctctctccaaccaaacacctttgattcacaaaatagcatttttggcatgaaacattcactattgtcattactttaccctccaaattacgttgacttttttttattcaataggatttaataaatccaaaagtaccaactatgatccaaaagcatagtagcagtatttttgttttgcatgtcttgaaaaacgcactgatctttaagtcataattaccaattaagtcaacaaaactagtatttataatcacaaatcaaaattgcttacattaaactagagtgaagcacagcaaatttcaaagccatagaaaacgccaacatactttgtcaactacttttcatcagagtcaaaacaggtcaatcttaccttctgaaagatttaattaatctaaaagtaccaagtatgatccaaaagcataaaatatagtaacagtaaaaaaaaaaggaaaaactgatcataataagtccaaatcatcaattaagtcaaacaaaatagtatttataaccataattcaaaattgcttgaagaggtcttagctacattactttacaaaagatactactacattaatcagtaatatatatatatcctatcttatctatattcatattcatataaactagagtgaggcactcaaatttttaagccatacaaaacaccagcatacttcctcaactccttttgatcagagtcaaaacagatcaatctcatcttttgaaaagtcctccatgtgagcaaactatccgaaccagcctgatggctcaacccaacttcccttacgatctgcaatgtactagccagactttccaaaccaccatacagaccaggaaaaaaacccatcatgtacttcatgtcatacacattttgaccaaagaagtggctcacgagatatagaaaatcaggcaaaaagtgaggaaggaaacaaccagtaagaatctttaccaaatacccaaaatcataggcactgtggaaggtaatccatgtaatatctctgttgaacacgagcctatagtggtacatcagattagcaaagtgggcagagttgattccgtgggtgagatttctctcgaaatctatcccctgtttctttaacaaatctatagaatctagtgcgcacctatggcggtttatgtcgaaatcacagaagttaaattgccaaaccaccgatgtttggccgccgaggtcagga

SEQ ID NO: 82134 - DNA, 818 bp, Cannabis sativa
aggtagcttatattttctcaacaagaacccatgtggatcaatctcttattatactggcattctaggtcgtaaatcatgatcatgccctatctttttttttcaatacctctttgtcatatacattttgaaatatcttgggcttttgttttcttttacattaaaaagttgtaactagttagaatttataaattttaataagtatactattttgcttgcgaccagttaataactacgttatgtatgacagattatgatgagagaatttctagactgtttctactgttgagcatttctttgtttcccaacttctttgttattcttacctttaggatattgctttgatttcaggaatgtgtgaaggaaggaatttatacaaaagaacaagctttggagtaccttgagtcaaaggtaaggtttcattgtaatctctaaagaatatgatgtctaatgttaagttctttctctacttctgaactctataatcttagggaggaaagtacttaagaaaattactgtctaggtcttgtgaggaatcataccccaaacataaatataatagggaggaaaaactctattttaatatattaaaactgaaagtaaagctagagtttaatgggaaaatcatgttgtattaaaactggaagtaaagttagagtttgatgggaaaatcatggcatcagttctacgattggaactaaacaatcccttagattaatggattaactcaaaatccaaacttgaagttaaaagagggattattggaatttaatgactttttatagtaaaagcatcaaggaaggggtttggggaaacttgga

SEQ ID NO: 82135 - DNA, 2488 bp, Cannabis sativa
ataaaatacaattcaatataatacaatacaatacaatacgacttaatacggcgttccaagcgaaccctagatacttatttatatgcttagccaatttacgaactcgatttaggtggaactctaacactatgtttggtaagacggaaaaaaattaggaaggaaaaaaagtagggtatgatggataaagaggatattaataagtctcgttcgtgttgtttggtattataagtggaattagaataatagaaagatagttatttattaaaattactatattgtcctctttaaatatactaaaaagttttaaaaaaaattacaaaaatacatcaattcgaaaaaaaaattatttttattttttgaatttttttatttacaaaaatatattttcaataaaaataataaattatttttttggttgttttatagtttatttataattgttatgagattatttttccggttatttttttgttgttttataaattatttatagttgttgtgaggttgatttctctctgttttttagttgttcttttattttttgctgaacaaaatatatttttataattttataactttacaagtatattttcgtaattaaaaattttaaatcataaaattataaatataacataaaagaaggatatttttaaaaatttccctgtcattttttttttgtatgaagggtatttaagatatttaatatattttattttgttattttctctcgtccttcaacttttagaataattggattttgtacatttggagggagaaggtgtccttccatctttcctctcccttactctttcctccctaccaaacacatgatttattctctctttctaaccctttgcttccatccctttcctttcacccaaaaatcattcttaagaatcatattgtaacactttgtttgatattagaggaatgatggattgagttgatccatctttagcttttatgtgtttggtagaaagagaaagggtgtggattgcaaatccacttaggccacaaaaaaactttcctttcaatctatgaacttaaggattgagtaagagcactcacataataaaaaatttctaaaatatataaaaatctaaactaaaaacacgctaggtcaaatactttaaactcattctctacttcgaagattttttaaaatttactattcatgttctacatttataaaatattatttattgttctacatgttttattaattgtttagaattttaattttacattttatttagagatatatctaaatattaatattatatatttcaaataaataaaatatactacaatttaaaataaaataaataaagtaaaatttttgtaatgtattttgaaaaataaaatataaaaactaaagaggttggtcatgttactttttctataattctctttttacccttgaaagtgagctatagaaatgaaattatcatagatatagtaaatatgctaataaatatttataattttatttctatattttagaattcctttccttcctcccttccaacttatcaaataaataattgtaaggtacacacccactttatccactatttttatctttctacacctcatatacaatctatcattaactcattccatcctttttaccataccaaggataagtttagaaaatttagataatttattatcttattttaatgtgatcacatgtttcaagaattaagtaattttttttaatgacaaatctaaattttattaaatcatagtatgcaccactaatcatggtagcaagtcagttgaaacatcttccaaactaaagcaacaatcaggaaaaaatataaaagcactaacaaaagtataagtcacaatattagctgatcgtttaacaaaaataataggaatactactcaaatcaagaatcaaaaatttataatcattaatcacttgaccaaaaatgaccatctacgtagaactctgtaaagcttgtataaccgtcaagctaagtgcctcacaaacacccattacttttaccaattcaggtatgaccgatccatgactgagctttgtgcaagcttccaacaataaacttttatcgtcctgggtcacaataccaaagtcataacaatgagaatcttcaaagaaagcagcgtccacattgactttaatactaccaatttgtagtgaaatccattgctcaacaccatcccctacctgaaaaccaggccacgactctatcacaaagttttaagcaaatctccattattaaggcaccctttagtagagccaataatactatcaatttccaaaaaaaattgctgctaaactcgctcattgcgagcagtccaaatagcctaacaaatagctaccagcaaacactttttatccacatcaagaactttgaagctaaacacacaccaattcaagaaggtatcacctggtttaacagttgtcccaatcctctctcggttgcagttcaaataaatagatgggcaagtcactaaag

SEQ ID NO: 82136 - DNA, 1173 bp, Cannabis sativa
gtgatgctggttgttctccacactaactcttgactcttcaactaacgagtgtcagaaagagaaaaaaaaatgctttcactacttttagaattgtccacatgcccgatgactccaaggtcgcccggaaggaagactgcaagctttcgccactcttaagtctcaaaagcttgggggtaaatactaactgtgtttccggaagacagcacgtggcataaccgaaaggtaatcactatctaaaaatgtgcctaagccttccctcttatttaagcccaagcccaaattggaatgagcccaagccaagtgaagattaagagcttcacctccgagacatagcattcatagcattcttccaagacctggaagttctcctagtcttttgggatacagaaggaacagagactttggaatgaggataagagcacacctagaggcaaaccatgtgagatgctcttggacgcctaccacaagatgactctcggaagccaaacacggactaggagtcgaatgtctaccgcatgggagtaccggacgtctaccgcaagacgagaggcgaatatctccccttaacagacgtgttcacctctctaacactggatcagatattattccctgtgttagatcatggtagtgcgtgcgccaccactacgtttgcctacaccctttttgcccgacggctccgctgatacctttatctaccaaacgtgacacttgtgcaacacgtgtcctgcaacaaatggtcccctcattagtacggaaccgtcgccccacagcttggatattcttagtaggcttcatagtcatgtatttgtgtattttactctattagcgggcttgcttttacaataaaaatttgaatgggtcataggtatgtttggacccaaactgtagcctatataaaccctactacccctttatgcaaggggatgaaattttagccgaagttctgctagctctaccctaagctttctccttctctaagggaaaccaaaagaaactaccttatagccaggattagggttccttattgtaaaactcgtttgtgatacattcaaaagtctaaaaggccaatacactaacttgtagactaaggataatcaatgtccgaatcacgtaaaaaccattcatctcttttactttgaaaaaccgtgtttttgcaaatgtcagttgtatata

SEQ ID NO: 82137 - DNA, 1208 bp, Cannabis sativa
gtaaaataatttccaacatttagccatgtaaaccgtctcctataatgttccatttaaaaaggcatttgcaacatcgagttgcctaatttcccactgaaatgtaattgccaatgtgagaaccaatcgaaaagtaaccgacttgactacgggactaaaggtatcttcaaaatctataccaagtttttggagataacctttggccactagttgagattttaatttgtgaagagtcccatcagcattaagctttactctgtgaacccacttgtttcctataagatgtatgtgtgattcataaggtacaagtgtccaagtaccttgagatataatagctcgaaattccttgttcatagaggcaaaccatcctggttgttttagtgcagccttgagagactttggttatgtggcaagcagagattcaagcaagggattcttggtagccatataagctttaggtttgaaaatgcctttttgagatctagtaaccataggatgggttctttgtggaatatttgatgcaacagtagaaccaatggctgctgtagaagtgactgggaacacatcagggacagcagtagcttgttcagatgatacttgagaaccagatgccgcagcaacaggataaggcagagaggagctattagaaataggctgactcgatgtagaatcccagaagtatcagcattgagttcatgcatctgatgctcatcacagataggctcagcaataaggtcaggttgagaatgaccaggatgaggagcattagcagcatgagaggcaataggaacatgattagtaacatcagagatttgattagtgccaacagaaggaaaatcagttgaaaatttagcagtaggcaagttataagaagtagttgatacctgtgtggcagaaaaggctcaaagagcaggatagacaagctcatttaaaacaacatttcgagctataaaattctcccagttttacttccacataggtaacctttatgcttaggagagtaatccaaaaagatgcgttcttctgatctaaaatcaagcttgtgatgattatagggtcttaaatggggatagcaagcacagccgaatgacttgagaatgccataatcaggagcttgttgaaataagcattcataaggactaagaaaatttagaactgatgtaggcatcctgttaatagtatgagcagcacattggaaagcatgccaccaa

SEQ ID NO: 82138 - DNA, 1190 bp, Cannabis sativa
ggattggattggatcggttactttacatgtcaatcaacattccaatctgcacaaatacggatatccgcactttgcagattgaattggatcgtgaaaattggattagatcggctattttatgaacaccgttatttcaatgaattgtttgctgataagttaatattcgggaatattggcaaaactcccaaattaactctgaaactctttcataaccccttattattttggtctatataataaaaactagttttcaaataaaataaatatatattttttaaaaaataacataataaataatgtaaaataaaaaaaatacaaatttaattcctttcttttttggtttctttctcttaccatttctttcatgttcagaccagtagcattgtcaatttttttaaaaaaataaagattgacgatgtaacaacacaaggttaaaatactactaattagtagaacataaagatttaactttcctcctcttatcgtaacaagaaaaaaataaacagtaccgatacaaaatcacaaggccaaaaaagaaaaacattttaaatgcatgacacaatgtgaaaaattagacaactaaatagccccataaataactaacacaaaaaaagtatttaaatcttgttgaaggcaacgatatcacagctctggatgtattcattagcaggctcggcagtaagatagtcctcgatgatgttgtcgggagacacgagatcatcgacaattgtaagcataatctgaagcttctttataccataaccaacgggaaccaatttcgctgttacaaatcaaattaaaaaccaaagattagaatacaataactattaggaaaaaaaaaacctcaaagaaaagatgacaatcgatgatattttggatttcattatatttagcatagagctagacaaataaagtaggcacaatgagttgagggtaaggcaaaccatacatgctccccacaatagaccaggcatctcaacactcctaacagcttcttctagctttttcatgtctgtctcatcgtcccaaggcttcacatccatcagaatagaagattttccacctaaagaaaataaatcagcaaatgtaaggacaattttcacatataaatttctaattgaatgaaatttctggcagttctccaaaacatgcgttcacattatacatactctctttcttcttagaagaag

SEQ ID NO: 82139 - DNA, 1641 bp, Cannabis sativa
actgtagcgtgccttagcattagggcattacacctgacccgaacccaggacccgccccgagacccgaccattaagctcaactaagatcccgggtcgggtcaggggttggtattgggtcaatttatggtaaaaagagtatgattttacacaatctattatataagtcaataccaaacataatattgtactacatattaattaacaattttgcccctgaactttcgacactacctcatcatgtctctttaaatctatggcttgttaaaaattacccctggactttttcatttacaaaaatttagtccttatgttagattctatctcactatcccgtttaaatgctgacatgtctttgtaaattgacaatattacctctaaattttaacaactatcaatcatacaccctccaaataaaaaagagaaaatttaacacttttttgataaatcttaaaaattaatttagattttaaaaaatatattttgaatgaatataaattaaaaaagaaatcaaaattttaaactattaagtgatttagatataaaatagtatattaaaactctattaagatataaaaaagtatattaaaaatttaatttcacaggaacaagtttaagtttttttttttctctaaaatttaagatttgtttaagtaagcataacatttttttttaatttaatttctaatttttcaaaaataatttaatatttttattgaatttctaatatttttttatctttaaaatatgagtttataaatataaataagcttgattttcttttcacaaaatcttagtttgtttaaattatttattgaattttcaataattttgatttaattttttaagatatgtgtttataaataaaataaaatttgaaatatttttttaagaataatttaaattttttaataaaacttaatactctttttttattcatttaatatttttatcaagttttttaataattttttttaactttttccaaattaatagaaaattataatttttaaaattaattttttttaatgaaacgagacaaaatttagtatttatcaatgttcaagagataaaaattctaatttttaacggtaaaagagacaaaacctaacagaagagacataattatgtaactattacattttagagagaatttttaggacaaaatcaagtagtgtcgaaaattttggagacaaaaatattaattattctgtattaaataatactaaaaaacaaaatttgtatgttagtatggtttcccactaacatactaatattagtgggacactatagacaagtccaaatataaaataagttttagagtatcattggaaaggattgagatccaaatcactctaattttgacattttgccgttccattcaagttggcctaaagaacacattttttcagcaattctaaataaataactagggtaaagaataagaacaaggtaaacccaaaatttagtcataacttttttttttctaacaaaatttagtcataacacacaacattggtatttggtacactttcgaaagaaaaaatgtaaagctaatggacttattataagggacatcacgacatgccttctttcattttgttttcactaagaaatcatatgtactttggattagagaacatc

SEQ ID NO: 82140 - DNA, 896 bp, Cannabis sativa
gggggttagttgcaaaaacctccctactttagggggttttgccgcaaataacccttaaaattaaaattcaggtcagatgtaaacaagaaaaaatttattacacaacattataataaataattaaaagaatatttctaaaattatatatttcatttaaatatacagaattcatttaaatccaaatatacaattactcacatcagatttaattattaactttattactaacatatatatatattgttgtacatagtttgttttgttagaacccaaatgattttttttgacaagttcattaatttttttctttggtagattctatttttaaatagagtaactatatacacttgctatttttgttatatatatatatattttgtcaagaagaaaatagcaaaaatatttatttaccaatttaattaatatgaccaaaaaactaagaattctaattattttttaaattataagtagaggtatgcaatttcacaaattaaattaatatgcctataaagttcttacatttcctcattttttatttgaaaggattaaattaatagtcttaaaattacaccttttaataacattacacaaatagacaaaaaaaaaaacattgtttctgcaaaaccataggggatagcagctggaaagcatgtaacaaaagtttatttattaataatttatttttgtttttatttcatttattaataataaataaaaattattattttcattatattgtattgggagaatggcaagcatgtaggagaggtctcactcatcgaggtaaagggtctaattcattatgtggcattcggattaccataatcacccatgcttttagttagagattaatattttgttgatttattcccaaaatgattattaatataatatta

SEQ ID NO: 82141 - DNA, 866 bp, Cannabis sativa
cacctcatatccaaacacaccttagtgtaattactaaactgtgtaattaccaccctagtaattaccctacctagtaattacacagttacttctaaacacacccttagagaattttttgattcaattatttaaaaatataaaaaacataaaaaaaaattgttttcattttttagcctaaaacttaaagtcattttaaaatttaggggttgtttggtttcatacttaaaactgttttaagtttttaacttttaaaaattaatagggtcgcttgaccaaaaaaactgagttttaaaaaattagaaaatagaaaacatcaaaatgtagtttttaattttcaaaaatattttttttgtctaacatattatatattacatttttgctcgcatatccggaccctggaccctagacctcgaaccatggaacccagacctcgaaccctggaccccggaccatggaacccaaactcggacctcagaacatggaactcaaacccagaccccggaccacggacctcgaacccggaccatggaacctagatcccggaccatgacctcgaccctagaccccgaacccgaaccatggaacccagacccgaaccccaaaccatggaacccaaacctgaaccccgactcggatccagacccaaaactggacctggaccgaacccggacctcggacccaaacctggacccgaacccggactggaccacggataaacaaccagatccggatctcgacccaaaccttggctcagactcggaccctggatcctgaaccccaaacccagacccgaacccaagatctagactcggacccgacctgacccgaacctggaacctagaccccggatcctggcctgatcgaga

SEQ ID NO: 82142 - DNA, 711 bp, Cannabis sativa
atggtgttggggcgattggggttgtgacatgggatgaggtcggtggcataaaaagctctttatgctactaaagttcctctgttgtcggtcactcatggggaactggaggcgattggtaaggatgctgaggttcttcgcaggttgggtattaaggaggctgatatcctctctgataatcaagttgttgttcaggctcattctgctttggttacgcccttctggaatgttttctttttgttctctaaggctctgaccatgctttctagtaagaagattgaggtcttgtggatccctaagactaagaactcttctgcccatgtcttggctaaatggggattgtttaacaattgtaaggggtttcttaactgttgggaggtgacgcctgctcaccgagatcttaaatcattatgaataaaaagtttggtttcgtagcaaaaaaacaaattatttaccaaaacataagtagatatactaatcaattattaagtgtcacacgcgtatgatattgagcaccataataaaaatgctaactaattattgaatactatatctttatgatattaaatattttaaagtaacatgtaacaataatagttaaaagaattaaaaaacaaaaaatcataaaagatcaaaacaacttgtggaaatgcatttatatatatatagtagagagatagtagatatataatttatatcttactattataaaag

SEQ ID NO: 82143 - DNA, 1189 bp, Cannabis sativa
cgtgagccatgagcttaatgctcctttcgatatcagtgtggttggctgacatttgagtcatctcttagtgagatttgtgcagttcctccatcggacttgtagggcttcaacttttgcttaaccttaactgaagtttccccttaaaaaaactattaatatgagtaatttataaaacaatagtacaacaatcaaattttttatttgataaattttaatcacatagtatttattcaattattaaaatagaacaacaaggttcaattgtaatattggcatccttcataatgggcaaacattagatcttcctcaattatattttctttgatgtaaaactaactttaataaatatatatatatatatatatatttgtggttgtttttttctttccactcatttttctttgttcccattttgcactttcatttcttttatatttgttttaacatatttaacatgatatattttaatattactttttctaatagtgtattatttttttaaataatttttctactatgtacattttttaaaatatttatttattcttttgcattgtttattcttttttctaaaaaaataataataattggtgagttagttattactttcatatttataaattataacttattccttttttgaaatctttctttatgtttggtagaggggtaagaaggagggagagagaggagtggattggaggaagagggatattgagaaattcttttgtttggcaagagagagatagagagatgatagatggaaggagagagagtctccctcaaacacaatttttaatccctcctaacatggtgaaatttaagagaattacaaaaaattgtataaaagatcttttctactcttaaaaaaataatatataattatattaaaaataataaaatagtaattttaatatttattttaccatactccatgtatattcctaataccaaacaatatgaaggagaacaaatatcacttctatttctcatactctccatccaacttactctctctccttcctaccaaacatagcctaaatgttcccgtaaaagtaatatgttaccatctaaagggtaaccaattaaccatattataagtgtttaccatcaaagtaatttattactataatagaagtaaccaattacttatattttatatcatcataatacttgttagaatattagg

SEQ ID NO: 82144 - DNA, 1849 bp, Cannabis sativa
gtgctcacctattccaaccagtaccgccttactaaaaataaatgttctatcatcaaaataagtgttcatgctgtgttgagaatttatagtattacataatcaatttacaacaattaaataatattttctttgaaaatcatgaaacatgatgatgatcaaaatactaatgttttttggttgtgttattattgagtaatttgtatttgtgtgatgtagatatgatatttggtttgtaatgtggatatatttgaattttattttctatattgaatagttttttaaaagaaaaggatgttaaaagtggcattttgctaaagaaaaaaaaactatacccaataagcctaacttaacctgtacccggtcctaactcacccagacccatcccaatccgacctaactcactcgcattcgaaacctaaaaataggcgagtatgatatacaactctcacacacccgaaaagtaagagtttaaatggctcgggtctaatctgatccagctatgatgtgacctgatctgaatcatgtaaggatccaccccgccctggcccactagaatcagagactccaatcggatcaaattcgacctgattgatttggatccgatctaatcttacccgaccttttttatttttttatctaggcttataattttatatctatatttattttgtattattattatttaatacaatactatattttcaatagattgtgtaaaattaatatattttcaataaactcgaccctaataccatctacgagtaaggtccaggtccaggtctttcacctcaggtctaggtctaggtcctgggtctgggtcccgggtctggttataggtttgggtctagatcccgagtttgggtcgggtcttagtcctaatctcgggcccaggtctaggtctaggtttggggcctgcacccaggtttgggtccgggtctcggtcccgagtttgggccctaagtcttgactcgagccagggtcttaggtcctgagtcccggtccagggtctgagtgccagtctcgggtccagatttgagtcctaggtctgggtctcggtcatggatgtgagttgcaatcccaagtctgggtcccgatcctgggtctgggtttggggttcgggtcccaatcctgggtctaggtttgagttcgggtttggggtccgagtctaggtttgcgttcgggtcctggtctgggtctcagtctgggtccctagtcctgggtcctgggtcctgggtagggatgcacacgaggtgagaaattggcggagagtgcttcccacatccccatccccatcaccattaagacttttaatccccatacccacttattacccatgggggatggggcagagaatcctctatgtggggcacagggggggcggagaatcccctataataaaaaaatataaagtttataataaaaatttaagtacataaaagtattaaaaagtaaaatattacacattagttgttattcaataaactaatattatccacaacacaagttaaaattcaaaaaaaaaaaagatattaatataataaaaaaatacaaacataaattataaaatataaaatattactagaaatataaaataaaatactaaatgggtcccagtcagggcggggagtgtgatttccgtcccgcctcgttacccatttagacagggaattcccacccccattaggagcaattcccttcggggccccatccccatgaggaaaatgtgcatccctagtcctgggttcgggttaggatctcaagtcccaggtcctaagtctaggttcgggtccgagtctaggttcgagtctcgtgtttgagtccaagtccaggtgtcggtcctaggtctagg

SEQ ID NO: 82145 - DNA, 910 bp, Cannabis sativa
tgactgaaatcgtagtaagagaatagttaagaaaagaaatggtaatgttaaaaaaaaaacatgttttatatattgcttttcaagattaacatgctagtttgttacaaggatttttttttattattattattaatatacagcaaaacaaatgtaaaagaattacataattaagatttaaaaaattattttggtttaaaaaaaaaataaaaaacattcctttgcttcaaaagatttaaaatatattttttttagtaataataagatataatacttcaaatataaaaatagtgaacaataataattattattgtaattgtaagagcatctctaattatactctctaaatatattagagtgagtcttaaaaaaaaaaatgagctccataaaatgactatggataaataattctctaaatgtaagtaattccatatttttttaatattattttaataaaagcactattattttttattattattttaacaaattaatttatatttaataaatttaaattataaaatattagtaaaatgatcaaatgctaaacaaagtaggaatcatggttagagcaacaataattaaaccgttttagctattttagctaaaatttagataaaaatagagcagcgttaaagatactctaatagtcacacaattttctttttaagaaattttcaatatatattaaactgattaaaaaaaaaaaaagacatgtgtaataaatatacaaacttcatcaaatatcactaaaaaatatatcaattaaagttacaagggcaatagactccctgtaggcacaatcagctagtgaaacagaagctctagctaagtggtgagcaacacgattcacaaatcgttttgcccattttactaacacattttgcccataacattttactttcacagtttc

SEQ ID NO: 82146 - DNA, 1011 bp, Cannabis sativa
tgtaaagggttttatttagggcacaaaacccaacaggatagccattcccttgcaccaggtgacattgggggacgaccatgtatttttgggagaaaaacaacaccacttaggtagcctctggttagctaataaggtgatgctcctccttggaatatttgagaataggtcgttctaaggcctatttttaataaattaggtcttggaataagcgaaaatgcataggttaacatcaactgaaggagtgagaattgaaatgactttgtattgaatgatcacttcagacaagtgtgttatccaatttcttgcacaatgacgtggcagaatactcaagtgacacgtgtcctgcatttcctgtatctgggcagaagtgaatgtgctaaacagactccatattgtatgttagcatgtagacgtttgattatcagagcaagatgaaagacagatcatccgaggaggtataaatctggcttgccgaactacttatcaggagttaattactttagaatgatcttatgaagtccagacacaaagccaatccctacgatcatgggattgaattagagaaatatagcaacctattctaatttcctatttcgtgtctcataattatataataaatgtaatttcctattttatatattgtaagcaaaagggaaacctcccctcatgcattaaggccctataaatagtgatttagcctcactgtgaaagggatcaaaagaattacttcagagagagatctaagagaattactcagagattcattgtaagagcttttagagagaaaaaaaaattgttctttcttaccacactcacggggctgaacctctttaaaatttggtgttctttattacttcgtcatttttgctctattttaattacattcttaatcgcttattaactgactaactgttgttggctaaaagtgaggtcaatattttggtgctctcattgagagcaaaaacccaagttttctatttgtcttaagttttaacaggcgtacaggatggt

SEQ ID NO: 82147 - DNA, 884 bp, Cannabis sativa
atttagggagcaattactttaaaatatattttgtgcaatagtccttccaatctgatagaaaaggatcacatgatcctgaactgatcttacatgggatcgcgaaacccaaattggcgaaatttccttaatatttgtagtagtcactcacaaatatttaataaaataatggcggcaacaatattttatcttacgattttgtttcagttatacatttaagtgtcaattttaaaatacatgacgacatattattggaccacgtattaaataactatcatttatcctattttttaattgactatatataaatttgaatagaataactaaattagttgtgttcataggtatagcttagtgattctacattttctctcacaaataggagaacctaaagtagtttttctttaaataaataaaagtgtttttttttttttttgagaaaacataaaaacttttttttttatttattacgtggtccaataatatgttgtcacgtgtttttgaattggtacttaacgaatttagttggcagttaagggtactactgtaacaaaatcgtaagatgatgtatttttaccgtaatttttttaataggataatagcgacataaatacccaaagtttcaaatttataagtggcataaagtcaatatttatttttagtggcataagtacccaatatttgtaaaactgtaattttctttaattctgccagtacatctattgtcctcattttaaaatttgtagtaaaatgatcattttagattatttattatttatattgtcttttgccacattaaaaaatcaataattttttcttcatattttatttttagtattagaagcaaattacttaaaaattatggtatatctatattagttttgtta

SEQ ID NO: 82148 - DNA, 923 bp, Cannabis sativa
cacatcacattgaaccactgtccaattatcagggttgataaccagagtgttgctgcacttgctgcaaacccagtgtttcatgcacgctcgaaacacatcgaaatagacttgcactttgtgagagctcaaatccttcccaagcaattatcagtcagatatgtgcctgctcataatcaagtagttgatcttctcacaaaatcattgcctacagatcggtttaactatcttaaagccaaacttcaaatgcttactcttcttttcgtttgaggggggatgttactattacttagttagttgattaggtgttagttaaaggtgttacagttagttaatcttttctattataactgtttctttaacagtttgatcttgtaataattgtgtatttaatcgtggttcacattaataatatgcaagtcttttagtttcacgttctttcttcttcaattatgtcctctgcacctttattgcgttacaggacgacacttcataataatgttagatactttagtaccccataacaatattattttcttaaacattaagttttagagattattttttttactatataatgattaagtttctttattttttattaataatattgttgctagttcaatatgagatcatgtttgtattcacatagatagattaaagacatgagatatatgtaggacataaagaataattaatttaagcagttgtgtaaatatagtatatttgaataaataagaaaatagagacaataaagctgttgaagtcgaaatacttcaaagagtagttgaaagtaagagaataatattaatatataaaaaaaattatttctaaatttgatttattttaccattcacatgtgtagtatgtatctattcacaatatatataactatcatggttatatatataactatatataataaa

SEQ ID NO: 82149 - DNA, 818 bp, Cannabis sativa
aagggttaataataatctattcaaattgtttttttaatgatgcttattgtatggtacttcatattcattccttctcattatttccatttgcatttagcttagtgaaggattcacctttcttagattattaattatagaaaaactaactccaaaaatgaagtcattaataatgagaagcactctctattgctgatattgcacacaaaatggaatgtagaacaagaacatgaacaaggatttgtcaaatatattaatggaaaaaaaatccatttgtatcattcttagggacaacttcttttagcaccagtgtatgcatttttttcctaacaaattgtaacaataagtttggttagttactactatctatcttggtgtctatacttgtatgattaggtgcctaagcaataaataagatcaatgaagtcatcttttgtgcagggaatatctaattcgaattcttcttcggcttgacttaaaaagtcttggaatgaaagctggttcaagtatgccacagggagtatattttgaagttgaaaaatgcctttgagtaatgagttgcttgacaactaagctagcaaagcgaaaaatccatgattgtaaaattttgtaaagaaagaaaaaatggtcaaacaaagaatctcagaggattgtaaaagaaagcttgataattgagaaactcattaattggtatgagttgagtatatataatcaatactcttgataagttttgtaggacagatatgtctacttggatggaaaataaattgatgaagattaaagaggcaattagttggatggggtcatctggttagaggaat

SEQ ID NO: 82150 - DNA, 692 bp, Cannabis sativa
  modified_base (644)..(646): a, c, t, g, unknown or other
tttttttacaaatttttaaagggtatatttgttttttttttctcatttttaattaataaaattaaaattaaaataaaataagttaggaaatagaaaggcattccttataaaaatagggagagaatttttttctttattttttccgtaatttgtataagctccactactttctccatttctaaaatttagtaaataattgtatacaattgattcttatttcctttaagtaaacatgcccttaaaagatcataacaattgtgaacaaacatccacttagtcatattatggaccataaaattatatgtccttacactactagaaaataaacaactaacaagagatgaagttctttgacaatgactagaataattcttcaatctcgcatttacagtccactccattgataactaccctaaaattgctctccataattacaaacttgcaactcttttccactgtcgcatccaaagtcaaacaacaagtcgcaacctcgctacaaaaagcgtcagaaaaacccaatcatacagtagtcacccgattaaccacaccatgatggtctagtgacaaccaaccataatacacttgttttccatcctctcttttacatcatagtttaatttaagttgttgaccgaggttttcggnnnccaataaaatattataagattatagagctgtaagaaaattagagaa

SEQ ID NO: 82151 - DNA, 777 bp, Cannabis sativa
ccaatttaatactagtgggtccgtccctaattgggattcactttgaatgttaccaatttttttttttttttgaaatgtaactaattttgttatacaagcatattaagtatatattaaacaaatctaaaactaaaatccaataaaatcccatcaaaatgatcaattatttttcaaaaacataatttattaaaaaatatttttgagattaaaaaataaaaatataaaagtattactaaaggttaataacaaaactacaattattataatatttaattttgatattaccatctgaactgtatattgaactcatgagttttctaattttttttttgtgtattatttattttttcttagtattactaagaaaaaatacatatattatttatttattagtattactattgttttgatttttctttaaggattttttttttctatctttacatttctaaacatgttttttttttatattttttatttattttttttatttttaaaaaactaagcaacctaaatcgcaaccaaaatacatataacaaccacgtagaaagtacttgaaaaactactgtagcaacccaaactgtaaatttaaaaaacaaaagttaaaaaataatatatagagtaattcttttttttcttatcctcactcattgtaattttttatttctatttggagtgaatgtttttatttgtagacgagtcaatcatcaacgatcaactattgtatgaaaaagtaatttttgttctggccatgaaattgatatttatatctaaagt

SEQ ID NO: 82152 - DNA, 768 bp, Cannabis sativa
ataaataaatgtaaatataacaaaaagtcatcaattccttctattcattatcacgacgtgtattatgatggtttttttaattattattatttaatttgtatacgaacaaaaaaacaaaatagaaacaataaagtattgctttgggtttggatcgtgtctaacattttttatatatagtgtattataattaattagtgatattttttaaaaattatttttttaaagttagatagtacttgatacttaattgttttttgaaatcatcatcaataacatacgatgcctattattatttatatatgagaaatactaaatcacaccagtaatatttagcacacacttatgtatcaatatcgttatttgtttaactaaatattaagtcctatataatttaatgtaataatttttaagaaatattattagctagtcgcaagacgacacgtgcataataataatttctttatatataccaaagttggtaaaagttggaaaatgtttagtataatatttaatatattggggagagcttattaattttgaaaatgttggattttctttctaaattgtactttaatagcatgatacccaaaaaaatattagtcattagcaatagtctaaaataatacatcaattatagtgcacctaaatcaacgttacctaaagacacggcaatagataaaaacagatcattgagtcacaatgtaatgtagttattatatataaagagaaatcagaaagcatcaaattatatatataattttttttaaa

SEQ ID NO: 82153 - DNA, 963 bp, Cannabis sativa
cccaaataaaaagtctaacataaaaaacccaaagtttccaaaaaaaaaaaaaacttgtcgacaaaagaggtactcactcttattttattttatttactttatgtttcaattgtgtaatttcacaatattaaaaggtaaatgttctatcatctaggttttacatgacttcaacactgaagatcaaatcgataactacatgccactttctcaactagatttgtcattctccacaacatcgtttaatcttaaccatgtaaaatattttgctatgtatttttttttattaaattattgtataaagaagtatttttatggatagatgatattatatttatatttatacaagttggtttaacacataaaaattcaaacataaaaacaagtatgattgaattactcttacaggtatattagttatattaacagttataaaagtataatttattttaaccatttcttataagattataattgcacatcgacaggttgatcagtctacatttattgaatttggggggactcattttttttaaaaatacgatttcacgtggtggatttccaattttataaaaatcgctaaaagatttttttagagaaaaaattactaaaagtttgattgacatatttagaatttaatttatataattgagattatataatatcttatggtggtttttttttttatatataaagaatataaatgtttctctaatacgacaacgattctaattaatggtgtcattatgcaataaattagttataaaatttaattgttttagtaagaaagaattgatataaaaaaataataactatactatggaaacataagtgatttaagaagtctataatattgatttaattaatctataataatataactacacatgattattttttattcctgcaaaatataattacaagtaatttagctaaactattggtgagcaaagaaatagaaaaaaa

SEQ ID NO: 82154 - DNA, 1204 bp, Cannabis sativa
tccttgttacactaaaatatggtttcagccgcaaattactcgtgtatctattacttacaaggtaactacaatgaaattctcatactcatctcatcatatattagccaaccaattaattattaaaataataatatatattttctaaaaaataaatatatccaatggggccaccgctccccactacccctcattccgcctctgcatataatcaaaactatgcatatagctttaaccacatgtcattaagtactaaacaaaagtattattaaatagcttcagctattatatttcttcgagttacaaagtacaacaaaggaaattatttataagtaaaattccctcttcttttttcttggtaaacatatgtgatatatatatttgaaaacagtttgcctatacctcatcctacgagctctgccaaagattcttttgttgcccaaaaacgtgatataacatgtctgacaacttttttcaacggccacgattgtcaagattattctcatcttcatcgtcaccattgatctcactcgagctaacagccatgatgaaatgaaaactcggagagaaagaaataagaagagagagaagcaagctagctatagagaagaagaaatgaatggatgaaggtgggagagagaatgaggtaagagaaggtccttgtgattttaaagggaataaaattaattaaagatgatcacagcagcagaagcaccaccaccaaccgaaacaaaaagaaaatgtttattctttttctatttcttttctttgagtttgtggagtgagtatcttccaagcatatgctttggagcattaattttattgctatttccttttcttttccttccactttagctacttttgtttcattatttattaatagttatgagaacattgtgacatggatgtattatgaaataggtgtcaaaacttgaaagttgtagctcacgaggttctcaatagcatttgtgtcgtgtcacatttatttatctattgtatcttgcaccctctataaagctatgagtcagatattattaccctgcaaattgcaatatatagaatgttggtctgatttggataaagacaaaaattattagccgtacgtagtaagattattaatttgtaattataagaacaaccataaaatcaccatcttattagcaaaatcataatgacttgcgatgagtctatttggtaagagagactt

SEQ ID NO: 82155 - DNA, 2185 bp, Cannabis sativa
aaatagataagcgatgtaatcagttgcttctggctaagcaactcccatgaccttcttattggctttttcaagcttgatgaaactttcagctctgtgtagcagctctgaaatgacttatacagatttgagcttcaagtctttccataatggactcattactgttagtctagctgtcatttccatgaccttgacatattcactgagtgtctttatttgtgtggtggtctttaagaatcgttgtaataatctctaagaggtttgtcttcttgttgcttaatgcaaaacaaatcgttgggctcaattagtttgtgccttgatggggagaattggtgattaaatacttgcttaagcgtaacccaagaatcaatatatcatggggaaagcttgaaataccactattgtgctacttccgatagtgtggttggaaagactcgacaacgagaattgtcttgaatgtcttgcaagtcagtttgtactttgaagttgtggatgtgaaagagagggtcttcttttctagtgtatggatgcatactggatttctgaactttgaagggatctccaacgacttgattcaatctgagagaggagaacaccactcttgatctaatccgtactctgttgtctttagagtagtgatacccttaaccagagcgacaagggtgttaaattcggagctacacaatatggtgatgtgtgtatcaattggtcgcttcttgctgatgttgttatgcaagctcttttatcttctaagtccatcaaaggcattgattaacttaggcctggtggttgtttcctggtagtgtagccttgctggaaactgtggggatctatctcgtatgatgatagaattgtctcttgagtgtttgctttgtgagcagctgctcacagtagtatattgactatcccttttgaaatattcttcctcagagtgacatgtgtggagggagttagaccgattactcaagctcaacatgtctctatgcacccatgggaagtattcgtactgttggccatcaggaccttgggcgaagtacctacaccaagcaccttgttcatcacgatagtattttcgagtgtggagtagttcattgaccttcactttctgaatctcatactcttcacttttgtggtagagcttttggggtcttcctttaagtctagttgcatgtccttttccctttgccaggtcacggggtggtctagagtcattagacttgtgaagagaatcccatggaggagattagtttcttgcattattcgacttgattcgaatagaattgtggttggtcctatcagctgcatgtgatggacttgtaggcctacgatcttaagtttgagtccttttggacgtttactcctagctcgtttccctaataggagactgctccaaatcaggtagagatctcatagatccatatttatgagtctgattctttttgggcgcttgcccgtagtctgattccttataaggaacctcagtgcctattgcttactaagtagtggcgtggctaccaggagtggtagtgttgctttgcatgttcatggatgattgcttgcttgaacttatgaatacctgtaacgccctaatttatagggacgccatgtgtgtgattttataaactagtttaatattaatagattaattagttattaaaaaaatgtgataaaaaaatgtgataatattaaagcttgactaaaacaaaacactaaaaacgaacattataatagcatacaaagtgtgttccgaggatccctattataagaagtcttacaaaagaactatatatgaagatgcctcaaaaatataaaaccaaaatatacaatagatacaactcaaaacaactcctgacaacctggcacgcaggctggtgagatcaatatgtacattgttggagaagaatatcacctcatgattgatctagcttttttttacctttacctgcaccacataggacccatgagtcacaaggactcagcaagaaaagtaataataataatcatctagtttattattcgaatattatcatttatacacaatcagaatcaaatcattatgcattgttcataaaatgaaatccagatcactactggcatctgccatgaataagcatcagtataccgatatctagtaacacaaaattattataccaataataggaatcatatttcatttgaaaatataaat

SEQ ID NO: 82156 - DNA, 1328 bp, Cannabis sativa
  modified_base (1303)..(1303): a, c, t, g, unknown or other
ttatgttgagttaaatatattatttaattataaaatattactagttttagatgattaatgttattaaactatgcacttactaacttatttgtcaaacataaaattaataaaaattcacatgaaattactacttgacatttaaactcacactatattttaaaataaagtataattactctaatatataattagaaagttacttttaaactcacccaaaaaaaatataaaaaagtggcaagtgaaggctcactcttccttatcacaactaatggtccataataaattaataattccatttcaatcagagaccaattaattaaggttaatacttatttggatcatatgtatactttgtaagaggtaccaagttgactttttgttctataaaatgataaacttgagctaattttttgcattttttttttaatataaaccaacttgaaaataattttcagtacgaataaattcagaaaatatacataattttgttataacaactctagataagattattattaacttttttttttgataaaaaaatcagttcaaggtactatattgtattattttagaaaatacatagtttaatttattatttaacaaaataaatggtccaaccaataactttgataatacacagagtttaaaataatatttatctattaattaagtaacccattaatttggcttaaaacaaaagttaattaagccatttaagaatttatatatttatttttcatcaagaaaacactagaatgttaaggtggtccaattaattatcagtgtatcatgacatcattcacacatgtgacaagaaaaatatgatcaaatgtagggactctgctctataatgtgtgtgaataacatggatagttaatgagtcaaaacatgcattattgtcttagtggacatcaaattggtaaataattttttcataattttatgtttttaaaaataaaataattaaaaaaatttgtatgttccaatcaaggtaatttcacttttctctcaaaaaaaaaaatgtgaaattactaaattatagtttataattactcaattaacatttaatttgttgagtttgcaacaatcttgtatgtgaaataaacatgattaatttgttatggctgagaagtacttttcaactgtgtagtttcatatctacatagtcttaaaattatcatatttaatttttcccacactataaaaaataactacaattagtgataagtttttaatcataatataaattttttgtgactaaatgtaacttttagtcacaagtcacaacaaaaagttacttgtnactaaaacatagtatttagatataa

SEQ ID NO: 82157 - DNA, 1762 bp, Cannabis sativa
  modified_base (34)..(35): a, c, t, g, unknown or other
cgggcagatattccaagtggattccacgtgtcannattcatgtgatgccacgtcagagtgcaaaaattgagataacaagaatttttgtagaggtttggctagtatagaactgttcaccccttgtacatagaaaatgagtatttataggcttacatgtgggcaagggtactccctttacccacatagagttttgtactactgcctgttgcaagggtaaaaaaatacaactgtaaatctgaccgtccaaccttggagaaccatttggatgaaacacacgtgttgcttaaagatttctcctttgcagaatactctctagacaagtcgttgggcaaaaggcatgcctagaagtgcatacgagcactaccatggcctggcatgggggacaggatctgatgcggtgtcagaaaaaggtgtaaccgtttgtaggtcaattttcatatgaagctgacatggccatttaccttgatgtagcggttatgatctgtgaccagtccatagaggtctttcctcaaaagccatttaccaaatcgtgctccaggacttctcggagctgaggacaaatttggttcttctgtgtcctggagacgctacttgtgatggggatggctctccccataaagtatccatcaaacccctcctagattaccaagatgcctctacaaagaacctttgtagttatctctgctaatccaggacgttaacaaatcttcttctctaatcatgccacgtggcccttgctcggaaatacgaataacatttacctccaagcttttgggactctccaagttcaaggagcttgtaatctcctccctggaattgatcattggcacgtgctaactgttagagttgtggacgcatctttttggtgaactgtaattcgttaagggcacatggaacattgaggcctgccaacgaggcgatcatgtgacacattaaatggcatagttgattcattacatgcgtgttggggtgcgtctgtcagaaaaaggtgaaattgatggcgaggtgatttgaaaagacccatccttatagcttgatggacccgaggaaagtcatgacaaataaatgcttctatcccttccaactccccaactgttggatctaatgagagatctagatcgtcgatttttaaaaaggcaattttcttcttgaattataaattgacatcgacaactctctcttcactttttgcacacttctaccagacttcgagtattcccctgtaaatttttctctcttactgttccttcgccattgcatgcaagaagtgtgagagtttaattcaataattgctcaatgttcgcgcgaggcttttttcagacattgatcctcttcaaatcgagcagcttgaccccttgccaaacgaagggttcgatttttagatcagttgcgaccgccttatctactgggttagaagacttcagacaagattctacgatagcaaccgatctcctttccactcaacacataagtacaataattcctggttaaacttttattatttcatatctatggtagaaatttcttgttcaagctaggactaggactatttatatgttgaatagcgaagtaggctatgtgaaagaaatttcacacttttaggataaatctgtctgagaattgaattgtcgtgaaaagcggatagtgttgtctagaggttttcttttttattttagcttgttgcttcaaaaagtttggttttatcgattagggtacaagtctggaggttttcttttttattttagctagtcgcttcaaaaag

SEQ ID NO: 82158 - DNA, 867 bp, Cannabis sativa
tccaattaaaccaacaaaattatttggcgagttaattttttttttaattagatagattgcaattaaaaatttacgatttaatatttatattaaattggtaaagatatattacaatccgactaaactaatctatgtataccccttcataattaatataagtcgcggtttcatatggctaattttttttattaacttttgtataaatagacatagaaaattagagacacaaccataagggtcaacgtagattagacgcttattccctctcgaaaaaaaggagctaaaagcacacaagaggtagcgatggcaaagccatccctagccgatgggagggaaaaaaaaaactaaccttaagcgactaggatttgtgaaattgtgagagcccctttttttatctcgagaaagtgagaaacaaaaaaactcttatagatagatgctgaacaaaattttggttgtactgtttttatcattgcataatatatggatattaatgatttattttatactttaaattaaattattagtagaatataaatattatttatcaaattttaaaaagtgcagaatatgtctactactaactaattttaaccaatattttattatgaagtattttttgtataatgttatcgaagtgagcttagtaaaagtttcttatgagaagtatttttctttttagagtacaactccaatcaaaggatatccatacatattatatttgtatatattttatatcatattgtcatattgcttgttactaatgttgataaaataggagaaaagatgcaatacagttttattatggatgcactttaataatatcactatgatctctttattgactagctagttttagatgtaagcatt

SEQ ID NO: 82159 - DNA, 1197 bp, Cannabis sativa
ttgatcaatggaagtgaataaattctctattttacccctttttgttttcttatccctctctttataatcacatgattttctttttctttttatttctcattttccattttcctaggctttctttgctatttttcattttttccaaggctaagtttctaaatttatctcctcaaatttttcatccttaaaaattcttcttgaatattaaatttattaaatttaaggacttccgtccaattttgtttaatcttgttgatgggtgcatgccatagatagaaatttagagggcacaattgatacatatcaaaatttaaaggcacaatttaatacatgaagaactgccatattaaacatattttaatagtttgaaaataatatttaatagctttaaaaatttaagggcacaatttaatacatttaaaagttaagagggtagagtaatcctaattaaccaaaaaaaattcaaattttacttagaaatggtaccattttttctaatacatattttaataaaaagtttatatagatcgaggctgtaggcgtacatctagtccaaatccaatcctaaaagtgaaatttctctaaataacgaggcatgtactactttttgactttctactttcctcttcccagtttggttgctgccaaacaacctattgctatagatatatgacttcgacaagattaaaaaaagtgtggcggtactgggaagtaaatactaaagtatagtattggattggatgcttatccaaaaatcaattggatatttgtatcccccatcactctatcctaaaaattgtacataatatattaaatcatgagagaaacatccccatacaaatataaatgcatagtaagaacaagctttgaccctgagaaataatatttatgtctcatctaaagaggatgatgttgaagagtagttagaatattggcatgtgaaaatgaacatacatgtgatgttcctcctaagctcagttttccattatgatgattatgtgaagaaaagtggtatagttttttgttgatgatattgtaaacccaacactattatatataatggactatctgtcatgcataataatctcattcttctcacttgtttggttaagtaattaacacttattccttgtttggctgcttcatttcaatgcaacctccatgtgcaatattagtatatgctaccggattccttgt

SEQ ID NO: 82160 - DNA, 1037 bp, Cannabis sativa
tttttcgtctcattcaagactacaaaatggttcagatttctgatctaggtgcaatttcaaaacaatgaaaacaaaataatgaatgtcgtataaagaaaagaaagaagcttttcaatgaatgaaaaacaaattacatatgaaacagaatagtagaacacattaggttctttaggaactagtacatgggggggaacttttatattgaacaatatatatatatataattgtaataagtgcattttttaatagtaaaattaaatgaattattacaagagtacttaacactgagaaatgtttccctttgtaatgtaattggacagcctcacatgagcagtggaatctttcttctttttcttgaaatgtttagatgcagctttaagcaccttattccaaacctgtaaataagaccccaaaaccaaagtagagacttttaagaacaattgacttattagcacaagttggagattttttttctttccttctttctaatttcataaaatttacgaggacacctccaaatttttaaggtgaaaactttataaatcaaaatttcttacctaaatctcaaatgggtacctccaattgaaaatataacagggaaagaaagaacaaaaataagaagagctagagcaatgtacctttctagtaaggggattgcaagtgcctttacacgaaggagttgaagagaaatcagaaaccaatttcttcttaaagctgttcttgttcttcgttttgctcttcaaagcactgagatttaaggcaaaacccgtggtcgtcgtcttaatcatcttctttttcttcttcttggaatgaactttttgaaagctgcaatttgggttgcctaactcaaaacccatctccagattgaggtttctgggcgaagcgaaatccgaatcggagtccaaatctgcatggctgtaaggtcgagggaccaagggagaccatattgagctctgagaataatcgaaatcgaaagcggaattgtctggaaacttgcagagaagctctttggacattaatggctccaaatactccac

SEQ ID NO: 82161 - DNA, 2117 bp, Cannabis sativa
  modified_base (1111)..(1111): a, c, t, g, unknown or other
accaaatgacacattaaataagtggtgaaactacttctgtctctttattgatatttaaatgatagatgattacagtgaaatagagttttatttaagacattaagcccaacagaatccagcagtgccgcagtcgacaagctgtggcgctcaaacatggcatcagtacgcaactctacatatctaatcatggatcttacaaactcacgaagctcttcgtcagtcatataatggagctctcaatgaaagcactaattgttagataatagtcctcttcgagacatgacaaatctccaaaatgcactcttcgagacagtgccaatctcccaattgaaccaaagttctattttctcaatcaatccccaacaatagttacacaattacatatttatagacattcacactatttctaaattactaataagcccctatagcattttcatagtctaacacacgtagggcctcattttcttggagcgcatcatgcacaatcatggatctgattggtgggcgctcccttgatggacatgaggagctttctcagtcttggacttgcccctcatcttctgggataggtggcatgggacacttttcttggcgcctagaagttccctctccatgtggttgtgtagggacaaaggtccctataccaaggggttgattaacttcccccttgcgacttcaacatcttctttaaaaaatttcctcctggtactcatcaggattgttgtgaaaaaagtaaattaatgaattttccaaagggaaaataataaaatctccactgcggcactctcaatgaaaacaccaaattgtattgagagcgctctctaatcctctcaatgaaagcaccaaactgttggcgcggtttttcgtcaactgatctaagaagatcataaaataaaagaggaccacggtgaattaatctgactaataaaaccacaaaaaaaaaataaatgggcacccggaatttatagtatttcaccccccatgtctcgatggtaatggggctacgtaacttgtagttttattgattagatccgacataccagagttatgttctcaagagtgtgtggataaaagtacaacaaaggatttctaggtgaaatcttaatcnagatttatgaatataaggctcatgggagacttaatattcatgaatctgatctaaattaaaggttgtaaagttcttgggaacaataaaccaataatttgtgaaaaaggtgtgcatcaattgtgttttgaagtttggtgtcgcctgagtatggtggacttaatgaacaagatgaaggaagcaatgtggtgtttttggttgccttttagtaattttctagaagaaggttttgggagtagaagatccaaaagagagaaaacggtctcaaaaagaagaagccaaaaaaaaggtccccttcctagcctctacttgatgtatatataggctagagggtatgttagtgatccctcatacattaggataactcattaacaaatcccgtataccactcatttttatgaataaaatactacaaataaataaatatcaataacaatctccttgtatctaggtaaatatcccaccaatattggacaattggttattttcgattgacgatgcaccaatttgaaatggagtgctgaatacatgcattttggaatgctgattcttgcgcacaacgccaaatgggctgtggcagagtgctccaccaaccctcgcttagctacatttcccaattctcgagtaaaatgcattagctttccttgtaatctaattttggacccgataacttcaaaattgagtcatggttgacacactttgatccgtctcaaaattatcttttcaacacaagttgaaccaggtcgtttggataaaaagtaagggagctatgcctaattactgaaggtagtttatgctgtcttgtaccagttgcgagcactgccatggccaaatggcagatgtcggctatgcatgttctcggaccctttggggtgtgttttgacttttctttgacggtgagtcatattttggaggtttcgagacccaaaaacctcatttcgacgtccggaacccttcaaagtgaccactgccattagttgggtcaggataatggcacaggtcacccatg

SEQ ID NO: 82162 - DNA, 823 bp, Cannabis sativa
cattccaacttatgcaattcatggttgagggcggtgttgctgagcaacatccgccaaaatatcagtgaaaagctcatctgaatccgaggaagtggaaacatgaggagcagtaagctcattcaagcctgaattacccgaacgagtggtaggatcattggatcgacaacgcttaaggactgatcgaagtgattcagcgtttagttgtcgtttgaacatcttattgggattgcaattctctttattatcattagcaatgacaatgcttttgcctttaccattatcccgtgggagttggttttgattaactatgttggttggcaaggtggtaattgcagcaggggtagtgaataatgtagagttgagtgatgttggcacatgtggtataggaggattaacggtgatatgtgatgaggatgggggataagtggcaaatgggaatgaaggttgaaggtaagagggaatggggagagtgactgcatcattgttatttgctggtgtagttgtgatatttgagtggagattagagcctgtaggagatgattctgatgttgggggaatactatgtcctggagttgtttgttgtgatgattccccaatagttaagactgcaggaaaagattgaggccttgatgacacttgtggtaacacggcagtaatagattttttggctaatcttgtcatgagaggccaaacttctcccttgaagaaatcagtcctatatctattataacccgattgaggaagaggtgagcctatcatttcgggtccatatgacagtgagggatcaacaccattgtacaaattttccaagaaactatgacag

SEQ ID NO: 82163 - DNA, 930 bp, Cannabis sativa
ttttccgttgaaaaaaatattatatattaaatatgatatattatggtgtattaaactaatctaaatatgacacatcaatttatttgagagtattttaaagaaaaaaagctgtctacatggttaataatggttaatagtatttaagaaaattagttgattgagttggcacatttagattgatttaatatattatacgacactaattttttacaagtgatcttgattcatatatggtgtagtaattttttcttgaacaaataaaggtagtaattaattgtatcagtttatccgtatagtgttaaattatatttaatattacatttttttttatgtaaaattataaatagtattaatttttataagaatataaatatataatattttactataaattaaaatttcatttatataattatgtaaaaatataatataatttaatacaatataatataatttatatatattggatggagaatatatttttcatgagtgtgatgttgtattctgaagtagaccacaaacatatatatatatatagataatatatatatatataactcattactcactcatctcatcacaaaaattaatttgattatgtcaattaataaagatggaaaagagtgttatatcattatcattataacaaaatcaaatttgcaggctatcctatggtatatatattagctaattaattaaaatacattacctatgttgaaacaaatccttaagtaaatttttaatttaaaaaatttggggctgacttataataattaatttgcaggctaataaagatggaattaaatataatatatataaagtaattaagtaagttgaaaccatgtcttaattagttaaagtagttgttcatttattattgcccatataagtgatctgtcatgcttcccttgccggcctatttaatttcat

SEQ ID NO: 82164 - DNA, 735 bp, Cannabis sativa
ttcaaaaaattattcaagtatttgagccaaatgattacccaccgaatatttattggaaccaatctgtctctcaaagaccctgaagtaatatagtagatacagtccaaacatcagttccggtgtcgatgaaaaggcaaaagctgacacaatcaacttccaaatgcggaactttccaaaaatatcctggcagaagcacaaattattatattgtaaaacgagcaaataaataatttgtattctctacccagttcccaatgtcaagaaataaagcataaaatacaagtatcataaaatttatgatcaagcatgataaacactctatagaagaataaggcagaaaatgcactgactatataaggctaagattgttaaaaaaatgtaacaaacaagaacaaaaagttgtaactaacaagaactatggtatgaaaggaactaatggacaagatgaattcatgcagccaacttctagtggtttaatagtttctttatgttcaatgccatatctctttctctgccaacacattgtgtctacccaaggatctctaaaaaatcaccacagatctatatccatcacattcatcttttgtaatttctagcagttgtactgaagatgcttattgtagcgtattaaatggagtagcaagcaactttcagaattcaaaaagtttggattactgaaaaagattcagaaccataagaaatcccagcagaaacatcaaaaacaaacaaaaggtt

SEQ ID NO: 82165 - DNA, 1235 bp, Cannabis sativa
aaaaacagaaaacaataccaaacaggcaaacatgctctaaaactctacaaaaatcataattcaggaaaaaccccgctcaccgttcactaaagcagtacatagaaatatagattaattgtcttttttaaggatttacttattttatttttataaacaactcatggtaatttgcatagtattgtatgattgaagaggttccaacttcactctataactctcaaaggtccctcggtccaaaatcactatttttaacaggataagttgaaatataaccacttttttcatcagttaaccaaaaatagctttattttaaattcaattgaaatgtactttctttcataagtccattatcgattatacccgagtactgttcagagaaatgacaaaggttttttttcattacataagggaacaatgggaatataacaaataaaagaagtataaattaaatatatagaaaagaaaggataaaaatgaaatggattaataaaaaaagttatagggtgcaatttccactatttttaacacctcagcttctcttttcatcctttaagttccaagttccaacctcgacattttaatgtctttcttaattaatataagctgaacccaaaccaataagtacaggatggaaaaagataaaataaagatacaatcactccacacacatcacaaaaatcacataaaacaaaactcgttggttttgggaagtataaattctacccttaaaatgggcctacttactctttgttttcttgttcttgtagaagatattcagatcaattacctgtatttatgaactgacttggttcaacatattctatttttgacccaagaagaacacaaattgtaacagtatagtattagtagtagcattgtgactaatttgccaagaaaacaaaatagggattaacatgtcaaactataaaataagagacaaggacggacgacaaaagaatgaaaaatcaaccagaaaataaggtcaacaattccacaagtaaagtttgtgttgccgaataaagaattataacaagcatgaataaaagacaacataaaatatctaaaagttgacattgatttgtatattttgagcaaactaagaagggattcaaacctaggcaagccatgatattctaacaacacaagtgttaatataaatattacttcatatttcattatgataatactcgtatatattggtcgaattgagtaaatgccaaaacagaaaacaaaga

SEQ ID NO: 82166 - DNA, 1345 bp, Cannabis sativa
tgttagccctttatactatattttctagttcaaaaaattgtagcttactcaaaatcacttagatcaacaaactttccaaaaattgaccattaatctctcacggcttctattagtatttgaaattatttttttaattggctttgaatattagtgtagtgagagtaatgtatacaacataagttattagataattgtttgtagaagtccatttcttcttagaaaagcaaccaagttctcctactaatcacttttaattaatgacaataaaatataaatttaattagtaccaccattactagtaacagatgatctagtttatttttcccttattgtaatttattaatttatttgtggggatattaatttttaaaaattctctagtcatgaaatcgccctttctaccctagcaaggagatatctatataaaataattgcaatttattttttattagcgtcatttccattccaaataataaatgctaaatttatgttgaaagtgtatcatatccaacaaaaggtagaaaactttcatcatagtaatgtatcatattcaacaaaagtgtattcaacaaaagtgtattcaacaatcttttgattttttttatttatgttggactatctaatagtatctattacttgttagtatatataaaattctaaacatatatgaattagtatatacaattacaaaatatataccgaatagtatcttttttttttatgaatcaagtgaatttcattgctcaaaatatttttatagtttatacaactaaatagcattctccaagtagaaaaacctaaaaaaacaatagactttacaaactttacaatgcttataaccattctttatcactaattgacgctttctttggccatgtacaagatattctcttctttgacacatttttaactttgcacactatattatctatactcggcattgagtttgccatagaatgtcttttctagctcgccatatggagtatacaagggcagccaagacagcagcaagaataatctttttaaccttactaacctttgcttttcggatccaccttactattcgatgcagagaattggaagtcatcctccaagaaagccaatcttttattttccttaagcaattcgacgagaaggggcagtcaaaaaacaagtgctgcaaagtttcttcttcggcctggcagaataagcattttgtgtcttcaacctgcttatatacttgtactctatcctttttttttgagccgattgagcatggaaagccataaaataaaactatgtttgggcatattcattcggctccacacaatagaactccatccaattttacaattaggaggcctta

SEQ ID NO: 82167 - DNA, 2298 bp, Cannabis sativa
  modified_base (48)..(55): a, c, t, g, unknown or other
aagttcatatttagggtgttaagcaacatacttgtgagtagatctaannnnnnnntaaaataatttccaacaataacaacaggcacatctttcttcaagtccttgcacttaatacaagtgacatgctcatgcaccttcgatgatgatggaccaacaaattcagcttccatggaagacttggggacatgcttagaatcttgatcacgatcgcttttacctttaaccttaataaaggacagagtcgtgtcacccaagaaataatcatgcaagttcaaacttactctcgccaccgatgttggagaaatgttttttagttttaaatgcaataaaataaaaaataaaaagttataaacaaagggcataaactgaaaaaactgaaaatctaaacaaataaaaaaaagtaacaataactataaaacaacaataaaacaaacaagttatccatcttcactgtgatactttcaactatggcattttaggcaaataagaagccttggaatgtcaatgtttgaatacatcataactttccccacaacatagggataacactttaaaaactaaatttgtaatgctaatgaaaaacccaataacctgtaaaaaccaccatcttgttccttctgcttcaccttcctaataccagcatcaattttacccttcaatgattcaatagtcatattaaaaacactctttccccaatccatattcgttgtaatgattgctatccaccacatcaatttccttaacaaaaataacctttccaaaggaccacccaacaagtagcattgaacgaaatacaagacaaccagcttgactgctagttcatcattatccttaaaattatcaacagtaaagacagcttggataatattctttgtaattttttattgccctttaaataatgtttaaaaatcatattttcatcctgcttatactagaaaatatcagagtcaatgtggtaatttaaacccgtaattaacaaaaattcctcaacactacacctcaacaatttgcctggcacaaaaatctaaaattccaacttatttggctgctgaacctcccttaacaacagacaatgaatgagttggaagtggagactgtactcgggcatacggagaaaatgaccaaagacagttttcgagaatatttctagttgggttggggtgagaatagttttaatatcttttataactgaataatacccataggttattagtttggaatgatagtgttccaaacgactgtacttgcaagctcacctagaaagatagaataaaaatactaaaactaaactaaaataacacaaaaataaaagaaaaacaaatgaaacataaataaccaataatagaaaaattaagaaagcacacacctcaacaactcttttccagtgatcccgtcaaacacatcatcagattcaacattcataactggagatttacccttcccttataagaaaacaaaacaacaataaaaaacaccaatacaactattaaacaatgaatactacattcaaacgaataaacagccaaacacaaaataaaataacaaaaagacatatgatagagaaaattcagaaaccacagacaaagatatcattaagagaaaggaattgaaacaaaaccccaaaaataatacaaaaacaactagaaattaccttatcaactttgggcgactgtaaaaatttatgctccaactcaaaattagagtcatgatcttttaaaacaggacgaggacctttggatatcctcttcttcgaagtttcaccaactaatttttgtttcgtaggaactgaagaggtagggctaggggatgttccttgaaattcctctttcccattaaggctcgaggtaagtttttttgaagtttttttgggggattttttacaattgaagaagaaattgatcgggtaacaaccattgattatgaacatgcaagtatttataagagaagaacaacatgtaaaggaggggaaatgtagagggaaacttgtgatttaaaaccaaaaaaactaaaaagagtatgaaatataaccaactaaaaccatccctaacacaataatcgtatgaatttgttttaaaaaaataaaaataaaataaagacacgaagaagatgatgaacagaacaagagaataatggagaagtgagattaaacttaaaagaacgggtagtgaatatttagggtatactattttgaataattagtaattttgcctcctgaacttttgacaatactgattttggcccctaaaatatacaacttgttaagaatcccccctaaactattacatttacagaaattta

SEQ ID NO: 82168 - DNA, 596 bp, Cannabis sativa
agctagctcaaacattgtttttgatattccacactaactatatagaaattcattcttaacgaatgataattcttagggttaggaaaaataaaagtttgaactcttagaaggaaatgtgatatttttcaaaattaataaaaaatgtattaatttaaaagggaatttttttaggtctatggactaggtgagctctaaacacaaatttatatcgcatatgcccaaagtcggacttaagtacctcgatgacctaatcaaagtaaatataatgtaccttgatgcatctttttcatgtttttaacatcgaaataattttaatttttttattcgagagtgtatattgtaatcatttaaaatattttctaattttttgacaatccataataatttgatgcgccaaaaccaatgtgtaaacagtttactgtacatgtgctttatattaaacgtgtgtgacagtttaaatctattttatgtattgaaaattattttgaatttttcaaaactttacattattccttaaataattacgatgtatactattatataaagaaattaagattaaaactatctatatgttaaaaatacaaaaatgactcatt

SEQ ID NO: 82169 - DNA, 685 bp, Cannabis sativa
ataataatttataattagtcataactttttcacttttagtcacaaattttgttgtaactaaaaataagattttttgtagtgtctgcaaatgggtgctcgttaattttgaagcttattataaggaatatttcttttgatttattttttttttgttgggaggtaaggtgtggtagtggtggtgatgatgatgattgcaacattgcagctgccgctgcacaccctttaagagttaatttcttggtgtgcaaattcgtgaaaattagactcatttatatgagcaaatttgtgggtagtgtcaaaagttgcaggtatgaagtaactagtcacttaagttataattttaatgacactataggtcgtcttttgttaaattaaatagtgtaaagttacataaatcactttatagctcttttagggcaaacgtgggcactactaaaaaaaaaatttgactaaatatgtttacataactttgattttttttctctaaacttataattaccaatatttgtaatttaagctaactttaatgttatctccaaattaccttcccatttacatcacttccctctctctcttctcttcccattccttcttcctcatcggaccccgtcggaccccatatcagacacaatcggatcccacatcagaccctgcatcggaccccgcatcagacaccgcatcggac

SEQ ID NO: 82170 - DNA, 955 bp, Cannabis sativa
atgacaccttaaatttgctactagctcagtaatttggagggttttaccgccaaaatttgaacttggaaggtgaaatacaagtgaaacgacaattaagaaagttttgccgcaaaaaactctactaaaaatgatactttggtagttttaataattaactttctctccatctttctacctttattactattacaaacaacataaatcagatttactattctctctgtccattgtagattctacattcatcttcctctcaatccatctactaaacaattaacatagggagaaaaattattttttatttagtagatctaagaaaatctctaatgaaatgtcaaattgatgatacattgttaaaaacaatataccacaagtattgaaatcctcttattcaaagtgcaatgagaaaatttccaacaatatctaatgcatatattcgtattgaaactattaacacaagtatgttcagttatacaaatgtttgagaagattataggagtggtgatcttgaaggcgaatacaaaaatggtttgggtggaatttccaatgaatccacactcccttccaacatttcaataactcgactcataattggtcgatttgaaggattggtctgaatacaccacaagcttactattatcatcttcttcactttcacaccatcttcttcattaacaattctctttaattcaagattctcatctaattcaaggtgtttatatatccaatgtggaaaatatatctcacttgtattattaacttgaacattaatattcgatcttccacctatcatttccaagatcatcattccataactgtagacatcagatttatgtgacacatttccaaaatttctattaaaaacttcaggcgcaatgtatccaaccgtccctcttggacctaacattgaaacacgactttcgtctgttttacagattttggccaagccaaaatc

SEQ ID NO: 82171 - DNA, 658 bp, Cannabis sativa
atatatatatatttaaattaattagtcaagtgaagtggtcccctatatggtaaggttttgtcaaaagaaaaagggcgtgtgatgactttagtgtttttttttttttggtagatgtgattggaattacttgtgatgaccattattgataagtatatattattgggaaatgattttgtcaccttattaaaagtggtccacgtacttataatagtgtgaaaaggatggaattattgtctgcttcgactttcagttatataaatatatctatttatcggtttggtaaattatatattttttattattaattatggttataagtttggtattctttagggagctagttcatgaaaggaattacagaaaatttggtgttcattcagaaaattttgcttgtaaagttgtggtcagtctggatgattcttctggatagctgcttgtctttctgtaagtaaagtcttccgaataacttgtcatacattcggagatgtaaatagcttgttgttaattttgaatgcctattcaaaacatgtgtatttattttttgaattgttcaagcacgttttaaggctagcgtgaaatacttgaagatctttaagatagcattaattagccacgatagaatcggaggaaactacatgacttacgattttactgtgtg

SEQ ID NO: 82172 - DNA, 1083 bp, Cannabis sativa
actgtagcgtgccttagcattagggttttataaaaagaatcgctgaagatattcaaatactttccttaaccgtttccacaaagataagaacaatagaagatcttcatttcatgagatttgacttagcagaatgagaaaatcatgggattcatattcaaatccacactgatcattctcctattattttgggattaaatgtattctatctctcctttaaatagtgaggtcaattcactatgggggagttcttttttacgcactttcaagagagaacactttgaaaaaatatttgtaaccttttttaaagatactaagaattcacctggctggaccttgtgatcttaatattctttcataagtaatacaactaaaaggggagtaggttgtataccattgagaagagtcgaacttctataattttcgtgtgtcggtgacagttattcataaaaatcccccccttttgtggtattttatttagagtattttttatattttgtgggactccaaaattttatttcattttaattgctaaagttactataatttgtggtgaaattttttttacccataaatttaaaagctaacttattttgggaattttgatttttttatgcatgttttaagagttaattggttaggaaaactaaaactataggtaattgttaaaataagcacattttacctaaagcccaaaaatacccctctcaaaatcccacattgtttctctctccttccctctctattctctttgcctcttcgcccgacccatcgacaccccaatccgcagccacaaccactattctgatccacactcaccgtcatcacaaccgcatggaggagacacaccgtactgacacacaactacacgaaggagaaccaccgccaaaccccgacaatgtgtaaggtaaggtgaaaatcaaacattgtgagattaaagccagaatgtcataaacaacgaaatcatatggtctactacagtaaaaattacaaagtatcgagcctagattctctatatatctcctacaacaagtcaagaacaattctattttctacaatggaaacccagaaaattgaaggtacaaa

SEQ ID NO: 82173 - DNA, 1215 bp, Cannabis sativa
  modified_base (1026)..(1026): a, c, t, g, unknown or other
attactctattttcagtgaataaaaacatctattctttattgaaacaagaaaatgttcgattattaaatctctataaatatcatcagttcattgttttttattaaatacaagaaattgaaaagaaaaaatgtaaaatattaagagggaatattttatattttgaataatataaatgattaaaaaaaatagttacaactacaaatagaaattctctatcaaaaaatgatagaaccaaggaaaaactactttttgggaagaaaaaaaactacccaataatttagaaaaaaaatcaaatataacaaaataaataaataaattactatcatgcttcataccacattagagcatcaccaatccttcatacaagaattgtggcttgcagtaatcaccttagctcaatatttttttaaaatatatttcctttctttattgattggtttaattgaaaaaaatgataaaattttttaagaaattattttacaaatacacaaaaacaacaaaaaaattacaaaaatacgtttttcacagaattttaaaaaattttacaatttcttttaatttatttatagaaaatacagtctttttatgttgtactcttgttaatttgttgttgattttttattatatgtatgttattttttattgttgttttgatgttatttaaaggctaattagtaattcccctcccccgaactttgacatgtactaaatcatgctctctaaacgttttttgccattaaaaattccccctgaaatattgagattgttacatttaaagacttttgtctaattttagtaaaaaaattctaacacggatgaaagttcaagggccatgatttagtacatatcaaagtttgaggggcatgatttggtggatatcaaagtctggagagcatggtttagtacataaacaatcattgcaatagtaaaattgaatgaaattagacaaaaatccttaaatctaacaatctcaatagttcggggggaatttttaacggcgaaaaaagttcagggggcatgatttngtacatgtcaaaattcaaggggaagaattacaaattagtcttatttaaatgttattttcatgttgttatcatgttgtttttgtggaaaatcgtaaagatgtaaaaaaaaaaaatctttaaacgtaaaaatgtaattcttttgtaaaaaatggtaccttatgtaattatctcaaattttaattgggtcaa

SEQ ID NO: 82174 - DNA, 1514 bp, Cannabis sativa
  modified_base (1313)..(1319): a, c, t, g, unknown or other
atagttttaggtatggaaaatagaggatttagaaagaaaaagagctaaaatatatagtgaaaaaaatggtgaaatgagggtattttttatggtggttggcggagaggttaggtttggggtttctctagtttgagagtttctgggttggctgatcgaatgaggaagacaaataaccgacgacataggggggcacaccctatggaatcggttatttccaaataaccgacaccataagaggcaaaaaatttccttcaccacagtttaacaaccctatgtcctcccttaataagtttccagcaaaaataaaagcctctaaaactccttattgtagtagtgaaagattatatttatatataaataaaattagaagatagaagtaaagagaattagatttaaaatcaagtttaataagtaacgaataaataaatacactaattttatataatctgttgtgaaatttgagaatgggtttaaactctctttaagcactatgtaagtctgcctatgaccaatgttgcatgagtttgcttaaataataattaaagtaatttaagtaaataaaaggaacaaattttattattaatatggatgattattgaatgtgatcagcaaaagttgtaaatcatgctttatatgtcaaaagtttaaataacataaagagatgctctgaacgtggtctcattgccctagttatgtatatatttgttgtcaaccccatatcatcaactaccataactgtttttaaacacaaaaatatcactacatatatgtcatcaatcattaattgcgactttttttttttcattttttatttattataaaaaggctaagattaaattattatgtacacacatgaaatgatgagacagtatcttcatgtaataattatacatgaagattgttaatctgtatcatgtttgctctgttgtagagatattttatgtttttagcacatcaaaagttataaatattggaattatcttaaataactattacataaatatacataaataattttgatctaaaaaaaaaaaaaaaaaacgctctgaacggagaaaaagacatctccacgatataaactcccacatattatataaatgagagtagtgacgatacatgtggttagatgtctatatatatatatttgtgtgacacagtgagtactgcagaacttaatctttttttagtaaagaataaaaattattatcgcacattaactaatctcagaaaaatcgatatagacgttattttgcaaaaaaaaaataaaataaaaaaaaaaaaataaatcagtacataataataataataataannnnnnnaataataataataataaagatatgaaaatatatatgattatactagaagaaaggtacgtgcgaggcacgtatacttggttttatgttagatgttttctattttatttacaaataatataataaataattgaagaaaaaatattattagttattgtttgaaattatttttaatgtatacaataaataaataataca

SEQ ID NO: 82175 - DNA, 1405 bp, Cannabis sativa
tctctatattatttacttaaattcattattcatctctccaatttagtgagctggtgtaatgtattttatgtatatctattggtttaattcgagtttgtctaatattttagacctattattttttagatcggatcggatccatccaatattttagatccaatatttatccaatccaataaaaagtaaaattttaatgatgattttcatatatacttatatattttatgtataacaacataaaatttaattactcatccaaactaaatcaaaatactaattagttcgattggatgttagatctattggattttcagacacctcatccaagatctgatatgatacaattagatattcaaaaataacatttgatccgatccgagcacagttgaatatctaatatatttggcggtcggttgtaattggatcaaatgcaaataaatataatttaaaatattatcaattatttatatcaaatgcatataaatttatactggagaaaaataattaaaaaaaaatatatagacaaaaaaaatttatataatataatttttttatatatatttgtgattatagtgaattaaattataatataatcattaatataataaaattttaaccacactttaaaatttataatttacgtaccaaacactcaaataaaaactataaacatatatgcacttatacataaagaaaccaaaactctaatataggcatgtagttgttgtaaattgtaatcctggtagatatttgaatattagaaaataaaacaattatttgaagaaaacaaaatagaacaattgttcaacctcatccatgtgtgacaacttgatatttttctttttttctaagctaacaattaaattaagatttattaaaatttagatgggttattaatataaaaaatctccacttttaaacttgatttgctagcagtattttcagctttaattaatacacgatttgatcatactatttatttcctgtcatgaaatcaaaatagtcaaatgaaaaaaacagttttctaagtttaattgtttctcagtgactactcaaatttatatcgggcatttatttacaaaacagtacgcagaatactcattatattatattagtgtcatttcaattattactttattacaagaaagaaaattcagtaccaaaagaaaagacaaaagaagcttgaaaactaagtgtagagactcctctttaatgattgcaaacgacagtcctaaacaaaaaggtgtttactttcgtggatcaagaacagctccggtaaaaacaaggttggaaaactcttccacaatcataaacataaatggatggtcagcaacaaatgtagggagtggaggaggcttataatttggagcccagccaccgtataaaaaaccaacaaaggtggcag

SEQ ID NO: 82176 - DNA, 1131 bp, Cannabis sativa
tcactatgaataaatgtgtgttttaaattgagaagtaacacttagctagattgtggccgactaaatgtgaaatgccaccaaacaatgttttggctttttttaattggaaacttatacaaaattcttctatgaatcataataatgatttttaattttttatgaaattgaaaaaatatatgtataccacacaatattcttttgtgataaagatcaattttatttatatatataacctccaaaatactttttcatgagtactctgaatcattaataatgttaaagagacctcaaaactctacttcagaaaatgaccacacattgcaaccatctttattagagacataaaatccaaaatgtcattttctttaatcaacttttgttgggattaaaaataatttttaataatcaaaattaaaaagaaaaattatatatatatgctttaacttttgtaataattttattttatatgaaaattaatcatattattacaatcaataatatatatatataaatatagctagggatggaagtatatgaaaagtctttaataaagacatacatatatatacatacaaaagagtattttctggaatattgtgttcactttttctttcacatgcatggatatgcaatgctttattatataatgaaaatatccaataatttagaaaattatatctataaatgtcttagtcatcaattaattattattactattcatcaccatctaatcacatatatagtcaaaactactttttcaccttttatttatgtcacactagaaaaaatgacaatatagtacttcaaaacaccctcattattcacatgtttatgccatcttcaccaacaaactcaattaaatatgacatacatttactataaagtaatagttacttagtgataatttttaaatcataactcgtagttacaacaaaaaaaaaatatttataactaaaacataatatttaaatctaaattgttattaatttatagttttagtcttgtaactaaaaatatatttaatcacaacaaattataatttttaagacaaataccttttaacaacagacatgttaataacaacataagaataatgacttataattatagtcacaaattttattatgacta

SEQ ID NO: 82177 - DNA, 836 bp, Cannabis sativa
aaagttttaatttgacacatttttagagaaatttctttgattagcaaagattgcacaataattgaaaaagcattgtagcgtgccttagcattaggacgttacatgcatgagagccaatgattattttttaatggtggaatgatagatccttgatggttataggtttggggaagatgatgaaatataatgtatatggaggaatttttagtggaaacgaggggtgcatcgctaaatgtctttgtacctttcgtatcctatttgttattctaattaaattatataaaaaatatagatattttatttttacactttaaaataagtttttttttttatttttatttttatgaaatttcacacaaaattcttattacaattaacggagcaatctagatcgcaaacaaaatccgtataacaacctacatagaaaacaatcagagaaaccatcagagcaactcaaatagtaaatttgcaacaaaaaaattaatatatgaagtaatttttctaagaaaatatataattagtaatttttttttatatttttaagattaaataattattgtgtataactagttaaatttttattgccagtaaaaacttcacatattaatttaaaaattttaaatatctaaatacactgcttttaattttgattgtgttttataaacaagacaaattgtagtgaagatctttttatttgtgaggaaaatacaaaaatctactgccggtttgcttacccctagtatatatataagagtattgttattggataccagtagtgtctagcacgcttaagacgtgttgtcttccgattagttagcgatactccctaaaagcta

SEQ ID NO: 82178 - DNA, 647 bp, Cannabis sativa
ctttcatgttacttttatctagtactcttgttgttttcgtgttgtttttataaaaaaccgtaaaaatataaaaaaaaaattatagacgtaaaaatataatttattttacaaaaaattatatcttatgtaatcaacatatatttttatagtttaccctaagttttgattgttgtaaatctatattgaagagaatttcactcttcaattccaaatcatggtaagattacaccaaaaatattgggtgacattggcattgcattgcattaagaatctaaaccaaacattaatttttagcacatattatattagcttatttgtaaaaaatgttctaaaatataacactaaattacaaagttggtactcgaggctctaaacataactattaagtattaaatcaaaaaaaaaaaaaatgtcaaaagtaaatgtgtggtcctttttagtaactaaattaatttaacccaattagccataataaagtgtcttttttgagtaatttataaagtgctcttttatccaattaactttcacaagatatgctaatttgacaccttttgtttgtcaataaagtattgaaatgatatgccacctattaatattaattgcctaaataaatgaataatctattggaaaaaaaaataataaataaa

SEQ ID NO: 82179 - DNA, 1062 bp, Cannabis sativa
ctgaagcccaacgagacttggcaagtctgcatagacttcaccgatttaaacaaggcatgtcccaaggaccattttcacctgacaaggattgaccagatggttgacgccacctctgaacaagagttatagtccttcatggattcttactctaggtataaccaaattaaaatgcatgtggtagactaagagtacacgagtttttgaacagttaaaggattgtattgttacctagtcatgtcatttagattaaaaaatacaagagtaacctatcaacagttagtaaactgcgtgttttgaaacctactgagaaaaagcatggaagtctacgtggattacatgttggtcaaatcgaaactgctaaagaatttggatgaactcaaggagttggttagcttgatacaaaaatacgagatgaagcttaacccaaagaaatgtacatttagtgtcaaatcgggtatgtttctgggctttattgttagccaacgagggatagaggccaatcttgaaaaagatagaagctttattagacatgccatctccaaagaagcataaggatgtggaaagtttgatagggaaagtaggaactttgagacgcttcatctccaaatcgactgataagtgcatcttattcttcaacattttgaggaaaagtcaaaaaattgagtggaccagcaagtgtgaagtagcattctagagcctaaaggatcacatgtctaaggctccaatcttgttcaagcctatacaaggggaagatttatacctctacttggcagtttcaaaacacgccatcagtgcggcactggtccatgaggaagacaggacacgacatcatatttactatgttagtaagagaatgataggtaccgagatccaatacccgctgattgaaaagttggcctactattttcttgtctcatctcgaaaactatgcatgtaatttcaagccatacaatagaagtctttactaattgtggaaagtaacgaaacagagataaatgtagatgctacagaaataattgtacccacttggaaggtgtacgtagatggagcagggaatgaaaa

SEQ ID NO: 82180 - DNA, 719 bp, Cannabis sativa
  modified_base (665)..(669): a, c, t, g, unknown or other
atataatacaatacaatacaatatgacctaatacggcgttccaaacgagccctacaagaacaataatacacataccgagtatcaatagtaaactcaagatatccacttcccaatttcccaactaataataatcaagtcgaagatcattcttacaaaagatgatcatttctcacgtgtgatcaattaattcacttatgcaagttattaattaataaaacaatcaacttagttatctaataagataactaatattcacttgtcacttgataaagtaaccaattatcatttgttgtctgcgaagacaatcgtattaatcctacaacgagttcatagagtaatagctctatcattctcaatgttacttaataaagtaacccaacatttttggtcgtctaataagaaaactcatacatatattttactctctatatttactagagaaattaacctcacttacaggagataatcaattctttaacaggcaataacgtacctcattctcttaacaatacattacatggtttaatatcctaccatgaaataaatttaaacttaatctccctctctactaaatcatctttcatttttaaacattctggtaagcttatcaaccttatttctgttgggaatattttaccaagatttagatttactaacaagtatgnnnnntaacatcctaaatatgaatatttctaaaacaatgaaattaaacatataag

SEQ ID NO: 82181 - DNA, 607 bp, Cannabis sativa
  modified_base (48)..(50): a, c, t, g, unknown or other
tttttttaatgaaaacataaaataaaaggttaaaatagtaatttaatnnntaaagcctaaaaattattgacactattatatagttatagataccttaaagataatatcacacaacacccattctctaaaattccaatcgtaaatccctcaccgcttatctcacaagtctaaattaaaacatcattccaaaattaactcaaatcaaattcaaaacaattagaataaaagaaaaatccattacagaagaaaagtaaaatgaagcaatagcagattacggaaagaaaattagaaatgagaagtcaaaatagtataaataatgaaataagatctgtactgagtcggaataactatcggggatttttattagaatttgggataaggtgaatgtggttccatctcaaaatcaattggtgatgggaggaaaagcccattcatcttatatttaaaaattatttccacacattagcaatgtgggactaactcttaatacaccctcctcacgcttgggtctggaaagtgtggtataactgttgggttttgtgccctaaataaaatacatttcaatataatcagatttacttattaataaagctcagaaataacattt

SEQ ID NO: 82182 - DNA, 1326 bp, Cannabis sativa
ataatacctaagttatatttttgtaacttctataagtacctagctattaattattaagtaaattgccacgtaacaatctctgattagtccacgtcactaattttttttgaaattaaatataccaataaaaaaataacatgtggataattatttcacatttaactattaagtacctatgaagttccaaaaatataacttaggtattattatcgccaaaaattaaatttaagtatttacttgcaactgaaagttaaacttaaatatttataccgtaaattactaaatataataatatagcatttattgtgatgctacaaatttttacatcatgatgcaaatttaaatcacttttaattatttatgatttttgtatcataatttaacatattattagagtaaattttttaacaaaaagttatattttacatttacatcatcaattatttgcatccccactcttagctgattaataaaaaaaaaatagacagagaaaaaatgaaaatccatttaatccaaaaattagtcttattattgataattttctcgacttatattcatagcgtacatacacagttacacattatcacggctcggctcggctcggctcgggaggaacaattcaggaaggatgaactttgttggaagagattcccttccaagccgatttcatggaagccgtagccgaattgagagccgcctccatatacctcttggaagcgatggtagcggccttctccatcaacgtacccatctttctggctccttcggctttggcttccaagctgttaagctcctcctccgccattctctccatttcttgctcgaatcttctgaactcgttcatggcggcttccatggccgattcgagctgttcctctgcttcttccaaggcgatctcggcttcctccgcttcgttgtggctttcgagctccaaggcggcccaggatctgtaagcttcgacctcgaagagcttcattaggtcttcgatggtggatgggtcgaagttcttgtcgttaagagcatgatctgagagaagggtgaattgagagatgagagactccattgttttctgattttgagtgtaatgaagagatcaaagactattttgtttgtttggatgcccagaaaattcagatctaaaatagaacaagtggtagtgcacagtgagtgagtggggtgagaagagaatcgtggaaaatgaattatgtattattattattattattattcttttttttttctttttcaaaaataataatagatagtaggccgttggaattgatgatttaacgggttggaacttggaaggggtatttgtgtactttc

SEQ ID NO: 82183 - DNA, 1080 bp, Cannabis sativa
ccaaaggttcaagagcgctgagatagtgggttgcatttacgatgtgtgggagaagcccttaataagatgatctcgcgattagagatctgatgcacatttctctcatggggatggagcttcgcggggacctgcctttaatagggcggggatttcccatataaatgtggacaaagattactttttttccccaaatgttaaatggggcgaggacagggatcacattctctgtctcgatagggacccatttagtattctattttatatttctagtaatatcttatattttataatttatgttttcatttttttagtatattagtattctttttatgaattttaaattgtattttggataataattagtttattgaataataattaatatgtaatattttaaattttatgcagtttaataattttatatatttaaatttttattataaactttatttttttattaggggatttcctgccctgtctttgcctccattagagaatttctcgccccattcttgatgggaaataagcgcagatagaaattaaaatctttaacgaggatggagatgggggaaacactccatgctaattcctcaccctgtgtgcattcctaagatctatatggtgccttgtatcgaaagtctatatgatattgtggtggtcagacagcgtgttccattgatgattacgacgatacaagatggagattggtgtttagggtatttgtcgaaagtattcttgacaaagttgatggtcagacagcaacatctgttactgataagttcataacggtgacacgaagtggtttttacaaaggggaagccacgagtacatggtccttggtttgaggggaagattgttggggtatcaacccaaatcccacatcggacgaataggcaagagtttccttaaatataagtgttccatcaactccattagtatgagaccttttaggaaggtgcccaaaagaaaattgttagggcttaggcccaaatcggataatatcatactaatgtgagagttaaagtgaggttgcatcccaaaaaggtaaaagaatgaggcccaacaagtagtatcagagcc

SEQ ID NO: 82184 - DNA, 1368 bp, Cannabis sativa
  modified_base (99)..(104): a, c, t, g, unknown or other
attaatacttttaaccacagaccttttaatcacaacacaataatgataatttataaatagccacaactttttttatctttagtcacaaattttgttgtnnnnnnaagtaaaattttttgtagtgtatactaataacagtatgttgagtcttgtggtgcttgacacattaaggtctcccttagcattatactttataaagcacagtctcatagctacctaagacaagagcatctttaatggggatgttgtaaagattgatgacagtggatatatttttggcatctctattgatgaatgcttatcattagagtaaaaaaaaatgctaagaaagaatatcattgtatgacatcttttttatcttctctttttttttttatatatatattttatttctttatttatttattttggtcaattagtaaacttcattacttcaaaatattaatttacatcctacaagcatcttcaatttgaagatctatatttctccaactatacaatgaattacaaaaactctattatgttctctactaagactatgtttcccataaatttacaattttgagaaccatttagtatctattgaattgacatttttaagcaattaaatgcatgtaattcttctcttcacttctttttggttaatcgaactacatgatcctctttttgctttgctgaattccatagtatgtcatttcgggacctccaaagttgatatatatacaagagcagcagttgcagcagccagtactgccttcttgaattcgctaagctttgcacgtttgatccatctcagcatcctgcataatgatgtcgattctgctctctagccaagctattcttttagatgtgttaagcgttgcatagaaaaagtacaaaaaaaaattaattattttaatatatattaaataataatataaattatttcaataatttttagaggtgcttactattagaatattttaaaacaaaaagtgtcaaaaataatatgtaagttagataatataaaatattatattcttaagtgatgtagaggtttttgacactcttaaagaatactagcagtgaagttctttatataattatagtgagaagattaaaagaaatgctaaagggtacttatggtgtctagcacctttatgaggtgtaatatttttattattgcaatttaatatcggtaactacttattttaatttaataaaaattagagaaccgctaatcaattataagacgccgtattataaaggtgttaggcacctaataacatctctaatggtagcattttggagaatgcttaatgaggtggaaagcttaagtggcaaaatataaggatgttatactattggagataaaagaatgttattcct

SEQ ID NO: 82185 - DNA, 1321 bp, Cannabis sativa
aaaaggtccagtgggccccttttgttcacgtgagttattgcaatgtgtgtgatcagcttccttttaggctggcaacacaatctaattgatagagtaagtacttgtttggaatctattttgttcctatttatttttctttttatgaatctactctatacttaaaaataaaaataaaaaataaaaaaagctgatgacaatctttttcagcatgtgagccccaacacattgcatcaaattaatatcaaaacaaataatatcgatctagtataatggatcccactataaaatacaaataaataattatgtctcattatataatgtaaatgataattacacaattactattagtaagaatattagccatataattacctaatatcaatacatgtgttcactctatcttttaatcaattagggctcgtttggtatgtcgtattgtattgtattgtattagcattatttagagttatttaatataatattatgtttggtattaacttgtattaaaagatcgtgtaaagttataatctattttcaataaactcgaccccaacactaatttcgggtcaggtctaggttcgagttccgtctggatccgaatctaagtcctagtacgggatctcagttccagtctcagtctaggtccaatcttgaatctagattcgagtttaggtcggagattgagattgacctcaaattatttgtacatattataatacaagttaatacataccatattttatatattaaataatacaacttatattgtattaaaaaattcaatcgtaataattaatacattgttttatccaaatataatatgatttattatttaatataatacattctttatacaacataccaaataactccttaataaaataataattacaaaatgagtttaagtttctttttaataaatcttataattatgacgataaaaattataactcagtgtgaatgtcgaccacattcagaataataagtcgagcaccacaagaacaagaaaccattgtagggttacacctctagcattggtcatagacacacactttaaatataagagaataattataccattccttttcgggcgtggtaaagtaaagcgtacgttagagctaatagcaattctaacgaccaatactcaaaccaatgaaaataacatgtttttaattaagtatatttaactattagtgatgacataaaatataacttttaaaacatttattatatatgttataatcgtaaaccaaacctaatggtagatgtagttagatgacaaattttgtctttttatcatgaaataaaatataaagaaaat

SEQ ID NO: 82186 - DNA, 1376 bp, Cannabis sativa
taaaaatgcttttatagaaactcttaatccaaaccttaattatttattttatataattttaaaattatcaaatctaaagacctagttatgtataaatagattatatcaaacgttaaaataatacatttacacaacctctacttatgtttcaatagattattaagtacattagcattaatgtaaatccatttacaacaacatctaaacgttaccactcatgtatgataattaagtttgatcttgttaagacttgagtctccaaagctgctggtgtgtagtgcagcagcagagtatctcaaccctgtacatcagaggacagctcagcaatattcctgaatattcccttaacggtcttgtacccgggatttgtgaaatcattgcacaaatctccatgctgataattctgttaattattgctcaattgtacactgccatatgtcttgtaatcagtggccactaattgtaaaatccttctataaaaggcaaagcatttacttagcacaattcgagctgagatttatcaattcatttactctctatttcctttcttggtatcagagctatttaaaggctaatgccatgtccactggccaatctcagtctccagctatcacccctgccaacaacaatggaggttcagcctccaacaacccagctcagtcgacccatatcaccaacttcacacaaccattcaacaccctaaatcagccctttccgttgaagctcgacagaaataattacactatgtggaagactatggtctccaccattatccgaggccacagactcgacggatttgtcaatggcacctgaccctatccagatgaactcatccctataactatctcgattggtgaagaaggagataaaattggtgttaaaatcaaccctgactatgaaaactgggttgtaagcgaccaactcttgttgggttggctatacagctcgatgacagagtctattgcaaccgaagtcatgggatgcacctcctctgcctctctatggaaagccctggagaatctctatggagctcactcgaagtctaaaatggatgacactcgaacagccattcaaacagtaaggaaaggtaacatgaacatggttgaatatctaaggcaaaagaaggcttggtctgacagtcttacacttgcaggagacccttatcctgagaatcatttaattgctaatgttttatctggtttagatgatgattatcttcctatagtcttacaaattgaggctcgtactagcactacatggcaggaactgcaggaactcttgctcagttttgatagcaaaatcgagcgtcttcaaaacctgaatggaacacccaaaaatcctactgtaccatctgctaactgttgggttttgtgccc

SEQ ID NO: 82187 - DNA, 1017 bp, Cannabis sativa
  modified_base (911)..(918): a, c, t, g, unknown or other
  modified_base (968)..(970): a, c, t, g, unknown or other
aagttctcataatttccaagcgatctttagatgctacaccgtgttgaatgactttggtcgagggggaccaaatggatatatagtttactgccactaaaggtcataccctttgtcgatgtaactgttaaagcttttgttcatggatgttgaattggtggacatttcattttgtccatgaaattttctttactatctcttccgataattttttagttttttcaactgtgtgtacccttcttgaaggttgtggccacgtggccatctataggtggcaatgttagtcctagaggacagacgactccgggtctatcctgtgccagcagaatagggagtgtcgggagatgtatttagggagctcaaggattcaaaggtcttatggtaccctattgttagggagtaggcatcattctgacataaatcccctgtctattgtataggaacgtagactcgctgtcttaaatgtcctgctctgactaatgccctgatcctgtctatcaaatgactacactttggacaaacgtccaactctacatagtattcgtatcgtttctttgagtctctttggggatatttccactacaacatctttcgtctatttggtcttttggatctttctaaagctttttttcaactctagctcatctctcctcctatctccttttagtttctcaagttctgctcctgaacctcctctttgaaccacccgagaagcatctttcatgtggatcataccacatcgaaccaaaaaaaaaaagggttttgcgtaggtgcacgtaccgatacagaatgtccacaaatagtcagaatgttattggaatatattttaccaggacctagatttactaacaagtacatttttttaccatcctaagcatgaacttctaagacgatgaaaattaaacacatataannnnnnnnaaaccttacattggttgcagcaaaattaaatgactccttctgctcagatnnntaacccttgtatcctttctatcgtagagtataatcaagatttgagcc

SEQ ID NO: 82188 - DNA, 793 bp, Cannabis sativa
atattgtaataaattggagttcacttttattgaccatataaaaaatcgtggacaaaaggatttttgcctccttatcaaccgactttttcgattcgagtagggtgttccctagacgaggttgcaaattattagtgatgaagttattttccattgatgagagttcactccaagcaggagatcacatttacagcttcagaaacgcacacatctactcccaccacggtaacaattaattaataattaatttataattatgttataaggaaattaatatttaatattcaaagtgcaggaatatatgtgggagaaaatagagttatacatttcacaagaacaggaggtaataatgatgatgatgatgatgatgatgatgatcacatcaaaaaaatcaagaagagtagtaattataggtgtgaagactgtggatacaatccaaagaagagaataggggttgttaagtcatgcctagactgtttccataaaggccatcgactttttcgattcgagtacggtgtttcatccaagaaattcctcctcagccgccgcacgggaacatgcagcaccggatcttgcatctactccctagacgaggttgttcgacgagccactgatatgttaaactcggtcgaggggtttggggactacatccttttagaaaacaactgcgagacattcgcagtgttctgtaagactggcaaacgagtaagtttgcaagctttttctatgaaaaataaaggggtcattgcttttaaggacttcacatcccaatctttctctttgaagaacactgcta

SEQ ID NO: 82189 - DNA, 1801 bp, Cannabis sativa
  modified_base (1035)..(1036): a, c, t, g, unknown or other
acttttgcaaattgtgggctcgacgtatatataagtgaatttttaccaattagaatagttatatatatacatacgggatacaaagtatttatatttatacttatatatatacataactacttttaccttcatttaatgtatgcatgtataaatattttataaagtgtcggaatagttcttcatgatccatgcatgcatgcttatatatagcatgagtgtacattttatttgctcctatatgaaaatcgcatatatatatagtaatatagagagagagagagagagagaaactttaaactatatattttgtattccggtataatagcatatcatgaccttttgtgttataaaaaggtacatacattgttaaaactgatccgctaaatctgaattcagttaaaaggaaaaaaaaaaattgcactaaaattttatttacaaaattactgatttgggacaattatgtagatctcgagcaagccttggaccatcactaatgatttaaagaaagaataattacataaaatattaatttctgtaaaaattttacattttaatattaatttttttttacatttttacattattgtataaaaaaaaataacaaaaaattcacataaaaaaacaaaaaaaaaataatatcaaaacaacaacaaaacaacatcaaaataacataaaaataatataatatataaataacaaaaaatcaacaataaaataacaagatacaacatataaatacataaaagaccgtattttatgtaaataaaatctaaaacactgtaaaaaaattaaaaattactctgtacaaaacatatttttgtatttttttgttgtttttgtattttttttttaaattattccattaaaatatatgctaaattcactacaaaaaatcttatttttaattacaataaaatttgtgactaaaagtaaaaaaacttgtgactaaaagtaaaaaacttaattgtgactaattattaatcatcatttttatgttgtgactaaaaggtccgtgactaaaggtattagtcacannaattataatttgttatgactaaatatacttttatagccacaatatttgttgtgactaaaaataaattagtgacaacttgtatctaaattattatattttagtcacaagtaactttttgttgtgactataagccacatttagtcacaaaaaaattacatgactaaaagtttatcactaaaagtaacttgttttttagtgattttgtataaatttaataaaatgttatatttagtacactttgtgcaattatgctccaatagattaagatgtaaattgacataaaaaataattatcagtaataataattgtaaaattaaatgtatattttttaaaaattatggcaatattgttattaaaaaaatgtgttacagtaatttattaatactaaatgaaaataatataaataaaatatatgcattaattatgtaccaagtttagcatgcagttatagtgtgtattaaatttagtacaattatttttggaggaaaatacgtgttattataaaacaaattatgaatcgtttacaataacagagtaaataagtgaagggataacctctaaccaagaacgagtctcatccacccttaatgcaaatttaacaaggccatgtgctgctttatatgttgaatgtgtacatgtaaaacatttacaactaggaaaaaaggataaaagactaatgacatcaataattaaatctaaaaaagaggaatttaaattgaagggagctttcaaagcattagcaactattagtgcatccgtctcgat

SEQ ID NO: 82190 - DNA, 880 bp, Cannabis sativa
catttgttggaattgaagtggaaccaattttagagatagggatagtggatccattacgaactgtgatcttggctttgcctttgtaataagtagttgttgaaagatgttgcatgtctgaagtcatatgatgtgtggctctactattgatatacgtaccagccattgtcatcagttgagggagtggaatcagacagcagagcttgggatgattgttgttagaacctagatttgaagtttgatttgcaggttcaaggtcgtatctgtgataacatttgtaagcaagatgccaaatctcgccacagatttgacacacaagacaagttcctcgaccacgtccatttgaagcaccacgagagggaccatttgtattaccttgatttgaaggttgaccacgaccatgatagtttccttgtgaggatgactgacccctaccattggacgatcccctgttttgaacttgagcaaaatttgcttggggaagatcaagagaaaaagactgattatgttcaattcgcatttcttgattctgtaacatatactgaacttcacccagggtcaaagcatcaacacgagttgttaaaaacaccacaactattttgtatttgggtccaacaccaccaagaatatacataactaattcttgatctgaaagacgatatccaactgcagagagggattcagccatatttttcattttcaagatatattcatccatgcttagagaacctttcttggtggtttggatttggggtcaaagttgaagctccctgactttggactgagtagcaaacagagtagcgaatgtatgctagagttgacagcagattgacagtgaaggacatgcctaatcatggcttcggatagggaattcatgagccac

SEQ ID NO: 82191 - DNA, 689 bp, Cannabis sativa
ccagatctctgcttgatcttggaagctcgcttcgttgtctattgctagtattgctcctttcactgcagaagccattgttttttctttcctctctctctagcaagcactctttgtttgtttctctctatataacatataaggtggagtggttgttatagtttttgtgaacatttgcatgcatggtatttatagatcaacatctcaaccgaataaactacttttttgccatggaaggaagaaaaaacacagttatttggcacctgtgtctaacactctacgagtcttaggcacacgtactcacaacaatttctctactctattctttattttattttaaatttgtacattacctcatatatcaatttctttattttatcggtacattaaaatacgtaaagtaaatagcagcataagtatttaaagttttaagtttttaagtggtataaacctaatatttatttttagtaatataagtacctaatatttataaaacagtaattttccttcagtttcgtgagtgttgaatctgttttgaatttattaaaaaaatatgtaatactacatttttctgtctaggccccaataatctaagatttgggttttatatatgtcatgtttaaaatagggttaatttcacaaatgcacaaaaacaacaaaaatacggctttacggaattttaaacattttta

SEQ ID NO: 82192 - DNA, 588 bp, Cannabis sativa
aatcagtaaacttcaattcaaaattacaaaaatatcccccatcgactgtaacagtcgtttgtcagttgttgacgtattaaagtaatcaactaatttttagctaagagaagtgttatataggagatcttaactataatggataaacaatttattaatgatattatgtttggttctgtataatgacagatagcattcaaatattggtccatcaaaaccataagagcagcatatgatccttttcgatggaaactaaaatgaaaaattgtcaaagagcacataaacacgtacagtttctgcagtgaaggaagatcccaaaaacttcctggaatagatccattaagacggttatacgacaaatctctgcaatagcaagaataaatttctttacagggtaacttcacaaaacaaatatataaataacagagtaaatatcaaaattaaatattgtgcaagagatcaacatgaactttcataaaataaatattgtgggaatataaatatgaattcacgtacattgttgtcacattatgagaaagcttttgtgatggtatggatccaactagatgattcctgctcaagtctctgtac

SEQ ID NO: 82193 - DNA, 1288 bp, Cannabis sativa
agataatatataataacatgacttataattttacttatcaccaattagttttgtgatgtaatttgatgctcctactatcatcactatatattatatatttaaacctcatttcaccatagaaaaacatgtccaaatagaataaccaaaattatcactagcgatcaagctgttatagattgtgagcaaatacagattttatttgaaaatgaaatgtcacatattaataatatgtgaaataccattaataacatgacaaatccgatgaacacataaatgaaaacgtaatttagaagtgatcataagaagttttttaacttggtctcaataaatatccttaagatatcataatcaacaagatcacacatggaaaataaaatcaattaataaagtttatgaataaattacaaaaacattttttttacaaaataaaaccctcagttaataataatgggtaatctaatttctagaggcgtcgatttgttgaaatcagtacaaagaaaataataaatggtctcttcctttcaaaaagaatcttaaaaacaaaacttccctttttgtattacacgtccaatgaaacattattagacaattacaatgataaaaaaatatacaaaataataagaacaggaaaattaggtaggacaccttaatctctaattggaaaactcctcaaataaagaacaaacctcgattaagtcttcaatagatgaaagatgtaaaaagttcacaaagggagtttaaggatgttgttgatgtcgtttttcatcaaccagatttaagaagatcataaataacaagcatattggattgagatcataatggttattagaaataaatcgtaaataaattgacaaaatgatttataatagttcactccttatatcatgatggtaatagagctacgtctatttgtagtttaacgagagttcaaacacactagagttattatcttatgagtgtgcttgattaaattacaatagaagagatccttggtaaaatctctatatatgtgtgtctatgtgactggttttaaaaaatatatcaatgaacccaagtgattattttttgataagatgagactgaaatactttgagaaattgtttctcagaaaaatgttatttgagagagagggagtcgttagaggtccctaggtgatatcatcaaatcggggccctttttcaaggtccatccctatggaggaaattgcactctttttatattgtctttttttatttttactctcttttttaaagtctattatttttatctttttttttaaacattgtac

SEQ ID NO: 82194 - DNA, 1048 bp, Cannabis sativa
aaatacaaggtccattttgttatttaacaaaatagagggtccagtcgataacttttgcaaaatacagggtccaaaatagtatttacctaatatttttttatcacaccttttttgagaagcatcttttagcttttctaaaatatttgtatgaaatttccttatatgcatatgtgtggttctttaacattaaaatgttaagctaattaactccaattttaatttgagtcccgtcttttcatttgagcattgacttctttcttatatgtttttgtcattatctaaatttttcaaaagcttccattcaataatgcgatcaaattctgcattataaaaattaaaatcaagacattagtattgaaagaaaaaaaaaattaaacaaaaaagaaagtattagtattgaataaggtattaggattatatatatatttaatttttttaaatactaattatatatgaataatatagaaaattattgtataaaaataaataaataattactattagtattaataaaaaaattagtgatgattaggtaaagcaataactaatattagaatacaatatatgatttgtaacttaaggtttttttgttgttctattgattatttttagctaaaattttgatcatgttatttttttggttgaatttaatcatgttaaattgctcatatttatgtgatatatatatatatatacacgtatatggttgcttatagggtttcaggttttattataatcatttaaaaatggtagatattatttataattcaaaattcaaaaaaataataaaaattaaaaagaaagatatgtgatacataaaaaatggttttaaaaaaatatatataaaaaatgaataaaaaataaaagaagtaaaaataatggttgataaagcagtgacttatcacagtcttacaattcttgttatttgaatttagtcaaacacaatacacttgatttggatatcaagacaataaattgattgaaatgcacttcttgttttatgttagtggaagtgggagattttttagatgttatgccctaaataaaa

SEQ ID NO: 82195 - DNA, 1125 bp, Cannabis sativa
tattaatatttgattaccaaaaatctagaaacttgtttatgaagaaatcataaaaaaaagtcgaacatgattatattttattttattatttgcgtgctattgtaataatgttaatgtgtttgatcttgattagtgaagctggttatattatatgtaattatttttacccttgaaaataatccaatacaaattggaaaggtaactagaaagagtcgatattatatataatattccaaagaggaatattgtcccttttgctctttatttgaaaagtatgattttctttttttgtactcaaaatgcttccaaaatccaatatgattataatgtattagacatgaactttaaattagtggtgccctttcataaagaaaaacattaaaacgtgtttaacgttgttcattgatttaattattgttagtatgaactagaactgaattgtagggttatctttctttatgaaaagatatgtctgattacagagatacagggcccaaagaaattcttattttggatttcctccctaaaagaatagaagtgactacactacactactgcactcaaatattaagtagtatcaatcaaagttaaaagaatagttagtatcaattgaagttaaaagaaatgaacttttgggacattagaatataaagtgtctagtttaattcaataaactagatcctacacatttttccttattgcttttacttttttttagggaaagcaattcaaagttaattgcttgcttagtgctatacaataaaaaaaattcattttccattaattatttaattcccatatttttttttcaaataataatcatatttataaattaatcgcaaaagaaatcgtagtttcccctaaaacacaataattgaaaatttctacaaagaaaatgtgtgattcgattagcagattgtttaacaaaatgcaaagactccatcaaagtcttattacaatctacaataataaaaccaaaagcataatataacttagcaacaatggactctgatgtaatgcatatataataaggaaatcattatattataaacatagaaatataactaaataaaatttaataatgcattattcttttcatttttgagatgaataagcattatacta

SEQ ID NO: 82196 - DNA, 1254 bp, Cannabis sativa
caaacatgacttgtgttttaaaaatttcaaaaactgttttttgttctcatttctaaaaataattttttgaaaacaaaaaaacagaaaacaataccaaacatgctcttaatatcccataccacaccacgatacgaacctagaccccacctttggacccagacgcgaacttttgatcccaaacttggacttggtgctgaccgtaacctagcccagttgcttgtacttaggaccccaaattgggacccaaatccaaacccatatccaaactcaaccccggtcccagccagccccggacacaggctagttggcctcacctcgatcccggctgggacttggacttcagaacccgaacacaaaaccacgacaaaaaacccagactaggacctggagctcagaaccgaacccagtcttaggtctgacaccagtcccaggttcgattctaagatccaaacccagatttggccccgaccccaaaatcaaatatgtttgaaaaaatgtaaaaaaaatatatatatatatatattagataaaagaataaaaaattatttgtttgaaaatataaaacagcatattggtggtttatgatttttaggttttttaacttagatttcagattattattttaaaaattttggtcaaacacactcctattaatttttaatatagctaacttaaattaaacataaatgcatgtgtttttaaaatttgtatttaaaagttatatccattaacaacctttttctttctttacaaaatacttgtagaaaagttatatccattaacaacctttttctttctttatgtgtacctatgcattatccatcatatcaaaagagaacattattctttttttttttttttttttttctaaaggtgttacgagagaagtagaacagaatattattcgaatcaaaagttataaggagaatcaattaagcatagctcatcaaataaatatggaaaacaataaataaaaaataggcataattaaagttaagttagcatagtaatgcaacgacaacaaacgaaaaatcaaattacagtttttcttttttctttttgaaactacagtttagttacgtaaccattatatatatatatcatccatcatttaataataatgacctcataattcaattacattacattattccagtaagccgtggaatcacgcgcctgctcaagcgtgtgacaaacaagaattaacgaaagtgatcatatatgtatgagtggtatggtgggccggtgcgtggt

SEQ ID NO: 82197 - DNA, 572 bp, Cannabis sativa
tcttcttcctcttcttcttcttctagctctgaacccaaatgaggttggaccctttcatctacaatgggactgttaataagggcacttgagattgagccatcattgggtgtaggtggaacacatggagtggaagagcttgaggttgaaggaaaatgagatggggattgaagtacctcagtcatgtttttggggaccaaacaaaaaaaaaaactagtttgtgaagaaaggaatgtaaaaaagaaagagtcttttttagttttttagttttgtttcaagtccctaatttattatgattttgactatttgggtttatgaaaaaataaaaaaccaagatttggatatgaatgaatgaatgaatgaaagagttggagtttgattcaaggaagggttttggaggttgagacgtgactatcatcactttctctttccaacccttttttatatatatatataaataatatttttcccctctaaactggctggcttagaaattcaggattgaagaagcaatagctagaaatattttgagagagatataatgagtggtaggttgaacttgaaagagagagaga

SEQ ID NO: 82198 - DNA, 585 bp, Cannabis sativa
ctctctctctctctctctttttgaccctcctaattcaatcccttatttaagtccaaccaccccacaattcttaaattcctctatcacacaacctacatagcttagctagactcccattatataatacatttacttcttttctgttgttataaccttctgtgtagtctttgtgttgcaatgtttttcaagagtgagaataatcaacaacagaaacaagaaaaagaagaagaagaagaagaagctggaaatgaattttcagataaccaattagatgtggaatcaagaacaagtactggaaacgacaataataataataatgatgatcatcttggggattggttaagcttaggaggcctcagcaaaaatcaattgtctttttcagctggagaatttgatcatcatcatcatcatcaatcctcctcctcatcatcatcatcaaaaatagcaccaacaacaaacaagattttctcttgtaatttttgcatgagaaaattctatagctcacaggctttagggggtcaccaaaatgctcacaagagagaaagaggagcagccaagaggtaccactctcataggatgatgatg

SEQ ID NO: 82199 - DNA, 1600 bp, Cannabis sativa
agcaagtagccagagtgaagcctatctgcatataaattagaagaataaaaatataagctaaagaaaagagtgtgagaaatgtgagggttaatgtttgatatatatcattagacttttgtaagaaacgtgattaatatatatatttttttgctacaaagataagagtgtacatagcttaatagataggatatattgataataagaagaaatgttttaaaagcattaaatcattattttattatcttgtgaagaaaaactgtttctacatattaacaatcaattcacaattaacaaccttttaactgaggaatataaaaaatcaaaatttttcaataattggcattaaattttaatgtttgtagagatagtaaaatattatttaatgccaattactatccactaatatctccaatatcgggctctctctctgttttctttccttgaagaaaagaatgaattattttatttatttctctcttttgaaaccttaaaaaatattaaggaaatgaaattgtaatcataaacacccattaaaaacaattaatatatagaaagttaaaatcccattcattgtaataggtccattaatgtatatatggaaagtgaaaaatataactaaacaaattaagattaaatcaaaaaaattagaagtagagagattaggaaataatgataattagggtgccatgtggaatcctttgggcattcctttatatatatatattgataattgtattgtaaaaaataaatataatttactgattaattcttgtaaaaaaaatagtaagaaagtaaagtcccaattcaactcgtataagaaaatagattaacccatttataaaaaatggactgatccgcgtaaagtatgtcacaaaaatgtagatttatgaatgtattgggcttactctttaaaattttgtcacagtatgacatgacctttatcttttgataagtcggttcagcacgatacgaaaaaaaaacttaaagactattttttatattgtaaattattttaaaattttcaaaagtgagaattttaaaagatatgttaaatgactacaacgtatacgattattaaaaaattagactaaaaaaaaaattggatgttaaaatagtttggagtgcattagtacacattttgttgatgagcattgctatgaggcattcatggtgcttagcaccgtggtaaaatgtgtcactctataattggttaacgattttctataatatttattaaagtataataagtgagacccaatattaagttatacctcacaagaatcaataagtaatccctaatatttttctttgttgagagatgcgctccctaaaatataaatatattagttaatatctataaatataaatataggtatatatacctaggaaaatttttatggtgcactaatacactttttatctatttcgtcatttataaataaaaaaaaaaaattaatctaatgttctttatagttgtatgcgttaaaactattcaagacaacttgttttaatattataaattattttaaattctcaaaatttagtagaatgtcttaaataactaaacatacttatctataaaaaataaaaaaataaaaaa

SEQ ID NO: 82200 - DNA, 864 bp, Cannabis sativa
tattctttgttgcagaaatgtataatagtcattaagtgagtatttgaatcctttgagttgagtattaagcttttttaggagcttggagagttgtatattgtgtaatagtacaaatggtgtaccctgatccaagcaggacttgttatatttttcttctgcaataactcttgagtttggtacacaagcaatgggccttacggtttgaaacccaaattttcttcctcctatctcatatatttcctatcatatgaaaattgaacaagtcacatgatttagaaagtgagataattgacttaaaattaatataagaaaaaaaaaaataagttgatgattttttggatacatgaattgtatatagtgatgaaattatttcaaaatttgtttgttgaattaattttttcaataatttcatgataaaagaacaatctattcttattagatcccatctttctctctaaaaccaaaatatggtaagaaactactaattgaggaaggttttatttttaaaattatacctcaatcactgagcttaagttacctatcaccatgcccacatattttttggttgtgaaggattgaaaggttgtagagttggagtcgaaaagggacatgtaatcgttgactcctacattgaacaagtaaacagctcttgacaacagacttatggcctcttcatcccctaatttctgcctcaacaacttgctaacgttcttgaaataatcaacttgaattttaaggcttaatgcctgaaaaaaatgaaagagagaaactaattaaatgaataaataagtaccatcctcaatcaaggcctctcggtgggcaagtttgaaagaactagaggggtgttctaaaaatgtgcaattg

SEQ ID NO: 82201 - DNA, 2322 bp, Cannabis sativa
  modified_base (59)..(66): a, c, t, g, unknown or other
  modified_base (1129)..(1140): a, c, t, g, unknown or other
gacaaagcacgctgaaaacactcgtgttggtctatagggtcagtcatcagtccatgaannnnnnnnagtgacgtactcgtgtataagagacattatctcggacctgagttggctattgaaaagattcgatcttgtatgcttgcttcacaaagtagacagaaaagctacgctgatccaaagcgtggggatattgaatttcaagtgggagaccctatttttctccgagtatcacctatgaaaggggtgcgcaaatttggaaataaaggaaaattgagccctagatacatcagtccttttgagatactggagtgaatacgcttggtggcctatcgattagctttaccacccgcattgtctagagtgcataatgtcttccatatctctatgttgagaaagtacgtgttagatccgacttatattttgagttacggtgatattgagcttaagacagacttatcttatgaggagcaatctgtttagatattagacaaaaaggagaaagtactccgaaataaaacgatccctctggttaaagtcctatggaggaatagtgaagttgaggaagagacttgggaattagagtcgcagatgtgggagctatatcctgagttattcagataaattttgaggacaaaattcttataaggatgggatgattgtgatatcccgataagcctaatgataaataattagggtttatatttatattttgggataattaggtaataagtgagattatgatcctactaatctagttcaacatatattttaaatttactataagtgaataaataagtgtaatttataaattttgaagatttatatagcatatgtgaatgcaatatgaattatatgtggaataaaaatattttcaggtttgacgaccttagagactcgatcgagggctagaaatatcataatagatttaattgatagaattaatgggaatattgtgataaattgataatatatgtattagaacaattaagagtatgcgtcatttagtttagtgccttagaagtaaaaattcttaatgactaaaaaacgataaaataactattaatatatattattatcttattatactgttattatcattattaataatattattattattaatatattnnnnnnnnnnnnttattattattattattaacaactaactacgtttatatatataaaagttatgttatatataactttacagaaaaaaaaaaaccgaataaagcttcgtcctttgacaaaacctttaccttttcttatctattttcttcgaattttaacctaaaacctagcgatttaagattcagtagtagcaggatagcgaattctcggagcgggaaagcttaaggtaaagtttaattccattttaagtttaaaacaattagtttcgtatagggttttgcgaattagaatagttatgaaagttctgacctcataggattgttatcgggtatgggactagttccgatattttcttgctgaaattgaggtcattttgggttagaaattgagtttagagctttttatagtttaagtccgaacattagtggcgtttgtcaatcaagggctttttatggcatttaccccttaaaatatttataatattttaaatttaaatttctttatataaaatattgggaaattaccccatatactatttttttaattttttttttcaaatttacggtttgggtttcaaaagtggttgcagcgctagttgcaataaggttttctatacgatttttattgcaatttaggttgcagcgttagttgcaatagggatttctatatagaattctgtaaaaatgcaaaaaaaaatgtttagaaatgtaaaaataaaaaaggccctaaaatatttacataattttttttattttaattcaaagttaaaccactaaatttaaaaatatgattaaaaatatttataatattttaagtattttaaatttaaattaatttttttatataaatttatttttaaatatatataataatataccgaatccaacggacatgattaggttacgtggaatctctagattaaaaatactgtagaacgcccatcatcttaaatagcagtattctttttaaaaataaaatattcattttgtcttgtcgttttgacatgtctggtatgtgatttttgctattgagtggtgtattttgcgagttatgagtttgttgagttggaattactgtgggcttaggaaccctcaggttgttcaattccttaaagaaacagtttttcaaaagagacccaatttaatttttttgtgtgagacaatttgcaagaaagacaaagttgattgtgttgga

SEQ ID NO: 82202 - DNA, 2002 bp, Cannabis sativa
  modified_base (729)..(749): a, c, t, g, unknown or other
gttttgtaaatataataaattatcttaaatattagggttttcttttcattcagagtttcataaaatgttagttggttaaaaaaaaattaattacgattgaactttgacttgtatcaaattaagattgtacatcggtcagtttagtcagtttatactacaaattttctaacccaatataaatatacgtttgtaaaattctaagtgcaagctatccaatttttttaaaaaaaatagtaacccgatcgacgatttggtacaataatctcaatagtttgggaaaacttttaatagcctcaaaaattcaaagacatgatttggtacaagtcaatacagcaaggaatccaacctcactcttgggattctaaaagcatgcattaaacatgagcactaaaaaattacaagcttaattatcctggccatgacttgctatcgaaaaatttttgtcgagtgttcagattaatatttggtcataaattcttcaatacaactcggaattggacgattcaaaatgttctgaaaagttgagaactagatctacaactttcatgtttagctccaagtccaattgtactttcaaagtcatcaaaaattggatttaagttatgccttatagaattgaacttgccggcttccactatttttcaccataatgtgctaaaatcctttcgaatgacactaaatgcatgattaatcttcaaaatagcctaacaaattaaaatcatactaatnnnnnnnnnnnnnnnnnnnnnaagaatattaatacataaattggtcatatttataagacaaaatatcgacttaatagaaagtagtaatggacgtataccccaactgcaggcaaatggaaaatctgtgaagcaaagctttggcctcagcgacatgaggctcaaaagatcccacactcgaaaacacatcagagaaaaagacatgaccattagaattggacgccaaaacccccatccccattttgtggtcttcatcacgaatcccaacatccacaaacaagttcctcatcttaagccaaatttatttcggtagtagacagttcattcgaccattaaggagaaggccgaccattagatgaagactcaccagcattagcatcttggtatctctaaagatagttaatggcccaaggggtgacatattatcgggaagaagcttatgatcatgaacaaaagtagtacgcctatgccaaatgcacctactaagggcaatgaactcatccaattcatgtttactcaaaatatctacagaacctaataacaattcataaaatcaaaagacatcctttaaagaatcgagctcgtgaaaagatgcattgattcaggctgaaggcttgaatggctgacacgcaggtttgttggtgatttaaacatgcgatgctgatgtgtaaaatgttggtgagtccagcatggccttggcggttggggatgtcaacgcaacctaatattgggttataaagtaggctatgtacgcttgagtcatcagtgtgatgtctagcatttgaacattgtattccttaatattgtgttaataataaggttgggaaggggttcccatatgctgtgtgtgttcttatgctttatgtgcatatacttgataacgagagagtgttgttgagtgacgttatgcaaactaaaccgtgagtgtgtatgcataaaaacgagtgttggattggctcactagatcagagagaatctaggttatcgcagagaaaatttgtgtgtgtgaaattaactttgtgacaagcaaatgacgaagtcaaagagcataaatagtagtttcattattctaaaaacaaataagataaacctcaaacgcatgtataccatgacaagttaaattggcataagacaaaatcaaagaacatgaatagtagttctcaagggcggagccactcattatgttagagtggccatggctcccctcaaattctaaagaaatagatgtacatatttaaatgtatataaaataaatgtaaataattaatatatatata

SEQ ID NO: 82203 - DNA, 785 bp, Cannabis sativa
aaataaagccaaacaagcctaattgttttcaaaaaataaagccaaacaagcctaattgttttcaaaaaacaattttctatttttaaaaataaaaaacaatttttaattatgataacaaacatgcacttagttgtcacaaaacacagtgataacctttggctcaatcctgagttcttcaatcaaaccaatcatctaaagagcttcctatatcatttcagtgagggtcatatatattcagactctattgtagataaagtaataaccacttttgcaagttgcttttcaactaagagcactcccacacatgttgaagaaatatcttatcaaggactttttagtgtctatgcaaccagcaaattttattgtggaacatcaatacaaattttaataataacatttttttatatcttcaataatataacattcttatattttgccacctaaactttttacccggaagtattctcctaaatactattattaaagatgctttaatattgctcatgtgagtgatttgtgtttggtgagatttaattaaaaaacttaatgagcacgtgtttttctatattccttttggaaattttattatatatacttaaaaatatatgcattatcaatttttagacttttaattaatttatattgaataatatttattttggcttgctttttcctttttacctctttatattaataattgcatcttaaaaaaaaaaaaagtaatttgcggcataaatacctaagttttatgccgagtagcagataaatacctaagtcctattttt

SEQ ID NO: 82204 - DNA, 1016 bp, Cannabis sativa
tgtcattgccatgtgggcaaaattaggacttaatgaggctgaatagacgtcaccttaaaaatgtaaacgaaacagtactttggagagttttcccgccaaaatataagattgtatggttttttacaaataaattgatagttgagggggttttgctgcaaattactctaatttttatatgtctttttaaattatttattaaaattcaataattatctcgtcaatttagagaagtcatatggaccaattttcaaccttaacattttttttttttaagtaaaatttaaaacaatgataataccattctaaattactccgaaagataagcaatggtcatcacatacatttcacaccacacacataaatagcaaaatttgattagaaaaagacagaacatgaagctgtcaacttttctaatgctcatttaattgttaattaattatacatctttcttgtgactaccaattagtagtgactcatgactagtttcctaatctaaaaaatatatatatattttataccttgattagcatgtggttaaacttaaacaatattcatagtgttatgtctattgtattttattttattaatgggtacaaaacaaaccacgttccaaaattttaataatctaattaagacaaaaatacatatttgtgcagaatttagaaaggtgtttggttgaaggagtcactttaatttttattttattttttttttcaattgagggacaaaatgtctctcttatctaactgaagtgatggggacttttcttattttatttattcattattatgtcaaatcaatggaccaaacgttccaccattttgttcctttaattaagccaagagtgattggtgtcaatattttcaattaatatgtcgccaaacacgtccttatccaaagattacttgtagtggcagggaaatgataattgcaaattgtttaaaataaaaaacatgactcattttcataggttttaaataattaaaattaatctctatgattattctgagccacct

SEQ ID NO: 82205 - DNA, 808 bp, Cannabis sativa
aaagtaaaaattttgtagtatacacgtatcattactttttaacatatgtgtaaatcgctcgcattattgttgaatttgagcaattatataattaagcagtgcggatagtgtccgataaaatatcaagaggtagtgtcttgtaaatagtatttttttttttttttgaaattaagtgtattcatgcattactaacagaaacggaaacaccagttagacctcttggtcattataaaatagtttctccggtactgaggaaatcaaaattgaaccgcccacttagcgacattatgggcaataaaattacacgttctactaaatacattagaaaaattacagctaataaaagaggtagtatcttgtaaatagttagcagttctttataataattatattaaattaaaatatagtagttaattatatcaatagtaacataacaaatccgccttttatactatttctccaataaaataacaaacaatcgcactatgctcatccaaggccataatcctgaaatgggacatgatacccaatcaggacatagctatacatactctctatatggaggggttttctcccttctccaagtattttttctttttaatttttttagttataattttataacttttattaaatatttatttattgccctcctcaaattatatttttctgcactttagccccatataccattcatgaaaattgagggtcttttatattaagtcgaaaccctagatatagatatctgtccgagattgaaactttccgtaccgcgaacacccttaactattctaaaaggaaaaaaaaa

SEQ ID NO: 82206 - DNA, 906 bp, Cannabis sativa
tttagcatttctcttttaataattttgggaccgtaacttaatttgtcttaattgagtcattggtaactatctcaaagcagggtgtaacctaggctaaagcgggttatattggataatattattccgcatggatcaaatgtaaaagtattgagtcatatataagaacatgaactacttcactcatcactaattagttttgagacggaacctcatgattctcaacatgattcataattggttttaataaatatacactttttttttaaataatttttaaaaatgttatttatttttaaaaaaaggaacccaaaaaaaattatattttttatggcccaattttactaaggttagactgtctcagagggttctcattacagaaatgacaccgcctacaataaactaacttttgaaaaagttaggcctttaattcctttcaaaaaaaagttgtaatgagttttgaactcttaaactaagcaaagaaagatgtagaaaatctctaccactataccaccagtactgatatatttatcttcttttcaatattattccttaacatttatctagttattacactgtcttctaatcaaagtaactctaaatattccttctttactttgcacaaaacaataaaatgaaaagaaaagaaaactctaaatattccctctactccttttgtaatagattttaataattttatttttttcttctcaatctctctttttgttttttttttttttttttttggcataattatgtagcaaatttattaacttttgataacatattttgaattttgaagtgtaattcatgggttttctttataaggaaaaagaaaaacaagaaaagacaaacataaaatgggatatattgtagtgtcttaaaggcaagtagagttaagagaagaga

SEQ ID NO: 82207 - DNA, 1132 bp, Cannabis sativa
taaaattaatcttaattaatatttcataattagaaaaaaaaaattaataaattaaatagttaggtgaggtactttattaattattttaataaatttcaattgttcaaatcaaaatgactaatcacaacctatttaatgtaactaatcaataaaacctctttaatatagattatgcttcctttaaggaactatgatgattaattgtattaaatagatatagagaaaagaaaaaaaaaagtacatggtttccatatgttatatgcatatatagattgcttttaattttgtatatgggttttagccttggttatatacgaaagaatatcgttagataaatatgatcaaagtatcgaaatatctctttacatataacaaattaaacttttatacatagtagtcaagaaatattgttagtatatatggaagaaaccacttccatagtcatgatgatatttttcatatcattgttagtaatatttgttatcaaatattgctcctcaaaataatgaacaataatattatgccaaataatagttgtagtagtagtagtgcactagcaccacttcctcggggtccttcccgttggccaattctcgaatgcattccggagatgttgcgaaacacatcgacataccaatggatccacattctcatgaaagaattggacacaaacatattgcttgtatccgtctcgggacaactactcatgtcatctctgtcacctctcctgagattgccagagagttcttgaagaaacacgacatggtgttcgcttcaagacctctcacaggtgtcactcgtttaatctcccatgattacaaaaccatcatatttgcgccatggggtgagcaatggaagaagatgaggagagtactcgtgtctaatgttttcaaccgctctacagttgcttggcttcttcgtaagagaaatgaagaagctgataatcttgttcgctttgtttacaaccactcttccgctaaaagtggaggagtggttaatgttagatctgcggcacaacaatacatagagaatggagagcataatgtgcttgatgaaaataataaatagtttatgttaattttagttatgtgcggattaatttaagtttttaattatgtttggatttatttaa

SEQ ID NO: 82208 - DNA, 1173 bp, Cannabis sativa
taaatgatgcatcaatacatctctgataaagagtgaatagaatccccttataatatatttgtattaaattttgtcgttttaattatggagtatttatttaccgacctttcgttatattgcgcatattttgatgttactgttagctagaaaatgctaaaacactctagtcaatctaaaacatgacttagtcaaccccacaaaataatacaaagctagctcttaatatagcccaagagcttttcctcaccatacatatacatatattctgatcatacactattctgatcatacacatctatatatatatatatatatatatatgagtcaagcactaataaaattcagttaatttacaaagccctttttccttggatcttatctgactttttctgttttcactgtgtaacaaaaagagggtctggtgagaatccactttcataatatatgagatcccttgttcatattaatataatatatattaatgcaatcaacacggaactcagtgagtcgactcggagagaaaaaaaaaacaactaagagacagagtagaaagaatataatttaaattaaacccccctaatgattgctcatttttgggtaagtaatatcataatgattaatcattatagatattgttgtactcacaagacatcttaatttttctcaactcgccaaccccaactcacaagcaagttgatgatcaattcatgcctaagtatcaaagtgggagttataattataaccataataattgattaatttaattaattacctcctaataatacacacacacatttttaaccaagtggagtctaaagcaaaacaaaataaagtatagttcttagatggactataaaatattagattttgatagttataaaaatattgaatgttctattcctaataatacacaataccagtaaaaaaaaatgaaagactacactagtatgacaatagtatatatagtatagtttaattaattatatatatttgctataaaatatgaaatctggatagacttaaatatattaaatgtgattcaatagacactcctactcttaataatacacaatatatttttgggaggatgataaaatttaacatccaatatataattcaataggatctggaataacctaaaaatattggatgtggtttattggacaatattgc

SEQ ID NO: 82209 - DNA, 652 bp, Cannabis sativa
aaaaaaaaaaatacctccccaaaaaaattaaattaaactaattgtatccttcattttttttttttaaaaaaaaaaaacaattatatcccttgatttcaacgttttcacaccatcaatctcatatcttggttaccctctcaacaaaaaaaaaattaataaaaataaatagctattacaacatttcatgttaatgattgcatctatattcaactcactaattgaatccaatgtctcaaacaacctctctaaaccacaaatcatgttatatttttcaactcaatcattctcaatcacttcaagcttaaggagtgtgtatataaattattatatgttataataataatgataagtgtaagtaaaagttatctcttggttcaagtagagatagtatttttttttctgcatgtccatggaattttaaaaaatcgaaacatctcatagatagatagagaggtaggaatttatcgaacgaaccgcacggaatttcaatgaattagatttacaaaaattattaactcacttttcactataaagtgaagcttttggttctctgatttttatcccattctattttactagtttgatcgtaaaaattttttgtatctgtatttccggaatatgagtgtgtgacttgttagaattgatcctatga

SEQ ID NO: 82210 - DNA, 1185 bp, Cannabis sativa
  modified_base (26)..(45): a, c, t, g, unknown or other
attgagttctttgattcactcgttannnnnnnnnnnnnnnnnnnnttcttacaacttctattttgggagcttaataacatgagcgactagaaacatgttatacaataatagaatccaagctttcctaatataacgaatattagttccattatagtgttaattctgagtgtgctaatagttgaatccaaatctatgttaagttatggattaactattcacattgaattattggtacataaggaatcaagagataattagaaaggtaaaatgatattttgaccaactctaattatgaactaataattggaggacaaactaattatgttgattatggaatcaagaggtgtttgcgttttccaaacttcctttgtagtaaagtccttaaagcatgctacttttcgaatcatagcatagtggctgcgaagtgcggaagtaatgcatccttcatgtgacaaagcttgatttgggagaagaaactcattttgaatggatatcgatagagaatggggatggaaatgatgttagggtgttggatgatccttggctgcctagacctgtcactttctgagcttacgacaagcttgagtttccagatcagctctatgtggtgaatttacaacttacagatggttgttgggatgaggattttatcaaagcaaattttaataaggatgatgccaaattaattcttagtttaccaagtggggattggggagtgaaggacaaagtgttgtagcattatacaaaaaattgagaatatacagtgaggagtgggtatcttttagcatcttatatgagagagatatcccaccaattaaatgagaaggagaaataatcttggtgaaaaaaattatggaagacaaatgtgcctctgaaagttaagcacttcgtatggaaggggtgtcattattggcttcctacgaatagtgctttagtcaaaatgggaataacagtggcgcctcttcgtacttgatgtaggggcgagcgggttgaggatggaccgcataagttatggtgatgtccattgagtgtggaagaagtgtggtctttgggatcaaattcgccaatttcgcttaactgatatcatatcatttttttataggctattaaaggtttagtcttcttcttcctttgctttttttctagttgttgcttggcatctctggtctgttagaaattctattg

SEQ ID NO: 82211 - DNA, 1178 bp, Cannabis sativa
gaaatagatgcctggtttttgttgaaaacgtttacccacaagacacgctttaaggcgttgaactgtcccatcttgattcaatttgacacgaaacacccatcgattatcaaaaatgctcataccaagtctccttggcacaaggatccatgttttgtttttaagcaaagcataaaactcagtgcccattgctgacttccaacgaggaattttcaaggctgcacttgcactgtctggttctaactcagttattaaggccaatggtgagggagagaaggcatgaaagacctaaggtttatgtataccagctttggctctagttatcataggatgagaaggtgtgtttgggttgggtggagtgttaggcgctgcattatgttgcagctgggagggtgaggtttggtgtggctgtttggacaaagataaaggtgaaagtggaaaatctacatgtaacggtatagtggagtaggagttgacagaggcacgagtggcttgatttgctagacctggtgagttgtgttgttgagtgataggagaatttgaagaaaaatcatcttgttgggaggcagaacaaggagctccatcatcaatcataacatcagtggcatgatctgaagtcacagtagacaaataaggcagccattgagggtaatggctgggtagcaatggtggatctgtatgagcagtaggataagtaaagccactagcaaaaaggaaatcagtttcatcaaaagacacactactagcaacataaacatgaccagaggtatgaaggcataaataatccttgtgacttgggctatgccctatgaaaacacacttggcagaacgaaattgtagcttattggtattatatggcctaagatatggatagcaagcacaaccaaaaaccttcaagaacttatagttgggagagagaccaaagagcttttgaataggacatttatagtttagcacatgtgtggcaagatgattaataagaaatgttgcgatttgaaaggcttcccaccaaaacctttgaggcatgctagagtgagcaagaagagtaaggccagtttcgactatgtgcctatgttttcgcttgactttgccattttgttggtgagtgtgaggacaaggatgcctaaacttttcacttattgatttgagatatggctcaaacttgtggtactcacctcccc

SEQ ID NO: 82212 - DNA, 1274 bp, Cannabis sativa
attattgagttttgccgattttacagtattattatcttttaacaattgtagtgattttattaaattaatataatattaaattttttaatattattaaaaacttaatacaataataaggaatatttttttagtgtaagttttggtgttatcgttggagtagaaataaattttgacactaaatttggtgatagtgttacaccaaatttagtgtcctccttggagatgctctaagagtgtgtttgataacactttcttaattaatttttttattttttttaagtataaagtgaaaatattttttaaaatacatgtatttataaaaatgtttccacttttcaaatgttcaattaataatctaaattttgaaaacaaaaaaagtcactttcaaaacttttttaaatagtgtttttaatcaatattttggattccgcccaatctagaccttaggacccacacccggaccctgacccagaactggacccggacccaaagtctaaccccgacccagaccctaacccggacccagactttaacctcgaccctgaccctaacccggaccccgaccttgaccctaaccacgaacctaaaccctaacctagacccgaacctcagccccaagccccagccccagtcctggacctcggccccggactcggaccacggaccccaaacctgaatcctgaccccaacatgaaacttggacttggaccccagacttggacccggacctcgaccctagaccctgaactcggactctggacccgaactcgaaccctggacccagactcgaacccgaacaccgaacctaaacttgacccagacccacacccagacacgacctggatccctaaccttggacccaaaccccgaccctgacctagatccagaacccgagcctagacccatacccaaactcagactcgacttaaataaaattaacaaatgaaaataaaaaataaaatttatacaatacatttatgttttctgtttttaaaaccgaaaataaaagtggttataaaatacatttttatttttttaaaaataattttttaaaagtaaaaactttacttttatttttatgattaaaaaattttataataaaagtagtgtttgataatatttttatttttaaattctttaatgaaaaaaattaagtatcatttttaccaaactacattttaaaacacaaaatttaagtaaaaagaagagaagagaacacaacacggaatcttatttcttaacttaaaaaaaaaatagatttccttccaaatttc

SEQ ID NO: 82213 - DNA, 671 bp, Cannabis sativa
aaaaaaaaacataaacgaaaacaaagcaaccgaagcaggcaatctccatagtcatcaccatctggtccatctccatttccaacatcaaaaacaatctctcccatccaacggtcttaatttcatcgatttcaatcactttaaacctcttcttcttcaaatttaacggttagatctttttttactctcttttccaatttccattttcagttttttctatgattcaaaagcctcgctcttctgcttcaatctctagggtttatattttttttattgatttgaaattgagattaagggtttacgtttcgatttagatgtagagggaagggaggttttggtttgattatgttatttatacttggatgaattgatttttgtaggtagttgaagtttgaagctcatcatggctaggataaaacctcaggctttattacttcaaagcaaaaagaagaagggcccaactcgaatcagcatcactaccataattttgtgcaatttattagttgtattgattgttttgtgcttatttggctcatatcgccactggtctagaaggtgtttgttctttttactcttcttctttttgaattttatttaaatattgggtatttccatttctgcaaaattgtttttttttgttcataaatttattttttttatttgacagggcattg

SEQ ID NO: 82214 - DNA, 1718 bp, Cannabis sativa
taaaaatactccaaacacgattaaaactcaattaaaaatatattaaatactaaaaataacctaacaatttgtgggattaatagattgattagaaatctgaaataacattcattattagtaattaagagtaattgttgagggtggagattaacctttaactatttcttgaatatcgtagtatcacattctatttgcttttttatttatgttatttaatattcatcattaaaatcctctttttttaattcttgttactaatttttgaataataaattaataatagttctcgcgggatcaacttgtatttactgttatactaaattggtaaatagaaataaaaattagtaaatttattgtagtaaataaaactcaccacttgattgagtcttatgcttatgatcaacagagacaacttcattttgataaggatgtgaataatgttctcactgccataactaaagtacttaagtcctcagagggtgctacttctattcccattaatgatagttcttctaatggtgatggtcccttatttgagcatccaataaggtcatcacatcctctagttaatttatttgcactagtttcagatccatttgagcctgatttagccttattttccttcgctcatgaggagtctccatcttttttgcctctagttcaggctggtttggtgaagggcgagtctcagtctcttcctactacagctgatgttcaggggagtctgatggtggtgtccaggggtagtttgacattgctattccatccactattgatccaatttttgttggtccttctgctattcttcctaatgttgctcctgatgtttcctctttggtgcaacctgttacttcatccattagtgctccttatgttgctcttgtggcctattctaccagtgagtgattatgatcactgagggggagatagctgttattgattttttgtaaagttgttccaaacattatcacgtattttgggtttggtctcatggttgtgttgttgttgttgatagtaatatttatctttgtttagtccttttgtatgaactggttatatcttttgggatgttttctttgtgtctttagtctttttgttttatctcttcgggtttgttcgatgatcgtaatttgccaagggagagattgcatgtgtcgtgttttacagtggaaaattatgttggttacccttctgtctgtaagggtgttagttgcatctagtctagctttgataattgatcgtttaatactttgttagatgcatttgtttatctgtaatttttttattgtttgtcaggtcatcatcgagttcatttgtgtttgttggaacaactcattgccagctgtaatgatttggtaattcagttggttaagtcggatgtactgaagtagaggttataaaaagcttaacaagctttttctaactaactcttcttcatctttgttagaatctactttgagattattgctctgctagagcaaaactatttcgtgttaatcttttttcagtggaaaattatgttggttacccttctgtctgtaagagtgttagttacatctagtctggctttgataattgatcatttaatactttgttagatgcatttgtttatctgtaatctttttattgtttgttaggtcagcatcgagttcatttgtgtttgttggaacaactcattgccagttgtaatgagctggtaattcagttggttaagtcgg

SEQ ID NO: 82215 - DNA, 1372 bp, Cannabis sativa
  modified_base (560)..(562): a, c, t, g, unknown or other
  modified_base (1230)..(1235): a, c, t, g, unknown or other
cgatatcatacaaaaagtcgagattggttgaagcagaatatgaacgaaaaatgtgcaatttttacaacgtcattgatcaaatttaggaagtacactacctctattggaacagagttctattgttcaaatgttcttggtacaataccaatgggaataaaatgtatactgagtatcattttactagtataaacattagctcaaaatggtttgaagatgaactatttgttcttgccaatcaagtatgttcagtcttgtatttagatgatattaaaagttaaagatttgaaagtagtgtagcaagtgaatcatcgtcacatttgggatataccaccaaagtcagatcatggggaagatgatgatgaagatcccactatcatcggttctgaagcatatcaagaagaattttcaaataatgttgatttaaattttaattcaacaataagtgatatcaatcttattcgcgatgatattgaagatatagaatgttatgatggagtatttagtgatattccaataaatcataatgatgacactaaagaagaactgtaacttgatgattnnnaagatataatattgagtgataaaactaattaagtataaagtgtgccaattttttttaaaaattttcaaaataaaaatttgttacatgcaatactaattaattttgtatttttcaggtttacaatcatgtcaaattagaagttgtgtgatctaccactaagccgtctaaggtcatttggtccaaagaagtcgcataataatgattcaacatctacaaaatctccaactcctatgccatgttctccaaatgaagattcaataatatcatttgatgatgaaattcaagaactcttaggtacaaaccgttcatacatgcaacacttaattaagataatatatacataaatatagttatatcacaaattatattgtaattatggatagagtcagagaagaacactcgtggccctactcgtggagatggggtcaaacgttcataaaaaaatgatacaagtgagaaaataatttctgataggaaaggtgaacttagagttcatgggccaaatgccactatattaggaaacactgttagtgtaaaagtacgtcatcatgctccacttcagtatagtggttgggccaaaattcctccagaagataagaaagttgtatatgcttgcatcatggtatccatatttttaatataatttttatgtacataaagctataatnnnnnnatttatttaataattatttttttttaggacatctttgacatagattttaaaaaagatccatacctcgaaactcatttgaatcactattgtcaagtgtgatatagaggctaccataacaaatgccacagtaaatacaa

SEQ ID NO: 82216 - DNA, 977 bp, Cannabis sativa
gcaagattgtaaacaatcgtatagttgcaagtaatgttaatgtgaaactttgtttaaatatcaattccacatactccatgcaagtaaaagtcgtagaatactatgtacactttaaccatctcttagtagatacttgatacactccaatggtaatggttggattacttctctccaaattgttgcttttaaaggcacattcaattccaaaactgttaaacttcgcttccttctctcgctaaaaatttaaattactgaatactttctctgccataacgtcgctgtctagactgaaaggcttgtaatgcctctagaaattcaaattctccaaaatcaggccaaagggactgtgaaaagaatagttctgtatatgctaactgccacaaaaagaaattgctaatcctaagctcaccactagtccgaataagcagatctgggtagggaaactgggtgcaattggtttcaagttcttcttcaataagagactcgctaatgtcctcaggcataagaacaccatctttgactttcaaggcaatctttctgcaagcttgaacaacatcatactgcccactatagcttactgccacaacaagttggagccgagaattattctttgtgctttcctctacattggctatcagttcctgaagtgaacctgggagcttagacttatctccaataaacgaaatttgaacatcttccctgcttcaagaggaccaaatcaaatgcactttcattgctttctcataaatgataaacctaaaaaagcaaactttgaacaataacacctttaagaagcaaacaaatatacgtcttcaacagttcaaccagagtaaaaggttcattgtgtttacttacataaataataagactaaatttgggaaagataaacaacttgctatccattttcattgctttattaggattgttttcatacgacattagcaaccaacctcacctatataaatatatatatatat

SEQ ID NO: 82217 - DNA, 1370 bp, Cannabis sativa
aaatgctaataaagaacaccaaaaattaaagaggttcggccccatatgatggtaatagcctactctcattgtattatattaatcggagttgcaaagtcaagaataagctcttgaatgcaaggaatacaaatggcagagtttctgctatttaagtgttgattttcggatccctttcccaagtcatcggtgaccccttatataggggggaaatgttagtgcttctcgtttcaggagacgcgaccattgcgaagatatctcaaccgtcttcttagtttttagaagtggctggagtctgattcttgtgattatatcccgctactttcgtggatttgtaactaccttgagcttcttgcgagatttgaatatttgaattagttactgacgataagagttctccccagagggcggtatgaccgcttaactttccctgggggccactactttgaggtaacacccccaagaaccattctgaagggggctgatagtcgtcaccttgggggctaccctcgagaccccttccacttgatcttcgacattgtgtatagtcttgacgttatgaagatgcattatatcaaccatgtcttatgtaggtgaaatgtgttacttggaccatgagggtgtggggagtttaagggcacacccctagactaactccatcaccttttgagtagattgttatatttgaggtagggtagtagtttataccccctagactggtttgactcccttaggtgtgtggtgatcgtctatcccgtttgtgggggtgctagtccatcttccccctaggggtagtcactttgcttaagctagggcacaatgtgagcgtcagacttctcttctagtggtcatgactttccacattcttcatcaattcagtcccgatattctcgcgccacgtataatcatttttgccacatcaccatcgccaaaattgggttaaacattatttttagtagttagactatatggtagaaactttttgtgtagcccgtgcttcaattttattgttgatgactgggtgatacgatgctgggaataccatgcttataccatgcttcatggtggaaaaaaggggcaatttaataattttgctttatttttctttagttaagttagtggaatttagttagataatgatgttaattagttaatatagctaattttttttttattgtacttatccaaaatcaaagaaaactaaaattagaaaagtattaccattttctctctctttcctttggggttcgaccaaagcaaatccttgttaggctatttttagcctaagttttgggtcacattttatagttatttttcttctttattattgtttttggaatagaattacgcttgttttctttggtttcaggttt

SEQ ID NO: 82218 - DNA, 1350 bp, Cannabis sativa
  modified_base (36)..(39): a, c, t, g, unknown or other
tatatatgtatatttactctttataattatttattnnnnttaattttttttttataaaattatatgaaaaataataaataaaaattattttaaacacttagaaagaaaaaaaaaatattattgagtcattagtattttacaaaaaaaaaaatattattgtcaaaaaaaagttatcacattccattccaatgtcaaccaaacacggtaatgttgctatcctagatagatttatcatttccttgatcactttccaagtaatgttacacctattcctatgtaatgaaacctgcataccaaacggccccaatagggtaggaagaactagcttgtgacttcgaaaataggtaattttttctgtcaagtttaattgcaagaagtgcaaggctttggaaaggtgatgacataacagtttgtgtagggatagaggaaggtgcataaagttcagaagaggctgttatggtcactcgtgggtcatttgtggggttgatagaggacttttctgttgaggttggggtctccattggcttgaatcatggggcactttctgctctaagatttactcctagttaaggaaatcaatcctattggctaggctataacagactaatattcctcaattgggacaactaacaagggtcaaaaatagtacaaaattgcacagcaaatatttgcaacggtaatatttggtattgatcctaataaggcagaatatttttttttccttcaattctgatgcttcttgacctttcatttcaacactctctgaaccaatgcaacaacctctggtcatatgatggtaaaaatgagatattgtttttaattagttatagaaaagttaagcatgagactctacaaaatcaatgtaattaatatacatttcaaaaaatctacttaatgtaattgtatatacctacatttaataaaaaattgtgcactagaagacaaatagtacttggatatgagtgaaatttttgcaaaaagttttgagcaacaggaacacatgaaaaggaagagtaaaacgtttgtgcacagaattagagcagattactttgcaaaaacaaaaaaaagaattagagcagatcgtatcttcataatagaataaccacaaaagtagttgagttgcttattattaatttatatcctcaccttattaagtgtacgtaccgtatatgataaatatagctatatatacaagtacgtacgtgtacaactcattacaaaaaaacattatacactattaatacactacccctattcgtcgaccgacattttgatcactccaaatgatcttgcattcatgagtctaaaaccgaaagagtgttgatagtaacagtccacgttttccccagt

SEQ ID NO: 82219 - DNA, 1749 bp, Cannabis sativa
tctactctcttaatctcacatggtatcagagctccaggatcgtccatggagtgtacagattcatcaaatggagcagcagcaagattgaacactgctcaactccaaacacctcaagtcaatcttccaaaatcctatccagtcacctttactcattctttatcgataaagcttgatgaacataacttcttgccatggcgtcatcaagttcatgcctccattaaaggtagtcgtcttcacaaatttcttgattcaactcaaattcctcctaaatttttgaatcgtgatgatgaacgtactaacaaaattaaccctgccttcgaggactgggaacaacaagacaatcttcttgtgtcctggcttctgtcttctatgacagagaaaacaaccaatcgaatgattggttatgatactacagcacagatctgagaagctcttcatgaatattacactgcccttaatgctgccaatatcagcctgtacaaaactcagcttcgcaataccaagatgatcggttccctcaatgactatctgctcaagatcaagaacatagtcgatcttttggccacgatcggacacaagcagtcagctcaagatcacatcgaggctatcttcaatggcctcccacctgaatacgatgtgtttgtcacctcggtcaccacaaggaaggatgcatactcagttgctgaaatcgaggccttgctcatggctcaatctgcaagaatcgaaaagaatgtcaaaagcctcgacattagcaaaggagaagctcatctttcacaaacaagataccctgggttcaatcaatatcctcgcagcaatttctctggtcttcagcaccagaattttggtaatggtcgtggtaattccaatcagtataatcctgtgggtaatgttcagcatcagtacaatcgcagtggtcccaactcaggcagaggacaaaatagctcagcaggccgtggtggtcccccctttggtagaggacaaaacaacacatggaatcaaaagccccaatgtcaattatgccacaaaatgggtcatacagtgaagcaatgtttttataggtttgataaatctttcacgggtccggagtgcttccaacagtttcctcctacagctaatgtggctgagatgcaggcatgctttgcaacaaatgaaactgtcagtgatgacagctggtaccctgactcaggagccacccaccatctcacaccagacaactctaatcttggctccagctcaacctacaatggccaagaacagatttacattggcaatggcactggtctaaacatagaacatataggtaatgcctctcttctctcacctttttcatcttcaactcttcaactcaataatttacttcatgtccccaccattaccaagaacttgcttagtgtatctaaatttgctcttgataatggtgtattctttgaatttcacccctttactttgttctgtcaaagaccaggcaaccaagaagatcttgttggctgggaagcttgacaaaggtctttacaaatttgagtctcctcaactaagtcaccagcctatcattcaacagccattctctgccaataattccaacatacaatgttacaatagtgaaaagtctgtttcgaattcattgtattccctttggcatagtaggcttggccatcctactgccaaagttgttaaacaggcccttcaatcttgtaacattcaatttcctaataaagatttacatgatttgtgtcatgcttgttgtcttgg

SEQ ID NO: 82220 - DNA, 774 bp, Cannabis sativa
gagtactaattataattttttaataaatatgggagtattatttctttaaaattttaaaaaattctaattaatttacagtgtcaaaaatagacttaaattattttgaacacgcttagaaatctgaaatgtcataaactttattgtttatacttaaactatttagaactttcaaaaatttacaaagataatattgtatataataaatttcaccgttaaaaaatctagcacgtgtctttggatggaaaggttgagaaaagaggttataataataggaggtaattaacacaatttttagcatattctaaatttgtcacaccttttacaatactatgaaaattatatttttatgaaatgtgctcaaatttagcaatagagatgctcttggtgtggacaatttagaattatataattgaaaacattaggttccattgtatctttcaatcaaaccctttgtatgccttgtacacttgtatggtttaataataccatttatcaagttgagctttacaaacctcaaccaaaatggaggaaattcaggccgaaaaagaaaattaaataaaattgggggttaatttttaagtgggaaaacattgaaataataatgcttgctcatttacaaatagtaataaaaatatactgcccaaagaagtagactggttaaagcacaaaaatgcagatgagtagaagagaaaaatagacctatgcaagtatgcaacacaaaactttaacagccatataaccaataaccgtatctcggttgtctttagaaaccaa

SEQ ID NO: 82221 - DNA, 2647 bp, Cannabis sativa
  modified_base (2612)..(2612): a, c, t, g, unknown or other
acagacaacatgtcaacgactacactgacacgacttacctaaatgcgtctactaagaagtcatttcttgtttagattgtaggaagccaaaggtgtatttggttagtgtgagtcattattttcatgtatgatagacatattaaggattgttattagttgttgaatacatgcatattctagatatctctttgatatgttgtgtgtgcacacttgttgatgtaagttagtggcttagtctttgtgctatattcgagtagatccagatcaatagttatcataatattttatgaatctcatatatatgtctcattatgtattatacttggatcatgtcaatacaatatgaagcataattagtcttatagacattagtatttcttgagatttctgtctgttgacatgattgcatagtgagagcacatatatatgtaattatgtaatccaagtgggagaatgttagaatattttatgtgaactaacataattaagtgttgctcactcagtattgatattagcatataatggtaactaataatcggtaatgcatggtaatattatcgggccataataggatagacataacgtacaaacacgctcgaagcccatggacacgctctaaaatgtttttggtcagcccattgggccaagacaatgaattctctctatttggactataagacaaaaagacccactaatccttataaaagggtcataccccttattagtgactaaggatgtgtgtgggtatgtgtgtgttgagagtgaaaagagtagtgttacacactccttgcatatattttttttctttccttttgtgtagattgatcaaataaaaagataacatgaagaatcaatacatatgagaatacatatgagaggtatgttcattatttttaatactctaaatataataatttgattttgagttacttgttgaacattataattgttaatgtttaaatcatttatatatttatgttttcataatgctcaatattgtaaagtaatttaaacatttcttctatatcaaaataatcatcttaaagaataaattatgataatacttttttttttgccaaaataattagcagtataattaaaattcttttttaaaacacctattaagagagaaattattattttgaagacacctaattttgttaaaaagaaaaaaaaaagaaaagagagaacgtgcaaggactgcacatgttttttttaaagtttgactttcaactacgaactactaagtgataatagtctctaagggcacctccaaccctagcaacgttagtagggcccattttcaattttataactattaagcttttacactaaccaaccaggaaaaaaagaaaaaaaaattaaaaattaaaaaaatatgaacatcaatggtaggcaggagcaatatgcttatattacccatttaaaaagtgagcaattttgggcaaatggacccacactttctgatagtcacaagtatagaaactcccattggagttgcactaatagaataggcaaaagttttttcggtacggtatttcactgacgtggaaccttaattcgtgttgattgtttatgtaaggttattcttgtaaataattttaaaactgtgtatattaatgtaaaaattctccaaaaaaaaatctcttttaaaattatatatatttttaatatttttgaaaaatatcacatttttcttttctaaaataagggtccaaaaatattttgttttctatgactcattatatttctagaccgactacacttttaagccaacacttaagataaactttagaagtttttacaccacatattgaaattttttactttttttctattttactgtggggcggaattttttttaaaaatactgtatattttttatattgtgtactgtgttaagtttttactattatttttagttgttccactattgttttcaattgttatgttttgctgttttacggttgttttataaaaaagacagtattttgtagtttaataaaaattaaaaaattccccataaccttatgtataggtgaatacatatagaaatatatatttgctattttttttttaattttaattaattatttatttggttgagaaaaattaagacgaattgaggaaagtgcaaaggtagatgaaattaattctttgacaaaacaaagttatacgtatgaatgcaaaccgtgtttaatttgtccattctcatctgttggactttttaccaattgtagactcgtaattaacaaattgtacaagttataactccttatcttattcaatcataacaacaactccacatcaattttgatcatagttttcttctcaacaaataaataaataaataaaataataaaaaaaaaaaatcttgaaatattttcacagtatatcatatatcttgtccttagaattaatcagttgccgtaattatacattctcattttaacaagcacacgtaaatatgatataataaattgatatgatttcagtccaaaaaatcgattataaacatacggctaattcaacaaagttttaacttgcattacttttcttcaaaagataaaccaaaataaatatatatataaatatatatatatctattttatntaaagtgtgcctatataaccgaattcttggtttat

SEQ ID NO: 82222 - DNA, 1940 bp, Cannabis sativa
tggatgtgaaggagataagcaaagggtacttctcagggagccttttcactttcaaaataatcatattgtgttatacacgccaaatgctctacaaaatattttacctgaagatcttatattctcttctctttgggtccaatgttatagaattcattttcttagtaattctaaagcattggccaaagctttaggagacatcattagagaattttcggaagtccatgaagactcggtggaagaggtttgtgttcttttctacaatttttgaggtaattagatgtcactaagcttttattgaagggtcgcaacataagacttaagcagattcatgaaaaattctgggtggaatttcgttatgaaagacttccgaagggtgtatggagtgtggaaggcttggacaacatttcagaaatgcttggagtcgatggaaaaaattaataatggtattgaacctgaactaccatatggacctgaattaaaagaggttgtactccctaattctgggtatgataggtactgaacaaatttctctaaaggaaatgcctggtcacttctcacgcgcttggctcgaaattcattatcctcagcagttccaaccctttcaaataggaaagcaccacatccatgaccacttttgccagtagaatcataagagaaacaagaaaatgctagtactaaggctattattccaagatccactcaatccataaatgaaacttcttctttgatcagtaatgttgtgtctagttacctaaacgtttcggttcaaagtgtagtaatgttgaatgcaaattaagaatgccactactaataaataatttgccaccactatcctctttaaactgacccttttggccaatatcatggaccataattctagtgcaaagaccaaagcctcaagtcctttctcttcaacaactacagtaaataaacccatagtaaaggctctggatgtagatgatctatttgatctttaaatcccagatattggcaccattgccacttatcctcctattccctttaggatacatgctcctcattatggatttggtttcaagcctttgcaaatgatcaccattgcagtaaaagatgttgtcataagttcaactacgaggcaggctggagataaagaaaatgcatcccaaaattgaaagtcaaagagacaatttgaaaacctctcaatgaggaaaattcttaaaagatgtaggggaccaaagaaaaccttgttctctccaactttgtcttttggagatgagccaaaccagagtatttctagtcctgaaatggatcagtctagttttttggacaattttgcggtgactgcatcgcagccccccaactagccatgaaaatcatcagttagaatgcgcggggtctagggaatctgagtgcattccttcatcttcgtttgcttgaaaaggagaaatctcctcatttattatttattatggaaactaaactaagttctaatgtaatttctcgttttcgtcatactttaaattttaataatggacttgaagtcccacaggtaggtctatgagagagtttacttttactttagaaagatggtgtcaatgtaactcttcttaattttaattcaaatttgttcgactgttatattgcttttggcaatggtcctacttgacattttactattttctatggttctccagaacaacataatcggtgccattcatggagtttaaggagattaaatgatgtagctccacttctaccatggcttgtgattggtaattttaatgagatactttccaatacgaataagtaaggggggtgccttgcgaaatgaatctcaaatggatgactttcgacgagctttggatatttatatatatatgtacatgatactaactaaattatatactacaattaaaatatatatatcagggcagcacaattttatatcactattgtatata

SEQ ID NO: 82223 - DNA, 644 bp, Cannabis sativa
tagatttatgatttagggttttctatattaaagcacttttaaggaatatgtttagatctgtgatttatatatttcttaagtgttttataaaccctaacaagtaattctctcattttttttttgctattttatttattttctttgtggaaattattaaaaaaaataaaagatattatgctaaagtaaatatccaattgtcgtaaggacttttttttatggacattttttgtagaaattatagctttatttgttttatacaataataaatattatagctataacagaaatatctttttgtatttttttgaaattttttgaatagtttacaattaacattaaatattaagaacaatatagtcatttgtatgtatatatatacaatataaatatacttgtaaagtcattttctcgaaattgtacattattcataactttgtttagaaaaataataaaatgcatgctatataataactattataattaatatacatgactatcagataaattatatactaaattaatcattctagctatcatccttaattactctatttttttttcattagttacatgttattttattcaaattttgtgttattaataatttttctttttatgcatatcatgtgttttattcaaaaagc

SEQ ID NO: 82224 - DNA, 555 bp, Cannabis sativa
ttttactattttggaaaatacatagtctattttgtcatttaacaaaacaaatagtccaatcggtaacttttacaaaatacagggtcaaaataatatttaccgaaatattatcgaggatggtatcacaattgcaaatgttttgttaaagtataatatttatttatttcttgtgttagatgactcaaatttaactaattgtcacgttatcttttttcttttcttttatttttttattaatagggtacaagatagaagtgttcataaatgttttattttttttatttctttttagggtcccaattattggtaaaataaaataatttttctcattctatcatattttatatttaatacacattaaggctccatcccatccttcttcccaacaaattttgttttgttataataaattgcagcaattatttcatcaatttaagtttttccagttatccatataattagtctcttaaactcacttagtttcagtaatattgatttatgtgttaagccttaggctaagacaaactataccttttttcctttgactaattcaaa

SEQ ID NO: 82225 - DNA, 846 bp, Cannabis sativa
aataataataatgtaaatagatttcattgaataaattaaagctttttatttatttatgtgagtgttgatctacaacaagtaataatgtgtaaacttaaaccatacggaagcatggctcctgagtaaattacagttgggacgattttttttatttattaatttattttaaaaaaaacttgtatatatatataattccctcacatatattttaaaatcaatccaattttgttttttgtaataatttttgtaccaaatattctagttacgcatgataagattttccatttaaaaactctgctggttccaaaagtaagtaaatatttaataaataaataaagataaaaaggtatataaatatatattgacacagctttatagagatcagaagacaaatttttgcaggcattttgactaagtctataaaggcaataataataataataataatgttaaaaaaagattgatttcaattttcaaacatgagagataaaaaaagagtagttaattaagtgcatggacaaaaaagtaaccctaacacatatatattaatgcatatttctgccaatatataatagagagtacgtacgtatacataaatcagtaaaatttgtagtactgaaacggtgaaaaaggtaaggagaccaatagcatatatatatatatatataaatataaatatagggatatgattttgtcttgttattgtactttcacgacttatctaatctgtgatgtacgacagccgtcagatgagagagttatttgatctgacggctgagattgatctaaggaaaattaaagttaaaaagaagaaacgtaccctgacactcatttaatgtaccctga

SEQ ID NO: 82226 - DNA, 1393 bp, Cannabis sativa
  modified_base (661)..(685): a, c, t, g, unknown or other
ttgaatatctaacatataatttttttaatgaaaaaaaaaaacttgtttgtactactttcggcttttaggtcaattatttcccaattatataagtttctttcaccaattaattcatttcgtatataatatataatataagtcaacctagctaattatatataggtccctatctaagttatcatatataatgttttatttaatgaacctaactaagttatagttagtaatcatgaaataaagagaatatattattaagtaaccggtttcttcatcagaaactagttttttggtaattttttcggcgacaataacaatttaaacgactttttcggcatcggcagtaactccaacgacttttctgacatcgacaactactccggtgattttctgacaccaacagaaaactccgacaattttttctagcctcaatgacaaataaaaaacattaaatatgaaatttaaaaacctaagttacatatatataacatacaaataccataaaaaacacttaaaaataattaaaaaaaaatatatcatataaattggttaaactcaaaaatgtcatctttaaataaacaacttttaaaatcccacaatgagtataatttcctcctatgatttcttcttcttcttctcaaaaaataataacaataataataannnnnnnnnnnnnnnnnnnnnnnnnaataataataataataattgattaaaaatttctcacatattttttatgtattacgcgatttaatgagttagattaaaaattttcatttacttttattaaaattaattaataaagattttcgttagtggaaatatacatgtaacttagaaagattttattgataggtaatttttatttttatggttttaaggtacaatttgtaaatatatcatttttctttaaaaaaaaatatatctattttatggaatttttttaagaaaaatttaaaagataaggttactagttaccatcatttttgccatatgtttttgacaattggacttttagacaataagcccacatatcatttataatgtagtatttttgcaaaccctttcattaagtaggtttgggcttcacttataagctcatgtgtcataaataaaatgataaaaaaaaaactttatatttttatatatatatttttctttatatttttaccgttttaaattatttgaaaattctataatgcactcctaaaacagatgcattgacatatttctatttattttaatattttaaataattttttagtcaaattttttctcatgatcatataagttacaattatttcagatattctgtaaaattttaagaaatttgaaaaaacttaatacgccaaaaattgtgttcaaacagtgtgttacacgcgtgactattttattttat

SEQ ID NO: 82227 - DNA, 1071 bp, Cannabis sativa
ttcaaaaaaaaaaaatagtagtatacataattttattatcatgatataaattttttgagtattaatttagtattgttataattttgtgtggtatataattttattactacggtatattaattttcaataatacaatatatcaaatactgttgtatatattttataatttttattaactaattaattatatttaacgattttcttaattttttaaaaaaacaatatttactaacttaattttaaatttaaaaatattttacatctccgtcctaaaaaaaaaatcttatattgatattttttttttcttctatataattatttttgcagagcaattaaagcccttgaatggaatttttcatgggtcccgccgtacacgctctataatttgcaaaccttaaaaacaaaattctaattaaatgatcataaataaaattatgtcgaatagtattttttttctctttaaaatagttgcacaataaatgtaataataataataataataatgaaaaataaataaataaataaaaagagagaacaaatatgcatggaagtctaataagagtgaccccaccaccatagccatgaataggctggcattgcctgagttgcctcttaaacccaatttttaaaaacccaaactttgctaagtgtcaattgcttactcaaatcaaagttcaccactactcagttcttatagctatattattatatatattatatatcagcctataaactcaccaccaaaaacaacatcatcattgcatcaataataatctgtcctcttttcgtctataattatattccgacatttgtttatgtattcaagtgctttgcatgctttcccttaaaccattttcctcttatccgggcttttttgttccttaatccacactttcattccatagatttacgccacttctgttttttatttcgaccctttttcttaatctatccaaactaatcagagttcaaaacacgaggcttcgttttccggttctgtgattcagtttgtctccctgtttctgggtatatatttgtaaacaattttgttgcaggtaaggtgtttgattg

SEQ ID NO: 82228 - DNA, 2477 bp, Cannabis sativa
tcccctgctgatcaaccaaagatttcccctcgcttcatctttgataagctttggatggctgagccaaactttgagggacgccttcgtgatgcatggacgcaaaaccttccaagttcttcctcaaaccctttgattagcttcaccgaaaaactccgcaattgttcttcttcccttagtgattggaagaaatctttgggtccccctctagcaacgcaaattcgtgatactcaatctcagctcaagcttattcaatctctcactcaacctacaaatgcccaattagatcaagctcgagctcttgagaggaggttgaatgatttgttgcttcgcgaggaaacttactggcaacaacgatctcgtgtcacttggcttcgtctgggtgataaaaatacccgatattttcaccgtattgcttccatgcgacgtcaaaccaataggattagttctctcaaacgccctgatggctctttggctaatgataattcttccattctgacaaccattgagcaatacttctcccaacttttccagagccaattacctgaggatgatattatcgattctgtcttgtcgggtattactgagcgcctcacagatgatgaaaccacactgctccaaggttcttattctgaggctgaaataaagaaagctacatttcagcttgccaatgacaaggcgccgggtttagatggtttcaatggcagttttttccaaaaaaattggcatctgctaggcaaagacatcactatggcagcccaaagttttttaaatggtgatgcggacatcactgcaatcaatgaaacgctcatcgttctcattcctaaaaaacccaaccctgagcaggttaccgactatcgtccaatcagcctatgttccacgttctacaagatcatatctcgggttctggttaataggatcaagcctattcttagtcgcataatctctccatctcaaagtgctttcttgcccaaccgtctaatctctgataatattatcattggccaggaaatcatgcactctcttactcatcgaagatcgggacgacttggatggatggctcttaaacttgacatggccaaagcttttgatcgggttgaatggcgctttctcagaagggttatggagaaattctcttttccccaacgatttgtaaaccttgtccttgcttgtgtctcttctgcaactttttctttttctctaaatcaccaggttcttggacacattaagccatcccgaggtattaggcaaggggatcctttatccccctacttattcctcttatgctctgaaggcctttcaacgcttattcgcttacaaactcagcaagcccagcccagagctcagtctattggaataaagatcgctagacgagctcccatcctttctcatctttttttcgccgatgatagcctcatttttagctctgcttccccggcggctgcgacttccatcaaatccatcctcacgaattatagtctagcttcaggccaattagtcaatttttccaaatccgctttattcttttcccccaatactactgaggagatccaaaccaacgttgccgctatcctgggcatccctgttagtgacactttcgacaaatacttaggcctccctcaaacctttggcagatcaaaaaaggaggctttcaactatataaaggatcgggtttggtctcaccttaacaagtggaattccaaacttttctctaaagggggtaaagaagttctcctgaaatccgttgttcaagccattccctcctatgccatggcatgttttaaactccctgcctctttccattcgcagattgaatccatgatggctcgtttctggtggggcggaacggaacataatcgcaaaattcattggaaacaatggtcttatctctgtcgctcaaaattccatgggggccttggttttcgttcaatgaaagctttcaatcaggcgatgttggctaagcaagcttggcggcttcttcaggatcctcactcccttgtggccactttgctcaaatcccgctatcatcctcacacaacttttcttgcagctggcaagggccatagaccctcccttgtttggactagtctcacttggggcaaagaacttctccagtcaggtcttcgcagatccataggtgatggtactaccatttctgtgtttaacgatgcctggatcccaggttttggtagtttgcattaccttcagactcgctctaatgcagatttgacagtttcagctcttctcacttcctcccatgattggaaccatgaccttattaaatctatcctccctgaagatatctcccaagctatcctatctattccatttacaaacctccctaccattgacacttattattggtcttttaccctcatggaacctacactgttaactctggatatcatcaagcccatcgtcaactttcccataatgaacctagcccttccgacacccacacctctcaagcttggtggaaa

SEQ ID NO: 82229 - DNA, 2442 bp, Cannabis sativa
catataaaaagaagtatgtttcaattaaatataaaattaaaagtaaatttaattaattaattaataaaaatagtatttttcaacatactcctttttcttaaataagtcaatccactcttatatttggactaaaatttgtattttaattttttacatttattttttaatttactcaattatatataattctcatatataacttcaattatagttatataattttttaataatattttacagataattataataaaaaactattataatttaaatatttataattttattttatcattaattgtcatccttgtggcactatagtcatacatacttttttgaagctctctattactactattctttatatcctttatttatttttttcaagttgaaaagataattttagtgcaataaatataaatatatatatatgttaacactatttagctagaagtataaattttaatttatttttattgtttggataactactatatacagggtcgactttaaaatttagtaggtcataggaaagaaaaaatatttttgagcccttatttaaaataaaatgtgatattttttaaattaataaaaaatgtgtaattttaaaagaaatttttttggcctaattgggccctaggaatggttaggcatgctattatatgaatatttttttaaatgaaaagtactctttaaaatgtttggattttattaaaaaaaaattcttttatgtgtaaattaaaaattatataaattattttaattttagttttttattttttatctaaatactcctagaaaaacttctttaattttaaaaactaaaaaagaacatatagtagaaattaagccaaacatacacattgacaaaatgacattatatatccattttcacaaataataattgcatttcatggtaattaatataatatccaataattttaattccttttagagatataattaatggagctcaaaactttaaaagctataattaagagtgatagagagatatttaaggcaaggtattcattataagtcaaaaatgcacacacactcccaattattattatttttcaaaacaaattattaatatacaactagtttttattaaatgggtagtaaataatatgcaaaatattatggtatggcattattattgtatggacataattagttggctttttttgattgcactcacaacacccacgttgaaaattcaaagaagagaaacaccatgaagactattttttactactcaagcaccaaccatttcattatattcattttagccatttattaatcatcacacccatgtctttgacttgtttttttttctttttcaatattttgactatgaaataataacatataaaagagaaatgttgaaaggtatcagtagtgtctagtattttcttatgtgttaattttattattagtttaattaagtaatataataatttttaaagagtatcgctagccaatagcaaaacaacatatttagaggtgataaacactactgatactaataataatattccatacaaaagtgttaagaagtacaagatcagggtcagctcaaacgatttgaaagtctctagtaaaaattaaatttagatattttattgaaaaaaatatcaattaatactttatacattcatttttgtaaaaaaaaaaaaaatacttcataaatttagtaaaattaaatatgcctagtttattattttttttaatggaatattagaataatatatgtgagtattgtgaggccaaaagttttttttcactctttttttttttttaatatacattgtcaatcaaaaacatttatatataaaaggaagataaaagaagatgggatttctaatataggaaccttgtacaatagttcaagtcttatatatttttgttagataaataatatagagaaactactaatcatttgtaataggtcacttcggtatgatgttggtcattttaggtgtctaatagcaatgctcaatgatatatgagtatactcaaaaatacatatgagaatatcttttttcattttttttatggcagtgtttggtatagttacaatattaaatctataaattttgaaaatttttaaacactttacattatcgaaaataagtttgaagttttttgaacatgcacagtaaactagaatatgaagaattttattttcggtaccgtaaattatttaaaaattttaaaaatttacaaagttaacactgtaactataacaaataacaaataccgttatgaaaagaattttttaaaaaaatattctaatatgtgattttgggtgtagaaataaattaagagattgtaattaatactattcgtgatatataattacaaaacattatatgataatatttttcttttaaaattaattaatttaaaattgggacaaaacctttgtttaaactaatt

SEQ ID NO: 82230 - DNA, 2431 bp, Cannabis sativa
aaaataaaaaaataaaataaaacacctcgatacaaagactagaaaatagccatagatctaaatgtgaaggacactactctaaccctcctttttttattttttaatgttctataataaattagcagtataatgtttttaaaattaattatattgtgatgtgagatttcaaaatgtgatccatttcatgtgcaaaatcattttagacatacaaattaatatattgataaaaaagaaaaataatacatacgatgatgcaaatttagtaagaataaaattaatcttttaaaagtatttagatattttgaaaaatggaattacctgccgtactctgatttttaatgcttggcagaacaatctttttacgctagtctattttaatgatatccttagccatgttaccttaaaccctgtgtcgtttcttggaatgagagagcttagtagattgcatttggaaggagaggggttagggtttagggttagggtttagtagattggataggagtagagtgtttattgctggaagtgtgaaaatagggttaattggacgattgagaggacatcaatgtttattttatcctgttattttttttaattaataaaaatataattgtcaaaatcttggaatcacacgtttacaattttttttttcatttatatggatttttttaattacttttcacttttatattttgttttaattatttttatagtagattgtttcttaattcatttgtacaatcgagctttgtcgttctaatataaaatcagagttaagagctaagatttgtctctaatctaatctatttgatgcttagttcggatttgatattattaataacttgtttaattgaattttttttagttatgtaaactaagtaaaataaaagcaaactaaaacaattttacataactaaataagattcaattaaacaagttagtaacaatatcaaatccgaactaagcatcaaatagattagattagagacaatatttagctcttaactctgattttatcttacaacgacaaagttcgattgtacaaatgaattaagaaataatttactttaaaaataattaaaacaaaatataaaagtgaaaaataattgaaaaaaaaaatccatataaatgagaaaaaaattgtaaacgtgtgattccaagattttaacaattataattttatttaattaaaaaaaataacaaggtaaaaataaccattaatgtcctttcaatcgtccaattaactccattttcacactttcatcaataaacgctctactccccatccagtttactaaaccttaactctctccttccaaaaatgcaatttactaagttctctcaatccaaggaacgacctaaggttcaaggtaacatggctaaggatatcattaaaatagactggcttaaaaaagattgttctgccaagcattaaaaatcagggtacagcaagtaattccatttttctaaatctccaagtactttaaaaagattaattttattcttactaaatttgtatcatcgtatttattatttttcttttttatcaatctattaatttgtatgcctaaaatgattttgcacatggaaatggatcacattttgaaacctcacatcacaatataattaattctaaaaatattatactgctaatttattatagaacattagaaaattaaaagaggagggttagggtggtgtccttcacgtttagatctatgactatgttctagtctttgtattgtggtgttttattttattttattttttttggtatttagtttttgctgtaataaaggtgtagtgtgttaatcatgatagtcgtactttttttgtgattttggctcaatctatgtctcaatttattgttagatatctttcaaaacaaactaattaattaagtgtaggtccaaataaaaaaaactatcgtagtacttttagaaaattaattttattcttactaaatttgcatcatattcactataagcataaattatataagacagaatatagactactcattacacacatttttattgtaaactctttgcaatttgcatcacaaattttttattaggcataacccctctccaaagcttgtactataattgcgttcatatattataaactcatcatttgtaactagaataatcaacactcctaaacaggtcttagtgtatatagtcaaaataggaaaaagagaaatagtcacccaaatacatttatatttgttatagaaaaggcacaaaatatcttagtatatattgatatagtatacatatgcgaagcagaaaaattctttacattataatttctttctagttaaaaaccattagtttttcactttcaatagaatttagataggtacctccattactcacgtagacaccccaagcaaagaaagtggatgatatccaatactctcaagttcagt

SEQ ID NO: 82231 - DNA, 954 bp, Cannabis sativa
ttaacgatcttaaaaatttaggaagcatagtttggtacatgttaaagttcgggaaaaaaattctagttagtgtattatttgtttaaagtagaataataagaaaagaaacatattgggggagagggagttagttagcctgatttgtttgaaccgtggattcacatagttgactttattaggctctctagattttcatcatcatataattatttctagtcaaaattattcaaccaaaaccaaccactcagttatttaccaaaaatgtcaatagagaacaaaaccattttgtacatatttgaaaagaataatctgaaaacccaattcagattcaccccaaaattcaacccaaaaaagaaaaaaaaaaactatcaagttgcactcttattgcttttcatttttcattgtcttaactctttcttggttttgggtttattttaatttatttgaagacttatacttgaattggagacaattaaaatttgttacaggaaaggaattattacttaaagaagaagaatgggacatgaattttgggtgtgtggcacaaggacagagctacatactccatttcttttaaaaaaaattgtaatgataatttgtataaatatatattaaaaaatttacctaatgcccctcttaatttttatattgcacattggctcttctcacaatatttttcatttcaattttttaatttggtggttaaagattgtcaaattctaaatataagtttcaataatgttgcattatattcttttaaacgatttgtgaatatagttgtttacgctttaacgagtgattatacttaattaggtgatataaatcttttgcctatttaattaggtgattatacttaatgaagttgacatttattttaaaatagaaataataaactatattttacttacattttttttagtcacaagatagatgcattttttttttaaaaaaaaa

SEQ ID NO: 82232 - DNA, 1765 bp, Cannabis sativa
  modified_base (72)..(79): a, c, t, g, unknown or other
  modified_base (1232)..(1235): a, c, t, g, unknown or other
cacaaaataggaaactatattaagtacataccagccgaaattaataggaaataataaaatatttttgtcaannnnnnnngccaaaaatggaattaacaatatagatatatcatcgatcgagtaacacaatatttcagatgtcattaattattataatataatttatgcttgagttattaataacgtatgtgtttcaattttaatataatctgttacaatatttattagtggagtttatatattattattttttagtagctacaaattaatgtcgttgcatgtaaaaattatgaatgagaaggtagttgttgtggttaattagttagaaacgtttgcaacacagatgcctctctcgacgctactatggaatttttgggttaggaatagttgtttgagtgttagagagtcttacattgctaatgtctaaaaagataatagaatgtataattaagatgactgagctactccttttattgttaattagttttgagataaaacacatgcaccttatacaatatactctgatttaaatccaaaactggtccaaaaatctatcctgaaggagaatattagagagtcttacattaataatacgtggaaattaaataccatacataagatgcatgagctacttctctcattgccaaatagttttgagatggaatcccatgcaccttaccatacactcacttattcctactttttcaatcaaacactttcgctgatccaagaaccaaagtcaaaaaagcaactcgtgatttagggatagtgagccaaaaaataaaaatagccaccaaaaataccgatccaaaaagtagagtaaaagagccacttatgatcagggatagtgagccaataaagagtcgattataatcgagttgtgcaaaatagtgagcaaataaaaagaattatcacgtagaaaatataaattgacgctttatttacaaaatgcttccataaggtaaggacaacatttataccttttatgtaattttaattgctaaaataccacttacactatcacttacacaatcagacgatggttgtagggtagttgttattgtgtggttgcgcggcagttgcatcagacgatggttgcagggtggttggccgaaggttgcatcagatgaaggtgtcaatcaaatgaaagattttgggtgtttattgggtggttggccaaacgttgaatcagacgaaggaatcaatcagaagaaataactgttagcaaaatnnnnatgcaactgtaatgcaactgttgtgaaacattaaaaatcataacagcgtttctacgtacgtaactctatctacatatctctttatgagttaatatgaataaattcactattagaaatttagaagacaataaaaatacaccaggataaatattttactatagtattgatgtaatttttttagattatacttgagttggattgtttgggaactccagtttaactttttgagatctgtctttcatggatctaaaaattgaagtcaggacattaattttattcaaattaaacaagatttctggttgaattttagtttcgtagtagtttttctacacattttttatgaattcgaaacaacccctattttgattgattttggtcatcttcttaggcgaagtccccagaattaatggtagttctctttttggttgaattttcgcatcagttgcgttgggttgcacgatggttgtgcgatagttacccaggaagcatggatcctgggttacaagtgtgtgtggtatttgtgtaatttt

SEQ ID NO: 82233 - DNA, 652 bp, Cannabis sativa
ttctaaaaaggaaaagacacacttagtcaacaaagattcacctgaaattttgtaacaaatgatcaatgtcacctaatttttgactatctctatagatccatggcacttcaaccatggtgctatatggtccactgaactctttaagtccttccacatgaaaagggttgtccaatcttacatcaaaagaagaattattcctgaaacctggactccacatgtcacactgttctcttggagaaaaaccactcactgatgacagagatgaatttggtgatgaaagaccattgtgtgtcaatggtgggtctgaaagcttgcaaaatatacttgaaatacatttgatcatatcctctgagagcctgttaggtgtctctggaatatgatccgaaatgcgtgtgccaagatgttctgctagactgattatgtttgatgaagcattctgagcatactgtgtaaagcaattaaaaggttagaaatccactcaccgtgatgcccatgaaggcaatgtcgtttgcaaggatactgaggctacgtttggttggaaggaataaaaacacaggaataggaatgaaaatagtcattccattagaatgacattccaatactataaatgcaaccaaacaaaagaactaaatgaaaattgattcatttccat

SEQ ID NO: 82234 - DNA, 2157 bp, Cannabis sativa
ttgtagcattacttctaacactttcaaacccttgtgtgcagcactgcagctactacaattcactacatggctccaatacctaaaaaaatatacattaacattattacataagatgtccaaaagggtcttcaaaattaatattgaaatattgtgataattttgttgcgttatatatagaacctgtccatgagttgttctctaggaggggttggaggaagagcaccagagaatttgccaccccaatcaacttggccaccaccatacttgttaagccattttctaaaagcaaccacatgaacatctgattttgttggcacaaaacatgctttattccatttcccaactccagcatccatcattttgcgttcctacattcaacaacaaataattaactacaagtatttattagtattggttatgggtatcacttttctcaacatttttttcttaattaatggtagggactcgatcaaggagaactaagcccgtgtctagggtctacccaaactcggggcccaatatttgtttccactatatatgagcttgaaaaataaggttatttagtttgtttgtagaaaaagggtttatttagtttgcttggtgaagcacccaattagtagaagtttgaaaccatttttgtgtatttgtgaaataatctcagtgggataattacgtaaggtatcattttttgttaaaaaattatatttttaatttttttttacatttttacaattttttacataaacaacacaaaaacaacaagaaaactacataaaaataacatttaaataatatcaaaataacaataaaaaataacatatacagataataaaaaattaacaacaaattagcaaaagtacaatataaaaaaaacgtattttctgtaaatatattaaaaaaattataaaaatattcaaaattccgttcaaccgtatttttataatttttttttgttgattttgtgtatttgtgaaataatcccttaagttatacctatgaccacctcattttcaatattttaatatatataattacaatacattaattccatcatatgtgtattttgatatttatatatgttcctctaaaattttataactaagtacgttttaaacatatgttgacatttatacccctctaaatatatattttctttaatttttcacccttgcatacataatatatggatcatggcaagaagttactagaacatgaataaaaactgcataaaatttgttaataaatttaatttttcattagttatgtaagtacttttctagtatatatataagcaaggataaaagtgattattacctcaagatgtagaagatatgtatctgaatcaagaacagcatttactgaaatatgaattatccatcttggaattattttgttaaaccaatcattaaatcttcttggatttgatgcacttaatatcaatctgcttctaccaggactaattggaacacatataaatactaaagccattgtcttattattattattcaaaatatccttcaaaaccaaaaaaaaaaaaaaaaaaaattagtttaaaatattttccaaataattattaccaaaagaaaaaaaatatatatatatcattatttacctttttagcctgattattattatcattatattgatttagattaagtggcatagaactatagaaaacaaatggtgcataaaattggttgaaaccaggatcactcattccagtaaaaccattaatgttgaaactttccaaagtcatttcaagaggtatgccaccttctctatcagcattacctaattaagaaataataccaagtggattattagtattattaatttgttcataagaatttaatgaagaagatttagctttaattaattatcacacatcttcacatcattaaataattaatgtatgaacataaaattgtatatattgtgagagaaaataattataaaaaaaaatagatggggtatgttggtgaaattttataaattaaacttattaggtagttaagtgccaaattaggtggcgtgaattaaagatcgcaattaagtatcgagtctcatacaatttttttttgaataaaatcatcaaactttatttaactgcaattattcatgattacaaaaagtaaatcggtagaaacctcattgctc

SEQ ID NO: 82235 - DNA, 1441 bp, Cannabis sativa
cctattaagagtgcacccatatattatattatattatgttatatggtaaaaattaattaataataaaaaacaatttatttagagaaattttatttacaccttaaaaataattaaaatttttaaagacactccattttaataatttttattttatataaaatttatttttttaattgtactaagtttttttaaaatttttccttcacattcatattcttaaaaaatataccgatcaaataaaaaaaatcatattttaaatattatgacaaaaaaaaattaaataaaaaaactatatgaatttttttagaaaaaataaaaaaatatatacttgagttagaaaaaattatgaaaatgaaattaaaataagtgttgaaattaacataaaataatgtgaattttttttttaaaaaaaaaatattaagagtaacttttaaaaattatttaagtttatattttttaataataaaatatatttatcattttataaggtgcaaataaaactctcctttatttatcttatataatattatgctctcacatattattaaaaaaaagacaaacactaattttttttttcttatgtaaaaaacgccccacatttaaattaatttgatgtttaaaactaaaaaaaaacatatgctttaaatttatacatgtgtcggacaattaaaacacatgcacggtcgatcacacttttttttttttataatttatttattgaaaatgaggtgagaatatcaatttttccaataaattaaatttgaaaaagagttccccaaatactcttattgttcccgataatcataatacatatcacattcataattattgaaatatttgatttatagtttgatattggactataattggtgtcttttcctagccattatttttggatctaccttctttgttgttattccatatatcattattagcaattattaatttgcatctacgagatgatgaatacatattgatactgttctaacaactagctacccttttcttcttttttctttcttcctaacaaaaaagtacctacgatgaatttggctcggtgttattcttggtaacattaataagttgacttttcaaaagtagataaaaaaaagtcaacccatgagttagtgtttcccaactccttataaatgatgaacaacttagttgaaaaagaaaaatgatgaactactttgaaatattaatccccaattaaaccatcttaataattcgaatgatctcggacattcttttataaagaatatataagttctctttctacaaaattacaacatatatacaagagtagttatattcgacataaattgtatataagaggattaatgatgacatttaagccatccgttctaattcaactttttttttttatcggatctaatttaattattaattttttttgaaagaatttaattagtaatttgat

SEQ ID NO: 82236 - DNA, 1765 bp, Cannabis sativa
atggcagtggaggaggtggtggctggtttagcgaccatgacagtgggctcaaaaaatgatctggtgtgtcatcattcattgtccacattgcaaaagatgaatttaaatcacgaacttgtaaaaattggcttgatcttgattcaattggaataaatattcattttatcgaatgagataatccaaccgatcatgagtaccttgggtgtgggagtcaataggtgcctctatttgtaatggaatactatgactcgcagccggtcctatactgtcctcttcctcttcaccctcttcgaattcatgtgccttgtggtgcttacaaaactcctcttgagaggtgagagaaggttgcagaaaatcgtaaaagtgctttcaggttataatgcccattggtttgcgaaccacatcaccctccattagccaaactatattttgagtacataaggcagtgatgagagtgccacgtgttggactaccagttgttttgaattgagctatgagtttgaaattgtgggaaaggggtcgaccaaagatttttcatgatggcataagctaccaaacacctctcatgatcaattgtggaaagatgagacgtcagcaacaagcgagcattcacaaaataaatccaagcttgagcaaccaggtttatttgccatctaaacaattatttttagtcattatttccagttaaaaactgagctcccttcatttcttaatgtttcaaccacctttttctttttttttttgtctttagagtttttgaattgaattaagttccatgtttagtccctaacttgaggaacctcatgaagattgaactaacaatcaatatggtcgatacctaaaggcacccacacacctctcatattaatttcattgttttcattcttgaatggaaaattggcgaagaactcaaacatcatgttataatttacctctctcacatattcatctccacaaaacatttaccaacttcttcttactatttcctttctaataacctcataaccccaatcgtgaaggaatggttcgtcttgaagtttaaaatcacagttccctaatcaccccactcttttgaatctttctatacctttgcacaacctctttattgatgaatttgtgggaatcaaatttgggaggttggttttatggtggtggtggttgcgttaagtttgggtttcgggatgaggaggcttgactattttttggtggtcgaaaagtgtttcttcttggtgtagaggccatggttgatataaaccttgaaaaaaaattaggcagcacctcccctataatttcttcttctcaaaaatacaaaacaattccaattcaagaaaattcaatctttcactaaccacacaattaaaaaatcttcacaaaaaatacccaaatcctctcttccagcaaaatttctactgactattccaataaactcaaaagataatgaaggagattgacttacatgtacttgaacaccgaatatatcatccagagtactgataacatcgatgagagtactgagaatgtcggttagagtatcaggaaacaatcgtggttagttgtatgggtgtctagttacgatatggttatatgtttatgtttatgcttttcttactgagtttgttgactcacaattattatttttatgtacaagtaagggccaaaattgaactagaatgcgtatagagctggatgaaaattttatatatgaagccagttagacctagagtgtttaagtcttcgggaaaggtgaggcttatattatgttagt

SEQ ID NO: 82237 - DNA, 1244 bp, Cannabis sativa
attcgaatcactattttctacattttgcaatcacaaaatatatacaaatatgtattttatgtttttataaataaattatattattatgataaacttagaaagtgaattaaccaaaacacgtagttcataattatcctactacttctaccaatagttacgtgagaataaattactattattaaatttaatatccacaaaagaaccaccaccttagatttttttaaatatatttacacacctgcatatttacatgtatcatttcatattttgtatgcactagtttaaatcattttattatgtttgtaaataaatagtaaagcctaaaatattcatctcaatccaataaacacacacccaccccctatattattgtacaataaggaaaaaaattaaatggtttatagcttctccaaactgcagttattgaattgatcgattaaaatacttctaacccagctaagttaactcatgtgcgcccctagttctttgggaaggaaaagtttccacaattattatagatgatttactgagttggttaagcaataaaatctttctcgctcaaaaaaaataaaatttgagtagtttaaccactaaaaaaaataatacaatttatgtagttttgctgttatggttataacatatactatattcataattctccttgaaaatctaatgtattattaaataatctgaatttttttgaaaattttcagtgtgcattaggactacaaaaaatattttcacacaaaaattagaaaaaaaatattagaagtacggattgaggcattgtggcttagtggggtctcccctaataacttttcatttctttttttttttttagtttttaattagatatattttgattcctttatttaaaaaaaataaaaaaaaaatctattttaatccccttaattattattattattattaggataaatagtcacattaatacttaaaattttaagtttgtaaacggtataagtattcaatgtttgtaaaactgtaatttttctctaattttatttgtaaaattataattttcttctaatttcgttgtaatagacttcgtttagaattattaaaaaaacatttagaagtagctaaaaataaactttaaattcatgtcacttgtaaacttaaaatttgagcattatttatcttgctatttactattaattttattattattattattattttgtgtactgtcccctaataccattccctttgccggttattcaatt

SEQ ID NO: 82238 - DNA, 838 bp, Cannabis sativa
tatatattagggtttatatagtctctctagctctctctatatatatatctatatagaacagtataccattcatcgccttgtctcatgactactccccttctagccacataattatgcattcttacagcttcaatgaaatatgaccttttcaatcttctgtctcttttggtggacctattcatttcatccatatataattaagaatagtaccaataaacctattttctttaactttctttcagataccaaacacgtaccctataccatgccctatctagtctaatttttgagagagataacactatttgtttagataaagccttggctattatgtaaataaatattattcttaaaaacacattaaataggtagcactaataatatacacaactcatgtggtatatatcggcgtttagctatgtagagtggtcctatgatattattaactcatcctcttagttatgggtcaaatgaccaaaccaataatccaacatgattgttgctttttcagctgaaactttacttaataagtatctttttaataaattgcactcacttatatgttgttagaaatatatgacatagtaaatagaagaataaaaacaatatgaataaaataacaaaaccaactacaacactagttatgcgataaaattataagattaaataaaaattacaatcccaaaacataaaatataaataaagaaaaagaagaagaaagaaattacaattcaaaattcaaaaatacaaataaatgtaaacaatagaaaagcttatatataatagtgtgtatatataatcctgatttttgccaacctgacgtggcatatctacatcg

SEQ ID NO: 82239 - DNA, 1667 bp, Cannabis sativa
  modified_base (27)..(31): a, c, t, g, unknown or other
ttttgatcttatattaattagtaaatnnnnntatattgaaataggttttatttacagcagataatccaacacgatgatcccttgggacctagacatgaaaatggacaaggtctcgaaccttgttctttacattttgctccataaaatgagcctgcagttagtacaaactggaaggccacgagcttcatgtcatcactaactttagttttgttctctgcttccatcattcgttagaggaaattcttcaagcttttgccttgttgttgtttgagtttggttagggatttgacctctatgtcgtaatccctagtagcaataaattgtttccagaaggtagactgtaactctttccagccatgaatcgatccaggagacagactcttctttcgatccttggcaaacttggttagcgtcaagaaaaaacaaaggcatttgacatcatcactaattgttgccacttgcatcagacggttgtatttggacagatgggcattggggtccattattctatcatataattccatctgtggcatcttgaatttttctggtagtggagcgccgatgatcctcttgacacatggttttggatctttgtcttccaaatcagaaatggctccactctatttctggacccattttttcaaagcggtaatttgttcttccaatgtctttgtgtcactacccagaagctcacatccacgaattctatcgttgatgtgattctggagatcatttccacaaggtctcgctttctctcctttggcttttttacgcttgggattaaggcatctctggaggtcaattgtagaccaactgtctttagaaaaaaattcttttatcccatcatcttggttaacagaataactagagtagtttttctttcccttaatggtaggccttcatacttgagtacaaagcctatcgttattcacaacttggccttggggagcataagtacgtcaaagcctagaggcattggtggacttctttgtccgtaagggctggttggccatgttcacattgtttttaggaggtaatgggatagtttaggttgatgctcacctatctttgccttcccctcatcctttacgggagctggtgttctaacatctgtagggtttgctcttaatttccttattaacaggctcctcttgagtatcttcttcgaagtcttcatctatatcgctaaatttggcttgcagtcatgccatcattttcatcatttaacgagagaaagcttcttgttctgctagcttgcgttgagtttcagctaatcacagtatactcgaatcaccttaaggtcttgctcataataatatttgtctttgtaatatccatctgtggtttcaccatcgtcttcttcctcctcttcctcatcttttgggtttttctcaacaaactattcccgatgttcggttgttttagtcgttcgatcaccaactttgaacacttctccatcccttacattgctcagttggacgtgcccttgagagagtagattagtgtattccatgatgacatcctggcttggaggaaggggtttcttgatgaaggtctttcagctaggtagcaaccatttttacagatgtaaggcagcttcaaatcttttctcagctctcaatgaaagcaccaaaatatttagtgagattttagaaactaaattaaag

SEQ ID NO: 82240 - DNA, 593 bp, Cannabis sativa
tatgttatggctgtcatttggttaattttgttttatgaagaaatgaaatatcatagaatactgtacaataatagagatcgtctactactccagttgatgttaatcaggccactttgggtaaaatactgtacaataatagagttattgtggtaaaaatttcactagaattaactaaagaaatgtatacattacagattactcacaaattagtcacatagcaacatgattataatatatggatacatattcttttagtttgatccacaattttggctaagcattcaaactggtatagggcatttaggaattaaatgcattcaaatctgtctttgtctttataggaatgtaaactaatttttatatatctccaatgaatctaaaggagatatctgtttttcgttggaaaaatatagtcccaatagaaatatataatgtcaaagcttacatacattactagcataaatattttgaaactaccaccgtcaaaaactagtaaatctcctacccttttttttcttttttttttgttgaaaataaatggtctgtgcaagtacagtaaaatatttatatttaaaatggtatccaaaccaaaa

SEQ ID NO: 82241 - DNA, 1517 bp, Cannabis sativa
  modified_base (1413)..(1413): a, c, t, g, unknown or other
tgagctaaatgctccgctttctttgtgtgacattgttaaggctgatgcctgttaatttttaatgaaactcctttattaaaaaaaaaatatatataattacagttatacaatcttaaattttatcgtactatctatacaattatttttttttgcatactctcaaattacagtaatttagccataaatcaatcttacataaaaaaaaattatttgcaaaaataagcgaaagataaaattataattatttctaaagttgaaagagcatttttaataaaaaataataatttaaaagataaaattatgtaagtgtcaaagtacagaggaattttcttttttaatatcttcgtaataattttttttataatattttttataattttttgagatgtgtgatgagtatacaactcaatggttattcatattatatcttaaattaaaattaagatttaaaaacataagaaactaatattcaaacgtaaaccccccaaaaaatccaaaataaatgaagatatactctttctatttctttttttttttttaataatgattaaatttattaaactaaatcattcagaattaaagatgcaataagcatgtgcaactttattagcagaccgcttactaaaaataaaaaaaataacattaaaatcagcaaccaaaatcatacaattataaagaatatggccataaaaagaaactatattctatttcatttagttccaattataagattgaaaatgaaactctatgtaaattatgtaaagtttattataaaaaaggctaatatattaattttgaaattgatgaacagttggcacatattttctggcgtttttagttagtaatttaggtggaaatattttttgacttttgtgataattaaaataataataataataaaagcacacacataggttggataaatgataatgacatttcaacactttgtgtagaggacttagtcaattaattattataattaaagttaaaattaaaatggccttattatcattaatcattaattaacctatgcacataaatgaacaataaacatatcttgaagtgtaagtaatttaattgttggaaatttatttagattctacctggatattaattaggaaattttatacaaaggattatttttagtaaaacatttacactttttacacttttacatttttacatttaatttttttatatatatatatttttgcggtgttatataagataatacaaaaataataaaaatatacacaaaaataataaaaaaataacatcctaactgtaatatactaaaaataaaaaaccaataacaaaataatattaaattatcaaaagatgtattttttataaataaaatcttaaaatccataaaaatattaaaaatttgtataactgtatttttataatttnttttttttgttatttttgtatattcctattaattactttcaatctgtgttaatgggtattttgttttcaatctatattgcattaaattggtgttattgttttta

SEQ ID NO: 82242 - DNA, 1768 bp, Cannabis sativa
cgttgaacgaacagacaaacgatatgtgatttttttgtatttttatttattgtttggtaaacaattgagtgttggtgaaatttgtattttctgtgatttttttgtatatggttcgatggcgtacgatagtggtccaatagtagtgtaatctagatgttaggaatgaatgttcgatggtggtctgatgcaggcccgatgcctttctattgttgaaatgagcaaaggttgaagacataggtttgatgatggcccgatgctacccataaatgtaagatatggtttgatgaaggcccaatgtcattctgttgttgaaatgagaaaatgttgaagatgtaggttcgatagtggtctgctggtacctattttttatgtacaataatataaaaataaaaaatgggtagcattgggccactatcgaacttacatcgggcctacgtcggacctaagtcttcaacttttactcatttcaacaatagaaaagcatcaaacttggcgtaaaaactagtttttttgcccaaaatacagatccaaccaaactcaattctaagtcttacataaactcacagatcacagagattcatcatacattttaatcctaaatcaattaactcatacattttaactcaaaaatacaatgaaatgaaatgaaaaagagagggcccaaaatcttacttctaacattgcgatggtctggctgcagtggtcgtaaattggagagagagttcgagatgccgtgatggttgtgggttggtgatagagtccgagatgtttgatgttaggggttgggttggtggtagtccttcggtccgagaagagagcgagagagagtagagaaagagagaggcggaagtgtgttgaaaaataggaaaggtaatttagggaatagataaaaattggcctaattagttaatattagttagctttaatttagaaaaaaaaaaattaaacctaatagattaatattttatcaaatttccgtgaaaatcaatctgaagtcatcgtatcaaataggacaacaccatatcaatcttttgttatattataaaatatctgaaattccattctcatagattagaaatgggttgtctcacagctaattttgctagcattcccatgtggcctttttatgttataaagacatatgacatgcatagcataaagaaaccaagcttattattattattgatcaaatcatttaatcatctaacttttgggtagggaaaaagaatagagtgtgacccacttgtgggtatgaaaccaaaacagagcaatctggcgtaaattaagctgtaaagttagtcaataaaagaaaattgaagagaatgtcacatgcatagggctatatagggtttttagattgggataaaatcttgttaattgttatacaccataaactagtttttacatacctagaggagctctgttcgaatcacttaaaatatgaactaaatttgtaagtgcacaaatcacacttataagttcaaaaaataataaaaagggataaatgcgtaaaaattaattatgtactttattatgtagtatcatttattatagttaattatttatgtaagaaaaataattagtgacataaaagtacttaagttatgaattttattgctgttaattatttatgtaataacttaactgtaatgctctactagcttaggtgtgctacagtaatttttaaattattgtgttaacttttgctaattaaaagatttaataaaaaacgtgattaacaaaaacttttatcataaatataaacttt

SEQ ID NO: 82243 - DNA, 646 bp, Cannabis sativa
aaaaaatgccatagaagagtggcaaacctataaatgccatttttttgtaacttttttacaaaatctcatatttcatgtaattttcacaattttgatttagctccacataatgcggggactcagataaaaaaaaaaattactatattttttgtaaaaagtctttatctaatgttaaaatttgtgacaaatttatcgcatattgaaagttaggtcaaatttaatacataattaatgcagctttcgtatttacattatgattttttggcggctaaacttttttaactattattttacttgcacttaactttttagtcttaaattttaatggtaaaatatttcaaactaacgaatttttagcaaatttaaaatgtcatttattcttaattaaatgccaacatgaatcagctacctgtacaatcatatacatatcacacatttatattagttcgtaattatttaaaattatataaatcattttaaaattaaaataatactttaaatttataaatcattaataaataaatatttttttcttttattcattctccaaattttctctctcatcgatttgtctttcccactctctcccccgagtccatctctttcttccttcccaaatttgaaaaaatcacaaatgcaaaactaa

SEQ ID NO: 82244 - DNA, 1378 bp, Cannabis sativa
  modified_base (652)..(653): a, c, t, g, unknown or other
ggttatacttgtggggtgctcctatggagatcggtgtagggtacccggtgaattctgtcacgcttttgaaggaaagttttgctgtgaaggactattttgtggaggttcgctaattggcgagggttcagtttgcgaaccctatccaaattgccaacctaatgttggcggtgaatgcttttcgggttctttcataaataatggatgttgctacccaaatcactgcagtgttcctagaactgaatacggaggaggaacatgtctcgccccaaatagtaatgacattaataatgttacggctgaaattagtaatgatcatgaagatgatcatcatatttcaaccgcaacttattaaaatcatttggtttaagtactggagttaattgaaatgcattttttgcatttcaactttatgcactagtaatttccatcttatttttaattaataaataaaatattaataagaaataactaatatttcttattaatttgtatttgcatatttatttaattgtgtgtttggttggtatataatagctttgtacgtgtttatgcatgtacttgcatgcacgtttacgtaataaaatcaatctatgatgatcgacctttgattttcgacaatttaatttgttttaatatattattattattattnntattattattattattactatttgtgcgagacataagtacttttgattttcgacaatttaatttgttttaatgttgtactaaaaattttaagtttgtaagccgcataaatgtttatttttagcggtatatgtttgtaaaattgtaattttctcccagtttcgtcaatacaaactttgttttgaatttattaaaagaacatttgaaagtaacggatactacatatttctatctagacccaatgatctagaattcgggcctatgtacaaaaaactgctatttttttgtgataactttttagtgacaacataatttttttgtgactaaatgtgacttttagttacaacaaaatgttctttgtgactaaaacatagtatttagttacacgttgtcattaatttagttttagtcacaacaagtattgttagtcagagcaaattgaaaattttgtgactaatacctttagccacagaccttttagtcacaaaataagaatgataatttataattagtcacaactttttcacttttagtcataacttttgttgtgactaaagtgtacccatgtttaaaacaataatagagtctgtactgataaaattaaagaaaaattacagttgtataaacattgaaaacttatatatgccgctaaaaataaatattgagtttatgccgcttacaaacttctttaggtacttatgtcgttatttattattattattattat

SEQ ID NO: 82245 - DNA, 1813 bp, Cannabis sativa
agtgtaagaaaaataaacatttttataacggtatgcatgtaacggtatatatgccaattaattgaccaacaatattatgacaattaattttaaattttagtatattgatgcaattaattcaataaaaattgtatagataaaaaaataattcaataaattcttttcataccaaacataaaaaaaacttgaattttttttttttttcaatagatttttttccaatattttctttactctttttttctctaacttagaaaagtagccttaatgaataaaagttagacatgaatgttatttctgacaccatttttctttgatcactgttttaaatagttgctgcaaaaaaataaaagaaacaaatttaccgaattaaaatttgggttgagtcgcagaataggtcgttctctttaagacattcacgacactgcctagaattgcacaagcagacgatcagtctcgtcatcatagcccaatcgagaatactgtatcggaattctattgcacaatagagaattgttaaaataccacacccaataatcgtactactgtccaaaatatatatttaatataatcgtatatttttctgtgtgaaaaagatgtatttctcccattagttttgatgcattatataggcaatacacagaaggtagtaacgggaagaaatacgtttctgaaggaaacgttagaacgtggaatcatgggaacaatgctaaaaattaggagtggaaaatgtctctatttactaattaattaaacacatttaaaaattattttaattaattaaaaaataataatgatttaataaatgaattttcttcaaaaaaaaaaaaataattaagtgacaccacacccgcttgatcggctcagtcggtcggacagcggtgggcaaaattggttaccccttgaggccccaacccaagttctaattttacacattatatacacttctaatgaagtattttatcccatatgggatccattctcacacacttcacttctcattttgtaaaattttacatagttccaacaatcccccacttgaaattttttaaaaagatattttcttgaccggtaatgtaagcaataagattgagcatagaaaaatgtatttttcgatttgaacctttgcgttgtgaatacaacttagaatatactagagtgactcgtagtcttaactctatctctaacgatgtaccagacataacttttcttggctgtagtccaaaagcccttgctttaatggccagcacatctaattcataggaagcagtcccactctctcattcacgtaggtgtgtctatcaagagtactcctgtagctcggtactctaatccacattgagtacgattctcattaagagtttccattaccttatattgcttcaggaattcatgcttcatatttcttgtaaccatagcatgatctcattcttatcacatcataacttattattacccattgaatctatttcttaggatcttcagtctataggtcgggttaccattatgagtgactcattattctaagggcaatagtcccataccgtttgaggttttaagaactttctcaaggatcgactaaattttcatcagtgcatacatgatccactcttactgctccaatagagaggaactccctaattgtactatgtttacgatgtatctgtcgtctcaaaccgttataataacgattctaaacttatgcaatagttgcagtactatcgcagtggagcaacacagcgggtatttgtctttcccataaagggatctcaactagtaggcttctcaaccaacatgcttcttcactagcagt

SEQ ID NO: 82246 - DNA, 529 bp, Cannabis sativa
  modified_base (210)..(212): a, c, t, g, unknown or other
aatgaattgaaaggatgatcaatgagcctcttaacaaaagcaagacttggattttggtagaaaagtttttgttggtaaaagtgtagttggataaaagtggataaacaagtatacaaagaagggattcttggtgtagaaaacactacaaagaattgctatctttagttacaattttttagtcaccagataatttttttgtgactaaatatnnnttttagtcacaacaaaatgttaattgtaactaaaacataatatttcttggttttcctctgttgttaagcttaagagtagtttttctaatgtttccatgcatttcgttaatcgcatgcacttttttagcttttgttgactctttggctaaaagtgcttactgttcagctgagagcgatgctccttgctgtaaaggggaggaattttcccctatggatcctattttctcagatgttaatctagtttgaacagaggttcttttcaaaaaaaaaaaaaaaaaaatatagtatttagatacaaattgtaattaatttagttt

SEQ ID NO: 82247 - DNA, 1446 bp, Cannabis sativa
aaaaaaaaaaaaacaacaaacataaatactaaacaccggtttcaatacaaactaaaacatactttaactttattagaagatttttttggtcggcctttagccttcgtagccggctcaaccttttcaccaacagatcgcacttttgagtcagattcactctccatctgatgaaaaaaaaaaataccaaataaacattagacacaaacaacaaaatcaaacctaaaatttaacatgaaaaccagattcaaacaatatcgaaacaaaagaacaaataaaaaacaaaaacaaaaaaaaacataacaacaagttcctcaatagtaattaactaaataaataaactaataatccagccaaaaagaaacccaataaaagattaaagcattttgcaacaacaaacttaaaaccacctacacaccaaatatcacataatgcacaaataaagcgaatctagaatataaatcgaactccagaaactggtttttagctgattccaaattaggtatccgataaacccaaacaacacctgatataaaaattgtaatcttgatatagaaacaggttttccaatgacaatttttaaaatcacagaacgcacaaataacacaaatcaatctctagaaactaattttggacatgtttctaagcatgttttatacacctttctcagaaaagctacctaataaacttgagctttttcaacattgatcataggcagtagctctaggttcttatcttttccctcctcatcattaatgttaatggatgcaaaattattggtcaaaagatccgaagggatgatagcctcagattgactagacttggggaccaaaaatatcaaagacaaagtcgaaaacctcaaaacattcctaatgagaacaaccaaccataagtttgtaaagtcatttctagtgacatgaaacagatgaagcaccattccaccaccccattttgaggttaaggagccaaggctatcaatgcacataagaagggcaaagaaggtgccttcgattccaagagggtagagtcgactgcttaacacgatcataggcatccatcaaattctgctcacaattctacaaacacattcttccataatcacaaacaagtagtctgggattccgagggctaagttccacataaggatgaacatgaggtccaacattccacacacactataacacagaaacccagaaacatagaaacccataaacatagaaacccagaaacacagaaaatcatgaggtcctaccatagcttttctcataatggtcaaaacacagaaacccattttcaaaataacacataatgtcggcttattaaactgaaaagaaaccaacaaaaaaacaaaatcaaaaatttcaaaaaatacacaacaacaaacactattcacttcggtttattcattttttaaaaaagaagatcaactaaaaactaaaaacactaaaa

SEQ ID NO: 82248 - DNA, 1758 bp, Cannabis sativa
  modified_base (26)..(32): a, c, t, g, unknown or other
aatcagattatattgaaatgagtttnnnnnnnggcataaaatcccaacagatacaagtatccagcttgcaaaattactctctattccacttgttcaacgccagtcgagtagccccaaccttcttaaagactatagcaagggcccaagcattagacaatgaattccaggcatggtcaaccatcagtgagctccgagggtccctagtccaccaagcctcaaactgaaacggtcgattagacttagcctcagggtcctctgtacgaatattcaggggtttgtggtctgaattgcaagtatggagcgattggatcacaactttaggaaaaatgtgtaaccactcctcattgaccactgctttatcaaaggctgatttaatatgatctgggccatccatatggttatcccacgttaagttgtcccctttaatgggaatgtcaatcaaagcatggcacttaattagctcagtaatgaaagggagaaatcggtctttcccctttgacctgacacactcaaagctactcacaacaaaattcacatctcctaggatcaactagggcccgccgaaatcatgaccaacttctataatgtttgactagaatttcttcttctcatggaagtagggggcccgtaaacacaagacaataaccaaggataatgctcagggtcaagagtacataataccaaaaatctagtttttagaaatacaaatgatttcaaaaataaaacccgctttccacgataccaataatattagaataaaaaatgtaagttcttaagagaacgtaccaaaaaggtggcatccactttcagttcgctaatgaagataaagtcaagagaccacaaccgaatcagggcttttaattctaaactgtagaggtatgccccaaccgtctagagttccaagcaacgcctctcatgcctcatgtggaggagggacaccatcctcctccacaggggtcacaccaccaactgacacaccaatcgcagatccctcatcctaaatcacaacttcctccttgataggaatagtaatgtccaacaactgagctttggccttccacgacgtaagtctaggcaacttaaggagtatgaacagaggtatcccatccatgctattgaattagcagcagtggttttcgctttgaaagtttggcgtcattatttgtatggcgagaagtacaaaatctacacagaccacaaaagcctcaaatactttttcactcagaaggatttgaatatgaggcagtgacgatggttggaattgattaaggactatgactgggagatcctctaccatccagataaagcaaatgtggtagcggatgctctagtcgaaagagtccagggaaaatttatgaatagaagaagatcgcaccagaattggctgaggatatgaccagagcaaggattgaatttgtagttggaaaattggccaatattacgttacagtctgatttgttggagagaatcaagacaaaccaacaaagtgatccaaaattacaagagtataaaaagaagtttgaagttgggtcagcaaaggatttctcaatctcatcatatgggttattgcagtataaaggtaggatttgtgtaccagctaatgatagtatcggataggagattctagacaagtctcataccatgtcatactcattacatccgaggacaactaagatgtatcaagatgtgaaagtcatgtactggtggccaggtatgaagagtgatatagtgaaatacgtgtcaaaatgtctaacttgt

SEQ ID NO: 82249 - DNA, 851 bp, Cannabis sativa
tatctcgtgtttcgagtctgatcgtgtctgacccgttttgccagccctacacccagccaggcaccacaactgaaaaaataaataactgccataaaaatcaccaaataagccataaaaatggtataataactgccataaaggtgtacagttttaataattttgactactttatctattataaaaaatcgtttgttttatgctaattaaaaaattcaaaaattttaagtatttaattacactaatacttatatatcactgtttttttttggaattaattttttataaaaatatgagatgtaatagtaattgaaagcgaatttagattgttggctaggggtacaatcacatcgaaacataagaaaatgtacagtgattttgttttcttaattaagagtactatgcaatgggagaattctcctaaaatataaaatgatattcattcatatttgtggggtgagaataataacctaacaaattaatataccaatatataaatatatatttatatagtagtggaataaggcacataaaaagtatgtgctgcattttttatctatattattttctaaagtattggaaaaaaaaaaaaatctatataccattttccttaaaagttcattataggaaaagaatttgaatcacctttaataaataaaagagcaaaattaatttgctcaaaaagaagtacgacgtatatagtaattgaaaatgcttaggtagagtcacaaagaatatctttacatagacattttttttttactagcaaaaactacgtgcgagacacgtatactaaattttatgctaatttttttctatgttatttgaaagtgatacaataaaaaattaaagaa

SEQ ID NO: 82250 - DNA, 2613 bp, Cannabis sativa
  modified_base (1613)..(1614): a, c, t, g, unknown or other
atatattgtattgggagcataaaaacagaggaacaatcaaggttgcagctaagtttggcacttttgttgaaggaaaaattggattggatatttaatggtaacatagaaatatttgatccaattctcactgctgaagagaagcaagctttgagtgatatgggttttaaagtgttgcggaaggatgagaaaggagggcgaaaggtgaataaaccaacagtgttcttcatgccttgttgttcactgccattgtatgtgaatctagcgaaaaaaaatcaaggagccacattgaaaaatgtagtgatattagggaatggcttcaaaaagtggaaatttgatgttatctcagagaagtttaatgaatatgttaagcctcttatttttttggctgaaaaatttgctgatgagtttgaagttgattctaaatccttagaagcatttaatcaatttagttggcattttggttccgtgtaataagttgataactatattataagggactagggtctcttgacagttgacaagttacccatccctattttttttttttttttttttaaatttcaaagtttgaattaatctacattagaaaactcaatcaccagaataataaaatttttgagtacttcaataaatctacacacaatgtgagagagtgagactactacatcacttgtaacgccgtaatctataaagacgctacgtgcgtgattttataaattaatttaatactaatagaataattaattgttaagaatcgtgataatactaaaaacttgactaaaatgaaacattaaaaattgacatcataatggcagtaaaaaagtttttctgagaatcactgttataaaaagttttacaaaagaactatatataatgacacctcaaaaacataaaaccaaaacacatgatagatacagccctaaacaactctttgcaacccggcacgcacgctggtgagatcaatatgtacattgctgaatgagaccgtcttctcatggatactctaactttcccttgcccttacctgcaccatagagtactcgtgagtcacatagactcagcaagaaaagtaataaagaagggtacattaaataacttattatacattttattatcataaaatgattataccataatattcaacaataagtaatatagccagccatatgcataaaaacagatttgctcatatatttgcattgcctaattcatattgcaatatcatatataataccattgtatcacctaatcagatgagcccgtgtcacaacttggcaccaatatattgtatccctaatcagacgagctcgtaccaaagcttggtactcacatgtcactgtcgctcgtacctaattaggtacgctgccaggaggaaacccaacaacagttttgatctatgccataacccgacattcatatatcattgccgcatgtacctaataaggtacgctgtaaggaatatcgcatcacctatttaggtgagctcgtacatatgctcgatactcatcatatgtcactgacgttcgtacctacgcccggtacaaattggaccctctgttttgttaaatgataaaatgataaagttaccaattagatcatttgttttgttaaannataaaatggaccctgtattttccaaaataataaaaataggaccctgagcttaattttttaatataatcaacttacgaacagatacagaaaatgtaaacagttttgtcataacacttttagatcaaattattattaaattttatttggtcagggtctattttgtaatttaacaaaacagatggtcaaatcagtaacttttacaaaaatacaaagtccaaaataatatttaccctattatttattagaaaatcacacccacgttgaaatagttcttttttttttttgaaaaataatatattgcaacttgaagataagaaataagtacaggttacaatatattgcaatagttcattgttttttattaaaaaaatataaaaaaaaacactatcattgatatatccccatattttccaacagcatgtttaaaaatgttaataaaaaatgaaaaccaatacacacatgtataatcatctctcatgctaataaaaagcttatttatctacaaagaaatctgaaaataaaagtcaactaaatatacaagattcaagcatatgtggaaatctttgtgtgtgccaagcacgttattaccttttgttccaatacataaattgaatatatatatttttctcactacatctccacctccttagtcctttccctatagtctccaaacttatataaactctccattttcttattcaaaaaccaacccaattatccatctactgctcttatcttataacatctcaaccttttttagcttcctctgcttttttttttcatgggtagccaaagagggtcaagaacagggacgacccaagatgctttacctgtctctaactggaagaaatggtccaatttcgtccctctttttgtcgcccttgttgttatgtcagagatcacctactcaggtcgtctcgacgtggccaagaacgttgctaagcttggtgtgttgatctctcaggcttcacctgctcatcaagtgagtttttgaatata

SEQ ID NO: 82251 - DNA, 1514 bp, Cannabis sativa
tctagtagctcctgtgtcaagaatacaggagccttttatgggaaaattagacagagatgaaagcacgatacctgtattacctgtggtgtttccagtatcaatattagccataccaggttgttgtgttgcaagaaaattcaaaagctattggtactgtgtagcagtgaactgaggcaagagagctttgctgtccacagtcgttttattgttgtcagtactggtctgaatttgatttgctgcagcatcctttgagttgttattcttgttgtagcctggtggataaccatgaattttatagcacttctcaatggtgtgtctaagtatgttgcaatgggtgcaaaacggtctatttttcttgggatgatacgatttgtttcctgcagtatcctttttgttgttgttgctggttttgtctccttgaaaggcaaagccatactcaggttaggttcagcagcagtattggtgttaactttctggtttttcttcttgggaaacaagatgaaagaccctgttaacttcaggtagcgggtccattagcaataaactgctgcgaaattgggtaaaagagtctgaaagacccatcaggaaagacatgatgtactccatatggtggtgttcttgaaatttcttgacaccaccacaggtgcaaccattgcaaacgcaagtaggtctgtaattcgaaagttattcccatatgtttttaagcttggtaaaatacatgctgatagtctgattgtcctgccttagattcatcaaatttttcctcaagttgtatatgtgaggaccatttctttgttgaaaacgaattttcagattaatccatatggcagcagcagattcatcacataaaatgctggaagaaatctctttagaaacagagtttaaaatccaagaaattactatgttattgtccctaagccatgcattatacataacaacatcattaggcataggtttagggatagtaccttccaagaatcctagtttgttcttatccagtgagcaattgagaaactaagatgttacctggattatctccatggtgcaggtagtatggatcgcttggatcttcgaggggattctctgttggacaatctgttgctagttttgtatgattggattagtagaatttccaatcccagcttcagcgatatcacttccatcctctggtgtattcgacatcgaagaaggaaggggaggacagatgaaagatgaacaccgagactgaaatagtcacacgggaaagacgccggagaagaagcacagctatggcagcgaaagagaaagagaaagggatcaggggaaagctttcctttcccgctctgataccatcttgcgaaaaggaaaaagctttattgaatattgaatgtaatctttacaagaagaacttaattaaaataaagacagagaagaggacttaaatacaagaagggaaaaggttagttaaccgactaactagagttaaactaaccataacaaccaactaactaaggtcaagagcaagaacactctta

SEQ ID NO: 82252 - DNA, 564 bp, Cannabis sativa
ttgattcttttgcttcttatttagacactgcattgcaaaagaaaataaaggagtaaagataccttcaacattaatttccttctatttttaacactcatgttacagtccaaatcaataaccttacttcagagacgtcatttgcagccgagaacaatgcatgataatccgctcgaaccgaagcatcagtacaagaaatagatgatgacattgcagcctcaagtacagcaaagaagtgatcactggtttctggcttgacgttgccggcttgaatcagctgtattgcaagctttgaagccttagcaaactttgcaggagtcttaatatgtgaagcaattttttgcatagcctctattacttgtttctccgaaacatctgttgaggttttaaaccttaacttcttctcaggggctgtatctgataatcaagttacactcttcaccttaaattgaaaaactttgtacgtttaagtaaataaaagaaaaagaatgtacaacaaactgaacttcagccatcatttttgtttttaaaccactaaaaattaaaatttctacacatttcaagatc

SEQ ID NO: 82253 - DNA, 912 bp, Cannabis sativa
  modified_base (98)..(121): a, c, t, g, unknown or other
aagtattgtaactaaaactaaattagtgacaacttgtatcgaaatactatgttttagtcacaagtaattttaatttattgtgactaaaagtcacattnnnnnnnnnnnnnnnnnnnnnnnnactaaaaaattatcactaaaattagctatttttgtagtaattgttttgtatttaatataatgaaccacataatatggtccattaataataaactctatacacttgtaaaaaccaaaaatctttgtgagattatttaccaacaataataagggtcagaattaatattatttggagtaaaattgataaataataaaccatgtaataataatatttatgatcatcatgatcatgacaagcaagtatataaataagagttttctttttgtagttgaaaattactcatttgacatatacctaaactggaaagactacaattatttacttattaagatattataaatagtgtgattgtattgtatcatataaaaacataatcatgccttataataagagattgtgttgtaaaaacctctcttgtcataaatataaattgtgttatgttactataaaatattataaattgtatcctattgtgttcatatttatattgtcttgttttcttatatgtgttcaaattggtgctcttatactttggttacttttcttgagtttgtagatttggttattagttactaatatgcgaaaatctaaaacaatgtatatcaaataataacttgtcatcaatttacagagtggtacccaatccataccattttcttcagttttaattcgtaaaggtggccatttattaggttttaacttttagatactgttaacaaattttaaatactatatatagtctttaagattttatttataaaaaatatggctttttattattttcatgttat

SEQ ID NO: 82254 - DNA, 613 bp, Cannabis sativa
ccccacttaaattttaaaacaaaaatttacagctaaaagtaaaaatatacttagtttttttttagagaaaaaaaaaatgtactagttacccaatcaatcaaagggcccaaaaacctaaaagcaaaagtatttttgaaatttcaaaattcaaatagtaacttttaaaatcttagccaatcaggagaaggactgtttaatctcaactttaaattagtacaaagcatcttcagtttatacttatacgtttgattaaaataactaaaaatatattaaataataataggaatagaaatatgaataagattaataatagaatgaaatcaaacttaaaatgcattaaaaaaattattaaaataaaaataataactaaataattttgctttggaatgatcgttcatacattttaaaataaaagagttattccatcaaaataatagaaaaaatattttaaaatataacttaataatagaatagaatgagcttttttttttttcattttattaccccaactgtctatgggtttggtgtggttgcacgtgattcgaatggcaaaattattgactttattgtcaaatatttccatgaaacctacacggctgaggttgttgaggct

SEQ ID NO: 82255 - DNA, 2573 bp, Cannabis sativa
aattgaggaaatcaatttgacattagctttattaggatcagaaattttgtgcacataattttcctacatcgattctaaactagcttctccaaagaattctagctactcaaagtggctacaaagtttatattggtggtcaactagaagagtttccttaggtcagtgtcttctgccaagtgttgctgacgacatactatctcggatttgtgtaattcgtacaaacagctcatgtaccatgtcaatggccaaacattacctttagaaaccatgccatcaatggggacatggattatgacttggacttgaaagagaaaggatttaaaagaagatatccacacaatatgagctcgaagttgtatttcagaacacctgcaccttcacttaagaaagccatgtaagttgttgcaaagcagaatgtgacatgcctaggcattctgtgcttgtacagcttgtagcaagagcctcaagtgtgatattaataataatcgcaaaatgattctggaaacatgaaatcccatttctttatgtgtgtcctaattattgtggtatcaatagaatcacaaggacaagagcggggtccttataactaatcccaaaacaaaaggaataagcaagcaaagagaggaaaagaccaagaaaaatgggcaggcaaggcaatagtaagatgctggtagtttgcatagttatttatggcctcatttgcgttgacttgacataaataaatgtttgtgttcaagtgtcatcaaggagagcacacactcttcagtgggacttcctatcattaatgtaaagtctaacagtgttactttcttcttagttgaactaaagtacttattcttaactcagattgcaagaaactaataagaaaacacacagatttacaagcttcgaccctgaaaattcattttagacgactagtgcttgggttcctttgaaccagggtaataaccttcactatgaattaaaagaatacactatccagtttcgattacaattgttcaaaagtaatctacaaataattcatacaataattaccccactgatttgaacacgaacaaatcagaaaatcatctaagcatccttagacttcagaagccaagatccccttgcttctatgcagttgaactccctttaacaatgcaatctgaactcccttcagacaaacacgatcactgattctccttcaatccatgaagatccaatcagctgacctgcaagaataaccagaaagacaaaagaaggtaatttttccctaacaaagcaaaatcactaatcaaagaagaagagttagttagttaaaccggtaatccctggttatatactaacaactctaatataacaaacttaacagctcagcaaccaaggaaggacagttgtccacggtttagacttactaagctgacctttcaagatgagacaaaaaaaaaaaaacaattagatgaaactatccaccaaatagatgaccagagcagcacaatttgccacacagaacatctggatcttacaattaccactttggccctttgcaaatgccatctacaagcaaccattgatgccaaattaaatctcaatcaattaaggaattgaaaaagttagaaaatctacccataatatttcactgtgtcctcgttacacaattaagagcaaggattggaaatgaacccttttttgttttttaagatctcctgttaaaaagtagtgtcctatattgtgttaaaccaatcaaaatttaacacattcattaattttttatttataaaaaaattaaacctctaatgaagtcaataaaagtagttatcatatttaatataaattagattagttgatgtgtcaaactttgataggtttaacacaatatgaaacactaatttttggagatcttgattcttgaaaggtatatgcaatgtaagcgtgataaaaaaaattacacacgttgcatttgtagtttgaactattgcgttttatttatgatacggattgtatttcagatatagttataaaaatatgctggactagattaaattaaattgaattattaattaagattggactagattggattagttttgtactacatagcatttatttatctagtatataggactaaatctctcctaccaaattcttggaagatactaagatcttcaaggaagaaggatcagatttccccacatcgatccttaaccaacaggtcccccaaaaacatccatatctaccttagctggatcaaacatcttattcttcaactggatcagagtcaaaatcaaagtagcaacaatgaagtgaaacccaactatcaccaaaacttattatatatgtgagtattaataattatcgcatcacccaaattcttttaatattaattatttattcctatatatacttgaattaatttattacatcacaaaaccaaccctatatagtgctaggatagtggccagattttttgtttttgatttttttttttttttttggtaagagcttcttaaaagtacttttaagtcatatgagaattaaaaaaaataataaacatgaagttgaatgggggtgaaggggacgtggagctatttcag

SEQ ID NO: 82256 - DNA, 1325 bp, Cannabis sativa
  modified_base (894)..(901): a, c, t, g, unknown or other
tacgtacgtacgtatataacacttcttttacttatttctaacacacacacatatatatatatattacatattttatatgtacagagatatagttaattttggtcttgatataaatatatactatactgttttcctttttctatattctcttaagtttaattattattaattataaggaaacatatataatattcgagtcaaattaaaacggatttaattaataaacctaggccaatgatgatctccataaatggactttctccatataaaattaaaagaaaactagtatagcttcttagggcatgggaagaagtagtatataatatatatacacaacaaaccttaagtcttagggggtctgcaaatcaatatatgttatccaaatcctaaaccactaattacttatatatataatcatatatttacgtgtttccaacttaattttattttggctagaatattacatataccaagctagtggcagtacgctcttaaccattgttttccactacttttaattaatatataataaataaattagcttaattccttgccacaatctcgagcaccactctccactcccactataagataatattatatatatatttgataatatattagagctttatatcaaataattatgcacgtgtttttatatataattttagtgtaatattgcttattccatcttcttttgtctctttcataccatcatataaaagttaaaaccaattatttcttgttgaaatatgtatataatatccaatattatccacaaatgtataatggataaacactaactagtaaagtttatctcatgaagatagacatcacatatatatagtataagctagctatatttggtctaaggatatatatatatatatatannnnnnnnatatatatatatgtgtgtgttttatatctttttagagttgttttgtttgccatgtgttgattattttcagagatcgatattatatagtatatttgtatatacgtgaattatttagtacgacaatttttctatttttgcggcaacctatatattaatttgtaggtataaatctcgatggttgttattctcatcaagggaatattttacctttttcgaggtaaatttcctaaaatttgttagattattttatatgtaattgaaaatagataataataataataataataataataatttctgtgaattttttattagactttttatttgggtttacattaaattttattagttttattaacacttaggttgattggatagttctttgctgtattagctcatatatattgttggtgatcaattgtta

SEQ ID NO: 82257 - DNA, 1197 bp, Cannabis sativa
aaagggtgtttggcaaaccgctggtttctggcatttgttccctagagatcttgaattaatgactgatttgctagacttttttatattcatgagaaccaattgctctgaagtagattttgaagtgtttcttggtctgagttggctggtgtggaaccagagaaacaagcgtatttttcaaaacaaaacaactgccttagagagctggatcccttgggcaatcgactacaccaatagcttgcttcagagggacaaagatactcaaaaccagcagaacaatcaagggaaaagaagctggacagctcctcctgcaggtactttcatcgtaaactgtgatgcttcagtcaatcctcatatgcaggggtatggaatagcagctgtgattcgagatgatgagggccggctggtagctgctgaggtaaaatttcagaccggccttgtttcagttttgatggctgaagtgttggcaattgaattgggtatgttgctggttcaaaagatgaaggttcggccatatatggtgtgctccgataatgccactgccactaaatatatccattcaaaaactattcctacagccgattggggagtcccaataaaagagattttatcttcaaatactttagaaggttgtacagggattcattttgtcaatagggattgtaatcatgttgctcattctttagctaaatgggctgttgttaatagatgtaattctttttggtcagagggtattccctcttgtgctgctgcctttttaattgcagaaaagcctgaccttgtgtagctctttgttgctgaataaagtgtttctttctcaaaaaaaaaaaaaaataaaaaaacaaatagaggtgtattggtgtatcccttttaaaaaggtgcattatagaattttttaaaagtaaatacataaatagtaatctaataataaattgtgagaatatgtacttacattcttatagttactatttgtatgtttagtgctaataaagtaaattttaggtatcttaatgttattaaataagtttttgtataacaattatacttgtattttatagtcacataactaaattgttttaaaaaaaagtaaataaattgtaaataaaaagtgatatttgtaacaatttgtatagttcaatgataaatttttacaacagatttaaaaaaaaaaaaaaactctactaaaactatagtttaatg

SEQ ID NO: 82258 - DNA, 716 bp, Cannabis sativa
gttgacaatttgtcaatctggtcaccttccaagcatatgatcgaagattcaacttgtgtattgaatcggtctttatcaaaaatggggtaataggtccttctagaggaaaaacaataagttttgggcacaaataacaaggcatagcgcctaagttaacacctggggctggccctgcgcctaggttgacaaagttttcctagatttctttcgagcatcatctttatctttagaaaatattgagaatcaactatttctagggaccaaatgaaacttctaaaggggtagaatagggacacagagcctaggttcatacttgggactaggctctgcgcccaggttgacattttgtcaagctgggctgtttccaatttagattaacaaaaagtgctctggcatcttctatgtcatcagaaataacgaagaaccaagcacacttggggagaaaactacaaactcgagtccttgaaaaatagggcccaatgcccatgttgacctggtgttgggcccaacgcacaggttgacaatcaacctgggacgctaccttcaaatactcgaatgtcaaatctgatgcgaccattgaatctgacatggtcaaaaatagggggtgagacttcgtcctcaagtttagaggccttggaagccttgaaagtatcaaaaatagaatcctaagagctcggtttaaaggccccaaccgtccaggtcaacatttggcctgg

SEQ ID NO: 82259 - DNA, 591 bp, Cannabis sativa
aggaataaataagagagaagaagatagaagaagaagaagaacactttattagaattaagtaataataaatatgaaaatatgactatatatagaaatgtcaaaagtgtatttagtatctttttgttatattattattgagtcacgtataaattaaaaaaaaatagtttaaatatagttaattaattgtaaaatactattaaaaattattaagtatcattaatattgaatagtataatattcatatatttattctatatatattgtggctgtcacgttaaacgtaaatataattaatctacttaaagtgttgtaattaataataattattattacaaaatataataataatttttgtttttatttaaatcactattatgctttcaaatttcaatcattatcactatatataaaatatgatattagtaatatttaatatttttcttattattattagtgtttaatattagtaacgaattggagaatagtacctttaaaatggtagtcggttaacaatgctcatatgtgtacgtgtttagtttttgttatgggacttcaacacgtgtcatcttctagtatttacacgtagaaaag

SEQ ID NO: 82260 - DNA, 659 bp, Cannabis sativa
aggagtttgatgcatgaaatatggctatataatcgctctaatttgctgccacatcttctctttcaaatatttatttaaggaatatttttataaattattgacaaatattagttaatatttactagttatatttatattatcttttttgtgagatttgattatatatttttaatttttttttttattttggtaaacaataagtaataataaataagttaagaattggtttttaaaatttatataaaatggaataaacaaaaatgttacaaggtattatatggagttaagtatataataaaattaaaatttgtctaaacaacataacaaataaattaaagcaatgagaattgataagttgggtgaaatttattttaatatttgattgcatcagaagaaactcttgcagcaatggcaaggactcttgtagtacttgtctatctgggcaactaaaaccaggggaaggtgtatctttcttcacaattattcttctcaataaaattataatgacaagattgtcccgagcaaaaaaaaaacacattgtcatcggcccaataatagtaacaatatttgaaaattgccccatcatgggatataattaggatacgggttaggtaaatgtaattatctcactcaatagaaccacaaaattaatactggtt

SEQ ID NO: 82261 - DNA, 924 bp, Cannabis sativa
cattttaaattcccctaccggacctcgctcccctctgactcggctgaaacaataattaagttttaaagataagaatttatgttgcaaagtcccaaaaatgaatctaaatttgatggtttaatatgtttttgaaacctgaaaaatagctgtatcattttggcttagacaagctttgtgaaaaaatatgagaacatgattaaaaacgctcttgactctagatatatgctcctgatcttagggttacatgcacactttgtgttagagataggagacgccaccattctgcgctacgtactgtcttcttatcgagcccaggtaaaacttatctgatctgaataaataaaataattatttacaacacataaatttctaattttaaacttttttaccgctgggtggaatatttttcaaaagaatgtgttttttttataagaaatatcgtgtactcatgtgttaagtttttagtgttattctacggttattttttaattttctactgttgtttttatttgttctattatattttttactattattttataaaaatacactatttttgaaaaactttcgtatgaatgtatttttgtaaaaattaatttaaactctagtatttttttttaaaaaaaattccataaataaaatatgatttgattcagtatatgttgatgttctattctataatgtaataataaatgagcccaactcaatcttagaagaataaaatcagacctaagtaatttatatggatcaactccttgatcttgtgggctgtctgttgccaaacatcttatcaaactagagtgtatatatagtgtggtgaaaaacaccctcaattcttggccaaatcagtgccaattaacaacaagaacaacaccaacataacaagcaaacaagattaaaacaaatcagaaaactaaaaccaga

SEQ ID NO: 82262 - DNA, 1315 bp, Cannabis sativa
  modified_base (1289)..(1289): a, c, t, g, unknown or other
gctaagcattgggtcgaggttccattccaacatcgtttgttcttggtggctgttccatatttggtgtcgggtttcatcacaagttggtgtggttcgtatcacacccctggccaaggacttttttctatgcaacctgctctacccctcacttttaggcttttgctgatcctgattagggagcctgcctcgacactcaaagatcaatgtcagcatattgcgtctttcttggccaatctctaatctcctagaaatcaaagaaacaacccacggtgtctcgatcatcagctgaggtagagtactgggccatggccaataaaacctgtgaacttacttggctccacaacatcatcaaagactttaacatccaacccctgctataatcaactatcttctgtgacaattcagctgctatacacaatgcaaaaaatccaatgcagcacgaaagaacaaaacatgtggaaattgattgccacattgttagagaaaaagtcaccaatggtagcatcaaaatgaaccatgtcccttctaaaaccaacttagccgatatattaaccaaactcctatttccaactcacttcaatgaaaatgtatccaagatgagtgtcaaaattttttacactctatcttgaaggggcctattaaagtttgttatgttagatattcagttagttagttcgttggtttaggtttcttggttcaagtcctttgttctgcctatattgtaggttctcctattgtaagtttaatttaattcaatacagaaataaaacattttccattttttctgttctaatattcattttaattaatggttttttttttattttttttttaattttttcttttccgttcattttaatgttacttcgtatcttttattaattttattattttctcattttctttaaagtttttgaagagatttgaaaaagtaaattactaacttttggtttttattccctttttgtagaatataataactatatagtttgtcaaattatattacttgctttttcaaaaaaaaaaaaaagttaaattatgtcattttttaggactaacaaaattgtatagcctaaattttttagcaatcataatttgatatgtgtaatttttaatatataattaattagtttaaattagcttattttttttacttttatgattacttttttattctaaggtgttttatgattaatttgaatctattttgtatgaaatattaatcatatagttagtcaaattttatccattttgctaagaataatccaaatatctttatatattaaaantgtctatctaacggcaattcttggtt

SEQ ID NO: 82263 - DNA, 644 bp, Cannabis sativa
acagttttataggacatgtttttaaaaaatattttcacttttccacttttaaaaatagaaaattgattaaaaaagtgttaccgaacgccacctaaaaatatataattttttgtagaagaagttcctcccaaaaagataaataacgtatagagtagtagtttcacgtgtatagttttgagacaagtatagctagcttcttattattgtaaatattttcccaccttctatgaccactatatcttaatcaaataaaacaaaaaattataaataaataaataaaatgtgtctaactcaaaagttaacaactgaatcgtgtcataaattgatcaaagagtggttgagtagatgatctttatgtaacgagaggataaaaatagcttaaggtcgagtcagtgtattttatatattttattataaatttaaaatatacaatcatcactgtatcactcttagtatttttttttataacaaaactaaattgttgtaaatatgggtcgaactttttgatatggtacgcactcaatacgagttcagaaggtacgagcacgtctaggcacgaaaaaaatataagtttgggcacgatatggtacgatactataaattgacaagatatgatacggaaaatatattattaagcacgaacc

SEQ ID NO: 82264 - DNA, 1530 bp, Cannabis sativa
tggaagtatttttgtaatattattaattttttttttggttaaaactgaaaaaaaaaactaaaggctaattgtgtaattcaattagtgaaatccctaaaggatattgtcactttaatataggttatagaataaagataacctcacactactaaaaaattaggttatttaaacaccctaatcttagcagttctatgtgtaattgctaagattggtgacatttaaaaataatgtttttgaaactcatgatctcggcgggccacccgtgaacctccgagattagtaccctatctcatgcgtttcacgggtagcccatcaagattgggtctataattgaaaaaaaaaaaaaaaagtcaaaatcatgtcccatttccataacctaaacttcttcttcatttcttcccaactgcacgatcttcccaacccagcctacacgaagctgtcccaacccaccttagaagaagccgcctgtctgcctatctctgtccccatgcgaccgcgcctgagctcgtccctttcccattaattttgttatcaaaaatgccagcaagaagctcgtaaatgtttttttttattattttttttaataatttgtaatttatttattgagtaaaatgtaaaaatataagtttatatgtgaatgttttaggcttaaaattgtttgagtcatgacctgaatatgatttgaagtggtttgtgattgcaattgtttcttattaatatgatttttctatgttcattggtgtttgagaagttctatattggtttgatgcaatgtaggtactcttagattcctgttgtgcaatgttagcaccctatgctcattgctcgaatagagaagcctctccatccatgtccaaaggtttatttggacaaatacaacaggctaccagcagggcacttcctagcaggttagccagcctcccatggtagaatttttaggcatagaatactgaactcaatcattttcagaagttttccatggcatatttttttcttatataggaagagctcaaagactttgcaaggaccctattgtgttatatagttcatatcattgtaaacaatccaattaatgagataatataatacaaataatcttttaattaaataataatataattcaataaaaaaataataacctgaatttttttttctagtgctccttatttcagaactttttttttcttaaaaaaaaaaaaataaagattttagggttttttttttttttgagaaattttatttacacctcaaaattttttaaacaccttattttatataaatttatatttttaattaatctaagttttttaattttttttcttctaatttatatttttaaaaaacatacctatcaaataaaaataaattatattttaaatattatcacaaaacaattataagaattttttttttttttaaaaaaaaaacaaaactatatatataagtttaaaaaaaattataaaattaaaattattaaaattaacattaataatgtgaagaaaaaacttaaagaaaaaaaattaaaagtaa

SEQ ID NO: 82265 - DNA, 856 bp, Cannabis sativa
ctcagtttgccctcattttatttacttgtcctaagaaaagaaaaaagtgtttcacattaaggctttgacattttattatatagagatgtcacagtactgtttgtcagtgtcagcttagcatgttccattggctgcttccactgcagatgatatgggtcagtaaactgaaactatatatatgatcccctaatgctagctgcttttaattaatttgatgttatatatatttatatagccaagctaattaaatcgacaaagagaactatataaagggattttacaccatatcatatagctaaccacatctgcctttcatcaccaataaatgtttttatgatatagggtagaagacatcttggagatatatatatataaatatatttatatatacgaggtgtaaagcacattcaaattcaaagtatttgttaatgtaaaatttagaaaaataatatatggattaatttctcttattttaattaatgacaaaaatatattgaattaaaatcctcgtattagtgtattgttatttaattaaaatttgactcaaatattaataaaatgattattttagtaatgtagctcagtaggtaataaaatatcatgggctaaatatttttattaatttattttataaggggctaaattagaaatacttaaaattaataacctagatatgagattatagtggtctccaagaaacaagagtacgtaattctattcttatcttctccaagagagaaaattagaaaattctaagtcttattttcttgtaggggtgttcacaaagtatctgatccaatccaatccgcacgatccaatccaatccaatccccaaaatgcggatatccgcacttgt

SEQ ID NO: 82266 - DNA, 1194 bp, Cannabis sativa
  modified_base (32)..(32): a, c, t, g, unknown or other
tgattaacataaataactgctaatttccaaantaactaagcgggctttacagtctgtgttcagtttccaaggtttaagttggggtcggagtctaaaatatagattaaaagaattgttaaaaaaaattttgaaagtctttttttaaaaaaataaaattaaattcttaattaaaaaattgaaaagtaaaactagttttatagaacatgattgtagaattttttttttttacttttctaattttaaaaataaaaaagtgttattaaacgcatcttttaaaattttgattctcaatcaaaaaaaattaaaaagtaaaaataattttatagaacatgttatagatatttttattttttttaatttttaatacaaaaaaactaatagaaaaactattactaaaagtctcctgtatttatgtaaatgtaagattgcaaagtactagaaaacttttaagaaactgtaaattttaaagaaaaaaatcgagtactatcataatcttacaaaataaaaattattaattattataattagatatttaaacttgatatttacattagattatattattttgtaatcagatcaaaccgatttgatcatgtaaatcctacttccattgcttttgtgtttgggaaagaagatagagaagtaaaacactgggacactgggataagggcttgaggcccagattactaaggcccattaataggaataggattcgtcaatctttctgttttgttttgtaccctaacataaacatatccattcatcaacaatatgacagtacaaaattcaaatcctttgcagaatcgctgcagcacatgttgtggacccaatcatttctcttccccaaattagttgaaattaagtggttgatgttggaaacaatggtgagtactgaagaggttttttgatgtaattgtcgaaggtgaccttatttcttgtctcttctcctttcactctttctcaaccccatttagctaatacaaacatatctgcagctcaccgcaggtccacaggctgtttgtggcttttattcctcaaagcccatccatattttgcctccaaaaaacatctctttgtaattatccacttatttatttgtttatttatttattttaacagttaaggggtatggatgaattaattccttacgagcggaaatgggcaaattgaaatattgaacatcagtcaaggtga

SEQ ID NO: 82267 - DNA, 1046 bp, Cannabis sativa
taaacctatcatgctcttctaatagcacatgcatctcatacaagcaattatttctcaaataattagcagataatcaataatcaattaacacttactatatcatgagtcgaacgggtcttcaaaactaatatacatattcaactagtcttcgctaatcagaatctttaaatcttagtcgctctaataccatgttgtaacgctctaaccccgtaagggcactgcgtgtgtgtttttataaatttgtttataatcataaactcatagtttaagtaaagtgaattaattaaaactttaaaatatttcttaaaatctttttcaaaatattactggaccggggatcccctctattttaaactcttactaaaatactattgtattcatttattacaaattattaatatatgttcaaaatactataaaagttggatcctgtcaactaagcataaaagacggcaaggtcgatatacattcgacgggagacctctaacccatggctaatctactttttctttttccttacctgcaccacaaaacactcgtgagtcacaaagactcagcaagaaaagcgagaaatgaaaatacaaagtccataaataaataagccaatagtcaataacaattacatacttaaacatatattcacataaaacatcgcagcttaatacaataataataatcaattatttgtctaataaaacaagctattctcgatactttataaagtatccatcaaccctcatttccaaaaagtcagctaatttcactactgttgcctaatgaggcaatcgataagtaaaaaaacctaacaacaatttcagaatagagttataactctttcatattaacggtcactattgtatctcaacttatacatgcaaagtggtacaattgacttttctcaccttaagtccacatttaggtgtgcgggccgacctgagtggaatagtgctcgatgatctcaagacctatatcacgacaacgacaaatcgataaataacttagtcaatcctgttataagacttaaactcaaaatcgaacaaacccct

SEQ ID NO: 82268 - DNA, 1303 bp, Cannabis sativa
aaaatgtacattgtaaaatttcccaaaaaataattcttaattttacaaatacaataatataaatatatataaatattaactaaattataaaaaaaaaatgtcgtgactgcagtgcacgatatatacataaaacatcaaaatgctgcatgatatgcagcctccttggaacatatatacacaccataccattcagtctccttggagctgctcttaatgtggatttaacatgtcccctttgtcatgttgatgttgaaactatttcccatattcttactcaatgtgactttgctaagtcttgttggaatatttctgcaatcgactttactggtggggggatctctgattttgcaagttggtttggtgatgctctgctgaataaaaaaactaagattgtggaagagatggccatgattgcttggcgtatttggttggctcgtaatgaaatatatattgtggaataaaaaaactactataatttttgaagtgctaagatcggcaaggactaatcttgacagttggaaaagtgctcaagctcaaaaggcagctcctttacttaatgtaaattatggtaatggaagagagcattggatgaaacctatgaatcataagttcaagataaatgttgatggagccatttttgaagctgaaaatagttttggtgttggttatgttgttcgagacctgtcggcaatgcttgtagaggctggttctataagcaaatttggtgtggttgctcctgaaatcgctgaagcaattggagtgaaggaggctttgagttggataaaaaaacaacatttagatgatgtggaaatagagacagattcattagtagtagttcaacctattaatggaggtgtcaaaatgacctctcagtttagaatgtcggtgcatgattgtcgtgtgttagtttctactttaaacaatgtgttaatttcttttgttaagcgatctgcaaatagggttgcccattggattgctagattgtcctattttctgtcaaattgtaattttaatgagcttaatgctccgtctgagttgatttctattgtaatggatgaacgtttcagtttaataaaaaaaaatctaagattattttttagaagaaattaaaacaagggttagaatacaaaagaaaagttttacaccaaattggtgtagattcaaaattcaacaccattaatggtatagaatttggtgtacaatttactgtaccattgaagtgaaatagtgtgaagattccacaccaatttggtgaaatgttgcaccattagagatgcttttagtaatttgtgagatttatatg

SEQ ID NO: 82269 - DNA, 1117 bp, Cannabis sativa
ggcatcatcgctagcttttgccacttgcattagacaattatatttgcacaaatcagcccgtgggtctatcctgcctttgtataactccatttgtagcattttgaaattttttagtagttgagcctctatgatctatctgacacaaggttctggatcttcctcctctaagtcaaagattgctctgctttgtttccatacaagcttcgttatggagtctatttgctcttccaggtgcttggagtcactatccaggaactcacgcatgtggatcctattgttaatatagttttggagtacatttttgcaagacctcacccttaaacctccagctttctctcattttacttttaggttgttgcaaagatctatagtggaccaactatcttcaagacaaactacatctattccctcttcttggtttatagaatttctaggaaagtctttccatccttgaacggtaggctttggtaccaaagcatctagcctaccatactggaaaaccttggctcacagattagaagggcatcctagccttggggtttgacagtccttaatatttctatagaggcttattaactagattatggtttgtcttgggaacggtgggagtagtatatctttggcgttcacccttaacactttttcctttgtcctttgcaggacagaaggtctgacataaattgggttcaccttttttgtggggttattttccttaggggaaggctctcctagactattctcctctaaaatttcctcatgggcgttgaatctatcctgttgttgcgctagtgtttactgcatctgatgagagatatcttcgtatgctaccagtttttgccaagttactgcaagttctttagccatctaatataccttgagatctttctcataataatagttttccttgaaatagccatctttaatctcgttttcatctcctctatcatccttattgttggttttccctcagggtcttcttctcggtcatccatccatctggacgaccacaagcttttaatgtttctccgtcttcaaagtgctcatttaggcatgcactgacggaggtgggttaacgtcgtccatgataacgtcctgaccatgggtagtgggttagcga

SEQ ID NO: 82270 - DNA, 677 bp, Cannabis sativa
ttatcaaaaagaaaagaaaaacagagcataaaagaagaaaatattgaaaactcttctctctctctcactcaattctctgaaatcctgaaatggcgaacaaagaaatggaagtggtgaaaggtgttgacataaagaggtacatgggaagatggtatgagatagcttcattcccatcaaggaatcagcccaagaatggggttgacactagggctacctatactctcaatgaagatggtactgtgcatgtcttgaatgagacttggagtgatggtaaaagaggttccattgaagggactgcttacaaggttgatccaaatagtgatgaggcaaaactcaaagtcaaattctatgtccctccattcttgcccatcatccctgtaactggtgattactgggttttgtatattgatgaagattaccaagtcgctctcgttggccaacccagcagaaattacctttgggtatgtttttttatttatttacaaaataaaatgaaatttgttaaaagggcttttggctttggatataataataagtttccttgattttaaaactaagccaaaaacccagttgtgatactgaattggttttaattagttctgcatatttatgactgattctaaagtttatatcacaattttgttgttttgggtaattagattttgtccaggaagtca

SEQ ID NO: 82271 - DNA, 596 bp, Cannabis sativa
cagacctgttaaggaatacttaaagtaaaagtaaagtacgaaaatcctgacctgctaaaccagcacatgcagaagaaaatactatcacaggcggtgcctgcatatttacatgaaagagtttagggcaatgccagagtttacagcttataaataagggtttcatattacaatatgaaaaacaaagtacaaggaaattaatttacaagtacaagttgtcatttacaaagggaaaacatatcagagaatagtaaagtactaaaccaccaaaaaacttacaccaacgagaaaatgaaaccacatcggtccctttacaaatctccgaacaattggcattactgcagcaacaaatacaaaatgaaaacatgagtttattaagcaaggaaatctcttggtgaagaaggcacaaacagaaagactttatttgtaaacaaagatggatatggcatttggaaaaataaaataaaaacaatgataagaaagggtatgaaatataaaagcaaccagtaagcccttgcatttgaattcccagaatagctaattattcagctacttggcttcctatcctataattagcaattttgcaatgcataaaaaaa

SEQ ID NO: 82272 - DNA, 1040 bp, Cannabis sativa
cctcccatctttgttatcttttttgtacccatcaaccacgagtagctaagaagagaaaagtaaaagtacctcgaattgtgattgtagaggttgaatttgagattagaaaaaccaattaatcccgtgggcagagggctcccccgaaccttgttggtcgtacagtacgtacaacgccaacaaatactttaactccttcaggctaatctacgtcgggtagatgttgtaatagttggctatattttattcaattttatcgtaaactgaatcacgtggtggatgttagttaataaataaatgcaaattaaatatttttcaccaattttattttgaaggttaaaaaactgaaaaaataaaattataatttgaaatcatatgataattttgtatagagatttatcaattaaaaaaaataattttgtgtaaaaatctctaatcaattcaaaaaatttggtaaaatagtcactcatactaacaaaaaaaaaaaaaaatatatgaaatattgaaatatggttaattttatgacttaattattactaaaaaaattacaatcccatacgaagtatgatttgttttctagttattatagaaaagaaacaatcttttattttgttatttattgacataaaatgagtaaaaaatatttaatttgcaccaatttattaattatcacttacaattttttatttattttataataaaattaaataaaatatattggaaagattatgttactatcaaaattgtatttaaaaatatattattaataaacggtttattacaaagtcacaactcggtagcgtaaagaaatcaagttaattattttttctaagtattgcaagtagggttgagcatacaatttagacaattgaaaaaactgttcaaaccaacctatcgaacaccgttgaaatcgaaatcgaaaatcaaaaaaatcgctaatggttaaaactactattgaatggtcgattttttttttgtaataaatcgacagaaaaaactaaaacagaccattatatatgtatattaattttttaagttttttt

SEQ ID NO: 82273 - DNA, 603 bp, Cannabis sativa
aggcttactaaatagttttgaactttgatttcagaaccttttccattggtgagagatatatttaagatcacatctggaaatgttgtttggagttttggtggccatgttgatttcagcccctataattattttatttttttttttcattttcaaaatgctttcggttttaatttgttttgttaattctcaactcaagtaatctgtacattattactattacacaaggtaaacctccatagttaaaatgtatatactaggaaatatgtatgtgctgcacgcatattttcatataataattgaaaaagaattttcatatttgtttagttaatttgatttttttaacaaaattatagtagtgtgaagaattcatatttgaggaatgataagggtactgaaaatatgtaccaaaaattacaatgatatgatagagtttttaacaatcatatttattattaaaattgggatcatctactttattaaaatttagtatcacgtcattataatatttttattgtaattcttggactccattaacgtactgtcctcagatataatttttgaaccctattaacacacatgcatcctcactttttaacaagttat

SEQ ID NO: 82274 - DNA, 585 bp, Cannabis sativa
ttctattccaaaaataataataaagaagaaaaaacaactataaaatgtgacccgaaacttaggctaaaatagcctaacataaaggtcaagatatcatttagatgtcatgggatcgcatggctactcataaacatttgggtggtatgggatttcgtcacttacacaacttcaatctcgcaatgttggccaaacaagggtggcggttactggtctctcttacatctcttgccagccgtgtgttgaaagccaaatactaccctcaatccgatttccttactgcagatcttggcaacaatcccagcttcatttggcgtagcatatggagtgcttaaaacttgataaagctaggttgtcaaagaagtattgataatgggattacaactaatattttgaagcatccttggcttcccgatcctataaatccgtatgtctcctctgccaccatgggtcttgaaaatcatatggtgagttctctcttggatattcatgatacttcttgggatcactctcttgttaatgacatgtttaatccccgagatgcacacatgatccttggaattcctttgacctctataccagatgaag

SEQ ID NO: 82275 - DNA, 952 bp, Cannabis sativa
atttatcaaactttatatttcttccagaattactatcttcaattcaatgatgtgtataatttaaaaggtacaagaaaaattcatatgttgttgtaatggtcaaatatatagaatcataatatagcatttattttttctcgtatctttctaacaagttgtctaatttatcaatagactatttagcagtctaattattgcaacttgataaattatatacttaaatgtacaatcagtacatataataagtcattacttgttactttcatgacttgataaaaactatctgcatgtctagatacaaacaaaattttttaactttttttaaataaatagtatttaagacttactagagcaacccaaatcgtaaattgaaaaaaaaaaaaaatagtatataaagtgattttcttttaaaaaaatcactacaatattaagtgtaaatttaatgtaatacagtacatatagtttatatactaactaccaaatttaactaatatatatataaattaatagtgtttggttgtgacaacgtaagatccaaaaatcatttttgtaaccaaacttaagtaccaatatcctaaaatgaaaacattataatattcatgaatatatcgatatacttacataatataaaatatttgaatgttgtttaattaagcaaagtctaacaccctttcttcagtaatcattttaagttactagaagagtacgtaattaaaattaatgtaaaattacgtacaaaacgtgcgagttatatatgattatgacacaatgagcacgattggaaacacatttttcatgatcattttcattggttgcattttcatttctttatcactagaattgtgaaatgatgtagtgagaaacaaagtgcaagttacgtatttgcacgtttgaagagtaccgattattttgataaattaacttcaatacatatagatacacatatatatac

SEQ ID NO: 82276 - DNA, 916 bp, Cannabis sativa
acaagccactcaaatatttcacatgagcgatccattagatgcacgctggtcagttgtcctcacaatgcaagcaaaagattatgctaaccaagagtctagtggcgatgatctcatgctcagcaaccaaattcatcaacttactgcaccatattgatgtcattgttggggatgatatcatatcatctcgtgatgatgggaaagggttgcgggtgaatgaaactatcaactcataatccatgagttagtaaacacatattagtatttactttttttttttgacatatttaattttaattatcaatttgtatatttttgtataatttaatatatgttttccgtatttatgtaggactattcattacggagccagaaccaaacaaggattatgatgatgggggtcagtccattggcgattatcatgacacatctgagctgaaagaacctcatggagaatcggaagaacctccacaagcaataccacattagaaaaacactagacggagaagcaaaagagtagatcttactaaaatgaagagcgaggggaagcagatggaggttgagttcaacaacttcggaaaacattaaggaaaatgaacgattgctttcgctacccgacttgagacttgggtgcgagttaacattccacaacaagatatcagttggcctaaggtggatgctaaacttaaagaaaaatgtttaaatgaaatgaagataatattaagtaccttaaatttatttctcactattaattatgatttgtacttatatataacaataattaccaatttttgaaaagtttttttgagttgtcacaggagaacaagaaaaccaccatttcaagagatggagagattgaaaaacattcctaatatttaaaaggtatatatgaattaaagatgtggctttccctcttctt

SEQ ID NO: 82277 - DNA, 1093 bp, Cannabis sativa
tttgggcttacattaacgttttaattatttcttgtttaatgtatagttaacgagcttaacatatctgtgaaatctagttgaagcagaagtgtggatttttctaattaactgaacttgagaggctcgattctccctaactctataaataatctttattatttctcaattattgctatgattcatcacatatgtttttctatattcttcaattaaacaatgttctaaattgtattgtcctgggattttataaatttctaaaagtgaaagcaccaaatttaactattcatttacaatttccaaccatagctatctataaatgtctataaagctttaatgggcaaagtattaaacatcctagttactgagtaaactcaatgacacacacacccaaatcataaaaatcaaacctttaagcttgtgcttctgattttatcatctggtttaggaaaagaagacactgtagccaagaaatctactccagctgaaccaagaccaacctgttaaacaaaacccaaacttcaaattcagttaaaaatcccaaaaacaaaacaaagacttgacatttagacacaaatgggttacttacaacaatacggttttctgggattggaagggaattagaagatgacattttgagcctggaaaatttcccaagttaaaaaaaaaaaaaaccaaatgaaaagaaaagaacaaaatgaaaggaaagaaaagttcaaaggagaaaccttgttgagtgaggtagagttatggagagagaagaagaagagagtgtagagcgaaaaggagtggcattgggtgttgttgttgtatttaaggagagcattttttgttaaggtgaaaaagcttggctatggttatggcttggctctgccactcatggaagctgattaatcatttggtttttcagttgacagagaagagtgtttgggaccggtaatatagttattcttagccggaattggattaacactattccatgatggaattaactatactcataagtcaaagaccaaggccatatttgttttttgaataaaaataaaaaatgaaaaataaaatattatatgttaaacttatgtcatgtgtatacatt

SEQ ID NO: 82278 - DNA, 1166 bp, Cannabis sativa
  modified_base (944)..(948): a, c, t, g, unknown or other
gttgagaaagtaaagaatatggtgagttgtatggtaaaagatgtatgtatatattctcaaaattaattggcatagcttatataaccacgtgttgtgtactgtagtaatacagatatttcactgatatcgttttttgtttggatcaagggttataccaccacagccactcaagggtttatatatgcttgattttttaggaggttaacttattgtaacggtactatttttattaaggtgggaactcttgggttatgtttaaaagttaaatttttggtgagagaagaaaaaattaaaaaaaaaataaaaagaaaaaagattattaaatagtatggaaagaaaaattatataagtgcattcaacaaaattttctattttaaacttaaaaaattgatttatatttttttattttccacaaaactatttgggcaatcaaaaaagtaggaaaaaaatcaacaccaagtgatttcctattaattcagcaaaattgacataggttatatgcattttatatatattattaagttcagggataatgtatgcaaaaatatatgtatatgtgtatatatttatatatgggcagaattaatatataagaaatgaaatttttctcatcgacagtagtggaactgtctttattactactggacttacttgtgggactaattatgagaagtgggtgtgtgtctgatattatatataataaatgtagctatacatatagagatgataagttggtatgaatggtagtagtcatatatggattcactatagttgaatgtggatcattactattactaacatctctatcatctctcttcaactttcattttcatgaatttagtaaccaattaactcaattccttactatcatttacttagggtttattttacactaatgatctacctatatatatacatagtcttctcctctctctctctctctnnnnntctctctctctctctctcttgtaactgttagtagtagtggatccaaagctaacaataccattaataattaaactaaaaattgtaccattaataattaaactaaaaattgtattgttcactctaaaaaaattgctacttttagtaataatcttttagtcacaacattaatcttttgtaactaaatataactttttgtcacaacaaaaaattacttgtga

SEQ ID NO: 82279 - DNA, 1007 bp, Cannabis sativa
gacccattcggttgttggtggtatctatttgcttcgtttcgctgttggagccactctcacccaagaatctcatgtcattgaggcttggaacgtagttaagcaacacgcacatgccatactcaacactaactaatgcctatttgttacattttattacctttgattcttttggcaagtcaacaatgatggttgcttgcctagattgtctatttattcttttatgtacgttcccatgtgtacgaaagctccattaattctttataatgaatatttgacaaagactatttcacattttcgtttgtgcaattctatatagtaatgatttcttagtttgattatttttttctgttaatgttattttttttttcttaacataatattcttagttaatgtataactaaattactaaataaacaaataacaatattttaatattaaattctaactttgcactatttgaaaaaataaaaaaaattgataattttatgtgaatattatgtctctagtttagaggcaagaaacttgtagttaaatgtttatttaattaataaatttcacaattatttaaattttgaaattatttaattttatctcatataaaataagatatttttaagtcgtttatctttattttatttcacttattatttgaatttaaaacaaaacataataatgatgatatataataattattcatttcggtaatatgtatgattttagacaatatatgaagcaataacatttcaaataaaaattaggatatttacactatatattttttttttttccaaaatttacatttatataatttttatatttatatttttcatacctattttttttcttttttatttattaaagcttccatattaatttttttcttcttaattatgtctctttatatttttttattgacattttttagctgatttcttttttttcttatgttttttttttctctttcttctttctatttatcttttttatcgttctctctctccatacta

SEQ ID NO: 82280 - DNA, 1249 bp, Cannabis sativa
aaaatagtacaattatttaaaaaataataattataaattccacttaaactgtatttcgaacaaaaccaaaccgtttttaatagtctagtttggtttggttagagagatttatgtctggtttggtttccaatattcaaaaaatcgttatactatttggttcaaaaaaaaaatataaaaattcagaccaaaccaatatgtgaacagccttaataaaatgttgtcctctaccgacaccataactatcttattttattttatttctgtgttcttattagctattgtaattataaataaattgataataacaacaatatggcccaagcaaacaacattaatgttgtctgcactaataattgctctaaagttaatgctcattacattgtatttgatcttattctattatataatattatattaaaatatatgaatttatatgtgttattaaaatattattatatatagtattttattatctatatatataaaaagagatatgagttttaaaatatctttaattagcattatttgttctctttttaattatctcttttataatttcttaataagattaaaatctctatcaattgtacaacaaattttattttattattctctttttgtttttaaattttttgataaaactaaaatctctatcaattatacaacaaattttatcttattatttgttcaaaaaaaaaaagctttattattattatttttcttaattctttattaagaaaacactcaaatataattttggaaaaaaattctacaactatttattttctaataaataaattacaacctaatataaatactgtaagcgtacaccactattcaaatacaaaatgctatataattacttatatatatttatataatagtaataacaagttaatataaatcacattcctccctaaattaattttggtatctctaatatgtatataattatcactgttttgaatgcattgtctattacaagcgagatacaatgacaacaagtttgaaagagtataaaagagatacgatgataataataaatttgaatgcagtagcggtatggtaattaaaataattttgaatataataacaattacaaatgaaatacggtgatgagaacaacttaaaacttttttttttcaatttacgtaactaaaatataatttctgcatcaaatatgtagtaagttatcactttagataaaattttatgggttatagtgtttaacacgtttttaataaaccta

SEQ ID NO: 82281 - DNA, 790 bp, Cannabis sativa
ttggactcactaatggaggaatgtcataccaagtgaaaatgaaatatgaatgcattgttccacctgcaaggtttcagggaacaaatccctcgcaacaagaaccttgttcctcaaaaaatcaattaaagcaaacaaatgagaataagtaaagcttgatcataattgtaagaaaaacctcatatctatgatttctgaaatgtaatcaacacaataaaatcaaaatttgtttccatcaaatcaaaataaacacagcttcacattcacaacttatttctttgaagtcaacttttcttttgctttctggatcttcaaaaccttctttacaatcttctgttcttccaccaaaagtgctctgataattctgccacatattaaaaagaggacaagagagagcaattttttttagcaacagaggctacatgtttctgaaattaaatctgaaaaaaaaaactaacagttcgattaagtatgctcataaaacacattagggagaaagatgtgtttaaaaatcctataaaagtaaaattcaaatacaaacctttctcgaacagctctaccagataatacaccaccgtatgggcggttcacggtcttcctgttccttgaaagtctagaacgcttgtactcagtaggtctcaagtgtggaatctacacataataccagcaaacaacacttaaacaaaaggcaactctctaaaatagaaacagaaaatgtaatcatgtgctgaatatcccaaaaccaatcttctatcggcctactaacaaataaaaattaaaacataatttacaa

SEQ ID NO: 82282 - DNA, 518 bp, Cannabis sativa
tgagacttcagcatttggctataaaagtgatcttagttaacaaaaactaacaactgagcaactattctaactcaatttcctcacaagtgttaaccgccagaactaatctttttctcagttttttttttgttcattcaatgtatgtctaagtaatttgttaaaaaaaatgtctaagtaatgaatccgatagtgagtggagactaagatagattggacgaacactgttgatgattattgatagcagaaacattaacaatttttactccttaaaccattaacatctagcattaatgttaattacactaatttctctgtggtaacatttaaccatcatttgtcttcaaaagctgagataattattactttcttcaaaacctttcaacaaaaattattgatttgtattttaaatggattaagcatctaacctctgaaagtgcatagtaataaagaagcaaaataaactcagaatttatcatgagaaataaagtatcttaatattttgtattgatcagaaagag

SEQ ID NO: 82283 - DNA, 2157 bp, Cannabis sativa
gtaaaataatttccaacaatatctcctttactctttgttttgattatggagtacttatctcgaagattccaacttgcacccaaagataagagatttatgtatcatcttttgtgtaaaaagctgaaattgaccaacttatgttttgatgatgacctagttgtcttttgtaaggggaatgaagactctattcaagtgattagggaagcttttgaagaatttagcaatacttcgggtctctctattaatcttgggaagtctcacatttactttggaggtgtctctcaacaaggtaaattggctcaactcatcaatttacaggtagggagttttcctttcaaatatcttggtattccccttagaccaactaaatggaagcttgaagactatggtactatcttgaaaaaaatgaaggtcaaattaatttcttgggcaacaaagtacctttcttttgcgggaagggttcaattaattcattcaaccttattgagtctaaggaattattggatgagaatctttcttctccctaaaagtgtgataaaggagatcgagagattatgtcgtggctttctgtggggattgaaggataatcgaccaaagattcatttagctagttgggataaagtgtgtcttccaaaagcttttggggtttgggcttcaaggatggagttaaatggaataaatcctctcttgctaggtttttttgggatcttatgaacaaagaggacttgctttgggttaaatgggttaatggtgtttatctcaagggggctaatttttggaattatgatctaaaaggagatacaagttggtattggaagaagttgtgccatttgaggaagtgtttctcggttacagatataacatcagctggagctaagggaaaatttagagcttctaagctctataattctctaatcttgcagcaaccggatccagcagctcgggccatttggtgtcggctgaatgttccaaaacagagctttatcttgtggcagacagcacattctaacctgctcacaagagataagcttgttttattccacataacaacaactgatttattatgtgttgtttgtggttctgacattgaaaaccatcagcatctattcttcacttgcaggttctcaaagatggttcttgaagcagtctttgcttgggtgggattcaattgttgggctgctgattttgggagatgaaacaactggcttcggttgggccattctagcttgattgggaggttgttgattgttacattggctgccaccatttatcatatttggaggaataggaacaattgaattttttcgaattactcaaatactatcaattgtatagttagcaaaattaaaaaagatgtcaaatatagattgctatttctcaagaataggaatggctccaaagtggaaatagatttactaaagaggttgattgtaattaagtgagggtgtggtctccttgggagagccttgagggtgtattgttatttgttggtgtgattaatgaagctttgttcttgatcaaaaaaaaaaaaaaaaccttcagaagaaatgatttgttgttttccaatcagattgttgttgctttagttttttagcagtgtttaaatagtttgttagaacaaacattggtctttttatgtttttagtgttttctggacaatatgtaatttcttatatttctgttttttagattgttatgttaaatatatttctgttgaattatttagtattcaatatatatattaatgttcctgagttattttgttgttgttttattattgttttactattttttttacagttgttttactttatttatcagattttcataatattatggttttgttataatcttgaagaaaataattgcattatttaattaaaaattaaactttattaatgaataattcatatttatattcaatatagtatccaattactttaaaagctcttgtaaagtatgaaaaattattattaacatcatttttttttataaaaatagactaaaccttagttatgtatgaaatttatattcttcaatatcctacgctcaaatgtatattcagtttactcatgttgttccacagttgttctgtggttgtttgtattttcttctattttctatgccttctactgcatgttctatagttatgcctca

SEQ ID NO: 82284 - DNA, 657 bp, Cannabis sativa
ttacttttttctctatttaaatcaaaatgtgtaagaaaatcagtgatttgcattaataatggtatggagctaatttgaagaagataaaggtgaatgtataatgagagaatttagttttcgtttttgtaaaaaaattaaattattcacaaaaggacaaattttatttttgtccctaattaatttatgaagaagatgataagaaacttataattaaaaattacttgtggaagtatagaatcgtagataaaatcaattatttgctttcgaattttggctacagtaacataataaatcatatataaaaatgtagccaagtaaaggaattttgttaagaatataagttaaagtattttaaaaatatataggaacaatttttaagccgaaagtgtcgaccttcctaatctttaatagtattaatttattataattattttagatgaatggtaaagctgttgttgaataattggagacaatacaacattatttgatgcgtcagagattttaatctattgaagacactctcattattgttagtgactgatattgatataaaattggtataaggataagcttggaatataatctaacatagtttttcttttttttggtaaagtttaaatctctattattttgccagcaaaatatgtggtgaatagt

SEQ ID NO: 82285 - DNA, 837 bp, Cannabis sativa
aaaaaaaaaaaatatatatattttaaaaaaaataacttagaaaaacaatctaaatctaactaattattgcaaaaatctctctttaatattacaattaattcttcacaaaagcattaacaaaaaaaaaaaaaaaacaacaccacctctgtcttctcaatctgatcgtctcattcatcatcttagcaaataaaaaagaataaagaaatctgattcatgaataagaaaaattacagacatttttaaggaatcatgctcttcacaaacccatcaaacccatctaaaataatccctaaactttttattcaaagtagaaaaagactcactcagatctgagaaatttattacttatttgcccaaataacccactcgatccaaaccgaagagagcgtccttgccttcagataaccctcggagcgactaccgtcgtctttcagagatcctgaaacccaaaaccccatctcatactctcaatagcttttctctttctttctcagcttctatgtccagtctcctttgtcgacgttaatggcagatttcgactagcaatgaaccaaacaccatggcgacggcatgatgcaacttctcctcctacaagtagctctgtcgacgtcgatggctcaccaccatgggaggtcttcgttcccgaccaccaatctattagatctcgccacaggagcttttgatttgttttttatgttatttgattatttaattacttttagaatagtaggaggataatcggggagagatttgagtttgtgtctatatggatagtttgaaagttggggaagatgatgttgcaatttgtttatgaacaatttctctgatttttttttt

SEQ ID NO: 82286 - DNA, 545 bp, Cannabis sativa
ttagatggacacaattacacaagtaggacagttgattatttatatttacgactttgtaaatattttgttaatttttgccattagtatgtaattttttttaatttatttataagtactatttaatatcgactcttacataataataattgaaatatacaaaacatattattttttaataattatttatgaccgtgcattgaaatatatgtatatataaatttatatatatataatgcatcctggcccctatgatatgtgagacctactctgttcctagttgcaataagttgtattagttacaattcattaagatccaattataattaaatatttagaattgttagacgatattgttagtgataatacttagttagttagtttgttagttagtttctttttctgttagtttgttagttgtacagttcttgattgtaactaacttattctttcagttgtaactagctaagtctataaatacttgtacataatcatttctgaagtgtaatgagaatatagaattcattcctcaaatcttttattcaaca

SEQ ID NO: 82287 - DNA, 2161 bp, Cannabis sativa
agattgaagaggcttttgcatgaactggcaaactttattcacactataagacaactcgggtctggtgatcgtgagatattggagggctcctactattgatctgtgcatctgaggatcatcaaaatgttcacttccattagcagagagcttttgtccactaatcattggtgtggcaatgggattggcatcttgcatatatgctttatgcaatagatctttggcatatttcgtttgagtcagaacaagaccattgctgttgtgggtaacctctatgccaagaaaatatttaagctctcccaggtccttgagagaaaaagtattgtgaagatgagaaattatatcagtcactgttttgtgattacttgcagtaatcagtatgtcatcgacatacacaagaaatagagtaatggaggatgagtcatgaagaataaagagtgaatgatcagatttggaggacaagaacccaaaagtgattagacactgatgcagcctttcgaaccatgcccttggagtctgcttaagaccatataaagctttgtgaagcttgcaaactagattaggttgagtagtgatttcaaacccaggtggttgtgtcatgtaaacctcttcatgtaaaatgccattgaggaaggcattgttgacatctaaatgtctcataggccaattattgttgattgctagggtgagaacaactcttatagtgaccggtttgactacagggctaaatgtttcagtgtagtcaaatccgggttgttggtggaaacccttagcaactagccttgctttgtacctttttagagaaccatctggattttctttgattcttaggatccatttaaatccaataggttctattcctggtggtaatggtacaacagtataggtgtgatttcgagcaagggctagaacttcttgtgacatagcttgtctccacttttcatattgcatagctgacttgaatgtctttggtattttttcagacaagtaggtctttggtttatggataccagctttggcccttgtggtcattttgtgagtgttggtgacagtgggattactggttgtggttgagggtgggttgggttgggtgttggtgggaatggtggactgtataggtgggacagggagctggaatgcaggttgtgtggactgattttcatgagacacatgttgattttcaggcatgacagagagtgaacaagggatagattgctgaacatgtaagttgggatcgagttcactactggtttgggttgcagacacagaagggatggttgctggtgtaacagggcagatgcttatagcagacacatgatcaggtgtgttatgggtgatgttgtcatgtgtaatagtaggaataagagcagatggagtgtattcaatttgctcattaggtgacccaggctgtgtgtgagcataaggaaactcaaattcctgaaaaataacatcccttgagatgtagattcttcctgagttatctagacatttgaaacctttgtgattaatgttgtagcctaggaaagtgcatggtgatgatctaaacatgagtttgtgtttgttgtatggtctaatattgggaaaacattgacacccaaaggttttgaaggtagtgtaatctggtttaatgttgaataagacttctataggtgacctgttttggagaataggtgttggaagtctattatgaatatatacagcagttctaaaagcttcatcccaaaattttaagggcatagaggcttgtgcaagaagggttcgaccattttccactatatgcctatgttttctttcagctaggccattttgttcatgtgtagtaggacaaggatgtctatgcactatcccatgttggtttaggtaagatgtaaaagatctgtattctcccccccaatcactttgcaaaacttttattttcttaccaagttgaagttcggcttcagctttgaataattgaaaggtttttagagcatcagatttatttttgagtaagtaaatccaagtgaatctagtgcaagcatctaggaagtgtatgtaatatttgtatccattgttggatgtgatataagagggaccccataaatcagtaacaacaagttgcaggggttcattatacacagatttagagtgtttgggaaagggaagcttatgaatctttcctaga

SEQ ID NO: 82288 - DNA, 1913 bp, Cannabis sativa
gtgtttgtttcattgttttagaaattttatattaggtaggatgttaatgagatgttaatgaaacgttaatgaaacataacataattgttagtaaatctagattctggtaaaatatttcaaacaagtcacaccttttgctggggtctctccgagaactgtctctgtacaaaggaggaggttttcggtaatgcataatttgcctagtcacgaaatacactcgttcttgagtgtcagtgagttctgtgtactgcgtatattggggtgtataccctctcttttgcctattatcctcagatcgtgtactacctttagaagacttcttactccaagaactttgagttgctcctgcgatgcttgtggctggcgcggactgagttgaaagttgcacgttcatcccagggggactgcttactggggcccccaggtgtgacagtgctggagcaagggcaagattctaagtatatcccggaatggcagagaattgtattccgcttgtctgtagggcgacagggaccgcaactccaagaagttgtgttcctatcccataccctaacaatcccgttggataataccctccataagctactatctacgctttttcgagattaatgtacttctagaccctcttttgaaagtcttggaggctagtagctccttcctgttgtagctcattccaaaaaggagtcctagttcggattccagtttggagtaaagctaactgttgttcgtcatcaacctttttggtttttgaagcctacttcttaaacatctttatgaaattcttcagggtctccattggtagttgtttcatattggtcaaggcacttactttgaggttaatcttcctcgtcaccacaaactatcaccaaaagttaacatgtagcttaatccaacagtctacaaatccgagttctaacttcttgaaccattcctcaggggatccactcaattttagtgggaaacataaacactttgcgtcattattgactctcatgacagccattaatctattgaatggagatagatggtcattgggatccgtatctcttgagtatattgccatttagggcattttgaaatttttagggagttccgcctacaggatattcctggcatagggctctcggtcctcacggtcggacttcgagtcatatcctttctgtctctacgagaccctagagatgtctttgcggaggattgccaattcgactaagattccttcatttatgatacccttcgacacaggtattgcctgcttcgttttctccaagtgctttctcaggtcaccatccttatcattaagcttttgtcttaagttggcagggggatgcttgcgactttttctccctctttccccgggctcctgatgcattgatacactctttcggtcctctcgatcctgagggccagtgctctttcgagggagtctgcccctttgcggacctttcccttttgggaaatcagagtagacttttcgcagatcttgggcttttttgttctttttggggaacggtgtaggatttctcttagggtttccttcagagtaatatcgtatggggcttggttccatatttttggccttttgggtacttgggaaggtctcttcctgtgtctcttctagtcccagaggcatggccttgggctgcacgtgaattccagctgtttctatggactttttcatggcgacatctcttgcatcctcctattttgttccttttgcgcgacaagtttggcctcatgatcaactgccttttgccatagggccagtcactcagtagctaccattgtcataaacatcatacccttcttagttttcttcatactcctcgtcattttttagtctcgctctttagaatacatgtttactcatgaggctgcttcttcgtcccctggattctgaggatcttgggggg

SEQ ID NO: 82289 - DNA, 798 bp, Cannabis sativa
aacacctagctgagacataaaaatccaaaacttatttattttgaatataagtattaatatatatatatatataaattttcgaattttgacacaacttatcttgactcccaatttttttcttgtcggttagaaattcctttaaactatttgcttataaatagatccttcgaggaactccaatttacaataacattaaaaaaaaaacttaacgattttattcagattaaaattcactctaaattatttgttagacagtaaatttttctttagtgtattactatattattttacatatatattatggtatggttcttctaattaaaaaggtcttcaaactcatttatgcaaatttgtctgtttcctagaagtgtattctcgaacaagctttcttgctctctgggtggagttttcaagaaagctagtcctccttcgaaaaaaagttctgggtgactagcggttcttcttggaaggtagtcccgaatagttgactccagttggctcgttcctatcagggatggtccttcagcaagtgccttggtctgtgactacgggagccctcatacttgctcctggatgcacttttattcacactgtcgtggagacctcgcttaaaggagaatttgttaagttacttattgtctaactaacttaacaacccaattcttgcaaccactgactttaagattttgatcctaagccgataaataatacacacacacttatcttttcagaacaacaataagattgagattgtaattgagaaagagatagattagattgagaggtagagagaggtac

SEQ ID NO: 82290 - DNA, 1465 bp, Cannabis sativa
gtttgggtctatgtttgggtcttgggttctgagtcatgggtttggatccctgattcaggtcagcgtccaaggtcgcagtataggtttgggtcccagtccgagtgtacatcctcgtctatgatcagtactagtccttgtctctggtcttggcttggtttaggtctgggtcctgattcggttctcaagtcccaggtccgagtatcgggtcctggtccccgtcccggtcctaggccaggttctagtcccagtctaggttcagttctcagtcctagtctgggtccgagtccttcgttcgagttcgagttctggtataatttcgagtctgaatctaggtctaggtctaggtctaggttcaagtatcaatccgtgtctaggtcaaggtcaaggtcttggcctgggtgtgggtttgggtcttggtctaggtctaggttctggtccagttctgggttctggttctggccccgggtcacaggtcctgggttccacgttctgggtaataggtcctagcgcaagtttgggtctgggtatcgatctcgatctaggtccgggtccgtgttcggttctgcatctagatccggttttgggtccaggtccaattcttattctagggtcctgattcaggttcttgttccgatttcaggactcgacttcgagtcaaggtttgggtcctggtctagaaattgttctgggttcgggtcttggtatgattccaagatttagacaccgactacgggttgggtcgaagccccaggtcgtgggtcaagatcaagatcccaatcttttgtccggtctcattttgatttggatcctgggtcctggtgtgtgtccatgtccgtgtccagttttgggaccgagactagggtcgggtcttgggtcccagttccagtcttgggtcctaattttggttctaattttgagtttgggtccccattctaggtctgggtcgtgggtctaggtttgagtctccaatcctggtctaggtcctaggtctgggtctgggtccaagttcgtgtctgggatcgggttcgtgtcccgtctctcgatctgagttttgattcgagcctgtgtcccagtctgggtctgggtctgggtcctattcgtattccagttcccaaactcagactcgaaaccatgtctggggtacgggtttgggtccgagttcgggacaaggttgagtctgggtatgggtctcaaatccaaacagtgactacaggtcaggtccaagccccagctccagatctggataacagtctcgggtcccaatctagttccatttcatgtcccaggtccgggtccgggtcctaagttatggtccttgtctgggttgggtcatgggtcacggttccagttttgatgcccatgttctgggtccacgtcccccatcctggtttcagtcctaggtcctggtcctactctaggacccggtcgaggttcaagtccttatccgagtctgggttcaggttcc

SEQ ID NO: 82291 - DNA, 1068 bp, Cannabis sativa
gcaatgttggggacgatggagtagttaaacacatataatgcatatcaatttgcaacttctcgtaaatatactccaacgaaatgcatccttttttgttatactcttctagctccataacaatttcattagccatgaattttgataaaaattctttgcagcattctttgcctgcacaaattattttgttttcagagtagagagtactagactcgtcaaaattgagtatgtaagcttgattacatctcgcgaagagtctacctcccagtgaatcaataatataataggatgaaatagttaatttcatcacgaaaaagtgatcattccaacccaaaatgaaaacttttggttcatcagttaaacttttcgtgatttcctcccacatatcgtctagggagaaatgacctttcaaatcctcaaacttttcaacaccaaaaaatcctgtagtagacttttcagtgattattgagagcggcctaatgccagcttccaccaacgtctcaatatcaaaatggttatttaaaaacctgttttgatgagaggttttgttgcatagtttccgccattcagaggagccttgaataattagagagtctaattgaaacctcgtggggagagaattagggttgctaagaagccaatgagaaacgactatggctatagccgaacaagcaccttctccggaaactacattgttcatttgatcaaaggaagcaaaaaagattggtacttcgagtgtgagtttcagccgggcttctctaactttttcatagctcactaattttaaacgattgtcggaccatgcaaattttggttcctgatcaattataaaccaaccaataattagtgaatatatattttttttttttttaaaaaaaaggatgtattaattataaaataatatatataacaaagttttttgtgctctctcactttatttttctttgaatttatatatattgaaacaagatcgaccagaagtacattacaaacagttataatttggcttaatctatatttactcttagaggttgtttagtatgatattatctttttatagattgataattt

SEQ ID NO: 82292 - DNA, 1274 bp, Cannabis sativa
gacactcagcgagatctttagcttttttagatggaagaagaagcaaggctttggtatttgcttactgttatagacagattatgcgaaaaaaaaaagttttggaaatggtctaaaaagtggaaggaatgattttaacgtttaattattattttctttttcaaattttgtaaccgttggccagccacttatgagctcctcttggaaaagacagcattgtcaagtattaacacccttccttttatttctaaacgttactcctttcaataattgggctattgacttgttaatgacaccttgctgaacagccgaaggagattcttctcaaaacaagttctgaaacctctacatactacagaactaggggcctaaacactttacaaatgggcacagtaagttccttgtatttatttagctccttcacgagatatttggttcttgttttggaggtatctaattaaaatgtgtacatttgtcaaaaaatgaatataaaattaatctgtagttctgtccctcctttttcctgaacaagcagggatgcctttctttcttccaagccaaatatacattaacaaaaaaccatgaaatttcagatataaccttcaaattttctaacaaaccttcacgtatcagctcaaactttctcaggtgcaacactttaaacttcgcatggcattgtctaaaggctaaagcgtttacttcaccaggcgaacactgggctggggcaactacgagtaagtagatagtaaagcaagagaaaattctccacaacagatgtatatcatgcttataatactttggaagggaaaaaaattatacatattttattttttaaggatcccacctataaaacattggattgaaaaataaaggggcattcttgttcctaaagcaagcatatttgactgaaattcccagctaacaaaaatatggcagactgcatgtcgttacaaacttctccgtgtgtagattgaaaaacctttccaaaagaaatggttaaaccacaaccagcagcaggaatagagggcaagaaaggctatatatttatgtacaaaaggaatgcaacttgtctttgacaataaacaaacaaaaaaaaatgtcaaacgagagcagctagcttatgctttgatctgtttcatacacagctttaaatgaacttgtgtgaccaatttgaagctcgggcagacaagcactagagagattctcttggcaaaactagatcatatatatccaaaacacccaatcctttgaagaaaaactcactctccatatggcat

SEQ ID NO: 82293 - DNA, 798 bp, Cannabis sativa
agagagaggggaagagagagggaagttttttttagtttttaacaatttttttttattttttttttaaaaaaaaagggtaaaataggaagttcatgtaatttatggaattaatttgtacaaactctaaattttgatatggcgttttattagggtcaaaaagtgaaatttcccgtgtagaatttggtccctcggggcaaagcttccgcaccatttagtgttttgcaccaaattgttgcatgtttggagtttgaacatgtttattgcaaatgaaaataaaacaaataagcattactgctcagtagagagagcttcaagattggtgattactgaaaatcagtacagcgaaatggcactaaatctgaaactctctagttcaacagttgtattttaggaattttcttcgtagttttaaaagccacctacccacttatttaaaagcaatccccacactgatatgtaacttatgagaaatgctaagggacaattaaggtgccaagaaccgtaagaggtgtcaaaccgctattggtgtattttaataacggatccaccacatcggtgtgttgttgagttccttaagttgccaaattgcaatgctcatatactcccataatcgaattcatgtaaacctttgaacaggacaacatgaactgattaacccgaaactaaaggtttccagtgtcgagctaagttcattacacaaaaagcaaacacagtatcggcagtgattaaaaataatacctattgaataattttcctatatttacgtatacaaacatattcaagagttctgacacactt

SEQ ID NO: 82294 - DNA, 829 bp, Cannabis sativa
tggtttttgctctattttaattatattcttaatcacttattaattgactcattgtcattgactaaaagcgaggtcaacattttggtggtggtgcaaactcgtaggggcctggctgatcagggcgacccaatggtgacagatcctaacttgcagacccttgagaacaaaagaggaccaccaaggacaaaccccaaataggccaatacacaaccacctactgtgggtcatggtgtgacttcccctctggctgggataacaccaagcatgcaagagacttggaacactagttcaacagtcgatctgtccattcccaacacgtaagtcccgtccaccactaatgcttagaggatagttggagacgatcctaaaatccaaaacctctgagcagcccttggactcatgcaaggtcacaataacgctttgcaccatgatcaggaagatctctgcgccgctataaatgttgcatttaacgagtaaagacatcaatttatagaatggagggacatggagatggaaaccttaagggctcagcaagcatctattgatgatcgcacaaggtaggccaccgtactgataaggaaggcctactaagttgtcaatcaatagctagctattacgtctagtattcctctaggtggtagagaagggtatgctgctgggcataccgcccaaactcacgacggtcagccgtccaatccacagccacagattcaacctgtgggccaaacagtagacgacgagatccttcctaactgctcttttgatggagttacaccttacaacttcaccccgactgaaatctttcgccaacctatcggccaaacaagtt

SEQ ID NO: 82295 - DNA, 845 bp, Cannabis sativa
atttagtttattttatctgttaaaatattttgttgataaggctacaaacatagttgcagtataagcttatgtaactcactgaattagtcaaatcaattaattgacattaaatatacacaaatgttagctccaaaaatacaagtacatatttcaaaaatttgtcattaaaccacaaatatatgtgtattttctgtctaaactctcataccacacaactaccacattagcaaactgttcaaaagaggtgacgaaattcaactgaaacattatgttgttagcaatgatttcaataattgattgacaagattttggccaaacaaaaaagttcgagaactttagttataccaaaaaatctcgaaggcttctatacaaatatctatatacccatttcaatttaaccgcactcatttttcagttatacttgatttaactttgtttcttctttaaactcacacaaatttcaaaaaaagaggaaggaaaatccactttattcagaagcatattgaataactgcaattgcaaattatcaatattgatggcaaacaaagattgcaattatatacagttcagtttcatttgcaggaagaaacatatgaagtaaaagcttttaagctgctgagcctgaccggtaacataatggtgcgtgaagcaacatacatcacctaattgtagtttatgtatatataccccacaacacatttggggtccaaatatactaaaagatggagcatctttatcttcttgctgttaaatagcttccaacttctgggtctctgatgtttccttaagaaaactgaggcgagtttgcgtgctcttcttaaaagcaactggcaaaagcatataaa

SEQ ID NO: 82296 - DNA, 1070 bp, Cannabis sativa
aattaatatattgtaaaagaaataatctatagactaattaggatttttgtcttttgaactttgacatgtaccaaatcatgtctcatgaactttccaaatcgttaaaattcttcctgaactattgagattgttgtatttaaggatttttaactaattttattcaattttggtaatgtgtcgattgtccttatactaaattgtaccccttgaacattgatatctactaaatcatgccctgaaactttaacatgtaacaaattgtgcccctaaattttcatccacgtcaaatttttttttaataaaattagagaaaagttcttaaatctaacaatctcaatagttcgaggaaattttttagcgacttaaaaagttaatgagccatgatttggtaaatattaaagttcagaggacaaaaatctaaattagcctaatatataattctttataaaattttaaaagtaagaaaaaaaaaattaataaggattataatgaattgatgatatgttaatgtgtttcacttattatttattattgaattttcattaatattattggtaaaaaaaattcaaataactgcttgcgaagcgtgacatattttctagttatatatataaaggaaatatatgtgacgatgatgtgacactctaaaatctctttgattaacattaattgttttcttcttaattctctcatttttaaatttttttttattagtttcataaataataattgatataaaatatatatttttattttttttatatataattttctcttttttttttcaaaaattaatagttttttatttttatatttcttcatcacatttttttaaattaaaaaattatattttaaataaaaagttacaattcacatcattttaatttatatactcataaatttatatatgataataattaaaaattcacataaaaattctttgtcaaccgtaaagcttctcataaataattattatttatttatttatgcatatatatgtctctaactctagatgtgtacatcataactattctcaaaaacaacaaaaaaggaatagcatatttttatat

SEQ ID NO: 82297 - DNA, 1221 bp, Cannabis sativa
tcttaatctagggctactactcatttatgaaaataattccatgtatactctttttatttacttaactccaccacacaatactaatcctaagttctaacacacgatcgataatcttaatctttgtaataagatctaacaaatgaaatacataactttgttcattacagtacaagagtttcaaatgaattaggagctgggaatccacaaggagctcgtattgcaacctttgctgcaatgtttctagccatagccgagacgagcatagtaaccacaacactttttatgagcagaggcatttttggttatactttcagtaatgagaaagaagttgtgaattatgtcacagaaatggctcctctagtttgtttatctgttgtactagacagcatgcaaggagtcctatcaggtaagcaataataataataataatagaattattttcaacatattttcgacttataaactaacaacatgaaaatgtaaaatttgcaaactaaatttgctgaaattcacattaagtgacatttagagagacttattatatgtttatgctcgcttaatgttcggacatagagattattttgctcattatagttgattttgcaaaatattcactttcaatacttagtaaaattatattttattccatatttagtgaactaagtttgacacacctcatctaaataatttgatccatatgactaaattacccttgttttattttagttttgttttatcagaacacaacataagtatcattcctagtagattaacccaatttgtatttccctaaaaaaaatgtaaaataattaaaatttggtcaataagaccaaattaccctcattttattttgattttgacttttgagaacataacataagtattatttctaatagagtagcttaatttgtatttcctaaaaaatattaaaattgtagatggtaaggtactaaataagtataatctctctattaaatgatacatatatttatgtgtaccaaataggtattgctagaggatgtgggtggcaacacataggggcattcataaaccttggtgcattttatctatgtggaattccaattgctgcaattttgggtttttgggtaaatatgagaggaaaagggctttggattggcatacaaagtggtgcccttgtccaaaccactttgcttgctcttgtcactggttgtacaaactgggaaaaacaggtttactctt

SEQ ID NO: 82298 - DNA, 924 bp, Cannabis sativa
aggtaaatttgattaattgatgaataaaagaggcatttttcaacttaccccttttaaatatatatgatttattttattttttctcatttttctgagaaagaatttattatattattttttttgagagagagaagttttattgaattaaaaaaatgtttaaatatacccgtgatgtctagtactattttatatgttaatattattattagttcaattaaatataaagacccatataatctaatgtaataacttttagagagtgtcgctagccaatcgcaagacgacatatcaagaggtgttaagttctactggtggccaatagcaatgctcttaagtttattatgctgtgaaatgctaggcaaaattgatgtaataccaaatatgcaaaggggggttttggtgagcatgtcttaaaaagctatgacagtttgttcttttttaactatttttaactccttttatcaattttttttttcaatttatttgtcagttattgatcctcttatcttctctttgtttgtttctcacttcgtgtatggtccattactggttctctttcaatggatcgaagaccaccctccactaggtctgttatatcttttactgatcttgaaaaagaagttcaagagctctgctcatgatgacaacactctcttcgccagagtattatccttcaaggaaattaatcgaaaaacttttcgaattaagataagtggccattggcaaggtcgttatccggttgccatcactaatcatcactctggtttgttcatggttacttttggttgtgtaggagataaaaagatggcacttattatggagctttggcactttcaaaatcaccacattgtcttatgctcacccactggtttgtaaaatgtcacagttgattcgttacaccattctcccttttggatccaattt

SEQ ID NO: 82299 - DNA, 1416 bp, Cannabis sativa
  modified_base (665)..(665): a, c, t, g, unknown or other
aaaaaaaaaattagtatagtctttcaatattttctaaaaattaggttggaacagttctagttttgtaatttctcaaaaaaattttgaaaaactattacttaccaaacacatttttattacagctttttaaaaagtaatttttagcttgttcaaaagctgtattaaacggaccttaaaaataattgaaatgttattagtcattgccaaaataaattataaatcatactcatttattatgaatttggtaaatttatcattgaaaagtatatttaatttttaagaaattccaaagatggtttgaaaaactaatagataattagaatggaatctaattcagtgtaattataaaatttggggtatgtatttaaggataaatagcggcataagtacctaaagttttatgtttttaagcgtcataaacccaatgtttatttttagcagcataagtactcaatatttgtaaaactgtaattttcttgcagttttgtcaatacaaaatttattaaaagaacatttggaagtaactgacactacatattcctatctagacctaatgatcaagaatttaggccttatatgtgcccagcttaaaacaataatagagtctgtactgacaaaattagagaaaaattacagtttataaacattgggtacttatgccgctnaaaataaatattgggtttatgccacttacaaacataaaactttgggtacttatgtcgctaattaccctttatttaactacgagaagccaactcacatgccctaacaaaatgattatataaatatatagattggagatttgacatatattactatcttggataattaatgttattttttatgcacaatttaaaaatagtaacttacaattggttatcgatattttataaaaataattacattgagaaatgttaaaaagtacccataatgtctagcaagtgtaatctcgctattgatataatttaatatcgaatctcacttattttagtttaattaaaactataaagaactgttaagttgctaactaattataagacgtcacctcataaaagtgttaagtactttggtgtcccataccaactcttaattatattgaattatatgagatctaatacttaattactttgataggaatataataccttaagaagtattaaagactattgatatcttttaatattttttaatttttttctcttttctatgtaattattaattactcatttatagaacacgaaaataaaaattatatgtaattattacttgacttcaaaattcaatataatcaataggatgtgtaattaatataacattttcttttactttattcagcagcaaaaaaaaaaaaaaaaaaaaaacactttcttttatcatgtattttggttgtgattttgttacgaatggccaataatt

SEQ ID NO: 82300 - DNA, 744 bp, Cannabis sativa
aaattataaaaatcgtaaaaaaataatatttaaaatttcatacaattgtatttttatgtatttttttttaaattattcctattataaatagggttgcaactttattgcacttcaactatgtaatactctcaccatcacttaattatagttcttattttgttttgttatagaatattcataacattatgatagttgacaataaactacactgaataatatatttatacacataaaaatatttttgataaagtagtgattgtcaaacaaagtataaactttctttctacataaaaatactatcattgacaagtttttgatattaagaattttgttataaaatgtcaaacaacttttgtgtattattgaaatgtcaaccattacaaactatacaaaagtcagtattatagaaaataatatttttgtaacaaaagtcagagaaataaataaatagttactcttttttttttaagccaaaaaagatagttaccctagttccaagagtttcccttacgggccactgttaagcccattgttgaaccggacttgtagttatcatggtttggaatgggcttgggtttgggctttggtggcccaatagttttctctcttaacccagcccaggttagagctagagcatggtgttgagacccatggtgtggtgtgttgaaattgaatggtatttttgaaattattttataaggatggaattgtgattatcgattatgtaaaacattgttatgataa

SEQ ID NO: 82301 - DNA, 919 bp, Cannabis sativa
gttttcgtcagtagtattatgttttaactgatcacgtgatgcacgtgactaaagcgtacgttacggctgacatggaattgtgtgtcggtgcgtgtttacgtaccttctttctttacaaatacaatagtttagtttagatttcacacaaaggaattttggaattttgtacccaaatttttgcaattactattttcacgtgttaaacaatgttgcacataattatgtttggaaatttttgtttctaatttattattattacatcaatatcagataattatgtaatgcaacagcaagaccagtacttgtggttgtggattcattattgcacacctgttataattaattccaaataaattaaaatattgtccaaatattaatggttccaattaatacatttccaattcgttttctttttaattggaataaatttccaattggaattgttaatcacgagttattgtcatatattgaatattcacctgatcatataacaaattatgtattatgtaaattcaaccataactcagtttcagaaagaaaaaaaaattacctttgtcataacttaattaaacctgaaattaaaaataaaaccctaaagtaaattcattttcttaaaacaaaaataaattcaaaattgaaagagtagaatcaccaacaacaaataaaggaaatgtttgaatttgtttttagtagtttcatttaaaaaaaaaaatgtgttataagtataatttacattaagaaaaaaaagagttatcaataagtttaactagattattaagaagattgctttcaaaaaaagattattaagaagaaaattatatatatttatacaagaaaaagttgtacactaatttcagataaaagtaattgattaatggaactctgactatgcattaattagtgtcatgtcaagaaccgg

SEQ ID NO: 82302 - DNA, 914 bp, Cannabis sativa
aaattaaagcctttagtttagatcattatgggctcgattgatacgctgtataaaggtcgtattgtattaaataataaataatattatttttagattaagcaatatattgtattaattattacgaccaattttttttaatacaatgtatgttgtattatttaacacatactaaatggtccgtagtagcttgtattataatatttacaaaggagttggggtcaacatcaatctccaacctagaccaacctggactcggacccggacctgtaccctagacccggtcccgggacctcggaccccgaatccggacccagtcccggacgtgatcacggacccggacctgaaccataacccggacacggacacggacatggacacggacctggaactggacccggatcggaccccaaacccaaccccggacccagacccggatccggacccggacccggaaccgaactcggtcccggacctggactcgggcccgaaccatgacctggacacggacacggacccggacccaagacccggaaccgtagttggtgttgggatcgagtgtattaaaatatattataactttacacaatcaattaatacaagtcaataccaaacattgtattgtattaaataatactaatactataaaatttacacaatacaatacaatacattacaatacggcgtaccaaatctataagtgatgttatgtcggcattttccaaaaaaaaaaaaaacaagagaacggacgttattatattttgggtgcttttctacaataactatatttttaagtggtagtttgagtttttctcttttgatattgatagagaaagtaagggtgcgtttggaaagccacattaatataattggatttgtgtgtaattagaggtaataattacacaatttggtatgtt

SEQ ID NO: 82303 - DNA, 672 bp, Cannabis sativa
  modified_base (618)..(621): a, c, t, g, unknown or other
gttacatctctggtttgaaggaaagtcttcacagactccactcgctctatttttcatagagtttgggaatcgataggacatgcacgtttttgctgtaaatatgcccgggctgtgtggcgcccatatttatctgccgtttgattggtcaaaatcctcttctatgcataaaggggactatcatattcacatctcgtctggagcaaattatttgtacattatgttgtatttagactgaacgaatcgagtggtccatggttagagtgccaagcctacaagcaattccttttctgtgaactacatgaacaatttcatatcagcacaggcaaaaaaccacccaactgtctctattgctgcaactacatcagttctctcttcctgccctgctttgtcaacgtcatagcaacctcctcctataggcactcttaaactcaatgttgatgcggctatagatagccaaaaaaatattataggggttggtgttataattcataatgattatgctcaggagttgctgccctctccttgcccattgttggtaatttcgcatctcatgaaatggaagcaaatgcaatgtttcttagtttgtgaaaaactgagtttttgcaaatgtcaataatnnnnacgaaaatataaaactgtatacgcttgcagaagcagaatgtaattctgcta

SEQ ID NO: 82304 - DNA, 1326 bp, Cannabis sativa
ttggtgccaatacagttcttgaaagaacgtaccattaccatccctaaagaagtagacaagttggaaaataatccaacctggaggacacctattgcagcttacctccaaactcgagctttgcccaaaaacaaaaaatgaggaaaaaaagatgagaagaaaagttgcaaggtatttaatcctaaacgaagtaatgtatagacgatgcttctcaataccgtccttaaggtgtatcactaagatagaagtcaatcggttgttgatagaagttctagaagggttctgcagaaatcatgtcgggggtaaagcctatccaaaaagatactctgacagtggtacttttggccaaccatcattgaggactcaatggattatgtcaaaaaatgtgacaagtgccaaagattcttgaagatccctagagctccactcaatgagctcacgaaaatgtagtttcctttgccctttgttgtatggggaatagatataattggtcaatttccaaagggaaaagtaggggtgcagtatgttgtagtcattattgactactttaccaagtgggaagaagctgaacccctagcgacaataacatccaagaaagtcctagactttgttgtcaagaacattcatatgtcaatttggactaccatagaagattatttcaaacaacagaacggagtttgacagtcacatgttcactaatttctgcaactaccatgacatcattaaaagcttctctaccatggctcatcttaaacaaatgagcaggtagatactatgaacaaggccctcaaggaatctttaaagaagcgctttgataaggcaaaacaaaaatgggtggaattacttcaagaggtcctctagttgcataagactgcatagaagatggccactaggcaaactccattcactttaacttaatgctatgaagtaatgttgtctgtagagctagtgccaccatctcacaggaggataacctatgaccaagatgtaaaaaacattttcataacagaatcccttgacgaagtagaagaaacaagagaccaagcaaccctaaagttgaaggcttaccagcaagaggttgcaaggcacttcaaaaaaaaattcaaggaaaggaaattcttcataggagacctaatgttccaaagagtgtttctgaacaccaaagatcctacagcaggtttgtttggacctaactgggaaggcccttaccaagttatagagatgacaagtaagggatcctataagcttgccagatatatcaagaacatagagctggttctcctaccaagatattagaatgggaagcacctctagaagtactactagtga

SEQ ID NO: 82305 - DNA, 1670 bp, Cannabis sativa
agaagagtaaatcaaacaaaatataaactattctactcctcatgtaactaattatactcacatggagtattaaaatgtggcacttatgtggcttaaaattcttgaaatccacaaccccttttatcttggcatcattagtatcatgaagagataaagaaccagcagaatcccagttcatacatcttttatgttgcattgattccgacagtcgagaatattcatctttcaccaaattaataaagtcattaacacccatgttagaaccagagtctctcaaatttaatccaacggttgttccattgggtaaaagaactttaaatctgtatatttcgtctaaactgttactacttccatcattggttccaaacaattgcctttttgttcctttctggggaaacattttttatatcatccacaaaacagccaacctggaaaacttcaaacaaaaacccagcaaattaagagagacccgaatttgaaactaaaaaaataaaaactgaaaaacggttttgggttatagcatacatatgatctctattcaattttatatatgtaactagttagaacccaacgtaaagaatcctgggaaaagctacagactttgttttaaaaattcaatctttctttcgaaaatgtaaaaatctccaaaaaattaatccaaacaagctctcgatacaactttaaaatgtagaaatttccatgaaaaaaaaaagcaatgcagaagatattaatcaagttcacctttctcgaaaccaaatatttatataattcaaaacttcatttcatttaaaagtacaaaccttggaacttaagccaaagaatttatagagggaggaaacttaggtggcaagctaagcaccagtacgtacggacgaggaagacgatacaagtaaactcttgagttgagtccacctgcagtcaagtactctgaatgactgccacgtgtcccaatatgattggttggtttctgtttcaggtgttggtcccaataaaatgtaataatgacaccttcaagaaggagggatgggttaaccttcccgccaaaaaatgggataagttaaattttcttttttttctatctattaattaaaaatattttggtattgttttttttattgaaatatactcactttttttttttaagtaaattgtcttaaaggggtctaatgaagatatcatccataaaattaagtatatttaaaaaatatcaaaatagaaataaaaattaaattaaattaattaagtaaagggatatacaatttaattttcttcaaaaaaaaaaattgacttatcagatacctctaataaatgaaattaaaagataaacttttttttaccaaaaataaatataaaataaaaaattaataccataaaatatcttaatttgaatttcggacctcaagtactaatttaaacaaaaatatattttgtataatcctattccaaataggcaaataggaatcagtttatttttgttactttcttttaataataattaaaatgttttatttgaaaaaataaatgaaattaaaagtcccttaaaagataaaatctttttacgaaaaatcaataatataaattaaaatatcttttaaccgtacagcaatacaaattttttcttaattcgaatttgaacctcaagtatttactaattcaaatataaatatatt

SEQ ID NO: 82306 - DNA, 528 bp, Cannabis sativa
taggaaaaagaaaataccacggttggtgagctgatcaccataaaagtcagaggccccagtatgacaaaacatcaaataagtttaaaacataaaacacagggaaaatcccttttattaaaatcaattatgtaaacttgtacgcatcaaagaattgatgatgcaataacactgctcttcttcatatgcagtaacatatatttttattttaaaaatatctttacataatctttattcttcagaaaccttgaagaaggtataagacaaaatcaagttattaataccatccattctgggatctgtttcgaactctggatcaatgtaaaagaacacctgaaagagaaaaatatgcttgataaactgattctctttctgagaaaaacagtgtagtgcaaagataatgacttacaggcatgtcaatctgctctccaggaagaaggcgctgctcctcaaagcaaaagcattgtattttgttgaagtaaactgcagccttaagaatatgataaaaatggtaagaacctaaccatctag

SEQ ID NO: 82307 - DNA, 698 bp, Cannabis sativa
tttattatttttgtgtatttgtaatataatctcttttatatatattattaagttcccacaaattatcattatatatgattctctactcaaattttaaacaaacaaattagcttagttgttattatagttagtagagctctcttattttaagagataaaaagttgattagttgaatgttaacgttaataacaataatagaaaaataggattttgatgattacaatagagtattgctttaggtatctcaaggtgcctaagattatactaatatattatattacaatttatcagtaattttttatattatttattatattaaattgtgtagtacttaatattaaagtgcaccaacattttttctggtatttgccaccttatctctaattgaatgctgaaaagatagtattttgctatattttcagcatacttaagaaaactactactctaataatttagcacatgctaaaattttttaaatgctacattttatttattataataccacaaattattataatttattgacttttactaaactttatagtttttatataccatattactattatttaaaggctaattgataattttttcccctaaactttgacatgtactaaatcgtgtcccctgaagttttttggctgttaaaaattcctcatgaactattgagattcttaaatttaaagacttttgtctaa

SEQ ID NO: 82308 - DNA, 1161 bp, Cannabis sativa
ttttcatgaattgtttgggtttatttgctttataataaattggaagttggtctcatgtttttgaattttgtttcattaattgaaaggcaatttagtcataaaattaagcgtgttagaagtgataatggtattgaatttcaattcttaaatgaatacgttgtgaaacatgacattatatttgaaacctcttgtgtggggactctacaacaaaatcgtcgtgttgaccataaacattgacatatattaaatttggcacgtgttttgcgttttcaaggacatttgcctattaaaatttggggagaatgtgtaatgataacatgttatttaatgaatcgcacaccttttagtgtccttaattataaaacaccatatgatttttgtttggtgaggttcttaatcttacagccattcatgttttgggttgcttgtgctatgctcataattaaaaacatcatggagacaaatttgttagtggaagtcgtaagcgtatttttttggggtatccttttgctaaaaagggatggaagttggatgatttagacacaaaagaaatatttatttcacaggatgttaaattttttgaaaatgtgttcctttatctgaaccaaattttgtagattcccataatgcttctgctcatatcatgggtactcaattcttctatgagaacgaatatgatgactttgtgtgtgaagacagggtggtatctcatgaggttgtcatggaggcaccaacctgtgtgagggtttagtttcgacaagtgatgaaaatgacaaagtcgaccaacatcactccatctcaagtgagagaccgcaaatatccacacctacaaatgttattcctaaggagacagaagttgaactagggcgagggacatattccaagtttcctaatactagatatcaagactatgtgactcgtaccattgtgaaaaagaaaagtcctttcaccaactcatccactttaccagcttcctcaagtactctttaccctatctcacactttgtatcttgtgatagattttataataaccatagaaaatatatatcagcaatacatgcatgcaatcctcctaaaggttttaagaaggcagtcaaacatgaaggttggagaaaggatatggccgatgaagtacgagctttggaagattagggcacctga

SEQ ID NO: 82309 - DNA, 759 bp, Cannabis sativa
ccagccgctatagcggctgagaggagactgaacaagcatacattgtcatcataactcagtcacgcaacttgtaattattcctttctactgattgtgtaagttcttagctctaaccttttttctgatttcttttttaatcttactgaacagactaatcacttcctgtatatactataccattttagtagttgtatttgaactttgtagagactaattcagaattgtaattgaatgatattcatgtgaaaatggtagatgttgagtctcatcttgggctaaaggctagttgtactttttatttttaatcctggttatccagttgtaaaagacaatgtaaactttgaataaaaaaaaacttagaatatatgcttggaaagttaatggtagagctttgacatctgaattttaataaacgtttagcctttttatgtattttattttatttatttattttcttttaaatgtattgaaaagatgtagtgttattaaaatatgagacattttaggggaatccaaaaaaaatttcattatttgataaggaaaacttcattaaacgaggaaaaaacaaggaaacaactacagagcctctaaaaggctagttcgaagaggaaacaaagggagcagccctagcagccatatcatgatggttccttatgaacttttgtatggaagaaaatttaaaaaacctattcactgggatgaagtgggtgaaagaaagttcttaggtcccaaagatgttcagagaacaagtgaggcagt

SEQ ID NO: 82310 - DNA, 767 bp, Cannabis sativa
tattttttatagaatataactaaccaattgcaaaacgttacttttaggtggtgttaaaaaccactaggtagtctcttataataatgcttttattcttaaggtgatatactttataattgtgtaaacattattagtgcctaataacaatattcatctcttaaaaataacaatctcgatccatcagattacaaatctataaaatggtgaagatcatcacagagtaaaaaaagatagtgatgaaagagctagataataaaatggtaatttgtggccaaatttcgtatacttttatgtttgttatggtttaacctttttactcgaaaaattatagctatatttcctggaatcgacaatcgttttgctatgtattcctttcatctattttagcctcttaagtgccacagtagagtacacagtgtacacaagtatagacatgataatttttcattgatccacttaatattaataatttatattttaaaaatagtttaaaatatttaaaaataaaaaaataaaagttaattaatattttttttttctttttcttctttatctttcttcttcgttcttcctagaaatcaaacccccaaccaaaaatcgaatcccaacccaaaaatgaaacccaaaaaatctaattatcccaatctaaataatccacatataaattactccaatccaaaaaaactcataccccaatccaaaaatatatatttattatatatataggcccttctgttatgaggtgttggatcataattaatcttaaa

SEQ ID NO: 82311 - DNA, 1471 bp, Cannabis sativa
aattgggcaatgggaaactgaatccgtgaaagctatttttaatgaagaggataccgagctaattttgaagttgtcgtgttctagctgggagattgaggacaaaattatatggcactataataaaaatagagaatattcgtggatacgaaatgattactgaacttaggagattcatgctgattctggttgtcaaagatgttcttatgtttttcatacactttgggaatgcaaactacattctcctatttggaagtaatgtggtcttaaaagcaagtatgtcgtgggggaaggaaagatgttttaaggagaaattcgagttctttgtaattgtgtcttggcatttatgatatttcgaaactctatgaataatggagattgtacgccaagaacaacaaacattgtggattggtaggagaaagttatggtcaagagaaaggagatggaaggatagctgtaaaatgggagccgctaaatgaagggaaactgaaaatgaatgtttgacaaggtgggggttgttctgggatgagctattatatgataatgttaatggtatttcgtttgtatattgtgaagttaatgaagtagctcctagtttagctaatcaaactttgattaacaaagttatctatgtggattggggttgaactcccttgtgcaagttaagttttacttgacttgcctaattttttgtaattgttgttgtggttgaatgaatttcattttttaaaatatagcttaaaaacaactgcaaatcacttatatatcaactcataacattgacaaaaacaatataaaaataacaaaaatcaataaataaataaagacaacataaacccaccatacaatacaaaacaaacacatatacaaaaaaaaaatgtcaaaaataaacttaaaatatacatcaaaccaacaacaaagaaatcccaaattaaataaaaaataacttaacatcaatgctactttagcaaataaaccagacattaacatattgtgccaaacaactaaaaaaaatataaaaacaatcttaataaagcaaaagaaaatataaatcacctatacatcataaaaataaaaatatatatttatttttttattgattgaacaactaaaaaataataaacaatggaacaatttcttaaatcaaacaacaatcttcgacactatttgacgatggaactgaaataagaattcgaggcggagttttttaagtctaatatcacttctattgccccatacgtcgatcatttcttaacattgtgtggcataaaacaaggtaataactttatatgtcaatccatactacccgatgaaagaagttgctatcctcccaatcattttaatgtggatgtcgagtgtagtatgagtggttcttccaaaactagggcttggagtttaaagcacatctaagctagggctatccttacattgaaggatcacttcaaaagctattgcgattacataaggatttccc

SEQ ID NO: 82312 - DNA, 2274 bp, Cannabis sativa
  modified_base (1291)..(1291): a, c, t, g, unknown or other
aagatggattaagatcatcactatctatggattaacgtacgcttccgctatctgagttattctctttgaatcaacaaatgtattctataaatttatttttatgggcttataataatatgtaagatgtttatctatggaagtgaatcttgtcattgcataatttatgagtgttaaagaattctaatagggacatgtaacaaatcatgtccatgaacttttcaaagatttcgatttaattttacttaatgggtgcttgacatggatagaagttcaagggacatgatatggtacctggataatcaatatgttaaacgtttgttaataaaattgaatggaattagataaaagtccttgaatctaacaatttcaataattttagggagaaattttaatgaccaagtttccaggagacatgatttggtacatataaaaatgatttggtacatcatataaaaaaaatttaagaaaaaaaatcataattagccttcttttaacattaggtattttggctgcaattaaccagttaattcaacatacgtgacatctatgttctgtttcaaatcatttaaaatccaatattcaagttcataaaatatgctttttatcctccaattacttgtatccccacctcttttccgtttcacaccaccaaaagacatgtatattccacgaactttacttggtagtgcatttacttgttttaatatatcctcacaagtaaatcttctaggaggatgtctcttctcaattgttccatcaaatgtgcgatcatatctcattcatgattagacgataaaaatcgtctatggccaacataagaggtcttaccgagcactctcatggaacaagtgtcttcgttacaagtagggcaaaccttgtaaccttgaccactgcacccagataaactactacaagcaggaaaattattcacagttcacaacatagtcgcacgcatcttaagcattgaattggtagtagcatctcttgtatctaccccattcacctacaattcatccaccaatggccttagaaatacatccatgtcctttcccggtgatctagctccaggaataagggtagtcaacatgaaattgttgtccttcatacacaaacatggtaggagattatagtttgccaacactataggccacatgctatacgattgactcatgtttccaaatggattaaatccatcatcagccaatcctaagcgaacatttctagggtctctcacgacattgggatgcctattgtcaaagtttttccacgctatcgcatctacaggatgacncatgacaccatcttctctaactctcccagtatgatgccataccatctcctttgcagcatgtcttgaactatacaatcttttcaaacatggagttaacagaaagtaatgcatcaccttttgcagtatcttctttctattagttgcttcattgatccatctacttgtcccacacaccggaaaaaattctttagatgcattctcattataaaataagcaacaatcatgtatacacacatgaattgattcatatcccaagtctaatttacttagcttttgttcggtctcatagtgtgatgtaggtatgttgttttcttttgggaaggcaaacttcaacaatttcaataatttatcaaatatattgtttggaattctccctttcacttttaaatgcattaattttgctataaaattaaggggcgacatccaatcacaactggggtacaactcaacatcaatctccttaaacatttcgccataatattgaccacttcgattttcatccgttgttgttgttgtctcatcaacaactgggaaaaagaaatcgtttatgacatcaaccatctcatcatcaccttcattgtcctcataaatatcattgacaataggtccatctgattcctcgtgccaagcccattttcgataactacttttaaagcccttgccataaatatgtccctaaatcatgtcttctcgtatttcaacatttaacacatggacataaaaattttccactatagtctacatgtttcgatgtaaatttgataaaagcttgaacaccttcccaataagtatcatcacaacaattttttgttatccaacttttatcaatcgctatctaagaaaaaatttaaatgaaaagattatgaaatttgtttaactgatattcaaatttttaattttaaaaaatttatgctcacttattatgatgaattattattaataatttttaaaaattattcaaatttatgaaactttttaaattg

SEQ ID NO: 82313 - DNA, 1571 bp, Cannabis sativa
aataaatttatcattaaaaataaggaatttttaatatatattaatatatgtgtacaaataaaagcttaaaatttataaatttgagcctttatcaataggacacgacaaaaataacaggtgtctccaagacacaaaaggaagaagaaggataaagactcctggagttttagtcatcttcgagaggaccctccgcgactaggagtatgttgaacttttcttcttcgagggaagaagtacccctaaaacagtacaaccctatggtagggcctcgaaacattgcccaagaatggggaactgtatataaataatgcggcatggggaatgtcaacctactctctgctagggaaagtgtgttgaagcatttaaacccctaattctctaactacacgacatctcaagtatcacttcacaattgtcttacgaactgtcaattcatcagtacgagagaaaagtcttgtctcaccaaacacctatgttgggctcaagccatccttataggataggaaatcatgccctaaggccatacatggggaaatgtgtgaagtagaattgaacaaacaagacaaaggtggccttttaaccaccattatgagcctataaataccccgagaatgactcatggactaatgctctttaatgccccaaccacgtaaaaaaattctcttcttaaattcacattaaatactcaacataacctgaactaattgttgccgaaaatctcgatcaacatgtggaaaatccataaagcacaagttgtgggtgcccaggttaacatttgcagccacctggtcgttggtaaattagttttgtcgattttccaacattacatcactcattattttagtcataactcacttaatttttatctaaatgatgtggttcaagtagcattagaaagctctaatcaagacggatctaagctgttttaatatctttctcacgattttgacattttaggactcaaaatgggttcgtgagctgggctatgaatcataggaattttctgacgagttttgtaagaattttttgttattttattataatttaattggacctccttccctataaaatgagagctcatctagctcattattcacagtttttattctctctacaaggccagagattctctgctctcacttctcaagaaattaggaggtgtagttagacttagtcattttttttctatagttctcttgtaaggacatttgcttttgtgataataaatgatcgaagtagatgtaactccactgtcatcgtaatatgagaagtgaactactataattcagtggtgttctttttatttttcattgttttctgtttgtcgctattgcttattagacgatatgaaatttgccactttttaacgtcaacaatattctaattgagaagttataactaaatagaggtacactaaaaaaaccaaaaagtgctaaatgtaacaacattaacaataaacaatcattcatattatatcataataaaattatattttattaaatataaatatctattacaatttagaataaattattaattctatataaatgaatttagggtaaattgcggca

SEQ ID NO: 82314 - DNA, 663 bp, Cannabis sativa
gttagccttttggttaagttagttttaagttaaacacatttaactaattttgttatttacctaaactatctactctgtcgataatcttagaaattagagttactttatcacattttataagttgaaaatggtttagtatttatgcttttagttaatctattaagttattgagcattttttttatatataatttattagatttattttcatttcatagttttctgtgtgtttttatagctattttatttaattatataatgtgttatttacttttaatttgattttaattttttattaattttatgtacttgtaagtgtgtttgtggaacaaataatgcgggactaaatggaaaaaaaaaaatattgaagaattggggtgaaaattcaattttaaaaatataatcagatcaaatataattcaaggttcccggaattgataattacacacctcaaaatattaatgagacttataagaatccttaatcggaagaaatgccctcaacggtcttccgggaatggaagctggaaaggtatcttcgatagtctatggtcctgagagctacttacgtgtcacacctctgacacgatcctaagaaatctaaggacttgtcccttctaccaaccttcgcaaaggcacacaaaaaaaaaagggagagcaccttt

SEQ ID NO: 82315 - DNA, 605 bp, Cannabis sativa
tctaaagagaaatgttaaaattaaggtaggtgtttagcattttctaattaaaatattatatcactattagtacaattaaatatcaaatcctatataatataatataataacttttaaacctaacttttaaataatatattttaaagcaacaaactttcatgtgcatgtaatatataagcaaataatcccatgtgcttacttgtcccaccattgatccttttatttttgtatacatatatgaatcaaaaccagctacatgtatgcatatgtgtacatatctatatataataataataataatatgacgacccctttacaaaaggttaacctaacaaacaaataaaatgactatcctccggcctagttgtttcttgttatgtagttttgaagcaacatttttattaatcatctcactaacttattaactacctttatatatataattaagtatattaactactctcatttaccaaccttgcttcatggtataaattatacatggtaaatactattttggaccttctgttttacaaaagttaccaattgaaccttgtgttttgttaaatgataaaatggaccctgtattttctaaatagtacaaatag

SEQ ID NO: 82316 - DNA, 886 bp, Cannabis sativa
tatggataagtggtgaagaagaatagagtagtgcatgatggatgtttggtttgcaatggtggaaactatcttattgggtccatttgagaggtcattttggttcttcatatcacaacataaaattatggtaaccagaaaatgtcacaatcttactttcttttcataatcccattctttctaatccacatgtgctattctcccttcccaactcatatcactattatcaatatttatatatttttaattaatatttatcatgcattctttgtaatttaaatatgtgtggattatttttttttttaagagaaatgttaaaatgtactaatgcctagcacacctttcaacatgtcatgtctaggacatcaaatttacatctaaaaattcaccccacccgacgcaaaattcaaaaaaaaaaaagtttaataaattataggtcgagttcaagttatacccagttacattaatttaatacccgaaaaaattgggttacactcgaatatctacttgaaatttggatgtatattgttttttttttatacattttctcttcaatcctaaaaacgtaaacttaaaaaaaaaactaacaaaatatatatcatttttattttatttttcttcttttattttctcttttcattttttctgttcttttttatgaaaaaatatataaaaaaaataggccacacaacccaaaatctggtcaaaacacaaccggattcggcccaacctgcacttgaaacctaaaaacccagtcacacaaacgtcagggttggtactaattttatacacactataaaaaaattattactattagtgacaattttttagtcacaatataattttttttgtgactaaatgtgacttttagtcacaacaaaatcttact

SEQ ID NO: 82317 - DNA, 1420 bp, Cannabis sativa
gtaaaatacattattatattgattttgggccaggtaagtaagacccaatttgagaaataattgttgtccgtacagagtagtaccattcgatagtgataggtaggcatgcgctgtcgatcgtgcacagtaaatatcagagtagtagaagttggacaatatgagtattggttctgatgttatgcgcattttctgtctgacataaggaacaaacccttaattttgtgagattcagtgtcaaaagagtgccatgtaagacgacacccgaacacatctttgactgtctgttctgaatacctcgtaatggcacccagatatgttgcgttaagttttttcttctctgggcaagttgccctttcgggaccaatatgttcgaccttatcgagattaaagttagattgcggttaaatttagagttgtggtccgactctatagtgggctgatccattagctttattgggtttgcgaatgggcctgtcttaattaattttgaatctcaaaattacatgtatcacctatctagaaacacgaataaaaaaaatatgtattagtaaataagaaaagtttctcatcaaatttgtagccaacaatttcctttcatacaaattttggatagtgaaattcaaggtttaattttaattgcatgagtcttgagtttaattaataaagcacctataaataatcattgagatacatatgatatcaactaacaaagctcattatttgctaaataaaatatataattaaaatattagttattttttaaggatgtaattaatgtttgttgcatcatatttacaaatgtctagagcccataatttaataatttaattaattaattagttgttaactattgcaattgcaatcaaattaatcaaattgatatactttgtcaacattagttgaataataataaatgcatgcatgagcttctctagcacaaaattcatagaattgataggatacacatgcatcacagtgcttcaaatataggcttatatatagctacctatgtacatatagatacacatatatagctatagatatcattttcatgacaaaattaaatatatccaaggctatatgcttgaattatggatcacaaattaaggaatataattcaataataatgatcatagctattaattaaggtgtttatataaaatagtcaatttaatctaatttatacattcaatattccaattcgtaaagtgtgaatatttatacttatgcgaattagatattaactgacatataaaaataactgatccaatttaattcacacatttatataaatttttaaaaattatatatagaattaatattttaatgtaaaacaattgtaatttaaaaatttaatacatataatacaaatacatttcaaaacttaatagatcaaatcaggctcggccctgggcatagg

SEQ ID NO: 82318 - DNA, 1033 bp, Cannabis sativa
tataatataattttcattctacttgaaaattatctgtacatgagaggaaggttaatggtcattatcgattaattaattatgataagatagccatattaatagtgacatttaggaaaatgaataatcctatgtgaagctctcgaaaagattttggtttctcaatgttattaaatatcttagaatcaagtcatttcaagataaattccattaacactaatccattttttatagagaaaaaataacaataataaattaaaaggagctaacatcaacttattgtgaatggcaagttggtgaaaatatatataattatgacaaaccctatgtgtcttatgctttgtttttcatgtcttctttcattgattttttcattaatttacaagctagtatgattatgtgtgggcatccacaccacaaatgtgtttattaaactttttctttccctatttatagctcccatttcttgaatgttaaaatatatataacaattttaactaataatatcaattcattcccaaaatgggtatccatacaaaaaatagaattacaataagtgtggttttactcgttttatttagtttggtaatttgttcttacgcctctagtgctttctttgatactaatggcgcacccggctatgctggccgtggaacaagcgaaagtgtagtcggcaaaggaggtagtgttggaggagttggtggtggtattagaggagaagacgatagccgaagcggtacaacagaagaaggacttggtgttgaaggagaagaccgcggtggcctcggccgcggtggtgagtatgctgctaaagatgaatatgcaactaatgaaagaggtgatggcactattcaatagtcatatagtagtggctatgcttcatcaaataaaaatttgtgtatttaattagtacgagttataaggacgtacctattatatttttatataagatcacgaatgccaattttatgataaagttgtgtattttcttttatcatctatatatatatatatatatatatatatatatatacta

SEQ ID NO: 82319 - DNA, 1076 bp, Cannabis sativa
caaatctttctcttcctcctcctcggcctctttcaaccaccatcgccacccagctcattgctcctcccaagtaagtttttcttaaaaaaaaattgtagctttttcatagattaatgtgtaaatttatgtatgttcttgaaattggttaatttttgtgaattttttggagataagttgagtttatggagctttttatgtgttatggtagctttttcagtgaattgtctatagattatcgatataatatcgattaaaaatattaattttaattttaattttttttaatgtttatcgatgggaaatcaatattttatctatggtatatcgatggtttagtagctgctaattaactttttgaatgtcttgagtttgttgataggatatcgacattatatcaatagtttatcgataattttgcttaaattttacacacgtaattcttttattttataaaagtgttacataactaattgaacattacattttatagtgtaaattatttttatttttttaaaattttacaagatgtcttaaataattataacgtataaaaaattgaattaattttttttcttatatgtcgaaacagtaaataatgcattgatacaccctatcgaatattttaaatggtgttgaagatacacaagtgacaccatcaatctccccatagcatttattttcatataaactttaatctttatacatttcctcattaatcatctttaaaaattgttaatttatgatcgctctacctacatgtgatcaattacattacaaactgctcattgaagtatttctttttttgctactataagttttgtaagttttagggaagcaatacaaatcttttctcagaagttatctatttttaatattacttttgctaagaagaagttggagtttagtaagaacagaaaaaaggtaccaaaaatataggaaaaaaatgaaaaataataaacaataaattctcacatttggtatatttgatatgtaaaaaagaaaaaattgtatagaaaaccaatcaattcaacaaaattttccataccaaacttaaattaatttatttttttgttatc

SEQ ID NO: 82320 - DNA, 619 bp, Cannabis sativa
  modified_base (583)..(584): a, c, t, g, unknown or other
agaacaaatgaatttattatagagccttttaattaatataactttttctaaaaattgggttgtaccagttataggtagttataggttttagctgtaacttcttcataaattcttcaatatgctgtttattgctaataagtatataaatttaaaaataacagtaaaaacaatcaaattatgtatttccgttagtcccgttagtacccacttaacacctcctttaatggataaaaaaaaattccacgtgttgattcataattggtcctattcataatcttaattaaaattatttaaataaatttaaaataaaaaactaatatattaaagattattttcttctttttcttcttcccctgtgatggacttctctgcttgtattttgttttttgtttggtttggtttttttttttttttttatgaattggtgttctctgttctctactctatttgcacatattattttcgatctgcccaaactcgcgctcgatctccacacctcctgacctaggcttgcccaactttgccccatcctcctggtcgtgcaatcttgcttagcacccaatcttttgttgggttttatgcnntaaataaaactctgtttcaatgtaatccagattat

SEQ ID NO: 82321 - DNA, 1101 bp, Cannabis sativa
attatacaattgtatcaatacataatcatattgacattaaagaataaataaattgatatgattatgtaatatagttggtctctaataaaagcacaatattaaagagcaactaaaatatataattatatcaatataagaaaattggaatctaataaaagtaagatattgtaatcaatagttatttctgtatatattttattaaaaaactgaaaaaaaaaataaattctaaccatataaaaaaaatatgaaaaaatggtaatagatttttttgcacatattttgtaattaattaatataaaatatataaaaatgtaaaattctcatttattaattagttttgtttaatttttaaattaattatagttgttaatagtgattttatgactaatagaaatgtacgttatctgatataactattgaaattctttatatgaggttatgttgttgtgttttaacttacaaatatttaaattgaaaagaaaagaaatcatgcacaagcacaacacccttttggataaatatatttgcaacccaattttcctatccaattatttttgttcaaacaatcccctcgagtgtacggttgtgttttaattcctcacactacacatatccatagatcttatgtatgtggttacatatatattcaactcacaacatacaataattgagtcaaactattgttctcattattaattgtgctataaatgcatacaaataaaagtcactccacaaaataatttctcatgtgcgcaataaaaacttgtttatagaagaaagtacaaattcttataaatggaatcccatcccacaagccacttgaggctagctcaagtggccatagggggtgcgtgtgtgttggaggtcctgggttcgagtctcaggttatgcatgttgtaatatataaacgcttaaatcaaaaaaagaatcccaacccacaattatataatgagaattgttattagattttagtggtgtttaataatactaggtgattctagcacgtgtttcgctcttcttgttttatgttatttatattttaataagtaatttgtgacataaatatctaattttaacttaaataaatacttaaatttaatt

SEQ ID NO: 82322 - DNA, 879 bp, Cannabis sativa
  modified_base (541)..(561): a, c, t, g, unknown or other
ccaataaaacttaatgtaagcccaaataaaaagtctaacagtcccgagatcgaactctccaagtggcaccgtgtcgacatgtacaattattcccaaactctggactcattgatgttcaaccttagtcttccatttacctacacatgtaagcaataactataagtcgacagactcagtaaaaaaaagcatataacataaaatatattaccgacttgtatttaagcgtccatacacctatccacaaaacttagcatatgatcaagaacgttcttaatagaagtacgacctctgtaccacattcactaagtaccgctactgtactagtattggtaggattgaaccgtaccccgaacacttctgagtgttgtaccacatgcactgcgtacttatccgtactggtgttacgtactagtgttggtaacaccaaatcatactctttgatcatcatatattgtaccaatacactcagtaccgctaccgcactactgttaaaaaattaaattaatcttgatcgatctttgtaaataataataataataannnnnnnnnnnnnnnnnnnnntaataataataataaaataattaggcaagaaaaatctttatctttctatatctcccataactatgttttactaaaaatccccaacaaaaatttcaactttcacggattcatatttcctcacaatgccgccaactttaaattattattcatctacttcttaaatttatgtcataatttttgaaccctctctaggttttttatttataattcaataatgcaggtcttaatatattctctttttataggttgtccactagacaaacataatcatttataaatgaaagctgtgtttgaccaaaaactacaagaaagtctaga

SEQ ID NO: 82323 - DNA, 958 bp, Cannabis sativa
atatgaatatcaaggcgaacaagaaagtataagtaactttcaaagttaccaatcaaaaagtatctccccaagtcgatctatgagaaattatgataacttataagttcgacaccggaacgtgcgggatcaacccgaattgcaagatcatataaatcaaagacgccctgatctgcgcgagcagataaatagaaatgcactgatcttaggtaaagattgaatagaaatgctcagtgagcgaatgaacaaactaatcaacccattgataaatccatccaacaaaggataattcaattggaggatcaatttacgaagtattaggatggagagtatggaaagcttttaggttacgagtcagatgaagactgacaaccttttcaccctgatattctgaactcataaatctttgaaggattctttgaaggccaaaagctttatccttgacaaaaatcaagcaacaacctgaagaatctttgaaggcctttctaagtcgctttagcatgatagcaacgaaggttaacaatttgaatgataaaatttagttgatggcactccaggctgggataatcactaatttgtaaccactactagaggcaaactatgggatgatttgcaaggacgcccagtcaagtcaaaaaatgaatttaatgaaaggtctcttgtctatgtcagaaaggaggaagctcaatctatatttaaagtattaaaagatggctcgagaaacaaactcaactcaagaaatgtagaaacaaacattgtaaacatgagaaaaagccacgaaccacatggaaaaaggaaagatgagtccaaggactcgtccaaagacaaaaataaacaaaaaaaaagtatgaaaagtatgtctcgatatataccgtgtacaccaaactgaaagaaacacgggagaatacattccttgcaaaatgagagtaagatcgtttttcgcaaacctaaacctatgagg

SEQ ID NO: 82324 - DNA, 1337 bp, Cannabis sativa
atatactactattgtgttctatgttatatacaaatagatcttgggttaattgttaatttatctaacacattatccaatttgttcacaaagaaactttatttttattataaaagagcattagggggttagaatatatgacttgataaaattcttttgtgacttaattttttgtttttttgaaaaaatctcagttcgggatagattaactccaaaagagattgggattcataggggggaatctctctcctttgcagttcggaaaactactatgaaaatatctagcatccttagcaagtttatcaatatgagcaagaacatctcttttagtaaaaataaaattacaacaagaaaacgaattaagtaaatgtaaaagcagtttgtgacttaattgattaataaactttcgagttgttctttcttcttttgaaataaatgtttgatctttcttccactatcttgtgtaattttggtatttatttgtatggaacacttcttaatgtgtattactcatgaatgattactaaataaatttattgtcaatggatatatatttgtatatattgttaatggtgtaatctcattctatatattttcatcccaacactgagccattagattttttataataaaaaaattattaatttacaaaaaatcaccttaaatcaatgtatttttcttttaataaaaattaacttcatttgtctctcaaaagaacaactaaaagttctgaagttctgaaagtatattatcttttgtaaatatgcactcagcaaataaataagattgacgtacaatatgatgtgtagttcgattaacaaaagaaacattttacaaaatgtaaagaaatattagtcaaagatttcaacaaactcttacaatcctaaatcactaaacaaaaggcatagaacaatttcataccgcgcaataaggttatttgtctccacccaaatcttttgaaagtttttcattttcagtaccttaatctctaacgtttctgtaatttcaaataacattttcctcgatcgagcaatatataaatatgtataatatttgtgatttaaattgcataataatttatgtttagatatagatgaatggagaacatatttttcttggcatataattataagattatgtacatatttatgaaaatttatgatttttgactttgagagtatggaaaacatggttcgttcgtatgatgttttcctcaataattattaaattgtttttggccaacaataattaatgtatattatttcttttagaagcaagagacatatatataattaataaatttatgtacgtcgtatgtgtgagatttcaccaaatacaaa

SEQ ID NO: 82325 - DNA, 823 bp, Cannabis sativa
tattttaaataccatattttttcttattaagtttttttactatatttatctaaattaattttttttttccatatttacgtaaatacctcttttttaaaaaggatttttacataaagttgatataatgacatatatttacttttttaaggacattacgaattgttactttttttctctttttaattacattttttttccacttcgttgagtaacatgaaaacaacctaaaaagaacatgatacaaataaaaaaaatatggttaatagaataggaaattaaattaataaaataaaaggaaatataatagtgtttatgaggtaaataccattttgagttctgtattttgcaaaagtaattaattggatcctctgttttattaaatgataaaatgatcctatattttctaaaataataaaaataggaccatgagttcaattttcaacaatttttttttttaatataatcaactttaagataatatctaacacgaacaaatacgataatatatgttacatatattatcaatatcttccttaattcaacaattatataaccatgactaataatacacataatatcattcaaaactctaaattagtatgaatattttcaatatcatgtatataaaaataaaactcaataatcctaataatctaacatagagtgaggctcatgataccttgttagagattagatctaaattacatatagatcttaactcatctaaattacatctcatgataccttattagagattagatctaaattacatatatctaatttcatgatattagatatgagatgataatggatatacggtctt

SEQ ID NO: 82326 - DNA, 986 bp, Cannabis sativa
agagatatgcaagaagatcagtgaccaagataaaatctagtcgcatgggattagaaatatgcgatgtaataaggaaggtaagaaaatagagacaactaacatagttgcgacatataaccttatataaagacaacgtacgtccttgtatcatcattctaaatgactatttagtatgcgacaaattctatgttatcggtatataaatacccaatatgcaatcaccatactcgcaagcattctatttaacttaaatctaaacggtaaaaccattcgtaatttgtttacaattaatatatttatttcatttaatattattagtataaaaacggtcacctaatgatcggttatgtaaccaaaaagacatgtcttctatatatataaaaggatgatccaatacataatgaacttaatcacaacttttaaagaatagtggactcactacaagaaacttttaacaacacaaatttacgttggcaatactaggcacaatgcaccagtaatacagacccaaatactcagtttgtaaaatagttttcactgacgcaattgccaactgcgccaaccaaactgagttatactaacgagtttaagcgctgacaaaaattagatcgtcagtgttaagtgttcgctaaatttgcccattggaattggatcgtcagtgttaagtgttggctaaatttgtccattggcaagtaaaatgagttttgccagcataattctgcgtcggcaaaaagttggtgcgtttttccaattgacgggtaatatagttttaccagagtaaatatgtgtcgtcaaaactattacccactaattttaatttggcgggaaatagatatgtcaccacacttttgcgccagcaaaactcttacttaccatattttattgttggttgggttagttattttgtcgacgcaattgtgcgctggtaaaatcttacttaattaatttttttttaagaaatgatagttttgttgggttttatgccc

SEQ ID NO: 82327 - DNA, 2306 bp, Cannabis sativa
atgtttattggagaatcttctcgctctggtgttaattcccctgctgctactaatgaaattctccaacattctgtgaacaacaacactcttcactctgatgttcctgttgtctctgatgttcctaccactgctacttcactgattcaacacacttcacggcctgcggcttcagtcaacccagcaacttcaattcatgcacaaactccacataacaaatccttaacaaacaatgtacgagtcaacactgcagtcaaattagactcacctgcttcttcaaaaattaatgaatcagtagtagatttatctgggattttcactccattgactgtcatggacttggcacccaatgcttatgcaacttatcctccaacaagtcgcacctggcagccaccaaagccaactcaactaaatatccccttaccaactcaatcatacattgtttccaagccaactcctactgccagtgctacacctcagagtggaaaagagaacttgtaacctaatcggcttccgaagagaatttctgaaggaactaatcttcgacaaactcttaaaagatgcaggggtaatccagcacaattgttcttttctcctttgtcagcagaaaatgaaccacacttggatgtttccattgatggaatggattcgactggtgtctatgacagcgatgcggagtctgagtctcagctccgcgatcagccatgaaaatcttaagttggaattctcgtggtttggggaacccgagtgctttccgtcatcttaaattgcttgtcaaagagcaatccccacatgttttatttcttatggaaactaagttaggtcctaattctatttctcgttttcgtaatgtattacatttcaataatggacttgaagtccctcgtgtcggtcttagtggtggtttaatgttactttggaaagatgatgtaaatgtaactcttttaaattataatataaatatgtttgattgctacatggcttgtggaatgggtccgacttggcactttacagctttttatggtgcaccagctgttcataatcggcatcatacttggactcttttagaaagattaaaggatgttgcaccaactctaccttggatggttgttggtgacttcaatgaaatcttgtcaaacacaaataaatcaggtgggagtttgcgtaatgagtcacaaatggacaactttagacatgttcttgatcattgtcacctatatgaacagccctttgaaggtgatccattcacctggatcaaaggacgacttaaggctgacacaattaaggagcgattagactggtgctttgtaaatgccatttggggtgatttctttcaacaactcacaactaaacatttagattactatagttctgaccatagagtgatctctgtccaagtgctggaaaactcctcaacgcaccagcaacctcgtcgacaaacacgattcagatttgagaaattgtggttgcacgaggaagaagctactgatctcattcagcaacattggaagccggtttctgcaggagatgctgctgcaacttttttacagaatatttcatcatgtgctgattctctccaacagtggcatagacacaaattcgggaactttaaaaagaagatttcacaagtgcaaaagaaggtagctgatctgaataacacatctattcgaagctctgctgcaatgaatgatttgaaacatcaagaatcggttcttgatgagttgttggctcaagaagagacatattggcagcagcgatcgagagttgattggatgcaaaatggagaccaaaacactaaattttttcacgcttatgcatcctcaaggagacagcacaataccattaaatcattgacagatgataatggtaccattgttcattcaaaacaaggaatgactgatgtcattacttcctattttggtgctttgttctctgcaacaactgttaacactgaagctttgcaacatgttcttgctgcaattccaaccacagtcacggctgaaatgaataactctcttgttaaaccgtttaccagtgatgaaatctacaatgcacttaagacaatcaatccagataaaagcccaggttgcgatggaatgtcggcaatgttctaccacaattattggtctattgtgggagatgtggtcactaaagtggtacttggtattttgaatgagggatatagtatggaatccattaataagtctctaatcactcttattccgaagattaagtcaccaacgggaatggcagactttcgcccaatcaatttgtgcaatgtcatatacaaaatcatttctaaggcgctt

SEQ ID NO: 82328 - DNA, 1055 bp, Cannabis sativa
tagcaatgctcttaaattaaagtccttcacctcaatttttaaaatttgacatacatgttaattggttaacagtcaggtcattattttattagtcgtacgtgacaaaatttaacgaaccaattcacaacaatgtattatagtttatggattatttttaacgagctaaaaaatttaagaacacaataaagttataattcaagggtaaaagtcctaaataacatagaagttattagggaaacaattttattttattcatttgtttgttttgtttcattagtattagaattttggtctaatggaatagaatattattttgagtagagaaaaattatgtctcataaaccaattcaacactatcatcataataagtttgagtaactgcgaccctccttataaaataaataaaaaagaattagcatattaaagtagtaatatatattgaagtaatatctacaataataatatttaaaattttttaaaaaaatattctcatattcattcttattcctatatttttattcatttaactaaacactatttaaattaattataattagatacatttcattctagagtaaatgtattttgaaattaattatttttttaattctcgaaataaaatataattttggacgtggttggttggtacttggtacataggactagaactaagattgtttatctctggattaataatctacttttcccaaagtagatcaatttgtgtgggtggtgggctccactttttattattttcaataattcctttattattttttttaaattaaaatcctaataaataaataattttatatttaaaatgaataaaataggctaactataatttttgctcttgaacttttacatgtatcaaatcacgccttttgaacttttaaagtcgttaaaaatgcctcgtgaaagttacggccaaaaaagttcagggagaatgatttagtacatgtcaaagttcgagagacatgatttagtacatgttaaagttcgagggacatgatttggtaaatatcaaagtatggggagcgtggtttagtacataa

SEQ ID NO: 82329 - DNA, 1786 bp, Cannabis sativa
caactatgtagtcccatacctacacagtctcagaatcatcacacctggtcattcccatgagatctgggattccacagctatgagtctttccccttacggatcacggcactactggctgtcacaatccaactctcagctaggcaatagggttccaaaccctacctcaataaaatcatagggcctacccaatttataaattactcatgatgccacatatgaatgtgtagccccaaagtcaaacaatacagtataataggggtcattgataggaagttgacctcttaccacaaaaggactggttgcagcatccatttgagtaatggcaatacccgagctagaatcggttttacctcttgtttcagtgattccttcttcaattggggatttcttaaaatgccccaccaggccacactggaagcatgtttcttttgcccctgatcgtggacaatccctttgttaatgtccctttataccacatcaaaaacaaatttttcctttacacgcaccctgatgacgtttcttataactgaaacatttcgaaaaagtataggggccttcaaagctaccccattgatcttcttgagcctgcttcccttaagacttgttgtgtggtgacgttgtccagttatcatcaacaaatcatcgtgctagaaccattgaggcaggaacaacaggcaccgaagaaagaggtccatcaaaagaatcctacttccataacctatagatttcctcacattgtctttgaattttgtcttgcatttctacaaacttttgctcccaaccttgcaaattctgtggtacattatcatcactctcgctagaagccctccaatggcttctacttggttacagggacaactaggattctccaactgttactagccttgaccacattatcctgactctctatattgtaccaggtgtccattctataggacaaacctgccaatttgtaagtcaggctattcaggcaatggtccaagttgtaatcttactaccgcatatatggatttttaggcaatgcattatacagctaacatataagtaacatgctttttctaatcacgtagcttactaaacaagtaaaggcttactgaaccttgagtcgagtttttctcagagacgataattgtatatctcttgattaggcacgctttgtgataccaaaattgtaacgccttaatgattaggcacgctacagtaaattttttatttatagtgcatacttttgctaatcaaaggattttctcaaaaatcgtgataaatttaaacttttgattaaccttaaacttttataaacatttacacataaccatacaaaaggtcgggatcccattttttaaacttgtttacataatcaaaataaactttacaaacatggcgcacaacgactacaaagtgaagcccacgtcgtcccgagactgaactcaccaagtcgtaccatcttgacatgtaccatcatccctgagctctggactcattgttgctcagccttagccttttctttacctacacatgcaagcaataactgtgagttgacatactcggtaagaaaagcatataacatatactatatcactgacttgtatctaggcgcccatacacctatccacaaggcttaagagatgattaagaactctcttaacaaaggtacgacctctgtaccacatgcactaagtactgctactgtactagtgttggtaggatttgaaccgtaccccgagtaccactgagtgttgtactacatgcaccacgtccctaaccgtagtagtgttggtaacacagg

SEQ ID NO: 82330 - DNA, 1313 bp, Cannabis sativa
ctgtataattcataatatcagatggtggttgaggaaatgaatatattaactacggtttttatgaggtatgacaaccaaaagatcatatatcccaacagtgctctatcaaccaagcccattgttaacttttatcgaagtccagacatgggagattctgttgatttttgcgtccacatctcaactcccatggacaaaatagtcactatcaaggagaagataaaaaggtatatatatatatatatatatatatctatatacataaaatacatacattatacatatatatatatatatatagaggcacacttaataggtaatatgagtatgaatgggtattattaaaaacttttgagtttttatacttaattttgctatcaaattaaaagaaactcttcaattttgcattatatggttgaaattgttttattaggccaaaaaaaaaaaaaatgttgaatttgagtttgagaatataaatatatttttgataaagaataaaaaaaagatattttttaattaaatcctcttgttaaaaaaaaaaaagaatataaatataatagtagatttagtgtacctgttaaactatattgtatatagaatagaggttaaaagtttaaattcatctttaaatcatggataccccactgtatataatacatggagaattactaaaaaagtattagtggtgcttaatatcttttttggtgtcatatcgttattggtgtaagtaaatatcgggtcctatataacttaagaaaatagcttttaagtaatatcgctagctaatcatggagcgttacctataaaaaatactggatactactaatacccaataacaatactctaatatatgtgtgttccaattaatattgttgaaatatatatattatgcaggtatattgaaagccgaagtgaccattggcaaccaagtccaataaggtttatgatgatggatgtggttgattcgaacaatctcaagttatcaatgtgtgttacacaccgaatgaaccaccaagacattaaggagagatggagtagaagggcccttttggttgaggaaatggttaagatttttaagcaactccaaattgagtacaggatgcttcctcttgatgtcattatcccaaccaactcaaacttcaaagggccaacaagttttgtagatcatttccaatgagtgcacaactaaataaataacacatttagctactttcatcaaataagctaaatgttcttccactttgtataaataagccttcttatataggcaatgggcaaattatgtgatttactgtatgttaattttcttcttcgta

SEQ ID NO: 82331 - DNA, 1532 bp, Cannabis sativa
aaaggtgatcttgttcatctcctttatttgatagcagaagaggccttcgccaaccccttaactttactgtgtaggatgccttcatcatctcctcagttttgcagtggaggagatcttcatcatctcctttgctttacagcggaggtggacttcatcatctcctcagctttatagccgaggagattttcaccatctcctcatcttacagcgtaggaggtcctcttagaaactgtcaatgatgtgttgtaataattactggcctttctttggtcaattgaggatgtgaaaaattcctgaattaatatacccaagatgtgggtgaggtcttccccatattgggaccttagagtgattgtatgtgcgatctccattttatccttggtcttaaatttagaggtcttcacgtcccatctcctgtattcacaatggaataggccttcttcgtccatttggctgtctcaacagtacaggaggccttctacttcccctcgactgttagcatagcaagggaggtcttcctcatccccttagttgttagcacagcagaggaggccttcttagtgaagttaactatgtgttgtaaaatttgcatgctactattttgttgccaaggagacagtcgataccagcttttgtcgagaaattgacagacaggtggtagataggtgagatagcttagaggttggtgggggttgaccttctaaggagacttggtgtcgatcatgattatctgtgtttctacaaagtatgacatgtggcatttaatgaggagggataatttaatccttccttaatcgaagtcctttgatactactttgtcacagagaggctttctggaactgcaaattattcaggatagaaaaatacacagaagcatacgtaatcctacctcgtcttcccagactccagaggagaatggtttctcctagacccggaggggtctaatggggaagcttagtaaggtggtacccaaacgagtgcttgaaaggtttaacacaaacgtcaaccaccttagagtgtcgtggacattgaccttttatgcacgctaggtcactaaagtgacagctatgctttttctatatgaagattagattttgtctcctacatgtttgcatggtagtgcacgcaccaccaccaccacgttttgctagacggatattacagactcctacttgtaaaggaacaagctttgagcgacatgtggcctctacttttaaggattgaacctttgagcgacacgtgtctaagaggtacaaaatggtccccattatccagctgcaggacacccgggcataatgtttcccatgggatcatttggtgaactctaatattgcatgtaatttaacattttagatgaaaccttgggcaagtcacgggcctttccatactcgccacttagtccataaataccccttgattctcatacaaagggggcaagacaatttcacgtagctaaaactctgctaaggtttctctaagtcttcttcttcttcaagagaaacttaaaatacaaagttagggtttcctgcaaa

SEQ ID NO: 82332 - DNA, 814 bp, Cannabis sativa
tcaatgtgtgattgaagagattggagaggcagcagagatgcaatggatcacaagtccaaacactactaatgaccaattggatgcaaccaagcaggttttttgctttggggctatggagacttgcccacaaaagtctccaagttctcaatgaaaatccttgcttggaattgtcacggtctcgggaactccgcggcagttcgacaattgacggccttgattcgtcagtcaaatcccgatgtgatagttttatcggaaacaagaattggaaaggagaaatgtcatagactatgcttgaagttacatttcattgatggaagttatgtccatcctgatggttcagcggggggtttcggagttttctagagtagtgggctgaagggtactgtgatgagtgaagagaaaaacttaattaatgttgtcattgagtcggaacctcctggttctccttggaacttattgggtgtctattgcccgcctactataatggggagagaagctttctggaaaaacattggtgatttaattctgaaaaacatgaatccttctatgatcattggtgctcttaatggtacccttgcggatcatgagaatctccattactcaaattggatgaacccagctcgttactcctttgacttgcggcgtatggttgctagaacagggatgatagatttggggtcacaaggaggaaagtttacatggtttcaaaaaacaaaagctacaaatgggggatgcaaattaaaaagagctcgtcttgatagagttttggcgtcgattgagtggaaaatgttgtacccgaatgccattactcatg

SEQ ID NO: 82333 - DNA, 1333 bp, Cannabis sativa
ccccaaccacgtaaaaagtcttcatctcactttcttacagctccttattataattatattttaatagttgtcgaaaacctcggtcaacatagggtattacaaaacatatcttcaaaataagttaaaatgattgtagccaatcatccttcgagctttcaacaacaccaacaacattaatcaaggatttgatcgtgctatttgctttgcgagacgaagcatgggcatgataaaactttgtattttggtcaccgcattgaagtcaatcaactcttgatctttgtttccaatacttcttcctattcgaaaagatcatcaagaatactctcagaatctttgaattctgtcacagcagcatgtgatcgcataggttcattgtttagtgcagccacctttttctgtatttgtgcaatgtttcacttcgtatatctaagcttttgggtatgccaacattgtaaagattctgtagaaacttgaagattcaacataaagtggtccacaacctgatctgaacctgggcctatccagctttgcttaattaaagcagtagcttgtgcatcatttaaccagattttttcgaatctgaagcgtgtttttttgtgtggctctgtagctgaatggattggtacaacttgaacactaatggcacaatgatcctaatgatagtaatccaaatgttgtgtgatcaaaggctaaaacggagaattccatttgtcatttacaaaataccaatcgagcctttctttgattgtgtccatatgatgtttgcttttaatccaagtgtatggatcttcttcaaaaggcaactctgaaagtgagcaatagtcaagggtgcttcaaaaattatccatttgcacttcattccttagagctccacctattttattttgattggaaaggatttcattagaattgccaatgaccatccatggaattaatggagccacaacaagtattttttttaaaacagtcgaagtttctagtcttttgtgaatttcaggtgccccatagaagccaataaagtgccaaatagagtcattaccgaaagccatataataatcaaagaagtttgcattgaaatttaaaatagttacatttacatcatccttccataagagcagtatgttagaatttataaaacactctagaaatacaaataatcacagatctaatcatatttctaaaagtgctttaacataaaaaactccaaatcatattttatagaacttttgccaaattaaaagagaaaaaaatgataataagatgagcggaagtactaacctgaaaccagaaggttatgatcttccaagaatacactatttttctaaagtatttt

SEQ ID NO: 82334 - DNA, 750 bp, Cannabis sativa
tatatataaatagatttgttttcttaaagtactactttttggttttcttgatgagtaagtacttataattaagtaccactaccacacattatataaataaatttaagctttttgtagaagtaaatgaaacaagggatttgaagaattaaaatcgttaaagtcaagaaatatttagaaattattagtcacatgaattaataattaagaatattttatggcaatgatgttaattatatggggtacgtatatggtcacaattatgattttgatgatgttgaggttcatatggtggtattatatatatatggaattaagagtgaaatattattaccaaaaacagtgatataaatggtggaagggatgagtaactcttaaaactcttctgtacgtcgcaagatattatgtatatattatatttttgtatggattaattaactcttatatataaccttatcaatattcaactatagcctaaatatataaatatatatatataaaaaaatattagaaatagtggccaaaggaccatttgtttatgctttatattcactattataattttcatgaaaaatctttaaaatttaattctatataatagaatttttaatttaacagtactttcttacgttaattttaacaaaatatctcaattacttcatcatattctttattaattttataatattaatatatatttaaaaataaaaattatgtaaacattttatataaaaaatttaattttattatata

SEQ ID NO: 82335 - DNA, 1220 bp, Cannabis sativa
ccttcaaataagttgaattcctcatctatctgaagaagcttaaaggcacttcgagcacgccaaccttcttcttttgcttttcgataatagatatccttcaattgattcagccaattacttaaaatcccggaaaaacaataataagagaactaaaacttgaatgatataaataaaagaataaaaaaaataccctcttatccctcgaagcttttcccatgtcacaacaccaggtaggtttttgggtagaaactggaaaacaaaatttccaaatgtgtaacatttaaacaaaagaaaaaacatgaaaccaacttcaaaagaaatttataccaattcaacaagaacttcaagtttatctctacatattcaacgaagtagaatgacaaagcgaaggaaactaaaacttggctcaactattttcactttcctttaatttagggatgtaaatgaagtagaatgacacataatattagcaagttaaaagctactgtttccacaacataataaaacagacacgcactgtaatgaagcccaaacaaagtgccaagtaatctgatttcgtatagagctattaaattgtcgtacaaagcagagttgcaaagtcaaacacaaatcaccgttgtctcagaaacaattaaaaattatcacacttataaaattaaaaaaaaaaaaaacaaaatgaaggtgcagttaaggataaaagactagaactagtgtttgtgatagtgtatgtgtatttatcagaagtagaagccttaactaattaagtaggttttgcttgactgaaattgcatcaacctactactatatttgacatatcaagtagttgaaatcattcaattggaagaagtagtttaaaatatgatggattaccagaatcattacctttgcatcagataaaatgcaatataataatatgagaaccaatactatgccctgtcaaggaaacaacactcacatatggtttccatgaaaatctgataaacaacttttgttgtgtagagttacttagctgatattagttacaactggtaaagcaaattcagataatagagaattaacttgtgattgtgaatctttgggattaaactgaatgccataagtgagaaacccatgacttacttttcttggggtcttttaaaacattttatcaaacacttgcagagcattgagtaatagttgaagagttccatggagactagaagcaagaaaactaaccagag

SEQ ID NO: 82336 - DNA, 619 bp, Cannabis sativa
atatcatgtcttaaacatacatgtattgtaggccaactttcatgcattcatgttgcctataatctctatcatcttaaacctactcactaggtactggggccagcctaagattagtagttcttggtgtaattaacttcttcaaatgaattggtgtgggggaccatgaaacacacccccattggtgttacatgactcatttcatgtgttgcaggctcgtaagtggtttagaccttgttacatccatctgtggcaagaactaaagtcacagaaagagaggagctcgcttgtgtcagccaaggaataagatcgagagtgggattgacaaggactctttgacattctttgcaagagattcagaaagaaatcagaatacagttttccttgattttcacatgtgttaaaattgaaagagaaattataaaaaaggaaatgaacacaaacacgggcaggttattcttggtttagtgattagtacttttgtaagtctaaacttacaattcttattctctacatgattgttacttgtgtgagtgagaaaatttgaaaaatattcacaaattaatagtttctttttctgttacttgctacctgcttgttacaattcttattctctacataa

SEQ ID NO: 82337 - DNA, 1676 bp, Cannabis sativa
aaaaaaaaaatagtaaaatcatagaaaacgccgttgccggggatcgaacccgggtcacccgcgtgacaggcgggaatacttaccactatactacaacgacttttttgttatgactttagaaacttgtttatataaatacataatgcaacattaaattactaatgagagtttagtcatagtcaaagcaatctgatgtggtgatacaaatccaacgtgttcatttattgtgaggaagtgaggtcactttgagtttgagataagttttctatatatttctatgctataattttcatctttgttaagactccttttttctgatttttttaattgaatattaattagatgataagttataaattgaccttctttaattgatggtgtaaatttggttcaaaaaaatatactagtggtaaaataataaaatttattttatttggtatgatgatggttttggatgtatgtaattatagtatgtatatatctcttcttctcctcatcctctaaaacctccttctttaagcctccaaagagacctgtgaagactcttcttggcattgaaactaactaaagaggcaggagcccacttaagcaaaactctacatatttattgtatatgtataaatatatatgcacatctttattttataatttggatatgaatatgtatgtgatcacttggatatgaatggcatgtgaatattagtgaagtacttaatttggttcttattacttaggtatatagtctccactctccactctccactctccaccaataatattatccattaataagagttcattacataaagagacttttccaagcacaagagatgtaccaaaatgctttttatgcatgtcatgaaccaatccattttatcaaaattgctccttacaaaaagagagtgagataggattaaaaaatgttaagactcatgtaaccatcgtaattttctctgtaagtctacggatcgaacctcttaagactcatgtaaccgcaagtaccgacgtaggaattacaagtgtcaaagcacagatgattttgctaaccccaatatcgacgatcttaacttccattatcgaattcactaatagattcgctggtttaattgtgtgagtgaaagtaaagactattgagaaatttctttgccacgttagcaattttggattctgagaaagttcattcagattctagaacattctctagggttcttgaatccatatactccattagtataccaaaatcacctcagagtttttgaaagatcttgtgtcatcggacctcgtgagataagtctgtacggcggaggatctccatcttgcggtaaagcttattagagttagtctcacattgctaatgtgtagaaataaattgtcatgatgaatgtgctacttttcccattaccaattgattttgaaatagaacctcattcatcttatcataaattctaacatggtatcagagccaaactaaactctaatgagtatccgatttctaaaagagcctcttatgatcctctatttgggaccttttagccaatgtgtgtcgttttctagtgttgggatctttgatctgtctcaaaatctacaaattttctgacgtgtacccacataaatttctcgatatttggccttgtgggattcgtgatattgtgatctcttaaaagtcgttcgttata

SEQ ID NO: 82338 - DNA, 1109 bp, Cannabis sativa
tatgtcaggctccacaaatcctttcaaaatgctattattctccaagcatatatcgaacttgagccaacattatacagtcaaacatcaaaactctcccaatggcttaaagctttggataatgaattctttgcccttaaacaaaacaactcatggtcctttgtatctctccctcatggatgccatattattggaaacaaatgggtatataagatcaaatacaattcaaaaggtgaagtagtacgatacaaggctcatcttgttgcaaggggatgtaatcaacaacatggtatcgactatgttgacacctttgcaccagttgcaaaatttaacactctcaaactctttcttgcccttgctgccttaaataactggccccttcaccaaatggacataaacaatggttttttacatggttatcttgaagaacaagtctacatgaaaatccctaaaggctctatgtacatgagggggagcttcctccaaatgttttttgcaaattgaacaagagtttatatggtttaaagcaatcttctaggcaatggtttgctaagttaagcactactctacttagcaatggctttactcaatctcccaatgatcatttcctgttcactagatcataaaataacactttctttgcactccttctctatgtcgataacatagtcattgcaagcaataatgacttggatgcatttgccttcaaaaccttcttaaacttgaaatttcaattcaaggatcttggtccacttaattttttccttggattagaaattgctcgatccaaagcaggcattgttgtctctcaaagacccttcaccctcgaattctcactgaaactggatcacttggaatcaaaactatctccactcccatgggggccaacatatcccttagcaaagacattgggccccttgtttcatacccaacatcttacagaagcctcattggaaaactattatacttaaccatcacacggcctgacatcacttttgttgtcaaccgtctcagccaatttcacagtgaaccacgacaacctcacatgaaagctgccaccagaatcttacaatatctaaaaggcacccctggccaaggtctcttcttcagct

SEQ ID NO: 82339 - DNA, 627 bp, Cannabis sativa
tatatatatatatattacatgaagaaaatatttaaaacaagtttataatttttgtatttttgattaataatattatatttttttttccaatgattagaaactattagcattactaattctcattatgttattaagattttaatatatataaaaaaaatcatcttacaatatatgacatacattagatatgaacaattaaccctatataaattgaaacactcttttattttaccaatattattcctctacacttcaactctaattttaatccctaattttatacataataagattttagtaacaccactattggacaacgcataaataacatagtcacaattatatatgaataatgtgcttggatattgttaaaaaaaaatttaacaaagtattattaaactgatgaacaacgacttgtagtttgagaatactttagaaagaaacaattgtaagaacaatataaatcaacgtcaactccatcaatattaaaatattaacaatcttaccatattaaaattattgttatgagagttttatattggattgtcttcatgaaatacaagcaaataagactaaaaatagtgtagcatgatcagtgtgtaattattaattcatcaattatcgaag

SEQ ID NO: 82340 - DNA, 1330 bp, Cannabis sativa
  modified_base (28)..(29): a, c, t, g, unknown or other
ttccgcatttaattaatcacttaattanntaattaaactgggaatattaaaatacggaatttcagaagatcactttagtagatttgttctaggattttaaggccgaaacacaggaatcctgacaaaagagaaactggcttagagaattttcatgagtagaaacactgcaggaattcagccaggaatcttgaacagtggtatagaaatgagggttatcaatccaaatgttttcaaactgaaaacgtttcctaataaaaggattgctagagacattagtatcatgaagaagaaccttaatggctcgatggtccaagccataaaaaggcaaatgatgcaagcttgcagtaggaaagagagtcttccaagacttagacccaagagcccaatcgagacgctcatacacagtatgattgtgccaagtatatttatcaccctcaaaagtgagagagaaaagacaaaaatggtcaagaaattgggcaaattggtccatatctttatggttataataagtactgcctattttatcatcaaaagacaaaaaactattaaaatcacccatgataagccaagggaggtttggagcattagaaaacattttttcaagcaaattccaagtaaaagaacgatgagaagtgaggggagaactatagtagccagtaaagtgaaacatttcattatctttaaagtaaatattacaatctatatgattgctagaaaaagataaaatatttacataaacagtagctttccacaaaagaagaagaccacctccaaaatacttcctagggccttcaaagccattatcaaaacctaaagctactctaattctatcaatagccttcataggcaagcgagtttcaatcaaaaaaaccacatcagggcagtgatctttaaccaaaagggagagcctcctgaatgcacgcgtactccctgaaccacgtgcattccaactcaaaacactcatttttctaggcgggtgtgcaaagcatcacccgcctgttccacatcagcagtagcaggagaagattcttcttccgatctccagaacgagcacgtttgagttaggaccttatagagtttccaaccacaacatgttgaggctgaaatgaaggtctcttgacaccagaggttgaagccagacccttcccacgaacagatgagttaggctgaccctgaggagagctaactcccatagcaaagtcaccaatggaggcatgactgcgagaaacattcacaggaacagaagtgccagaggataaagtgtctatctggctaacagggctatcagccacaataagagaatcagtagagtatgatgtaaaagcagaag

SEQ ID NO: 82341 - DNA, 792 bp, Cannabis sativa
aatgaaattgctaaacctttaaaagtgaagcatggaggacgacccaatttcagacagacatcaataaaccaatccactccaacagctacatgagcaacttcttcatcagcaatttttgcgacaatatttgacgttctaaggtctccaaaacccaccaatctttgcacaagtcgaggcccagcatcaagtcctctagcctcctatacacacacacaagaaaaaaaaattggaaaatcaaggaaatttatgaaacatttaaagttttaaaataaagagctaagaggacatcaacaagtcttaaagataccataacttctattagaaaatgataaactgtttgatactagaacaaaaataggatcttgcatatgcagattgcagaaatgaagaaattaacaaaatattaatgacttgaactatatacaagaaaacctcttccacttgtgtatttgtaaaaatgaaagtctaataggggaggagctggcacatacatttacagcagaaaaatattgcattctctccagaatctgtcaatagtaaattcatcacaaaggacagtaataactctatctacatagctatcaaatcccttgtgatatcaatgaatcccactaccctacccgtcagcatttcaataaatggagaataagaatggaagaaaaatattcatttcagttaaaattatctcaaaactagtcaattaaatgacaaatgacttttaattcacaaccttaatataaaaaatacaatgaatttgtactttaggcattttctttagcaatgcggcaatgc

SEQ ID NO: 82342 - DNA, 2667 bp, Cannabis sativa
atggggggccaggcaggcccactgagtgaagaagaagattagatgactaggctgttggttgcggattaataatgatttgacagatttgtgttatatgtaattagattccaatgcaactaataactatatccaatatttggtaataagctcaaaccttatcgcttcaattcatcattcaagtacgaaagaatacaatagagcttaatatagtcggggtggaggagccatggtcaacaaggattgggaatccgaatatgctgctattgctatatataaaatataaaaatatagctgtatgttgtttacacaattgtatgtataggcacatgtatgtgttgtacgcataaatcactcttaaatgaagaacaaaacattttaaagaaagaaaagaagatattttgaaaaaactggaaaatattgaaaaacacaagaatgtattgtgaagaaaagtaaaatccaatctcatagtctaacaaaactaagtcatttgaactaacaattgtagttgaatataaatgtaacataccatttggactaacaaaactaagtcattctcaaaataaaatagctcagttgacactattttagactctcactaactaaaatattaaccctccaaatatgatactacactaatggattgatttcttttggaaagagatttattttcccctattagatcagtcatactatataacgaagaactgagaaaaattaaatgcgaataaatatgttttttcgttggaaaatttgctgaacatgtcctaaaaaatttatatgattaagtagtaattagtttattaaacacgtttatttaattgaaataaataaaaaattaattaaataatttttttattgaatatattttttaaaagctgtaagagaatattattttcaactttgttttacaaaattactgactcatatcttatattttgataaataataaattagactatgtatttttttaaaattgtacaaaatagtatttttagatcaatttttgataatttttttaatataaccaatttaaagacaattttaacatgaacagttacaaaaaatgtaactagtcttgttgtagcaactctaaattaagttattattaattttttttttttgataaaaaatctcaaaatactaatgatattttagaaaatacataattttgtaaaacaaaattcgacccccaagtggcaaagttgcaatatatgtacccttgtttatatgtacccaataacgtgtgactggatctttctttatcccacaatatgcagttctcttatttattttcctttaaattcacttactttgtataaaagttccaacattgtccatgtccatctcaaaaattagagtctatatatctctaattttttttattctttcttgaatatttgaagatgaaaatcataatttcttctgaaataataaaaataaaaagtgatagatatatagtataatatatataggttcccgtgccatgccaataggctatagtcagagtgggctggaaatgtcaggcctcccaaagctgatcctgaggtccaaatcttcaataccttaattgtattcaatttctatttgtattaaaatacctaaaagtcagcccctgtagtgggtctcagccttttcctttgggcctagggtttatccctttttctgtatcatcgttacgtagctttctgtaacatgccttgtgagattttctggttggagtattgcctagttttctcagtctgtgagtgctgtaagatggaagatctagtgacgttttctactgacgaggataagaacaccgagaacaagatggtgagtggggtggaggagctctcgatctcgttggaagctaatcttgatctgggaagtgaggcggcagggaaatcggtggtggcaaaaatcatttcaaagcgccctattttcaatggcctgctacgatcggtgctgggtaaaaaatggaagctgtcccctggatggaagcttcaggatgttgggaacaaatcgttcattatccgtttaacaaaaaaagcggaggctgaactcatagtaaagaatggcccttgggcggtgtgtgacggtttcttggtggtcaaaccaatgcctgaagatggaagatggagtgcggtggatatggactcctctccgatatggataagggtttatgaaattcctcctcgtttctggactcagaagaatgcgacggctatagctaacaagattggttcggttatttccattgatcgtatgtggagaaacggattccctacaaacgaatacattcgactaagggttagtctttctcttttaaaacctctccttgttgggttatttcttccaatggaagaaggggttagtctatggtgttatttcaaatatgagcatctcccttatgtctgctataaatgtggaattgtgggtcatgatgagtccttttgccggcgccaaagaaggatgatcactgatgattttaataacacggttccgatgtacggcccatggatgcggctgggctcccgtaagaaagattgtttttctgactatgctttatacgaacaagaaaggctaaaccgggaagttacggaggtcagagcccaagaggtagtggagcaaaatctgtgtgctggggtggaggactttgagccagccttaatcggtactgaaattcac

SEQ ID NO: 82343 - DNA, 917 bp, Cannabis sativa
aaaaaaagaaaaaaaaaagagagacagattatttatttattttttaaatatttgtatttttgtatgtaacaattatatttattgattgtattatagtcaataggaaaatatatggaaaagaccaacaaataatattatttattctatataaattatatataaaaaaaaaaagggtgtgtgaaattaggaataagtgaaggcaggaaaagaaaaagaaacttgaacaactaaatttggacactgaaaagttattgataaatttaaaaaatattgacttaaatgtaattcaaaactaaaaaaaaaaaaaaaaactaatatttaccttttatgaaaaaacatactaatatttattataacagtaacatatattttcgatcatatacaaaaatacagagaaagtaatctcacataattaacttaaaatgaaaaaaaagtgtaattaaatctgaaaaaaagggaaaagaagtcttatatttagaaaatggtaaaaaaaaaaaaaatagctacataatgcactatttttttaaaaaaaaaattgtatagttttatgtttaaagattttttttttatatatttttacagtattctataaaaacaatacaaaaataacaaaaaaaatacattaaaataacgataaaataatatccaaacaataataaaaaataatatacaaataacaaaaaaaaaaataacaacaaattaataaaagtaaaacatatcaatatatccaaaaactgtatttttaataaataaaattataaaaaacatttaaaatttaaaatttaaaatttcttacaattatatttttatatatttgtgaaatagtagttgttatctctcaaaaaatccaaaataatggtgcatgaatttttactctagatatggaggtccaacaaggtggagcttattggccatgg

SEQ ID NO: 82344 - DNA, 1050 bp, Cannabis sativa
ttcacaatctaataatctatttatatttatcgaaattttatacatggtaacatggtattgtttttttattattattattttgtagaagatataatctcatgattctcaacattgtattgaactatattttttgtggacaagtaattttatctgatccgcacttatataaatagtgaatatgtctactctgatacggtttaagattagtgagcaaaaaatagtcaccatcttgagggggagtattgtagatattgtctcacatgaataaataataaagtattactcattactaattgattttgagatagaatctcataattcttaacattttgggcatgtttgatgcatgggataaatgtttggaattagattaaattatccaatttcacatttggataaaattgaaatttaaagattcgtttagtacatcgtattatactatattatattactagattatatttagttatatttttagtttttatttttaatctaataattttgtattgcattgcctaatcaggcaagggcatagcctaacacccatatgtcacattatcacatcactcacaaccccaaatcaacttgagactgagagagtcccttacaaatagcttctcaaccggggcctggccatcctttgtttgcggtcgacgttttggcaaagtttgtccgtcgacagctgaatgtttcgatctggttcgattcatggtcgcatttgcaaacgttttcctgtgggccgacatttttaaggaatgtcattaaaggtaataaattttatttattttattttattttttaatattatacttataatgataattttattttttaaaatatgtcttacaaaataactaccatatactatagttttactcaaaagggtaatctagttaatttaaacattccgattacatttcttaataaattaaataagataaatcactatcatttcatttccaattagttttagtaaacaatatattataaatattgatttgttataaaataatatagaattatataaaataagtaagaagaaaagaagaa

SEQ ID NO: 82345 - DNA, 950 bp, Cannabis sativa
ataatcaaactgggaatattaaaatacggaatttcacccaaaaaaagaacttattggttgattaccatggattccttgaactgaaagaaaaaagttattttctcctcaacttcttcactccctcttttttctgttacaccacaaccattacacgatcaccataaaactaccctcaccaaaaccacaccactgaaataaccatcaccaccacaagaccaccaccactgcatgcaccaccattatattttccacattcaaatcaacacttacaaaatacaaaataaaaataatattaaaaaaattacaaatcagatctatcaaacaaataatgaacaaaccagagagagattttgaatttcctaatgatgatttcaatgtcttgaacaaaatctagaaattcaaaatagagcattttcgttgaaccaccacgtaaggtgactgtccaagtttaacagtgacgaaacaggttttggatcatgggatcgagaagcccatgccaagaagaacacagatttggagactatttgtcgaaaggaggttcagaggccaccagatcgtagtcaaacatctcgaaacctcatgaattctggcaaacatcaacacccaatttcgactatatttcaagcctagtccattaaggaattttgctctcctatacctcctgagtttaactgtaccattcactgtccaaaatggtgtcgagatctcaccgaaaaattgattgaaggttttagggaccgctactttaaccgaatcgttctcctcgttggcgtctcgagtcaggcagggcttgcacaggtggaggtttcaaaggatggttgttctctttgtacatgcaatgtcactagccggtgatggaagaccgacgtcgggtctggaggataaaccaccgagagtgaaaagggtgagaggagagagaaggtctgaataatttttgaggttaataatta

SEQ ID NO: 82346 - DNA, 1221 bp, Cannabis sativa
cgagagagagaatctcctacttgagctgagctgtggtgactggtggtgactgcctgactgtgagcgacgacggaggaggtcgacgtcgtggatggagtggaggagtcaagcagactgagcctggagttgtggggtgtggaggtccgaacggaccgaggctggtcgtgtcgatccctgggtcgtcgtcgaccgtgggtgaggtctggtgaggtcgggcgtgggtgggggtgggggtggatgtgttgtgtctgtgggtctggtggcgaggctgaaatgtaaagcagtaaaagtaaagggaagtttagagtttttataatggtatagcaccctcttattttgtcaactaaattatccaccttaacaagtacttttaaaaaggaatatttgctgcaaaaccatctatagtttatatttttaacacttaaccacaaaaatcaacattttggtggcaaaactactcaaattcctcatatgttagctatttaccccttccatctaaaaaactatgttatccacctcctattttgtcaactaagttatccaccttaacaagtatttttcaaaaaggatattgggcacaaaactacctgaattttatattttttaacacttaaccataaaaatcaaaattttggtggcaaaactacctaaaccccctttctattacctatttacccattccgtctaaaagactatgttaagtgccatggtgaacacgccacagtttatacatataaaaattttagtgatctacgtaattttaattattaaaaaattaaaaattataaaaaatattttcttttttcctttttcttttattttttcacttttcctttttctttcattcttcttcttaactgaaccaaaaaaagccctagttgctcatctaacggaaggccaacagacggcgtagaccctctcctctcttctctctcgttctcgcctgacccagccccttctgcgccgctcagtgtcccagactggcaacccagacccaaccatggtggtcatggttgggatcgtgatttcgtggtcatatccaaccacggtggtcgcgatttagttgtttccttagccgttcacctagaccgagaaaaagggaaaggttgaacgctttgttaagctcctcctccttggccaccattaaagctcgaacaacctcgacaaattcatacttcggtagatgcgtgttcggggctcgtcttcaagcttgggagaaaa

SEQ ID NO: 82347 - DNA, 1491 bp, Cannabis sativa
atatgtgctgatctgataatcagttttctgttatatatgtatatatctatgtatgtgctttctgttttattttcctttagatcgatatttggtcagagaatatattatacatatacagagtctatatatacattattatcatgtaaaggactctacatagtgtacttgagaaaaggcaaactatatatatgtgtaattaagtcatctacttctctaatgtaacaactgaaactttaatttatttatttatatattttgttttgtgtggatgtaagtgtagaataagaaattgggaaggtcgaatttgatatttctcaaagtgtatatgaatttgtcgcagcttacagagttgtgggtattgctcaacaaacttttattacatgaacgaaacgaaacttcgcccatggtttttgagcacatattacgtcattgtgtgttgtacatttaaaagtgttaaataatgataaaaagaaaaaagaaaagtttcttggatttggattttgtgatttatccttaaataaggaagttttgatataattgttttttatttttttttttacatttagtacagaattttttagtgtaatttattttaactcctgtacatgtagattgtagttacttaaaaaatttcaaatattatagtgttcaaaataaaaatttaaatattttagactttatttttagtattatgaattttatttaaattttttaaaagttttatatgtgatctaaaatagattggaaaactttcttagatatcaaatgatgtataatgatattttggggttatactatattgacgcatgggttttacataaaattgataatatttgtgtttgcttagaagtactaatgaagtggaatggaatgaaaagaaaatatgtttttattaatttatttttttatttgattgtattataaagtattaattgaaaatatcattctaatataatgattttttttattattttggatttaaaatgaaataaatgatcattttaatataaaataagaaaagttttagtaattttttatacgtttcaaaatttatttcatttttattcttattttattcttatatattttcattcagtctgattaaatttaattttagtgtgatattagtacatgaatacataataacgtgctaatagagaatttttaaatgaattgcatatatatacaattacacaataatttaatatcatatttcatatatataagtatttaattaaaatatattttgtgggtgttgaacaaaaatgaaagatgccttgtagtaactcacaaacacacatactataatatataatcacatttggtaatattgtgtcagatgagtagtagtattttttggaattagacatgtctctcacttttgatgtcataattaaataatatataacatgtatagcatccgattggcttaaaatagatatgcatggttttgtagtagtaaaataatattccacttgcttcactctctct

SEQ ID NO: 82348 - DNA, 796 bp, Cannabis sativa
ttttttttaaaaaaaaagaattatatggtaacttaaatgatattaaattggatcaattaaaaaaagaaatttcctagcatattatttcatagatatatcagtaattttcattaataggcaaaatcagatcatagttgattacatgatgataaattgctcaaagagcataatcaataagatagacaacgtatgttcgtttacagaaataggaaaagaaaatcctaataacaccttcaaataaaagactaataagttgacaacattaaagcattaaagagcgcgaagactgctagatctccaatacaaatgaatatgtgactaatcacataactataaatgactatcggccaaagatcattcaataaaaattaggtaataataacctatttattaaatctagaatacaaagaaataatcaaacgactaaccacagtgataacaattgtaacaaaccatcgcatcataaattatgggaccaataaaaatttgagaatctcccaaatgtgaatgtggacaagactaacatcccctgacattaataaacaaagtcctactaccataataatagcaaggtggtatatcaacactctttttctctttaagaatatatacatccaaaccccaaccctagccaacaacccccaccccgcccataatagaaccccgaccgtcgaccaccactaaccaccacatcatagcagactcaccacagacggccaccacccataacagaccaatgccagccaatcccaactccacaacctgttaacccgagaaaaggactcaaaaaaccaaa

SEQ ID NO: 82349 - DNA, 1109 bp, Cannabis sativa
gctttctttgaattttctctctctgtggtccactactatacatactacttagctcatcacttgtatagctttccacttgcagggccctatataacaccactcaacatttctgagtttgttgattaatttgtgtgtttgtgtagacaaaataacaaagaaaaaaaaaagaaagaaagatatcatctgagcatggattggaatagcaacttaagacttgtttcaagacctgaatgttcttatggcttcctttacaactacaactatgatcagtaccagggtaacatatatattagtattctacttttcttttggatgaatatatatatatccatgcatgaatctgtttcttatttgtttaggtatggatatgaaacatcatcaagcagctttaatggcagagacaacacaagggttagggctacttggagttccatcaatggagaagatgaatggtgggggtagtagtggtaacactggtaacagtagttatgggatgatgatgagtaatcaggacaagaagaagagactaacgacagatcagttggagtctttggagagaagcttccaagaggagattaagcttgaccctgataggaagatgaagctgtctagagatttaggccttcagcctcgccaaatagctgtttggtttcagaataggcgtgctcgttggaaagctaagcagctcgaacgcttgtatgatgctcttaaacaagaacttgatgtcatgtctaaagagaaacagaagctccaagaagaggtaatatatatatatattgttcttatttcatgcaaccatgcataaaaaaaaatatatatatatatataataaatatgcacctcgtatatatatttatattacgattataagattttttctttttttattttttgcttaactacaattatatgtaaggtattagattgcagtgtgttatgtgtaattatatatatacagcaaccatataaaattttccctttaatcatagctatacatatatagtactacagggaaaaccacgtttgttttgtatggaatggaagttctatgttactttttatgttctttaatttctgttgaggagagaattatataaatatatatatat

SEQ ID NO: 82350 - DNA, 698 bp, Cannabis sativa
tgatgacgtggaaccgaaaattcagttacggtctggtcagattgatggtcggtttcgatttttcaatttttatgaacactcctaatttttaatgtataaactatcagaaataaagcatcaaaagtatgtaaagagtactaaattttcaacctaaataattaaacacatgacaaatcaaactattaatcgctatcaccacttaatgatcttccaataaaaaattactataataacaactcaattgttcaaattagagttaaaggaaataacaagatgaatcatggcaatatcaatcataatgatagactgacctacaaattaattatgggattaataataatctaggaattctctagatctaaatatggagagtggtagtcatcaccctactacgaaactaataacacggtagtctcgcaacatcattattaaaaacaaacacatactaattataaataacgacacataaatagaaaatcatataacaaaagacaaaaggaaaccatctacattctattctctcctagatcatctcttaaacatctccatcttgactagaataaacaccctagaagccgcctacgatgctacatcaccacaaatctaaaaacacaacccaacccttttgccatttgaaccagacccgaaaccctacaccccattattccacaactaaccatctacattctattctctcc

SEQ ID NO: 82351 - DNA, 797 bp, Cannabis sativa
atttagtgtaattaagtttttatgccatatatatcaaaacttatctttattttcccatatttttgtaaatggattttctatataatatacgtttcaaaattcaattgagtgtaagaaagaaactataacctatgagtggggtctacaatacataattagtgttgaatcttcatatttgttaatgccaagttgcattttgctcacgtggttcttaacttattttagagatttttttagaccctattaattatttttagactttaatgagcaaggaattcatgaggccctgtctcatcactgcatgtgtacactctttttctctacttctttaattgatactaaatagatatgtactagtatttcttttgcaaacaaaatataattaaagaggatatgccaatattcgatcttattatataattaatctgataaaatatccctgtaaaaatatcatttttttttattaatatatataaaaaaaatctgataaaaatatctactaaatctatacaataataggttcgagcagcttaattcaattaatagataactacgcatggcaggactttagtttttattaaaactaatttttaaagtgtattttatgaatgaaatactatattttattatttgttatgtagcacaaattcaatttaagaatcaagacactacgtactgtttattatttgttttttttttctttcaaaaaaaaaaacgtactgtctgtcgttgtccataattaagtttgtttttttagattctccataattaattaagttgatatatattaatattct

SEQ ID NO: 82352 - DNA, 964 bp, Cannabis sativa
aactcctattatttaatttctcagccaatattatgcatacgtgtacactactcatatatatcccatctaattcaaactaaccaaactcaaccgctttcttacaaaattatgaggtcatatataattactcaacatttcgtcaaaaaaaaaatatgtgtagagaaagtgaataactattgtaatagacttccatcatagtaaataactacgtaacctaccaaatatatataaattgtgttgaaataaatattttgaatatccatttgtcgaagaaatataaatgttgttacatgcatgcacacacgaagataaaagacttgttttattgatttttcagcaatgcttggctatactcaaaaattcaataaatatatacgaataaattaaatatattattgtatatattagttatgtatatagtacccacttgttagttgtaaaatgatatagaaacacatgtttttgtacttaaaatgtacacctaacctaacccaataagtctaaaatattatgatttattatatattaggaaagaaaaagttggaatatatatatttacatatatatagcatttagtgtgaaaaaagaaaacttcattggatataatcaaaattaatgagtatgaaaacaatgttttagtttcaaattaaagatgaaaactaaattttctaatttaatctcttcatgaattaattgatataatacttaagttgggagatgactatatattaagggcatttatgtttttgatattgaagaaattaattataatctagttttttttatataatagtctatattatagttatagtaggcatttatttatttatttttttaagaaaattaatagtttataatttcaaaaataaaatttaattattattatcattatttctttaaaaaaaagtttctaatatatacaaaaaaaaaaaaaattaaattacaatttttctaattgctaaaa

SEQ ID NO: 82353 - DNA, 1182 bp, Cannabis sativa
catgtcggttttatttgtttcattgacgcttcacatattgtccaaaatatccacaacagatcatgctttctatctcgtcctttagttgccgacactcttcaattgtatgccctatgtctttattaaatcgactaaatcttgttgggttttgtttgtgtctcgcatgtcccattggctcaggtttgcgaaatgtaaccgtgtgctcatttgcaagaaagatgttttcccgagtttcatttagctcggtgtaaacggtgtaaatttgcacatgtttgtcgtgctttttcagtttcttcttattcgtagatgattctatctagtcatcttttcttttggtattcgaacaacttgggttatgagtctttatcgagatggtacttgttgtggcattgcttatgcttggtttatttcctgagccagtctttatcaacttcatctgattacttgcttcctcttttcgcacaaacacttgcgctcttttgttgaattcataaatatttctcactggatgaccttataagtcatcccaaaactttccccaaatcgttgaaacttcggtcatgattcttgcttgaagagcagtaaattgaatactgtcattcaagttcatgtagcgactcggttggttgatgctttatgttagttagggatgatgcttctggtcgtctggttgatgctttctgttagttagggatgatgcttcaggccgcttgaaattgtttcttgaaatccttggacagctattccaaagaagttatcaaatggtgagttaatatatcaaaccagctactcactgctccagttaatgaggtcgggaataaaatgcattgtagattattcgagacgttgctgaatcgcattatggtattaaagttattcagattagcaactaggttggaagttccatcatactacgagacgtgtgggtttctaaatccttggaaaaattcaaaattcataatattaggatggaaaggctcaacttcctcattcgagtcatagccaggtaatttccctgattccccatcttagtatttcctaaacttatcctccaactcaatgattcgcaatttgataggatccacttgttgttgattagtgttgaccgaggttttcggcaactaataaaatatgaatataataatgagctgtaagaaagcgagatgaagactttttacgtgg

SEQ ID NO: 82354 - DNA, 1419 bp, Cannabis sativa
tattctcaattaatgaattaatgtaatggatgttttatatttacaataataataataataataataattataacagaaagggatttttttaaaaaactgttaactaatatgtggtttggtaatacgtttattttttaatttttaaatcacaaaataaaaataaaatttttatttttgaaaaataaaaatgtgtaataatttttgttttttaattttaaaaacagaaaataaaagtatgttctataatatttttatttttattttattattttatttaagtcgggtttaagtctggggttagatttgggttcaggttagagaggttcaacgccagggtcgtggggaaatttgggtccaagtttcgtcggagtctaaaatattaattaagaaaaaaaattgttcaaaaaaaatattgaaagtttttttttttttcaaaattttgattctcaattaaaaaattaaaaagtgaaaataattttatagaacatgtttttaaaaaatattttcacttttataattttaaaaatagaaaactgattaaaaaagtattaccaaacgtcacttgatatcacaaattttagtttatttggttaatagcattgttgttggacaccagtggtatttagtacattctaaacgtgtcgtcttgcgattggctagtgatattttctaaaaattattacattaaattatataagagtccataccaatcaaaatattgatatataaaaagttagtaggcatccctaatagtatttctctttgataaaaggcatctcttctttaatcagttgttggtcaactaaaagtaattaattttgcagatcaaaatagttggagtgtaacaaacgaaggctgtagactagtgagcgagtgagtgaggtcccattttagacaattatttgatccacgtacacaaagtacatccaataacaactttatctttccttgaaagtgtaactaatactatgaaagctccattcctttaatagaagaccatgtgaagagatgcaactttaagttatgagccaaactggaatattgtttggtttgtttcttatataatattttatgcctttgtttcctattggaatgtgcattgaccaatttatcctttctaagttacctaaattgaccaataacagttagaaactaatttaataagggtagtgaatgatgtacttggaatggaagataaccaagtgaaatgtcatactcatattagtttagttcttgattggatttaggattttaccaacaaaaagaaaatgtcaacagaaaagagtaagaaaaatgttcttcaaaagttttataattaaactaagtttttttttttctttttcaaaaacttattattatttatttatttaactttttgtttgaattgggagaaagcaagacttttgaagaattataaaa

SEQ ID NO: 82355 - DNA, 1642 bp, Cannabis sativa
ttctctaaaaaactttaacgagtgaatcaaaaaacttaatgaacacaaatatgaattcatgtataatcaggattcaggctgatctactaatgatcatcattgtgatatgaataattctttcgtggtaaacgacacattaatgaaagatgtttattatatatcaacccagtcatgcataatcgaattatacacaacacgtttactacatgtctatctacatatatgattcaaatcaaaatcacacacactagaagtatagtgtatagtaaaccgtacttagcagtttcatattaaagattctcaatactttaatatattaccgacttgttctattcatatcgtataatcttaattctcttgtacatccttacaagactataccttgtcgatatgaataaggaattttaagatatttaataattatactattataattattgtatcatttttataattgtatttcatatattctctaatgtattattcattaattacttgtttttaagacataaatcctaacagatgctacatttggagaaattgaaataacatctttcttttttattttcattgtgaatattcttaaaattgacaaaataataatgtcaataatcaatgttaaacatattcctaaatattgtatggaccatcgatccatgaacttgcaatcttgattttacggaacgctctatatatcaaatatagatatgttataatattatcctttatttttatcataccaatcaattatcatctatagatagtctataattaataaggactaaaattgctattttaccctttaatcatattttatccttaaaatacttgttgtattaatgatattttggtgaactaatatataatcactgaaatagacgctctatcattaaatacgtcaatttagctcaaaaaaaattatcatttcacttcttacatagaagttatagatttttaaatttataattaacactcttacttaattatgagatcgacttcccaagatgcaaatataggctagaccttataacttgaataacacaattaacttaaaatttaatcatgtcaagattaagatcagattaatttaatctatgtaataatatatatttttttataatactaatacacacttaaattatacacagtaattacataaaataatgtatattaaatattaattatttataagtatacatcacatttaattatatagttaaaattaattatacatgtaaaaagtatgtataatttgaatgtatccaaaacattatttattataaatttatttctgctcctgtatagacgaagcaggctggcttatctgttttaataatattaatatacaaatcgcacgatttatttaactaaagaagaatacaaaagtgaattatggtatgttgtctaaactagtggaaatattggttgtccaccaaccgcttttaataacatattctattatagaatttagaaaagagaatatagtaagagcatctactcaatgctatatttgatacttttgtaagaaacaaatgtatctcccgtttattaaaattgacataatatataatattatactaaatttaatatataattaataaatatatattattatgataaatttaatatacaatttatacaa

SEQ ID NO: 82356 - DNA, 1738 bp, Cannabis sativa
gtttggtttggacggtttatttgggttgggatgtttgtaaattttattgaacacccctaatgtgggccctattttcaagaaatggacattgctgaatattttattaaactctagttgtattacatgtaatatatgtgaaaattattatttttgtaatttttactcggtaacgatagaaatatgacattttggctattagagacacgtgagtttgatttaaaactattttagtttgcggggcacgtttatttgatatttggataccgagattaggcgaggttgtgatattagatcattttacccctaagccttaagactacttaaagggcaagtaagatcaaaagttataatttgcctaagagttttagctttgtcttttagtaagtcagtagctattctaagggttttctaactgaattaagtaaggtaataataattaatgaattattttattttcttaagttagataatatcaaaacaaaacacatatctctatttaaaactcattccctctctttcggccctaaggaaaccagaagtccggaccatttcaacaacaattttatgaggaatttggcaacaattcaagggaaattagaaaagcaaactaaaggtaaggccctagaaccctttttctttgatttttggaagttttggtttggttcaagcatgtaattttgagagttaggtaaagtctgaactgtaggtgtttaggtttgatttatgggttagtttaggattgtttgatgctctttgcgttaggttttgataactgattaaggtgttgagcaagtttgagttcttcgctgaacaatgttaattttcgattttttgggtttcagttgttgctattgcttgaaatatttatgttggactcaaattaggtgttttggagagtttcacaaagtttgggttagtttggaattgagatgatatgcttgaagatatgtagcaaaaaatggcagactgttttctcagaaacggcctaccgtttttcctagcagtggcccagaaaaacaacatgctgtttttttgggaagttttttcgaaggctcatttttggtattttcttgatatttaaggtattgtcacgctttttattgatagggtaacttctgattttgagtttaaatccccgaaaaggttttagcaaattatttacctattttacgtaaatgtgacatagggcattttaactccatcgatgcaaggacatttttgtacttttgtaggatcgtctttagcctcaaaattaaatgaaataattttaattaatttattcttaaataaatcatttatttaagacaaatttattatcatataaattttatcttaaaataataacatttattatttattctgggttaagacaaatttttcttaatattgttataggtttgagtttgaatttcaaacctaaaatcaattatatttatttaattcaaaattgaattttaaaaaataaatatctcacaaaactttattgttttatcttaattattaaaaataataaaattattttattagttaattataaataattaagatagttattaatttgaatttaaattttaaattaataagtatgatattaatttaaaatttaaatctaaataaatattcaaaataacaattaattatttacattaaataattaaatgataatttatagtgtatattatatacaatatatatatacattatacacactatatatactaggggtgttcgcggtgcg

SEQ ID NO: 82357 - DNA, 894 bp, Cannabis sativa
  modified_base (73)..(80): a, c, t, g, unknown or other
aaataccatacaaaaacctaaaaacaaaaaaataccatataaattggccaaacttaaatgtgccatatttatnnnnnnnncttttaaaatcccatactaagtgtaatttcctcattctagggatctattatcggccctaaacacctatagcctatttatacttaaggtcaggcctgtgtgtacacatgcacatgcacatgcacgtacacatacataaacatgcacatggacatgcacgtacgtactacgtaatattatgaattcacttatatatatatatatatataaatctttaccatgttggcagtaacttgcataagtggcattgtttacgacaccatattgatcaagctcataatcacgaactttgagctcaatttcaatattattattattattattatggcattttataatggggaagaacaaagaccgaagacgacgttgatgagtaatagtaactggaaaagctactaatgatggtgatgaacggtaaagatcgtgacacgtggacacatgtcctagtggcttattattgtaggtatgagttgccaatattgaaatggtgtgcaacatattgtttgctaattctatatagctttatcgaatactcatatgaggactttgtttatatatatatatagtagaaagtataaaagggttggcaaattgttgattataattaggcaaacctaaaggccggcctagaatatattaaatacccaataattaattattatgctggcccaataatattatagactagctagttaactatgagtcgatataaggctgaattgaagacaattaggatagggagagagaaatggttgttggattaaaattttattgttggtacatatgtataatgtatatgttattataaagtgtgat

SEQ ID NO: 82358 - DNA, 991 bp, Cannabis sativa
ccagtatgatctggttaaaagatttacaggttggttctggtttttaatagttagtaggccttgtacttttagaatcagccagtatgatctggtgcatgttagaaatgttcccaatagcttaaaggttgctaaggtggtctaccttttctggttttcattgatcctaaatatcttcaccatttcttaagaaatagattagcgggtgctaaggtgataaatccaattttgatttaatttaattgctgattagtcagttgctcataggatttatatatatgggttgaaagtaattcttttcccattttattgtctgtgatctggtggtggttgtggtggtggtggtggatgcacaggtatggtcttactcttaccggtggtgtcgtgtctatagtgtattgcgttgtgtgattcgacttttggttcatggttttccttattttcaaatgtcatggtctctctctttagtaacgagagtttgacaggttgggaaaacaaaagttcactttcttttgtagttaagtccaacaataccgatttctttggcaaaacattgatctcatcgctattactttcaacatacagacttgctcacacagggcatcttgtaaatggttaataattttcgataatcgttattaaattaaaataagtggcaccggtaatggtatgacataatagtggtgctaaacactatgggtgttcattagcatttttctattaagataataccatcttaaccaaaccttttgggggttcatatcaatttgagcatgatgtggtgccctctaattagatgtttttttataatcattatcataataataaaaaaaaaaaattgatattaaattgccctaatagtaatattacccttcaaaatttaaatagtgttaagcaccatgactgccgtttattatttctcacatcaaccctagctattttctttgaaggaggtatcaaccctattcagctatgttgattggaaatataagct

SEQ ID NO: 82359 - DNA, 555 bp, Cannabis sativa
ttattagtaaatctgattatgggtactatttagggcacaaaacccaacactaagatcctggtaaaatatttcaaacaccatggccattaacttggcaaagtgcgggtctttgggtgaaatctttctgtaagtttttttggtccttgccaccttcctagtccttgatgggcattttgatgtggggtgctttttgattgtaaccacaatctttgtgtgcatagaaatattctttgaaggctttggatgaccttttaacagggtatctggaacgtctgcaaggaccttatacatccaagaagaggttaggtattgtctccaccctatgtttattttgcaaacaaatcttccttccccctcaccgccaatattgttgggggtaatgatggtgatgtacggatggttctcaagattctgattccttatttttcactttccaatcattaaagctggatgtcgaattctcacttgataatggtgaagttgcacggagtctaggctggtcctcgtaaagaagtgcaagcaaatcatagtctatgttggaaattattttactag

SEQ ID NO: 82360 - DNA, 1569 bp, Cannabis sativa
tttatagttaacttcaattatgttatctcttatttatgatttttaagatgtgccttagttttagtaattttatggttctacagcttatcttgtacaaagtcattattatattccctctatatgagtatgtttaatgtttattaattataatgaaagaaataatcgtagctagaaatgattgagaaagagtaaacaaggaatcaaagattttgtttccttctgctaatttttgttatacatatgaatggatggagaatggaagaactctccttgattcctttccaatcctgtttatcccattatggaacatggtctatgtgtgagagcctgcactgttgtcttcattaccatgtcatctcaacatttcaatgcaatttcgttaatcttttcaaaaggcaagtcctaattgatacatattttacatatggtgtgtttacatataaaattaacaatacgtggctagccacgtaacatctacctagtatatatatatgatgttaaattctagttgtttccatttcacacacacactcacataatactagttgtttcaatttctcacacacactttatgtttcttgttcccatttaaaggttatgttgttgttagtgaaatgtttgttgttcccattagaacaatatcagtaaaatagttctattatctttctatttttactgttctaagaatgaatgaaaaaagtttaaaacaacaaattagttataaaagaaaagaagttataatctggtgtattcttttcaaattttcttttttaggataattcttcaactgagtagttatatatatctatagtatataatgaaaattcacttaccatgtaagttggcatatgaaaataaaatatatgggtacaataaaaagctgaaatcgttaaaatattattttttatgcaacaattaatattcaagagtaaaagaaagaagaaaaaaaagtcattgatgaagtggtactttaaatagtaaatagctcctcctgaataaatgggatttgcaacctcattgcaattgagtaaaagtaatctatcaaatcaatccaaatctatctttataaagcaacaaaatcaatccaaatatatgtttgtaaatcaacaaaatcaatcctaatatatgtttgtaaagcaacaaaatcaaaatcaaatctatatttgtaaatcatcaaataatatttgtatactatactgacttttttagccaaactaaatgatgtgcaattttgcttaatcaagcaataatcaagttttgctagtttttcaaatttctgcaagtctttttgttatgtcaaggttgattgtattttccgcatttgatttgctttgttcgttttttgtttttctgttataaaggtttgcttcttcttttctttggtcttcccactcttactttttcttttggaggctgaacttctcatgatttaacatattcaggtacctcccatgtgtcttcattaggaatagggtatacaatttctccataagttgcaagcatggcctcctttgtgtaatatgatgagcaatattcatatgcatctttattcatatcttttagaacagc

SEQ ID NO: 82361 - DNA, 1282 bp, Cannabis sativa
agtcatctagatagcttgacttcgctaatggattcaatccattatcctggttgggcatttgttgggcctatagtaactgaattaagcaatcttgaaattacacgtgtccttcttctgaaaacacaaataactgtatgaaaaaaaaagaattaatttttgaaaaatataagttcaataaatttttttaacaaatttctaaaattataatttttaatttaaataatagtataaaatggtataagatattgtaaaataacataaaataaaattcttatcttaatttgttctctttggttataaatcaaagataggataaaataattgtgtttgtattatcaaatagtgattaattttttacacacgaacgatttaccttaaaagtgtgtggagaggttgagtcaataatgactcttaaatacgtttttccaaattttctaagatttttttgtctgcatagatagtttgggcttgttgtatacgttatacctatagttcaatctattggtcatttgtatagattttgatacgtcatatatttacaagtttagaggtgtggatgagtttattagagttgccgaaatgcaactaaattcttctagagttactcgatgtccttgcataagatgtgtgcattttaagacttttgataatattagggttttttggacgacagtaaaactttctcgcgaataatgtggttttacgggaaagttttaccagtgcaggatgtcaccgacaaaacattttagtcgaggctcaactggcgactaaaaggcagtgggccacatttcaccgacaaattttggtgcaagtgaaaactatatatgccagcgaaggtcctagttcgtcggaaaaacttcaatccttctccgattaaaaacacaccgacaacttttgctggcaaatttactcgccaacaaaagttccccgatgagtttagttgatttttgctagcgctaaaagtcactgacaaaagcctcttctcttgtagtgaccacaatccataaacaaccatttcccccaattccaaacattatgcaatcaatctatcgccaaatccattgtccccaaattctcaattaattattaagcgttagccacaattcaatatttaattcacatacaatcacctccccaatgtataagaacataataatggtagctattcggtaagtcctcagcaccgccttacctagacaggcatcaaaagtgatagtctcctatgagtactagtcctttgtatttctcgaatggtaggatctagtctacagtgactcaaatt

SEQ ID NO: 82362 - DNA, 2201 bp, Cannabis sativa
aagagaagtcgactgccattgatgatctttgatccaaaaaagtgcttcccggactcccattgcctctgctacttccggttctacttgaccagtcaagaaggtagtgcgaccttcgagcagaaagccatttgaatctcgagccaccatgccaaatccacagccattctccctttcaaacatagctgcatccacattgatcttgatactattaacctgtggtaaaatctaatgctcaaccccatcacccgcctaactaccaggccatgattcctctatagtagagttttgagcatgtctccgttgatcaagatatctatttgctgaagcaacaatgtcaccagcccgcgttacctttttgttccacaccaagtcattcctagcttcccaaatggcccaacaaatcatggctaagacacaacgtttttccacatccaaagccttaaaggaaataatacaccagtcaagaaaagtgttaccgggcataccactagtgcctattcccacccgattccaacaaagtgtagattcaggacaagagaccagtctatgaaggatagtctcatcttcactttgacaaatagggcatagggaggtcacatgcacatgcttggtgcgcaattgtaccattgttggcaagcagtgcataccagccctccacatcaagtttttgacttttggcgggatttttaatttccacatatgcttccaataagcccccagctccttgtcattcccgttccatcttccttgggtatgttgaagaagattatatgcacttttaactgagtatacccctgaagactctttagaccaaacaagatgatcattggcttgggtcaagtgaagtggtatctttaaaatgaggagtctatccctttcttcaaacaaatccgaaagtatttccgtgtcccaagaactaccatcaacagttaaaaggcttcctaccttagcttgctcaagagtcgggtgagacgagatgatgaaagggttgtcatcatgaggaagccaagattcattgaggacattgatatcattgccatcgccaatacaccaacgaaccccccttttgacaacttcctgagcctcccaaatacttctccacacaaaacttggattattacccaactcagcgttcaaaaaagtacctcttggaaaatatcgggctttgaagattcgagaggccaaagcttccggtcttgtgagaagacgccatccttgttttccgagaagtgccaaattaaaatcacgaaggtatctgaatcccaggaaaggtaagaatattttaatttgacaaaattaccattattagaacatgtaattattttttgtttatagattttttaagggcatatttgtctttttcatttttaattaataaaataaaaataaaaataaattaagttaggaaagggaagtatttcctataaaaatagagggagaacctttcactttgtttactccttaatttgtgtgagtccccctactttatcgattttccaaaatttaatagacaattatatgggaatcaataccatatcatttatttccattccctttaagtaaacatgccataaaagtaaatatccctacccaacatttttatataaatatataaatataaatggaccatttatatttacatacatagttatatttatatatttccctatgtaagagcatctcttcatttggcatttcaagatattataattttattttttatataacaatttatattattataattataaggaaaatttgcagcgaaagtcttcaaaaagttcagtttgatatagataagtccccaacctcaaaaaatggcgttaatagtgctcaaggtcatactttttatttgtccattagtccttactgaatcgtttacttttttaaaattgacatgtgtcaaaatattattggtcaaaattattattattttaattttaaaaataaaaataaataaataaattatttaaaaataatttcttttatcttttttttttctttttctttttctttttctttcttttcttcgtctttctcttcttctcattgccataaacaatcaatcaccaaccccaatcccaaaccagcacaaccatcgtcttcttcttcttcttcttcttcttcaataaagatatggccgacggtgagatctgccattgctctggttcctctttgataaagagtacataatccttgaa

SEQ ID NO: 82363 - DNA, 876 bp, Cannabis sativa
tcctccttctccattagacttcatgacataagggaatcgttgaatttctcttttttgccattaatttttccagagccatcgttgttgtgctttccaccaatattctcattgttggagaattggcatagtctgcgctggtcggctcgttggatagcacttagggaaatatgatgccttgtgtccattcaaaattgacctaccctcttgtctgggcttgtcgaaaagcctccttcaaacttatgaagccatcagctcactcaaggaactccttcatgtttctcgttgcgatccttctgatatatttttagaattcactcaacagcaagatgcctccaagtatggccgtacatcggccttcttagttctagcctttgaccttggtggccttatccatgaacctttgaatgtagtctttcaaaggttcatcatatctttgctttattttaacaagatcctccaagtcatgaatatatttttcttgaagcagagaattaaatatagaactgtcgagagaattcttcctaagaattgaatcttcctggggcttacttgaaagactactttagggctatttcagttagggttgccagaaagattcaacatcgcacttcttcagatacttgtttaagagctatttggatctcaaagtactttaggtgtactacgagatcttctttcctcgagtacatcttccaagttggaatcttgaacttgggaaagggcatggaaatcatgtatgctaagaaaagtgaaccccttgacctatccagttaaggtctaatggtttcgagcatgccaagcccttgatcatgtctcttatttgattcaattgtgcttgcacaaaaggatctaatgttgtaggagccaggttgattg

SEQ ID NO: 82364 - DNA, 1830 bp, Cannabis sativa
agacggtacttcacaaaatttatggcacaacgacttgaccatataagtgaaagggtttgtaactactcgcaaagaagttccttttattggagaaaggtactctatatgatccttgtgagcattgcttgaagcaacatagggtcttatttaagaggtcctctactaagaaaaatgaggtactggatcaagtttactctaacgtctgcggtcccattaaagttaaatccttgaaatgagcaaagtattttttaacatttatagatgatgcatcaagaaaggtttgtgtctatatgctaaagatgaaagaccaagggcttggatttttcaacaatttcatgatatggtagaaagagaaattggaaagctattaaagtgtcttagaacaaacaatgaaagtaaatacacttctcatgagtttagaaattattactctaaacatgggattcaatatgaaaagacggtacctataactcctcaatataatggtgtagcagaatgaatgaatcataccattatagaaaggatcagatgcttgatgagatcattcaaagtaccaagaccattttggggagcagcaatacaggctgcatgttatctttttaatagatctctattaattccattaaagttttatattctagaaagagtatggacaaggaaatatgtgtcatactcacacttgaaggtgtttagatgcaaggcattcatgcacgtactaaatgaacaaaggttcaaacttgacgataaagcagttccatgtatcttcataatgatttgggtataggcttagggatccagttaacacgaaggtcataagaagcaaagatatggtcttttatgaagattaaataattgaaggtgcgagagaagaaaagagtcaaccataaaaggttgacactaagttatttcctccaaaacaataatggtcaaactatgaattacaagaagttgttgagatgtcccatagtgatgatagtgatgctgaagaagatgtaccaacacaagaaaacatcaatcagggggagcaatgagtaccagcaaccagaaaatgagggatctcacagttggttaactagaagactaattaaatacaaaagatatctatagttggagtacattcttctaactgataaggggcagccagagaattaccaaaatgtagtggctcataaatacaaatacaagtggataggttccatgaaggacgagatgaattcccttacgatgaacaacacctataagttggtgaaacttccaaaaggcaagaaggccctaaggaataaattgtgtttagattaaatgatgatggacatggaaacttggtaaagtacaaagactgattagttgccaagggttttggtaaaataagagggattgattttgatgaaatacttttgacagtagtgaaaatatcataatcagaataatctttggactagtagtgagtctagatcttgacttttaacagatggatgtaaagactaaatttattcatggagatttagaagaacaaatttacatgcaacaatttgaaggttttgaggtgaaagagaaagaacatcttttttgtagagtgtgtagacaggctccacgacaatggtaaagaagtttgattcattcatgatggtattggagctataagagattagcggcagattcatatgtcttcataaggaaatttcctaatgaggaattttttgtcttattaatatatgtgaatgacatgttaatagtttctcaagatggtaagatgataagttagctgaagaaagaactatcaggggtcttcgatatgaaagacttgggggcagccaaacaaatcctaggaat

SEQ ID NO: 82365 - DNA, 2779 bp, Cannabis sativa
  modified_base (455)..(455): a, c, t, g, unknown or other
tagtgcttgtactgaggtgattgattgcattcagtcacgggttactagccaaatgaatgaggagttgactcggaatgtctctacagaggaagtgaagcgagcagtttttgatatgcatcctgataagagccctggtccaaatgggatgacccccgcattttatcaaaaatgttggggaattgtttgcaatgatgtggtcagccttgttcaacaatatttcagtacaggagtttttccaccgggttgttgtgacgctaatatagttcttattccaaagaagaaaaggctcgaaagaatggttgacttaaggcctattgcgctatgtaatgttctgtataaagtgatcaccaaagtcatggcaaaccgaatgaaaccttttatggatgaaattgtggcggatactcaaagtgcgtttattccgggtcgtcttatttctgataacatcatggttgctntcgaagtgcttcattatttaaagcggaaaagaaaaggaaaagaagggtacatggctctgaaattggacatgagtaaggcttatgacagaattgagtggggctttttgagagcgatgcttgctaaacttggcttcggtcagtcttgggtgaacttagtcttaaattgtgtcacttcagcttgctataaggttactcatggaggacgtgacaatattggccctattgtaccaagtaggggaattcgtcagggggatccgttatcgccatatatttttatcctttgtgctgaaggactttctgcgcttattcggaagtatgaagatcggggctgggtacatgggtgtaaggtggctaatagcgctccaaggatctctcatatgctctttgcagatgatagctacctctactgtaaagctactattgcggaggcggtgaaaattcaagagttgcttcacaaatttgagatggcttcggggcagaaagtgaatttgaacaaatcttcaatcttttacagtgtcaacacagacatcaggcagagatatgacattaatcagttattgcatatgatacaagcggatgaaaatagtctctacttgggcctgcctagtacactggggagaaataagtctgcagttttgggctacctcaaagatcgagtaaggaaaagacttcaaggatgggaagctaagatcctttctcgtgccggaaaggagattctcataaagacggtggctcaatctttaccgaattatgcaatgagtgtttttctgttaccggtggagattggtaaagatattgagtgtcagatggcgaacttttggtggaaaacatcctcgaggggcaacaaggggattaattggatgtcgtgggatcgtatgtgtaagcataaatcagtgggtggcatgggctttcgtaatttacgggacttcaatcttgctctccttggaaagcagggctggcgtctactttctaggccaaactctttggtggcacgagtttacaaagcacgttacttcccaaatgagagtttccttacagcacaattaggaaacaacccaagttttgtttggaggagtatttgggaagcccaagatattgttcggaaaggtacaagatggcaagtgggagacggcggctcaatctctgttttgggggatccgtggttgcctgatgctgataacccgtatgttctttcatctcatccaggcttggaaggggtaaaagtttgtagcctcatgtgtccgaatgatagatgttggaatttggagattttgcagaacatgtttggggatagggatatcagtctgatcaccaaaatccctttgcaagtgtccccgtatcccgatcaatatttttggcatatggagaattcaggcctttacactgttaagagcgcgtataaccttatccaacagagcaaggggttagtctatgaagatcatttctccactttttggaaacaattatgggcgttacgcattccaccaaagctcaagaatttgatttggcgttcaggtacgcagtgcctcccaactatgtgtcaattgcttactaagagagtggcagttagcgcattgtgtcctgtgtgtgaacttgaggaggagtctatccttcactgcttgtttacttgccatcatgtgcatctttgctgggaaagagtagggataggaacttaagtacctgtcaatcataattttttatcctggatggctcttcttttcgagaagcttgacgttgaaatgaaagggatggttgctactctttgttgggcaatatggaatgctagaaatgagctggtttggaaacgaaaaagagtgggtgcttcagatattgttgtgtcggcaaggaactatcttgaccaatggagaaatgctcagaaatctcaaaccgagatatcatggcctggtttccaggtgggtgatggtgctgagcaatgatcttgtccacctgagaatagtgtcaagattaatgtggatgcagctttgtttgaagatgggaatcgggcgggtgtgggagtaatggtcagggatgccaagggactcttcattgatggtttcacaaggatgtttcaggaaacgttagacccagctcttgtggaagcaatgggagttcgaggagcgctaagttggttgaagagaagaccaaggcaacagactttcgttgaaactgattgtctatcggtggtgcaagcacttcggagtcaagtgaagatgatttctttatttggtattgttatttctgaatgtaaatgtcttcttcaagagttgaaaaatgtctcaatttgttttattaagcggtcggctaatatggtagctcattgtctc

SEQ ID NO: 82366 - DNA, 694 bp, Cannabis sativa
tttttttttttttttgacatttaatgagaaagaattcgaacttacacctcttctttgtgaggagaaatatggagctactaactatacctatgaccacaatctataaaatttagataacatactatttaataaataatattaaattaatataggaatttttatttaaatattaaaaaacattctaaaatatcattttaatactcaccttaatgaattgacaaataaagttcacaagaatcttactacttatatagaaataaataattgcaactttatttattacataaatttaattgaccacacctgattttatttcttttccacgctggatcaaaagttcatatcacacctggtatatctacacaaatgacaaaacagtaatctaaaacaaagcaattacaataaccaaggacccataacggcaccaaaatcacagtcacaccaacaatgatcaaccagatatttcaatggatttgacatcaggcttcttgatctcttctttagggactgtaacagtgagtaccccattttccatggcagctttgatctgatccatttttgcattctccggaagcctgaacctcctcatgaacttcccgctgcttcgctcgacccggtgccacgtgtcgttcttatcttccttctcaacgctcctctctccgctgatgtggaggactcgatcatcttcgacctc

SEQ ID NO: 82367 - DNA, 1209 bp, Cannabis sativa
ggtaaaataatatccaacagacattgtgaaggatctgtttgcccctgagattgctgctattatccttggcattcccttaaatcaatctggtggagtcgactcttggtattggattgcagaaaagaatgggttttattcagtccgaagtgcgtacaatttgcttcaaaagcttaaacatcattcggatgactcagaggtcattgtattctggaagaaattatggtctctcaaagtgcctcccaaggccaaggatctcgtgtggagggcggcttcaaactgtctcgccaccaaaaggaacttgtgcataaataaggttttgtctgatagtacttgtcctatgtgtggtgtttttgctgaatcggaatggcacatcttggtgtcttgcaattttgcttggtcatgcttcggttatgctggtcttgctgctgttgagagagactcgttctcttctttgctggtgtggttggaagctactgctaaccgggttagcagtgttgagttaggcaaagtggtgatgctatggtgggccatttgggctgcgagaaacgatttttgtgttgcagcagcgtgcgagaagtgtgagtgctgtggtggcttttgctacatcgagtcttgatcaatggtcgaatgctcaaggaaagggtaatattcccttgatgtctcctctcaaagttgaagatggtttagagcggtgggttaaaccgatttcaagaatcaaacccaatgtagatgctaccctttttgcttctcttcataaacacggctatggatgtgtggttaggaactctgttggtgacctggtgtcagtttttgcgggggttaagtccggttctgtggctcccgaattggctgaaataatggacattcgggaagccttgagttggctcaagaacaacccgtattcaaaggccactattgagacggatagtcttgtgtgtgcagcagctattagaagtgcagaaacctttgcttctgctttcggcttggtggtggatgagtgcaaaaatagttttaaaagtttgtccaatgtttctattgtgtttgttaaacgttttgtgaatcgtgtcgcgcactttgttgcccggcactctatttctctagctgaacatatatttcctattaacagtgttccttcggacttattgtctattcttgtgagcgattgctcggtttaataataaagaacacttattcaaaaaaaaaaaagtc

SEQ ID NO: 82368 - DNA, 1399 bp, Cannabis sativa
aatatattatttatattacgagtccttaaagataacttaaatatattgatggattacggggactatttatatcaataagatatatcttcttttttggtggaccatcactacttgagaattttaagttgagattcttaaaattaagtgtgtttgacttagagtatccttctaatcagtaatttattggaaagttttcttaaaaagtgtgcaaataaagataaagcacgttaaaaactcgtaggaccaatcattatttcaaaaaataaaacttaaagcgacatgttaaaagatttgttgatgataaaagagcaactcgattaattacaaagataatatttttgataacaatatttgtttaaaggcaaataacattagtcattagcttgaattcatattacatatttacatgtctaattttgcatattttaatttaaaatcaatttaactttaaatatgtagaaattgatatttggtattgggtgtaaataatactttttagtattttttttttcaaacaaattctttgaattatactttctctaaattaagtagattgtatattggttaagtaaaattttattaagataatccaaagcccataaaaccggtcaccatgctatcatcaccatcaaaatattctcatgagtttttcttaattctactataccaatttctccacaaaaaaaaaccaataactctttccatttctagtgtgattaattagtcaacattctcaagttaaaagtcatacaaatccacatggttgtgttgtgataagggcaccttataaatcatagaatgattctcacaagtcaaaacatgataagtggtctttgggttcttattacaaatttagcataaggtaataaggtatcatttaaattccatgcttatctaagtcatttagggataaatatgataagtagatatttcaacaataggatatccttataaatttgtaatacattgtacatatttttcatatataattaagtgtacaaattatttcgacaaataagatatagaaatttatatataaatatcactttatattcaaattcgtctttttagctttgggcacaagtctaaagttctttagatcgaaattagtcctgtgtggtcacaaacatagcctttttgaaaataagcgtaatcgtaccattagtaatcaaagttagacttcgcggtcattacataaaaggttctccggaaccgaagcaaccgaaataatcccgtacaacttgttaataaaagcccaattagccacattatgggctgcaaaattacaagttcgattaacatacataaaattacaacaattaaaagagggagatgacttagcacaaaatgagatataattgtcaatcgcccaatgagactccgtcccattgagagcatt

SEQ ID NO: 82369 - DNA, 2540 bp, Cannabis sativa
caagttggcattcagcgaaaactacaatggcatagtattgaatatgattatcttaaagctattcagttgatccaaaggaaaaggcctatcaagatgttgacaaaatactagaccatattcgtcattcgatttgagaatgtagttaggattttcatttgtatatcatgaagcaaataaaaattctcacacacaaaactattgtcatgcaaattggagttaatctcctttgtgctagtctcgctttacactaacattcaccatgatcaaatgaaatttttttacacattagacttgtgcaaaaattacatatttatattatgctattcaatgtggcaattacaaaatagccaacttagtgtgtcacttaaagaaaagggtggttggtattagtaattcaacttagattaacgattaagagtacatttgggtttggaagtaaaaacaacgaaaataattatgttttaattgcacattggaatgacattttcatttgttattagggttggaataaccattccttttagggacggacccactttgaatgatgtgggggctatagcccctactaacaaaaatattgccttttaaaaaattaaatgcaatttttttaatttcataattatagattaaaatagtagaaaaagcccccacaaaattaaataatttaataagagtaattataatatgtgtataaatattttttaatgataaataagctcacaaagtaaaaattctgggtccgtcactgattccatatctaaaactgtgaaaatgtcattctaatgctttaaatttatatccaaacacagaaaatgatggatcaaagattcactttcgatttcaactccttatctccaaacaaccgaatgcctaaattaattttcatgtgggtttatgagaaacgccattaggttgccgagggatcgtttatcacacctaaaaactcgtcctttatggtaccaatgcaaaactatgaagaacaaaataaaatgagacattagaatagcaacacgataatgttatatactctaaatactacagacaattttcaaagcaatagttttaggaactccaattacctaattttacgaatctaatcagaaaaattcattcacttttgaactaaaagaagtgatctcatgatatctaagttttgaggggaaaaagatacggttattaactgatatggtaagtgtaaacagtcttatttcttttctaagaaaaagggttgaaaagcatacaatttctttctgttccaattatctttagtctcacttcactatctttctgaatcttaacctgcaagatccaacacactgaattttttaaatccacaagatcgattaattcgaaaaaaaataaattctattatccataagtttaataacaactctatataagttttttatcataaatacgtacggatccatctgaagtggtgtaattgggcatatctcctaactggaattccatatcaactacaatccacccacgacaagatacacttacatttagatatataacacttttaatatcgatacatatattattcagcgaaaacttagatataaacttacatggtttgaaacaaaaatttgaacaggtccaacttcagcgaaaaaccccatctgtaatttccagatgttattgtacactctcactttgattagaaacacaaatttataatatttaatgggcatgtatgtcataaagaaataataagcgtaccttatttaccatactaacaacagcttcaagtatctctcctttaaattagagtgaagaagtaacaaaagattgaagagatactactatcctaggatgtcaaaataacatttcacatccaacaaaacaatagtaacatttcaaggaccaacatctatgggactattatatcctatgatgtccaaatactacatcttttccacataattaaaattgtaactttaaggtttttcatttacaaacttaagagtactaattttattgtcctagggaaacaaacaaatcaaaagaagaaaagaaagaaagatagaaaaagatgctttcttttttcttttttccagatgaacccattttattgtctttcatcagcttggagacgatattatctcgcagactacgaccaaagtgtcgtggatgaagctgtatattcctctctaatacaatctggaagaatctgatgaatacaaagggaccacaaaatgtgaggcttttttttataaacagatgattaaagtatgcacatctgaaacaaaacttgatgccaaattagttggagtgatgcaacaaagagcaactcaaggaacttcaatgaaatcatttgatagcataatcttaaagttcccaaagattgatgagagcttcagaaattgcaagactacttttcagctctttggtatgtatgtatatgtatatatatgtgtgtgtgtgataggtaaagaggtcctttttgagacaggacaatctcaaagtgaactgaagcccttacactatgaaatagtgtaatagtgtgtgtgtgtgtgttcaatttcccaaag

SEQ ID NO: 82370 - DNA, 618 bp, Cannabis sativa
gttaagggaaagcgatcaaagtgagagcagagaagaaaagcgtacgacaacgacaacagaagagaataagaagaacgagaatgaatttgaggaatgagtggctgagtgaagcgccatatttataggagaccagatggtagttgaccagatgatcagaattgggaagggaaggaattgataatctgggtcaaataggagaatacagaggcagagcaagctgtattgggtttggttttagttttggatttgattggattggaggaccaaagaaacgaaaacaggtggctgaaagcttccaagttttaatatacttcctttttgggagacattgaggaaatgatgatgaaggtagaaaaggagaggtcctcgtttcacattcacaatctcttggagaaaatatggcagggacattattggaaatctatcagttctattctagaaatttgcgttcaatcttactttttttctttaacaaaataaaataaattctttctttctctaattcttaaaatatgtatatataaaattattaaaataaaaaattattttaaatatatcaaaataaaattaatttatggcatgtttaactttcagttttataattttaaaatttctgta

SEQ ID NO: 82371 - DNA, 3146 bp, Cannabis sativa
cttaagaatgatgttttgaaaaaccctgaaaagaagaaagagattgagaagttattgaatcctattcctaatcaggtggttttgatcagttggtttctattggtaggcttattactgattttcaagatgggagtgatgctgcagattcgactgtgactaatggtgttgatgatgctcttgataaagatatcggtgttgctgttgagattgaggggaatgaggatgatgatgaagagagtgatcttgatatggtccaagaggaagatgatgaggatgatgatgatgtggcagagcctaatgaatctgggggtatgcaaatgggggctggggttgatgatgatgatatgcgggaagcaaatgagggtatgactcttaatgtccaggatattgatgcttattggctgcagaggaaaatttctcaagcttttgagcaacagattgatccacaacagtgccagaacgttgctgaagtggtgcttgggattctagctgagaaagatgatatggaggttgaaaacaaactggtgctggaacttgagtatcagaagtttgatctcattaaatttctgctgcgaaatcggctgaagattgtgtggtgtactcgtttggctagggctgaggaccaagaggagaggaagaaaattgaggaggaaatggttcagttgggtcctaatttggctgcaattcttgaacagttgtatgccaccagagccactgctaaagagaggcaaaagaacttggagaagagtattagagaggaggctcgaaggttgaaggatgagagtggtggagatcctgaaaggagtgggagagttgacagagattccgatagtggttggttgaagggtcaattgaagctccttgatcttgatagccttgcaattcaacatggtagactttcttcaaatcataaatgtatccttcctggtgattcatacaggcgcccaagtaaagggtatgaagaaattcatgttccagcattgaagccaaagccatttgatcctgaggagaagcttatagagatatcttccatgccggagtgggcacaaccggctttcaaagggatgacgcagttgaacagggtgcagagcaaggtgtatgagactgcccttttcaagccagacaaccttctcctttgtgctcccactggggcaggaaaaactaatgttgcagttctcaccattcttcaacagctcgggttgcacatgaataaggaggatggcacaataaaccacaatgattacaagattgtatacgttgcgcctatgaaagctcttgttgctgaagttgttggcaatctgtctaatcgtttgcagcattatggtgtgacggtgagggagctcagtggcgaccaggctctaactcgccagcagatcgaagaaactcagatcattgtcacaacacctgagaagtgggacatcattacaaggaagtcaggtgatcgtacgtacacacagcttgtgaaacttctgattattgatgaaattcaccttcttcatgataatagaggtcctgtgcttgaaagtattgtagctagaactgttaggcagattgaaactaccaaagaacatatccggttggttggcttatcagctacactgccaaattatttggatgtggcattgttcttaagggtcgatcacaataagggacttttccattttgacaatagttataggcctgtccctctttcccagcagtatattggaattacggtaaggaagccattgcagaggtgtcaattgatgaacgatctctgttatgaaaaggtgttggctgtagcggggaagcatcaagttcttatatttgttcactcaaggaaggagacagctaagacgggtcgggcaatacgtgatactgcacttgctaatgataccatcggtagatttttgaaagaagatagtgccagccgtgaaattctccataggcacacagatcttgtaaaaagtaatgatctcaaagatcttgtgccttatggttttgcaattcatcatgctggtttgaacagaagtgacagacagcttgtggaggatctctttgcttatggtcacatacaagttttggtctccactgctactcttgcttggggtgtgaatcttcctgcccatacagtgatcattaaaggtacccaaatctataatccagagaaaggagcctggacagagctaagtcctctggatgttatgcagatgcttggtcgtgccggaaggcctcaatacgattcatatggtgagggaataattattactggacacagtgagcttcaatactatctttctttgactaatcaacaacttcctattgaaagtcagtttgtttccaaactggctgatcagttgaatgcagaaattgtactaggcactgttcagaatgccaaagaagcttgtagttggcttggatacacttacttgtatgttcgcatgattcgaaatcccactctctatggtttggaagctgacgttctcaagaaggatgtgacattggaagagagacgagctgatctggtaagtttttatcttttctacataaacttgctttgtgttattcaagagtaggtttcttatgtagcagcaggaatcagaagggtggccagggaatcatcttcgttcatagtgttttttatttttctatttttcgtgtcatgtttgtttttcttgaaaattaactaattcttgcttcagctcaatatcataggttttattttaatatgctcacttttttctttttgtgattctttgcagattcattctgctgctaccatcttggataagaacaacttgatcaagtatgacaggaaaagtggatatttccaggttacagatttgggtcgtattgctagttactactatataacacatggaacaatagctgcatataatgagcatttgaagcctacaatgggagataccgagctttctcatctgttctcactcagcgaggagttcaagtacgtgaccgtaaggcctgatgaaaaaatggaactagcaaagcttctcgatcgagttccacttcccgtcaaagaaagcttggaagagcctagcgccaagattaacgttttgctgcaagcgtacatctctcaactgaagcttgaagggctttcactgacatctgatatggtgtacataactcaggtttttatcttagcc

SEQ ID NO: 82372 - DNA, 1025 bp, Cannabis sativa
gatctattccgatcaactctttaccggagaacattttgtgtaatgaccatgaggtctaatatctatctaatatataactacgcttactatcaaaaaaaaaatgttaaaaataaattaaaaaataatttaattttaattatgtaaaatgtcccatctccattttggagctctgagattttgatttcttggactaaactcaccaaatcgaagccaccgattccaaatcctacaacttttcccttcttccaagttgcaccacctggtaattttccatttcttgtctttgatttcattctctctctctctcctttattttctggtttggatttttctcagaaactttggtatttgattttcctttttccttgtcttaatgccattaagagatttatgtggtaattgatttcaatgggcaagtagttagtttttctgtagctagaatttagggttttagattggatcaaattaaagtgtttttctttgatattaaattttgaaattgaagtgggcaattctcttcagaagattaggattaaattcatctggttgtttgattctccatagtgttctacattggcattcatgatttagaaattgtgtgtatattattaccatttgaattgaaatgttataataatatgaataggtgttaataatgaatcatacaaatgggattgttctaatctggatggaaagaagcttctgattttggttcaataaacaaatttctgtttctttcatgtgaatcaatcccatttgtatggtgtttgttcttatatatcagtactgtgttgataaactgtttgatgacattgagaaacttctttccaaataaaatctaatttatggtttttctaggcaatttgaattgtaattgttagctactcatagtgacaaataacttaccttggaacaaagttgtgttgttgattaaagagataattttgtagttgagaagcaaaataggcaatgcttcattagtaacatgtttagagaagtaatggaccaaaatgatttgaatagct

SEQ ID NO: 82373 - DNA, 2100 bp, Cannabis sativa
attaaactcaaataaaaacaaaaaaaaaacaatagaacaaaacaaaactataacaattgctatgtaggtactaaaatttgtaaatgaattaataaatagacttacaaattatcttcatcaaaagagccaccatgtataattgaacctggaacaagagggtccttgagaaagcctgttagtctctcaaaatggcgttgatttactattctggctatgctctttgactctattggtttctcaccataaaatctctttatagttttctttaacatttcgatctaaaatacaaaacaataaatcatcaaaaatttcttatacataaagccaaaaataattaattaaaatgagaaagttaattaatatgctaccacagttggagcaaagtttgcctcgaccagaagataatcaactgctatacatgcttgtccactacaagcccccacattgctccagctattcttttcactgcaacctttatggaaaacaaaatccatgtatatatatataatatttcaacatgatttcaacattaaccatattgtcatttctcagtttgtgttatcattcatgttaccttaaataagaataattgcttaaaatattttgtcacataagtgtgttagatttatgtgtaatttatatatgtatggacacatattatttgtgtgaccttaattaggccctaatacacactattgaggccttattttacattaaaccaaaatttgaggctatttaaattttatgcctaatttgctttatggttctaagttttagttacaagcaatacttttttactaccaatataggaaaagatctcatggcaagcattctttgagtatagcttatataattttcgcattgggtattcaaataatttagattttagagggtatgtcatataaataaattttgtattatatcttatctcatatattattggtccttatataaaaaaagaatttatataaataaatataaacaaacaaacctttaaatctgaagttgttgaaagggaatctagtatgggggacattttcctccaagctccaaagtaacaggtgttaaatgcttagcagctgcagtcattactatgcgtccaatttgtgcactccctcgtaaagtatacaataatacatttcaaaataatttcatttctagtatatatactttaacatcacattaaataactaattaataaaaaagaaaaaaaaaaagaaatcttttaataccagtaaaaaagatcttatcccacttgtgaagtaaaaatttttcacagatttgaggtcctccctcaatgacttgaatagctttggaatccatgtaaagagggataagattagcaagaacagaagaacaagctagggcgtgatttgatggcttaagaaccactgcatttccagctgatattgctccaatcaatgggtccaatgccaaagctattttgtatttattttgtacaaacaaacatgtatattcatattatgcctaatttttagctttattctctatcttaagaaaaataaatctatatatatatatatattgactcacatacatataggaaagttccaacaagaaaatattagattaacaccaagtggttcaggctgcaattctccttttgcaaggaagaaaacaagtgggattggacattgttacaatacaattctctgtaagcttcagcagggtgtttaccaagatcacgaaagagtgctttagagagcttttgttcattatcttggataagtttaatgagtgttgtgagttgtaatgtattagagcggaaacttgtgaaaacaaggattaagaatggattaacagggtaaatgaaactgaagattacaggaacacacaataggatactagggataagataactataggattgtaacataaatattgtcagtgaaaaaactcggagctttactatttggataacaatcatcatttataaagtgctatttatatctggagtatgtaaatgaaaatatgaagaacaaaagattgtatgtcggtactcttacctccataaagatccttcttagtgaagtattttgccatcaatcggcgaatgtagttgtgacagtcagtagtccc

SEQ ID NO: 82374 - DNA, 1279 bp, Cannabis sativa
tgccaatagaattagtcaaaataaaatcactcactcacaatcgtgtaaattaaggagaaataccatgacttgaataaagtataaatacttttgttcaaaatttatttactttatttctaagcactaattgaattgaattagacatgttaatttgtccaatatttgaacatgttggaaatctaaataactaatccaactaatttcatttatcttattaagggtgagataatcccatacaggtattttttttttaattttaattttgttaatatattttaaatttaataataatttaaataaaaaaattattacaaatttatttataattttttttatcaaacttattcagtgaaaatatataattttaaattatcatacataactttttaaaattaaaaataatattattttcaaaaaaaaaaaattaaaaataatattaattaaacaataattacttaaattaattagttttctatttacattgtcaagattaggagggaaaataaaatagctcaacaaaattttttaacaacccaacaaaattaagaaaatatgatttgaatgtagactaaaaaaaattctatttgtttaaaaaccaattataaatgccaatagccaagggagactccaacctcaaccttttaaaccagaatatttgttcaataaaagtgtttccaaccaatatggaggttattgtaatttttttaagcagcttcttcaacatgattggtacttttggcaatgtaattccaaaacaagtattctcagctgtgcaaacattctctccaaatttctatgaaatttgaaaagtacagcatgaaaatataaaacaagctgaatttctgctaacctacgagacttggcaaggttataaaattgtaaaaccatatcttccaaacacattacgttaagtattgtatgctatatcagacagtacacattcatgcatttgacgccttacgtgtcaaaatactctaaactttgcttctcatataagaacaatatattgcataagccaactcaaccttaactggattgttgtttgtgccagtgattcaatcatcagtgccaaagtagcggtcgccaaactcacccataccaggaatgacacgaaattcttcatttagggcgacgtcgatctctgaagtaacaatctttaaggatggaaatcgtttgcagacacagtggattccttcaggagcctaaaggtcaagaaaacaaacagtcagaccagtcaatgttaagatcaagtattactaaatcttctcaaaacaggaac

SEQ ID NO: 82375 - DNA, 1114 bp, Cannabis sativa
  modified_base (136)..(145): a, c, t, g, unknown or other
ataaatttaaagagtcatttacaataacaaaaaatatagtaggagaaatctcccctaaccgaacacaatcaaaatctaaaaatatttaagttaattttttttatagttgtatatattgtaattatttaaaatattnnnnnnnnnnttaaaaaattcaaaataatttaatatgttgtaataaatagagttttaagaatttattgtatgtgtggtttttttttattttatatttatgtaaaataaataatttaattattaatttttatatcttaaattatttcaaattttttaaaattttacatgtattaaataactataactttaaaatctataacaaaaaaatgttggaataaacaatttgtatagatacggaaaagttgcaataaggtgtatcgtagtatcaccttattttattttccttaatttcgtgtctgctttttctattttaatatatatattattttatttatttattaaatggatttgaattcttgtttcaagtccggtcagttgggggcccacgctgcttagtcaatcacggcctttttcttttctttatttctttaaaaggagtttggctcggctcggctcggctaaagcagaaagaaagaaattgatgagatgagatgagagattatttcggtgtgtttgtttggtgggaaaatgagattctaggtgggtacaagggtgttttcggtacaaaatttttaaaaatgagaccttatatttgtactctaaaaatttaacaattattataaaattaatatatatttttgaattttttttcatttatatatttaaaatatttttttttatatttatagaaaaatatacagagcaacataatttgtagtttaaatctacttcacaacccatacaacaaccaataaaacaacttatactgtagaaataaaaaaaaatattaaaaatagtatatagaataattttttttattgtgagtttttaatatatattttatttgatattaaaaattatataaaaattagcatatattaaaaaaaattatctattattaaaggaaatatagaaataagaaaaaaagttttaaataacaataaatttgataatatgagagatttttatatttttattg

SEQ ID NO: 82376 - DNA, 1124 bp, Cannabis sativa
cttaattggctaacttcaaaacaagtactcctttaactaaattgtggtatgtctttgtcattgtttaaagtatttattttctgcattatgcaaaaatatgtcaattattattaatagctaacattttgtaataattcatcattatgacttatcaaaaataaatcgtagttagagaaaattaaaattgtgtgcacctgcaacctatcttcctaggtggattaaatttactagctaggctcactcactcaaaagggtgaacgagaaaaatcaatcttataattatttttattggcttgtttgtctgtttgtatggaaggtgaccgattggaagcattgatatttttgaaatgactaaaaatatgaattgccagctcataagctcttattaggaaattttctcatgtgtatttataattataattagttcttagatagtttaacttctatgcgaatagtattggtcaatgagtgcccatgaggttgtaggaaatttaattctttttttcaaatgttttaattactagtataagaaaaggacaatgcatgagttgtgttaataattagtggattccatttcagttttgttggtcttccctatgtaaattaataaatatatttgggtatactatttaaaggttcatacattattgtctgttcttaagtttgtttttagttatttgataatagatgttccttttttttattgatggtttgcgaaatatgaaactgtctgcatagaccaactgtcagtaaaactcttagtcttaggtggagcaagcccttttacacccttaatttcttttcttttactcctggtgtaatgactcttatggagagtctatagctataaatttgtgccttgtatcacaaaattagattaccttgttgaaatagggaattagggaaatgaatttcatttgacatttaatgtttgtggaagtattatgtaataattcaagtagctggaattcagttatgaattatggatagcaagtgattgcgttctttcagatttcagtccaactatattccttcgttaggcaagtgacaataagcttctcaaattttagttagggatattttgtaacaccccgatttcctgagatgtcacataggatagtccg

SEQ ID NO: 82377 - DNA, 1492 bp, Cannabis sativa
ctttaacaaggttctacgagttgaaatcatcaaaccaggctcttcaaaaacatgtgattttgcccctatatagaagatttggcaagttttctgtactactcatcgagagtgattcatctcacttatgatcataaagtgagctcatgctggagcaccaatcacacaagaaataacccactacactgaagtagtggtctatctcactcacagcagataccttcaacatacaaacttcaaagcttttcactcaagtcacaaagaggaggtcaacgttgcaaaagaagagcagtcaagctcagacagtgtcaacaaaatttaaaacatcatggcaccaaaggtgatggttagtaatcaagcatcaccaactgttgtaatcaaaatagaccctaaaaagagtgggtcactccctaagagatctgaagcaggtgagccaacattactccatgtggtaaaattaaattaccattcacagtcaaaattaccctatggaaaatattactatgactgccttcatagtgatcgataccaagtctccttggaaggtcatacccagcgacctttaagccatctcaattatctacctcttgtctgtcaagttcacgacagtagctggtatcgactgtctccttggaaactaaagagtagaatgcaaatgttacaacacatcattgacattcaccaagaagacctcctcaactgttctaaggggatgaggaacacctctttcgctatgataatagcctaggggaaatggaagacctcttttgttatcaagacaactaaggggatgaagaaggcctcttccattgtacagaagggatgatggagacctctaaggttaagaccaaggataaaatggagaccacacctacaattactctaaggtgcatccgagatggggaaaaaatcacccccatcttgggcatattaatttgagagttggtcacatccttaattgaccaaagaataaccactaactactacaacacattgtttacaatcatcaagaatacctcctccactgtaaagatgaggagatgatgaagacctcctctgctgtaaagccaaggagatgatgaagacctcctctgctgtaaagttgaaaagatgatgaagacctcctccggtgcaaagctgaggggatgttgaaggactcctccattgcagtgacaaggggatgttgaaggcctcttacactataaagctaagaagttgatgaaggcctcctctgctatcaaactgagaagatgaacaacaacaccttagttgaaacacaattgagggaatgttaaagaacttaaagactacaacctaagagaagacaaagattacattaatatttgcatatatagagagtgtgacaagatagtcaatgctaagacaatagtcaaagatcagagtaaatgttgatattccaatgtcagcatgatttcacagtatctcaaatcaaaggaaatcactcaaggagtcatcaacttaacattttgaattc

SEQ ID NO: 82378 - DNA, 1215 bp, Cannabis sativa
  modified_base (42)..(54): a, c, t, g, unknown or other
tcatactttatatttgtttatttaatatcgttttagaagttnnnnnnnnnnnnnttaaataacatacttgttagtaaatctaagatcctggtaaaattattccaacagatgaaccttcacgaaaaaactactcctaaacctacttggaaggtttatgtagatggcgcaggggtagacttaggagtcatgcgcccaagaagatgttgaagtgtaggagattgagatgggtgtggggtagattgagacggtacaatagtggcactcgttttgactgttgtatagttattgttgttgttgttgtggctgttgttgttgttgttgtggttgttactgtggttgttgttcttgtagttgttgttgtggttgttgttactgttgttgtaatggtggattggttaacggtatgttggatgcccccaggtccagggtggaagacttgaccctctttgtgtaggaactcggagaagtccttcatccctttagggggaaagacaagcctgtctaggctgtcatcagaaccccccacatttggtgtggtattaaggattattccttccgaaggggggatgtcctgtaaggtctgctctcttagagtgataagatcttcagatgcctcttaggaggtgacataatccttttctccactagcggaagcagaagggcttggaattgcgggtccaatcttagtaagaggagcgatctcccaaacatgcgatgatgaggaagttaagggaggacgagtttgtgggtcttggaagcccttgtgttgattttccccttgcctctttcttgggagttcctagccttgtccatagcagctgagatctggttgctctaagacttcaacatcacagactctggcgtatctgcacgtgaagcaacaatataagtaagtaaaatagacaattacaggtcatacaaatataagaaaaatatcaataataggaagagaaatctagtaaagaaacttctgcgtgggtgcaaccattcagtaaaatgctatagggtttcccatgagcaaaggccaaaattcccctatgaccaatgaagctgccatactccttaaattgagcaaagacataaccataaaagggtccactttaatagtgtccgaaggagttcctggatttctagggctcctaataatgtggtctactctatctaagtaatccttcatgggttatctatggcgatttatgttggaatttattttac

SEQ ID NO: 82379 - DNA, 737 bp, Cannabis sativa
actatactctatgttcttagttttgtatattgcctgagttcgaatgtatgaggagaatttcaagcccacatgtgctctagagcaagtgttggtattcctattcacaaatcttaagttttacacaatatggttaactctaaaatcacatttaataaaattcacatataggagtccaactctatatatgtaatagagcttaaaacgagctttttaacgatataaagaatgtctaaatcagagtttagagctaaaaattatgcccaaaataaaagaaaaaaattgaattgtcacctcggggttgccgcgaccaatctcggcaaaggctatcccttgttttgggtaaaacctctccgcatccaccgtaagtctggtcgtagcgataggacttgacaaccgagaaaaaacctaaattttagctccaaacatgcacaaattcataccaaacttcaaacataatatcctattggtaactaataccaatttagagtgtaggaaaattcaaaagaaaacaaatatcacatagctaattcacacattcaagctcaaaaattcccaaagctcacataataaaagcttagaatccaaatatgaatttatgttcaattcatcattttcaaagcaaccaacacgcaaccaacacaacctaaatgttaaaaattcatgctaaaaaacacaactacaaaatgacccaaaatttaaattttgctgaactgaagcaacacaacatcactaactta

SEQ ID NO: 82380 - DNA, 1023 bp, Cannabis sativa
tgaaagccctttgcaacaaggcgagccttgtgtctattgacagagccatcagaattaagtttttctttgtacacccacttacatccaatgggagttctgccactaggaagaggaacatatgtccatgtaccatttttctttaaggctaccatttcttcagacatggcattacaccatttttcctctttcaaagctgcctttacattacttggttcttgagaagctaagaatgctttaggtttgtaaatgccagattttgcccgagtttccatgctatgtttgttagtgtgaataccaggtgtaggagatgacagaggcatagttgagctgggaatggtgggcataatgggagtggtgtgagtgtttatggtaggtgttggttgaggatgtggaggcatgttttcaggggagacaattggaggaattggtatgtctgagactgagggaaaactgagaaactgctcatttcgaactgcaccagaagaggctactggtgttgcagcagatgcagaagcatcagcagatgcagaagcatcaacagatgcagttgaaacattaaagagagattctacagtataggacagagaaggcagtggtatagcacttgaagtatgagactcagactcatgtgcagtgacatctgtagaaacagatgcatagggaaattttgattcatcaaaaacaacatcccgtgaaatatacaacctaccatgtgtgtctagacatttataacctttgtgattaaggctatatcccaagaatgtacagggtgcagacctgaaatccaatttatgtttattatatggtcggatatttaggtaacaaaggcaaccaaaaactttcagattggtatagtcaggtttagtattgaacaagagttcaattggtgaaagttggtgaaggactggggtaggcaatcggttatgcagatatacaacacatctaaaagcctcatcccagaattttagaggcatagatgcttaagcaagtaagcttaatccatgttcaacaatttgcctatgc

SEQ ID NO: 82381 - DNA, 579 bp, Cannabis sativa
tagcttaataatgcatcttaattaaaatggaacgtatatgtgagaaagatcaatacaatattgttgtgcattttcaaaacaactctacttaagactacttaacaaacattagagcatattctatatatagtgttaaaaaaatagtgtattaaaatattttattattttagcacacttaagaacaattatactccaatattattctaaaaaatatgcttattaactttaacacacactaaaagttatgttaaatttaatacaaaatatatcaatgtaccaaatttaactcacaataaatactatttttttttttatttactatatcactaattattatattttattaacttttactaaattttatattctttatttattatattaccattatttaaataataataatttttgtttaaatatgaaatgactattaatatgattaattattttttttttattttacattttttgtattgtaatataattgtaaatagtagatcaaagcacaaatttataatttttttttgccaaatttaatacaaattttaaattttcaattagattggagatggtgttaaa

SEQ ID NO: 82382 - DNA, 764 bp, Cannabis sativa
cacaagatttattgtttgtatgttggaacaaaattgaaatttcttttttattattaaaaaggaatatttgcgacaaaaaattatatacaatttactttcttgcacttaagtacctatataaattttttggtgacaaaaatccttatatagttcatcttgttgtacttaaatccctaaataaattttttagtggcaataattcttatataattcacatttggcagcaaaaattacaaccataacacatttgatgcaacattattccctgagttagtaacaatacagggactaattttgtaacagaatgactacataaggagttttgctgctaacaaatttacgtagcgtagggatttaaatgcaagaaaataaactacgtaagaattttaccaccaaaaaatatttaagtgcaacaaaatgaactacataaagatttttcctataaatttcccctattaaaaatgactcgtattgatacataaattaaaattttatacttacatatgatgtgtacttcttaaggtcatctcgtggaagaaaaaataccttaatgagctatatatattggagttaaaatatcaactattcactctccaataaatgcaaacttggatgcatttacatctattggaataaaaatttcatttttcattctttaaaatacacccaatataaaaaattagactttccattaatttatacaaaataattcttttcttttcatattctacccattttatccttatttaattaaaaaaaaaaaa

SEQ ID NO: 82383 - DNA, 816 bp, Cannabis sativa
tttgaatggaggaggagaaggaaaggtgtaatttgtttgaatgggggaaccacaattaagaaacgtgtgatttcaatattttatttatttatttttaaaatataattttttttaggtagattattattattcggtgattctataatacttccctaaaaagatatacagtgatgtatttcttatttagtttagcttctagaaaaaaaattagtttaatattttcatagtcgtgtgtgttatagttatttaagacactttgaattttttttagaaattcggaataacttacaataaagaaaatagtgtccaaacaatcaatttcacatataaaataaaaaattcttgcatacaacaaactgtttgaaccatgtttttgaagtgttaaatttttctgaattttttaaaattttgtaaaatgacttaaataattacaacgtacacaaacattaaaaaattttgataaaaagattctttgagataccgaaacagaaaggagtgcattgatgcaccccttttaagatggtgcattgtagaattttttattattatagggtgcttctacaatgaacctcattaaaagtgtattgatgccactctaactatcttgccatttattaaaaaattttagtccatttttttttttatagtcgtgtataccacaactttagaagatgcatcgatacactattttttgagggatgcattataaaagtaccataatttatagtattatttagagtatttgcttttacacacaattatcgaacatcaccacaacataaaatggttggcgattttctattataattattaatg

SEQ ID NO: 82384 - DNA, 1177 bp, Cannabis sativa
ggccggtcactttgtcttaaaaagaaggccttatggccggacagataaaaaatagaaagataaaaagagaagtgttcagacggttggagtcctaggctctttgttgggtctcctgggctggtaggtgctagaggatctgttgtctgggcggggggcatgtcaatattctgaccagaagtagaagtggttgcctcggactctccacaggccacctgggaagtacttgagatacatgtctttggcatcgacgaggtaatcaaaattcgcctgaggattagcattacaaaagtcgtaaaaactctcgagaccagctgtctctaaggaatttaccttccctttgagcctctctaagctcctcctccttggaattcttctctgcttgcaacatgcggtagacagttcgatgaaccaccctttcctcctgaaagttgttcacttctcgggacaaggaggtcatggcagcttcacgttggtcaaaagcctctaaatccttggtcagctcagtcaccttcttctcggcagcaagaagcttttttttaacttcacccaattccatttggatggctccaagttaaaccctggattcatcaccgtcctttctggccaagtccacttccgccctcatggtcttggacatggcggtgttctttgaggcagcagacttagcccgagaataagtgtaagccatcttctgaccagtctgcatagagaaaaaatgttagaatctgagccaagtaaagaaggattaaagggaactgtcaggaaagactcaccctcataaactccttcaagactcctcccatcaacaactccaaggaaggcttgttgtcagctctggctagttgctcattcacctcagggaccgatcgattcatgtagtgggttagcatatctttgcctctcttggtctcgggatgcagtgatggaggttgggtgagagcccaaatttactcatatccacttttggccaactcggatctgccctttgactgttcgagcctgcccgagcttcctcctcgagaaactttggacttaatagctttcggtgaagaagggtccacaacggttagctcctcggaaagatcgataactgcctcggttgatgccttttctctggacgttgttgtctcactgcccctagatctcttgcccagaggagatgagcccgagcttcctc

SEQ ID NO: 82385 - DNA, 1246 bp, Cannabis sativa
gctgtcagctccgccaccaatggtgtgctggcataccgaaccaccgtggcagcagcaaaggtaacagccccctctccatctcgaatgaccacccccgtcgccgccccctctccctgaagcaaaaaccccgcatctacattaacagcaaaacatccaccacatggttgttcccacttctgactcacccgtttaggaccctcatgtttatggccaagaccttgctgaaaatcatttatatatttcccacaccattctaagatatccccggctcgggggatccatcctccatggatgagtttatttcgcactgaccaaagatgccaagataccaccacaacaaactcaaaagaagttgaagaacaaaccttttgaatctcctggaacgtcagcataacatcagtagagcgtgctttctgaatcacatcccacaagccaccacgtttccacacctccttactcttcgggcagccccacaacatatgagcgacatcctcaatctgatcatcttggcagcgagagcacataggcgccacttgaatcccacgcttggacaaagcatgatttgtaggaagccaactatgacaagccttccacacaaaatgcttaattttcggcggaaccttaatcttccacaaacttttccaccatgcttctaaggccttatcactcgaccgatgagagacctcccgcatatcgtgcgccaaacgatacccactactaaccgaatactcaccatgcttagtataatgccacatcactttatcctccacaccccaattaccactcggcaacctcagaattaagtcagcatccacctcattaaaatgcgcccgtatgaaactctcatcccatgcaccatccgcgagcttcaagtccacaacatacaactgatgagggaattccggcttgtcatacacacgaaaagtgaccggtcggggcaaccatggatcatcaagtgccctaacagcattcccatcgccaactctccacctataccccttcaaaataagctttttcccccacatcatgctcctccacataaaagaagcattactaccacatttagcatcaagaacagcactattaggatgataacaagctttcaaaacccgagcactaagcaagtttgaacatcttaaacccctccacacctgcttagccagaagagcctgattaaataatcctagatctcgaaaccccaaaccacccttttccttcggtttacacatatattgccacttgcacc

SEQ ID NO: 82386 - DNA, 1248 bp, Cannabis sativa
aagatccctgagaattcggcccaaaattgttgttaactgccgtgacttgtgggtcaatcccaccatttactggaccaacattaaacacaccagaatctgacatctcctccgccctccctgaccgaagccaccgtgaacccaccagctggtttgcacgccgagaagaggctatcatccacttaccatatggtttgattatagaatcaataggtatgtccaaagctttctcacaaaagcgttcagaatggcccatgattccacatagaaagcagaatgttggaactttttcgtatttgaacgtagcccaaaaaatctcagtgctatcctttttccgaatcttcattcgtcgttttagcggaactcccaaagatagtgttgctctcacacgaaggtaatctttccaaacgccaatgaaattattaggatcagtttccacaaagcctccgagataggcacccgcagcccgcactaccgcctctgtcatacaccctggttgtaaatcatgaatctgaacccacatttccatcttgtccaatttcatagccttcggattgtcaccttccttcagcctttcaaggattaaatgtttacgatcaaaggtccaaggactacctgttataactctatgtatatccatctcatggtagaattgaaacaaaaacaggtttgggctcaattccttcacgtacatacccctcactggcttccataaatcagccataatatgttgaaaaatctgaaagtctgaaaccctacctgttaagagacgccccacaagacaccaacgcgtatctataagtggttccccatccgctggcccttcgaaaataaactcctccccatcttcttcatccagtctaatccctgtccatgcatcctccaactcccttgtcgtactactactcgacgccataaacaaacaaaaaagacaaaatcacaaagacacgaccaaacaaaactctctaagaaggagagactacaaacgtatcagaagacacgactttttctcgcttatatactgaagaaaatatttgaaagaaaattccacacaaagaaaatatatggaaaattccacacacctaaataatagttaggcttacgatatatacatatattttttttagcttgtaaattgactcaattttgtcggtgttttaatcacctttaaacccatgactccatataatggcaacattttattcagagaggtacatattgatataccgtatttctcaatcaaaatctttt

SEQ ID NO: 82387 - DNA, 663 bp, Cannabis sativa
gattcagacagcttgccatatctcttggatctgatcccaaaattatagggatttctttggtgactcatgatgcgaaagctgaaattgcttagtgttggcatgcggtgcagatcgctcactgccaggctaagagggcttcgtccgagcgaatgtatgttgtgccctttttggcatatctcttgcgagcaggtacataaagttgattccacgtgtcaccattgtgtgatgccacgtcagagtgcaaaaaattggaaaaaaaaaattcaagggctaaagaaataataaatggcagaaaataagaaaggaagattatttgcgtggttttggtgttcacaaatcctagtccacgagttagtatattagcctcgttggacgatattaatgaatttaaaatgttacatgggaaaccctaactctgtttccttaatttcttttctaagaataagaaaaagatcaaggataatttttctagagtttttcctatgtgttttgctggctttcccctttgcatgaaaatagagggggtatttataggcttaagtgaaggatgttggtctccccacaaaccacctagagtatctacttaaatctcactattggggtaaattacatacactgtatgactgactggttgatcctgtcggtagcatcatgcctgtgcgt

SEQ ID NO: 82388 - DNA, 2190 bp, Cannabis sativa
aacattcgtttaggtttggaacttagttaagctaaagtccaagccaagataattgttgttttttccttttttttttttccaatgctataaattgcaatcttaacacgtctatgttgataataaatcttatcagttaaagaaataatgaagaaaaaccacttaaagaaaaagctataagcagggttatatattccctgtatatagaaatattgtagttatttattgcgacataaatgaagaagtatgtacgataaatatgtataagatgtgggtcattctctagtgataaagagttacaaattttttttttagggaaaattcagttgatttaaaatatcctgttttgataagtgaaggcttccataatgtttgtctctttgttgattaaaatatattttatttatttatgtggagttagtgtatatagaagcaaaattagaataaaactcttcagcaccatactaacaaacgtttcacccatgtgatgactgattactagtactagttacaatattattaaaaatagggttaatactattgaaaaataattcgatagagtcatgaaaaatgaaaaatgtatgtacatacagatatattttttttattatgtgttactcttatatttaatatcaatattttattaattatttttatattatttttttaataatttcttgatattaatataagtaaagctacttgttcgaaaaaaaataaataaagaaagttattaattaaatatatgatatactcttattaattctaaaaataattaaaaaaaaaaacaaaataataataattgtcaaaaaaattactattataaggagaaatattatagatatcttttttggaagtttttggtgttagaatttttatcaaaaaataaaaaaaaaataaaaagatttggtgacagactttgtttgtttggtgactttcattgatgaagttaaaaaattttctcttttattagatgattaacgattagattttggaagaaacacaattttataataaattctccttatcagacactagtttcagcgagaagataaaacatctcggtgcaagctgtaaattattaacgtaattgtgcattgtaatttatctttatttttctatttattaataaaagctttatttagagtttttctttagagaggaaaaattacaatgcactattattatttcgtgtttttttttagagttatccggggtgtatcatatatttaattagtaactttttttagaacaagtaactttccttatattaatatcacgaaattattaaaaaaataatataaaaggaattaatcaaatattagtattaattaattattggtataaaatgatagagtgacacatttggagattgaacataataaacacattggacatataaaactaatgtttaaatatatttgactatatataattagttaatcaaataatactaattttttttaccacagttcatagtatgacattcgataaatattattcacttgaagattacttatgttgtatcaacatacatatgatttgttcaccaatcaagatgcaattaaaaaatcctaataatctatgacttatcatttttatcatctacatataaaagaaagaaagtgacatacatacatatcacattgatcaaacaaaaaatattacaaaagtgtttctttgaaaaaaaaaatattctcgtgtaagataccttatttgaagatcttttagtaaatgaagcttaagggtccacaatgttaaatattagtaactttctttattagatcacaaaattatttaaaaaagaaataaaaataatataaaagaaataaattaattattagtataaaataatagagtgacacataatatctgtatgtacagacgttttttatgactctggtacctaagcattatcttataatatattagtcccttccattccatggtatgaagagcttaattaatttgagtagaaaaatggtccccatattgaattataaattcaaaattattttatattgccaatttactagatttaaatttcttaggaccattttttttatgcaaacatgggttggggagaaatgaccataagttttctaataacttatagataattatttctagagcaatttgcggcgaaacccccttatgttttgatttttgtacacttaacccccttatctttat

SEQ ID NO: 82389 - DNA, 907 bp, Cannabis sativa
attcgattgatgcaattcaacttgggttttcaacttgggtttcgaagctatttttcgaagctatttcaatgatctatcaagtcatggctcacaattcaatctcatttctgaatttatcgactccaactttcacctccaagggagttacgaatttaagctgcaattacctggagcgggtcccgctagtgcgactcaaacaatcagcccccaaatttaatttttaccgttagatcatcatctacaatcaaaaatatcctaaatttattttccatattttttgaattattttattctcatataatatgatctccttcacctataaaaggaatgctcaactagctcattttttagtttagagaagtagccataagttcagagcatctctctctagtttctctctctaaaaattagagcatccaaacttagccatttttatgtaatctatcttgtaaaaagtaaaactcaaagtagatgtagcttcattactatcgtgacacagggagtgatctactataaattccttgtgtctctcatgtgtatacttaacttataatttatttttgtcaatctagcgagcgggtgtggctcaggaatctgtgtctaaatttctgcgtcaccaccaagtatgccacattttatacctcctatattgttcccaactatctctccttctccatctacatctacaaacacctcatcaacaaacactattattatttctctatctactcccactcaaatgctaaaagtgcaggttctcatagtacaggttcaactgggtttaccaattttgctgatcctgctccatctcccattgcttaaggtttttctacaacaattcctatatctatacaacaacctgaagaagtaaccatacatgggaatactcaccttatggtcactcgag

SEQ ID NO: 82390 - DNA, 1082 bp, Cannabis sativa
aattaaaaaaaaaagttttttagagaggtatttttgggattttggaaaagttatcatattttcaatgtagaaaaatattagtttagggaaaaaatattaggtatatgtaagtatagaattttaaatttttctaaaaaataactggtttgaaaacatataataatatctatgtaacaaaaatatttattttatacaggaagatgcaacaaccatcaatattatgatttaattatttttagtgatactatttatattatgacattttgtattatgcgcaccactatatataatcgtttttaatttaatactcgtacgtagagaggaagggcaatgtacttatgttacattacatatattactatatctgcattatttaaattgtgatatatatgaattttatagtgagtcatcaaaaataaaaaattagtggtcagcgcaattttattgttcgctccctaagataagccaattcttcatttaaataatagggatattccttcttctttttcagtgaataataatactaattatactatatttccttgttaatgaaaaaccaggtaagcttatctaaatagataagataagtaaagaccttatttgtgggggaagtaaactattttcatttagatatattaattgatgtggacttagacacataactcaagtttccatgttttataattgtataccttccttatataaactataatagaaatgtatatttatattaggttattgttacatgttttacatttataataaattatatttttaatttttatttttgttgtgtctattttttaaattttataaatttaaaaaaactacttattaatttaatttttttaaaaaaatatttagagttttaaaaatttgaaaaaaataaatataaaatttaaaaatattaaaattgattatatttctaatattaaaaataacaataaaaaaataataatgttacaatattaatatttatatatatttaaatcaatctaaaattactataagtttaattagcttaaaacaaataatattaatatttatatatttaaattaatctaaaataaataatattaata

SEQ ID NO: 82391 - DNA, 1518 bp, Cannabis sativa
atatatatatatataattaatgtagctatatatgataacactctggcaagtggcaatgaacacatgtacatgtttccattattagctgcataagctgataatctccctctttcctaggtaatcttatctttaattaattaactcttaattaattaatctctttttcatgtgtctttaattcattttttattttttaacttaattactctccaactcctcattaatttttgtcctatatatattcactccctcatctccaaactttttaaaaacctctctatatctctaacaaaataaatatggattatttctctgatttgtttgatcttgaccaaaatcttgaattcataactagatcttttccatgggataatattgatcaagatcatcttcttcatcatgatcaacaatttgccaataataatcaagatcatgatgatcatgattattcatctctattttctttcaaccattttgatcatgataataatcatgatttaattaattctcatcaagattctctttctcttgatgattcacaagatcaacaatccccgaaaaccctaatttcttcaacaacaacaacaacaacactcgattacagttatgatcaagaagaagaggaagaagaaagctctcgtcttcagaatcagaatcagaatccaaatcagaatcaaaagaataagaatagtaatggtaatagtaatagtaatagtactgctactacgtcgatgagtagtagtagtaaagagaagtcttttataggagtaagaaggcggccttgggggaaattcgcggcggagataagagactcgacgaggaacgggcaccgcgtgtggttgggaacattcgaaagtgctgaatcagcggctcttgcttatgatcaagcagcattttcgatgagaggagaagctgcagtgcttaattttccgattgaaagggtacaaaagtcacttcaagaaattaggttttatgactttaattttggaagatctccagctgaggccttaaaagagaggcattacaatatgagaagaaaggtttcaaaaactactcaaaagaaaaataaaattattattaaaaataagaataagagtagtgatcatgatatgcagcaattagtatttgaagatcttgggccagaatatttagaacaacttttggaatcatcatcattatcaacttcatcatcatcatcatcatcatcttcttccaccacttcaaattttagctatactattacttaaattaattaattaattatttatatatacaatctttaaaatatttgtattgtctttttctttgttttgttttggaaattaattattattattactcttcttattattttctttgcattttatggtctgatcacttttttttaggggtattattgatttttccctttgaccaagttgggtttatagactatatagtttttttcacatcaataatttttaaagatgatgctaataataataataataataaattaatgatgctggattatttatt

SEQ ID NO: 82392 - DNA, 1496 bp, Cannabis sativa
ttgtaatgtatgatatatgggaatggaatggaagacagttatgaatgaaaacgatatgtaaaaaagaaaagtaatataaaggaataatgggaatgctagctacaactgaaaacatactgattgtaaccaatatatattattgaataatatcttccccggaatcagcctacccaagagataaataatgacaaatattgctaagggccggccactcgtgtcaagcactacaagatgtgacataaacgtttagactattttggatttatttgttacgttgtattgtattgtattaatattattaatgcaatattatgtttggtattgacttatattaataggttgtgtaaaattataatatattttcaatataaactcgaccctaataccgacactaggagttcgggtcccgatcgggttcaggtctcgagttcgggtcacaggtctaggtctaggtccgagtcccgagttcaggttcctggatacaggagattgggattgactctaaattctttgtaaatattataatataagttaatacaaatcattttgttatatacattaaataatacaaatttatattgtattaaaattttgtatcgtaataattaatacaatacatattattttatccaaatattgtattatttaataaaattataagatccttataaaatttactaaacgtgtctaaagtcttacacattttaatttaacaaataatataaaaaaccattcaccaaaccttatggatgtcacaataatctgtccatttgggactatgcgtcatatacataattacatatggttatttttatatttttatattttacacattatttaagtacgtactattattattgctaacttatattgtagttttctttcaaagaaatgtagactggtatttattgtgatcaccataatttccttaagaattaagaaacggtacgtatatggcatatatcgttatccatatatgtacttaattaattaatatacgtgatagttttttatatattctttttgaatatgggatagtttttatatatatattaattcttataatattgctggatcagaagttaataattaatcgatgaaataattaagtcatttttaacatgaaattattaaagtgtcaaatttgttgtacttcgtaattactacgtactctctctaactttcacaactaaaaaggtgccctcatgacttaattcgatttttagctgaaaatttactttactaattaattccaaatttttaaaagaaacatgatcattttcaacacattccaattaacaacaaagtacttaaatgggagtaatatgttaaaaaggtggctaaaaataaaaaagaagaataagacatcaacgaaaaatgtaataaagcatatatataacatgaaaaattaacagaaaaaaatacaatacaatggcaatatgagttgaattgaaactcattaaagagagattttgtggatttaagattcttttgtt

SEQ ID NO: 82393 - DNA, 968 bp, Cannabis sativa
tatttttcaacttaccccttagttttatatgttaatcaatatccaatctctacaaatatagatatctacactttatggattggattgaatcgtgcaaattaaattaaattagctattttatgaatatccctaaatcacaatgaccaagtatatccttaaaaaataaataaataaaaaaagcgaccaagcatataataatgataataatagtaaagaccaagtacaacctctccaccaatcaaaatttgagacttgtgttaggacttaattagtaccatttttgagtaggtttttaaggtgcttttcattagtttttagttgtgtttgtgcaattttattcttttggttggtaatatttttaagttttagtattagagaataatagaacaaattcgagaaaaaatgtgcaagaagaattaattaaattatgttttgtcgctagagcaccataaaaacaatccaagaaagaaatccaaaagatctagtgcaattggagcttctaatgttaagaaattggaaagtggtagcgactcaacattaaagttcaatctcagggcactaaaaggcaaaaaattgataggagggtcgtgtataacaagtttataggcgggcctcaatattgagattcagtgttcaggcttggaaaagttaattgctcgctgcccaaaattttcgttcaagagtcgcgacatgctcctgcagtgttgcagcacacctcaaaaattatagaatttcctgggtgctttaaaaaggcacaggccgcgacactcaatgagcatgtcgtggcctgcctattttaaaatgcctaaattaggttttttttttcttttaaacttttttgaaagctatttaaggaatcttttcaacacttttgaggagaacaatcatttgttgggctttgtgccttaaataaaactccatttcaatgtaatctttattattcaattatcaataaagagacaaaagta

SEQ ID NO: 82394 - DNA, 1361 bp, Cannabis sativa
atgattatttattgaatctttcttaattaaattatagaacatataacataaaattaatatacgtgccttgcacgtaactttcttctagtttaaggaaatattgattgataaatattacatttctatattgcctatactctgaatattatatttgatatttaatgaaaaatctacttaattgatcgaatttaattgttaaatatgtatagttatatttatatttcaactgtatatgttaaataaatatatatgtattttttttaatatatcataaaattttattaatatagtaattaattaaaataatagtctgtaattcaatcggtactttttttattggagatataattagggtcaaaattagactaacagactaattagttagtagtctaattcttaaattatttgacaaaaaaattaaaatcaaattaaataaaagcaattgtaacattataattaaccttaaaacatctatctataattaatgtggatgaaaatttatagtcgagtgttaatgagtttgttattgtgaagtcatagagatattaattaattataaaataaaatattattatattaaataatcatagttattataagattagtgaaaaattaaagttgataatgatgaaggccagcaagatcagagaccccttaccacaatgatgaagatgatgtagatttgattagtcataattaatatgtgtcttttaatattaagcaatatataagcttattatttattatatatatatatatatatatttattttcttgtttaagctataacttgttagaatagtaatatagttgtcaattttctcatgaaattattatcattttaaaagaattatgaaatctatatataaaggggttttcacaaaaatattgaattttgggtaaaatttacaattttactgttatacggaatttttttacaaaaatattgtctttttatataacaaccgtaaaacaataaaacaagacaattaaaacaacaatgaaacaactaaaaaacaaccgtgaaaacttaacacagtacacagtatatataaaaattatagtattttttaaaaaaaaatcgtcccacagtaaaaaaaaaaaagtaaaaaatttataaatttcaatatgcatgtggtgtaaaatctctatatataaagaacatttaggtctaaccttgatcataaacgagttaggtctgtacttatgcctaggacttatctagtctaggctcaaaaaattccctattaaaattatatattttttcacttattttaaaaattattattttttttttttgaaaaaaataaaggtcaattatttttgaaatttttacactaaaaatctaaaatgataaattta

SEQ ID NO: 82395 - DNA, 956 bp, Cannabis sativa
aatattttatattctgcctgttcagttttgctgtagcagaattactttctgctgcaaaaacacgatttttcatcaagcactccaacacttactataatttgttctcatttctctcttagatatcaatgtatcttattaatttctcatcttctttaatcttagttatttagtgacgacttattttttattctttggcttcaaacatatatatctaatataaatttatcacttgaatttaatagtgactatcaaatttattgataaaccgttgttccttaataactgttattattttgttgaatttctttgtttctaaaatatattgtgctttgaattcagagaagcaaatgaatcgtatttcaatttttattgagccaaactggtttaaagtttgagttagtctacatgtataataagccacaaaatttgattatcggcacactcaaccgtggtgagttttacattattacactttttatgatcttattatttttttgtgctacaagcaaacaatgccttcaaatcttactgttatagttgtctgttatagttgttttttttttttttttaatttgtgtgataggattttttgagatagttgtgccacaaagtttttaactaatttagaacactgaaaaatagttaaacatggaggctagctagcaagtgttggttctcttagccaattcattttttttactttttatttactactactaataataaaaaaataaaactaaatatctacttaagggcaactccaatagaaaaactcaagtttagtgttaaatcaacaccaaaaatatactatttcaatactaaatttttttctatttccaatcacaacactaaaagtatattcgttattattatattatttaattaataaattatattagtatataattatttgttttttaaaaaggattatttaattatttaaaagtataaaaaaa

SEQ ID NO: 82396 - DNA, 1674 bp, Cannabis sativa
cagacggtctaaacaagaccccagcccacaagacaattccctaaaacaaatcttcaatcatccaaggaatttccattactgtacctacaaaattgtgaacagtaagtgcgacttttcttttatagaaaaggaaagtttagctctggttttctccttaagaaatctgatcaaacaaaatgggaaactcacacaagatcagaatataatagctggttagatagaaaagaaatgagtaaccaaacttactatttcaccttattttccataaattggaatgccagacaactttccttccaaaattaaattgattaatataaaatttaaatatacaaaatatggaaaccaatataaatactccagctgaaattaataataaataataaaatatttttgtcaattaaatatgccaaaaatagaatgaacaaagtttaaaatctataccatattattactatttttattattatattcaataattttatttttactcaattatatttatcttctattaaagttcttaaaattaatttaaactatagcatttttttagcttgaaatataaatagtatatttttatttttttttaaatctaactatttgaataatagaaactaataagaataattatatataaaaaaaagtgaagaacagtttggatgtattaaccgaccaaacagacaaaatcattgagcgggttaaacttttctaatttttaattggacgggttacaattaaatatttacaaatggatatttatactgggttagtaaaaatatgttataacctgacaaaactgactgacgtacattcctagtaagaatattgctaatccaaaggcaaaagagaaatcggaatgcttttattgcaacaaaaagggccactagaaacccagtctcctatgtttttggcaaagaaacaaggtatctctaactttgttgtgaaatcatgtgttttagagaattattattcccttgggttattaattatgaatctactaaccatgtttatgctcttcttatttcagctccagctatttagacttagattgatatcctagcgagttgagatggatagtttaattaacgggtggagattgtccaagcttgaagatgaagctcatttttactatttttgaattaattattttatttatcgaacaatttagttttaattattagtttgggaattttatttcctatttcatattattataaataattaattgtgatatttttgtgagtattaattcttaacgcagattttcgttaacaaaatttgagcctcacgattatgattcaacacagaaataataataataattatagaaaaataaaaaaatgaacactgaatttttacgtggtttcgcagttaaaattttgcatagtccacgagtcaatcttattcagatttttgagtatattttttagggcctcttgtataagagttttttcatcctctcttttgatcttatccgccactatttataattgcatagtggcaattaattacaaagctgaccaaaatacatttacggctatcatcccaaaaattgtgggatttaattacaaatcaagccaaataaatgaggtttttacacagctatgaatatccagcctttattgggccgagatgagcgcataattaaatatgtacggtaagtcgtatctcataggg

SEQ ID NO: 82397 - DNA, 1131 bp, Cannabis sativa
gttttcttttttgattatgcattctcatattaacttactttctaaagtttaggaaattaaaaaaacataaaaatttatcaaaaattggatagcacatcttttttgtactgctttgcaaatttcgacagaattttcttctttcttttctcctctcctttctttcttttagtgatataagagtgaagaagtgagtggtggatcgttatcacttagggagagaaaagtgaggatcttttggtattatttttttaaattatcactattattttattaataaaaaaacattcaaaattttgtaagttaaaacacatgttgtgggtcattatggaactgaagcatctccacaacctgcctcatagaaggtcgatcatccttatcttcttcaacacattgcaaagccactttaactaaaaccttaatcttctcaacctcaaactctcccgattccaacaacattggatctattatctcttcaatcctagattctacagtacaataatctccattattattcattttctcctttacccaagtcaccaatctcccatgttgatcagccatttctttcccagtcaccagttcaagaaccaccactccatagctgtacacatcaactttagaggtaataggaagattgtacacccactcaggtgccatgtaaccccttgtccctctaatcctcgagaagcttggatcaccacactctcctctgtttagaagcttcgataacccgaaatccgccactttcgggttataattggagtccaaaagaatgttatgaggcttcacgtcacaatgcaaaacccactccaaacactcttcatgcaaatacgcaagtccctttgaggtccccattgctatgtcaaaccgtttctcccaattcagttggttgtttttcaaattgtcagctaatgatccatgctccatgtactcgtacaccaatagtctatgctttccctccacacaataaccccatatctctatcaagttcatgtggtttaacctcccaattgtgcttacttctgctaggaattcagcttctcctccatttgattcacttaatcttttgatcgccgcgactcgtccgtctgatagcacacctgttagaatgcaagtttagaaagtaagatg

SEQ ID NO: 82398 - DNA, 1189 bp, Cannabis sativa
tcctccaacacagttaaatcccaaagcaggttcaggtatactggcctagcagataaacaggacacaagtggatataattggttaaaatacttggaattatcagtagaaaaagtcacggaaaacaaaactagaaagaagatttttgtgcatgatagcaaaagctccataattcagagagcataatgtacaatgtcatttaaaattgataccagaaggcccttgatatttttcacttccaattgactctcggtaaaaacttcatctgcaccaagtttcttaaggttttcttttgcctcatctgatccaggcctgtaaagaagcagggaatgataaatcaaagtaagattttcattgaaaaattgtgttctcggaaagacgaaagtaaagaagcccgggaaattgcacctatctcttaaaatgttgatactatggacaccacggtctcgtgcaatctgaataacacactgccccacaatgcttgtggctccattttgaacaatagcatctcctggttaaattgaacgagagcattcatacaaaaattccagtgtactcaaaacaattccatacaaaacaaatgacaaaatgaaattacccgaattcaaagcaacatagtcttcaagcattcttaaagcagtcaaaggattcactgtaacggtagcagcatactccacgggagaatccttattaatcttgtgccaaacactctgatctttgacaatgtaagtctgccacgtccctaagcagaaggatatttagccaataagattaaaaccaaataacataacatttctttgatgtaaaattgtaaatgaagacttttgatgcaagtgtgtgttactttaacccccatttttctaatcgaaatagttctgggacaatacacagtactttggtttgtgcgttagccagccttattaaatttgaatcacactcatttttgcataacggtaactagaaaccccttgccaagaaacaatactacaagctataatcatcactggtttttgaactaagtaaaggaactaacatataaaactgtacatgcccatttgttataatctgtaaagtcgaagattacattacataaatacataatacttttctcaacataatttcgaaaaacacaatgcataaaaggtttgaactttgaactataaacaagggaaaatgaaaatgtaccgaagga

SEQ ID NO: 82399 - DNA, 797 bp, Cannabis sativa
  modified_base (744)..(749): a, c, t, g, unknown or other
aactacttaattcaacttgtcaattgaatatgaagaagcgaaattaaataattgcattaagaagtaaaataaaggatatttttttttattgaacttgtcaaattgtcatattaatttttctcttttatttctctaaattttaagtattgtttgttttatttatttttctcaaaaattattattgatcaaatagaaacaatttttgtgggaataatactctattttatcgttaaattacttgattcgattgcatatttttacgtatcaatattaatgaacacaatataattaaaaaagaggtccataatagagcttataggtttttacaagagaaaatgagtgatgaagagatgaacattttattaagagtgtacactttataagtagtgtttgtttgacttgttttaaacctttgtttgtagcgagaagttgaagaatatattttttttatacattaattaaatttatttttaaataaaatttaatttaaatatattttttctttatgagtattgtatttaaattatcctcacaccctcacataaccaagacacaatttcttctttttatgagaaagttacaaaattttggttaaagaaaaatagagcctattgtgaaatgatatgggtaaaattggtagaatgattgaaaaaataagtaaacataatagattttgaaagagagtaaaaattaaaagtatcaatttataacacttttatatcggattattattaaattttattnnnnnnaaaaatcagttcaggatcctatttgtactattttaaaaaatacaggat

SEQ ID NO: 82400 - DNA, 726 bp, Cannabis sativa
aaaaaaaaaaaaaaaaaaaaaaaaaaaattacaaaatgttcacaacgcttataactcaaccaacacacctcaactacccccaataatttttttaaaaaaaaattctttcaaaaagcttctctcactttaagcttttaactaagcttttctcttttttgttttaggatatattacaaatgacaattaagagatttatatatgtttttgacagataaaatgagtgatggaattcagccaataccttccattcctaattgcctaacttaggcatatcctaaaaataacaaaagatgtggtttattccttttattttaaataaataataattaaaaaaagataatactatttcttaacaaacatagtctagaagtgtgtctcagatgcttatttgaagataaataactgtaaccaagaaaaaacaaaatatacaagtatattggttacttgtcaattttagcaattaaggtttgaagtatcggtattgattatattttaccaacagaaaaatacgaacctcaagaaattataacgactatattaagtaaacaccaaccttgaacaaacatggttgtatagccagatcctcgccacacggggatgacaaaatagcggctgcaagattaacaatggcaacggaatataagtcacattaacagcacaacatcgcagttcacagataatatatatagttaccagtttgctgctctttgctccagcaagtgatac

SEQ ID NO: 82401 - DNA, 1334 bp, Cannabis sativa
aattagttttgagatagaacttcaccgatttttgttgtaagtataaattagattttgatgtgtatattataaataaagtaatagtattaatattagaaacataatttgttatgtttaaaatatggagaaagatggtaatcttgtgataaatattagaaatggtggaattaataaaaaaaaaaaaatcacgtgctttataagaaaataaatgaaaaaaataacaatttttgaatttaataaattgtacttgtgagtaatgatgtagttgtttttaatagactatttagactattttttaatagaaagaaacaattcaaatctttcttctaatttataaaaatttatcatttaagaaaacaaaatagtaaatcaataacttttgtgaaacgagttttaaaatgatatttatcatttgtaataatagaaaaattatatttacacttggctaattatagtttttataatgtattcttagtgatgaatttatatattttgtaattagcacaaatacaaataaatttaatattcattacaaactaagtactcgtctttttaccctataaaatttatattattatttttttattatataatatagaatttacaaatttaaatgaaacaaagatatttgttataaattttaatgtagttctataattatagattttttttcattcaaatttttgtcttttttgtttagtttttaatttgaaaagtaattttaaattgaattaattattatttatttaaatttttaatttaaaaaataattttaaattaataaattattatcttatttaaaagttttttttctttttggtttaactaaatattatagttttttttaggattatttgtagataaagatatatattcatatttgatacttttatctatttatattttatctcaaaagagatatgaatttatttttatataaaataataaacaataattttgttaaaattataaattaatttaatccgtaggtaaaaaatactactatattataaaattattaatactatctttatttttgtaaaataatatagtattgtataatggacctctcaaaataatatttgaagtggaaatagctaatatttgtaagaaaaaaaaaataggggaattactccaaatattgtttttttaatttttttttcaaatttatagtttgggtttctaaagtggttgcagcattagttgcaataggggtttttatacgattttttgttgtaatttaagttgcggtgctagttgcaataggagtagggctgtacatcggtcggtttgggcggtttatccaatatattttctaacccaatctaaagttc

SEQ ID NO: 82402 - DNA, 943 bp, Cannabis sativa
  modified_base (820)..(821): a, c, t, g, unknown or other
ttaggacataaaacccaacaaaaagtcctagcgtcaagcctggctgccaagtctacagtctgacaagtatgggcagagccttcccatgatacaaaaaaggcttatagctcagctagacttatttcgcgggatgtatgggtgctttgtgagaagaccttaccctttacgggagcattccactttagtcctgcgggagtagttgacttcactccctgggaatgggagagatttttgactgcgaattctcccgccatcgttgccttgcatggggggtttccttcttagaggccctttctgggagatagggctcccaccttctgggaatcgtggtaaaaggtatggactgactgattagtattgagctttcttggattagagtccacgtgtgaagcttacaaaaatctaaacaacatttacctcccaagcttccggaacgtttcacggtccgagagcttatagtctttctctgctttctcatgattggcttccaacacgtggaatatcttcaagtttttcactatctcatgcgagtcgttgtcagttgacgtgtcactggcaaaagaaattatcctcgctgtacacttacagtactgtaagtgccgactcttgtgattcgcacgcgtactaggcacggtgaatcaattgagcagacctttcatttaataagaacttcttgcgatgaatgccgttagggaggttaaatattagaactgatgcttcttctcagctccctattcgtcagattttcaggtaccattttggtgaatgatctgaaatgttttcttctcgtggaaggcactgttgggattttatgccctanntaaaacccatttcaatataatctgattattatcaatagaagattagtaatcatttatgtatacatgtagttttcatgtttatggtttaatgtgtacaaaaaatctgttaagtccaaaacata

SEQ ID NO: 82403 - DNA, 810 bp, Cannabis sativa
aacttgtatctaaaaattatgttttagtcacaagtaactttttgttgtgagtaaatgtgacttttagtcacaaaaaaattatgtcgtgattaaaaatttgttactaaaaatagttgttttttgtagtgattatagggaacaaaagttgagtacctcttctatttggaagagatataacatcttgaaacataggtatataacctagttagcagtctggcagtgcctaattaaagacaagtatatataacatggttatccaatgaatgtagagccgacttgcttgatttgtggcttgatgaatgagacacatcttcacctattttttcaatgtccctacaacaagatgtgtctccgaaagatgtttggctctaatcaataccaatataaaggtattctcaattggattcatagagacaaaggtagtgagcttcgaaaagaaatttacattcttacttttaatgcttgggtatacttagtttgaagaactcatgatatataggtgtctttggcatgttagcaaatctgttagttttgtaaaaaatttggttgtaaacatacttcatagtcttggaaaaataagagataattttatgtaatatgtaaaagaggagagttgtaaaggggtgttgagagtggattttgttgattatctgtaacatgtacaatacaaaagacaactacttttagtaacagttttttagttataatataaaatttttgtgactaaaatgtatgtaacttttagtcgcaacaaaaaattacttgtgactaaaacatagtatttaaacacaagttatcactaatttagtt

SEQ ID NO: 82404 - DNA, 796 bp, Cannabis sativa
atttagacaaattgtctcgggtcaagagttggatgttcagcgcttgccaagcaataaaacggtgtttgggagcacacattctatgccaaatattatttgcatactccactttatcagcaacaattagggaagtattaaaattttggctttaaacctacccttctaaacagcatcataaacatcctctttgtcaattttttctctaaatttcatgagtttttagaagtaccagctgacatccaattttaccggagcctgccaaaaatcttttcccttcaaatagaccgaattgatccacttaacccacaaaatgtcttgtttacttgaggcagcccaaataaactgttttagattttttttttttatacgaattttttttttaatatttaaaccaatcaaaccctgatcttaacaaggactgcagacgtcggcccgggtcctgaaccccagaccctcaccaaatcctgaacttagaccctaacccaaacctagtctacgacccataccaaatctcaaaccctgacccaaacccaacacgaacccaaacccaaacccaaccctggcctagacccgatcccaaccccagcttcgaactgaggcctcaaccccaatcccaaccccagagtgagagaaaatgtaaaaagaatatccttgaaaaaataataaaaattattcttaaggaataaaaaaccaacattttgtgacttttgtttttttattactcagtttttaaaaaaactattttcaaaaaatttagccaaactctccaactcaaataccccaaaaattcaacatc

SEQ ID NO: 82405 - DNA, 2330 bp, Cannabis sativa
atagtcacgcgtgcaacacactatttgaacgcagttttcggcgtgttaacttttttgatttcttaaaattttacaggatgtcttaaataactgtaatttacatgatcatgggaaaaaatttgactaaaaaattatttcggttactaaaataaatagagatatatcgatactactcttttagaaggtagattataaaattttcctaaattttttacttcacgtggtacatgcatgcatctgtagtatttttcaagggaagggggatttgaatttgtgaaatgcataccacacaaaaagtgtgtagtacatccttaaaaaaaagtgtttagttcatgagccagtttagtattttccttaataattcaattatgaatttttattttaatgatcatttatatccatacaggcgcatatctgtctttttccctctttaagtaaggccagatatgtagtttgagtatggtaagtttactagtttagtatgtaaggtcattatgattaaatttcttttcgttttataaaactgttttgttatttcgattagctttctctctacaccgataacatatttttcaaatgacttcaccaaaatattttattgttggaaggaaaatttagatatacttttggcacactcaatctcagtctcaacaatagagactaatagagactaattcacatatcagttttttcaatcatgaaattgcattagaatttacttttgtaatataaaaatcatctatattatataattgatattaatctattttttcattattttttgtagaatggtgggacgaaaaaacacaaagaggtgttttgttttttatatttaaattttactgtgtagctttcccaagatatttctatctcatgtaaatcacaaattttgatattatgattcatgaagtagtttaacctcattttaggatagaaaattaattttttttaatagaagaaactcattcacaaattaaatgatatttaccattgttattttaaattttatctatattatttcattaggcatttggtatgaggtgtttaatataatttgattataagaaatattatgaaagagaatacaattgtagagaaaagtgtaaacagtaataagtaattatattctcattaattgaattatattatttaattgagcacatgaatcttatatattatttttacaaattaaaaaaaaatattttttttattatatctgtaagagcagaatcaagagagagaaacagagaatattgaaagagaagctctatccaagaatggagcacagatacgtattatataatttgagaacttgaattgtattacaatgccacacataatcgacttgacagaaagataaaaaacagaataaaactaactaattgaattcctaactaactctaacaccccccctccctcaagttacactaggttcccttagtgttaacttgtctctaaaagtgtcgaactgatgttgaggaagaggcttagttaggatgtcagctatttgatgagttgcagaaatgtgtcttatgtaaagttcttgggcaaggactctgtcacgaatgaagtggagatctacttcaatatgtttcgttctttgatgaaaaacatgattggatgcaagagaagtggcacctaggttgtcacaccaaagaacaggacaatcgagaacttgcattccaatctcagtgaacagagattgaatccaaattagttcagtggtggcaagagcaatgacacaatacttagatttcgtgcttgagcgagctactacagtttgctttctagagctccacatgatcaaattgtggcccaggtatatacaataatcagaagtcgatcatctgtcatcaattgagcttgcccaatcagcatcagtgtaggcaacaagagtgagaggagatgctgctttaaagtgtagaccatagtcgattgtgccagccaggtatctaaggagccatttacaggcagaccgctgctcatccgtaggagcttttaaaaattgagacagcctattaacaacaaaggagatgtcagacctgatcaaggttaggtattggcgagctccaatcacactataatagagtgtgggattgtccataggggtacccattgtggcagcaagtttgctgtttgggcacataggtgttggtgtgggagtagcagcagccatgtttgtacgagtcagtaggtctgtggtatactttgcctgagtataagatgcagatcaatggaggttcttgtaacttcaaatcccagaaaatacctgactggtctaaggtttttgagtgcaaacgaccggagtagctgagatatcaagtgatgaa

SEQ ID NO: 82406 - DNA, 4014 bp, Cannabis sativa
  modified_base (686)..(692): a, c, t, g, unknown or other
tatcattaattattaataatatagtatatagtttacagtaacggtactgatcgaaaataataataaaataaaacaataaaaacaaaataattaggtgattttaatgtattaattatacattgtttagtgactttctttctctttacacatattcctacattaattcctttttaatttaatgttaatattatattattgttcatcctttaaattagttattaattaaggtgcttaaattatttaactgttaacacaaggaattgatcaaattaaaaattaatgaaaatgggtttatctaattaaactcttttggggaccacagttaaaaaatttgaaagactaccttgttggttacaccttccacttcttgtgtacattctcaaatttgtcttaattgacatgatttaaacatggaaaattatggtctgtcggccaatattataattaattacaaaaaattgcattgtaatagtaaaatttcaatattttcatatacttacacttttattttgtatagagctttaagtatgagttgggttttttgatacgacacaaaataaaaagatacaaaaatgtaagtttaagcacaacacgacaagttcaaatgcacgatacgtaaatatgaatagactaatttgaaattacaatacgttatgttttttttataatttaataataataataannnnnnnaataataataataaatattaaaatataaatcattctaattaattttttatatgattatgtgtaaagtattattgaaaaataatatgaagcccgagttcgatttgtataagaaaacagactgactcatttataaaaaataggtcagctcgagtaaagtacgacacgaaagtatagacttgcgtgccatgctgggcttatcttttaaaatattggtacaacacgacaatatccatatcttttataagtcagcataacactactcatattattgcagacttttcaaaatatggattgggccgatatgttaaaatcatcattttttttcctttttttacatggcactaaaattagatatgagcaaagcttatgactgtgtagaatgtaattttttggaagctatgcctagaaggttgggtttcaatgaaagatgggtccagttgctccaaaaatatcttcagacaacttgttataaagtgattaatcggagtcatgaaatgggtccagtgatccctactcgaggcatctgtcagggagatttgcattctcctatatgtttatcttgtgtgttgagggcctcttggctttgattaggaagtatgaacaacaaggttatatccataggagtaaggtagctagctaatggtgcgcctagagttattcatataatttttgcacacgataactacttgtattgtaaagctacggagacagaggcgtgaaaggtgcaagaaattcttcaaaaaattgaagctacatcaagttaaaaagtgaatctttcaaagtcttcgatattcaatagcaccaattcagatagtggtataagggatagtatttgtcagctattttgtatgctgactgctacagatgggagtttttatttgagtttgcctagtaccatgagcaaaaataagtctgtcattttgggtttttcaaaggaaaagttaacatcttcaagggtgggaatctaagctactcttttaggtcggtaaggagattttaatcaaagttgtggcaccatcccttcctagttatactatgagtgtattcattcttcctctagaggttactagagacattgagagttcaatgacaaaattttggttgcaatcttccaagaatttaagcaaaggaattcattggatctcttgggatcatctttgtaaccacaaaactcaaggtggtatgggcttttgcaacttgtatgattttaatcttgctcttttgggtaaactaggttggtggctgcttcctagacttgaatctttggtggctcaaatttttaaagctagatactacttgaatggtacattcctttcagcacaattgagctccaatccaaattttgtgttgaaaagtgcttaaaaagcaaagcatgtcatatctaaaggtgtgcgatggtttgtgggaaacgacactaatattactgtccttggtgaacattggctgtctgacaatgataatcccctggttatttcttctcttttgggtcttgccaatgttaaggttagtaataattaaatactgttagggatagttaggactatgagatactttaagatctcattgtggagcgctataaagaccttattactagaattcctcttcatgttggccaagggtctgatcacctagtttggaaaaagaaactttctggtctgtacacagtaaaaaatgcctatcatcttctcaaagaacttcatgggaattagaatttagaggggtcagcggtcacataattttggaagaaattttggagtttaaaaattcctctaaaaataaagaatttggtgtggcgggcgaagagggagtgtctgccaactgtgactcaactgggaaccagatgtatagagattagttctccttgtcttgtttgtaacgaggaggatgagtccatcctgcatgctttagttgtttgtccagttgttgtattgtgttggaatagggtcgggattaggactacttcacaatttgttagtacttttttagattggtgtgtggattgttttcaaagaattgatgctgatcataaatccttgttagttgctatttgttgggctacttagaattctcgtaatgaattttttagaatcaaaatgtgatgggggtgagtagcatagtggcatcagctaaaggataccttaatcaatgaagacttgctcataacttaactattgagtcatcatggcctattttacaggtggacgatgggtagagcaatggactttaccacatggagatagtattaaggtcaatattgatgctgctttgtttgaggagagtggtttgtatggttttggctacgtgactcgtgatgcaagggtttgttaactgaaagttgtattagtttgcattagggaatggttttgccagaacttccagaaggcatgggcaatcgggaggttttgagttagaaaaagcgacattagtagaatcaagttattcttgaaacagatagtttgactgttgtgcaagctcttaggagctctactattatgatttctttatttggtcaagtgattaatggttgtaagactttacttggtattttgaaaaatgtttttgttatgcttgtaatctactaataaagtggctcataactttgctagagcttctttattgtatcctggttgttgttttagtttggagcatgttccaactgatttgttactgtgttcgatggttaataaaatccttatatttcccatgcaaaaaaatccctaactaaaggcttaatggaccaaattccaacaaatcgtgtaatctatcaccggccaatcactactataaaaaaagacttttagcatcggtcaacgtctaagaaaaaataccaatttaaattttttttgtcagattgggaccaagacaaactagctaagcatgaggaaaacttcaccaccctcttccagttcgagctcacacacttctctgagtcataaattccaaatggaactaagaaaaagattagtccttttgaatgattcaatgctctccttaattgacgagtttagctttgtcagtgctctcagaaaccaaattagttaggtctagatcggctcactgacgctttttgcgttgattataaaccaacattttgagatttagcatcgatcggtttacaacacaaatgatagctgaccctaaaatttttccctctttctcacctacatccttctttctctctctcacgcgaggtctctcgatgacacctcaagaccctcgatgacaaaatctccaaaactaacaacgaggtctctctctctctctcttgcactctgtccctccctatctcgctctctcttttctttatctcacactttctctc

SEQ ID NO: 82407 - DNA, 966 bp, Cannabis sativa
ttttttttttttgacaaaatataaatttggacattgtattccgtgcgggtgagtcatagatttatgtgttttgttaaataataatttaaataatatttattgtaaaataaatcaaattaataactttagttcaatttcaaactttttttagtaaaactaaattcgtcgtttagtttagatccaatatcacagttaaaaaattgagctcaaggtatcaatatcaatttattgaaaacttatttgaataaaattaagtttaatatatcaatttaatccatttataaatatttgaattgccgtttaataaaatacaaaaaacaatcatataatcgtaataaatatagcaaccgaattagtattttacctttagtttttttcaattattagggcatcttacaaaatcaaatggtaaagaaccttggtacacatgtaatgtaattctccttctatatgatgattcaatttaaaagatgagcatattttttatatccaaggatttagttattattagaagggttcatttgctagttagttttctcatatttggggaagaaagtagcaaaaaagtagttgggtatctttaattgattccaaagatatagggtaatagtgactagtgatacttttaggtgattctttaacaaaaattggattcttttaaaaaaaaaagtttatttctttttgactagttattcccaattggctagggttcttatgtttgtgtttcactatgtttaaattttggataaacaatttcactactaagagtaaggtgaataattgctcaatatttgcatgttactatatgcatgttcctatagcacactcattatataagttaaaatagaatatatatactctaaattttaaagaattaatattaaaaaaggatatatatatatatatatatattaagctaattaggatttgtcctcctcaattttgatttgatatgtacaaaatggt

SEQ ID NO: 82408 - DNA, 1087 bp, Cannabis sativa
ctctataaaaataactttttcattatataatgctacatataatttcaacttacaattgcaatgagtacacatagtttcctatgagttttttttttcctgatgatggtgtcaaccttgttgtgcatttttgtgcttattttctgttattgtatgtccattcttgcatttgtaatcgcaaacactccaaaaatattgtgactggtgtttccctgtctgttacattttttgagttaagtgcttcaactatattaagagtcatagttgagtacatgttgtttaaacaattttttatcagcaacaataatttatacaactgatatgcaacttgatagtaacacaaaaacaatttttttaatagtatttattttattatatttttttattattttacctattattttttgagtgatatcttgactatttctcgtggctatgttttttttttctatatatggtcttaagcgcttttccaagttgtttggctccctcatatgaaattcgaactctatttcagtgtaagcttttgttgctgcaaagaatggacctctaaatgctttgcatttttttttaattttgtttttaggtttgagaagaggtggaagatgcagtagccatgtgttatttccgggaagacttttcttattgcttcgatgatgctttcatgtcggtcagagattaggcattgatcttctcgaaccccaaatgcttctttgatttttatgaagaaccactcctaggctttgtcattctcagagtcaacaatacagtatgcaaggggaaatatttttgattatgcatcttgtgtgttagctgtgagcaacatgcctccatacgtgacctttcggaatgtgccgtcaacaactatgattggcttgcagtttggccaaccttttagagcagcattcaatgcaataaatccataatggaaattattattttcttgcttctttatgtcaattattgttcctgtattttagccagttatttatcagtaacagtaatatttagcaactgttattcaaccattgagcagcccaaaaacaatttttccaatttaattaattatatttcaaaaaattaattttat

SEQ ID NO: 82409 - DNA, 535 bp, Cannabis sativa
tgtggttcttgatggtaggtattggaagtttaaggagcatatgtatattctttagtagtagaattttagtataggttaaagttttgatcatgttttatcatatgatgttattgtagatgaaggataaggatactatgcatgtttttatacttagtggtatttatgaaaacttattcaacctccacacataattctgatgcacttggttaattttcttttttaaaactaaataaccacctaaaattcttgcactatcaaagcaaattatgaataaataaatgctatatttaacatcagactaatgctaagaggcatcaatatgagttttaagtatgatgtgcaataaagtagtattcgaatttatataaattaattaaataacttttaagatatattattaatcaattgtaatgtaactctttaggttttaggtgttgttaagcagaactagttcacaataacaatacttttaatgcttttaagatactatttgtatattcatagatataaattagatgaaattgtaattaattta

SEQ ID NO: 82410 - DNA, 1529 bp, Cannabis sativa
  modified_base (1179)..(1184): a, c, t, g, unknown or other
gaaacttttcattattgaggcatgaaaatgaacagaaaaagggaatcatgaagtgctcttgcataaacataataatgatatctatgtatcaaatacaaaaaaggccttccctttatttattatgtgacacattgaaaagtggaccacaaaacctttacagataaactgaacttttaatctacaatctctaaactttcgaacatttgtacaccgataatttcctttctgggattcttttatttttttttttgcgctgattgttgtgtttcgttttgtagatggcaatgctggcaaaacaatgtgttgacgacgatccaatgtacaggccggacatgaaacaagtggtgatttctctgtcgcagatactcctctcgtctgtggagtgggaagcaactcttgccgggacaagccaagtatttagtggccttgtccaaggaagatagtgtgctttcaaacactttcttttcaaaccaattgcttttcttcacaggttcttccccccctttttgaccacattttgtaattttttctgttttaatctgttctatcttatctgcatgagtatgtgtgtgtatagttgttgcacaggtatagtagtaaggtggttgtaaacgtgtaatatgtaatagattttcgattctttcatggttattttagaatttattatagtattttttgatgtctgtctcatggtgccgagtaagtaaagtttatttaccaccaaataaatacattcataccatatggaaagatttttataacaagttataattgtaccaacttactttaagcagtgtaataataacaattaacatgttaactgctgtacttggtaagtgaggttagcacacgcaccgcagaggtgatgtaaaagatcttcgagggtctatctagtacaccgtattgtataattattatattaaattttattaaaaaaatttatagtacactccctttaatacactcctatttgttttagtatttgaaataattttttagtcaattttttttatggtcatacgttataactatttaagacatcttgcgaaattttaagaaatttggaaaaatttaacacgccaaaaataggaatcaaaaagtgtgttacacgcgtgactattttattttatacgcatgtgaaatagattgtttgaacactattttttatattgtaaattnnnnnnaattttttaaaattttgtaagatttcttaaataactataacgtaaacgaatataaaaaaaatctggatgccgaaataagtaaggtggtgcatcagtaactttttaagaaggtgcattctagaatcactcaattttattatctgtcgtatttttatatagtgtaatgtttagttgtatgtttgtataaatattttgatatataaaagagaggaatgtgatggttacgtaacagtttaaattagttttatttattctagtttttttttttttttttcacattaaatattaatcatctataaaggaaaaaaataagatggtgacagtctaaattaactttattctact

SEQ ID NO: 82411 - DNA, 1430 bp, Cannabis sativa
gaaggttgaccttggcttagagaaattaaggtaccgtacgggtgttccacttcctgaaaatgtgagcccgtgacaccagacgttgatgggtcgtggtcggagaagaatgtccagcccgccacttttttctctctccttgactctagttccacagttttagggttttggtttttttttttttttttttttgagataacagttttagagttttttgttttgaacagaatttgttttttattagttaatagtttatttttttttttttaaagaaattagtcaataggtaggagtttgattttgtattaataattttatttcagattttattataaatttattaaattaatttttatgtatatattttttaaagtaaacttaatttttactttaatagttaatattaggtagctatttaataagataatatgatattattttaaataatataccataccatctggtgtacagtgtgcaagataataacaaagtacttacagaatatctgaaagtctaacggaagatatttatactgctaaaattttaacatagatattaaatttcaactacttaaatatttatatgtaacacaatattatataactataagatataattcaatttaatataatattagacaaaatctcataataaaacgtagcagatgagccataatatcaataataaatgcctttccatttaaagttaaagatgggctccaatcattacacattttttattccttgtactactactttctatcaagtaacaaactactccaaaattaattactctcaactaacaactttgaaaatttccatgcagataaataaagtaaaaactaattattattcattttaaaattacaaatagcaggatgatatctattgcgtccatataactgaaaataacttttacccaatattggtgagacattgcgaaaggtactgcccaatagtaaaggctggtaattaattccatggctctgtgagtttagtcaacgcaacttgagacgacccaccatttgccatagccgctttggcttcattcttcattctcaccactctactccggaccgagtcacctgtttctgagttcatcaactcattaactcgcttctccacttcatcagagcttacaaacccatcttcagactcattcataggcagagcaatcttaatttcctcaaccaacgccactctgttaagcctctgttccgcgtagagaggccacgcaaccattggaacaccagcacacactgcttccagcaccgaattccacccgcagtgtgtcacgaacccacctacagaatcatgactcagtacctcaacttgctctacccaattcttcaccaccattcccttctccttagttcgatccaagaacccgtccggtagcaacgagtctaaatccgggtcgggaagacccgaatt

SEQ ID NO: 82412 - DNA, 1041 bp, Cannabis sativa
tcttagtactataaattttctagataagaaaaatgtagaaatgtgtagcacttttcatcataattcaatctgctacaaattgcagatccaagctctatcctttaacaaattttctctttattaatttgagaatctatctattacaactctttaagtattatttacaactttagagattacatgtacattatggttctaaagtgcttcatttttggctgcctaaatgagatatgcacatcaacatttattggtacaacataacaccttcgtattcgacaatggatgcagcgcttcatccattttaaaatcaatccaatctatattagtgagagcctaatccaattcattgcaaaattttgcaataatctactcatagtaacagcattggaaaaataaatgagcatgagcttatgtataccttcttcacaaatgaggcatgagcatgaacgtgagcttatgatatgttagattggtagtttttaagagaaattctccaaactttgaattttcctcttaagttcattgacatcgtcaatatttgtgtaacaattacccgtttcttatttatgataaacaggactttgttgggttttgtgccctaaataaaactctgtttcaatgtaatcttgaccttcatttatcaataaaaatataaatttatttcattacttgtttaatgtgttgtttggttcatgtgatcgcttgtttgatttataaattcattccaaatccttatcacattaatatgcttacttattgtgatgttaacacagtggaaagtaatcaagattatgtgattaaatgtatcattatgatttatcagtacacagtgtttaactgacaggataatctacaatgtagcttacttgcaccttgaataagtgatatgtcctgtcccgggtattggttaaagtgagcttgggttcgatgtatagaatattcttgaaaaggacaaatattgaacctggataagatataataaacttaccataatatctatctaattcaatatcacctagtcgatcttagatcaaatgatct

SEQ ID NO: 82413 - DNA, 1143 bp, Cannabis sativa
agctgaaactgtcttctctggagacttggctagctcgatggtgagttggctttattttttcatgttggcaatggttttagtccttttgggtttcttgctagaactcgaggcataacttgtttgggcagctctcttcttggactttttctcaaccaggggaggactgcttaaaatgttttccaagtcgaggtccatatctgcgaggcgaagggagtacatcagcacttaaggaaaaataaataaaagaaaatggggaataaactcccactcaaagaaatttaccatagttatcagaaggtgacaaggaaggactacaataataactaaactccctagaccctgtgatctcgtaaatatcagaaggagttagtggagataaatcccaacttgaatttatatggctcgacctatctaggttggtcccattttgcttggcaattccatagtatgaactagtccagctaagctggacatgaaacctagggtaccaactatcgactttatgtactatgcaatctatgagaaaggggttccaagtgtaaaaattatattaactatctcggaatcacacaagtgtgttatgctctgccctaagcacagtaggtgaccatccacattgattaccttgggatgctccctctttagcttctcgaggtgttattttctggagataatgtgcgtgagccacatagtctttgctctcctcctcaactggaactgggaaaatctggcacgaagaatacttgggtattttataatcacaaataaattcatttgaggcaagaaggccaattttcctcaatttcttctcactacataagaaatctgctactcgcaaccggaatggaagacttagcaggattctatgacgctcggccatctcaggagtcggaactggtgtctaggaaaccgctgtaaatagacaaaaacataataagtgacctcaaagatgtaagtcaatacaactaaaagctaagttgtttagagaggtcacttacgtataatacgaaatgcagatgtatttattggagcgaagccagttgttctgaagaaatcttccttaaacttagtcttgtttggtagcctcacaataattctgcgatcattagtgtgggtatagagataatagaagcccgctgcaca

SEQ ID NO: 82414 - DNA, 1241 bp, Cannabis sativa
ggaggagttgagagggaaattactatcaaggttatactaattactttggtttacagctcctcttgctgttacacatttttcaataacaatttaaccttccccacaccacacactttatttatggatttattatttacctcaaaattaaaaatcaaaacgagccgaaatgataatgaccattccccaccaacctaagcatcagaaaaatagcattgacaagttggcatatatatataaactaataataatcatcagaaaaaataataggagaatttgacacgaaaaactaacttcttgcaatcccttaatacaaaatagtagctctttactcgtatagcaatttggcagactgtgttctcgattttttgtcgtcatgcttcaaaactttctcaactgttttctcgctcttagatattgctttcgctatggatttcatcttccggacatttttggacctcttcattggtcttcccttctttaccttcctgttttaaagaaaaaaattacagtgagatgaacgttgattttagtgtagatgtacaggatacatatcaggaaacagcctgaaatgaaaccaagattggtaaccataccaacttcataacatttaaacgagaatatgaagcaaatatacaagtattcttcattcatttatttcaagttgtttataggcaactgtattatatgggattggcattggaacgagaattccgaaactttcccttttttcatttactagttttggcttcttcttgtaagccctgtgaaactcatagtattcacattactctaatgattaaaaatgagaaattccccgacgcatagagctcacactaattatatagacattcatgtcattcttttataaataaataaattgatgaaatataccaaccacaaaaatcaaatattctcaagaacaatactttcatataatatcaaaaatatctatataagtttccgtagtgcttctcattaataaaaagaaatttcaaactatttataccaaacaacgccttgatctttcttgtttttagtcctctagcagctgaacttacaaacttttagagggtaaaaaacacaatcacattcctaggcagaaatagcatatactctatagattcagtgaatacgcatgatgcttacgaatgaaacagttacttcctactgttactacaaaaactcataccactttaattaattggctcttaatcaaacatctttcctttaaatctcaatcc

SEQ ID NO: 82415 - DNA, 746 bp, Cannabis sativa
acccaggccatggggcaaaaagcatactcgagggtgcatacgcacactaccatgatttggcactggagacaaatctaatcatgtgttaataaaaggtgtaaccgtctatggagcgatattttgcaaggagaagacgtgtccaatgtctccaaaacccttaccaccttctgggttcttcactgaaaggagtcactcccaaaggccatcgcctctagttaccttctagattcgagagtcattccttttagctacctcagataatttatgtagtgaccgtgtccttccccttgatcatgccacgtgtccaattaataaaaacttagataaaatttacccccaagcttttgagatcttctagatcacgaaagcttgccattgtcttcaatgctaaccttggacacatgctgcaagtttaggtcggcaacacacccactgatgagatgaattcttctgagagtatttatgtcatttacttcccttcacgtggtaaccacacgacatgttaagatgtattttttcccctcttcgtgagtggcaaggcgtgcttggcaaggaaggaggagtacaactggcggttgagtgacgtggagaaaatgacctcgtcatttttgtgggtcctaggccaatcacatgggacctctcatctcccgagccattggattcactgtaatcactttgaaccgtggatctcgcttagccttgtctcctttttaaaataaaaaatgtctatggcggtgtcatttttt

SEQ ID NO: 82416 - DNA, 682 bp, Cannabis sativa
tcttgaacatattatagtaggttaatcactagtgtgtcatccaaataataatagactagaaaaatcatcccactaagataaggtgctgtgattctatgtcaagggactttagtggtatttattattatttttgtaacgccctaacaataagaacgtcatgcacagtgacttaacataattaaattaattatgctaaattgaaatctattagagataagcacacaaattaaacttttaaaaatacataataaaaataaaaacttgtaactaatagactttacaaaacatccagaaagacccattttaattcacgatcccataaatttttttcaaaatattacaagttattagtgcacgccgacctaggtggcgaaattggagatgacaaattttcctcctagtagacccaacccttgtggtctagcttggcatgaacatgtacaatacaccgcaaaagccctcgacctcatggctgatcaacaacaaatttaccctttcctgcacaatagagcactcgtgagccaaggaccaacaagacattataaacaacaatatgaatatcaatttagaattacttaagattaatgccattgcatctattgtgtatttggcatagacctacgtgttacgctcacacgtccatttctgtctatatagcatagacccacgtgttacgctcaca

SEQ ID NO: 82417 - DNA, 2596 bp, Cannabis sativa
aaaaaaaagtatagtttttttatagtgtaaatttttggtataataataaaaatttttaattatttaagcatataaaatcaaaattcccattagttattatgtgtgttactacatagatttctataaaaatatatatatatatataaaaaaaactactttaaaatataaaaataaaaaactttttttcttttttttcgaagtaagcctctcttgcattttgaatccattaatattatctacagtcaaataatatatgccccttagagcactccgaacaacatctctactctattctaaagaatacatcacaaaattctatttttttttttttattttacagtacacttttacactacattatatatcgacttctttaaaatatatcaccaaaatcctacttttttaaatttttattatattttatttattttcaaatatataatattaatatgtacacacatccccacacaaaaaataattattaaaacaaaaaaaaaaaacaattaataaaatatatttagagcaataaataatattctataagtgtagagtgtgaatagtaaactttaaagaaactttaaaatagaaaaagagtttacagcatctactgtagtgtatttttagtatggttctttaaattttttgaagcttgtgagtcgtcttaccaaagttaataatcactcattatataccattttttagaaagttatttgattgtttcattaccatggatattattctttatttgtttagctaaagtatctacaaaaattaaaatagagagttatttttattgttgttgctctaaccatgctctctactatagttagtatttgattattttaataatattttttaatttgaatttgtcaaatataaatttattttgtaaaataataaaaatgtaataatgttgttgattaaaatattattaaaaaaatttagtaaaataataaggagctctctatatttagaaagtttcttatctattctctattattttgttttttatggttgtagttcaatttttcatgttccactccttattttagctaaagagtgtgtttaaagagtataattggagatgtttgaaaaactcagttttacaaatgccaataaaattaataaattacaacaaaacacaattgtaacagtctccctatatttagaaagctccttatccattctctattatagagagttatttttttatggttgaagctcaatttttcaagttctgttccttattttagctaaagaatgtatttaaatagtataattgaagatatttggaaaatcgagtttttacaaatgccaataaaattaataaatatagtaaaaacacaactgtaacagtctgcagcaacacattgcaattctgtgactgcagaacatagatttacagtaacgaaccaaaaagaaataaataactgtagaatttaaaaaaacttgacataagagaattatacgtggtatcagtgttcttttgaacactcctattccatgagtccacacctagaaaatgaaatcaattactaaagtctcaaacaattacaaatacaattgacttaaacaagtttagagttcctctaaatctttgtcgtaatcctttgtaattcacttcatgaatctgatttcaacacaccactaaactgcgaattctcttcgtctttgatgtgtgagtgcttacttcttcccaaagtaaggcttgaacaattcttctcccaaagacatttctcttgttcaatcaagttgttcaactgatcctaagaggaataagagaacaataacataattattaaaatctagctgaacaactaggttcgcacaaaaaaacactctcctcacaaaagaaaatatgaaaaaatgaaaactaaaagagctaaatcgattggctgttctcttagttatatgtatggaacatagcaaccctagagataggtacaaatttgatttcacaactgtacaacactttcctaaaaaattcatgatttgcagcatcagaatcggactctgcagcaacagagtaggaccagaaaggaaactttccaaaaaaaagagcaagatcataaatatggacttcaaacttgccaaatacattatgtttgatctaatcttatcaaaacacaaccaaaatcattaaagagaaagaggaaagtcaaagttaccaaacatagacaactttccataagagaattcattctcttacaagaagttctctaaacaaaaaggagacaactgaaaaggaatcttttctaagaagaaaatgagcaataaaagcacgaaatcaatgtaaataaatcagttcaaatgcagaagaaaatcacatataaaaaaatattttgacacctaatttgctaaaaaaatgactttaaaatcttcccatttcgcactttagataattaaaatatttttaagtaatatacaccaacaaaataaagttagcaaaaccatacaattaaactacccctgagaaacacatcattaaatagaaatagaatgcaaactttaaactgaagtttaatataaacaccagcctctactccccatgaagggttcagagttgagtatagaaaacaagaaataaccattactc

SEQ ID NO: 82418 - DNA, 1399 bp, Cannabis sativa
tatttttataaatatttgtatgtggactgtataaatgtttaatgggccggcccaaagtatttttgtaattttttttccttttttgtatttttttgtttttttccctatatatatagcatcgatattatggaaaatcagttccatttggatcaagagaagaagcattaaagaatggaagtagtttgggttattttaactcagctcaagccttagctgactatgctcacattcttcttcatattaacaaaacatacaaagctcaacattctcccatcatcgtcatcggtgcatcctacggcggaagtaattaattcattaattaacttctttattacgtacaataataattaattaattatttttaatatataatgttcctaattaattaataattaattagaattataataatttgcattaatttgcatttgcagtgttagcatcatggtttagattgaagtatccacacatagcccatgcagcattcgcatcatcagctccaatactttactttgatgatatcacaccacaaaatgcctatttcgatattgtctctaaagattttagagtaattaattaactctatctctacctaaatttaattattattattcaaatatcaaatatatatatatatatatatttatgtatgcaggaagttagtgagagttgttaccaaactatagtgaagtcatggtctgaaattgataaagttggagctatggttgatggtctttcaatacttagcaaaaaattcaacacttgccggtattttatatattttttatttatttatttattttaattaatcaattagtttctctataatattaatgttaattaataatgatgatatatcatattaattaatactaattatataattctataatcaacaccaaaatattttaacagctacctccaaacttattttttaaaattattatattttgtatttttactattaaaagatataactatttttcaaaatattatcttttagatttttaccactatgcataacataaaaacatgaatttttttacacaataaagcctagttagactttttggccaaaaatccccaatcggcttgagacggccctaaaattaatttctagtatatgactaatgtaaaaaaaatggtcattaacacttttacatcaggttattagtaagttttattttgataaaattgagcttaatgttttaatttgtactgttttaaaaatagataatctgaattattataataaaaagtcccatcaataacttttatatttacctaaattaatatatatgtgtttagggttttggagtcaacatcaaagttgaagaactatttgggaggagtatatacaagtgcagcacaatataatagtccaccaacctatccagtt

SEQ ID NO: 82419 - DNA, 1453 bp, Cannabis sativa
cttggaaatgctcaaacttctagctttatgtaataactaaacatcattttcttgaataagactctttcaaagtagatattgattatctaatttcatgaatttttatgggcaatcaaaggttgacaatgaaaaagaaaagcttgagtgatgccaatcttaaatagatttatcaccaacaacaagctcagtcaaaaatatgtgtcggtttgtagaaaatagtgtgtaagtgaaggagaaaaataaatataggaagaatgaaaatgaatgtgtagtggactaaatgcaataaaaccgccattaaaatccattaagcaggaggtgattaagattgttattatacatcagaaatgaaatatatatatatttcaaattattaaagaattgtggactcaacctatttactatacacaactcatacttttccacatcaataatacctattgtatatgtgttttgtttaaaagtagaataaacagaactttaaataaaaatcattatttgattttagagtatttttcttttaattttcaaaatatatcaccaaactgtatttttgtttttatatttcattttacatcaaattttttattatacaatatacatcaaattctttataaattactaaactttttattatttttatccaaataattgaattcaccatatacatataatttgacagctgaacacattggaattcatcattaactacaaaattgactgacatatatattgctctgcaacatctgcaattctacagccacatttatacattgtagaaattaatgctacttaatatgaaaaattaacaagagttaagtagtacgaagaatgtcattaaattacattacatgaagaagataatgaagaatgatcttcctctgtcaaaatcctaaatggacaacaacattatccttaaactcttgcttttatcaggtattcatgacaagatcaaatgtgtagcaggctttgatcgaaatgtaacaatttatggtctaatatcctcttgataaatctaccacctctcttcccaatgttagttccagcaacacttgatgcaagaagagatttggtgtcaggtctccatttcaactctttaagcatggagaataagctagacaatgcaggagagatttccccatccttaaggcttttgcaccctactactctcagactctcaatctccttccatgaaaggatcactgactctaaacaatttgttgttagcaatgagcacccttctaaggacagaaaattcaccctcctgtaaaaacaatacataactactctatcagttttatacaaccaaagtaataagtaacttgtttagacagactaatgagtttagaaacctttacctgcaaatacttgccaagctgaacacatcattctccaatccccaacaatcctgaaaaacaatctccctaacagcctcacataaggtgaacaaagc

SEQ ID NO: 82420 - DNA, 1765 bp, Cannabis sativa
  modified_base (165)..(167): a, c, t, g, unknown or other
aaccccacgattttaggggataaacgttgtaaagatcacaatcaactttataattaactgcctactatgtaattataaatagaggcaagttagattaaaaatgggacgaaaaaaattgaagaaaaaaggtcctgaaaaatcatcagaaatctaataagattgacnnntggactatgcagaattttaactgcaaaaccacataaaaaatcctttgtgttcatattttttcctttagtgtttttatttttctgtgtgtggttatcactattaggctcatattaggttcacgaaaatctgctttaacagtttgggaggctatcactattaggctcatatttggttaacaaaaatctgtattaacatttatgtatacatcagttcattttttgtattaattaatttattattttaaaatatgcctatttattttatatatttatttaaatgcatatttattttatatatttgtcttttttattaatttatttcctatgttttgttgtgagattaattaacgttgttacgttgtgccatttttgttggtttttatgcctttagcttgtatgataatttttttttttgttaaaatgtaatatacatcatattgttctttgggttttatttttgtgaaatatttgaaagtatcttgaatcttttaaaagtcttgaatctggaattcgaaagaaaacttgtattcatattctttcgtattatataatttgttggagctgaccaccctttgtaattgtagtatcttaaaatttatcttccaatgcttctcacatgtactacttccactaactatgcatgcttctaccttaatcagattgtattgggttagagtcaattaagtacaattttctattatttgcatgacattgattgatcaaatgtggtaagattttgattattgggtcaaaaattctaatattctcattagcatgtcattatatcaaacctaaatatatagtagacaatagttggaacatgtataattgcaggtatttgaatcttcttgctcaatatcctgtgacaacaaaagttgcattgtaaaacataatattatttggaagttattatatttcttgcttttttatattcattctttcaattggtttattccagattttagaattgaattttgttacacatgtaaaaattaatcgatatatatactaaatcaattatgtaccattcactcacaattctcctaactctctctttctgcaaccatctcagtagttgaaaatctttccagcaaacctctatcctccgaaagaatcaattttagtattttttttttctttgcattatatacataatttggagattatcacacaataaatattttattacttttacaaatactgctatatttatactatattaataatgattattgaagtgatttattcttatttggttttcgaggaatttttttttttgaatttttatgattttaatttaattataaaacacctgatataaattaaatatacgtacttcacgtagatttcttttagtattaatatatctgtctatatatacatcatgtctatatatattatttgtttcgaatttgtgatatgattatgtgattttatttttttgaaaactattattgtgatttattaattcgttttaaattaaattgctcagtatttattttctcttttagagttatactagtgaaaataacacgtgctacgcacgtggaacaaaatatttatgaaaaaaatacaattggtattcaatactactacaa

SEQ ID NO: 82421 - DNA, 2519 bp, Cannabis sativa
taaaattggcatatattagcaattttagtaagtatgtatttagaaaaaaaataattggattttgtaagtatggaaattcaaatttcccatttgtaataatactatcaaacgattcctcaatgtatttagtgctggttaaaaatactcccaaaaatataagctggtcgtctcaacttttaacaagactttaagtgaagtttgaacatgtcttaggtaaacattaattaaattagacatttttcaaaaattattaattatatcaagatttataagatttattaaaattttattttcaattaaaaatacatcaattgattaaaataatttcatattatttatcacctattttattaataatcattatgattatttttttattttataaatgaaattcacttcatttataaaaatcttccataaaaactatctatatataggagagatatgagatggtgatgtgaacgcagattttcgttaacgattatgagcttattttcgtaatagattggtacagaaattataagtgatctaagaaaaataatagaaacacaaagaacaccagatttttaagtggttttacagttaactctgcatagtccacgagtcattcttattcagattttgctgatacagaacattctttacaatcagtgtatgtatttttttctctaaggattttttgtcccctttttcatacattctgcccctatttattataacataagttggtagttaattacattcaaattcgaatcctacaacgatattttctcgaaattgtgagctataattatgctccacataaatatatgtagttattatttgaaaatcataaagctatattttaacccgcttttaaagggacaatgctgacgtgtgaataagacacgctgcaaaacgtatctcgccgggacatctcacttggtacttgaacatgaacaacttgatttattcgtaagtcttccagcaatggcatgagcaccagtgtattgagcaaatttaagaactgctctttgaccataaggccttgtagactggacaatcatgtcctgaaggttctcaatagcaacaataaccctggcagcgagctggagtttaacaagagtatgccttcctagagcgagatggatgtctccctatccgctatttatgttctccttgggattatgtcttctgacacgaaatggtttctcgtcaatacacgaatcaatagtttgtacatcctaaacatgttaaagactgtgcagtctgcgagtaataaatatactctattagttctgcatttaatgagttattccatttaatatttattgatataattatcaatatttttgttgattcatattccctgagaatgacacgtgtacattctgaagtaccagccgaatttcgggtgtaacaatttcccctttaaaagtcattttcaatgaaaagtgctttttaaatgattgcagagggtatcttttccacttctctcttatttctatccgttagatcctttgtatattcaatctaacggagtccagacccaatggtgtaaaactgaaaaaggaaccaccttttcaccatctttgccattacaaattttttttgagcttttctgcgaaaaactctatcccagctttacgaagctttgcatgccctcactatcactcactttctttttgcgagtatatacggatctattgttcgatcacaaggtattacgaagatcatcacgtcattcgctccatccctaattgcagaatcgttcatcgcaccacaacccgatttcaaactgtaagtgtctcatccttcttttttgtttttctttacattcctgggttcgataattatttttatggtctacattttttccattccatttggttttagattattccatatttttaactttggcctcgctgacttgtaattttgtcattttgacagcggtctcaaaaagaccaacccctacttccgtgatgttcgagcgacacaggctcctgctgggtcttccctttcgtctccgatctgtcgagtttcttatgaacgaggcaaacttgaggtccgtgggcctcctcgctgtgaacgagtatactagtaattataaatatcccaagtatacattgtagcagcatgttccgatcccagctgatgaggaaactcaggattatgtggctcatgcgcattaccttcagaacgcagtccctcgagaagctgaagaaagagcatcctgaggtaatcaatgtggatggtcacccacagttcttagggccaagcgtaccacactagctagtgtctttccgagatagtcagtacaattttttacacctggaatccttttcctccatagatcacattcaccataggttcgatagttggtacctagaattccatgttcagattagctgtactagctcctactatgggattgccgagaagtatgagagtatgctggacatgtcaggtcatatagatttgagttgggacttagaaccaattaacccttatgacatattcaggatcacaggatctag

SEQ ID NO: 82422 - DNA, 596 bp, Cannabis sativa
tttttttttctttcttaattcttcgaccaattaatattatttatttatttatgttttaaaagtttaaatatatattaaagtgttagtaaaataggtgttagacacaatttattaagttaggattttcaattgaaattgattatgcattcttcacaacttaagttagtgactcaaaatcaaactacaacaagccttttattttcaacttgtatcaatcaatgagtcatgttatatattgactagctagttaagtggaaagtggtcactacaaccaacaaagggaaacaaatgttgtaataataatgcaaaatgatatttggtccttctacattggatctattatatataatcttatcccaaatctattagttatgggatcatatcatatgtaggacctacttatagccacatggttgtcctcatgagtaggaatatatattgaccatagatggccaccttaaattgactctaaaaataaaatttgtcattgatttttctcttttaggcaattagaacaagtgctatggttttgcaccatcttttgctttgttctacaattaatttgttattatattccccttttttcaagtactagt

SEQ ID NO: 82423 - DNA, 747 bp, Cannabis sativa
tattattagtaaaagaaaaatgtaacgatatcattacaataaaaaccattaaatagtacccttattattatttaataaattattattattataggacacttgtaatattacaagaagatatccgtactagagaaacgacgaatatctactcagagcttgctagtaatgttgatgcttctcactttagaaggctttggagttgtatccttgggaacaaatatggtgagaagaccattttccacttgagctctaatctgatcaaatttcacattttctggcaattcaacttttcgagaaaacgctcgttttcctgtccctctctctgctacatgcaaaacgctgtcctttgagtttgattcctcttttactccttctcctcttatgtgcaaaatgtttccatcttctatctcaacttttatatcttctttggccaaacctgtttcaacatcgttaataaaatctccacatgtagaatcaaaacaatcacctcctgtaactaaattaaacagaagagaagagatgttataacctggaacgttgaatttgaagatgtgtgcagaatgggattcaagccagtccataagacccgttgatcccgaccagtcttcgaagatcggagggctccaaaatcgaaagaaagggtgactaaaaacactataggccattgaagtggtttgtactaatataattaacttctttccctggtttgcttataaaggaaattatctacatgtatttgcggatagg

SEQ ID NO: 82424 - DNA, 647 bp, Cannabis sativa
taaacacataaaagaaataaaagggaatcaattttcttactcaatgttgaagcatcattgttagatataaatcgagtatcataatgaaaatgaaaggggatttcagcgttatggagaggatggaagcatgcagaaggtggcggttagaagatttgtcattcccttagtgtagaagagagaggagcaacagagagtaaaccagagaaaaatatgaaatgaacaaaaaccttactcaatgagaaaaatacaataaaaagctaataaatctcaagaaaaaaatgagagaagaaatatttgggaacaacctaatgtgaatctcaaacctaatatagactcaataagtgacaacccaggtatgaagaaggtgaaaagttggtgagaattttttttaattggtaaattattatacaattactattttgttttaaatactaattaatattaagtgataaaaaaaaataacagaaagatagaataataattcgtttaaaaagaatttaaaaagatagattaataatgaaaatttaagagaggaatataaaacaaaactattaatattattatgtaaattgtgtctaagagattattagagcagttacatattttacatattttctattgtaactgtagaggagttacatattctc

SEQ ID NO: 82425 - DNA, 671 bp, Cannabis sativa
ttataattagttacaattttttcacttttagtcataaattttgttgtaactaaaagtaaatttttttgtagttagagaaacactacatgtagagaaaccatatgtaacattctttaaaatttgagatataaagtagctcaattgatggagctaattttttgtcattttttcacatttctgttctctattttgaaaaaaaaaagagtattacagctcatctaatgtgagtgctcgtaaaagtcacgtacttgatctgtaggttaatatgagagttcaagacaaaaagagaagaagaaaaaaaaattccaaccctagctagctattggaatttggagagtcttctcttgtagtgtaataaaagtcatgtacttgatctgatgtgatcgagcattgttattgagtattagtggtgctcaacacttttcataggtagcagtactacacgaatattggttagcgatattttctaaaagttattttcttaagttatataaaactcgatatttaattacactaattgcagtatgacttcaaagaaaaatattaaatattaatagtgccttttagtcattctttgtttttggggtgcatgagaatatggggagtatgtactaattaaaattggaaagccgcctatgcaaccacaaaacaacactcttattatttggctt

SEQ ID NO: 82426 - DNA, 1068 bp, Cannabis sativa
acttcttcaagggtcaaggaatccatttcatacaataatgtctctttgaattgaccataagatctgggtaaaaaacataataacaacagagcttaatcttcaacacttatagtaacatctatattctcgaagactcgatatgattgcagtatgagccttatcaagaatcatcttcatgtccctttcttccagcatcatgcagagacctttatcttattttagagcatctttaagatcctgctaaaccaaaagagccttcatcttcaatcgccacaatctaagatcgttttgtctaatgaatttctccacttcatactttatcgatctcataattttgagtacacactcaccgcactaatttgttaggaatcgaatgagaattcaccacaaatacccaaaccagatcataattcacaatgtggtctaaataattgattaaatcaataatcaaaacaaataagaaattaataacactgaacatagacgaatcttacatacacataaattgatcttgaaagagtcaatttattgcattcataaagttcctcttcagtgtaacaattctttctcacttcttctctttagagcttaaagaattcagtcttgaattttagagaaaattacatgaaaatataaggtttaaattagctcaatataggtatgtaactactagctaccccacttagaataggaaacctttctaacaactttgttgacttagaccaatgctattcaaactagctgactagaccaacatatatatatatatcatatatgcccttgcattgatccattgagataaatattacaatttaaaaattattttggtgcattaattaagataaatgtgtattagatatcatggtcaatcaatacacactacaaaaaaattactttgagtgacaacataattttttttaacttttagtcataacaaaaagttatatatgtcaataaaacatggtgttttgatacaattagttactactttagttttaatcacaacaaatattgtgactaaaaatacatttagtaattataatttatattttttgtgactaatacttt

SEQ ID NO: 82427 - DNA, 919 bp, Cannabis sativa
aaaaaaatacacatttgcttatacaagtgtcttttatttattataaaaaaaaacaaacttataaatctttaaaattattaaaatttatatataaatttacaaattatatttaatttgatacacgtgcggagcacactccgcacgtgtgtctcccactaatattatttaaatgttataatttatgttatacacatttaataacattttagaatgtaatcatatattttttaattaggttttaactatgttatcttttagcttcatgttgcacttttgcacaaagaccatacacatttcatgatcccacgagatgcacactccatgttgcttaagttcaacttgttaccaaacatttaaaatattatttctctgcacatggaaacataaggagtgagatgtgaagcccagtataaaaaatacaccatgtacagacactagctttgtaatgatcgcataagtatacatggaaattagcagataattaacaacttaatagtgattaaattaatatttatgagtatatgcctattagcacaaaatgggacctattaacacaaataggtatttgagaaataatttctctattatggaaattttattgaaatctaggtgtattatatatgctatatatgaattattatatttttttatattttatgcccgttaatagtaaaatgcaatgttttggtcattaatattagtgtcatatagatacagttgagtatcttgaagttagtggagcaaatgagtttgacatttagaatttcgagattgagtgggattatgagttttggccattttactcctagactctaaggttactctatggggaagaaaaatagatatcttggaaattttgccttaagcttgattttaaccttttgtttagtgggaattattggagataagcttatcttta

SEQ ID NO: 82428 - DNA, 772 bp, Cannabis sativa
taaattgagaaatttttacaaagaccacaaattaaaaaaaatatatataaaaatacgtcaatacaaaaaaaaaattatttttacattttaaatttttttatttataaaaataaatttttaataaaaacaataaactattttttaagttgttttataatttatttatagttatattgtagttgtgttgagtttttttaatagttgatttattgtttgtggtgaaattgatttctcattatttatagttattttcttatttattgtttttgaaaaaggtatgttttgtaattttaaaatgttaaagtatttttataaataaaaattttaaatcgtaaaattataaataaaatataaaacaaaaattatttttgaaaatttctcttaaactaaaatgtttggacgaataggcaattaatttatatttaattattaataattagggtgtaaaaaatcattttacaggttgtaatttttgtgcttagagaggccaatactcttgtctgcgggttaagccaatatagctttgaattaattatggagttagtgcttattaaaatggaaaagatagttagccattaataattagatactttttttttttttgcttaacatgttctcttatatacttattctattgttttggcagattcctattgcaatcttcgtattacttaatgaaattattctcttttattttatttttattttagaaaaacctatttatttatactttttaaaaaagacaaacttgctctaattaacaagataagga

SEQ ID NO: 82429 - DNA, 546 bp, Cannabis sativa
cctcctattatagtgtactctaggcgcccgccccctctgcctcctctgtctcctatttcatgtcctgcacatgcttcttcgtcattggatccgaaccccagcaatgatcttcccgttgcacttcgtaaaggtaaacgcaaatgtacctatcctattccttcatttgtttgtaataatcatttgtcctcttcttcttcctctttcattgcctctcttacttttatcactattcctaaaactattcatgaaaccatttctcatcctagttgacttgctgcaatgatagaaaatataaatgctttagttgcgaatggtacttgggacttggttcatttaccttcaagaaaacgggtcataaggtgcaaatattttaagtcaatccataaggaacaattgttcgcttaaaggcccgtcttgttgccaaggtttatgctcaggcctatggagtgaattattatgatattttttctcctgttgctaaattgacatctgttctactgttcattttcatggcagctactcatcattggcctttgcattagcttg

SEQ ID NO: 82430 - DNA, 646 bp, Cannabis sativa
aagtggtatttttgtaatattttccttttgggctgtacaaatgttcattgggccggcccacagtattgttgtaatatttttccctttttagaatattcctggttttttcccaaactaaaattgtaacaagttacaaaaatgattgttaagatgtcaagttaaaaacaacctaaagctacagcacaaaaaaaaagtatcttgtcttatgtgaggtattaccaactgaggaactctataataaccctatattacataagtaaaaagaaattatatctatttatttataatttccctcaaattattttttcttacagtttgccccagacactaatataatgtgtgtgttcgacatgtgtgagagttttagctatttgtaactagcgaattaatgatggactcaagtcaaataatacctgtactatcacgtactacaataattgaaaataaaagaaataggatgagcaacttctcaaatgaaaattgatattatttgatgagtgaatagcaataacataaatattaattattaaattgcaataatttggagaatattattacacaataaatttgtatctatcttcgagtttgatttatcatacatctgcataggaatcaaatatgcggacacgcacggccactgagcccc

SEQ ID NO: 82431 - DNA, 884 bp, Cannabis sativa
  modified_base (828)..(839): a, c, t, g, unknown or other
tttcgtgttattttttgaaaaaccgtaaaaatgtaaaaaaaaattatttaaacgtaaaaatataatattttataaaaaatagtacctttatgtaattattccaagattaaaagacatactaagttctaagggagataggagagccttgtgttggtcttgttgttgcgtgcatgaagagaagggagagaggatgagagtatcgtgcaaggcaattgtggaggatagtaatgaatgtttaggattttttattttggacttttaaaatctataaaataaaactcaaaatagcgtaagaaaaatttaaaaaaactcacttaacctcttttgaaaatggccactgaaactcgggagaagttgaagaatatccattttcttatactaaatcaaatttacctccacataaaatttaatttaaatatatctctttttatgagtattgtattcaaattatccttacactctcacataactaagacataattttaaacataatagatttgtgttctttgtagatggatgtgtaggtttgtgagaaagttggggcaaaattttgattagagaagaattaaaattattgtgaagtgataggagtaaaattagtagaatgattaaaaaaagaggtaaatataatagattttgaaaaagagggtaaaaattaaaagtatcaagttaaaaaaaggtatgtattgtaatttcctcctaaaactcttttaataaaagcccaatgaaactttttaacaaaggtccaaatcaactcaattaacgcctcacacgcctcaaggcgtacgcctcaaacaccttttaaaacattgattattattattattnnnnnnnnnnnnattattattattattattattgggctcatttggtatgttgtatta

SEQ ID NO: 82432 - DNA, 703 bp, Cannabis sativa
atttccacttcaaaaaaggtggagattgaggattgtcctcgagtttctcacatcgaaaccatgcttaaagatcctctgtacactcaataattgaagctcctctggtgtatcaggtattgttgattagttcttccctatcagttatctgtttttctctcttgcttattacattttctttaacaaagttgtctagcatcagttatataaaaatagttgttttacggatgataaaacatgcctatagctttcatcatattatcttcctctaattttgataattgattttcaatttttttttgtaatattcaggaagaattgtgttgctgtgttgggtggttgatgttgttgcttctcaggcttgttaatttttccggtctctccaagttggtggtttcgttccttgtgatttggttgtgttgttgagtttgtaaatgtcattggtattgtttggtttgtgtttttatttctgatgttatgatttcatagtttgatgaatgaaagtattaagtgtgggatactgctttagtttggggttttttcagcatatgattatgttatgatgctttttccccttataagtaagtccacccttttattacataatatattgcagtttcttactcagactaactcaatgacaatgagctgtattctgattggttctacagtattcaatccccaatttgtaattggtcatcataat

SEQ ID NO: 82433 - DNA, 1576 bp, Cannabis sativa
tctttttaaataagctgcaagctctcaatgtggtccaataatatatattaatgtaagtatgtatctacatatatattgccatactgagacttgagaatatagttggattacttgaaagtttgagtggatatatttaaatttattaagaagaatcaagaatcaagtcattgatttcatttcattgatttagatattgtgcgtacccttacttttttatatgtagaaggtataaaatgttgtgtcatttactaatttagaagtattactatattgggatgaaatttggcactgaagagaagatcaagagagtcgaaaatgagtctagatttacatattgtcatcgccgccagaaactgtttatttatttatttttataatgtcacatatctaatggattttattccaaaaataaaataataaaaagagtataatatgagtatgcttaatttgcctttacaaaatgaaactttcctaatagttacatattaaatacaattaacagcacaataattacaaaaacttgtgtaaatatattatctttcacaaaaagctgcttcaatgactacatttcgtggaaatgccataagaatatttaaatatatatttatataattaatcacactaatagtaacattattaaattaccaaaattatattatgaggttaaactttggtaactactagatgcaatataaatttcacagattaattataacgtgggataaaatacacacatatttcttttatatatagaataaatcacacaaaagtagtaagatttatattaatatgtttggcccctcaaacatttttttattttatatttcacaaatgagaaaggaatcatattccttgatcatcaatcagatcgattcaataattatattctcttaattgttgacgagatgttctttcttttatcatttttattattacaactttcactatttttttgcagctagctagcaagacagacaaattaacaagttctttacaaatgactaatcaatttgttagctatacccgtgagtacttctccaccttcctatagctgtaattgacatacattatacataaccttctctcgtggttatccttaatatataattacaccacagcaattaaatgaaaatattcagtatgaacatgcatgcagcatatatatccatttatattccttacataaatatatatacactatatatactaatatagatgtcacataaacataataaagatcatgtgtatcacaatatgtagtatagcctagctaagctaagaccatactcgatcttatgatttatgaaatggaaactgtgatcctttttattagggctgttctgtacgtatcggatttggtatgattttctttttctttgaaccaaactattattaatattattattattagtttttgaataaatcaggagattatcattattattattatggttttctaaaaaatttaaaatatatatcaaattatattaatgttattcaaaaaaattaaaatgtattggttaagaattgcagtttgtattcaaaattgttctaatattttttgtaagtaatactt

SEQ ID NO: 82434 - DNA, 3264 bp, Cannabis sativa
  modified_base (942)..(942): a, c, t, g, unknown or other
tttagaatttttcttaacccaaccttctactaatgtgtcatgctaaataaaaaaaaatgcattttatttttttttcccaaaatatttaatattagattgaagttgtattagaaataataacaattttaataaaattgtttgagtttttgggtgcttaaatatgtaaaatatgcttttgtaatatgataatatttaaaaatattatttacaaattataatttttttttgttaagggcttacttttttaaattaaaacaagacctctaaaatatttgagacgaccctagtataagtgcaatgcacgtaataataacataatgtatgaaaaatttacactattacaccaaatttctttttttttttcttctttatgttattaaataatattttatgttttttaatatgtttggttccttttattaaaaaataaaatataataagtcataactatataaaaaaaaaattaaggtttaaggtacctaataaaaatctataagaaattgaggttaggtatgatcatcgttttcctttatcttttctactcttctttttgcttgttattgattatacttggattgattatgtcttttctactcttctttcgtctatacagcctaagttgataagtcttgcatttggcacactagcaaggtaaccatccaaatttctccatttcctagcaaatgctcttctttttcttatggtttagttttatgaccttcacctgtttgtcaaaatgcctgaataagattgggttttaccccctatcaatttacggttctaatatgaattgctcttaggtggcgtttggttgcaagtaatgaaatggaatgaaatggaaaggaaataattttctcattgattcttttgtttggttgtatttaaaactattggaatacaattccgatagaattggtcttttccatcattttggtggaatgnctattccattttgaaatggaaagaaagatcattccaatgcaagatttgaaaaaatttaatcatttttttatcaatttttttttttatgcattttaaattttattccattcctattcacattcttattcctatattttcattcctcccaaccaaacgacctcataagtgttagatttatctagttaaataatactctatctagaataaaataagtaatgtcaaacataacaaaacaacaaaaaaacaaaaatcataaaacagaacaaaaacatttataaaacaacattttaaaattaaatatcatcttctcaagagcttgaataccacaagttttagtagcaccagcatcaacaaaatcatcatcctcctttgaaatcaaatcctacttcgatagactaaaaaagaaagaaataaaaacaaccaactaataaaaattcaaagcatggcaaaaataatactaaaataagagtaatttgtgacataaatacttaagtttaactcctatttacaaataaatatctaagttttagttttggtagtaacaatacttaagttatatttttggaactctgtaggtacctagttgttaaatgttaagtaaattgtcatgtgacaatccctaattagtctaggttatgaattttttattttaaaaaaattaatttaaatatactaataagaaaataacacgtagatattgacttgacatttaatgtttaggtacctatagtgttctagaaatataacttaggtactattaccgctaaaaattaaacttagttatttatttgtaactggaagttaaacttaggtatatatgccgcaaattactcgtaaaacaataataaaacaattcaaaacaaacatttttcatatcagcaagaatttctgaaacaacaaacaatttatcatcaatttttgtgcactcttgagcagtagatgcatcttctacaccttcatcaacctttgcaccaacatcaacaacaacacacacctcatcaattttaacattttcaacattgaacacaacctgtccacgatcatctccgccaccaccatcctcgtcattatctggataaccgtccccacaattgtcatccccatcatcatcatcatcatcatcatcaacatcatcttcttcttcactgtcatcatcttcgacctgatcatcttccttggaatcggattcttcatcatccttattatcgacatcatcaacaacatcattgtcattttctgatgagcgaagcacatcatctaattggctcccatgatgcctagaagtagcatgtaaggactaaaaaaaaagaatggaaatttgaatataaacttaaataatattaaaaaaaaaactatacaaaaactacaaaataactacattaaaaaaccaaaaaagaattatctcgataagtatatccatttttttgttcaaatcagcaaaagcagacataataatccgctgctggctaagaacaagagacacatctttcttcaaatcctcatacttaatatgagtgacatgctcatgcgccttagatgaggatggaccagcatgatcactttctagagaaaacttagacactgatttagaatcgccatcacgattgcctttacctttaaccttaatagaggaaggagtcgtgttagtggaaaaataatcaactaaattcaaactagatctctcaattgaagttgaagaaatactttcaaattcaaatccttatactcaatacgagtgacatgctcatgcatcttacatgaggatggaccagcacgatcactttccagagaagacttggacactgatttagaatcgctatcacgattgcctttacctttaaccttaatagagaaaggagttgtgtcaccggaaaaataatcagccaaattcaaactagatcactcaattgaagttggagaaatattttcaagttgtaactgtaacaaaacaaacaaaaaaaaaaaaaggactgaaagtgaataaatatataattcaaacaaaaaaataaaacaacaaaaaaacaaaagtaaaacaacacacatatatctcctataaaggccaattgaagatgatgttgttgacattgtccatttttagttgagatattttaagatttggcattttaggcagttaagaagtcttgaatgccaatgtttgaatacaaagaaagtttcccaacaacgtaaggacaacactcaaaaaactaaatttgcaatgcatacggaaaacctaacaacctacaaaaactactatccttttccttcttcttaaccgtcctaatattagcatcgatcttgcccttaaaagattcaatagtcatc

SEQ ID NO: 82435 - DNA, 970 bp, Cannabis sativa
actaattatgtgcagagtacgcttacactttacaagtggacgagaagagtgacatatacagctacggcgtcgttttgatggagatactaagcgggaaaagatcagtagacgcagagtttggtgacgggaacagcattgtggattggatgagaacaaagattaagactaaagatgggataagagatgtgttggacaagaatgctggggcggcgtgttcgcctgtgagggaagagatgatgcaaatgctgagaattgcgctgctgtgcaccagccgcagccccgcggaccggccctcgatgagggatgtggttttgatgctgcaagaggccaagcccaagaggaaactgccggagcttactacaactacaactactactactactcatcatcatcatcatgtaatatgcattggtggtggtggtgatagtgggagcgatcatgatagtattcctttgccacaaaaaccacccgcggccgattgttaatatatgattttactaattttatatgaaaatggtttttttttccttttttggggcttttttttttttttgttatttttcatatgtggggggcaattggtataggagaagtgatttcttattttacttttcaatggaagcttaattatcaggtgttctattgttttggtacgtaattccttatttttttttttaatgtgtgtagtgtatgtgtttataagttataactatatatcggagattaacataaatatggatgctcgtaacaagagtaaacaggcttaggcaccgtacgaatacggagtagatgatgctcacaagatgtacgacataaaggaagttcatatttagggtgttaattaacatacttgtgagtatatctggtaaactaatttccaacagtttggtccgtgtcgaaccttgcccataattcaaaggtcatgcctaacctaacccataaataggaattattcgtgctaggtggggtc

SEQ ID NO: 82436 - DNA, 802 bp, Cannabis sativa
  modified_base (42)..(54): a, c, t, g, unknown or other
ttccccaggcggtgtgagattgcacagcttacccggtatttnnnnnnnnnnnnnacgggactactgactatcacagagggtccccctgagaatgaacaaccaaatgaccaacaagagccttctaataaaaatgagagcaggagtcaacctgagaccagggaattggaaatccccgtaagaacgagagaaatcttaagactcaacctgggacaggtgggttgccaccgagatatcgccaacgtccttctcgaacaaacagggaaggggcacgtacgaactccagtaggggcatgcaacgacccatacccaagggagaaggtcgggacgtgacgaggcgagtgccagctcgggatgcacaagaacctgtagtcgatcaacgcaaagaagggatgaaactcgtcgcaatactgatcgagagagtacaggcacaagtagaactgaaagttactctaggacgaggtccatgagtaggatgaggtccatgagtaggacgaggtccatgagatcacagttaatctacatgacgaggggatagacctcggcgtagtgatgatcgagaaagtatgagtaatacaaggagcaggaaatttaagagttactcagatacgaggtccataagcaaccattaatgaagacaaccagatcttcgtgaacatttaaatcggagacaacctaatttgtgctagcgcttaaattagaatgcacctaatttacgccaacaactaaatgccaatggaaagcaagaggatccaatccaatttcgaatcagtgagttgggtaataaatttaagagataccaaga

SEQ ID NO: 82437 - DNA, 772 bp, Cannabis sativa
agaaaagccaattattctaccatctttttcatttttccataataaagcaaggccgccactcctgccttgggcttcaacaataaacactccttcgtagcccaaaccacgaccaacaaactccactctagctttattactttttgtttcacacagaaaaacaaaattgggttgcttttgagtaacagtctctttaaggaattgaaaagcccgttggttcccaagcccacgacaattccaacttaacacattcataagtcttggcgggcctgtgacacagaacccgccccatctaagttttttgggcctgctgacataacaagatttccactagtatttccattcggcccaaatgaaatatcttcagcaaatcttttcctttttgattcaaggattagtagatcaccatcaatgccatcattaacttcttccctcatattggtatctcgtatgatatgttcaatattcacctttttatttttcacctcacttaaaaaaacaaaaaaaaaaaatacctaacgtaattttatttttgaaataaaaaatagttaccaaatacatttattttattttccaaacataaaataaaaatacttcaagatggatgtgaagcttttaacaatggtgaaggtagaaaccaaaaagagaaaaacagagcaagtggcagagcctatagcagaattgaatgccaagaaagcttaaccaactggttagcttgagaccaatttatttatactgtaataatgttcagtacatgagaaaataacagaaaaga

SEQ ID NO: 82438 - DNA, 1427 bp, Cannabis sativa
  modified_base (49)..(58): a, c, t, g, unknown or other
aataaaactaacactacgtggcttgccacgtaacaatcacctagtatannnnnnnnnntatatatatatatatatttcttcgttatatatatataaagttgatgatgatcaggtgccttagatattttcaaaatccaaaacatcaaattatagaagagtaataataaatatagatagatataatagatattttttattgatttaaaatagtcacacgagagaaactatatttcataaaaattgaataagtcgccaaatataataaaatttgagaaccagataatataaacaagccaaatataaaggtcaataccaaaataattaattaaaacgtaatgaaccattaataaattattcatttgtacttgacgttagctccaccatgtacatattatatatattaaaaaaaaataaaaatagcaactggctttttaatttaaaacatatttattagccgaaaacgaaatgtatacgctttataaaattaataaacaatgatctatactagcctaataaactatatataatcagaatttgcggtataaatatatttattacaaataaatagttaagcttaatctttaacgataataataataataataataaaatattattaatttttgaaactttcagtaagtaattgttatatgtcaaattatgtttttattagtatatttaaataaattttgaataaaaataaatatttaatccctcaaacattgaaagactgtcatgaatataccacaaattattactcgatatatataataataataatgttccattattggagattctattgttattattaattagaattaaacttaaaaaaataaaataaaatagaattaaactttgtttttgatgctttgacatttctcaatgtcaactgtctgacttttgtaagagattaaaaataattttacgataaatatttattatatatatacatgcaagttgaacgcacgcagggtcattaattaatgtatatataaatagtgtaatattctgattttttttttattttttgacaaaataataattctgaattactcatagttttaatatggaatttcaaactataatgatgaagtatattcatcgaatattccattaacgtgcatccatattcataaacttgtacaaatttatatatattcacattagtcattaattagttggttaatcgttaattaagtattaatcgttagttgtatattataatgattacttatatcataaaaaacgattatatatacataactaattaattactagctaacaacttcttttgacaggagtctaattttgaaggctgcctccaaatcaaatctaatgatatatatatcatgatcagcctatgctttcatacagatcatatatatatataatacatatacataaacacatagtgcatggtcact

SEQ ID NO: 82439 - DNA, 747 bp, Cannabis sativa
gcgttaggcgggttgacaacattttctgggttattgccattgtttgtgccttgatcgcccacttggggatcacagggctcatcgcagttttggggtgtttgagaccgtgccctaagacaacattgaggtgatcacgaagatcacccctgtgaacatggtatctccctccttgaggtgtctccacggagccagacctagtataaacactgggagaacgactttgtgaggatgaagaataagattcaacattgtttatctcattttgcggctgggctctccttcgagggttgcgtcactcgggatcttcctcttgtggcacctcgcagttagcatttcgtgcgaattgttccctttgcgtaggctagttcaagtcgagtccctcttgtccagtctggtgttctctacaagagcgattattaattctccgcgtagtatttattacttgagggttatctgaacgcatgtttggtacttaaggaggacgtcgggtcctgacccttctgttgaccttagcctgcagagcttgcatttgctcttgtggggccgtatattgggtcgtggtcagctgaatgattccctcaaacaccatagcttgtgtgataggcgggaattgtcccacagtggctgccggtgtcgatgtttctccaacatgaccggacaggaaataagttgagggggtaatggtggtacgccccactcctccatcgatggtatcgacaggtgttgttccattacctgggagtggaa

SEQ ID NO: 82440 - DNA, 1071 bp, Cannabis sativa
  modified_base (1036)..(1043): a, c, t, g, unknown or other
aatggaatgaaaattatttcctttccattccattccatttcattacctccaaccaaacgctaccttaatgttttttactattacctattcacgagtgatattcagtacacttcttatttttgttttttatttttattttttttgaaagcagcacttatttattcgtcacggatgaagcactatttggcaagcaagagacaaaaatttccttccacggacgcctatggaaaagcttacacgccgagtaaagtaaaggtagcttgtaataataataatagtttaatttcaaataataataataataataataataataatgattagtaatattattgagatgtgatttaatgatcatgtgtatgagataagtacaatgtttgatatttatcctctattcttgtttataacaaaaatatataacacactattcactcattttatttcccctctaactgaaattgttattatgataatagagaaagtcttaaccatttttctgaaggtgaagcttaatgttgtagtggtagatagacaatacctataagtaaacataaacactaatctacaactcaattagtacacatgaaaaaggtacttatgaaagtgatatcaccttcaagtaagtaagacaccatttctgataacaacgttgatgtgaaatgtgtgaataaatttaaaggaaaacaataaagtgtctttaattcttaacatgaaataggtaccttatctctcaattaaatatatcataaagtaccttataagtgatgtaacagtcaaataaaacatttgtgaatatattttcaaaaaaaaaaaaaaaaaaaaacatttgtgaatatgaaatatttaagagttttttacagcaaaatttttttaactgtcgtttcatttaatttaactctctaagcttaaattttgacggtaaaactcttcaaattactgaactagtagcaaatttaaagtatcattcggttaattgtcactataagctgtttatgtgtacactcttgtacatatgatatatttatattagtacacnnnnnnnnattatttaaaaattattttcaaaattca

SEQ ID NO: 82441 - DNA, 1228 bp, Cannabis sativa
tttttttttttttttttcaatactagtgtttatatttttttttaatgtttttaaaaaaaatgacattatatttttcatactatttaattaataactacataaatttgagggtttaaaagtattacaagattaaagtattgtcctttaaatgatatatgtgtataattaattaagacagtctacactaaaattataatgaatcatccgcataaattatttctccaaataatattatttttgtatgttgatttaattatttttttttttatgaacaatgaactttcaaggttcccaactttactagtactttttttatgtatgaaattgattgttgaactctatttttagcacaagtaaaggaaaatttacacaaaacattatttttaataaaaaaaattatatttttatatttatttatttatttatatttttaaagtattctataaatacaataaaaacactatatgaaaataacaggaaaacaatatcaaaataacataaaaataatatgcaaatagtaaaaaactaacaacaaaacaatatgaaaacctaaaaaattgtattttctgtaaataaaatattaaaacccgtaaaaatatttaaaattctgtataactatatttttgtaaattttttattatttttgtgtatttataaaataatcccaaaattaaatataatgagaattattcattataactacaacatacatattaaataacttattcatttatcactattcactagtattgcaaaataaaaagaaaaaaaaaatgttacttgagtcacttcctttattattattatgtcccatattgtggggttggttggtgatattcacaccacctacctaattctccacccacacttgattatcatgcattcatttaatttctctatttacttgtcattattatttggtattgtaccacactatactactactactactcctagtcctccttccttagattcaattttctctatatcttcacttcacttcaatttattaatttacctctctttctatttgtacatatactgaaaatgaacattgtttttagacactagtgtatctagcttacatgcactttgtatataattagcgatattttataatagctattaaattaaattatacgagacttaatacttaattacaccaataacaataaaataattttagacaaatatttataggaatttttaacatttctcttaaaaaaaa

SEQ ID NO: 82442 - DNA, 581 bp, Cannabis sativa
agcaatacgtggctcggcacgtacattcacctagtataaatataaatatacttataatttattatttttttatataaatattaatacctgcgggttcccgccactattaacgtgtaagaaattgaatctgacgtattaaataccgacggggctcgccgctaatggtccggcggtattaatcattaatagcggtggatgtgttagtctgccgctattaatgattaatagcaaccgggtattacccgcggggcaatacccaattatgacccttttttttccttttgatattcgagaagggtgatttgtgaatggacaggagaggtgctaaacaaaacaagtaggatatgactatgaccataaactaaatttggcatgcaacacgcttataaatattagaacagtttaatgttcacgtaacattacttaaaataaaacacaatttaacatctcacaaattaaagaagacacaaaagtactacaatgacaaacaaccaacactcttcttcgatgtgcacacaacacaacgaagcattattaagatacgattcttccacacaaccatataattacgttactgctac

SEQ ID NO: 82443 - DNA, 1108 bp, Cannabis sativa
ctattcctaacacgtcatcgtcgtcaaaatttgggtaaacaccttcaagcttggctaaacagagataaatagttgagtactcatttcagtgattttattttgggtctattagcgggattagtgcatatttagtcgcagtgcatgacgtttctattgttagggcgttacacctataatataggcgactgtgcaaaatcatagcctataatgtaggcgactatgcaaaatcgtcgacaattcttcttatagtatttccaccagttttctaatgtcaaaaaaacttttactgacgtttttttatcgacgcctattccacccagttttgtgatggccgaatagacgtcggtcttagaaaccgacgagaataatatacccaactgttaaaaatagtcagaaaatcccattttttcagtagtggcagaattagatttcgtgcttctgtctagactaagaaaacctagtgtgattcggctctccaagacttacacaattgggttggctattttgttgttcgaccttggaccttccttatttagtaaggacatgtgggtcaaaataattgagattaataattgcctgtcaactccagatcgggtagagtcaattagtttgattgggtcgaaactaaagagctatgaacacatattttgggccatgtgttagcaccctataattttgattttggaaatcgtcatttccttacactttttccactcatgcacattttgggcacgattattgaggggtcgaaaggaaagtgaatagacttgccataaatgttgagatttttcatcgctatcacattccatgttaccttatttattctttgtggaaacagtaatttttagtttacccttaggaatatttccatttcttcgaagcttgaagaactaaaacaagaatgtcacatctcggatgatatggaactctccattcttacttaggaagaagagctaaattggagggtcacaaatcgatatgcccaatacttagctcttgttgtattgaagttttggattttccaacccccaatagtgattgtcacatggattggtatggtacacattttccatcttactcccagttccgtgtatgtcattgttggaac

SEQ ID NO: 82444 - DNA, 1428 bp, Cannabis sativa
tccgtgaaagtacaataacgggacaaaatcatatccctatatttatattattatacatgttatttgtgtttcacgtaagagacacatgaatttcaagtattagcttaaaacttattagtggatccaaataatataaattggtccaagtccaaattccattctgcaccttccaggagaacaacaaggtaattcacttaggtgaggttatgtcaaccctagtcagcatccgaatggcctatctccgtgtatctggaaaaagttctcaacgtgtatctagaagattattatagtttcctattttttgtcaaattgcacaagatcatgaattacttcccccaaagtctcaaacagagaataatattttgctaaaaagggaaactgaataattagaaatcacgtaattaatatgtcattaattactcatgaatataggacacgcatacacaagttacctcatgggctagctaggcttcaccagataagctcaaaatcaatgtgttatttgtaaactcctcattagaaaaaacatgggaactagtatgatatctataatactataaatactcactgaattattcatgcaaagggtttaaaatttttgacttatatacttgctgaggcaaaaaataaagtgctcatgcttattgtaatctcaactgtatatttagctaatctcataataatattgactcatgaattaaagctcgttaacactccaaccacataaaaattttgagtgttttctttatatatatcttttcgaattatatcttctttaactcttatattattaattagttttttttttttttaaaaaaaaatgggtaaataatacagtacacttcttagatatataaaaatttggtaaagtagtaaatttataattttttttctttaagatgtgaaggttttcaataatacctttcatgtatctatttaaattttattttttaaaaaaataaattaaagtgtcaaagattcaaatattgacctttgaggagtaatattgagaagaaatcttccactatagtaaaggtttcgtttcatacattaaaaacaagttacataattttatataaaatttgttccactaataaaattttgtaggtccttcattgtatatataaacatgttggcaattacgtgtgttaaagaggaccacgtacgtacacctataaatatataaattaatagaagaaaacaagaaaagagcaatataataattatagggccaatggtcatctttgatactcggtctcatcgtgccaacacaaaaagattttgtgtgcatttcccaccaatacaaatttaaaatgtaatgcctgtggttgctctctctcctttcctacgtggtcaatcaacttcattgctctccacatctatccaatatcataatattcattgctatgaagcaacaataatagtata

SEQ ID NO: 82445 - DNA, 1682 bp, Cannabis sativa
acccaccttagaagccaacaattttgagataaagctagccatactccaaatggtacaatcttcagtccagtttggtggactgctatgagaagatccaaacctaaatctatataacttcgtggagttatgtcaaacattcaaagtgaacggagttagactgttcccattctcactgagggagcgagctaagagtttgttggtgtccttgccacccaactccattgatacatggatcgactggacaatgaaatcttatcaaagttctttcctccagctaaagctaccaagctgcgaggggagattaatcatttttgttagctcgacaacgaatatctctatgaggcttgggagaggttaaaggatctcatcaaaaaatgtccacatcatgggattgagaagtggatgtttgtccataatttttgtaacgggttagttggtaatacctgaacaattatagatgtcacagctgatggggattttatgagaaaaagtggagatgaggcttatgaattgcttgaagagatggccatgaataaccaacaatggccaactgagagaagccaattgaagaaagttgcaggtatgcaccaagttgatgctatcactaagttgacagcccaagtggaggccctgctaagttgatgacagctcaggtaaaataggcttaagttacttgtgagctatgtgggggccctcacacatatgacacctactcggtggatgtgaacagtttgccaatggatcaagctaaagttattgggaactattctcaaaataataaatatgggtacaaccaaggaggggtcatcatcagaactatcaagggcagtcttcaaatcagcagcaacaagggttctaccaacaaagaaatcagccccaaaaagctcaacaaccatcccaacaaccaaattctagtggaggctcaaatatccaagctgatttattgccccaattcatgatggagactagagccttcattaaaaccttagaatctcaaatggggcagttgactgctcatatgggcaacagtactcaagggaattcacctagcactggtgaggtaaagggcaaagagcaatgtcaagcaatttacttgatgagtggaaagagttatgaggggccaagagttgagcagacagttgaaactgtggatcagggtcaacaggcacaagctgaagttgataagaggcaagttgaagagccggttactgattatttgccgactaatgaagctaatcgcctataaacattgagcaccatataaaaattttgtaccctcaaaggcttcataagaacaaatcggataagcagttttcaaaatttcttaaaatattcaagaagctacacattaacatcccttttccagaagctattgagcagatgttgagttaccttaaatttatgagggaaatttagcaaagaaaaggaggtttgaggaatatgagatagtggcacttattgaggagtgtagttcaatcttgcagaagaaactaccgcccaagcttaaagatccaagtagttttaaaattctttgctcgatagggggttcagttgagacaaaagctgtaatgaccactttagtaatttggattagtaaagtcaattagcactaatttctattattttataattatttatgaattaattatttgtggacctcaatatttagaaataaatattag

SEQ ID NO: 82446 - DNA, 884 bp, Cannabis sativa
cgaaagatgtataaacaaaaacatagagagatagggaaaatgcaataggagaagaaaataagaatatagaatactgaggtaagatagagaaagtgtgccgaagattatcatataattcaaagaagatttcaatagagatatatgtttaaatagaaacaaaggaaaatattataatattattatctgacccaaaaattgaactttttataattaactaaaaagataaaaatattacaaaaacaatacggatgcacatgttttttaaatattcatacggattattaatttttttttccataaaaaggcagacagttatttttattttgttttcacaaaaatattaatattagttgtttgtaagttgattttatgttttttttatgttactttcacaagctccataaaaaaatatattttttaaaaaaaaaaaccttacaaaaatccgcttatcatcagtaaatattgcaattataaatttttatacatttttttgttgtataaatcagcaacatatgtatattatttcaactttcaagtgaattacaaactataagcacctcttaaaaaaggtttatttgtttaatcttctatatttacatctcatttaaatagtccctacccatattttctatcagagaaacttattcccctagtaatacgctaatgactctatttttaacttctgttttataatttgtacatttctaattacaccatgaattgtattctattaatcttattataaatacacctgaatatagctttgatcgttattgctggagttttctaactcacccatattttgatctgagttagacacctgtggctatatggacaagtaaaaaacaaatgatttattgcttcattaccttctcatctacaga

SEQ ID NO: 82447 - DNA, 1224 bp, Cannabis sativa
gaagttcatgtttaggatgttataaatatatttgttagtaaatctaggtcatggtaaatatattccaacagttgcaaccaatgctacacttgttccttttggcttccaacccttggcaactcattgaaaaccatccaaatctacctcatctactttattttccacaatatcaatcttttttgcaggttctttctttatccattcttgtttacctccactttttttcctacattcagttgtgagatgacccattctagagcaatggccagacacaatgggtttccattcatacgcgacaactacagaggtgttgaatccattctcatcttaaaagtctatgcttcctagaaaatcctgtttcaatgctacttcgatatgcactataggatagctaagtttatctcttcttttagttgcttcatcaaccataataggcttgctaacttgaccaataatcttgaacaaattttttttaccccaatatttgaagtctagatcatcaagatggatccaaattggaaccaccctaatgtcatccttcttgaaattgatagcatgtctcttattgaagaaattacatgcccctttaagcatctcatttctatcttcaatagagttaaactgaattaggaacataccctaggataccatccctactctttcaaccttgtctctccacattctccttacaaaaccttctaatattgatagaaggggattagcccctaatacatagcatacaatagaaggtttctaaaaatcaatttcctcttgaatatcatcaacaattatcttcaccttactggtcgaaataaaattcgagtatgatttttctagactaagcattacagtaccagatcttaggacagaaagattaggtgaaataccttaagcaatgctcgcagagcaataatcattagtctccaagaaataaagtaccaaatcatagattttaattattattattattgcaacacagaaatgtaaatttgtgcttgttgttttcattgtgggggaagcactgagtcggtttcccatgctcttcttcactgtcccagagttaagaccatctggcatcaatctacttttaaacaattctttgctgacaatcgtaggctggatatcagagatttttacctccatagccttgtatcacttcccaaagctcaacttcccttacttattggaatcatttggcaaatttggaacaccagaaatgctcac

SEQ ID NO: 82448 - DNA, 780 bp, Cannabis sativa
taaatgtcaatttcgaaaaaaacgggtattttcacaccctttagcttccctttttataagtgggagtgaaaaaacagcctctaaaggccaacattgtagtagtgtgactacataatcatatatatgatatacatcaaaatatatatattgcatcatcaaactctcaagcacaacatacatacatgatatataaatatgtatatatatatatttgcacttaccatcgtgtttctcacccaataatgattcaaagaaattcactcttaaatttggtgatcttggacataaaatgttttctcctttttcttgctcctccacttcctctttctcgtcctcttcttcttctaccacgcacatccattttctctaaagcctcgacctctattactctgacctctattgctctacaatccttttcacccacctctgttttctcctccatagtttctaactttgtttaccatcttttgaattattaaagattgtagtgctattaatgacaccaatggggcaaactattgatcagaagccttttcttttcgccatcaaccgaagcctcccctagagattggttttgggaattcaaatgaaccatcgcaattttttttcctataagaagatagagccaatggaagggaggagataaatgaaatctaaagagaataaaaaattgggaagagtacacgataaaattaaatggattatttcacaaatacatagaaacaacaaaaaaattacaaaaaatattttacagaatttttaacattttaataattgttt

SEQ ID NO: 82449 - DNA, 1629 bp, Cannabis sativa
  modified_base (1363)..(1366): a, c, t, g, unknown or other
accactttgagaccttgttctcatggaatgagttcttggaggatgttgtacaccagcaacaggctttggagaaatgtctgtcggaacaattaaaggtgtcttaggtacttgttgttgtggttgatttattggagctggtgaatgggattcagctggagcaggattatttaactgaggcatgttttgaggtatttgttcaggtggaggtataacttcagggtgttgggttatgggtggggaaatatggtgaggttgaatagcttgttgaggaatctcaggaagtgtcaggttttgtggtgtaggcataggtgagggagtagggtttagggatggggcatcagtgggtacctgaggtgctgatgcttagttttgaggctcagcagcaacattaatagtgtcattagtatttttaggaacaagtttagtacaaaatgtggcaataggaacaaagggtgaagagtgtacctgtactggtgttgaggatgtggtgtgacagtagctgtggctaggaatagcttctcattgaacaccacatttaagagcaatataaattctgccttctcaactctcacaaacatagcctttgtgatgagaagaataccccaagagcagacattacttggatctgaaatcaagtttatgctgattgtatggtctcaaatgtggatagcatgcacaaccaaaaggtttaaggatgctatattcaggtttgctgtcaaataacacttcgtatggagacaaaaaatcaagtatcttagtaggtaatttgttaatagtgaagacatcagtactgaaggcataccaccaataggtaagatccaaatcagattgagctaaaatagtgaggccagtttcattgatgtgcctgtgttttctttcagccctcccattttgttcatgtgtgtggggacaagggtgttggaaatgaatgccttggtcttctaggactcttttgaatggcctatactcacaccccaatcagcttggacagattttatgggcaaattaaattgtttttctatctttttttgggtcattgccaatttctttagcggaattagcttttatcattttgtggagagtttaatatagaaaaaataaaatggttcataataattctttgttgtatcctaagttagttgtcaattgaagccttaaattctcgtgtcaccagttcaaatctgattcctgacacatgagaaatttatctaattatttattttaaaaattattaataatatgaattcacataaagattctatacatagtatagatcatgatacatatttatccatctgaagtatcggggatatactttttttttttaaaatagtaaaagatgagtaaagagtatattttatannnnataaaatgtatgatatataaagtaagtgctcctattttttcagggtaagaagaggtagagaaaatgcctcgagccaatgtttgagtaccaaggtgctatagcgctaaaataactcatgacatactctcagaaaaagctcgaatgacctacaacaaaagagtaccagtacccaaaaccgacacaagtaagtagctagagaatacctatgggcgcgagacaactttctctaaggtcaatttaagcattaattttttatgtgatta

SEQ ID NO: 82450 - DNA, 1246 bp, Cannabis sativa
atcaataaatatgtatttttcaccatcaatcacaaccccaactaacttatagttagtccctaacaagtcaagaaaagaaaaaaattatcaagttgaataatcaagttaaacgaagcacaaatattaggaattactatgcaaactacttcagttataattctaaagtcgtgtgtgtaccaaactatatccgcttcttaccacaatccataacacatatagtattaaaaaacctcaaaagcttaaaaggtttcaatttcaattttctcatagacattaaaagtattttttaatgagagagatgacaaacttggagttagaattgtaaagattaatattcaaatgagagagggtagactttttaggacaagcaatttgaacaaatattgatcacaagatagacatgtcaaataattagaattcaaatgaaaaataacttttgagatttacacaaaaaaaaaaaacttaaaagataaagagctaactaaatgaaaattacaaataaaaaaaaaaaaacactttttttaagtaacatatgcgccattttttttaatatggacctttttttttttttgacaataatataaaaataaaatacaataatacaaaaaaaaaaaacatgttgctcttgttctatatattttttattttcttaattttttttacaagaggcaacacaaaaatacaagaacaaaaaaaaaaaaaaacataaaaaataaaattataataaatgttctttgagcatgaaattatccctctaataaatatcatgtcttaaattctaaagatatgatttcatcaactcaaataatcaataaaagattaaaatgtcattttttttttcaactctcacaactcaccaagaaatggaaaaattttaagcctaaaatttttctcaactagttatatgaacaaccatcttaccatatgtttggaacatgcattaaagaactcaaaagatcacttcttaataactaaatatatcaaaaaccaactcaaatcaaagattttgtaattatgctttgagaaaaattggcttagaaattcaacacaataatgcaattctcctaatgaatgctcaacagagctcaccaccctcaactaaaaattagacagtgtcttcaatatctaagtaaataagcaatatgaaaaagtcataaaaagagagcacttggatgatgaatatgtaacaaggagacccacaaagtgacctatcataattctccaaactaaaaaaaaaaaaaaaaaa

SEQ ID NO: 82451 - DNA, 1381 bp, Cannabis sativa
tattataattatattttaatagttgccgaaaatctcgatcaacattatgttatacaattgattttattttagtttatatttgagacatctaactccggtgacttttacaatatcggttattttttcagcgactttttcgatactaatgacttttattgaattatttattttagaaattgatttttaatttaattaatttgagaaaccaaataattattaatttttagaactggttctatttgttagtattcattaattgtttattatatgtttattttattataatcaattattattattattattattattattattaagtatccatattttgttgatcactaaattaacagttatatattttaatagtagaatttaagtgtatatatattgatattaaaaattttaattctatttcaattttcagatattatatatatttcatattttaatttatctgagcatatgtaattctttgtgaagaacgcatacacatgttgcgaagattatgtaaacttttgtagtgaataaatgtgctgttttgtttttaagtaatatttttgtatttgattttttctaatcaattgtttttctatgtagttgattgttgttgattaattcacgtttgtgatttgtaggttgctaagattaagatgttgattgttgttcgccattgtttgtttttcaatttggctttgtgcttgatgatcggcgatggcaatcagaccttgaggatgttttcaacactcgattattgatcaatcgtgagaaaaaaattgacaataaaaaattgaagatcagagacagaagatcaaggaggagaatcacagagggagaattgcagagaggaaataatgtttgtttgaaaaaattatggaattttgtaaggtaaaattgatttatacatgttatttttccctattattagcggtgatttcttttttttcataattttttttgttatatttttatgtcataaaaaaataaatactagctatcatatttcattctccatacactaatatacaaataaactcataacgatcatttcaacaaattaattgcaccaaacataaacgtagtatacgagaaacataataggttcagattatttagttaaaatcataataataaactaacaaatataaaaagccaaagagcaaaaaagatccctacaatttataatttggattatccatttcaaaaagaatataatatgtattagagttgaagttctggaataataaacatcagtcacattcacacacctaaggaaaaagttgaaataaaatccagcttcctttggcccttgcacgattgccaattcaatatattttttcacaaaaaaaaaaaaaaaggacaattgaatatatcaatcaaa

SEQ ID NO: 82452 - DNA, 1418 bp, Cannabis sativa
attcttaaaaaaaaaaatagtaaagactcattttctcaactattttatctattatatggtaagagatgaataattttatatatagagtttagagcataattaaaacactaattttatgttgacttagaatattaattggtagatttttagtaataaaaaagatttctcaacttattcaaaagaaatatatgtggtgtgtactgtgtatgtatacatgaacaaacttttttttttcttactttaagttaatggtcttcgtattttaaatttttttggttactgaaagaaaaatatgttttaaaaaaaacacatataatttaaaaatgaaaaaaaaaaatatattagaatgtgtcataaaaattagattatattcataaaaatgtgttaagaggtgcaatttatgatatttggctaaacccaaatttgttcataaataaaaaagaaagtgtatgaatttgaattatataaatagtagtattaaatacagcttcaaaagtagacttataaaattgtaccggaaaagaaattgtccagcataaataaaattgagttgtaagcttctcttttaatgtaattggcttgatttgattaatagaaattaccattcttgataaaaaaaaattaataacgcaaattaatttaaaaaataattatagtaaaattatgtatctaaacaaattggtagtaaaagtacttaagtagtcaatttttttatagttaactattagtataaaaaaattgatagtaaaattcgtaagtaaaattattttttgaaaataaatacttatataaaaataattcaaattaactttttaaaaaataataataataattcaaattaaaaattaataaattttttaattattaatattattttatattttttaaaaaataaatatataattaaatattattataatatatatatatataaagttttaattgtatacatgtagtgttattttaagagtatacactttacatcttaatgaccatataatctaaaatcaatggtcagaaaaatttccctaccggtagggaacttatgctaagtcctaccatactcttaccctatatataactctactgtattatgaatccgttatcaattagactctgtctaatatttataatgcttaatgttatcatttgacatttattcaaaaaaaaaaaaaaaaaaaaaagaaggtaaaattgctcacaattgagcatcatttttctatttttttatcattaacaactattttcaattattccaaaaattgcgcaaaacacggatgcattccttaggatgacatgtcatcttaactttttaggataatatatagttaactagggaactaagccgcgcttcgcgcggtgttgtccaatttttataatttatatatatatatcatatttatattaaatgatataat

SEQ ID NO: 82453 - DNA, 811 bp, Cannabis sativa
tatgtacaccaaactgtatatataaaacataccacatatttatatatatttataagtcaattcaatgctcatatatatcatttttttttatgatccaagatcaagtatatcttaattactaaagagagatttataatataatatattaatgtaacagcagtagttttgaacttattaaattgcaggtgttatgcatttattttatctatattaattacagtttctaaataaggctacattatttttaggagaataatggttataatataatttttcttttttgatgtaagtaatatatttatctacgcattataaatttttcaaatcacaaatcaaacatcacagtgcaattgttttttttttttaataagatgaatttcattactccattaatttcatttagaacctatacatcatcttttatttttcggatagattttttttcttttatttttagtactgcacctatatattagaatagacaatattaaatgcgattgaatcatccaaatgatgtgcgcgtgaacctaggttgttcatgaaatctgcaaaccgtagtttgaaacacgaaacaatccaaaccaactcattttagatcggactaaatgaatccgtcattgtttagttatctggactgttttcttactgtgcagtcttgttacggttttgacattatttctactggtttgaaccaaaccggaccgtttgcattatttttatgtaatatatatacatagttgttgtcgagcaaatttcacaacaccaaaaatgaataataataataattataataagaacaatatgatgaaca

SEQ ID NO: 82454 - DNA, 2117 bp, Cannabis sativa
gaagaggaagaggaggaggtattttcttgggaagaattattattagtggctttacatgagaagtagggtttggtgttttttggtgtgtagtggtgtttagtgggggtgagaagagagaatggagaagtgagtggaagagaagccattgatgatggtgtgtgaggagatattggagtgttagtgcttcttatataataatggaaattttcagagtacgagaagaaggtaacaacgtttttttggtggggtggtgtagccatgtgaagatgttgaaatatttaattcctctttttttttttaattattttaatatatgtcaaaaaaatatatataataattaatgtaatatgtaatattataaggaaagtgggtgagagccttttcaaacaaaaggaagaaaaaaagtagttgaagagttattttaggaaggctaacaaaagaatggaaagaaataaaaaaaggtaaaatgattttggaaatgaaaaataagatatttcggtagaccctttatttagttcggtattaagaaaaaaaattaattttttttataatcgagtacgttatagatattaaaaataattattttttttaaaaaaaaataatattttattgtgttaaaaataaaatttaaatattttatcagtttaaaatttatttttagcactgtatattattttgaatttttctaaaacaacagttcaaaatacttaaataaataggagtgtctactaaaataccttttaagaattttattacatatttttccaattattattaattaatgaaaagaaaggctgataattttgaaagttcttctcagagcctttctctattattggagcctaatatattttttttttctttttttatataaaaaaaaatataaatttaaacataaattatactgccaaaaggtagggagcatgtggggacatttatcccttataattttttacaatataaattttgtatataaatcgttatatattttatattttgatctaataaaaattaatatttttatttatgtacttatatatttttaaatttattcccataaattttatatatttttatgtcatatatttttatttgtatcattcttagaaaatttatattttttatttttattttcacaaaatttatattatccccattaaaatattaagctaactcctctactattcaagtccgtaccattatctcttcagtactataaagagataattacataaggtattattttttgtaaaaattacattttttacatttataaaatttattttatatttttacggtttttcataaaaacaacagaaaaatatgaaactacataaaaacaacatgaaaataacatttaaattataacatcaaaacaataacaaaaaataacatacagataacaacaaattaacaaaagtacaacataaaaagaccgtatttctgtaaataataatcaattaattggtcaaaggctatgtgttttatatttactttaatttggcatgcgttctaaatttttaaagttgttaattaaaaaaatgagattaattattgttgatcacatgttaattaactaaaggtaaaatttagttattataagtaataatttagtatgagagaaagatataataagacagagtggtgcttcttttaatattttaattattcttttaaagtgaatattattctttattaatctcttatttagactaaatggtcatcaagtcaaaacttgataattaattacttttttaatggaatattattctttaatttaaactaaattaatggtcaagtgaaagtacttgtcacttgatcataattagtcactattttaaaaaaatacaaaaaaaaaaaaataatgagattaatattccttatcattataataataaactaattaatagcatgggcagaaatacatgcacagcatatattaaataatttttgatttattaagattttatcttatgattaccactattaattatattaccatttataattaaatatataaaaatatattagtccttcaattattattagggtaaatattattttggactttgtattttgcaaaagttactaattgaactttttattttgttaaataa

SEQ ID NO: 82455 - DNA, 880 bp, Cannabis sativa
gtagtgaaagtgaagaagaaaaaatgaagcaacttgactgaacaacaactgattcagtgcaaatattcaatcagttttggctactttgttttctcctctttagcagagaaagtgaagtggtatggtcaggtttggggtcgattcaatattccaaaaccaaatatattttgtggttgactgtcctagattgataacataccagagaaagactttttagatacaaaatttgccaaaaattgacatgcttgtttgtgggttgtatattgaatatattaaacatctattttttgaatgttgttatagtaggcgatgtcttgatgcagtcaaggtgtagttatgtaggttggcgttcttcaggtactttggtaaataaggttttgccttgtctttggtaggtgtagtttattgtctttggagaaatcgaaacaatgtgttatggaaccaacaagtcactatatttttcatgttcttatacatagtattcaacaggttattaagcttagattgataatgattaggcaaaaaaatatgaaactacaagatagattgtggattgaaccgttataatggtctttggtatagatacatcatgttttcaagccaatcttttggtgttgttaaggtgtaaatgagtattggtgcaatacatatttatgactactgattcaaccaaaaaaataaataaaaatgtttacaatattatttttttagagacagagtgcattttagttgttcaagctattcttagttcggtatctatattccccttgttcttcagtcttttgtattcgcagatatttttgtctaatgattatttttattcaaaaaaaaatatatatgtatatacaattttatattccaaatgaaagtagttaaacta

SEQ ID NO: 82456 - DNA, 1547 bp, Cannabis sativa
tgttaccaaacgacacctatatttttttgaaaagaggacataaactaacatactcctatgatttggggccatttactataattcccctttatatattacaatcatgcataacttggggctcgaacccaagacctacaacacacactctcctatggctacttgagcttgcctcaagtggtatggagacaatactcaattcatcattaatattacttattacgattttcctagcgcatacactttttcacaacacaaattctaacaatgggttattaaggtcgatttcaagaggaagatggtcaagtttaaaaaagcaaatagtcagtttggtgctagcggcggtagtgtatcacctttaaagaaattgaaatgaagttttgtggtataagaaaatatcaatattatcctcaattatggggtgtataaagaatgatatattaaatgtagattacctttgattttgttaaagaaaataaaaaatactaatctggaatggacagagatattatagcaggaatacttgtaatatgtatagcatagatgacaaaaaaaaaaaaaaatagcagcctttgtttggtgctaatagtgtgtaaatataattttggaattcatataaaaaatagagttctactagagaataaaacagatgtttacggggaaaaacaattaaatgatagaaaagtttcattgaatgcttggtgaataacaaattaattttaaagtcaccataccaaaatatagaattactgacacttttattagacatttgctaaaaaaaaattgtcataataataatactctagtgacatttgatataaaataatacttattacagttttcatttatctgcatttctataaaaatttattattaatatatttttaagaaaaagttagaaacatgatttgtaccatcttctttatttttggcccaaaatgtgttatttttctttttctgattcatgttttatgattgaagatagtaaaatcttgtgtataacaaccccaaatatctatagtttcagtttcttgttgtgtattgcttaatttttcttttattttgttacatcacatggtcaattttagagggagaatagtgttcttcggtgtgtgtgaatgagtatttttgctacatatcaatagttttatatattttgtattacatttacatttttataccattagaaaaaaaatcacatcattttcttgttagaaaataaaatagaaactcagaatattaatatatattacgacttacatctttgtggtagaatgtaatatcattaatttggatggttacaatttaacccttgttgaaaaataatacttacaaacgattttttagtttatattacataattaaataaaatacttatttaagataatggaataagtctagaagaaacagaaaaaaaattgtaataaaataggatcagtcgtcaatatatatagaacgataatatccccacgtacacttatacagtaattaaataattagacttattaatttataaattacaaacataatacttgttgggttttatgccc

SEQ ID NO: 82457 - DNA, 904 bp, Cannabis sativa
ctgtcatagtatgaacatctgaggctaaaagtatgtatatgtgggtgtgtggaagcatatatggtaattccaaagtttcaattagtttgggtcggataatctttgcataaattacaatgcacgaacatgtacgtatacagaaggcatacaacttgtgacccttgtgttgagtaatctgctcaaataatcaaattaattaaattagtatgtgctatttcatgtttcatctatgtcattgcaattttgtcgtacggttattgtgtctcatattttccgctcaatttgttaagtgtattcaacattttccactgtgttatatatatatatatataaatatatatatgtataaatgtgtaaatattattgattatttattcactgaaagttttagtaagatagcaattggtatggttggtgctttgtgttatttactctgaatccaagaacattcttttttggtgattaataatctggaaagcagttgtgtactaatacataggtcttgtaggttatctcaatgttgaaggacagactaggggtgcagaaggataaaattctttccctggtggattacaggtttttgactttctataatcttcaatactaaaaatttggcacctaccacatgcacatgtatgtcgatatattttagatgttgtcaactataaataaactcaaatggtcaaccttggtctttgttcttttggttttagaattcctggacttctatcagggttacttaaaagtctcatctaccacagattataaatgtgctataatggtatggactggtgatatgtattctcacttacttttgaaccagcagcgtgcttcaaattctccataaatatatttttgtgtgcatggttaagtttgagaaacggtgtcatagtattagttgtat

SEQ ID NO: 82458 - DNA, 679 bp, Cannabis sativa
agccgaaacaatagccacctcagcagaattcaagttaaaaggcccactcttttccaccaaactcggcccaatagaactaggcccagtgcatataccattttcaccaacggtcccctcatttaaattactttgagctcccattgaccggtccttttcttttatcattagaaaaggaaatttctcaggtactctttccacttccagtacctccgtggttcttcccctaccaagagaagcaatgcctgatgcaactcgaggaggacgtgacttaggaatccacgcaatacgctgggactgcccgagaacaactttgtcacgagaagtcaccatcgaggtatgcctcgtccgtcgaaccgggttggagattttgaaactcgggtcatcaacaccctctgctatggcctccggtgacaaacgaacatcccccgtcgactttctttgagccacacccaaaatactacgggagccaaacggttttggcccggaaaaaacatcacgatacgcagaggagatggatagctaaggatcgaacataggaaacggagtgccatcgatattcgcaaccgtaaccggcgacgacaaactacatcccctccgttgatgtcccagccagccacataaatagcagaaaatacctattttatcatacttaacttgaatccatttctttaccccagca

SEQ ID NO: 82459 - DNA, 1139 bp, Cannabis sativa
acagaaacccttattgcaactagctctgcaaccactttagaaacccaaaccgtaaacttcaaaaaaaagttaaaaaaatagtatataagataattcaatcaaatataattaccctaaaaaaaaatagcaagtttagaatttttgactatgtactcattattctttgtcaatggaaatttggtcatttttcttaatgaaaagataaataaaaaagaaataacaagtttgggggttggggttgacacctaatcttaaatgatatatataccttcttggagagtgggtgtacttatatatgataatataggcatagcaataggaatagcatttccatactattataccataccattttcttcttcttcttcttcttcttcaaaggcatgcgactctcacttcctcttcctcacctctatcttcttctcgatccttcctctctgcaactccctttataaatatattgtatattatatatattatatatatttgaagtttttattacaaagaccagatttttcagatccagaattttgacctcatggatatggcttctaaccctcgaactgtggaggaaatcttcaaagattacagtgctcgtagggttggtctcgttcgtgctctcactaacggtattttttttttttgtatatctttaactcatattgtacggacttggatttgtttttcaaaatttccgaccttggtgattttttgtgtgttttggtttcagatgttgatgaattttacgcgctttgtgatccaggtaatgtcgtgtgcttgtagatcagattgttctggtttgaaaactactgatctttctttgcgttgcctgcgggtttttttgagtttcgttttttttttcttgaaatatttgtaattttttatttatagatttttgtgcatgttgacaaggtcgatttgagagtttttaaggttattgtacattttttatttatttatttatttatttttttgttgagttttgagagaatgacaaactttggttttcttttttcttgcatgtatttgaagtttgagttcaaagttttatccatttgttgctaaaaatggttcagctgcatttggtgttctaattcaaaatagatctttttaaggaaaaaaattgatgaattgtaatg

SEQ ID NO: 82460 - DNA, 654 bp, Cannabis sativa
aagtcggggacagggttggggtcggggtccgggattcggagtcaagggtttggggtctgaggtccaagtctgaggtccggggttcgagtcgaggtctgggtccgggttcgggtccaagtttgggtccgggtctgggttttgcttttactattagttttgtctatgtgacatacttttgagtgttttaatcttgtctctgtgacatgattttgagtgttttagtcatgtctatatgacatgcttttattttgttttgattcgttcttggttcttctttatttttcgatggctcgccatcatatcattgttagtagttggtaatatcaagttctctgcgactgaagagattgttaattttgcagtcacgtaccttacacaataattgaatacccaaactacgagatttaatgaacatgctacaataatataatgtaacaacaaatatcattttttttttttatgaaaagtcaacttgaaaaataacctcaggtacttttgtaaaaaaaaaaaataaataaaataaattcgcaaaaatattaaaaaaattgtaaatccatatttttgaaattcttttcattttaagtatttataaattaatgtttaaataatttgtttctaattttaaaaaaaaaaaattaatgatttttaaatgag

SEQ ID NO: 82461 - DNA, 1615 bp, Cannabis sativa
atcggatcagatacgatccaaaaaaataggcagggtggggcggatcagatctgagatctaataagtatccgaagtttcagataagaagtgatctgtcggattagaactctgacccgatccgaataaatagatctttttgtcatgcctaacctaaactaaagttagtcactattaacagtgtaagtttatttttcatctctctccaaattacccctcatttcaaaaaactcatccaaactctctttcttctctctttccccctctctcttcttctcacattctcgacagaaccaagacccaaatcgcacctgcatctagagccaccatcgtcttcacacccacgactagtgggaaggcctgctgtgacgcacgacaaccactaaagaaagaaaaaagaatcaagacccacaaattatgagaacaaccgaagagagaaaaagaaaatgatgtcccccgcaatttgtgttttttgcttattttttttggtaaaaatcgagttttggtgaaatttatattttttgggctctctatgatattcttttgtacagggtaccataaggtacgatggtgggtacgatagtagtataatctggaggttatcgatgaaggttcgatagttgatatagtactatagtggtacaatatagtttagttgctgcttaaaatttatgccataaattttaagtatggtaccacaccatcgtaccctatcgtaccatcatcatactaacagatctttattaaccatcataccctatcgaaccttcatccataaccttcatattacacaactatcgtacccaccattgtaccttatagtaccttaacctccatattatcatgctataaattttagaaatactggcggctaaaccacctgagcttgaaattttttaacacttaaccacaaaaactaatttttttgggggcaaaactacttaaactcacattctgttttgctctgtacctctctgtccaaaaatcacaattaagtgccacaatggactgcctacatgtacacaagagtacacgtggcaaaattttagtggtccatgtaattttaattttaaatataataaaaataatttaaaaagtaaaaaaaacaatttataaaaataaaaaaaatcttttttttttctctctttctttctctttctctttcttctcgacagaagccccctaacccttcttcttcttttaatggtggtaatgacagtcgtctttgcgatttgccaaaccatacataacccacgcaaagagacaacagaacccccctaacccaggcaaaatgatctaatgaagctccatcgtcagtccaaccccctcgaagctccaccgtcgttcaaaccccctcaaaaggcttctggctgagaacccccacacgagtgcaccgcctatgtcaaaccccgtcaccagagcattgcctctgtcgaactccccaactagcaaggcccttctcgtaatggtgtaatggttgtagtgatgatgggagagagaaggagttcgggtggtgatggcgattgtaggtggtttcagtagtaatggtggtttcaggggtggttttaggggttttggagttctgatggtaataatggaagaagaagaagaagaagaa

SEQ ID NO: 82462 - DNA, 1393 bp, Cannabis sativa
ctgggctgggttggggtctggggctaggctggatcgaggttcggggttgagccggggctggggtccgggtctgggtctggatttgggtcgggtccaagtctagggctgaagtccagttctgaggtcgggtccagttctgggcctggggttcaagtttgggttgggattagggtgcgggcccgggtccaggtttgtggataggtcttgttcatatcagggactcaaagtattgaagtgtttttcaaaaaataaaataaattaaaaataataataataattattttttaaaaacattagccaaacgagacttgtgttttaaaaatttaaaaaatattttttgttctcatttttaaaaatacttttttaaaaacaaaaaacaaaaaacaaaaaacaatactaaacatgctctaatatattattatcttatgacttgttttaaaggatagtagattatagtactatcttcatagaatcgaatatatgcccaaacaaaaaattaattctaagttaaaaataagtaacactacttaatcaaataagggttggtaactttttggtttggtatttagtattttcaataatatttatttgatattttgtattttaaaattatataattagtatatttttaaatcttacttactaggtacgtatcataaattaaatttaattgaaataattttaccaatataattaaattgctttcaattattacttaattaaaaaactgaactcaattataaaagttataattaaattcaaatttaactactagtattatgataaaattttatatatcaaatttaaagtaggatattgaattttagaatataggtaccgaataagaattattaaatataaaaataccaaaatggtaatatgtaatatgcataaatatatatggaatttaaaaatattaaaccatttgatttaacccaatagtgaattataaaaaaggaattcaaatttgtataattaatttagttacttaattaaaaaaaattaaaaatatatctttttaaactatatcaaaaatatatttacatataaatatttaaattaaactcattttttttttctgcaagaataattttttcttttctatttttttagccaatttaacaaccctaacccattaaatataaaaatgagatcttttttaattaaataaaaattaaacataaaaactcgagttttcctaataatacaatacacaaatgactaaattctcataataataaaaaagtagaaattagtgaacaaaaattattacactataacataattttttttttctttttggaaaaggcattataacacaatttctcaaaaatatgtttgcatattttcactttcctaaatactatacattgtgctttcaaaaaaaaaaaaa

SEQ ID NO: 82463 - DNA, 2425 bp, Cannabis sativa
taaattttatatagtagttcacagggtaattagttagttctgttaagcaggggtgttcataaaatagctgatccaatccaattcgcacgatccaatccaatccaattcacaaagtgcggatagaaaattcaaaattcgaacttgtgcggattggatgttgattgacatgtaaaaataaccgatccaatccaattcacacatatttagaaaaaaaattaaaaaattatacatacaattaaaattttaatgcaagaaaatagtaattttaaaatttaatatatacaatacatctatgtttcaaaatttaataaattaaatgtatattcaatttttattttgttgctaattatgtgaaaaaaaaaatattttttataaatattaaatagtttaatattaaaaagtaatcaatccaaaataatcgattcgatccgtactttgacggattgaattggatccaaaatatgaaattcacacttagtgcggatcggatgtactatgagtaaaataatgcggattggattggatgaacaccctaacttaagtttaattgttttcaatggtcaaatatacaatcagaatagcaagcgcttgagtgattacaatagacaaagttctctctcacaagaataggagagagttaacaatagactcctctttttataggtttctaagtacatggatccttttacactcttaggtcatggctatttatataacatatcatgacttgttcttttcttatttttagagaaataattatattgatcacaaaaattatatactttacaattaaataataataataaaaattatgtaaactaacagtatctcttgatatgtagagtcaatttccatttgagatgtgttatcctattttttgcacctcaacgtggaaatagaattgaataacacatgttccatatttttgatacctgggcagaggaagatatccctagcagtctataaacgactaaccagcattggtcagctattcgagcatgattgtgaagaagatgtccgaccagatacgaacatgtttatgccgagcgacgtacaagagatggtgacttcaaagactaatctcgttgtgtcaagatgcaaagataatctctataatcgtgggattgagtcagagaaaaatggcaacctatcctagtttcctatttcatgcattgtaattatcgtattattgtaatttcctattttgtgcattataagcaaaagggaaactatccctcatatattaagtctctataaatagtaacctagcctcactatgaaagagatcaaaagaattgcttcagaaatacattctagagagaatagagtgatctaagagagaaaattactcagatatcatctgtaagagctttcaagagtaagaacactttgttcccttctctcaagtcaatacaatacaaggagagtaggctattaccacacttacggggccaaacctctttaaaatctgatgttcacttgattttactgttttgctttcttttatttatctgtcttaatcgcttcatatttgactcactgtcgttagctagaagcgagatcaacattttggtgctttcattgagagcaaaaacacaagtcttttgtcttaagttttgacaaataagcaagatgattgtgcaaactcgtagggaaggcctcgctgatcagggcgacccaatggtgatagatcccaacgtgaaaacttctagaaacacgagaggacccccagggacaaaccctgagcaagttaacacacaacctcctactgtaggccatagagtgacttcccctctagttgggatcaaaccaggcgtacaagagatcgaaaacccaagtttggcagccgatcaatttagtctcatcactgaggtctcgtccaccaccaatactcaaaggccaattggagacgagactgaactccaaaacctgcaagaagcccatgggctcatgcaaggtcatactaacgcgttgcatcatgaccaagaggattttcgagcaatcacaaaccttgcattcgatgaacaaaggcgtcgattcatagaatggagggaccaagagatggaagttctaaaggctcaacagacagtcattgatgatcgtattaggtaggccatcgtactgataagatgggcctaccaagtcaccaatcaccaaccggctactgcgtccagtattcccttgggcggactagaagggtatgcagctgggcataccgcacaaactcacagcggtcagccgtccaatccaaggccacatgtgcaaactatgggctaaacggtagacgactagatcttgccagaccatcctttgggaagagttatacataataataactttatcactactggagtttcaggccaacctatcggccaaacaagtcagacaccaaggccacttggtacctcagtgtttggtaggttgg

SEQ ID NO: 82464 - DNA, 811 bp, Cannabis sativa
ttcaatggtctcgctgccacagttacacattaggcaatcatctctttcaattaccccaaatctctaaaatctttccttcgtcttcagcttcccaagcatcaccaaccatacaatgaaactatgcttaggaatattaaaacggttccaaacaaacttgtcccaattcactctagtcgactgtaaatgtatttctctataaccaacaaccactaagtatttgtctagtaccatgtttaaggagcccaaactcttcatttgatctttaaccatcactaattttctccaataccaacttgcttaagctgaaggtttataggcccaccaatcctcatccttaatgtagacattatgaacccatttaacccataggttatcttccttcttggcaatagcccaaacatatttgaatagagtcgctttgttccaatccgagatacaccggaatcctagtccacctgaacttttagattgacaaaccgaggcccaagcaaccgcaagaacacctgttaatgtgtattggccattccataaaaaactacggcaaatagactcaatttcacttacaattttctttggcagcatcatcacttggcgccaataaaagtgtatagccatgagaactgagttaaagaataccactcgcccagtaaaggaaagatttctcgagctccaagttttgatccgagccatcatcttctcgaccaagagtttgcaatctgctgaggagattctctttggacagataggcactcccaaatacttgaatggcaagtcttgcttttggaaacctgatgtaacgccctaatgctaa

SEQ ID NO: 82465 - DNA, 1037 bp, Cannabis sativa
aataacatgacaaaagagcccactgtagacagtatatgttatttgtgtgaacttaattcccggcagaataggctaattccgcaaagaaacaacaccaaaataagtccattacctgcattgatggcatgtttctccattaacttcatcatatatgcgttttccatcttctccatatccatcaacaagcagtgtccaagtgttcttgcaatcccccaaaagcttctcatgctcttctgtgtaaatctctgggttcaagccatctcttatgcgaatctcatcactctccgatgagcctttcgttcgtttaggacgaagctccacgtaactaaccttgtccaaagttttcaacctacaaacccacacgttcccagtaccgatcatttgatatagcacaacccattttgcaaaagtatcaaagtttgtgtcagtaatgaaaagtttccatttttcctacacatactctttcccccttcatttttcaggggaaaattaccaaaaaaaaaaaaaaaactgacctggatgaacgcctgggcgacccagacgaagagggaagagtttgtgttttcctggtctcagaagggtgcctggaaagacgctttcttggggcgatttcagacttaagcttctgagaaagatgaagaatgccaaacttgttcattctctccttgttctctttgattctgagatccctggactgctcatacccagaagcatctgaaggtcctgagagtagggagggttgggtcataatcttatttgcatcgggctctggcgctctctttttccggccgaccatggcgtctctttcgttcctacagaaaggactgagtgaagaagtggcaaacaaagagattctattctaatttatttaatgattcgcgccattttatttccttagaacaaaatgacaaccatctattcgcgccatctgttttcacattatgtaatttaggtttaaaatttcgtgttgtcagtaaaaaaatagttcaaaaaaacacaaaccataaatttatggaaaatttacatctgcaccctta

SEQ ID NO: 82466 - DNA, 1070 bp, Cannabis sativa
gtagttctacttctctctctctctatataagtacgtattaattctcagcttttttgggatatgtaataattagattagccatttagagatttagaaattagtcttaatttctcttttttctgtgtgtggagacaatggagaccgaccaaagagatgaatttcgcttgactttgcctcttatgtgtgaagataataataagaaagagtatgattgtaccaagatagaggaagatgagtcaaaccattctccaacctcaacctctttcttcaaaacctgtttcaatggattaaatgctttatcaggttcttcttcttattctttatattagtgtatgttatagttatttaagatacattttaaaaaattcagaataatttacaatatagaaagtagtatttaagcaaaatattcatgcttgcaatacacagtttaaaccgtgttttcaatctgttaagtattattaaataattatttcaaataccaaatggcataaggtgtatcggtgcattcattttaaggatatgcactgtaaaatatttttcatatttgtaattaaaagattttgtataatagttgagttatttaaattctgagtccgttattgtatgactcataatgtgtcttggggttttcaggagttggaatactctcagtaccatatgcattagcaacaggaggatggttaagcttgattctattctttgctatagcaacaggagcattctactcaggcttgttaattaaaagatgtatggattttgattccaacataagaagttaccctgatattggagagaaagcatttggtaacaaaggaagaatgatagtctctattgctatgtacactgagctctacttagtctcagcaggcttcttgattttagaaggtgataacttgtacaacatgttccctaatgatggttttgaaatagcagggcttacaattggtggcaaacaatgctttgtactaattgttgcccttgttatcttaccaactgtatggctagacaatttgagtctactctcttatgtctctgccagtggggtgctagcttctgctatcatcctc

SEQ ID NO: 82467 - DNA, 692 bp, Cannabis sativa
ataaataaatccatcataaaacacatttttttttagctttgattagttttcttattagctttgttttacaagtaactaaactaattttatgcttgaccaggaattccaaggagtgctcggtatgcagtggcagtaggggttggcataccatcaatcttgtgcatattgggcctactatgtttcatattcggtagggttaaggccattactagaagaaatggatccattccagagttcaattctacagtggctccacagcccataatcattatgggcctagatgggccaactctagagtcttacccaaagatagtgttgggtgagagcgggcgattgccaaagcccaatgacaacacatgcccaatatgtttgtctgagtatagacccaatgagacactgaagaccatacctgaatgtcaacatttctttcattctgattgcattgatgaatggctcagattgaacgcttcttgtcccatttgtcgaaaatctcccaatagacacacaattagagatgtattatgagataaaaaggttaattatattggatggataaagttttttttaggagcttcctataaacattttttagggtaatttgtatataaatattgttaataaaatagtatatttatgtctcttatctttttatttttgtttggaacaagtcttatcttctaattgggataata

SEQ ID NO: 82468 - DNA, 553 bp, Cannabis sativa
gcagaatcgtgcggattgaattgaatcggctattttataaatacccttatatgagagttcataatcaaagagaaaaataaaaattttaaataaagataaataatatattgtcagattattttcaaaatgttaattttgtttaaaagcagtataataaaaaaattggctcatctcgtcaactcgtattaatggctctgttgtaaaaaattcttgaagaaattaattgtgtattacattatttatatatatcgtatacatatagtgtatggcatgaagataaaattcaagtaagaaaagaatttaagtgttactacaaaggaccaaaaccaggaatttaacaccacacaagttggtcactttatcaatggtcctaaattgaaatttataatacacataaaatatcaaaatttataatacatataaaatatcaatgacttgatcaccatcaaaagttgatacatggtcaaaactattacatggacaaaaaggaaaataatatattgtaatctcatcatagaagtgccaaaatatatatcgcaaccaaataatatat

SEQ ID NO: 82469 - DNA, 792 bp, Cannabis sativa
  modified_base (725)..(764): a, c, t, g, unknown or other
aaatgctaggaaaacctctaagagcttacattagcaggttcatggctgaagcaaccaaagttaaggggctgactgaggaaggaaggttggccacaatactgagaggtattgagcctctaggaaaactatggaaggaaattaaaagattaactatgggatcaatggtagaacttttagactgagcagatggattaattaaactcgaagaggttgtatggtgtgtagatgcagttggacaaaagaaaaattagcaacacaccactgcagccgctgcatctatccataattcacagtatcctagcagttcgaatcaaagtggaaagagatcaaacaatggcaatagatagggtaatgggaagaaaagcaagttcaacaataactccaaacaacatccttgggagaatgccacaaaattcactgctttttcagtcctaatagaagacatagaaaaaatttatgcaactacccagtctatggtaccatataagaaacactgtcccatgaaaaggacatgtgcaaatgagacacaaccaagttctgtcattttcatgtagactacgaccatgacataaatgagtaaaacaatttgaagcgagaagttgaattcctcatcagaaaaaacaacatgcacttacaaaaatacgtcaaggctatccaagaacaaagggtcgctcaaacagacactaactagagccagttaatacctgttgggttttgtgccctannnnnnnnnnnnnnnnnnnnnnnnnnnnnnnnnnnnnnnnaaagatcagaaataatattttatgttgc

SEQ ID NO: 82470 - DNA, 2062 bp, Cannabis sativa
  modified_base (1773)..(1783): a, c, t, g, unknown or other
ttttacacttatcttttttttttttgagttttttgcggctaatccctctcaactattactcatcttgcacttgaccctctaagctcgtcaaattttgacggtaccaatataaatttgacacatgtacaaaagtgtccacataagcagtctatattagaagttaattataaaaaatagataatactttaaatttgctactagttcagtaatttggagggttttaccgtcaaaatttaagcttgaagagtaaaatgcaagtaaaacgacaattaagaaggtttaatcacaaaaatcattttttattctttcatgtttatttttataaatttaaagtgtcaattaaatatgtataccttaaatttacaaaaaaaaaaaaaacaaaacaaaaaaaacttaaacaagttttaccaaaaaaattccataaaaattaatacataaaaaaaaattgcttctaattactcaaattctaattaaactctcaagttataatttcttcaaaagacagaaaaaccctcaagttattaaaagaataaaaaaactgtcggaggaaaatttcatcggcggtagaggaattttctgatggcggtagaagaagaactacagtttgactttgaggatggagaaagagggagatgggaagagattcgtgcgacggaagagatctggtcatcggatcatgatgacaaaggggggaggagagacctggatttcaatgggtctccgacctggatattcaatatttctgggtttttttcttgcgaattgttcttagaatcattattggatttaagttcaacctttgataaaaattagcatttattttttccttttttgcggccaaaaccctagaaatactgtgtttatagagaaatgatgattaatttatatgtgtgtgtttgcagacatgctcgctgaattgtctagaagagagaaagaagcaaatatcacaccggatccagatattgacgtctttatgaaggtaattagacttagattacgaaattccattgaaattataatttcaaaccaaggcaaaaccctctctcatcatggctcaatttcatggttaattagttctactgttctactaccattgaatttttgttttgttttttttttttaatagggttgaatttttattattatcactagataattataattatttaaaaagaaatatgttaatctcttaaatcctaaaagtcaaaataaattaataaataattagcatgttaaattttatttccacttcataaaatgataagtatactttaatatttttttttaaaaaattaataattactcttaagctatgtttgataggaaggatagggaggttggagagttggtggaggatgtagaataaagagggagatgatagtagcaatcttattaacttgtttggtgaaaaggatgaagtgaataaaggataaaggaaattttatttacaccttaaaaagttttaaagacatctcattttattaatttttattttaaataaaatttatatttttaattatactaagtttttttttaattttttttcttctaattcatattcttaaaaaatgtacctattaaacaaaaataaattatattttaaatattataacaaaaaaattcaaataaaaaattatatgaaattttcttagaaaaaaataaaaaaattgtatacatgagttagaaaaaattatgaaaatgaaattaaaataagtattgaaattaacataaaataatgtgagtaaaaaatttaaaaaaatattaagagtaatnnnnnnnnnnnatttaagtttatattttttttaataatgggatgtatttattattttatggggtgcaaatagaactctgcaaagataaagagtatttatttatgaaattattatattgttcttgaatgtaattttttaataatattttataagggtatatttgtaattttaaataatttaagagggggagtgtgaactcttccattcatcgacggaatctaaattggaaatttggaaggatttgctctccatccaatctgactatacctttcctcccccaaatcccttgc

SEQ ID NO: 82471 - DNA, 809 bp, Cannabis sativa
actcatttgaaataatagactcccagagtaattaaggcgacctgtcttgtaacatgggtccatcatagccacctgacttttcttgaactgccatgtattttaaaagaaattctaggcaacatttatcctgaagtccttttttacaattttgcaagatgggacttgcgatatgcctccaagagtactgacgtcatgttgcgcgtgatcattttaaatactgctcattaattttcttcatttttaatgaaaatgatttgatttcttaatcgattatgatgccataaatttcaggatgtcagaaggacgcttgagtagtgtaaccgtcctttttatgcttgtccatatgccagctaccactctaactgttggatcatgaggcttttaatcattgaatgagggttgttggataactgacaatccatgtcgccttagttggtatatcaaaatccctaatctcttctttgagattttactatcgtatcttttagaatcttcaaaccagtcaaaacttcacgtagcccagatttccttttaatttttctttgacgtcgtcaagctcaatttcaccgacgttttgcactagcatccacaactactcaatttccccctatttgtaagaactagctttacgagcttctttttattttatttttgcaacttcatttgatgcttgcatgaatgtgttgttggtactgtatccatgattcttggccattttcctaattcgtctttagttttcatctttaggcaagagattcttatattacggataatacgattcaccctttttctttcccatcccctgcacc

SEQ ID NO: 82472 - DNA, 1072 bp, Cannabis sativa
tatcaggattggagtagctactactccttacctaaaacactagacaaggcaagatatttaactaatttggagttgaatggagtaaacttggatacctctcattcatatagttttctattactaaaaattttgtcattgttaaatgttaaacaatgggatattgaaggatctgatgtgctatctaagtttttgttgagttctccttctcttgaaagattgcgattatctaaatatgaattcgcaggttctaatgttcattatcgattacaaagtttaagcctcaagttcttggaaattatattcttgcatgttgtacaaattaaagttgaagccataaatcttgaacctttggtagtggaaggtaatcccttggaccgtatatatttctcttcttgcaagaaaattagaaataaccatcatgtagagtttactttgaaaacaatcaccttaaaagctctcatttcaaatatttctccaattgagaacttggctttgagcaactgtcgttcattggagttaacagccaacacttgaaatgtttctattttaaaaatagttacaagtgtaatagtcacgagttgaaggttgttacaatcgaatatgcaccaaaattggtttatcgagatgctgaattttcttgtgaatctcagttgcttttggactattgtgacattgcatgtcaacaccaatatgagattgttagttacttgacttattagtactctttatcctaatgaattttactactttgcatgataagaatgactagtttttgcttgtgaacttgctgataatacaaaatgaacatcccaagatttttctatggcaagaaaaatgagtcatgaaattcaaaagtaacaatgataataaaaaagaccaagctaatttctatcgattgcaatacaagaccattttaatgaccatacaaaattggaatatacagaggaatcctttagcaaaattataaaaaggtgaccctttttaagtgtacaaaaacaaagccaaaaaataaataatctcagctgacataaataaaaataaaaattgttgccttgctataagtcagagaaaa

SEQ ID NO: 82473 - DNA, 755 bp, Cannabis sativa
taattagtaaatttgattattttgaaatggattttatttagggcacaaaacccaataaaaagtcctattaaaataataataaaatattaaaaatgtgaaaaaatatatgtaagctatatttgaccgttgatggtgatctaacggtaaaattgacttcggaggtcggtcgtcaattttaagagcttgaatcacgttcgcggaactttttcaagtaagttgtagttgaaattcgtaactcatttgaggataaaatttgaaccaaatatctttagaattacaatttgcttgtgagacatgacatgatagagaatttaaatatctttgaaatgtaatttaaatcgcgttaatcgctgatggaggcctctccttgctaatggacctaacaagaggtgttgaatacccctccacatcaatcgtcatggcatggcttggtggaggagcataaggaggagacggaggtaaataaataaaataacacgaaaacaactcaaaaataaatgaagcataaataacaagtaacacaaaaattaaaaaaaacaacacatctacaaccctttttaacagtgacattgccaaaaatattatctgattcaacattcttaactgggatttaccctttctctacatataaacaaaataacaataaacaacacaaaaacaactgttaaacaacaaaatactacattcaaacaaaacaaacacacaaagacaagataaaaagaagaaaaaagacatattacatatgaaagtaatac

SEQ ID NO: 82474 - DNA, 1145 bp, Cannabis sativa
catggtcacccagtgaaaaacaatgctgagttcaatgaaagggctcaagtatttgttcggaaagaggaaggcagaaaggagatgaagttgttgtagactggctcgggaatcaaacctagcaacatctaaacaagtaccgtttcgaccaaaaatgataacccaggaacctctagttcaaagaggaaagacgactctaagggtgagctaaagacaagaagaagcaaaagatgcacgacaagtatgtgccgatctacaccatttacatcgagcttaatgaaactcgagaaaacatttatcttgcgcatgagcccagggtggcatttcgtaaacctaagcccatgagtcatgcaagacataagagagatgcaaccaaattttgtaaataccataaagtcatcgagcatacgacagacaaatgccgtcaactgaaggatgagatagagagtctcatcgcgtgaggtcacttcaagcaatatatgaaaagatatggcaatggacataactagcccaatccgaccaataatctaggcaactaggggttacaacctcttcctcttgaaggagaggatatcctggttatctcgggagggccaaatattgcaggagtgagcaataatgctcaaaagaggtatgtgaagaagtaaaacatgagtagactgaagaacctccaattatattcttggaggaagatgaaaaagacgtgaggtattttcatatcgacccattggtaatcaccatctagctcgccaacaagaggataaaaagggtgctaatggaccacggaagttcagtgaacatcctttatagggaaacaatgaagaagatggggcttgaaaaagctaaattaagacctttcatggtaaatctttgcgactttatagatgatagtgtcatcagtcaagtaataatcgagctcccattaaatttgggcgaagcacctttatccattataataatacaagattttttagtggtcgacctaccgttagcttacaatatactgctgggtcgaccaacattaatcagactaggggcagttaggttggttaagcacttacccttcaagttttaaacaccaatgggtgtgtgattagtgcgaggtgatcaaatgctagctcacaaatgctatcgcatagagttacagc

SEQ ID NO: 82475 - DNA, 717 bp, Cannabis sativa
taatgtcttgatggtgcctgatataggtatgataggggttcgatagtttgttaagtttagagattaggagtgatggtgcccgatataggtatgacaggggtctgatagtttatgcaatttggatgttaggggtgatgtcccgatgatgcccaatataggtacgatagtgggtccggtagcttgttcagtttagaggttaggagtgatgtctcgatggtacctgatataggtatgataggggatctgatagttttttcagtttagtggttagggttatgtgtctgatatagaccgatggttagtctgatgtgggtatgatgggttattattttatatataattatttgagtatgattacagcccgattgcgtttgatagttgtccgatattacacatgtttagcaattatttctttatgttgtgtttttgtttttattttttataatgttgtttttgttgtggatgacaaggttaactatgtttgcgtctttgatgtataatggtatttacgagcgtgaaggtagagaatagattttcaatgaagcagaaaatttgacattcgagattgatataaacataacctactcacatttagttgagcttttgtacgaagaactcgaggttgacaaagtgtagtatggcttgaaattaaaagtgaattacaagtacatgaaaaagctaatatatcgacttgaagttataaaaaatgataagcgt

SEQ ID NO: 82476 - DNA, 724 bp, Cannabis sativa
agggcataaaacccaacatttagttcatacagtttattttaattaaaatcatttaaagttttattgaattaaatattttaaatttgaatcaattattcaatcacatttgatcgtttgaataaatatttataaccgattctattatagaactttatttcctatatccgattgagaaattttgtcaactacatgagagaatgtctcaactatttggagaacaatttgaggtaagaccttaaatatctataactattttttaaattcaaatattttttttgtattaattattcaacccaaaaatcaaatccagtggggacatccctacaatagaggcgcttgtcactgtgtcctaacacagtgcaggtcgtggtccctatgtcttaacaagacattggatgtatcttttgtccaggctaattttgtcttttccctaatttatttaataaataaatttaaaaattatttattaattacaaataaataattactaacaattcaaaatagatttttttttcgaacttccatatacaacttctatctctacccttgataatgtttcaaggtggcaatccagggaccgtggacctacaattctatgctcgagtaaactagattatttattcaatctcatcaactaaataatcttgtttattaaattcatgattactccactataaatatggagttgaactgttagtaattttagaattttttttatttagtt

SEQ ID NO: 82477 - DNA, 578 bp, Cannabis sativa
ttgaattattaacggtatagtaatgggatttttcatttgattggggtcaggcagaaaattcggtactaggtactcacacacaactttctgaacacccaactctatttctccaattacattttttttttcttgttttcgatcaaagagaaagaagcttgtttccaattaaattatttgttccttggcctcaacatctcatgtctgatggaaaatgtgactgctttttcataataatccttctatttagttctctttactgtaaacttcaaagatgttaattgtttacactataggtgagtagtacttgggagatagatgggttagaacttatttaccatggattgtttataacaataacaatgtcatgatgtattgaacttttaacagcagcatgatttactttgtggattatgcttcaggggaaagttaatagacgcatatagatttctacacaaagagaaagatatggaacaaggattttcatggtctggaaaccccatcggaaagtaagaatcttacataaagaaaagcgtttgagctgatcgtttaccatgaaatatggatagatcacattgatt

SEQ ID NO: 82478 - DNA, 885 bp, Cannabis sativa
gacgaactgccattcatgtgttttcggtgcggacgtataggacataatcaaaaagattgttcagtggaatacaaagaaatcacaggagttatgggggagaaggctaaagcttacgggatatggctaaaagtgaaacaagaaatacaggatggatttcaggcaggattaacagctctaagtatagaactgcaaaaagggataaaggaacagaggattgggatagggcctgataggggaatgaaactttcgaatgccttttctcttctcacagaccccatgaaaaccaggaagatcactttggatggaacacaagtgggtaatgataaagacaatagtactgtagaacaaggcacaacaagcgccaatgttttgacaccacaaaagctaactgcaagcgatcttagggaggatttgggaaaccaggaagaggtgaatcgggggaaaagaaggatgttggaagttgaatctctatcgggggttggcaaactccaaagaactgcgaacctacctatgtcaaccatggaaacacaacagctatatgatgttccaatcacgtttcaacaagagaaggatgggatagaaggaggaccatctttcgtctttggcccgagtcaacaatcaatatctaaggcacaaaggcgaaaggtagcagtgaaaaaagatggaaagaacaggaagagcaaggcggagaagataccgattggggtttctcaggaaggggattcgacaattggaggtacgatggaagaggtgcactctgcagggcagggtcgcctacagccatgaaaacacttttgtggaacgttcaagggatggggaacccttggacggtccgtacattgaaatccccggtgaaacgatggaatcctgatctaatttttcttt

SEQ ID NO: 82479 - DNA, 1002 bp, Cannabis sativa
caccttcaacctccaaccgggtcataactttgactcgtttttctacagggggtcatagtggacccgatctgaaacctgattggaactttcaattctcatgaccaaaacaacccaaataaattctaaataaatctaaatacaaaaattaagacattcatatgaattgcatgcatcgaaaacacatcaaaatgaaactttaaattcacaaaaaaaattcgagtccaaacgtgtattcttttttttttttaaaaaaaatcaagttttatagtgttcaaaattgttttaatacacaaaatctatctatattgtcttatgaatgtaaagatgcaaatacgattcaaaataaacatcgaaaatgcaatgaaaaatttacgagcaatggacctaagaataaaactttcatgtatatatactcgtatacacatattaaactatataaaaatattataaatatatacaataaattataataattaattataatcaagatatggaatgaaatcaataaatatgcatatatatatatatatgaatgtgtatataatatatataaatatataaatgtgaatataaaagtatatatatatgatcaggattatatgaatgtaaaattatatatatatatattatatatatataaactttagatcatgaataaaaaactcaacggacatatacatatatatcaataaaatttaaagatataaataaagtagagataataattattttgataccaactgttagactataatgtaatataaaaataaaacatatatgaacaatatgtatagcgaaataattacaggcatattgaaatcttatatgcgatgaaaagaccaaaatacctctagccactaatgtttgagattcaatccctgcaataactttggtataaaaatttggtcttcctcactctttcaactctctttagatagaattttgttgtttgcacagaaaatgagtgaagagcttggagaccaagatcctatatttataggt

SEQ ID NO: 82480 - DNA, 1156 bp, Cannabis sativa
tggggtttggggctaggtccgggtttgggtttggggtctgagtttggggcctaagttcaggtttagggtttggggctaggttcgggtccggggtcgaggctaggttcggagtctagggctagagtccgagtttcggggtcaggatcgagtcggagtctggggttgggttagggttcaggatgagatccgagtctaaggtcgagtccccaactctagactcattacaaatattataatacaagctaatacgtatcattttttatagattaaataatatgattcatattgaattaaaatttatggtcgtaataattaatacagtacaatattttatccgagcggagtgttacgttatttaatacaatataacatttatatgatttaccaaatgagatctaataatgtaaaatacgtgagactcgatacttaattagatcaatagtgatgattatggtagcgttggtcactactaaaatttttagcatttctcaaatataattaagtattgattgattaatttaaatttaaagagttttttcggagtaattatcttaagtattaatcaccacattgacatatataaagatattgctattaaacattagtattgtttgtgatagcataacactacaaataattaaaaaaaattagatacaggtaattatcttaagtataattaagtatcgattgattacttttaattttaaagaattttttcggagtaattatcttaagtattaatcaccacatttacatatatacaggtattgctattagacattagtattctttgtgatagcataacattacaaataattaaaaaaaattagatacttgattagacccataataattgagttaagcataatggggtatcctatttttaagcaattcctagaaagagtaacaccaccgtttgtacatctttgtctcttttgttgttgttgcagccgtacgtgcaaactctattattagattttggttctcatcatattatttgacaccatttttggtttcttcctttttgttctcttaatctttaactattttaactttgtcttccatgatgttgtcatctctataaacttttcctagtttatagatatctcattcgtaacagttatttaaatttaatcaataatttttttttaaatat

SEQ ID NO: 82481 - DNA, 1169 bp, Cannabis sativa
tgcctgtgtatggatgccacaatggatttttaaactttgaggggacctctaaagccttaatttgatccgagagatgagaaaattactctcgatctaacttgtaccatgttggcttaagagaagtgattcccttaaccagaggggcaatggtgtcaaatttgaccctacacactgtggtgatgtgtgtatcaactagccgcttcttgttgatgttgttatgcatgcgcttttgtcgtcttagttgattaaaagcatcggtcgacctaggtgttggagttttttcctggttgtgtggccttggtagcaactacagggatttatcccgtataacgatagagttgtctcttgattgtttgcttcatgagtaattgcctacattactataccatttattctcttcaaaatagtcttcctcagagtgacatgtgtggaggaagttggactaatttcttaagttcaatatgtctccatgcacccacgggaagtattcctacttttggccgtcaggacctcaggcgaagtatctacatcaagcaccttgttcatcacgaaagtattttcgactgtggagtaattcattgaccttcaccctctgaatctcatactcttcatttttgtggtaaagcttacggggtcttccccttggtctgactgcaggtccttttaccttttgtagggtcatggggtggtctagagtcattagacttgtgaagagaatcacatagaggagattgattccctaaatgtttgaattgcttcaaacagaattgtggttggtcctatcaactacatgaggtggacctgtaggcctacaatcttgagtttgaatcctttcagatacttacgtagctcgtttctctaacaggcgaccgctccaaatcaggcagagatcccatagatctgtgttccaagtttgagtcttttcagacgcttgcttgtagttcgctttgttatggggaatctcactgcctgttgcttgctaagtagtggcatggcaatgaggagttgtagtgaggcttttaatgttcatggatgattactcgcttaaacttatgaatttctttcgaaacagagttccaagtagagaattttaactgttgtttgagaacttgagttatggctttagtgaaagtatcaaaatattcacgctaaaaagtggtcaataccag

SEQ ID NO: 82482 - DNA, 1193 bp, Cannabis sativa
  modified_base (41)..(53): a, c, t, g, unknown or other
caaaactacacaaaaaattggaagttaattccatgaaatannnnnnnnnnnnnaagaaaacgaaaaaaattgcacgctgtacggatggtatgcacaggataccatccgcgcgcgcagatggaggtgacttgcagagatatctcggcgcatgccttctctggcatgatttccacgcacgtgggaagggtgatcaccaccctgatttttctgattttcaaaaattcattaggggtgcacacgggtcgggttttcgggttttcggggtttcaggttcgggttttcgggcttcggatcttagaaatgcacaaccgaacccaattttcgggtgttcgggtgcgtcgggtatcgggtcgggctattgcgggttaggtgtagtcgggttcgggtcctattgggctgagccccaatgattaatttatggtttgaaatgaactgagccgactgctctgggatgcaactccgccggagaagaaccagtcgccgtcgccggtcttggagaagaagaagcgtgtgtgcctaccatgcgtggtaattgtttaagggtagggtgggtgactcagtgactcagtgtgggtgacgacgactcgagtcgactggtgtgggtgagagtgagtcggtgacgagtcgtccagttccagtccacactgaactgaagtggagatgaataggcagtgaagataaataggcaggcatggcaatgctgaacttttgtttaaaaattgaatattattaaaaaatagtattactatttaatcacatcaacttcaaaaattattattaaatagtattactattaactcagtcaacttcaaaaaaatattgttaaatagcactattcactgattggatggaagcctggaaagaatacaaataggttaggcattaatattatagggttactttttcaattatattaaattaataattaaatatatctatcatatatatatataaaaagtatagataaatattaaagagagtacactatcagattacgggttataacctgaacaaaaaaaaatcaattaacaaaacccgaacccgaaacgcgtttgagtcttatttcgggttgaacccgacccgactacacgggttttaaggagatcggtttttttggttgcgggtcggggcgggtggtcgggttttccgtgtttgcgggtctaaatgtgcagccctaaaattcataactaatt

SEQ ID NO: 82483 - DNA, 1236 bp, Cannabis sativa
  modified_base (36)..(69): a, c, t, g, unknown or other
  modified_base (1206)..(1210): a, c, t, g, unknown or other
atatgtgtttattatatcgttttagaaagttcatannnnnnnnnnnnnnnnnnnnnnnnnnnnnnnnnnctaagatcctggtaaaataattcacaacacataggccaattggaaaaacaccggtttctgcctaatcccctagtctcgaccatggtggcgaccatagaaaagggtcgcgacattggcttcacctggtcgcgactactgaagctcaaattggcagctttagtagatttttctctagaatgtcctgtcttttcaccaattggaaatttgaactgtaatgcattgggaaccagaaacaaggaaaaccaagcgtaaaaccattccaaaaggcaacattaaatgagaaaacacttatgaaatcaacccggaaattaggcttaaaatagcataacacccacaaaagccttcatgaatttctctgattatttcgttcgcttgtgtagggagaacacactgaagtagaggcatcgagtaccctttactatatagttttcctttaattatggtgtcatgaggcactgaatacaatagtttttgtgcctcgtttttgtcatctggaagttttccgtcgagtaaataattaataatcgaagtcatccatgtaggagagctgtctatcatctctacgtcttccgtttcacatatacttggctcgcttagcacctccatcggaactaagttcaattcatccaagtcgttctgcgaggtcagttttgccaagccatcggtgttagagttttgttctctcggaatttgctcaattttaaagtaatcgtatctttccaagttcttccgaaccttctctaaatacttgcaatttttaagcctttggcctggtattccccgaggatctggttcacaatcaactgcgaatcgctatggtagatgaggtttttgactttcaatgcttcgactatttttaagccaacaatcaaggcttcatattcggcctcgttgttggacacgttaaattgaaatctcaaagcacagtgaaacttgaagcctttatgtgcaattaatattactcctgctcccgagccttgctcattggatgctccatctacatataacttttaagtgtacgaatgtaatgaccgctctagtaatttagattagtaagggcaattagcactaatttttattattttattattatatctgactttatttaattttagaccccaatatttagaaataaannnnngagttataatttctcaattccggaga

SEQ ID NO: 82484 - DNA, 1047 bp, Cannabis sativa
ccaatgaagtagaggatgccatgagtagaaaatgtcacaggcaagtttttagtgcgaagttaatctctttcttctagcagccgagatggttaggactagtattgagattgtggttggataactaagaaatttaacacttcagtctaatttgttagaaaggattagaaatgatcaaatgaaataccttgagttagttaaatctcatgaagaagttttaactggttagactaaggacttctctatttcagatagtggaatactacagcacatgaatcgggtttgtgttccagatagtattaagctcaagaaaaaaaaatactaggtgaagctcacaccactccttattttttacatccaggtaccaccaagatgtaccaggacatgaaacccttctattggtggtggggtatgaaaaaggatgtgttcgactatgtatctagatgtttgacatgctagtagataaaggctgaacatcagagacttacaagtttattgcagcctatagcccttcccaagttaagtgggaggacgttaccatagactttgtggttggttaattagaaccataggtttgtatgattcaatctgagtaataaaagatcatttcactaagccaatgccttttctaccagtgaaaataacctatgtagtggatcattatgtagagttatacgtgaagcagatagttcgcctccatggggctttgaagtccattgtatcagacagagatcctaaatttacttcatgtttgggagagtctctagaaagccatgggcataaagctaaagttcagtacaacttttcacccccagatggtcagtccaagaggataattcagatactggaggatgtgttacgagtttgtgtgatggactttgagggttcttggaataaatctttgccattgatagaattctcctataataatagttatcaagctacaatagggatgactccctatgagatgttgtatggtaggaagtttcgttctctgattcactaggatgaaaccagggaaagaaagtattgttggattttatgccctaa

SEQ ID NO: 82485 - DNA, 822 bp, Cannabis sativa
  modified_base (34)..(55): a, c, t, g, unknown or other
tggatttaatagaaattgtatattaaaccataannnnnnnnnnnnnnnnnnnnnntaaatgacttctaatcttctattaataacaaataaaattatattgaattggttattatttagggcataaaatcccaacattgtattcattgagttaaaattccgctttatactcgaccatttatctttgtttttattctatttcttgcatgcacatttggagaaatttcctcaaaaggatgtcacacaaacatctaatggtaccatagaagcatttttagcagaacttgattttgataatttatgagaaggttgttagggggacatgataattcaagacatactcaagagaaaacaaaggataagaaaagcaacatggaatctaaaaaagcagacattcaaaggttttgattttttggtgtgatttttttaagtgtgaagctcacccattggtcacggtttgagattgataaccaagtttatgtgtcctactcttcactatttgtgatgatcagattagtaaataagtttatgtgtcctactcttcactatttgtgatgatcagattagtaaataagtttatgtgtcctatttattttaagccaaacatgatgatgagattgataaccaagtttacgtgtcttatgcttacctatttgtgagtcacagtttgagtatcgattgttgttgtttaacaagttgtgcactcacaaaaattttcagccaatttttttaaaatcacacagattttatgccaatgaatttggctagatcaattttttatggtaagctatttatttaatgtgactaataacaataaaactatgt

SEQ ID NO: 82486 - DNA, 1005 bp, Cannabis sativa
atactatgttcacaagtcttgtgtgattaaggaacttaatcaccattttcatcctcgtcaccctctatctcttcgccaaagatattatgttgattgcaattcttgtggccgatactttggaatgagtttgatgttcagttgtgttaaatgtaattttgatttggatgtggattgtgccttgatgtcaaactccataataacatgtctagaaggtcaaaattgcatccaacattctactcatccccacttgctactacttgttgacacaactgccgatgctatttataaagatattcatgttagatgctttgtatgtcaatctgaagattcaccatcagatgatcgagtttattatggttgtaaaagatgtaagtattttcttcatcaacaatgcattgaccaattcccacaacaaatccaaacatccctccatcctaatcacggttgtctctctcttcgttttacaaggtacttagaggataaatgttttttttgtaaaaacaaagaccccaaagccttttatttccaatgtcctcaatgtgatttttaattgtgtatggattgcaaagttatcagagtcttaaattataaatatcatgagcatcctctttcctttgtcaagaacatgtcctttgcatttgaaattgaacaatgcaatgtttacgacacttgttttaagccatcagtcatgtccaattctaaagaatttcagaaaactgagtccttcaaattctggtgttgtgattgtgatttcgagcttcatttattatgtggtccactaccttctactataaagcatgaaggtaatgtgcactccttacttcttgttgattccttcattgaagattgttttggtgaatattattgcgatatctgtaaaactgaaagaaatccacgaattcgcgtatactgttgtcgagagtgcaaatatattgctcatgtgcattgcgtgatttctgaggtatgccatagtatatatttgtttaaatcttgttgtgaccattt

SEQ ID NO: 82487 - DNA, 1492 bp, Cannabis sativa
  modified_base (421)..(421): a, c, t, g, unknown or other
gcggcaacctcagtataaagagtcccttttaattgtaatatattaaatttaatttaacttaataattttattgtaaattctgacctagggttctgattaagttgggctatttttaaaaatatgggaaaaattattaaggttatgataaatatgacataaaaagtaaatgccactaagtatggcattatctaaccaatcaaactaaaaatatggttttttttctaaaaaaaacatataaaacattaaaaagaaatctgaatttaaaatttataaaaaataaaaacttaattacattaccataaaaaatattaaaatttccttcatatttctttttttaaaaaaataaaataaataaaactatagtgattgccgaagttgtcactcgtaccggaaaaatcaccggagtttactgtcggcaccngaaaagtcgtcggagtagccgccgttgccggaaaagtattaaatattggttttgtttgggtattcccatttttggtgcacttttgtcatgtgcctttactatctctttctatatatttttttaaggaattttttctcgcgagtcttgtaaatttttttaaacctaattttaataaagcttgctaattttgagattttagcattaatttgtgaggataatggatttttttacttgggtaattttatagctatattaatttgtgaggataatggatttgtaaaagattttctttttattatgattcatggtgatcgttttgagtttaatatttgggtgattgatgttagagaaaattaattaagcgaagataaagtggcctttgcacaagctgtcgccaaaaaggaaccctctttgacaatttttctttcacaatttttctcaatcttctgtcaattcttttttgaagattacttgatttagtcgtagggttttgatcagaaataatggtagatgaagcgagttcctcaaatcgatgaagccaaggattcatatccaatcagataacagcaaatctggcgcattcaaattcgagaggtatttgcctttggttttatcaaaatgtgatgtatacaaatgtattgtttattctattggatttattgtgatccgattctgatctttgaaatgctccttcgatctccgccacctcgtcgctccacgctcattggccaataatggtgatatacggcgcagtaagagaacaggcatgttgacctcctcaacaagtatctttacctcagtggatgaatcgatatgaggcaaattgagaagaccattcagtatttgatcggttatggaatggtgggtacttttgttctttattttctctgtcgcaaattgagaagatcgttcagtatttgatcggttctggaatggtgggtacctttgttctttattttctctatcgttaagcctataaaaatgttcaaagggcctgtcttttacttgggctaatgtctctttgttttcaggatcgccggacagagaacaatccttatcttggtttcatct

SEQ ID NO: 82488 - DNA, 1098 bp, Cannabis sativa
aaaatttgtgagtatacattctaactccaaaaatacaaactagtaagggaccacttttgggggcgcttttataagtagctatcaagtggtttcaattttctaatcttttctagagccaaagcaattgtttatctttttgctcttgaaataacagttttgaatgggaataattttgtgactatagagagcgactccagaattagatagaaaattgatgattattgttgtcattgcaaaaggatttctcatgagttcttatattgtaatttttctactagaatttgtaattttgttaccgataaaataatgaaattgacttattcaatagtatatcaaattatattataataattgagagatctaacttatttcgtttaaaaattaattggtgataagtggaacagtctatatttttatatatagtacaatactctactatttattctacattgaaccataaacacaataagtaataatcttttatttatataatgttgtggtgtttaacagccacaaaatatatccatgaagaaaagaaatggaaatgagctttaccctaaatttaacatatcattaaagattaaagatttaacaaatataaattaaacaaaacaaacacacacacacacaaaacaaagcttttattaattgactaaatttcataattgattgttgtgttagaacaaaaagatttaaacatcatcatatgaccatgaaagagaacttcatatttggagtgttgaacttgatcctcattcatttaccatggagaaaataatcagtggatttccccactatataatcacacatcatttttttcaccaactttttcttgggaggatttacatcacatattatgggtttgaactctttcttcttctcatcaatcttcaccatcatcttcatcttcatatcttcatgggcatctgacccattgatagagagctcttctttctcagatggggtttgaattattttcattttcattgccatttccatatctgagattttctatgctcaaatttactctgtttttttaggtgtgtaaataggtgatatatataggctaacagaacaatgaattagttattctttttc

SEQ ID NO: 82489 - DNA, 1829 bp, Cannabis sativa
tttgggtagaatatttgcataagtaaatatagagaagttgttttaatggcgctattggagttgagagtagttaaacaagtaggacagtgattttattattaaagcattgaaagtaattaaccaaatgtatatgctctgagcatattgattgatatcccctcgattcccttattttccaaactgctagtgctaactcaatatttgttttgcattgtttgatgctatctgccgtggtctttggtatgttacatacaagttcagacgatctgccattatggggtatgtagtgatctcattctttaaaagttcaagtttgttattcagtactatggaattgttagtccttgcaattaatttctattatcctcttctcctttttgtatggttgtaggctttgttggtgagttgcatcctgataagaacagcgataatggcaagcatgttctgtacacacataagaatattaatgttcagtacaataaagatcaggtttgttggtctttaattcccatgtcattttctacagttagctgttttagctgtcacatgccatctgtatcatggctaagctttctataacatgtagataattcacgtgaacctctctcaagagagtccaaagcctttggaagttggtcgaacactggacctgacatactctgtcaaatggactccaacgaatgtcacctttgcacgtcggtttgatgtgtatttggattaccccttttttgagcatcaggtaaaaatataattaggatcgtttcatttctttatgttacctcatgttgctttgttaccagtttccctgtaatcatgtatgttttcactttttataaatgtagagcttggttttagtgatacgtttaatttattcatcatgcagatccattggttctcaatattcaattcattcatgatggtcatcttcctcactggattggtttcaatgatattaatgagaactttgaggaatgactatgcaaaatacgcacgagaagatgatgatcttgagactttggtatgatatcttaatttatttgtaaattcttttcgtgcaattttttaactactgggaggtgttttagcttgtaaaatgtggtattgaatctgtattttccacttttcaggaaagagatgtaagcgaagagtctggctggaaacttgttcatggggatgttttccggcctcctaggaacttagtgattctttctgccgttgtaggaacaggtgcccagttagcattgcttgttctccttgtcatcttgttggcaattgttggaatgctatatgttgggtaagtggacaacttaacagaatatatctgcactcattgttgagttttatttttaatctgccttggctgatgttattagttttattcttctttgcatacttgttttgcattatgagcatatgagcattgatgtttacacacctcttacttaattattgctcactgttggccacaacaacgatatactatgtaagaaggaagtgctaatagagttattaaagagcaggacatattcaagcttataaagagccattctaactagtaactaggcagctgtgtcataaaaacttcaattttaatatcaagataaatgttgggttggaactggttctggactacaatgtgctctattgtagttccactgttctcagtaatttatggagtacaataagtcgtgctgtatggacatcttgatatgttttctatcaagctcattgttatattatgaccttttggtttaactatgacaggatcatttgcctagtcttgtatgtcttactcatttttggtatttcaggagaggagcaattgttac

SEQ ID NO: 82490 - DNA, 950 bp, Cannabis sativa
tagtacttacataattcgaaaggggttccaaaaaatagaatagttatgaaaatccaaagttgggtcaaaccaaaggtagaattgttgctctttttcacctttgcctttagtcaacacattagtatgtacaacataaggttgaccactcttatttcccacaaatgcaaagtcaatttcatcccataataatgtcgatgactcattcgaatgagaagaaagctatacacacacatatacacatatatattaataaaataaaaaaatatatgtataaaaattaattaagtaattaattaatatatacttacataataggtaatgactgttccagaagagttaccaggaacaagtttgagttgcatattaatgttaccaaaaagatactgtttttttgactggaaaccggagcctgagattttgtcaagagacaatgttagaagatcaccaccgtccgatatctgagctcggttgtctcccaccgttagatcaaaatcttggctgaaatttccaactgagactacggctgtgggaaggttaacaacaagggaaagaagaagtagtaataataatacaacggccattgtatatataaacagtgatctatatatatacacaagaattaccattatatatatataggagtatgtatgtataatatttagggtttaatgtttaatgtttattaatggagattaattactaacagtgtacgtagtagaagttaggaagatggtttaattaattgtgtaataaggtgcatatggtggggtagttcagaattaatatatttttcatatattacaatttaattagaactgtatgataaaaatctatgggacgggattcttcaatgctctaagtcttgtcttttgacatgttttgaaagttttctttgtcttttttcttctgtattttgggattggctagtatggcttcgagtagtcaccaag

SEQ ID NO: 82491 - DNA, 905 bp, Cannabis sativa
tatggtgtaattatctatcagtattagtctaacacggacttatgaaacttaagatagcattttgagtattattatgctaaagggtagcttttttctgacctttcttagctctgttgcggctgaagtctgtgaagagctttttactcctagtccgcctcatgccgaactagctttgaatggggttgaagtgtttatgaatgcaagtggtagccaccatcaattgagaaagcttgatgttcgtcttcgcgcttttataggtgctactcacactcgtggaggagtttacatgtacagcaatcaccaaggatgtgatgggggtcgcctctactatggtatgtcgatttattttgattgaaccaactcttgtctcttatttctatcaatgtcttaatgaatgtccacgctcacattgcagatttttggatcttttgaataacttgtttgtggttttactctttttgtggttagatggatgtgcttctgttgttgtaaatggagatttggttgctcaagggtcacagttttctttgagagatgttgaggttgttgttgcccagatagatctagatgcggtatgtacactttaaactccttttgggtttgatttcagtttagtctccatttccaaatggacaataatgttgatctggtattaataattttgacgatgatagttgagtaaaattaaacaatgtgttggcacaatgtcaatactattccatttctgttaactaaccattatcaaaatttatttaatgtcataaacttgtgtattctttatgcatagcattaattttcttataagctgtatgcataaacttttgttatcttgcgtattattatgacaatatatttagttttcccatctgacatatgcataagactgttctctctctctctctctc

SEQ ID NO: 82492 - DNA, 937 bp, Cannabis sativa
  modified_base (31)..(36): a, c, t, g, unknown or other
aaaaatataaccatatggttacaataaaaannnnnncattgaatagtcacccatattatataatatatataataaaataatatataatattagtaatagtatactgtaatatatagtatatactagtataatatataaaaagctaaaattctttattgtagtgtatgtacaaacattaacaacttattatcccaataaaaattatataaaaataatttattatataaaattaattaaatagtatatataaaataaaaattcatatataaaataaatatttcataaacataaaaaaaaaatagtacaagaagtcaagattcaagaacaacaacgaccaataacctcgccagctgccacctcggaacttggcagtcacgggtggacaatcggacaccagtggggggcacggcacacaggtaggtggacacaagtagatagtggacaagggcagaggagagggctttctaactttggatgttaggggcgatgctcaccggactgagccggccgttgggatgcgaccccgccaaagaagaagcagcagccgcagcctatggagaagaagaagttctagggttttttttgtttgtcttggtctggttcgaatagtgaatagtgagtactgactgagtaggtaggtaatgaatagtgaaaagaaaaatgtgataaaataaaaattaatactttggaccacgaaatcaatatctacgccccgccccccaaaactcaagtccccccaaaactcgtctcttttgttttccctctctctccctctctctgtatttttttgtgtaggtttaacgaggatgacaatggggttcgtggctcgaaaggaatggggacagattcgtgggtttgtgatttaacggggatggtctgggttcataggttcattgttcaatgacaaggatggtattcttggtttgacggggatgga

SEQ ID NO: 82493 - DNA, 1561 bp, Cannabis sativa
attaaatatataataatataaaattatatacttacttgttagtttcagtcatatatattgtgttgtgttttggtaaatttgatatttttaatttttatattgactttaaaaccaaaaaagaaaaattggccgggcgggttaacttgaccaaaccgctcaaactgttggtcggtttacaatttttttttttaaaattgggcggattgcacttaaattagcaacactaactttacattgggttagaaaatatataggataaatataacacccaaaaaaaaggcctgaaaatataattttaatgggttacagtgcttaagaatttaatttaatattggcaatacagtacatatatacttccatttaatacggagaactatactgtatgtattgtttcacatctgaaaagaatgattataaaaaattaaaatataaattaattagtgaattttaaaaacgaagacgaaattaaacattaaattactattacaaagccagatagatcgaataaaatagtatactattatactagtggatattattctctatggtgaatatactaaataaataaataaaataaactaaatatattataaataataaagaaatgaaattttgggtaagagagcgttacaacttacaaacttcctctgaataacaacagataattgtgtgaggtcacatgtgtgagttccgaccagagtcgttgacacgcttgactcgggccccattactctacgcctcaccccaccctaccactgtacaccaacagaaagaaaagaaagaaagaaagagaaggtggaataaagcaaaaagaaaaagagcttcttctctgtatatttctctcagattcatcagatcccaccctaaaagcaaaaacatccacatctctctccatttttctcagtttcttactttttttttcctggttctattttgagaagggtttctttttcttcctcttctttcattaatattactacccatacttttgtttttctctctccagttcagtgtttctacaaacccattgaaactcattcttgtatgagttcaatcttcggctttttcgttctgttttgcggacgacaaaagtgggtttaggattgtttctagtgaaatcatttgggaagttcgtcggtttctaaagatttttttttttccttaatgcaccgctttgcattactctggtctggttcttgcaccgacttcattagggtttctctgagggtttaaaatttatcagtgtccttgtttctgaggtcagattcaacttactttactccatatttatcatctcctttacttttttttttatttttttttatatatatacatatattttggctgggtctgtttggtttctggtaaaactaaggaaactaaactaaataaagggttggaaagagaatttatatgttatggattatgaaaataagtttactcgttagatgttcttctgtttggtctagatattgtcaccgaagttctcataaacaaaagaaaaagaagtgttttcctcttgtgactaagccatttatttctccacattttctcagttacc

SEQ ID NO: 82494 - DNA, 1011 bp, Cannabis sativa
tggaagaacctgtctcattttcttcttatatcaataataacatttgcattcctatatagaatattaacagaaataaataaaacagcacatacatttcaccagttcataagaattgcttcaaagtttcgaatgtggagatgattgcccaaattaatatcccatactagaccactgaccactaatcacccccacaacaatattagttttaatttctcctttagataggcagaaaaaatcaataaacaattaattttaatcttatctgatcctcattgttgatggcaagcacaacaacaagtggagattattgtggaactgactttgatttgtacgaaaataacatctaatcaattcttctacacctctaaaatggtaaattagcttgacaattgaaaataaattatggtgttaacagtaggaattatcagtctagcttgatctagaccaaattatgcaaagcctaaaatatataaacttcctactaactcactagaaaaaaagttagttcaagatcaaatgcacaaataattagtattacatagtaatatgaatttaaattattaaggactaccaagtttgaatagaaaagacttgaaccaaccgtgctatgatcttgaatccgaacttttatatgtctattagcatctgaaggaacataagaatctcccttcaaaaagtcacgaactgccacaaagaatccagcagctgcaactttctctgccaatttccttttacaaaaggcaaaaactggtattagtttccaaaagggtacacaggcacaacatcattaacacaaagaattaaggctatatgtaaattaaatcacacctccatgtagtcaaaaattgatatgtaattgcataagactgagcctggattgttctttatcaaagtttttcctttaaatcgagcattccaattaatcaacaaagcattctcatcctattattaaaacccattacgacttttttttttacttctacaaatacatacacaacagaatagaataaa

SEQ ID NO: 82495 - DNA, 1093 bp, Cannabis sativa
tttttaaggtgtcaactaggccctttgatggagtaaaatacaatatttattgactttggaccaattgagtgaggcccaattcccgaggtaaggcttgtccatacaaacagagatcgtttgaggatgccatgtgccatacgcagccaagtccttatcgagaatgtcagagtatatggcgttggacaaaaaatgtgacattctttaggtggcgtacgcactctaccattttgttgtgggagacaaataatgaaccgcgtggccctgtatctagagggttccatgtaaggagacgtccggatgtaatctagacgactatccgattacccaattctggatctccccttgaaggtttctggatttgtcttggtagactttttgtttctaggtcgaatggtcttttttggactagggcggtccgaccttggcaggtcaataaattgggctcatgtccgaattagatctgtagcgtgacttggtcatttagttgaatagtcagccaaagtgggctcaagtttggactgcattagttgttattaggctttaaaattgcacacatcatcatcccataaacccttataacactttccaatcttccacaataaaaggtttaactagcttagttaaaggagtttaaaaaaaaatccattcttattctaaaccgaataaactgccatatataatataagggttttcttcttcttcttcttcttcttttttttttttgagaagaatatataaggattttctattaattttcttttttacaataggaaatttgaatttatatgcatacatttggtgcatattaaattttttgaacacgaacttaccaaaattaaaaaaaatgaacacactttatattaatacccataatacctttctccattctcttctcttctaacttcaccatccatactctatattttcattcatacagatggtagtctgatggtatctatttttttttgttattttttttttttatgtttttgtacataaaaaaattgtagtatcaggccaccattgaaccaccatcaaactatattctatatttatagatgttcagctctattcattaagctcgttaggaagg

SEQ ID NO: 82496 - DNA, 663 bp, Cannabis sativa
gacacgctaatatgctagtaatagttggttttgccgacgcttttcattttgccccaacaaaagttcttgtatcgagaccaatttgtcaaccaaaagaggattttatttttttagcgcaataagaaagttttgacagtgcaaaaatgcgctagcaatagtctcgtttcttgtaatgtcatttttctcaccatcaaaagatttaaacttgcctgtttgctttatttgttgatttagttcgaatgttcttaaggaacccattagctcatcaactttcatttttttttttaaatcatgagcttcctcaattgctagtaatttagtgtcaaacctatctagaagcacatgacatatttttcgaaccaaaatagattaatctagctttactcccaaggaaaaaaagtcattagcaacatcagataatctttcataaaatttagataaaatttagtttcttgcatacttaattcatcaaatctagttgcaacatggtaaaattagatttatttaaatgaatgatacctttaaattgagtttgaagaatttttcatgccaccgttgtaaattcgcaagatgatataaattttataaagctatcaccaataccaataaattttttatctaaatccttattattagatccaaataatttttcatcttcagtag

SEQ ID NO: 82497 - DNA, 694 bp, Cannabis sativa
aataatatttttatatatatatatccttgcatctttatattctttattcgttcaattaatataattttgattagagaaataacacatttttatctgtcaatattgctattggtccaactaagtatcgagtctcgtataatttaatataataacttttagagagtatcgatagcgaatcacaaggcgacaagcctaaaagtgctactaccaaggacgaatccactcatattagtaacaaaaatattgccttttaaaaaattaaatgtaaattttttttatttgataattatggaccaaaatagtagaaaattccttacaaaattaaataaatatagtaatagtgattataatgtaagtgtaattttttttttatgataaaataagccctacaaaataaaaattctgatttcatcactaatgtacaataacaatactccattaatatcatattcttttaataaattacaaaccacttgatctatataaatatgtattcaattttatattaatataatgttagtttatttatgatagcatagcatgctgtttccgatatatatgtatgcccatgtatataatttgataatgaataaattcaaacactaccttatcatattaaaatttgtaaaagggtctctacaatctacaaacaaaaagtgtattcgtaattaaacaaataaatttatatatttta

SEQ ID NO: 82498 - DNA, 1213 bp, Cannabis sativa
agtttagccgccaaaaatttagtttttgtggttaagtgttacaaaccgtaaagttcaggtggtttagccgccaatatccctattaataatgaagggtatattaatttcaatatatgcatactcatataatagttatctttaatatgaaaaataatataagataagttataataacaatatatgactttaatatttgggaatatttattttttttaattatagataagtggaaggaacaatatatgcattttgtaaatttgaaaaggaacattatatggcgaaaaataaatgagaagtgtcatctatttaatggacttaacaaaatttttcgatcctagtatcataagtttgagattatgtaaacatatggcttatggtatgtttgatattttacttactctagtgcaagcaacttactttagtaagatgctgaaatatttttttaatggctaattataaaagaagtcttttggctcctagatatagagtttatttatctaaggaacaattataatcattcaagaaaagataaagaccaaagaaagaatttttcaagcatcaacaatgagaggtctcatgtatgctctggtatgcattagactagacatatgctgttgagtgaaagttaggagtaggtatcagtttaaatccatgaaacaataaaataaaacttaagattaaggggacctatatgttagtctataagggtgatgttttcgaaaccttttaggctacaatgactcagatttctagatttacattaaagctaaaaagtctaaatctaagatggtaattactctaggagtagagcagtactctaaaccaaacaaaattattcatttagaccctatagatggtcttgaaattcccaacaaatttatgcgatgttaaaaaggtaataatttaattattttatataataaatgttaatataattttcaaaacaatgcatatgagattttaagggcatcaaatacgtttattgggacgtatccatgaatattgatagaaaattgtccaaaacaatctaaaaactaaaaatgtggtttttatgtgttgaaatacatcagtgatatcgtcacacgtgcaaatcataacagtttaacaaaacagatggtctaattagtaagaaaaaattttgacaacttttttttaatataaccaacttgaagacaattcctaatatgaacaaatacagaaaatgtaaacagtt

SEQ ID NO: 82499 - DNA, 1602 bp, Cannabis sativa
aacatagtacaaatcaaccccaatggtatcagccaaatcaatcaaagacacacgccctaatttatcaatttctaccacaatctcactcctcaattggtcctattttacaataagcataaaaatcaaagtcaaaaatcgatgatcaagacatagatagtatcgacagattgagaatacaaaatgagtgagagagagagagagagagagaggcgtacaggagtgatgtactctttgccggagacagtgtggagaaggtcgaaatcgatgatgcgtagctcttgaagcttttggaccaattcgacgacgtttcggtcggataacctgatgctggacttggcttcctgcgcaaactcgaattgtctctgcaactctgccaattcgtcgtccatcttcggattggatcacgcgaatattgttcgtcgtctgtatcgtattttctctcctctctatattttttccaatgccactttctgtttttcaaatggaaatggaatcatcccatttctatggtaatgtgttcgaaataaaatcatttaactacacaagtaagtaacttatgtgttcgaaaataaaatcatttgtacactctcatctaatataattatttataattttttaatctttttttttataactaaaaataaatttacattaattttttaacaaaactttggcagggatgacaatggtagaatgaaagagttttaaaaggaaaaaaaaaggcttcgataagagaattaccttagagaggctacccgcaacaaggattttttattatgaagctcgtaaatctctgttttgtgaatgatttaatcatcttttgtgaagacactttatgtaacaattctgaataaaactttcaataatttctgcttgatttcaggccttaaagctaatataagcaaatcaaacatttgttttgaaggtattggagttgttgagaaagttgatttactttaaggagattgattatgggatggtaaattctctttaagtactttagtatttttatgagaccaacaaaatagaaaactaagaattgtgaggtaatcatttcaaagaacaaaatgcggctttatacttaggcaagcaagcatttgtcgtttgttaatcgggttcaactaattcattcagttcttggtttgaagaattattagatgggtatttttatcttacctcaaagtgttatgaaggaagtagaaaagctttgtggatggtttttatggggtcacaatgaaactcttagcaagttgcatcttgcttttgagaaaaagttgcctttcaaaagtgaatggtgaaattagcttcagagatagctccaactccaagtagaatagaaccattttggcaaaattcatttgggctatttcaaaaaaataagatctcctttgggtgtaatgggttcataacttgtatttaaaaggcaagatttgcacaaactttgcaatatctagaagattttaaacatgaaagatattttagctgctggaaatatggcgaagttcaaaggttacgaagttgtataatagtacctttagagaagagaaggtggattttatgaaagcagtatggtgtcgtcttagcttgccaaaatatagattt

SEQ ID NO: 82500 - DNA, 1685 bp, Cannabis sativa
ttattgatatttaaaagaatagagattacattgaaaaagagttttatttagggcataaaacccaacagaatctcgatcctaaggaagtaatgcaagggacctaagtctttcaaagcaaacacagcatgaagcttattgataaattgattcagcttagcagtgttgttgtctatcacaataatgtcatccacatagattaataccataaaaaccagactaggaactttgtaaaagaataaagatgaaactgccttggagctcttaagcttccaagttataaaggtagcttttaacatgcgataccaacccttggtgcctgtttcaaaccataaagagacctggtaactttacacacataatctggttttgaggcatctacaaacccttgaggttgttccatataaacatcttcttgaagctctctatttaggaaagtattattgatgtgaagctaccttgtctcccagaacttagcaacaacaatagttaggatgatccaaaactatggaagtcttcacaacagggctatatgtctccccaaaatcaattcctggcctctgattaatcccctttgcaaccaatctagctttgtatttttgaaacatactatcagcattcaacttaatcttgtatacccactttattgatcgtggatttagtcaaccgacacagatttgactaggattggattttgcttatgactttcacgtgtagaatgataataaatataaaaacataaggatttatagaggtttagctactttgttcaagtaatgacctactttccttttagttgtattcactctttgagataataccaagcagaggttgaaacctcataatttatagctatggctctcttcaatattataatgagaatgtgttttgcagatgagaagtatgagaaaagagagagaggactctaggcttttgtgcttctgagcgtacttgagacttaggattcaagttgaggccccttttcacgtagggttaagaccctttatatagtgttagggtttacatggttggttatttgaaaatacataaaatatggagaatattcctaaagaatagggttattatttgttgatgaaaaatccctatttttgtgggcagtttgactgttctgaagtcatacgaatgctggagacaatttggatggcctgtgagaaaaatacaagtgttgaagcatatctgtacacttgggcgaccaaccatgttgatgggctgcccagtatagggggctgtctcccttggccggccagctattggtctggctaggaccttgcaggtttgtgcacagttttgtcttttcttgtgtctaccgtgcaaccataagatcttgcaggttagaaggctgcacgacactaacctcgctagttaatgctgacctgtcttcaatgtattttttttctttttttccatgtggaggtgccaggtcaggtggacaaaacttgggataatattttttccctaagtcctatccgaacgtctagttacgtagggactttacactctggctggtattgtaatgacctttactgtgtagatatccatggccagatagtagactccttagctgatgtgattttatggtagttattaattttacgtcgatcaatgtgggaagttgtgtgacggctgcacatttttccatgttgaaactcttggccttctctttccca

SEQ ID NO: 82501 - DNA, 801 bp, Cannabis sativa
gcgcgaaaaatgagcccattgttactcggatggttggaaggctgaccttggcttagagaagtcaaggtgccgcacgggtattccgctgcctgaaaaggtgagcccgtgacactttccataggcctccaattgttgttatggtgttgccacataaatcatccatttcttggtataacaatgccgaaattattcaatgcaggggaggtagggcaagcacactttgttaataggctttgtaaaatatccaatgcaattacttttataaatcttcatttcacactaattacataatttgaaattgacattatgggttcatttggctcagcttttatggcttttgactggaagaagaagagattaaaataactttttagtaactgtttggataatatttttcaaaagagatttttgtctatgggaagagctttatgtttgggtgaactctttaaaaaaactcagtattatgaagatctatttacttttatagaactctttctttggtcacttctaaaatgtgtaaatttgcttgcatcagaaatattagaaatgaaacataaatttgtttgaaaattttatacatatgtttttatatgtgtataattaaaacaaaataatgagaaatactgtttttagaaagagggaaaaaaaaaacaaaatataaaataaaagtgataaaatatgaaactttgaacgaaataaaagatggaaaaattacattttgcaccattttttagaaaaaataaatcacattttaccgcaaaagcaattaattacaactatacaatatctaatttttcgtaa

SEQ ID NO: 82502 - DNA, 1343 bp, Cannabis sativa
tatcgggtctcatataatttaatttaataacttttagaaagtatcactagtcgataacaacgcgacatgtcgagaaggtgctagattttactggtgtctaataacaatactttggtgcaaattattatgaaattaattatatgttatgcatggtggggttatggttttatgctcacataattggttgctttttcttttcatttttttaataatttttttatttatattataataaataaagtaattaattaatgtacatctgaatttagaaattatattcatgggtgaatggttagactaggaaagttcgaacaaacacttttttttttaagtcttaaggaatttcttcttttcttacctttaataaaaaagtgaccactcttttcccttcttgacatggtccttcttaaattctttatgtccccttttcattttctttttaattttttaatatttttttcaatatttattaatttaattaatataaattattattttttatacttgaggcattccgtacgatgagttctctaaagagtgttttttcaagctctgaaagggtacttctgttaaagaaaaagtctctctatagactatttttaatttatacaacttttggtccaaaaaaattggtgtaattatggaagaagtttcataaatatatagcatcaaattaattattattattattattattggaatgattctaaataatacgaggatagtgtaggtaggacaattaccactacaaaaaataatatttttagtcacaacaaaatttataattgaaaaaaaaaattatgactaattataagttatcttttatatgttgtgactaaaaggttcgtaattaaaattattagtcacaaaaatcacaatttgttatacgactaaatatgcttttattcacaattgttatgaccaaaactaaattagtataataacttgtatctaattaaatattatgttttagttacaagtaattttttattacgactaaaaatcacatttagtcataaaaaaaaatcatgctatgattaagaagttgtcactaaatgtagtttcttcaatgcacaatgtctttattatttttttttctttcttaattttgacattgatagaaatagaacttatatatgtaagacctcttttttgggaagacactaatttctcttaaaaaccttttagaaaaattacaaaataattttaatatatatttttttatattactctcaaaatattttatttatttatccattttttttaaaaaatataatagtgaaattataattatccaaataagtaaattcattattgagatacattataatttttaatggaaa

SEQ ID NO: 82503 - DNA, 1916 bp, Cannabis sativa
atagaaatagcgagatgttcaagttcgaatccctctcctctaatgtcaaatgaaaaaaaaaaaacctactaatctgcataaatttcatatttaaaagttggaaaataaatatgcctacttgatctgtcttttcagaccagagtagctatctaggaggagaatcctttttgtctttttaatttgttcaacagctattcttgtgatgtataactaggttcgaagatgggttaatctatttagaagtgggatattgtttgattgttgattatataagtaacaacttaactgttgtcttttaatactttttatatccgcagtctgcgagccaagctgctgctgccttttgtcaaaagaaggggaagaatatttcaaagttagccatgcaatacagcttgtcaaacaaagatatatcatcggtgctggttgggatgaactctgtcaagcaggtcctgtttgtcactagcttttgttttgaagtttgttgtatgctcattcaaaacacatgccagatctttatcctggcttttagcgcaattgttctagttttgaactgccctaaattcatttgaacacagagtattttctcattcactttagttaaacatgaatgaaatttttgttaataggttgaagagaatgttgctgctgcaatagaacttgcaaataatgggaaggatgaggaaactttatcagaacttgaggctatttttaaaccagtgaaaaaccaaacatggcctagtggaatccagcagagttgacatctttgcttatgttctcaagcttcatgcactggtcctgtggtaacaatttcattcaaagagaagcctaaatttatttaatggatctattttatgccagaccgaaacagaaatggaaaaaataatgtgcaattgaatgctggtgatcattatgtttatgttatagctattgggaataatgctagcaggtacaataaatctcatttctgattcaagaatgtaagcattggatcaattaaataatggtagcaccctttctgttttttattaaagtatttttcattcagttaagaagtatatattgttgtggaatgttattctttagcattgtacattgtgcaaactaatctatttaatgttaatgaataaagctgttatgttgaaattgtttaatactagcaattattcatagttattgtttgttcattgtacctaactttacatatttccacttagctagacaagctcttgtgaatggtgtttcctatctttgtgcaagatgccttagtgaatccaggagagaaatgatggacacttttgcttggcaaaggccgtactgtttaatgaacagaatatttttttgggacccacttttatagtactaagagtgccccaattttaaaatttgctaattcaaggtagaaattgacacaccaatgagaaggataaagagggcattgatagaaaatatgtaggagaggggtttattggtaattatattgatagggtatatagatggattgaaaatatagtatattatatatgtgtgtgggatcatgagaatcctattgtaattgagccttggctcttgggagagttgagttctctccaatattcattgttacactttgttcattcgatatcaaatcccaactgtgcctagttattgttattgccaattctatctatcattttgcctattatttctcttattcattgaagatccttgtaggggcaattcagaatcataagatatgaactcaagataactgttatagaggaaagacattaagatgtaaaatttgtgtacgagggaccttgtttttgaagtataacacacaaaaaaaaaagcaagcttttatagcatgaatgaacatatatatatatatacatatgtttatatgtatatatattctactactagtaaacaactgttca

SEQ ID NO: 82504 - DNA, 932 bp, Cannabis sativa
tgatcgaattatttttgacaatgtgcttattgctaatgagatcattaatgccatcaataatcgcaaagctggaaaggttggctgggttgccttaaaactcgatatggagaaagcttttgatcgtgtggagtggggtttcatacagtctattctcactcattttggttttcctccttctttcatttccttaatcactcggtgtttatccactgtcaccttcacaatatctattaacaataacctcctccctcctttctctcctaccagaggaatcaggcaagaggaccctctctccccttaccttttccttttagtgtctgagggtctttcagctgccattcgtgttcatgcctcccgttccaatttcaatttcatttctatttgtagggcagccccttccatttctcacctcttgtttgccgatgatagccttctcttcacaaccacttcccaaaataattgccggtcaatcaaggatattctagctctttatcacaaagccactggccaatctgtcaacttctctaagtcctccattctgttctcccctaacacttctccttctgatagggaatttttcttcaacactcttcaacttgataataaaccttttgtcactaaatacttgggcgttcctcaatgttttggccattccaagcgatcctccttccattacatcatccaaaaagccagtgccaaacttcagctctggagtaacaaattcttctccaaagcgggtaaggaaactcttataaaggcagtcgtccaggcaattccttcttacgcaatgtcttgttttcgcattcccctatcaatttgcaaaacccttgacagactcactgctcagtattggtggggttcttctggcaaccgcaataagctgcattggaaaaactggtcctccgtttgtgcttcaaaatttcatggaggat

SEQ ID NO: 82505 - DNA, 1027 bp, Cannabis sativa
aaaccataaacatgaaaattacatgtaaacataaatgatttctaatcttctattgataacaaatcagattgtattgtaatggattttatttagggcataaaatcccaacactttactggtgcaaattctggcctgcaagtttctaatctcattgatcttcataaaagatgggatttaactgctctatcgaccaacttttgccaagctgacattagtagaatactcaccattcctttaaatatttttcccacagcagatgtcatgatatggaacaatactacctctggaaattacactgtcaaatcggggtaccaatttgctacatcactggctgaacaacaagatacaaccagtagcaactcccttgagaattggtggacagctttttggaagttaaacatcccttctaagctttgcatattcgtttggaaagccttccataatgcattacctgttgctgcagaactacaccgaagacatattgttgaagccccaatttgtacattgtgcaagaaacataatgaaacaatcaaccatgctcttttattctacacgcgagccaatgaagtttggcatctcccacagctgtccctaaatttcaagcttgctgcaacgacaacatgtgaagagtttcttctatttgtaacaaccaacacctcaactgcagagcttgaattgttcctggttctttgttgaagtatatggtatgaaaggaatgttgaatatcatgataaaccagcaaaaactccacctgcaattgttcaatttgctcttgattatttggccaaatatcaagctgctaggatgccaattataaaacctcagccatctttcgatacttttatacatccacctgcaaaaacgaaaaatattccagcgaagcctccttggattgctccttcaccagagaagtttaaactcaacactgatgcagccgtggataaaatgaatgggatcgtaggcattggtgctgttttgagggattcacatggctctgtcactgtagcttttgttggaaattatttta

SEQ ID NO: 82506 - DNA, 934 bp, Cannabis sativa
tcgttttactgagagtgatgttcctcttgctcttcagtccattattttagcggatatttttgtctaataaagattattttcattaaaaaaaataattaatagtactaaaaataaaatttaaatagtaaataatacgtgtagctttattttaaattttatatttagtatcataaattatttaaaatttgtcaaaaatggacatgatgactactttaattataatataaactgattaaaaaattaaaactcagtatatctaagtatcaaaaataaaaataaaaaacgttaggatgaagaataatacctgaagctctctttatatataaataaaatttaagtggtcttaaataattacaatatatgcaatcataataacaaattaaattaaaaaaaaattgaatatcaaagtctaccaaaacgactagtgaaggaaatttgactgaggtgcaatttcatatatccaaagtgagttcgggatggggttggggtaatactacccaccccatatttgactcaaatatatagttttttaattattatgtattaaagttactgtacttacaaggttgactattaatcttccctaatttaatgtgtaataaagactctttaataggtagaatatttgtttattttaaaatcaatatcttaatttttattttcatgagtattgctatgaggcaatcatggtgcctagtaccacgatgaagtgtcatcttataattgattaacgatttttttaatatttattaaaataaaacaagtgagactcgatattgagttgcaccaataacaatattacacctcataaaagtgctcaatactacaggtgctctttagcatttctcttttgaaatacattacattattttctcatacccaatgaaaatttccttaccccaaacacatcgaggaatggatttgtaatgtcccc

SEQ ID NO: 82507 - DNA, 1422 bp, Cannabis sativa
gaacataaattagaaaaagataaaggtattttttttttttttgataagggtataggtatttgaatgaagaaaattgacctttactgaactcagacggccgtacatttaggattcgtccagtagaggagggaggagatagtataagtgtactatatagctggaccatcgtcattttgctttgatctctcttaattgtcgtccaagaaatggtcttaacatgtccacgatccatttatatatataaattcaacgctttctatgctcaatgtacctagatcaattttcggctacctacgtgattgctatggatactacattttcattcaaaacaacatgtattttatatgagaaatatttaaaagcacatatctaatctaaagataactattgtaattatatatcaaatcctacctaacttaatttaataataattatattaaatattagtaattataatatacttatattttaagcagtttaatcgcgtaacatgaatatgaaaacaatttataataaaagtgactattgaactctcgcttaacaaaagatcccaaattaaatacatcaccgaatatatatatatatatatatatattgtcttgatatattcatgtcggtaaaaatcttattaaaaaaattaatgtatttgaaatgtcttcagatgtcaaggaatatcaactgtccaatgagttagttaattctgttagtgataattcagttggtgttctgttaggatcataactcattcttgttgatatttgagtttgttatgtttgctgtataaaaagaccttgtactgaactttctgattcaataaaacagactgcattttccatttcatcttctgttctctctctttctctcgattgccttttcttcttgactgaatcttgacatggtatcagagcttgttttcgttaatggagatccctgtttcatccaatggcgcagcatcaacattgaataatgctcagccacaaaataatcagcatgtacctttaccaaaatcatatccagtttcctttaacctttctctgtctatcaagcttgacgaacacaattttttaccatggaagcaccaggttttagcatcgatcaaaggcagcagacttcaaaaatttcttgatcctaatcgagctccaccacagtttctaacagcagctgatcaaagagtcaacaatgtcaatccggagtatgaggtctgggagcagcaagacaatcttcttgtttcttggctcctctcatccatgtctgagaaaaccaccaatcgaatgatcgaatgcgaaaccactgcacagatctgggagcaactgacagagtattacacagctttgaatgcaacaaatgtaagtctttacaagactcagttgaggaacacaaaaatgacagggtcactgtaatgtaagtctttacaagactcag

SEQ ID NO: 82508 - DNA, 1004 bp, Cannabis sativa
gctcaccattcgtcgttgcccagggacatctagggaatgaagcttcagtgaggcctagattggatcagaaggttcttgctcgccgaatgaagaacatgaagtgtgtctcttctcgttctaactctttttatgattttgtagatatggaaaaaccatgccgctcgaccaaggctagtgcgcccctcccatgctcgtgactagttgattcgggatggccgacatggagagtactgtgactcggcctaaatttcagaggatagtgcaccaatatgcaacgaggtaggattttgagcttatcctcggggatcgtgctcatttaccacttaaaggcatggtgacctttagcgaatatattctcaaggcgggtgtcgcttggccgcttcacccttttttcgtgaaggtcctgaattatttcggcatagctcccctacaacttttgcctaacgaatggaacattttaacttgcttcttcatcgctttcaagaaagtcactagtggggctcccactgttagggaggtacactatgtgtataactttcttcaaaactcctcattccgagatttttattacatacacaagaaggtttcaactgacctgacagtcgtccgctcagtttttaacacaagaaaggcttggaaacaagacttcttctatgtgcccagtcaggtgggtgtgaccgaagtcttttggatgcctggtaagtgactttgttgcttctacttacaccaattaattaatatagaacctcttcatgatgacccttcaactcttttccttttctcgtttgcagcggcgcgtgactctccttccctcacaaaagaggagtattcttccagactactaaacttgttcaaggttgactatgaaagtaagctctatcaccatattctaactttgcccaacttaattgactgcggattggtcttgacaaaagataagttaaaggctaagaagttgtacgccatactgcttcctccggaggacagggaagaaagtgaatgtg

SEQ ID NO: 82509 - DNA, 957 bp, Cannabis sativa
ggagatttctctttaacaagaaaacaaagatgccagaacgcgcttagatttcctagaccccgcgcacaactgatgattttcatggctgattgtggggctgagactcaaccaccgtagatgtgtcaaaaaaccagattgatccaattcagaattggaaaagttctagctcggctcctccccagtagacaaagttggacaagattcaggttgctatggacccctgcatcgtttaagaattttccttgtggagatgttttcaggcagcctctttgataatcgatttggagaattattttctttatcaacattctgccttaatgttgtgttaatgacagcatccgtagttgtgaaagggttcatttttgcatgatgaaaatcagttccattaagtggagcatgaacagtggttgacataggaggataagttacattggtgttgtgattgatacaaatatctggtatataaagataagtcaaatcatctacattcaaaattgcaactgctggtgtaggtggatctgttacagatggagatgagatcgtgtttttggtcttcatactagaagtattatccacaatattggttagtgttgctggtgcaaacagaaccttggtggtagttaaagaattaggagtgacatttttgtgagcatttgtcatggaaagttgagttatgtttgcaacagttataaccgaggaagaagagtcattagtggatggtactgatttgggaataattgcctcaatattaatattgtgttgctgtttagaagactcccctggtaaaagtggccaaggatgagatgtttgtctatttgaaagccctggaatcacaccagttaaagaattatgagccaaatgcatgagaagtggccaggcgtttccctttgaaaaatctgttctgtacctatcataaccattatttggaagtgcagcccctttcaattcaggtccata

SEQ ID NO: 82510 - DNA, 771 bp, Cannabis sativa
cattttcttttgtagagtttcatttgtgtttcgagtcttcatttcttggcatgtattattttttgtattattttgctgttttgagtgaactgtgtatttagagaataatttagggctagaagattttatggttatgtgatctgcaggttttgggttttgtttttctaggatttgggggattattctctgtaatcatgttccaatataccctagaatttacgatcccagttcccttagaaataaactatcctcaatttccaatcatagcttttaagccctaaacccaagaacctcaaaccacacttgaaataaatgatgcaaaaattagggactatctcattaggtctgactaggaagaagcttgtaatcattataaacaatttttgtaagaattcattgagggaaagcgtcgttgtttgcgagaagatgcttggcttgtatcgcctagtttagttactatccccttagcgaggccaatatttttaccaccgatcacagttactttttcaccaagtgacttggattttgaaaatatggctcaagaagcttgcaaatccaagactccccaaaacccttctatcacattccaagcagaacttattaagtccagggtcaggtctataggcccttatattggggatgctctgagatcatgtggaactagcaacgagaaaggatgtcgcattcagtcagttgcccaaggagagttcaactgctacccacctgaacatttggctcaatatgaaggctacaacaccaacgagccttcta

SEQ ID NO: 82511 - DNA, 662 bp, Cannabis sativa
cttcatagcaagggttctagatttgcttaaaaagggcaggcagtgtatctgcacccagagttgtactttgtaaagatcctccttagtaacattctgcaacattgttggggagtgaagcaaaataagttggttaaaatagtgccaaggttcacccgatatgatctttaatttgtctcatgcacatccaattgttagtaagaacatatcagaatgttattcagaaactacaacttcaaatcgacacttattgctctagaaattgctcattttttttgatgaaaatctttgggttaacgacattggaaaggcaacgagcaaccaagaagaattttggggattgttgtggttcgataatgttagattcagagagagtgtagacctccctttccttttgagaaagaacaaggtttgaagtcatgtcgtgaaggatagaatccatacagaaaattaaaacagagtatgagaaaatgaaatgaaggaatagagtgtataggctcagatggaaaccataaatagacccttgagagaagtaaaactgcccgagctgtaagacatcatgatgcatgatgagaattggtggagttagagggaagaaggtgaagaacatgggttcaggaatggcggagaagaaggagagaaaaccagaaaaatagtaactgcaa

SEQ ID NO: 82512 - DNA, 1236 bp, Cannabis sativa
aattaagtagcagagttcgtgttaataattaataaatacatatctcattattattattaataaattataacgttttttatttctcgggcttgttgcgtgctgcgctttttgtgttggtctatttgtacttacatgttgtctctttcatacttctcgtgtcgtacttaaagacatattttttgtgtcatatcgtgtttaagcctacatttttttggtgcctagtgctcgtactttccaagctcgtaccgtgtcaaaaaatctaacccatatttacagtattatccttaatgtacccatgtcttaactcaggcaaacatattaatccataagttttctcggtactaatcttttctctcttgaggtcaaaacagaaagaaagcacatgaacaacgctaaaacagcaagtcttgatgaatcgtagtgaaaaagaaggggatgaagagatcatcaatgacagagaaagggcgaagcaagagaataacaatagaagattattgaagaagaaagactttttgacaatttttaattctatttttccaaaaatgtgaaaataaataaaaagtatgcagctagctaatatatacacactatacacaaatgttactaaagtttgccaataatatttttttaaaaaatataaaataagcataagaagaaggactaccatcaacctcctattataatcttttagtcaacttacaagcttaaaaaagatacatgtcaaaatatatttttttataaaattaattcatggcggtatttgttataattataacatcatctttataaatctttgaaaaagttcgaataatttacaataccgaaaataaatttaaagttttttaaacatacgtgataaactgaaatatcataaagttcgtctttcccttttttgctatgaattgttcatataaattaatgcctaatagaaagtatgaagaaaagaaaatactatcattcatcagtttacaaacaaataaaattagaggataacactctaaacatgaatgaatacttaatacattgttcatactctttttgttgttttctttatttgcttaggcttcttttgtgttgttttcttgggtttaggcgccattggctttctcttcggcctcttactccaacattgcaaattctgaatgttcttaagagcgacatcaatagtaatactacaattgataatgatcgatttctttctcttcatggttaaaatcttcactttcccactcatcc

SEQ ID NO: 82513 - DNA, 835 bp, Cannabis sativa
ggtcctatttttccttctgatagacgaaatcggaaagtgtaaataaaacaagcattggtcttgctttgacatcccaaaatgataaaatgtaacaagaaaaatgagcaagcatttcgatgaaaaccaactaaaaagtatatctatgctgctttcctataactggttatgattggagttaaaacaacctgtgtatataagtggacaaacgaacttagataactaggcactatggcaaagatgaattggaaactgtttcatcctttggatttaatgagattaatttcagcgttcttatgtcttgagattaaaatagttaatactttcctcatgattgcagaacattgtattagatttaagattaaaatatagttaaaagttgtaccttgctttagatcttctgcaaaatgggttagatcctcatcaagtcgtttcacatgactatctatctgaacaaacataatataaataaatttcataagaaggttttcaaaaggcaggatacattgatgcaaaacttcaactgaagatcagtgacaccaatatagttctcagtcatatggcattggcagttcaaattcaaatgatactattggtataccttgtaataacacaataaagaagtagggagatagcattaagcatacaaattgatatagctgaaatcaaactcatgatatagaccatgacagcaaaccaaattttcttctttaaactattaatcattgcaaccgaaatggttaatacatttcatttgtttttcgaacgaagagaactccttgttctctaatttgacatgtaaacttttcttaacagtgttataatcacaaccatatta

SEQ ID NO: 82514 - DNA, 1223 bp, Cannabis sativa
cggggtagatatattggatgtggtattgtgtgcttcaagtaattgacagtctggaaatatttattgttttgctagtgtttttttttataatgataaagatcacaaaagttattggtaataagattgtgaatgatttgagaacctggtttagtattttgttagttaaagttttgtaattcatgtattcattggttacataagtagtaatctcagttaccataagtaactatctttaataactgagtaaccacattggtatcagttacctaagctgcttatgattttgtttttttttttgaagagtacaaagtttgttatttttcaaataaaaaaaaaaaaccataatctggaaatttcaaattctttgtactgttgtgttctctgcatactgcatagtgtgcatatctagtacatgtacatattaaatatagaatatagtcatgcaaagcatcatattcttctcgaaaaaacaacgtgcatacaagcctcaaaatagaatttttggttttctgcttatgttattacttaaatagttttctaatattttattgtcagccacaaaactatgtgcagagttcaatgtgcatgtctatgttacaatttttaaataaataaataaataaagtgacaccccttctgacccaagccagacaatacaattcttcttgcatagaaaatcttgcaagattatttgacaactcatgattgagacactggaaagttgttaaaacttatattctaagcaagcatatcacatgcaaatgttaaccatatctttagcaacacttcattgtttagaagaagaagaagaaatatatcatgtaaggcattgacatatcagcaaaaataatgccaattgtacaaacaataatgtatttaagaagagcgcattggataattagttcttcataaggaagtcactttaaaatgtcaaatttcataatcaataaatgtcatattagtggttttattattgtctgaaaatagatgattattattgtgtttggcctaatccttgtaaaaatcaaacagtttattgttatattaatatgctttagtttatatgatttcataaattttgcggtagagtaatcaattttaccaatttattgtgtggtattattccttaaaccccaacaaccatttagttagttagttaatctttaattaacttaattgtcactaatttaactgtcaaatgtgacagcttgcatattgggtcc

SEQ ID NO: 82515 - DNA, 2270 bp, Cannabis sativa
tcaagtgctacaattgcaacaagtttgatcattttgcctcagagtgtagatcaaggagggttgaataaaaagccaattttatcaaagacaaaggtggagaagaaggaactgtgctacttgcttacaaaccgatgatagcaatcatatgtgtggaataggaagaatatttgttgagctcaatcaaatggtaaaatagaatgtctcatttagagattaatcaaaaatactcgtggaaagtaaaggtaagcttcttatatgctagaaaaaatggaagccatcaattcatctcaaatgtttactttgtgctcaacatgaaaaataatattttgagtttaggtcaattactagagaaaggttatgatattcacttaatataaaataacattttcttaagagatgataaaagtaatttgatagccaaggttctcatgacaaataatagaatatttctcttgaatattcaatacgatgttctaaagtgtttaaaagcttgctacaatgagtcatcatgactttggcatctacgatttggatatctcaactttggtaggcttaaactcttggacaagaaggagatgattagaggccttccatgcatcaaccaaccagattaattttgtgaaggatgtttgcttggaaagaaattcgagagaagtttaccaaaaaagtgttatcaagagccacgaagccacttgagattatacacaccaatgtttgtggaccaatcaaaccaaacatgtttggtaagattaaatatttcttccttttcattgatgatttttcataaaaagtatgggcttatttcttgaaagataagtcagaagggttcaagaacttcaaaaaactcaaagctctagttgaaaaataaagtgttcttcctattaaggccatgagatctgaccaaggaggagagttcacatcaaatgagttctgtaaatactgtgaagataatggaatttgttgtcccttaactataagaccctacaagattaggtatattatcgtgatttcttaatgttttacgctcctttactaatcaaacaatttatgaaaatacgtgaataattaaaacgttctcgattaacctttgaaattaaataaacaaaagctttacataatctaggatcttgtcttcaaaatttaaaactgtaatacaaaatatttaagtacaaaagttgttgcctagcgactaccaaaataaagcctactgctccaaagatcaaatcaccaggtctaactgccttaatatgtacaatcttcatccgctcggactctactgttcagtcttagctttgcctttacatacacatataaacattaactgtgaattggcagactcaataataaaagaataatcataacataaatataaactagattttaactaggcacccatacacctaattataaccttatcatgtatcctacacatactgagtctagaacagtcataccaaagtaatattgaccatattatcagcctatagtcagtatcctagttgcaccaatgtgatagtgtcaattaatactttgctaaacatatatctgtcagtattcagtgcaactctatggacactaatactgccattaccgatatgttatctaacatacattcataaacatccacgctaaacatgtaattatatatgcaataattatactaatgttacatttattttaaattcagttttgccggtcaacttgagcaaaaactgttgctcaacaattttaggcccctaagtcataacatttgtaaaattgataagtgatacgctaaatcacttctcgaggacttaaaattaaaataaaaaagtttccctatcgatggatagcgtggccataccctaaatatcacaaaaatacaaaaaaaaaagggttccaaaactactagaaccggtaaaccagattcccaaaatgacaaactagttcctagggttctgtttagggaaatggtaaaccaaatctacaagcctgccataaccggttaatcagttctctgcaaaaaatcctaaagacttcaccatcaactaaattttacctcaaatcaaacaaaactctccataccacctaattaagtcataacaagcataaactaactaaaaaaatcaacatcaagagactataggaaaatccaccatggaaggtctaagctcgagttcaataactcaactcaagctttagctcacccacaaccaaccaaacctgcttaaaacaacttgaataaccttaaaacaacctaaaaaaacaattccatgcaacccaaacataca

SEQ ID NO: 82516 - DNA, 1186 bp, Cannabis sativa
aagattttcatcactctcatacctaaagtaaagaaaccaaaccatgtcacccaattccatccgataagtgtgtgcaacgttctctataaattggtctccaagtcaattatcctatggctacaatcatgttttccaatggctgtatcagaatatcaaagtactttcttatctcagcggctaatcactgacaatgttcttgtggcttttgaactgttacactcccttaaaaataggaaatgtggttctaaagcctatgcggcaatcaaattgaacatgagtaaagcatttgatcgtgtagaatcgcactttatggcttaagttatattgaagatgggctttgggacaactattgtacaactcattcttcattgtttacagtcagtatcttattcattcttattaaacagagtagtacatggtgatctggttcctagccgaggtatacgacaaggcaatcctcttttaccctatctatttctaatatgtgttaaaggtctctcttggctattacaacatgagaaaagcattggttctttgcaaggtttgaaagtttcaaggtcagctccactagtgtcccaccttttctttgttgatgacagtgtgctcttttgtcgtgctactaaacaatcagcaaggtctattaaaagatctcttgatctatatagcagcgcttcatgccaatctatcaatcccgattgtgttctctctttctcatataacacaagagagtaagaccagagatttttccaacatctatttggcatgccaatccagccatgtcatgagtaatacttggggcttccctcttttgtggggcgtgataaaatgaagctcttttgtggcatcacatataaaatttggaatcttcatagcttttggaaatagcaactattttcaattggtggaaagaaggttcttttaaaggcggtagtacaagccactcctacctacgccatgagctattttaggttgccagtcactttatgtcaccaaatagaaagcatgatggctagattctggtggagttctatagcatcaaataattcaattcattggaagaattagaatttcctttgcaaagctaaaatacacagtgacttgggctttcagaatttcatacattttagtcaagctctcttggccaaacaagcttggcgtcttctggaatttccacactcccttctag

SEQ ID NO: 82517 - DNA, 1470 bp, Cannabis sativa
aaaattacatcattcaggtcaaacctataatgatgtatttgtagccttctatttaatcctaataaataaagataaataaattgtttatttaaattcaaattcatcaaataaataattatctaaaaaaataggtttatcattatttattttaatcatttaataataaataacttattctataaactatttaattaaataattatttattttgaattatttatatgataaaataattaaaaaaaaatcttgcatttaaattaaacaccctacacctatgactatccatgttgggaaacacaacctagcagattgatttattttttgttaaaactaatatttaacataatattaactacttataacatgcaattcacatatagagcttagaaaacacttttagaatgttatgcagcagaatattttatccagttcagcgatctaatccttatttctttctattgcagagtattaccaatcaccaaacctaaatcttcttagaacttgatattaccaccaattttttttacaatcttcctcagtaatctaggtattgtaatagaactgtgtgagaaagtgttacaacactagaatttcaaaatttagagagagaatctaaggagagagtggcaactaggttaggaagtattgactgagatttttggcaactaattgatgagagctatttaatgatcaaaagagatataatgcgaatatttttacgtagttggggtattaatgagccttagttcatgagtcactgctattaatatagtagtttttcttacagaagatgttttacactattttttatgaccctttgatctttagaaaatagttggagtatttatagcttcttaaagagagaaaaaaggtttcactatcgtcgttagtgttaaagcatggtttgcacaagtttccaaattcgaataataatgtatgtatggcaagttgcataggttttagctaggtgtctggtaagataagcccttaacctttcttgattgatgtgatagttcattatgcatccgtcataaagctcatagattaatgggtttaatacctctaacatgactttttagatccattcacagatgatttccccatgtcgtatttgatgcgcctatacaatttacatctgggacctaatgactggccctagaggctttacctagctcttggagatgaacaaaatttcttgatagtagggtgtggttgaagcttccgaaggggcctcccgaacatgactatcgaatttagataaattctctgaggaaatttatcttaagtatttcttgcccttaagacttacttgccacctcgctgacctcgagactgccacgtatattagaaaaaagaggggcaacatttactctccaagattccctatgcgaaagattagaaaatgtaaaatattctctattagggctgtacaaaaaaatttataaaccgcctaaaccgaataacccgccc

SEQ ID NO: 82518 - DNA, 2139 bp, Cannabis sativa
tattatatgtgatgatcatgatgatgttttctttggtttgtagttggtaatggaaataaaagccttagtttcatacaaggaatgtcaaagatacaaatccaagatttgcctgaaggagtagtgtttggagatttggaatcccacttctcaactatgctacatcaaatggggttgatgttaccaagagcaaccgcaattttcataaactcctttgaagagttagacaagacctttactaatgacttgaagtccaaattcaaaaagttcctcaatgttgggccattcgacttagtgtccccgacgccccaacctgctcaagatgagagtggttgtctatcgtggcttgacaagcaagaagttgcgtcggttgtgtacattagttttgggtcagtggcagtgccaccaaaagaagaacttgtggctatagctgaagccttggaaagtaatggtgttccattcatatggtcacttaaggacaatgcaaaagcaaatttaccaaaagggtttttggagaaagcgaaaacacaaggaaaggtagttgcttgggcaccacaaaagaacatattgtcccataagtcagttggggtgttcgtgtctcattgtggttggaactcgttgttggagagtatcgtcggtggtgtgcctatgatttgtaggccttttttcggtgaccaaaggttgaatgggaggatggtagaggatgtgtgggaatttgggatcaaaattgagggtggagtgttcacaaaacaaggaatgaaagtttgtttggatgtggtcttatgtcaagaaaaaggaaagaaaatgagagagaatatacaagtactgaaagaggttgcaatagaagcggttggcataggaggaagtagtacaaagaatttcaaagagctactccacttgataaatagccatagtgttgcttagttagtgcaatcacatgttaaatagaatttattttgaataatgagaaagaatgttaaatgtttttatgcattggtatcttaaaactacttcccgaggattgtcactttacaatctgcccttaaataaacatatcattattgtggccgagggaccaagatccattttttcatttttattttggtcaaattcaattatttaatttgatccatgtgatagctacgtgataaagttaaagataaataatcatacgactttttagaacttacaatcatcactcatcacccaatcactttcattataatttaaattaagttattataacaattttaatatttcagatcttgtattttgcatactagttggactttctgtttagtaaaataattaattaaattatgtattttttaaaatggtatccagagctcaattttcgattatttttgtttaatataactatattgtaaataatttctagtacgaatagatacagaaaatgtacaaagatttattataaaaactctaaaacgggttattattaatttttattttaacaaaaatcaattcagggtaaggtgtcacatttacacccgaaaacacacccactcagcaaacctactcgacctgaaacccaaaaaaatgggtttaaaaaattataagtcatgttcgggttacacccagttatccattaggtcgggttcgagtttcactaatttaatatccgaaaaaattggataatacctgaacctgcccaaaaacactaattttaaacaatgatttatcatttttattttcttgttcttcttttattttctttcttttcattttcttttttgttttttcatttaatgaaaaaatttataaaaaataatatttttagaaaaaaaaaaaaaaagccagcccaactcaaaactcggtcaaaacccacccggacccggtccaatccacacccaaaacccaaaaattcggtcattcaaacgggcaggttcgatttactaattctatgcactcgaattcgaaaacttaaaattcgtcaaaatccacttgatgtgcactcctcattcagagtactattattttgtatcattataaaaattacaggatctaatttattatttaacaaaacaaaaaatctaattggtaacttttacaaaatagagtatccaaattgtattttgagtgtgggaattcgggatagtatgatttgttgtggtgcccaag

SEQ ID NO: 82519 - DNA, 909 bp, Cannabis sativa
  modified_base (341)..(355): a, c, t, g, unknown or other
atttgaattagcttctactataaacttttttttagcttatagaattataaaaaaattattatacttttaataataagcaaaagtaaatatttaactaaaggatattatgaattattggattgcagttggcttatatatacgtatcgagataatactaaaagacacaatgataaaattttttacttttagttacaataaaacttgtgattaaaaatgaaaaaattgtgactaattatacataataatttttacattgtagctaaaaatattagtcacaaatatcacaatttgctaactaaatgtggttttagtcacaatatttgttgtgattaaaactaaannnnnnnnnnnnnnnatctaaatattatattttagtcataagtaattttattgtaactaaaaattatatttagtcacaaaaattttatattataatgaaaaatttatcaatatatttttttttagtgacaatactataaagtatcatatctttattggtttaattaaataaaattattgatgaaggattttcagtactaatgagcacttaatttctataatacggaaagtaattatatatataaagacatataaatagttttaacatatatgctagctataataagaaaaaagagaaaggtaaaaaacaaaaaagaaaactagctattatataacattgattcatgatacactattatattagggttcaaaacttataagcatatatatatttagatatatatataacacatattttagttaattatacatattacccttttatatatagggatattatatatatatatatgacatcatttatttagattctacgtacaacaactcaaagtggtcacatatatatgatgatatatgtttgtttaattaattagttgggaatgagcttga

SEQ ID NO: 82520 - DNA, 786 bp, Cannabis sativa
ttgatttgattcagagtttcagcattattattaatcagtaaatatcaaatgtaaaaacaattcacattaatagataagtgaatgtaatatatactagtgacaaattttcaatacccagattcaatttgtactaatatattttctcagggaagaataatgaataaattaatggataatgaacagtgctaatgattgaaaagtaaagaaaaacacaataaatcaaatataataataacaaacttataacattacaaatcttattagaagccaaacataaatagaaaggaactccccatttgtttcgtgtttttttttttggtttcaaagttgagttaatttaaagtttcagcattattaatctgtaagcatcaagaaaaagagagaagaaagggggagatataagtacctgaagagtggaatttggagaataatgagaaggaaatacaaggaagaagaaatggtggaaatggtggttgcccatttcgttgaagaacccattttagggaaaaggcagagctcaattattacgaaccctactttattactgtctctcttaaattaccaatcaaataaacattaatttatttcttttttttttttaaaaaaaaaacatttattttctgttgccaaaaataaataaatattttttttcttttcaaggtgaattcttttttaatcatctttccaaggtaaattgcatgttttgctataaatatagattatgtagtgtcctgtcataataaaaaaaatatataaattgtcttgtgctataaaaaaatataaatt

SEQ ID NO: 82521 - DNA, 775 bp, Cannabis sativa
tgcaagatcggtatacggggccatgggtttgcggaggagatttcaacgagatcttgggttcccatgagaagaaggttggccgacctaaacctctgaatcttatttgtaatttccaacaggtcgtaaatgattgttttttccgcgatatccctttcgaagaaagccaatttacttagagtaatgggcgcttcgggaaccttatctttgagcgtattgatcgtgttatggggaatatggaatggcatgacatgttctcggttgctttggttaaacatctcccctggatgaactctgatcactgtcccctcttgcttacctacaattttgtgcctcacaacacgaatgctaaaactcgatgggtctcccaatttcattatgagcatgcctggcatgacaaagaagattgtaaatagctggtgcgaattgttggacagaggaggattcccccttgatagcagagccgtttgtgactcgtattaatagatgtggccatcgtttggctacctagaacaagcagcaaagaaaggagtcccaatcccatattaaagctctgaaagaccaatcagctgctctctctccttatcttcccatcccgatgactggtccaaactcactcatgtggaaagacatttaaatagccatttagacaaagaagagatgttatgacaccaacgaagctgtgctttgtggtgtttccatggagattgtaatacccgttatttccaccagcaagcttccaaaagacaaaaggaaaacaacattaaaggggtgtttg

SEQ ID NO: 82522 - DNA, 1082 bp, Cannabis sativa
gagaatttatgatggacaatagttttagtttatgttttcttttccaagtttcacctaaattactaatgcaattttaaaattaattactatttaaaaactaataaacctaaatcaatataaacaatcaatatcagcatcaaaataaagaattagaaagaatacttatttttaaatatagggttccattaaattcacgaactaaaggtgaaatagaaagtgaaagaaaaaagatgaaactagtataataattcatcttcaatattcaatttccaagtttcgtgtttttcactccaagaaggtgttctccacatttagaattgttttaatatgaatctttaagtgaaagtaatgaatatttaataagctttaaaaaatcacttatatagatttaattcgtttcactacgctgacatgtaacgtttgttatctaacctatttgtcttgatttaaccctctacagtaaaattcctataactttttttgtacgaactccaaatgattcaaaatgatttaaaaaacttaaaaagtaatctacaacttctatttgtgctttgtacattttgatcacaatacgtaagtgtgagaatttacatagtcacgatgtgtgtaaaggaatggaacaagagctcaatttattgtttcatgaaaacaaattgtaatacaaaagcaaatatataacattactatttattagattatttctagtggaagaaataaaaattgtactatatttagaaaaatgaataactttaatatatttgcatcaatttttaatattgtactctaatacaaaattgtgaaaggaatatttgcggtaaaacttctttaacatttgtaattgttacacatataacattaatcaaaaaaatagcggcaaaagtactttatcttacaattttattgcagtcgtactcttttttggctgttaagtgccaattaaactcgttaagtgtcaactcataaacacatggcgacatattttcttagtttatttaatatgtggtccaataatatgtcgccacacgtttctaagttgacacttaacagccaaaaaaatgtataattgcaacaaaatcgtaaga

SEQ ID NO: 82523 - DNA, 590 bp, Cannabis sativa
atatttttatgtaagatatattttcgtggtatttttacatattagattctttttagttggagactctttcattttctcatttgcaatataaactccaattccaggctagggtgtgggctactccagcactagcactagtggctaagagatattattctcataacattacattgtataccttgttttaatttttacttctattttcatatttttttagatattttcacttttatagatgatgtccccattaggccccttagattatgtaaattatgtgctagacataagtagagagtgagggtatattaggtaattcactcaaaaaaatagatatattttaataaaaaaacaatataaaagtatttttgattaatagatattaaaaagacgtatttttttaacttatccacataatatttgttaaaattaaaaatttagaataactcaaactatacttaaaagtttaaaacaaaaaaagttaatcaaaggaataattttatagtttctccacgtggccattataatccaccatcgagaataaatctttggtttgatttgaatgtttggaagatatatcagaaaaatcaagt

SEQ ID NO: 82524 - DNA, 1198 bp, Cannabis sativa
  modified_base (812)..(814): a, c, t, g, unknown or other
ggtacaaagagagagtgcttaaaagttggaaggatgccaaagactctaatctccaaaacattgtgaagaaactctacagagtgaaacatgccttaaaaagctggcataactcagagaatggggacttgaaaaccttgtatatggaggcaaaagaggagttcacaagagctcaagagcaacttgctggcatgaaagaagcgcatcaattaatggtggtcataacaaaagaaggcgagaagaaagaataggatctacaacctagaatccaagatgagaataaccagctaaaaccaattgaaaagatggaaaaagttattttagatccagaaaatcccactaaatgtgtgtttattgggaaaaatttggatgaaaaactaaaatagcagctaatcaactttttgaaggaaaaccaggatcaattttcttgcagccattcagacatgatagggatggaccctaaggtgatttgtcatcatttgaatgttgaccccaattacccagcaaaaagacaaaaacggtaacccttagactccgagagacgatgggcacataaagaagaggtagaaaaattattgacaaatgaatttatatgcaaggctttttatccttcatggatttcaaatcctgttctcgactcgaaaccaaatggcaccgggagaacttgcattgatttttcagacttgaataaggcatgtccaaaagattgtttcccactaccaaggattgactagttagtggatgcaactgcaggacacgagctaatggcatttatggacgcatattctggatataaccagatcaaaatgcatgtnnntgatcaagaacacacaagttttgtaaccaatatgggactttattgttataaagtcatgccttttggtttaaaaaatgctggggcaacatatccacgactagtgaatgggatgtttgaaaaactggttggacgaaatatggaagtttatgtcgatgatatgctggtaaagttgataaaaagtgaagatcacatgaggcacctcaaagaatgctttgggatacttagaaaatacaatatgaagcttcacccgaagaaatgctcttttgggatctcctcaagaaaatttcttggtttcatagtaaatgcaagaggaattgaagccaacccagaaaaaatcaaggccataatcgagatgccttcaccaacgaagtcgaaagaagtcca

SEQ ID NO: 82525 - DNA, 657 bp, Cannabis sativa
attctttccattcatgaaattatcatttcgaaaggattttgtttggtggttaaaaaatgctcaaaattaaagtgatgagtgtcatagggtatataaatataatagaagctactcactgtaagataaataccagctagtcttatagtaggacttataagatgataaaaattaaaatgtttgccagtattttcagctataaaagttttccatcaagttgcaaataaggaacttgaatttcccaagtgtctggttatttaatatcttgctctcaactatctgctctgatatagaattctggccaactgtgctgaacagcatagtcctcccagctattagtctgtaatttgtagttgtggttgcagccttgcaggctaattgaggttcctaaggattataatcattaatttcttgcaaaatatggtcatgtgacatatagtatctatcacggttcccctttctctttctactatctctcgtcatgtttttgtcttcattatcatttttctttcgaagttaatcggaatcggaagaattttttttgcagtaattctttgtatttttttttaagaaatgaaaattgcattggacaaaatagaagcaaccaaaaggtttaagaaagattataaaggtaacatctttaaagaggatgtcaatgga

SEQ ID NO: 82526 - DNA, 1526 bp, Cannabis sativa
  modified_base (207)..(231): a, c, t, g, unknown or other
  modified_base (500)..(526): a, c, t, g, unknown or other
aataataataatataataattttgcattttataaaatatttgttcagttaatattgatttgtatcctatgtcaaaaaaaatatagatttttatcaatttataagatttttataaatgtgctataaaatataatctctcacattttattttgaaaggtataaaatataatcttttgttatacggtagaacctctatttaagaatactnnnnnnnnnnnnnnnnnnnnnnnnnttataaaaaaaataaagtctcaatttgggcagttataaataagaataacctctatattgtaattagttatacattttttaagtcccatattaataaaatatacctctatataagaataactacatcttaaaaaaatattaaaaaaatatatacatatatttaataaatttatttatgtagaattaataattttatttcaaattatagtacgtataaatatatatgttctcgaaaataattctagtataatatagtattaagaattgttnnnnnnnnnnnnnnnnnnnnnnnnnnnttttgatattttgatttttttttcaagtgtaattctatttagttataacctctcaattagaatattattttcttagtcccaagtgtattcttggatagagttttgattttttgatattttgatattttttgatattttgatatttttttcaagtgtaactctatttagtgtaactctatttacgttctattgtattataagaatttaaagatctttaattaatataaataattataccactttcttatttgattcaattcaagactaacatatatatacactccttttagctaataataaatagagtaaatattatttttgactttgtgtcttataaaaattactaattagatttattgttttgtaaaataataaatttgatttatattttataaaataatacaaaatagtattatgagctaaattttgttaaaataaaaacttaataataattcattttagaagtgttatgataagactgggtatattttctgcatttatattcgtgttaaaattctcttttaagtttttttttttaaaaaaaaaaagttattaaaaattaagtttaagatactattttgtactatttaaaaaaatacaatgtctaatttatcatttcataaaacaaaaaattgatttaattaataaattttgtaaaatataaaattcaaaatggtattaagttattaaatataaaaaattaccatgtgacatgtattactcaatacaaaatttgtgcctgccttgtacaaaagttaaccaaatttattcttaatatattatcaaaactcttactatactgattcattattgcttagcttttaaataatatttaaattagattttaagaaaataaaactaaattttaaatattttccaaatgtaagagcttgtttggctgtgtttacagttttcagtttttaaaactgagaatagaaaacagttttttgtcattttaaaaatttaatggtgtttggcacaaatttttaaaaactgtttt

SEQ ID NO: 82527 - DNA, 1377 bp, Cannabis sativa
taaagaaaaatgtaaccatataggcacaataaaaatgtaaccattgaatagtcaccctaaatcatatatttataatttacttttctatataaaagataataataattaatattaaaattaattggaaaaactaattattagagagaatgcaatgtaattagtaatatgtttctatatatatattgattttatctaataatatacacttaataaaaatacttattatcacatataatttctttgacaaaaaaaatataaaatttaaaaagattaacatcagtattatgtataatgtacataaacaaagtaaagacaaaaaaagtaagccgttaaaaaataatagagaaaacatgaatatgggataaagaaactgaggaaataatcaatgaaaatgtacaagaaggttaggcgatatttttttagcaaagggtacgtatattggctcatacgcatatggtacgatagtacacgtacgtacgcaattataaatattattaataatttcaaatgtaatttttgagaaagataatgtaatcttaaagttggatcaatggtggcttttattaaactagctagttaaaattatgttcttttgagagatttttattatgtttaaattcactatatataatttcaatctcgggcaatatcaataatcaataaattataacattaatagacaaatgcatcttaattatttctagtttttgcaataaatatattatgggttcatgaatcatgattgttaataaataaataaaacaatttgctggtaatattcataattcttttcaactgtttttagtcgagttgtaacacataggttcaacgtcggcttaataattcggatattattttttctttatactcaataaccgcgtcggattgagataatagagtcaagagtcaaaagctagggtaaggtgtaaacgctgcaggggtgtggtgttcaaactttgcaaccaaatgcatgaaagacaaaaaagaagcttgccttattattgtacgtaggaataaggacaatacatattgaccacttgcaccaattatacacgatcctaatttctaacatatatctcacttatttaacttattatatacctctttaattagggaccgctcacccagacttaaaaaaagagttgactacccaaacccaactctattttattcgccaaaataatacatatatatatatatatttataacaatatattgtataatattaaaaggaacttatatcatttttaagtgttttaaagtttgagcacgtaacgtgaagtaattagcatgaagatagagcattttcactcctacacaattcttgttatttatcattttttggctttctttgtcgtcgctcatgcccaggatcaa

SEQ ID NO: 82528 - DNA, 1192 bp, Cannabis sativa
acgagtgcaccatatatattttatgtataacaatatatgaaaatactaattagttcaattgcacgttatatttattggatttttggacaccctatcgaacatccgattcgatctaatttgatatttaaaaataacattcgatcaaatgggatatttaaaaataacattcaatttaatccgatcacaattagatatcaaatatttaacaatcagtcgtaattagattaattgattgtcattagatttaataatttatgcatgagagagagtccaagaagacggtctttaaggattttttttttgttctttagtcccaaagttttacactcttatttttgttactgatttatgatacaatattaattagtactaatcacaaaaatatactcttccatcgtccaactccaaagtaagctttgattgaatcaaattaataaatatattaaccatcatcttaagattaagaacaataattaaattatgaagaaataatatgtttggttggacatgcacattcatcgcctaggtattatatgtataatttaccttaaagttttagttctatttatattatatatatcttgactttttctgtttgaatattcgaatatgcttctaaaatttccaaaattttctcatttttatcacaaaaacattctctttttaagggctttattcgtcaacaacatcacatacatctatataataataaaatatgcgtcaagagtataattaagttataagaagaactggtaacttacattacagaatatagtacgactagttatgaaaataaatttgctgataatttttaattaaaagtgcctaataagaaattgaaaattgaaaattaataaatacattcacacaccacacacatatatggatcaagtacaagaggtggtggtcatccaggattcattgagagaagtttgtgtgaagtttttgaagtgggcagtgcaaggcttaaaattaaaagctggggacagactcaccttggtctcagttctacatcaagtcaatactccttgtaggtattattatataatattagttcatctttatataaatattgtttgtaatatatagtaggtacttaaaatatgatattaattaacatgagattaatatatcttctgttacatattaatttatttatttttggctaaattattattattgttattaatat

SEQ ID NO: 82529 - DNA, 1421 bp, Cannabis sativa
cataagctgaaatatcatttatctcggtttatctcagtttcattgggcggttatctcttttttcaacgcgcccaatatacagattgggcgggttatagttttgtcgattttttcggtttgtattttttgtcgggtttttacagtttggtttgggcgggttatttgggttgggcggtttacaaaaaattatgtacaaccctactaaattccatgtcgcggcacctgggttaaaaagccagaaaaccagcagcaaaacacgaaaattagcccccaaaactcaactaaaccttcccaaatcacaaccaaacttccaaaccatcaaatagagttgctagcaattatcaaagggtcaaaaacacatatttcatgcatcaatttctagcaatgaatcccacaatttcagattacaaattcatgaaaatccaagctccaacttaggcttaattccaagaaattcctatcttgaattcttacaaaattacaccaagaactcatgctttacacaaccaattttagagcttaagaacagcaaaatacacaaataaaatcctccaattttttgtccaaacttaactcaagcaacctcaagaattaaagctccaagcatgcataagacaacccaacaaaaagaacatgcaactcaaatccaattttacaaccacaatacattttcatattctccaacaattaattttcagcaacaaatcaaagattaaaatcatagaagattacctcaagctcaaatcaagaacaaacccaaagatcctcaaactcaaagcttaatccaagccaatatcaagcaaattctcatcaagaataaaatttggaaaaagaagagagtttgagggagagagggttcgggtcagaggaagaaaaaaccagaattttctatttgatttactcaaaatttcatcttttatcaattaacaaataaaggtaaaaagaccattttgcccctaggctaaaatcacacacatattcactcacaagggcaaaaatgacatttcacatataataaacccaattaattttcagattattcataggaatggcaatcgggccgggctggcccgacccgatattgttttggcccggccaggccaggcccgacttctttattcagcattgtgggtcaagcccaacccgatataatcaggccgggttgagcccgaccagtattccttttttttttttttttttaaatcagtttattttatttatttgtacaaatgttgaatactactaactctctatacatatatacacatatacacacacaaaattactaatactactagtctactaactctctgtaagtgttcttgcatgctcaatttcagaagcacagttcaaagatcttaaccttgtaaaaaaccattaattgaaaagatgccaagcccatgaaagattccaaacattga

SEQ ID NO: 82530 - DNA, 932 bp, Cannabis sativa
aaaaaaattaaaaaaaaacaaaacaaaaaaaaaaaaaaaaaaagaaagcataagatgacaagaaatcatcaaccaccttgtgcacaaataaatatatatatatatatatatttatatattaccttatgcacaaatatatatattagatagatatatattgatatattttttttttttcaaattaaaaccatgatagaacttttattgttattggcctcttaaagttgatattcttaggtgttgtaaaatattctaacatacaaatatacctagttagttatatttagaaaaatgataaaaagtattagtagcatttaatacaatcgaaggaaatttatcgctattgatacaattaaaagtattagagaagtaccaatataccaatataccaagaaaaatgttaaaatattcttacatatactaatatacctagttagttatatttagagaagtactaaaaggtattagtggtgtctaatattatccaaggagtcatatggctatatatacaattaagtataattttttggatgatattagagaaatattaaaattattaatcgttgttagtacgggtattattaattgttcaattaagtatcaggtctcctataatatattataataatttttatgtattatatctgatcattctgaatactaaccaataattaagtgccatatatagaataatgagcatcttaccaaacagcaatgctctatctagaaagatagtattttatatatatgtctaaaattatatataaagaagaaattaatgaaaaaacattaaagtaattaagaaaagataaaaaaaaaaagcataaaatggcaagaaatcatcgaccaccttatgcacaaatatatatatatatatatatattagatagatatatatatatagtttaaattaaaactatgtgttgcagaaa

SEQ ID NO: 82531 - DNA, 537 bp, Cannabis sativa
tatgaaatatggatctgaggcttcatgaactttcgcatactcttttatatagatttgatgaaatttatgacagtaatttgagaggaatgttttatatggacatcacttcactcctaaatccagtcctaacattctaattatgtatgtgtgtgtgtgtgtgctcctttccgaaactggatatattagatgcatttttgtaggggtctcgatagctctggctgtacttttttctcgttgcactacatgtctctacaaggtgaggttcaaactatataaatagaaacataagcataacttagtttcacgtcaactatttcatataagtattcttgtactcaacatgaagacatcgaactatggctgactatgattagtctaggtcccaagtctctgttatacataaacaatggttagctgtattgaatgtgaaatatgtttttaagtttttttcatgcattagcaatgcacatgcttttagctaaggtgcccacctcaatgttccatctcttcgtgttaagcaggctaaccacttttctc

SEQ ID NO: 82532 - DNA, 605 bp, Cannabis sativa
taattgcaccaataacgatattgacacgtaggagagtgctaggcaccagtggtgccctttagcatttctcattgtttaaaataacttttcttatcccatttgaaaaatcatcattgtaatagctcgtatagagattattatagctaattagatttttatttttatttttagattctactgcttaaagctaatttagattccaccacttacattaggtatatatatggtttgaacatgttttatatttgtatgtgaagtttgttataaagattgtggttatactaattatgataatctcaaggaagtggaagaaagaaaatattaaaactagacgtatgtgccggaccggatatatatacataatataattgaaggtgtaaaagtcataatagcattatctccccactttgtgtgggacattaaataaagtaatagattttgtgatatatatttatatcttatccaaacaatagaaggcaaaagagcagcattggggaatattagcattagcaatgcccatatatcaccattaattcaattcatcgtgactagtgatggttgcttttaaagttagaataaaacctacataataataataataataa

SEQ ID NO: 82533 - DNA, 1961 bp, Cannabis sativa
gtactaaaaattaatataaaaaaagataacaaaatattatatttttttttaggtaatatagagatttttgacattattaggatatttctaattgggtcaacaaaaataattttcccattggtcctaagtgatatacttttgttggtttagcaaattacatttttttttaatttttttaattaaaaatataaaatagcacctgtgccacttttagtatctatttattacctctttttctttctttcctgtcacattatacaatgcgacccacaatattttggtcaactatataggtcacgcgcgcccatttgagttggccttaaaaagtgtgattatgatattcttatggttcccaataccatattgataaggcacgctgtgagtggttaatagtttcctatattatttattaaattaataaagtgtgaagctcgataataatatatgtcacattgtggtgcttgacaccataaaatagcacatatttgtgtttgtgttgaatatttcaactttttgtttagaagtcgtatacgttacgtgaagtgtggcttatttctgtacataaaatagcacatactttgtgtttgtgttgaatattttaactttttgtttagaagtcgtatacgttacgtgaagtgtggctcatttctgtatataaaagtacaaattaaagtgaaactagtcatcaacgaaggaagaatacaaggaaaaaaattaaattatgacgcaacctaaagtcgtctataagttaagctacaaattcatgatagtatcaactttccacgtatgagatgtattatgtaaatatttttaacttaataacttttattctaatgtggtatcagataaacaattttaacttaacttttattctaacgtggtatcagaggtatgaaaactttcataaattttttattttttttttgaggaaaaaactttcataaattttaatctaactaataggttatatttggagtgttaatgtaattgtgtgcttggacaattctcaatgatgtcttaagaaactaattttttttaaaaatgataataataaaattaaatctaatataattcaattatatttatttttaattatatcatataaattttaaaacaactgttattattatatctaacttataattattattacatttaaaattaatgacatgaagatcaatatttttattttaatacatagttatcatagttacataattttttatagtatatgtagaataaaatatacaataatatgtagaatatatgctatttatacataaagattattggtggcattgttgttacacgtgataccattgtgtgattagtatacttaagactaatagtaatattttcatattttcgtaattgttaattagcacttaccaaagctgcttgtggtcttacttttggagttgttccttttgtgtcatgaacttccatcatctttcccttatgtttaactatatgttatttatatgcatgttattaattgtgtattggtttgaagtttgtaaaagctaaacaaagaaaagttataaatgaaggttcagtattaattttagaacattgctaccccaattccataaggaatatttgatatatataactaaagagagcactgaatcacatatataaaaaaatagaagtaaaatattattctttttttgagaacataaacaagacgtgtgtaagggtattaacttttaaatttaactttatgtgagtgtctaactccacatattcattttttttatattgatttatttataaattttattgtaaataaaaatatgctacgcacaaaatgactcataaacataagtttgtctgtgtaaaaatattaactaactatttttaatcaataatataattacttacaaatttatttttaactgtaaaaaaatatataaaaagttgtacttataattatatttcatcacactattattctatac

SEQ ID NO: 82534 - DNA, 546 bp, Cannabis sativa
tcattacttgtagaatattacaagttataaatatataaattgataagaaagattttatggtagattaaaccttcttattttctttacactcattctaatttattaattattacaatttattatcttaatcaaataaaataaatataatataatataaactaattaacaagcctcttccaaaagcgtaaaaacatatagtatatgtattttttaatagggaaatgctaaaagacagtactattggtgcttagtacattcttcggtatcatattgttattggtgtaattaaatatcgagtctcatataactttaaaaaaataaattttagagaaaatcactaaccaatcgtagggcaaaatttatagcaggtgtttgccgtaccactaataacaatactctttttaatattgaactctaatagtagtgtataatgttggtcaaatttaaagcatattaaaaattatgctaactttaatacaaaatataatatgagctaaatttacaccacaataaatattacaatttttatttacttaattgtcactc

SEQ ID NO: 82535 - DNA, 1486 bp, Cannabis sativa
ttgtagagagcgcgagttcgctcgacatacttgatgattccaccgatgaacatgaccatcgtcggtttccagagaatgttccccggaacagtttggatgaagacataagcagtcgcaagaacctatatgtaattcaacacagttgtattgtagttaattttttttaatatacttattggaaatcaaccaacttgttagaaaaggataagcctcttcttattaataagtattaagtagatcgaaaatatattaccaaccaatgtagaactttaatacctatctttttggttacaaattgtattagtttgaaatgactttaattaagccatttaattactttctttcttttaatgaaattaaatttttaatagacaacagtaccactaaatgagattctaacctgagttacaagagctaacaagtgtcgaagccagagctcattatcctcaagagaaaaggcagttatggtgtcaggaccaccaaggtggagaagaagaaatggagcccaaaaggcttgtatgatgtcgtctgctttgttattggcataacaacccttgtccctgccggaatcgtcattttgtttgctggaaatgtggccaacggtgaagctcgccgcccaatcagcaagcaaataagacatccaaagtaggaaaatgaagaatttattggaggtgcgttttctgaagggagcaaccataattagaaatgcctgtaacgccaggctaaaaagaatgatccctctaatgttccactccttccatatctctcgaacactttttggaattggagtaaccatttttttcgatctcctaataagctaaatttttttttttggataaactcaaaacggagtgtatatatattgaacaacttgacaaaaactacacttttaataatattagatacttattatgacctagcttagctatatataatatataatgctaattaattaatcataatatatataaaatgtcattgtagttgtgaaattttttattgtgagtcaaaaagcaaatatattatgtaaagagtatcatgagctgtaccagagtttaaaaatcatgtatcattattacgcgttttcattttgtaaaactatatccaataagcatgattttattatattaatatggatcacttattattaattatatatgaatgaatggcagttttgtaatactcaaaactcaagaataacgataagattttcatttttaaaagtataataattattgattaaaggaataatatacgtgtgagtgtgaagagagtacttaattaaggtaaacaaatgtttaatcacgtgacacgtgcacctaaatatttgtgtttgtgttattctattccaactaggttgttgcatggctccataaatccccactatctatagttgatctttgactatagtgaagaaacagagaaaacagagaaagaagatgaagaagaaaggcatattacctaacaattagtttgttagtcggtt

SEQ ID NO: 82536 - DNA, 828 bp, Cannabis sativa
ctctattcctgttaaatggcaaaactatcactaatccgaacaattattaagaaaaaaaaaaacatgaatcatgcatctttaaaacctatacgcatctctcaattgcctaatgagtattaagggaagtcttcaacaagattataatcacataaaatgacttaagatggttcatgtacatgtatcaggtgttaaaaaaatgtcattgacaaacttctgcaaaaacacattacatactgtgaagattatttacaaggatggatatcattctttccactgaaaaagtgatgcttccaagtttttgactcgatgatggcccggcgccacttgaagatccagatatgcattgttctgaaagctgacgtaatgcagaaagaagggatttcacggcagatatatgcatcagagctgagctctcgaacagcttcacaaggaaaaaaagtcagaatatatagttcatcattttttttaaataacaacagcttggatttatgagagaataatacacaagaacagtgaaacagcatagaaaaaaagggacagaattaatacatataacattatattaattgtttatgcaagcagatacagacattaatatttacgcaagcagatacaaacattaatatttacaagtacagaaacaagaatgatgaaacgctcacattttttcaaatgcaaagttattatcctatttaaagtagaaaaaattgaagagtggctaatagttttagacgtcccagaaatcaggtcatttttgtaattccttcccacaacagagtaacatcaacagctgcaaccaacaagaacaggtcgcatctaatattttct

SEQ ID NO: 82537 - DNA, 602 bp, Cannabis sativa
tactcgaaaaatattcttcaacacgtaaatcttatttcacattgtacctaaaatcactccaataacttgttggtggaattgcgtatggaatctcaatcggtcaccaaaagtgaaagtgtctgtttggcgtatgttattctatttggctttaccagtagcaacacaacttatttttcgaaaagttcgagtacctctttgctgttcgcggtgcggagaagaagctgaaactcctgagcatgctctatttttgatgtgcatatggaccaatgcaagaaattctcctattactctttgataggttatctcgtgagtttttgaattgatgatgagaaccttttggtgactgtggtatgataggaattaagtattatttggcaacaagcagtcaagattagatattattccagacttggccaataaccatctagcagagtttaaagagtatgatcggcgacagggccgaccctgaaacaaagtgggccatagggagaaaaaaattttttgggcctttatgttaaaaaaatatggtatttttcaaaatcagtaaaaaaatgtataattttaaaagaggaaaaaaaattttttgggcccctgggctgggt

SEQ ID NO: 82538 - DNA, 628 bp, Cannabis sativa
caaaagtccaaaaatccaaatcaattgcaaaaggcccatgttattagcccaaccgagtgacacgtcactaaaggagtgagatagcagaaaaagccaaaataggaagacgaaacgtggtgtgcaagattctagccaaaagaaaaaaaacccacaaaaaaaacgtggtgtgcaagaaatctacacatttatacactaaacgacgtagtttagcgttatgatttggtattataaataccccttgagtcttccaaaccctaccaccaccaacctttttcaaagaaaaccctaacacctgttactctctcacactaattttatcaggatgaagatcatcgctgcttacatgttggccgttttgggtggaaatgctgatccttccgccgctgatttgaagagaattctcggttcaggtataattaatataatgccaatctttggattctgttcgtaatcatatatcctagggtaataatagtactgatcatgatgaagaaactgatcacattgttagatgaaccaaacaagaataatctctatataacatttgatttttctttattaatttgtattaggttacgtaatttgttatctgtatacagaggaaagagctaatttctgttgaatattt

SEQ ID NO: 82539 - DNA, 726 bp, Cannabis sativa
aaattataaataatctataaaataaaaaataatactagtattaaaatagtctatttcccatgctattttataacatatagaataaaagaatcctacctaatatttgatgttgttttaaacatattaatttttttttttacattttttctaaattttatctaatatcttaaataattaccatatataaatttattaaaataaaatattcttccaaatactcaaattgtggtgcatttattttagaattttcattttctaattatttaattgggaatggttggataaaattggaaattgagaacagcattgaattgtattgtcagagacacgtggcgtttcagaactacacaatctaatgaattctatctctttttagtaaaaaaaaaaacagtttttggatttatcaaaatataaagatttgttgttttttattattatttagatctaaatcaaaatccaaagattatgacttatgattgtagtgtagagtttggtattagagattttgttttgggaattatgtttctggatttagataataactcccaacagttctgttattttcatatttgactttttagaaactaaaaatagaaaaaaccttttttcaaaaaaaaaaccttaatttctttttcaaaaattgtaaaactaaaatccaaacccaattattcattactgatattttgtgatgagtagttatgatgaggaagaaaaaaaattccaaat

SEQ ID NO: 82540 - DNA, 1131 bp, Cannabis sativa
ccccatatggaaataactcaagcttcttctaattgactctaaacgactctttgaaagaagttggatagtttcttgctctttggtaagggtgattgtttgttcaatggggttgaaaggtattgcaaaaaaaggaaggtccagtgaatgatgtaccatagggttctcgttcgaaaaaaaggcctctaccatctaaggtagaggctagaggctcggaaggccaaaagaatcgaatctttaaagaatgtcaaggatgtaacatttcgagtgtttcttttaattgtttttgtgtaattttgctttttttttttcttgtatatatatgttgtgtgtgttttaatttgatttctaatgttgttggatggttttgaatccgactttgaagaagaaattcctgatgcggatagcaagagcaaagtaatgcccatggtttgtttctttttcttttttttttctctttttgttcatctgtaaatgtcgattaagatttttagggtttctgtttttgttgttgttcttttgattggatttttgttttttgttcttttttaaagatttgttcacgggttagttctctcaatattcagtaaaaaaatattgtattcgagtattaattgagttgttctgtgtttattaatttagggattttttgattttgtttttctttctaaagaatagttcatgagtttatgtttctcactctgtttgtttttttattagttgttttttttttagtttttaattgagtttttatacgatttttattttaggattcatgattgtttttttaaatctagattattggattaggtattacatttatcatttgtctttgagttgtaattgagtttaaattgagttgttttagttatgttacagtttttggagtttttttctctttgaaaaatagttcaagggcttatgtctctcattttatctgtttgtaattagttatttttttagttaggacttttttatttatacttttataattgattttttatccatttataaaaatagaaacatcataacttcgaaatggaaacaacataacattgaaatggaaacaacttttataaaatggaaacaacataaactcgaaatggaaacaacataacctcaaaatggaaacaa

SEQ ID NO: 82541 - DNA, 763 bp, Cannabis sativa
acaagttaaaaaagttttatgatactgatgatgaacttataaaagtacggattattataagaaggccccttattttatttgtactaatattttatgatgttaaaatgaactgaatattattttgcttaaaaatcaatacaagtaaacaagttgtttttaataaaagtagacattaaattaaattaagatgattcttcaaattagattggaaatttgaatccactattgataaggtgcggtggttctggtgaatttatggcacagcatgtatgggccgtgagagtgagaatggcactgacgtaactgtaagtatcaccataaaacttagttatggtcccctaattgtcaaaatacaagtcatgctaaaagactgaaagctgtccacacacatgcattgacgagcgcctgacatgcttccatacaaagtctcgtgtggttgggggtttggatttttgggaatgcaaatgtaaaatcaagtttagtattattttattagtggaaaatttatgtttgtggctgtgggtcttattgtatcttcaatttttctcaatctcaatccatttcaataccactaagtaaaactctcatacaaaatactatattaaagcatctccaataagtagtgaaaagttaaaatatagctcatttaacaaaagatgtactctaatactgtgccaaaaagtgatataaatttagcacatagcaaattgtgtgctaaatttaacacaacatttactatgatgtaaaatttatactacaataa

SEQ ID NO: 82542 - DNA, 911 bp, Cannabis sativa
ccaaatagtcttcaccacaataaataaaatattaatagacaatacaatagataagtattaaattttaatagacatttaaataatctattaaatgaaaatcaattaaaatagaaaataatactatagaacacaaaaaattataattttgttacaaaataatgctgtatatatatatcatcattccaaaaaaaggtaaacgtgaaaaatatatttaatactcccaaaatctaagaaaatgcaaattaaattaaaatatcataaatgtaaaaaccacaattataggaagaattaatacaaatatcaatcaattaagtatacacaaacttacgaaaattaggtaacgtccatcaaattcgtcttcagctaagtggtcagattggatatccgccacatcctcactcaacgaaataccagggttggtcacctcccatgtacagcattggcacacagcaatgacaaaaacttaacgtcggtattatagagagaaagaatatcaatgaagatctgaatctttctgacacacagtaccataatcttgaacagacctgaatatggacggaaataataaaaggactaccaaaacctctatcactgttagcaaaacatatatatacaataaaaaaaaatcaaagaactaaaatctcatttgatcaaataaacaaaatttgtagggtggagtcaaaaatttcgtttacctatgccaagccagtcgaagaaaacccaatggatgttaaataaattaatccatggaaaaggaggctgtgaatgttcgtcattttcgactccctcgaatagctcgtattgaatcgaaactcttacaagcacctgagcgtaagtcgacataccatacaaacttaacaatgggatacacaactcgaatgccgaatcgaatcgagggtccactagggaaa

SEQ ID NO: 82543 - DNA, 852 bp, Cannabis sativa
tggcaggaacttgatgggagggcattgagagtgaactttggacctcctccagctagggatgattcatttccccgtggtggaagaggtggtggtggtggtggtggtggtcgtgatgatggcaacagaatctatgtcggtaaccttccatggagtgctgacaattctactctccatgacttatttagtgagcaaggacaggttgtggatgccaaggttgtttttgacagggagagtggaaggtctaggggttttggttttgtaacctataactctgctgatgaggttaacaatgctattgagtccttgaatggaattgtaagtataacttatactgttcttgttccaagttacatttttcagatttgtataaccttaacctaatctaaacgttttatcacttaggacttggacggaagacaaatccgagtcactcgtgccgaagccaggcctagccgttcattttaaattttgaatcttatatcctggataaagaagaaagactagggtatgtattggtcttgtcccttttcaaaactgtatgtgttgttatgcatgcaattgaattgatcttgtgatacattttaggtttacaagagaagagtatagcttttgatgtatgcttattgattatcttcaatcttggtctgttgttctgagcagagaaactggtagcgatgcagcagtaacctgtgattgattaccaagagtttgcagaacatatcaaccgtgatacagttgttccttggcttagtggcagattttggccatggaactacacagcgcctagacaatttttgtccttttttttttttggttgaaaagaagttatatttgtgtgcctagagtgtgtta

SEQ ID NO: 82544 - DNA, 1881 bp, Cannabis sativa
aatttagctaaaataaagaggacctcttttgtattatcccttctttgaaagcattattttttccttatagaattatctattccatttttcttcttcaattcatatataatgtattgattatagaaaggttttttttatttgatgaatgaaaagatcttttttgaaaacattaatactcttctctttttttataaaaaaagaaaaaaaaaagaaaacattaatactctttaagaatgataattaaattagttaactcaaatcgttttaccttattaatcttaatcttcattaatgtttttaataaaaaattgttcatttttgtaaaaaaaaaaatttaaaaaaaaaacattaaaaaactaacatgttccacaattcattttaatctcatgcaccttcattactaaattaatcaaaactaaaagaaaatgctctcatagatgagagcaaaagtggtgctctcacttaaaaaaaatccaatatttatctatatgcttgttattattttcttatagtggagagataataatatatgtattgcaataaaaggaaaaatatggtgagaaataagaatctatagaatcattaacaaactaaaagatatggtattcttctaactttctaaatctctctcttgtgaattaagaaatctcaaatttaacatagctagcccaataaagttgtacaatgcccaaaaattgtaattttcttttctctctttacttgtttttttccctaaaaaaattaaactgaaaaaagttgggggaacatcagagaatatgagatgggcaggactaggagatatatatgagcttaattattagtgtagtagtagggcatgaagtgaagcatcagacttaagtagtgaactatgttgtgatattttcttacatatgcattctcacctatattgaaatagtcctatattttttctctttcgctatgattatttggtaaatgattttccgacaagaatgttaattgttttgtatctaactctcataacataaaatagtgtattgtttagattaattcatatcacttagtgaacgacttgactagagaattcttctccttcttattatgatgataagatacaacattaaattaataatttatctcatttgttgcagtttaaaaagaacatttcatcatcttacactaacaaggaaattaatgaaatacgtgatgaatgggcaaagtatgtcatgcagatgatggcagcagacaaatgattgataatgcagagtatgataactagtagttgatttaattagaatacatagttattcttaggcagacatagctgtttttttgagatatatattctaacttgagtaatgtttgaaggttttttttttatgtaaatatatagtctaacttgagaaatgtatgatttttttatgtataaatatctttagtataagaatgttattattgctattatattttttcatcattgtatattagaaatctaaattctaaaaatgtaagggaagaattgcattaacatttgtaatttctcccttacctcatattatctaacagtttataacaatcatttaaagtagtatattctattaattatagttcgactgtagccttttccaacagttataaactgtcatttaaattgatttttcccaacagttataaatcgtcatttaaaaagacattttccatcggttactacccgatggaagtctttcccaacagttttaaaccgtcatttaaagtaattttttccaacaattataaaccgtcatttaaagtgattttttccaacagctataagttttcatttaaagttccgtatttttatgacacccacatagccaacaattttaggaaccgttaggaaatagtataaaagacagttataaa

SEQ ID NO: 82545 - DNA, 1288 bp, Cannabis sativa
atagttaaaataaccctaaacctaaagataaactaattcataataacaactataattataattgaaataatagagttaatagagcaaaagaaaaactatatttgatgtagacgacagctatcctaagtcttttctttttaatgttgcttttgtaaaagttaccaatttgatcatctcttttgttaaatgacaaaatagactttgtattttttaaatagtaaaaaataggaccatgagtttaatttttgacaattttttttaatatgaccaacttgaaaataatttctaacatgaaccgatatagaatataaatagttttgtcataacacttttagatcggattattattaaatttaattttgagaaaaagtcaatttaaggttttatttgtactattttagaaaatatagtgtttattttgtcatttaacaaaacagaatatctaattgttaatttttacaaaatatatggtacaaaatagtatttacactatcaataatattggtttattaaatttcatttattttattttaataaaaaaaatactaaggcttatcctcataataatattagcagtttcgaaatgatgtctttagtgaagaaatatacggttccattttcacatcacatccctgttctccaaagcaagcctatgcttttcaaaaggttatccaaacttctccaacctagaagaacaatttggggccaaattcgtagacccagtagctgatttaattaccaagaggagaagaagaagttgcgcattccgcaatcgtttcgagattttggaggtcgaagtatctaattgttgattattagaagaacaggaaaactaagaaggagaagacaaaatgatttgggtctcttagtggttgtaagtttttgttctaatgggaatttttttttcttttttaataaaatattgtttggtttctcaacttcggcattacatgtttgggtttgggcagagctgctaagaagaagttgattatgaattcatcctattctcattcagtattcatgtgtttatcattttctcgtttaatgatattgttttctgagttttcatcactaagttttttctattatcttttcaattatcacaactatagtttttcttttatactctactattaatcattttattatccaacgatcattataaagataatcaaactaacctttgtttttgttcttgatactttcagagttcaatgcttcaacctgagaaaaattgttcaacagaagaggattagttgctggttttaataaatgttttttttttttt

SEQ ID NO: 82546 - DNA, 1068 bp, Cannabis sativa
ccccactaaattagataaatttaataagagtaattataatgtagctataaatatatttttatgataaataagctcccacaaagtaaaaatcctaggtccggtcactgtatatatatattattattatatatatttatatatgcaatagtttctagtttcagaagtggaatatgaactgtgtgtggttggaattatggaattttattttaatttaattaaattaataacacaactaaaaaagatgactgttttggataagtaatgccatatagctcatcaaaaaaatccatgcaccctacctttaatggagtcttacctgtaataatcatcatctttattaatataaatataatttcttataaatatacaaatatatatagtgtcatacatttaattgagatatgtttactatatttttggtaattttttttttttttggtcttaatgttttgtttatattatagctgtaaataattccagataaaaataagtatgaatgtaacaatttgtttaagttcgaatttagccattacaaattattcaaaattaaaatttgcaaatgaaagttgttataaatgaaatgtctctaagtgaggaatacgttttttttatccattaattaaaaataccatcatattatattttattaaaatgtacctaattttgtgagtgggttgcccaatataccctcacctttcacttaagtctatcacctaatttttatttatttaaggagtataatggggatatcatctataaaagtgggcacacctcaaaaaatataaaaataaaggtatttttttttttttgcaaaaataaagataaaaattaaaacatgtaaagtaactagtgggtatacaactatacatgtagttttttcttgtgtaagctaaagtactaaacaaagccgatcactctaagttaaagtgggctaagcccgctttactgctcgctcttagggatccaaataaaaaaaaaaatcttttatattttctttacaaaataattattaaaaatactatttaaaagacccaacaaaactagtaggactagtattcttgccaaaca

SEQ ID NO: 82547 - DNA, 1661 bp, Cannabis sativa
gtatgttttctgaccataacactataatataaaagtcagtcaaattttatatatatatatttatattagtttctttataattcaaaatttaaattatattataaagatacgatagcttaaacactacaatagtaatttttcatttagtgattagttatatattaatttttttatttgaaacaattataaactaattataggaatcaacattttctttgaaataaaaatcatttaaattatataacaaaattaagtacaaaatacattctaattatattataacaaaattaaagtatatattacaaaatatgctaagtccttactaataaaaactgtacacaaaataagaattgcctaaaataaagatattcaaactcatctaatatgcttactaattcataattaattgaaagatagaaaaagtatacctctagctagccagcaaaccaatcaacacttggaagaaatcgtgttctcccttcaatttagacccttgatgattaaccacaaaacctacgaacaaatacaattattaaaaagttcaaaggatagcctttgtttcatgtgatcatgtcctttgacaaacttgaaaagctcatgcagacacaatagaaaagcaattaagtgtgttatacatcctgcatgtggtatctatatatatatacattaacatatatgtatggaaagagatcagctaaagaaagctaaaatccatgcacggttatatttatttatttattttgtttaagctactcctttttctataagaagctacatcaaataattaaattatgtctcctttcttttctcatatatttgtggtataagtgagtagcaatatatgtacattccatgaagctttttcaatcaaatttgatcgactacggtactgtatcaacttgagtaagattcccaatccaaaattgtcaaagatacagagcattcatcccatgtatatataatttaattcaagataatcatttggaaaaattaaattgtttatatttcttgaaactttaaaatgccaattcacaagaaaagattcatgtgctatatttcaaaccataatgtcctacatacttgaagcaaaatacatttgtttttacaataatcccaacacaaataagacacctcatcttgagattataccaatactaattgagttttgtttgtagcatattatattataccacaatgtaatttttgtgtgaagaaatgagatgagaccaaaatttaattttgttttgggctgggctgcagcatgtacaataaaatagcaaacactcacactataaccatacaacacaacccactttttttctcacttaatattctcataaatccaaccatataacccactctcacacaaaagatacatacaaatataaatatatctaaatgtatattaagttcacattcacaaaacaccaaacaagaataacaacataaaattaaaatccccgaaacaaaagcaatatgtacacaatttcttaaacaagagtgacataaaaaaaacaattactaatttcatattttcccaaaccaatgaaaagataaagcaatctaagattcctaagtgagcataaggaagtaaaatatgtagagaaattgaattagtgatgaataatattgtgtcctaatttcccacttaataatgtaca

SEQ ID NO: 82548 - DNA, 746 bp, Cannabis sativa
ttcctatgtgttaatattgctattcatctaactaaatatcgagtctcaaacagtttaatgtaacaatttttagaaaatatctttagtcaatcacaagacgacaagtttaaaaaatattaggcacgactaacacccaataacaatactcttatcattgtccaataaaattgagttaatacattgctttctcaaattggccaacttaattaataaacaaacagcctaaattttggaacacaacagaatttgttgtttcatgtcactacaattacaattagctatcttcgtccctattatagaaattaaaaaccacatcttcttccatttttcttcaaattataataattacaacaacaagattccacagaatttgaataaataccaccacgtctctgatttgattaacagtaaaacactaaaatactgaaaagtgaaaaactccaatgaaggaaacatccactggaattatacattttattcaaaataataataaaaaaaaaaactccatacattcgaaataatagacctattcctttataagtttgtttgcatagctcaattaatggtggtagttaacaacatcattgtactagtcttccttcataaaactaccggtacaactattctaataaatattttgtgtgtccgtagagctagtctaaaacatattttttctttatagttacaaaattatctgtacagttttataacttacatctacagaaggtgtcccagtagttataaat

SEQ ID NO: 82549 - DNA, 951 bp, Cannabis sativa
ttcaaaggagctaaaggtccaaggcaaggggaccctatctcttctctaatttttgttctagttatggcatatctatctcagtcactcatgtgggaggcaagagataaagttttttcatatcatcctatgtgtagaagtttacagcttattagcctctgctttgtagataagttgattttgttctacaaagggaacactgattatgttaaatacatcattgaagcttttgctcatttaaatggttgctctagtctgaaggcgaataatgagaaatcaatcatcttattttttggtgtgaatgagtctacaaaacaagaaattcaatagctaatatcttttaagataagtacttttctcatgaaatatcttggtcttctccttagaccaccaaaatagaagcaggaggactgtgagatcattctaaagaaacatgagttgagattgcatacttgggcaagcagacacttatacacttgggtacgcagatacttatcttttgcaggtaaagctcttctcattaactttgtcctcattggaataagaacttatttgatgagcatttttttaataacctcaaaaagttgagatagatcgaatttgtaggaattttctttaggtgagaaagggtatgcaagcaagttgcatatggtttcttgggagctagtttgtaagccaggacagcttggaggggtttagagagggcccttaatggaacaaggcttccttgcctaagtacttttgggcaattacttcaaaacaattggtctcatgagctaaataagtctgatgttggttggtactggaggaagctcttgagacatagagaagcattttgtctggaagatatcatacaagctggaagtaatggtaatattttaattaggcaagtctatgacaagctcataaatggatctcggtatgaatttttgcaagaaacttggtgtaagcttt

SEQ ID NO: 82550 - DNA, 564 bp, Cannabis sativa
aacctgtacagcagcaggtattgtgaagtcggcttgctcagttcttgaccattggaaggttgctaaaaaccagtcgtcactgtaccaaactgaccattggcgtaaaccagaaggattaaaggtcagggttaatgtcgacggagccatatttgcagcttctcaaaagttcaggtttggttgtgtggcacgtgattcaaatggcagtttaattgaggctttttcagctagtaaaagtggtgttgttaccccagaaattgctcagctcattggaataaaagaagcgctgagttgggttaaagctaaaggctgggaagatgtgattattgagtcggatgctttattggtagttcaagcaataaatagctcaatctccatgccgtctcagtttggtttattggtggctgactgtcgctcaattttactttctttaagaaatgtttcaatttcctttgtttatcgatctgctaatgaggccgcccattcgcccattgggtagttagaggatcttgttttatgtcaggttgcttttttaatgagctgaatactccttctgtgttgaaaaac

SEQ ID NO: 82551 - DNA, 684 bp, Cannabis sativa
tttatgctaattataatttttgtctcccgtagtttaacatgtatcaaataatgtttttttgaatgttttaggccgttaaaaattatccccttgagatttttagattcaaggacgtctaaccaattacgatcaattttactaacatgttaatattttaaattgtgtcctccgaattttaatatctatcaaatcaagttctttaaactttgatttggtacatatgaaagttggagagacaaagaactctaaatttttcttactttcatttatataatttgccatagtagagtcctaatcttcattttagtttaagaaatgttgatattataatacttctgctatttgggtcttacttgggtcaaaacaaacatctattataagatatattatatattatatattataacctatacaacaaatggcatttgattaagctctaattgatgatataataaacctatgtatccctatttttttaaagactaactagttagttgacttacttaatcaattcaaaccttatatttactgtagcttattcagctagatagatagggttggtttgtttattgtctagacaatgctacctacactacagacagaagaaattagaatattcatatatcattttgtgttacttattctaccgacattaaaaaatcagaaatacacacatatatatat

SEQ ID NO: 82552 - DNA, 1228 bp, Cannabis sativa
ttctcacaaagaaaactgatatatgtgtgttgcattacaggctttcaaaatgatttaaagctgaaagagttccaaaaggaaatacacgaatttgagctagttgggcatattttgtttactagctgctttgaagatattatctccaactccaatcttctcttcatagcaacagttttccagaaaactttaccatcaagttacctgtcaaattgatgaagcagtcgaagctagtgaggcacctgaggacattctttgcttaactccaaacaggattagcctttgccctttattatgaccatcactaagatcctctacgtgtgaaggacgaaggattgttcaacatgcaaaatcattggtttccaatcaactggggtgaggcaatgccccctaaaacaagctctagcagtggacaaagctagtgctgtacctgaacacattatccacacacatatatggtcagaataagctataatgcttccatttatataacatcttttgagtgtaagatcatctacatctaactcccttcaacttgcccaagcattcacaaagacaagcctatgtgttaccttggttagcttgagaggaagattttcagtctcactctcttcaaccatttgcttgaagttaacacaactaagcttgggttttagcttaatcttctatttggggtctcacataatagcttggttagtgtccatttaactgtagtttatgaattagtcatgactattctgcatgccttggttttgtattagtactgacaagtaaagagtaacttctcagaactgattttttcagtgtgctaaaccacgagtgattaaaggaaactcctagttataccattgcatttctactagtgaagattttttgctttgtagtttttatggtggtgggtgactcttttttatgattctgatgattaaattgctatgaaaatgcattatgttattcaactaattggcatgatggactctatctattaattctgcataactttgaatgtttgatataagtagaacaacatttcaaccaccaccagctagtactgaccaactatcttttttacaagtgttgaatatttaattcccatggtcatgagttgtctgtgaagtgaaatcaattaaaaaagaaaaaaaaaaatcaaataccagaacataatattcaaagggaaatttgaattcctatacttacattacccaaaaaaatttcccctaaatgcaaagtt

SEQ ID NO: 82553 - DNA, 947 bp, Cannabis sativa
atataatataatataatcactattataaaatattgataaccatattattatactattaatttgtgttcgtactattttatgaaactcttggaaaagttatttcatgcctttctaaatctctttggtatggttctcttcttgctatattatttctcaaaagttttattgtttgtatgatggtttgtatattccattatttttttcaatcttatcaatattaaatgcttaatttggcaggttattgtatgcctttctaaaatctaccattcctgttttcataatagttacagattattttctttttcatttttttgaatggtgaagattattttcttgaactgaagaaaataggaacaatactatttactatgtaattatttcaatattacattttttttgctgttttattttgatatttttcaaatttattgtcttattagtgttacaattctaaggtgaaaagtcttgccaccaacgtttttaaatgagaaagtatatacaaagtagaaagtttagctgccattattcttaattaattattataagagtgttttaatgtgtaattgcaataattataaatatatgaatcccataactgttgttacttagtaaacgcagttcttaaaataatttaaatagttagtgctatttagtaaagtttggagagtatattttaatagatattaaaatttaaatatacataaataataaaatttaaagtaattaaataaatatttttaaatttaataatctcaataatttaaaaaaaaaaaattaacaggcaaaataatttaatataattaaaattgaccacaaaaattataggctgttctatttactactgtatgaaacccatatatcaatggtatctataccacttgtagtggtagctgtctagctcatcaataaagtttttcatttggtaaatggcattaaatgagaaagga

SEQ ID NO: 82554 - DNA, 1658 bp, Cannabis sativa
caactgtccctcataatatcagtgttgctaatactgaacatggtgtgactacacaagaatcaggcctgagaggaactactgctcatcttaatgctcctacactcactggtcatgcatctcctcctgttgttcccactgaaagctcatctgctgcagctactcagtctcccatgatcaactcccatcctatgcaaactcgtggcaaatctggtattcgaaaaatgaaggcgtacatggctctcaaaattcccaaaacagtgaaggaagccctacaaatcgaacaatggaaccaagcaatgtctgatgaaatgctggccttaattcgcaatgccacttatacacttgttccattaccacctggtcgagaacctatagggtgcaaatggatatttcgacacaaagaaaactcagatggcactcacaacaagttcaaggctcgcctagtagccaaaggctttcatcaacagccaggattcgactttacagagacatttagccccgttgtcaaaccggtcactattctcattgttatcactctagccttgtctcatggttggtgcatcaaacaactagatgttaacaacgcgtttctgaacggtgatctcaaagaagaggtgtacatggtacaacccccaggtttcgaaatcccatcaacacctccacttgtgtgtaaactacacaaagctctatacggcctcaaacaggctcctagagcctggtttgacaaattacaccagtgcctgcttcagttggggttctttccttccaaatcggatcactctctattcatccaacatacctccaccttcaccactcttgttcttatatatgtggacgacattcttgtcactgggagtgaccctcaagtagtgtcaaatctgattgctgcactcaatgacaaattctcattagaagatcttggtgatcttcactactttctgggcattgcagttcataaaacaccaactggtctgcatctatctcaagccaaatatgctcgtgacttacttgcaaaagctcaaatgcatgatgccaagccatccccaacaccaatgacgagtggtcttcgtctttctgctcatggtagtgaaccaatgtcggatcctcaattatatcgctcaatagttggagctcttcagtatctactcatcacaagacctgacctttcattcagtgtcaataaggtctgccagtttatgcacaaaccactcctcactcactggcttgctgtgaaacgcattctgcgatatctcagtggcactctcactcacggtttaactttaaaacgaccaccagacctcgacattgttgcattttgtgatgctgactgggcaaccgatccagatgatcgtagatctacctctggtttcaccatttttctcggcaacaaccttgtggcttggcaatgtaagaagcagcatactatttcccgttccagcactgaagctgaatttcgaagtctcgcgaatactgtggctgaaataacctggatacactctctcttcacagagcttcaaattcaactccctaaaccacctgttgtgtggtgtgataatctcagcaccatactactcacagccaatcctgttcttcacgcacgaacaaaacatattgaacttgatttgtatttcgtgcgtgagaaagtgctgcagaaactg

SEQ ID NO: 82555 - DNA, 922 bp, Cannabis sativa
tggcaagagaattcagggggtatgatgtttttttttgtttttcatatgaattgctttataatataatcatacctttttgattgagctttaatatggattcggtttttaggtcatgcataataatgctaatgtacttttttagtatcaatttgctgtattagatttatggatatatattatttcaactattatatcgtaagttttgcttaatgaactcatagggtatatttatgttctattaattgaaatgaagaatttggaatttgggtttggattcacatgtgccattgctcgcatttgaattctgtcctaggaactggagtgaagaatttagaatttgtgtcttagacttgtgtgtgtgccatgccattgcttgcatttgaattctgtcctaggaagtgaaatgaggaattttgaatttgggtcttagagtgtctgccattgcttgcatttgaattatgttctaggaattgaaatgaagaatttggaatttggggtttagactcttgtgtgcgacgttgctcccatttgagttctattgatttagcttgtttggtgtttagtttatgtttcattatcatcttattggatggcgacttttccttcacatccacaacttgttaaagtctaatttatggtttgttgcagattcctcacttgagacccactgaatacaagcgctctagattgtcgaggaaccgtaggactgtgaaccgtgcctatggtggtgttctttctggaagtgctgttagggagaggtgtgtaactgttaattaatgacactcattttcctcccaattgtgaagtctaaattgaatgatctcttaacgaaattaaatttttgtgcaggatcattcgtgctttcttggtggaagaacaaaagattgtgaagaaggttttgaagattcaaaaggctaaggaa

SEQ ID NO: 82556 - DNA, 1384 bp, Cannabis sativa
tgaatgacttgataagacattgtagatacacacttcatgactaagtgaacccaccactcatggaaccccatttttctcataacagcctccaaataagcccacttaattctattatatgccttgctcatgtcgagcttaagagtcgtatagccatcgttgcctcgcctcttccttttcaagtaatgcataacttcataagagaccataatgttgtcagaaataagacgtcttggcacaaaagcactttgagtattcgccaccaccatttcctaaaaaaacttttatcctattgaccaatacttttgtaacaattttcatcaaaacattacaaagagatataggacgcaaatcaccaaccggactcttcttttttggaattagcgcaatgttggttctattcagcccatcttataacactccatccgtaacaaaatgttgaaccaaagttaccacatcccaactaacaaccgcccaacttttctaaaaaaatgcaggggtcataccatccggcctgggggacttatccggatgcatctaaaatactaccttgttcaccttgtcctccgtcacaggtttaagaagttccatattgtcctcatgcgtgatagaacagggaatgcaactgatcacttcaaaccaatcacaatgagaagtgctaaaaagctcttgaaaataaactgttataagatcagacaaaccattatcccaatctatccacttacctcgatgatcttttaagtttatgaatatggtttgtacgcttacgagcactggcgttggtatgaaaaaatttactattttgatcactcgcattaagccaaagttgcttcgaccattgtctccaaaaaatttcacgttgatcaagaatggagaacaaagtcttcttcattgcctggaacttttcaactgaagcactaactctcttgtttctcaattgcttcaactctttcttgcaatttttaatgcagctcccgaaatttccagttatttcctttccccatgttaccaacatttcactacacgcatggattttggattgaatatccatggctgagtttgcttcccaatactcctttatcaattgaaaacataaaggttcagttagccatgcattttcaaacctaaattgccttcgcccatgaactatgattgcttttttttgctccaaaaatagagtgctatggtccgatgacgctcgctccagattatatagtttagccaaagagaagagttgaagccaaaagtgtgcagttaacactctatcaatacaacattccatccaattagatgtaccacgacctctttcccaagtaaactgatggccaactaattccatatcaataagctgcgcttcatgaaaagcttgattaaacccatcgatcaa

SEQ ID NO: 82557 - DNA, 887 bp, Cannabis sativa
accctcaagtttgagatgggctgttaagaaatgaaattgtttcttgtctgttagtgatggtgtgctgtcattactgtattatagtggtcccagtataacaaatattgttaggatatgctttattgtgtaatcattagtttgttattcattgtaaaagttctaggtcattctttgtacggattctaacaattctataaatatacacctgcagccaatgatttggtgtgctgaggttttacattctctctgtataattttctctgcttcatcttttattctattctctgttttcaaacttggtatcagagcctttccaccggtggtgcatcctactgtaactaatggcagagcaaacacccattcatggagagcaagggtctacagcaagaagtgtgaccagtggcgttgctcagatctcagcaccaacaacaagcatcgtcagccctcatgtaggtagcactctaactcaaccatttgctttgaaattggacaggaacaactatacgctttggaaaacgatggtgtcagcgatagttcgtggtcatcgattggatgggtatctcaaaggtaccagggtgaaaccaatcgagttcctgccttctgatgcatcttcaggtgaagatgctgtgattatcaaccctgagttcgaagcatggatcgtgaatgatcagcttctacttgggtggctttacggatcgatgactgaaagcatcgccactgaagtcatgggatgcgattcatctgcaagcttgtggcaagctttggaaacactttttggagctcattctcgtgtgaaaatggatgagtatcggacgaagatacaaacgttcaggaaaggaaatctgtctatggcagattatctacggcaaaaacgccagcggtctgat

SEQ ID NO: 82558 - DNA, 679 bp, Cannabis sativa
cctaaaaacatttatggaaagaaccgaaaaaaaaaaagaataaataggatttttgccccctaaacaataacctttacagaattttgccccatgaacttttccctattgccaaaattcttcccgaacaagttacattctactcggtttttaaaacaattttcttatgggaggaattatgaatataattgcattccaagggtctattcaataagtttaaactacctgaaatccaatttattgacattaaacacacaaattgtagctccaaaaatccacatacatattctcataattcatcattagactgctatttatgcatttattttttgtctagacttttctctgtgctagattatcaaattgtttaaagaattgaacagaatgcaactacgagaggatatttgtaacaatttttattgttcagggagaattttcgcagctgagaaaaatttaaggaataaaactctacaatggtcatactttggttcatcaaaattgacaagcatctttagccataataagcatactttaaactcaggagttttaacaccctagctccccaacagacatagatacatatgttagcacaaaatgccaaaatattacacaaaagtaaatgttaagctttcaaacgatttgataatccatgatgagtgttaattgaaaggagcaaacctgc

SEQ ID NO: 82559 - DNA, 869 bp, Cannabis sativa
tattacccattaagaagtgttccgaatatataaattataatatatattattacaaactataaattaaatgaatttaaaaaattataattaattaattaggtaagactgattttatcaattacctaataaggagagggatataaatttttgcacaaataaaaaaagaaaattacaagatttatttatagtgtatatgtagacctactatactttctaaacaatatggttttttttaaaaagtaagcttaataaataattttaatttttcatgacataaatatgaaattctcacaaaatttgaacaatagaaaggaaaaatatagagagccacatacttttgtacatatattaattgggtaacactaaattaattagctgaaaaaaaaataaaagttagtaattttgatacaaataaaaatgaacaatttaatatgttacttataatttacaaaataacgtataccatatattttttaaacatatattgttattgagtatgtcatcctaaatctaaaatatataaaaaagtaaaaaataagataatatagaaaaataaaatcttgacatcttttagtttcagaattatataaatagatagatagatattataatattaactccaaatctcatcaaaatacttacaaccatcattttctttactctctttaattcctcctgcataagtagtaccaattaaatatatggaaaattgtgtctacattatagttatataagatcatttataaatttttagaaatttttaataatttaaacaattaattactaccataagaaaaaataatctaacaaatatttgaatcatcctccaaattccaatgtacatgatcatcctccaatatttgattctt

SEQ ID NO: 82560 - DNA, 1236 bp, Cannabis sativa
aaaatagtatttttgtaaaataaggcaaaatatcggggcgttacacctagcctcagttgggcgtaagtaggccgggggtgatctcccgatcctcccatgccaaaatcagccaccacaagtttttggctttttctagcagaagaactaccacccgctgtgttggaggggccatctagctctaaagaagacatggcgaacctgcccacaaatcgacacaacaaaaagagaatggtcactatctgaccccaaatttcccaagaatgacaccaccgaaaatcggcgccctagaggcgaatacaccgttatagttccctcagaaattatttaagtaagcggagaacttacctattgattaggcaaatgagtttggtgtggtactggtgtctagaaaaaataatgtccgatgacagtaatgttctgggaagaagaaaactgggaagaatgtgatttacgggcaagaagagtgaaaaacgaagtgactgctgtaagtatatatgggacgattgggaaagagcgcatctcacacaaagcagatgctttggtccgccccaggaggcatctgatgattggatgtgagaagctgaaagagcgcttcacttcccaacagatggctcccatcattgcatgcatcgtgaagaacactcagcaaatgagaagattgcctaagtccaatcgccgacattatgcgattcccaggaacacgcgcacagaattccaaaaatcagcatttaacactttgacaaaaaagtaggagaaatcatatctcctcatagtggcgctactatttgacagctaatgacgcaatacattaaagggctcgtcataaatgccacgtgcactggaattttttcaaaagaaaatactgtaagctcccagaccatgacatgtcttgaaaccttggggggtaaatattgttatccgcgttttcaccagcacgacacggggacaatatttaaggaaaagcgagaaattattaaagccgcccaagggcctcactccgtgcccccagaggattaaggctctaaccttgtggaccagacctcccaggcctccacgagagaaattcccttgaatgcgtgagcttcgagaaagatgtccgcgaatttgtagctttttcccttctaggagacaagaccctttgctcctgcgaaggacatggaccttccaccaaaatacgttagtttagggtacgcctttgacctgcggagactttcccccacgtgtgtcaagctacgg

SEQ ID NO: 82561 - DNA, 550 bp, Cannabis sativa
  modified_base (512)..(519): a, c, t, g, unknown or other
aggcctttctcaaattcccagccaggtgtcgacctccaatcactatgtcaagtttgcctgctataggtgcaggttggagaggtgttgtaatatcctagaaatctaattatgaataattagggtttattatatattatgggattaattagacagtaatgagtataagattattatcctgccaacataattcagcatagattataaattttgccataaatagataaataagcgtaatttattaattatgaagatttatttagaatatgtgcatataatgtgagttatttgtggaataaaaatattttcacattcggggaccttggagacccgatcagaggctaaaaatgtcacaacgagtttagttaaatttttttatggaattattgagataagtttattatagaattatcggggtattttggggtactcaaattgaacaaataccctagagttagagatttcttagtggctaaaaaatgataaaataatcttttttattattattattattnnnnnnnntattattattattaaaatctatttatatata

SEQ ID NO: 82562 - DNA, 622 bp, Cannabis sativa
tgtgttttgcagggggcaaggaatgaaatatttgccatgcagccggccccaatacagatttcttacatgggatttcctggaactacaggcgcagactatatccactatctggttactgatgaggttggagagtttgtaaccctttgtcctttaatgcatttttattttctgtttccggtttgatgtctaacttccacattcacaatttacagttcgtgtcaccttctcgattcagtcatatctattcagaaaagattgtacatcttcctcattgttactttgtaaatgattacaagcaggtttgttgtgtaaatattctcttcacatttctttctttatatttattatatggacctgtgacaagactactttcactgttcctttgcagaaaaattgtgatgttttggacccgaactgccaacccaagagatctagctatggtttaccagaggacaaattcattttcgcatgttttaaccaactatacaagatggatcccgatattttcaatacatggttggttgattgtttattattgacataaaaactttgaatcgattgaatcacagcaataactataatgattcacatgtcattaaatgcaggtgcaacatccttaagc

SEQ ID NO: 82563 - DNA, 778 bp, Cannabis sativa
tcagggggcatttttaacgaccttaaaaatttaaaaatcatgatttagtacatatcaaagttcgggaggaaaaaatcctaattagcttttatattctatttttctcacactataaaaattgatggaaaataatggacatgtactcaggcgtaaataaaataaaagattgtggtctcaaataaaaattcaattaatttatttaaatatatattttattttatttatttaataaatataaaaagctcattctattctatccactgagagtgaacaaggaagagcacaaactactatcttctcccatggcttctgcaacaactatggcggtctccttccgacttccacattcaccattttctcccaccccgtctcgactcacttccacctctgttcgactcgcccctttcaacaaagccaactccttaaagctcagctcctcgcaaaccatttctggcttcaattcggttcttccccacaaactctccgcagtcactcctagccctaattccccgcgctctctcacaattgtcgctgccaaaggctacaaaatgaaaacccacaaggtgaatttctttcttctccagtaattatgatcgtaatttttttgggggggttggttagcgaattgggttctgtttggttcgtgagaaaacgtgggaaaatgaagatgttgaatgaaatttgaaaatttgaaatctttgtattgtttttttgtattaggcttcggctaagcggttcagggtgactggtagagggaaaatagttcggaggggagctg

SEQ ID NO: 82564 - DNA, 1001 bp, Cannabis sativa
tttgtatccattataagaaggccagtgattacaaaacctaaagggtttgaaacccaccttgagctcttgatttttaatcacacagaaactgtgatttgagacgaaatcccatttgaagcaagcttcaacttcaggaaacttgtccaaccaatgataattcacaaaagctcggtctagcttaaaaaaatacaatcacccacatcatgtttatttgactaagtaaaatgcgaacttgaactcttccacttggcctaaagcaagccaatcttgaacatccactatatccttatcaagaatttgcttcccaccaattctatcttcaaagctaaacatagtattgaaatccctaaaaatgatccatgggctattccaatgaccaatgttagcaagaccatcccataagtttttcctctcccccattgaattacttccataaacaactgtgacaaagaaagaatcatgttggccacaaacttttatattacaataaacaaattgaggacccttaattaaagtattcaccttaacatacatagcttgccaaatcaataaaattctatcagatgtgatagaactagagtgatgatcccaatttgggaaattattctcaatcatatcataaaacttctcatgtttcacctttatctcaaaaagagctcctagcccatctttattctccttacgaatctctagaatagcattttgcttttctcttttattcattttcctcacatttgaccctacccaattcaagacatccatcaattacttggactagaattagtaacaaaaaccccatccccagtttcttgtaaaaatgcataacattacttatcacaaccttattaggagccaaaactgtcttaccaagaatagttcctgattatcaagaactttttctttttggggttatccaattaccatcattaactacattgccttcatcactagcaaaggttgaattattcatctcttcagtcttgtcgactaagacactaact

SEQ ID NO: 82565 - DNA, 965 bp, Cannabis sativa
attttaattctccacaagctaaaaccatttatgccgttaaatttgtccacctcaagtctaattgtggtcattgctaattaacttagagggctcgagtttagttcttgatagtttaaatgtggttcttgaaggtttgaatgtggatcttgaaacctacaactctaacaccatttgtagtggattaaaaccacttaatcttcatcgttaaactaaattcagtgagtaagaatacaagcaactcaaacaaacacaacttgaattaaaccaacaataacaaattaactaaaactaaaaaaacttagtttgaatcacaaagggataaaatgaatagaatctttattgatcatcaacacccattacatcaatagttcttgaactcattaaaactcaacaatggtgtatctcaccaattacgaaagctcacctggggtacccttgatcagaaacacaagggactcgtacacccctccttcactcacactaaatctaaaatagaaatgcaattatggcaaaaagaaaaagagagaattataaatagtgagagagactaattttgatgttgatatcacttgagtgtttagctgtaatattctatatatagggtaataattagattagttgattcgaaagtgaaatgtaaccaacttaactaccactcttgacacatgacaatgagagtgctaatgtggatagagtaagtggatcaaatctaaaaaaaaggtgtactaaaacaaccatttagagtgtagtaaattttttcaagaatatttattattattgttacaaaacaaaaaaagaatactaattatgggcaattctattttacactctgaaaaaaggattgttctaggatacttattatctattttgagatagtagattttttgggtctaattttttttttcatatttgtgcacgttgtagttatttagggtcacttataaatttttaaaaaattatgaata

SEQ ID NO: 82566 - DNA, 953 bp, Cannabis sativa
gacaaaatgaataaatttttttcatttaaaaaaattcactatctatgttaaggacatggaagtcaatatttatatactaccactagttttgttacatgattatgttttgagtagttatcccaatatgtctcttagttttaaaaaatgatcgttagtcatatttagaaagaaaaaaaaatcttgatagtaacaaaatattttggttattgagttatttataatttattgagttactacatttttttgtttgtttgtttgttttattttgaagttattatatttggtggcataaataaaacattacattattttgtcggtgacattcttatatcttaattaattaaattctcttacactaatcaccttcattagtctccttaatcatttctcaattatataattttttccagcaagaaaaaaaataagtaaagatgaacaagataataatattgagcttaatatattactcaataaaaaaaattcccccaaattgtacatgataatattacaataattcacaattgagaccaacaaaaaaaaaaaggaagaatcaaaaagattgatgaacaaagaaatcaagagtgatgaataaaatccacataaagaaatttaataataataaagaatgatagagatatgttgttgttctttttttttataacacataacataaatataaaagacatatacacaaaaaagtgtattgaaatatttatatatgtatataaaaatataaatagctagttgataatcataattatatgattatgattatcaaggctgcttgggttgtggtggtggtggctccactgcttccacaaccttagctgccttaggtggctcctcagtcgccggagcaatagtagtagtacttgtagtaggttgttcttcttgaattttgtcttcttcaatcacaatctctttctctacttttgttgttacttgttcttgtt

SEQ ID NO: 82567 - DNA, 760 bp, Cannabis sativa
aagttattggcttgagagaaagcattgatctttggagaagaatatggctagtctccaaggagtggctgacaatgccaaagctggagagagcagtttgaagaagagcttggctactgctcgaaagaagacttcagaggttgaagagtcttctcatctggcacttgatgagcattccttggctacaactcagcttgaagatcaagttaaagttctgagggaccatgtgactaagttggaggagcaatatgttgctgatgtcaccttttatgatggcttatgctttgatgccatctcccgtgcttggtcatctaatggaagagcacaaccattcaattggtcagctttcccttagaagcaagtcccaaactttataaggcattgtgagaaatgtttcaatgttaatgctctccaaagaatagactttgacttgagtgctgttgagctagtgatcgaagaagttgtgggggtcaaaggctacacccctaagcatcctaacattcctcctctgacagttgatgcgccagtagcagagaatgaggaacaagatgaagctgatattgacataataatcttctaggatgttgtcttagtccattcttattttttgtttttaactttcagctttaatgtgttagtttgtcgtcttgggcgtcctttcgatgtggataagccttagtaaaatgttatcaaaattgtttgaattaaattagaaattaacttaatataaaatttatttcgatactttctttttattttactt

SEQ ID NO: 82568 - DNA, 2053 bp, Cannabis sativa
ggagtttgttgtcggtaccgaaaagtcgctagagtagctgtcggtgtttgaaaagtcaccagagttgctgccggcgtcgaaaaagtcgtcagaattgtcattatagccagcaaaattactgaaaaaaaccaccaagaaagtggtttcttcatcaataaactaacatatttaaaaagtagggatggcaaaaataaatttaaaaagaaaaaataaagtgtagttagtaagatttgaatctttacccactaacatatttgtaatataccttaaccattacaccaaacttattattatgtttataaatatcattttttaatacaaatatatgttgtaactaactaaaatacatatacattttttttttcaatggcgactgccctctctcgctacaatgtgggttcgcaattggttggaattaatgaaattatagaaataaaaatgagaaggaaaatatgaataagaatataataaaataaaatgtattatttgtataaattgaaaaaaaaaaattagtcttttttattatgattttttttgatagatttaatcacaccaaaaaaaatttattcaattatcaaaattttattatgtggttatggttggtagctatttcaatatggaattttgtactgcatgcattttttttgccatttaaaagaataatcattttactaattaaaataggagaaaaaaaattctaaaggtctatttttaatgattttttttttttttcaaaacgttcggatattcattaaaaaaaacttttgtaaattataaaaattatgtaagttattatataattttgaaaacaatgtctcaaaagtcattttagttactagaaatattctagtttctcccaaaatgtcatttaaattaaaaaataatttttattttgaatccaaactttcttaatatacttataaaacttaaaaaaagagtttataacgcacatagtcaatgtccaattgaacaacttaagttaacttaaaattgatcaaaattcaaaaccttacttagttaggcaactattctcatcaaacgagcactcacaataactcctttaaaatacctttatatgtaaaaatttagctaaaaataggcaaatagctcatacattagatgagctactctaatgttattttaaagaatagtactgttgcttctctaaatgtagctacaactattcattgagctatatttattttattattattttattctctctcctctctcatgccatctttatcttatttattgatttttctccattattttatataaatgtgtattgaaaataataatatttaaatgatatagagataaaaatagagaaactcatatatgatataatgtaaaagtttgagataaattagaaaaaataaaattttggtgaggtattataaaggatagagtagaatagctattagctattgtaagtgccctaatagtttaatttccaacaaatccacacctgagtcaactatctttgtcatgaatgtaaaatgctaacctaaattacatctttataattttcttaacttatgttatctgttaattttaagaaaaaatagatgatcacactcataaaaatatattttagaatgctttggtttagctttattcctttatttatggttgattttatatattattaaaacattcataatatatataaattaggattttaagttttgacgtgatttcaaaatacattatttattataatctctgtatgtagctgtggattaaataaataataaataaaaaagaaaataaactttttttatttaataatttttcctgaacaaattttcaaaaattattgtgaaaaaaaatacattttctttgacaaaaaaaaaaataccatagttatcaaagttttttaaaaacttcatggacaaagaattacataattttgcatttactctccactcccacccaagtagatattaagatacatacataccttattaattatgtaacacagaaataatatttgacggtattatcttttattttgtttttattaatatgtaatgttgttcattattag

SEQ ID NO: 82569 - DNA, 2829 bp, Cannabis sativa
agaggtctgcattcttttcccaaggtaaaatatctattctaagtcttatatttatgtaatttttctcttcatgttctaaaatggtaaaacgcaatgcacacaaaacaccaaaactaaaacccattaaaccttttctagcaaacaacataaaaaaacatacaagttaaagtagtcaattatttccaagatattcaaactcctctaaataaagaattttaaagttttagctagtgattatacctttccccaataaagctagctacttgtatactcttcaatcaacacaaaaatataattgacaattaaaaaatataacaaaaataaaatatgtgaataggggagttgaatcaaaaattaattttaattcgataaacttttgtatcaattatcacaaaacaagcctttatattaaaaaaaaacttcttacctcaacaataaaatgaatatagagtgcttataaacaagacaatatgtatcaaatttataagagacaaaagaatgacccataaaataagtgggccaaaataatcctaataactatcatttattgacttaaatatgtgcctaaattttgaaaactcagttttgacattaaatatttcttcaaaagcatcagtaaaaaaaaaaatctcaaacaaagtacaaaggaaaactcaagtccaattttttcaaaacagagccacgatttacagcagggaataaaagagggccagggccatgatatattatctctgatctaacaaattaatgacaatccaagattttagtaacactttttatataaattactgttgacctaattcactgtccattccctgctcatacttctcagttttttctttttatttttggttctgacccaaaaaaattataatctttttttcttcatcaccacacacaaaacattgtatctcatctctctctttcatccttttgttttcttattaattattcctttttttttttaagacaagtctgaatatatattcacaacaaaattgttctcatcaatatcagtactactaattacaatgtcataatttatatcttatttgattaattattccatatacaaaatagttagttaaatacaaacataggtgagaaaaaccttgatgagttgataatgtatatatagtagtatagttttgtgcttatgataaatcactttgttgattcgtttaaacttgaataacccatttagggaaatcaatcatatacaaaattgggataaagtaagtaagtttcttttttcttccaaagaaaagcaagtattccttttaatttttatcctacactccctactcaaaaagcacttccaaagatagatagcaatgacacagtaacattattttcgaattatgccacaacctcttcacaccaatacgtctacgatcattcaaatttccctaattttaaatctaaaaccagaagcaatctaaatccaccaatgccccctctaaaattcaatattaatacaaacatgactcttctactaagtgcagctaccaaaaatgtaatattcaaaataatgtataaagaatggtgggtaactacataaatttgagtaaattaaattttcattacatacaccaaaccaaaagacattgcatattcgatttctaaatattacaagtacttctaaaaataaacggatatcaaagaaggaattagaaacaaatcttaaagttgtatgcaaaattgacgaaaataaaaacaccaaatccactcaaatcgaatacttaagagtggatttcaaacagacccagtcttttggcaggaaccaaacaagaagaacgattacaaaactaactagaatctataaacgttgaactcgattttttttttggtatacttaagatcatatcatacatacaaaaaagaataaataaaagattaatttaaccactattatttggttctatccatatatatatatataaatactagaggcaaggagatgaagaacatacctggaaggaaggagcggaggcctctgaacccgatgggatatgggttgttttgagcggattaggccttcaatcacgggcgaacaacggaagcttgaaaccggagctggcctggatgggtggagtagtggcaacaagttgagatggaaaccagagataggctcggcagagaaaaaaaatggagaaagagagagagagtcttaccggagataggctcgcgactcgcggattgggggctcgtcgatctgatggaagggtggagcagagggaaccggagataggctcgtgggttggggagaagcaaaagaggggttagggtaaatcgtgcattggggagaagcaaaatagggattaggtctgaggcgagtttttattttgaaagggtatttcccgacggtttagaaccgtcgggcaaagtataaggccgacggttctaaagtgtcggcaatagtgcatcaattttgttttttaatttttttctttacatttatgaaccgtcgcctaatgtatacgagtgttaaaaacagtcgcctatagtacaatataggcgacggtttttaacactcagataatttttttagcgacgagtcccaaaaaaaagcgtttttgggaccgtcgcgaatttggccttttgtagtagtggggagagctaatgggagggaggcggagtctcttcgtcggattcttcagtgttatgagaatgcttctggccagcaagtgaattttgacaaatctgctattacattcagtccgaatgttttaccagtagatcgtgcgagtgtattgggaattttaggcttggggtcagttgctactcatgataagtacttggggttgccaactgttattgggaggaata

SEQ ID NO: 82570 - DNA, 1640 bp, Cannabis sativa
aaattaaataaataaaatatattagaaatataatatttagatttcttataataaaaatagaacaatcactactacaaaaaactccttttaagtccatcaaagttggacttgataaattcttctagtccattttgtattggacatagtattcagggacataaaagaggtatttttctagtccaacaatgctagactaaaaaaacgtttctagtccaacattaatggacacgatatttagacccacaataggaacttttttctagtccaactttactggacgtgaagcacattttttttaataaatgtaaatattataaattattcaaatattataaaatttatttattttttataataattaatttattatatattagattatagaaaataaaataaatatactaagaaatactatttttccaaacttctttactaaattcacaaaaaatacaatttattatttttataggttcatctctacaagggttacaaagaaaatggaaagaaaaataaaatagaaaatgcataggaaaacgtaaaagaacaacaatgagctggagtgttcaaattcccctctgcaaacacaaagcattaccaaaataatattctcttgccactaaaagtagatccaatgttaaacaatttctagatctataactaaatcaaattgtatgtgtttatctatctgtagctgtagggaaccaggaacaagcccaatcccatccccacagacttgcttcggggttgtgcggtggcttcagcactttggggctgtgctgtggctacaaggctttgccggagttgaatgttcatttttcttctttagtgttgaacggagagggtgagagagatcggtattgcggataggttttttttctttagtgaaccgagagagtgagagatattggtgtgaattaagttaatatgagagagagaatttaataaagaattaataagggaattattatatggtacacgcttgaaatagggaaattagtttttttttttcacataagtttatgtctagttatgttttccctaaaatatttctaaaatattcaatgaaaataaacttgttttaaaaatatatattttatatttattacggattttctagtccaacaatgttagactaaatatgttggactaggaaactccctaaaatatttttttagtccaactgagttggacatgaaaataaatctatttttaaaaaaataaaaaaaaaatatatcacatccactaccaattttctagtctaatattgttggacatgataattttttttttcttgtccaacaatgttggactagaaaattcctcaaaaccttttcatgtctaacaataattttgttggacttaaaaaaggaacattaaaggggtatattgtagtagtgaattgatgtatagtgttatataaaaacttcaagtaaaataaaaaatataaagattttgtaaaatattataaagaataagctaattaatgggtactaaaaaaattgatgaggaaaacatgacgtctgattccttagcagaaatcttgaaaggaataagatgttactttgataaagcacttccagttatgctcttgtataagtaagagcgcaagcaatttcaggatgttgtcctagatgatatgt

SEQ ID NO: 82571 - DNA, 1129 bp, Cannabis sativa
  modified_base (313)..(319): a, c, t, g, unknown or other
  modified_base (923)..(931): a, c, t, g, unknown or other
ttaaggagagaagagaaaaatagttttagaataattttaaaatgtcatgtcgctgcctcatacttctactatatatatagattatgtacttaattaattgttaaaatagcgatatgatattttgtgctaattactttgtgccttaattttaacatttgtctttttaggctaaacaaattacttagcaatttaagaaaaaattatggggtttttggtaacacttctattttttaattttttaatcacaaaaataaatgtaaaactgtgtttttaaaaaataaaatgtgttctgtaaccacttttatttttcaannnnnnnaacagaaaataaaagtgtgttctataatttttatttttatcttttgattttatttaagtcgggtgcatgttcaggtctggggttggggctgtgatctgagttcgggtctggggtctagggtcggggttgtgctgtgatccgagttcgggactaaggtcggggctagagtccatgtcgcaaggtccaagtaagggtctaaaatattgattaaaaaaactgtttaaaaaaatttcgaaagtaatttttattttgttttcaaaatatttaaaattttgattctcaattaaaaaatcaaaaagtgaaaagagttttatagaacatgttttttgacaatattttcacttttctaataaaaaaataaaaaattgattaaaaaaatgttaccaaatacaccgtatctaatcgaattttgccacgaattttcctatttaaaatagtatatatttttcttttcataaatagaaatgtccaattcaatgaagaattaaattacctacgttatgaattatatgttgtatattattattacttgacatataattattatttgagaaattatcttatatatatatatatatatatatatattattttttaacttttnnnnnnnnntttaaatttacggtttaagtttctccgacaatttttatgtgggttgctatacagattttgattgcgatttaggttatttcgttaattgctataagagtttttatgtaaaattttgtaaatatatatatatacactaggtgattgttacgtgccaaaccacgtagtgttagttttatttaataaattaataattaaaat

SEQ ID NO: 82572 - DNA, 758 bp, Cannabis sativa
tttggcccatttgtcctccgtctttttttagttattattttataaaaattaaataatgagagagagaatgagatagggaataaggggcgggtggttgtattgttagggttaaaatgttaagggtataaatggattttggcccatttgttcgtctttttttttttgtcaaattagatgatttagcgtcgattatgcaccaacacattggtttataaccgacgaaaaagacctttgcgtcacttataaactgaagctggcatgcatcggtgcataactggcgataaattcccccgttaacatttttgttgattccgtgctttgactattgtgttgaccgacagtaaaagtctttgtaatagtggtttaagaaaatcaaatagaaattcaaagaacacacagattttctcaaagttcaccccaaattaaggctacgttcttgtcgagcttgccttagagttggtgtttgagtttcactatcagcaaacatgtatcacatcatattttttagatttaaagctacaaatctcttggctgataatttaaattgctttgattttgatatatatatttttttttttttttttgtgattttcactaactttctttattattttttgcttttctctcgattaaaatgaagtctccctctttgcctacgaagatgaacaataagattttaggtataaatctttagctcagaatgggttttatttatttaaagaaaatcaaaataaatttaaaaattaaaaatatatata

SEQ ID NO: 82573 - DNA, 796 bp, Cannabis sativa
ggaatcctaagaattgcattagcatcctcctcaaaaaacatatctctaaccaaatcaacatcccactgtcactctccaaatcagaataatttactcaccttcacaccctctaaatcttccacaatatcacccctttgaggccctttagaattaggaattcgaggatcaacacataagctcccacaaacacaccttcataaacaaactagaagaaacaacatgttgagccaaccacacactcctccattataactcgaatttatcgcaagttcgattgagataaattccccatgagggtaatatctagttttaaaaacctagccaacaagagaatttagattcaccaaaacatagcaagattaaagtctctcaaacaccaaaacccactaccaccctcctccttaggactagtcatcttctcccaactcatccaagtgatccctcaagaattcttatattaagaaggcctccagaactgagccatcatatggtcaatttcttgacacaaacttaagagaagacaaaatttcatagtagaaataggaaaagattggaccaaattcttcaacaaaacttccttcctcacatgcaagagaagcttcccattctaactattaattcgcttttccatccagtcctttaagaaacccaaaatataattcttatttgccccataacattaggcaaaccaaaatatttactttcatcattcgctttaaccacttaaaataaagaacaaacatgattttccactaagagacaactattcttgcaaaaaaatcaaagattttgcaag

SEQ ID NO: 82574 - DNA, 1012 bp, Cannabis sativa
gcaatctgaatcgagattgcttgctccgccgaataacgggcattattaaactctactagcaatcgttgattaaagattccataaatttaatgtgttactatttgtcttattcgtggttaagtgatattagttcttcgtacaatacaagtcacaacctcatatatgaatacgaatttttttgatatttatgtataaattattcaatattaaacatttataattttaacattcaagcatatatgaaaatattcaactcttatttataaacagaaatatctttataggctttttagggcataaaccctaatcaaacatatacctcttcattcaaactctttgggttgctcaacatatacctcttcattcaagatcccattgagaaaagcaaatttaacatccatttgaacaacctgaaaccaattaaacaagcaatagaaaataataatctaattgattcaagtcttgtgctgctaatcttgctttatttcgcacaattgtgccaacctcattagttttattcttgaaaatctattttgtaccaataatattgatgtagaatggtctaggcacaaggatccacattttgtttctaaaaaaaatttctaactcttcctacatagctttaatccaattttcattagttaaagcttctttcacatttttaagttcaaatatagataagaaacaaacaaagtggacaacattataaaaccttcttcttgtagccatgccatcgtttggatttccaagaattgaatctgtcagatgaatcaatttaactttgctacaaggctcattctggacttcatttgaaatgatattcgaaattttttgcccagtatctgtctcatcagattcatgatccgttggcatatatgaattagttgttgcaataagataatcattgacaatgatattttcttgaactttagtaggttcatcaataaacctatcaatttctttctcagtagaaaactcagaacctgatatcatcaataacaacattagaaaa

SEQ ID NO: 82575 - DNA, 2199 bp, Cannabis sativa
  modified_base (65)..(75): a, c, t, g, unknown or other
gtaaggtttcttgactttatatgtattttatttattatcattttagaagttcatatttaggttgnnnnnnnnnnntacttgtgagtagatctaagatctcggtaaaattaattccaacaaaggatccaacattatggctaccctagaggaggtgatgaagggaccggtggtccaggagaagtacacttgccaatctaccagctgggaggcagacgagttaaactcaactctaactttcgcccatcaactggagaagattatcacagtagccgggatcaagcgttctacttccggagtctttcaccgtcttcccagagacgaggaaacgcccaaccgtccctatggtggtttgagagcttggagccagactcacctcatgtctggggcaatgttaccgcttcaggactatttcataaatttcttactttttgttggccttgtgccttaccaacttatcgcccaagcatatcgcatgcactcaagcttgtttattttttatgttgccagagcccagcccggccgagattctttatttttatgaacttttatctgtccccaagaagggagaaaaactcaaagatggtctttacaaactcagtcccatcttgccaatgagggcctagttccctttaacttttagaagaatgtcaaggaatgtagtcatcaatttttcttctcctctggcttcctagctattgagcgcccggagttgcttactgaatgggtcaggtcccgcgatgcatcgcactacccccactcaacttttccttcaacacgctaaggtcttctccacatatgataaggacgggttgaatgttggggacttggtcacaactacaaactgcaggacggccaagttgatttcaaagagccagtcagtggatgactttaacttatccaaggttctttgccccaatgtttgcaatcctgactccgagaaggcgctctgggcagacatcattgcctccgcggagaatcggtataagaagtccctcgtcaagagggaacaagaattggcctacatcaaggtccaagccgctgcagggagggtccttcagatcgaggctggaaaagagcaagtgacctctcggtctctgctgattgttcatcatgttccgtctattcaggattactccacctgtaggctggtggaatttgatgaccggcttcataggtttaggatgcccccttttcgatggggcgatcatgcctagagtttttattttcaaaccttagccattttttaggtcggtccaaaatggggtccgatcctcctgtacctatccctttggatcagtctacctatttatcttccaggttgtttctcccctcagacagctttctaggggacgacgactccagccttttaatacaaacttttgctaggatagaatttgatcaccagagtaggattagttttattacattattgctgcatgtatgactttttgacaatgctctaacgcctttatttgtctatttatccaagcagtgaggccaacggatgagctcctagacgctcttgcccacacctacagtcccaagccaattctacctcatacgcaagacccggcactgactcccgggaggtcttcttctagcgtacccctggattgagtcattttaatcgacgaggaagaggaagtagaagaagaagaaggcgagattctccatccctaggaccggaagcaaaaaggaaagaagttggaactgaggttactaaaaagccaaggcgagcagacacttcgacccccagctccagctcagggattccatccgaggtggaggagtatacagtgccgcccgacattgtcttaacctccaattctactgatgaggaatggactcagctttgcatagcgaagcataactacgccacggcggagtacacgaaggggaatgctgaggtggaggccctgaattagattcagagggaggcccaggacagctttactcgcagtgagtatgcctggaatgtctgggatttagatctggatcccttgattgattggttcaccacttcattggacctaccctcgatcccttttcctaaaaattaatgagccactttgctgtcggcctagtttagctcctaatgaagagatacgcgacctgtgcttctaccaatctcgtctaccaaatccaggacgtgagcgcggccatgaccgcggtcagttcctatctgttagagatattttc

SEQ ID NO: 82576 - DNA, 808 bp, Cannabis sativa
ttgtatatgagcaggatggagacagaccagaccaccgtctagccagaaggatcgtatttagggcagtttgacgaggcaatggttagtaaacccactgaggaggtgcccaaccagggtattgaccaagtggtcgaccaacctataaaggctatggctgacccactcttcagtgataaagacattgcagttttcgacttagctccatctacacctagacacgagtagcttcactttattagtatttcaaacttatgattttattttcatagacattttgatttcatgttctgtatggcttattggccttttacttttgaacactacttttttttttcagccttagggatttcatgttcatacttttggcctataggcactctgttttttttaacattactaatgtttagccctaaagctttaaaattatggatattcgaccaggcagctttaatccttgctatcttcttattgccttaacatgtaagtatcagaatttacttttctttacgtcaagcagaagtatggttgcacttgacttaaaggcaggtttagtaccttatactaagctttaaaatttctttgcataagctctctatgctagttcgatgcattgtacagtgtggattcctcccaagtgatcatgtggacttatggtctcttggtcacatgtaattcaccaaggttcatagacctttcttttgaattttccagggttaaatgtattcctagatttattagtacacggggtttatcagttctctaaacaagattgtgtgattaaatgtgttcctagatttatcagtacaca

SEQ ID NO: 82577 - DNA, 1070 bp, Cannabis sativa
acctgagtagcaaagttgcaatgtcaggttgggataaaatgatacgaattcgttgttgtataaactagcatcctatcccattaaaaaaaaggtaattaaaatttttgttccttaaacttttcctgccgttaaaaattctctcgaactattgagattgttggattcaaagatttctgcctattggacaaaatccttaaatttaacaatctcaatagtttgggagggatttttaacgacttgaaaagttcagtgggcacaatttggtacatatcaaagtgcaggtgacaaaattttaattagccaaaagaggcttcattaacctctcacgatcggtgaaatacgttgtttcaagcaaccagacagtaaaagtaataatttaaacagagagcgatcgaaacttaccgattgcttctcctggctgtatctgttggtcacttcttgaaaacgagccaatgcctagaaagattatatagatatattacaaacacataatcatatgaccaaatagccaatacaaacctacagttaaaatgaaaggatcatcacctttcgatactctgtctcaaattggcgtagctcatttctctttcttaaaatctgagcctcaatatccttaagcttttccgtagtttcctcatatgtcttcacacaaactgcctcgatcgtataggtagcagtcttaaaaaaattatctcctgtaaaaattacataagcaattagcaaataagaacacactgagttctaagcaagataatgaagcagtcggataacagaccgtagacagcaaatatatgagtgccggcttttagttctgaaacctcacaaggttgtagaccttccaatctcttaaagaaagctgcttcgggatcctttgccatagccaactgcatcacgatatggataaataatcacaaacttcgagttaaccccttcaaaggtaacgagatctagaaacagaaacaaactcatacgataaagaatcagcataccgcattcacagttgaatccattctgtacacttgaaaatgtaaaaagtacatccctgcagatgtcactttccctgtcttctc

SEQ ID NO: 82578 - DNA, 617 bp, Cannabis sativa
ttggcttgcttcaattaaagaaaacaaatttccaaattctcattcttttgccaaattttatcccaaaataatttttattttctttttttttgttttttatgacactttatttttatttgcaactggaagctaaacttaagtatttatgtcgcgaattactcttttgtttacgtaaaatattttatttttatattgtaatcttgttattttgttgttaattttttattatttatatattatttttatgttgttttgatgttatttttatgtgatttatttattatttttttttataaaatactgttaaaaatatataaaaaaaaattagatgtaaaaaatttataaaaattagtattgtatgtaattatttttttcaataatccacctacttaatatttcgtttaatccaacattgtaaaatagtatattcttattctatgtttttatccctttcttcttctcactaatctttgctaatttagttacacactacttttgttaattatttttgtaagaatattgctatatgactgtaacatattgtcattagtgtataattaagtaacaagttttaaataacttattttaaatatgaatatgtgaagtttttatttatg

SEQ ID NO: 82579 - DNA, 1475 bp, Cannabis sativa
tatatatatatatatcttcttatattgtgtgctgaaggtttttctgggtttatcgggaagtatgaaataaataagtggcttcatggttgtaaggtggctaaaggagctcctgttgtttctcatatgatctttgcggatgatagttatctttattatcggtccaatgaaagagaggcaaccgagattatagagctcctgacaaagtttgaacaagcttcgggataacaagtgaatattgcaaaatcttttatcttttttaggactaatagctcaaagataaactatgctcaagttcaagaattttggggatgcaggttacaggtgattaaagtttgtatttgggtcttcctaatactatgggtaggaataagaatgctactttgtgtttcctaaaagataaaatgcataagcgagtggaaagttgggacggaaagtggctctctaagtttggaagggaagtccttttgaaatctttcgctcaatctctccctagtaaggctatgagtgtttttctgctttcgcttaagctttgttctaaaatggagaaaatcatgtgtaagtatttgtggcgagcaagtagtaatggcccaggtattcattggttgtcgtgggagaagttgacagttcataaagatattggtgggatgggtttcagagtttacatgattttaatctagctatgttagggaagcaagggttgtagcttttaactcattctggtttgattgttggtcgtatatttcaaacgtagtattatctttgtggatcgtttttgtttgcggagttggggtcgaatcctagttatgtttggagaagtattcttgcttctcaagagttattgaaagcttgttctaggtggtgcgttgttgatggttcttctattgacattttggggcagacgtgacttccgtgtggggagtagtgtgagattacttctttccatcctagtttggaggggctaaggtcaatcaaattatggtgggaggggtgtgggtgtgggatgatgaaattcttgaggatttgtccaatgcttctgaccaacggttaattgagagtattgtgttgaatgataatcttggatcagatcatctgtattgatttaaagagacttcaggagtttattaggtgaagattgcttacaagcttctccaagtgcttcatggtaggtggtcagaagataataagttgggcctttggagggtattatggcaactcaaaattcctcctaaggttaaaagcttactctagagggcatgttttgggtgtttaccaatactgacccagttaaaaggttggcatgttgatgtggtcctcatttgcctggtgtaccaaggtattagtgaatcaatcctccaaatttttgtcgagtgttctttagccaaagcttgttggcagcaggttgatagggctatttgcaaccttttgaccatagatttttcaggatgattttataaactttgttgggttttatgccc

SEQ ID NO: 82580 - DNA, 2766 bp, Cannabis sativa
  modified_base (31)..(67): a, c, t, g, unknown or other
  modified_base (1682)..(1682): a, c, t, g, unknown or other
  modified_base (2112)..(2114): a, c, t, g, unknown or other
gcaacagaaaatgttatttctgatctttatnnnnnnnnnnnnnnnnnnnnnnnnnnnnnnnnnnnnntagggcataaaacccaacacttggctccccctcgccctgtgtgaagtgccctaattaaatcaatctcccatatagcaaaagcgtaaggcgaggtcatcatccttagttttgttgatggtacttgaggtatatgtgaaaatctctaacactcatcacattttttgacaaactcgtgagtgtccttattgatcgttagccagtaatatccttgtctaatgatctttttagatagactctaccaacctgcacgatccccgcaaaagccctcatgaatttttctgatgatctcgtttgcttctataggaagaacacatcgaagtagaggcatggaataacctcttctgtatagtttaccttcgactattgtgtagataggtactgtatatatgagttttcatgccttgctcttgtcagttagaagttgcctgtcgagtagatagctaattataggattcatccaagtaggtgagctatctatcatctcgacattttctttttcacatatacttggatcgtttagcacctctaccagaacaaagtttaattcatccaaatcgctctgtgaggctagttttgctaaggcattagtgttagagttttgttctcttgggatttgctcgattttaaagtaattgaaattttccaagttcttctgaaccttgtctaagtacttagccattttcaggcccttagcctggtattcctcgagaacctgatttacaatcagttgcgaatcactatgacatatgagattcctaaccttcaacgcctcagctatcttcaagccaacgatcaaggcttcatattcaacctcgttgtttgatgcatcaaattgaaatctcaaagcataatgaaacttaaagccttctggaaaaattaagattacccctgaacccgagccctgatcattggatgcaccatccatgaataacttccaagtgtctgcgtctcagtgaacaagcggattttcctctagagttattccttctattaagaagtctgccaatgcttggcccttgatggatgttcgagggtgataagttatgtcaaactgccccagttcaattgaccattttatcaatcttccaaaagcgtctggttttgataaaacttgtctcaagggttgatcagttaacacttttattgggtatgcctggaagtaaggtcgtaacttacgagacccatgtatgaggcataaagcaagtttttcaagagggggatacctcgactctgcgcccagtaaccttttactgacatagtaaataggttgctggtgctttccctcttctcgtactatagctgcattaatcacgtctttcaagattgccagatagaggagtaacatttctctagttactagtttcaccaaaactggaagcgtcgccaaatgcctttcaatattcagaaaggcctcctcgcattcttctgtccactcgaatttcttgttgcctcgcaatacattaaaaatggcaaaaacttatcagtcgactttgaaataaatctgttaagtgcagccatccttcttgttagggcctggacatccttaggctttgttagtgatggcatatctatcaaagccttgattttcttagggtttgcttcaatgcccctcgcnttgactatgaatcccaaaaattttcctaagaaaacttcaaatgaacattttttcgggttaagctccatattatacttctttaatatttcgtagcattctgggaggtccatggtatgactcccactttttactgattttaataacatatcatcgacgtaaaccttcatgttttgtccgatctgatttgtgaacatctcattccccaatcgttgatatgttgccccagcattcttcaacccaaatggcatgaatttgtaatagtaaagtcccatgttggttacgaagctcgtatgttccttatctgggacatgcatttttatctggttatatccagaatatgcatccatgaatgacctaagcttgtgaccagcagttgtatcaaccaactcgtcaatcctgggtagtggaaaacaatcttttgggcacgccnnnttcagatcagagaagtcaatacaagttctccaagtttcgttaggttttgggataagaacaggattagctatccacgagggataaaacacctcgcgtataaagtcattgaccaacaacttatccacttcctgtttaagggcctgttaactctcagaatccaagggtctccttttctgcctctttgatgggtagtttggatagacatttaaattatggcagataatattagggtcaatccctatcatatatccatggctctaggcaaactgatcttggttcgcccttaagaaacttattaactgctatttcaactgctcgtccaggttcttcccaatgtaaacacactttgcaagatttcctggtcgagaacaacttcttccaattcttcaattggtttcaataagtttctttcatcttgaattcgaggataaagatcttcatcattcttttcgcttccctctgtcaagagtgccattaattggtgaccgacttttctgtgttgcagctctatgtgatagctatcgcgagccagtatgtaatctcctcgcactacacccacacccatcgatgtttgaaattttaatgataagtgcttgatcgaactaactgctccttgtccgatcaatgttggacgacccagtaatatattgta

SEQ ID NO: 82581 - DNA, 1125 bp, Cannabis sativa
  modified_base (32)..(34): a, c, t, g, unknown or other
gttaaatcaagaattgccgttagataggcacnnntaatatataaagatatatataaatcctgtcttttaatatttttcctcttattttattttaattttttttatcaaacgatatgagaattagctaggcgactgattattcagctcgtttttttcaatcctaatcatggtcgtgtcgtcccgattgaattgcatgctattattttagttaatttacatttataaaatttcatgatttattaaaaaatatatatgtaataacttaaatataattatatttttatcaaaaataaaaacttaaatataactatatggaaaatttcacaagattattttattcttttttatataatttagagttttgaaattagtcttcaaatatatatgtaacttattgggcatgcatagacatatgaaaagagaaacaagcacatattacaataaagtatttcaattctaataatggtattttattcgatttaaatttttaaaaatacaattatattgtgatgttgttttaattaataaattcttttgatttgcatgggcagctggtaaatcacggtgttcctgaatacgttttcaaaagtgttttcaaagcaatatcagattactttgaaccaacggtggtagaggatcgtatgaaataccagaagaagagttccactgatatgatccgatgggagttgcgctcatcggcagcggagaacagagaatatctcaagatggttacgcatcccaactatcattctccttctaaccaaaccactttcagtgagactatggaagattattacacaagaatgagagaagtggtacatggtcttggaaaagctatatcgaaaacactgggaatggaagaatcattcatagaaaaagcatttaagttggagtcagggtttgatgtgtctgccatgaacctttacccaccaaacttcaaatccaaaggttcaatgggtgtgcctgatcatactgatccaggattttttgtctccctaatccaagacatcaatggtggcctccaaattctatcccatcaaggaaaatggatcgacgtaaactatatgccttccaatgctattttgatcaatactggagatcatcttgaggtatttattattacaa

SEQ ID NO: 82582 - DNA, 575 bp, Cannabis sativa
tatatatttatggaaatttctgtatactcctaagtaaagagttggtctagtagatccttaactatttttgtgagagttttttttgtctaatttttttttttttataatcgtatatattgtaattatttaagattacgcgtataaaataataattatgtgtaaattttattttttagattataaattatttaaatttttctaaaatatgggtaattttttaacaaagtataacgtacatcatcataacaaaaattatactaaaaaactctcaaaatagatgaaaaatactaaaacacccctttaaaaaattgcagggtagacttacctttattatatatgggaagaaaaacagagcagtgggcaacaagagaaaaggcaataataataagtgagaaactatatataactttgaggtaattaactaaaaacttacttaagaataataactttgcagttaattaattattcaactcaggaacaaaacaaacaaaatctaatttaattcatcatcatcatcataagaaactgtgcaaataaattcttagcagtttcagttcgccgcatcaaacatttat

SEQ ID NO: 82583 - DNA, 1085 bp, Cannabis sativa
atatctatgtagatttgtttgttcaaaggaaaattaaatacattactaatttaagtatattctagtcaacatatattctttccataaatcatcaatcactactaactaaatgtgtatatatataaacaaacatagaacaatagaattaaccacaaaaacttgtaaacctaataattccaataagcactacaaaatataactctcaaatatgagtagttctacacccttaaacctaattctccaactagtgcttgttgcatgccttttgtttttatcatgcaaaaccacaaatgtgagaggatggtattttcaaccgaaaacgcatgtagtgatgatcaacgatctggagtctgatcgaagcgatctgaccattcattgcaaatcaaaggacgatgatcttgggatccacgtcgttcctttcaatagctcgtacgagatagtattccatccgaatttagaatgcaccacactcttccactgtagctttacatggcccagcggtaagatcgaccatttattcgacatatatgattgtctaagagataacaagaaatgcaacaagtgcaagcactacatttggaaaatcaactctacaagcccttgtatgcaaaataatgagaccaaaaaatttgctttttgttatgactggaaaaagtaatattagatatatattggaaactactatttatatagctccaaaatattgttctagatgatgataatttaatgattatctctttaataattattattcataataataataacaataatcctattattaatttgctcttgttgttatttacttattttggttacaatcaatattgttgggtatatgatcatcacagtgatattcttttagtttttatatttttagttggattatagtgtttgggattcatccattaccgatctttattcttttatctttttggtatattgtaccaacatcattaatattataatgatattatcattggacataataatacatatggtaattaaaatttgaaaacttgttagttaagttattaaatattaaaacttgttataaatattgtagctaggtgtgtaaattttcc

SEQ ID NO: 82584 - DNA, 1183 bp, Cannabis sativa
aaactataaattgttataaagattgaattgaaacagatttttaaaacaattaataaaatatatacagtaagaataatttaataaaattaaaacctaataaaataataaaacacatttaatataatatcaataaaagaggaaaatataataatagtaataaatatttaaaatccaaccaataaaggatgacagaaacacagaaaattacgcaattactaaatcactgccgataatcacgccataacttccaactcacaaagaagattcgaaatggagcaagacactagccactagcaccgatagacgaactttcaaccgtccttggccaccgaagacaatcacaagtcccccatatgctaaacggtctcacaaaacccagtcaaattcacccacctttctctttcgatatagatcgtcatcctcctaccgttaataagatcaaagaccaaataatagcatacaataaaagaagatataaaattaaaatttgagaatgttctatactataaccaatacagtcgaccaaaaaataaatttatatatatagtatacaaagaatctaataaatatgatcataacgctattacagaagacagtacaatcaaacaaaatatatatatatatatatacaatatataaacaaaacaagtaaatatgtaatagaagtactaaccgatgataccgtcgacaatgaagcatcttcggcacgctcaccatctacagtcgagaacgtgaaagagatccaccaccagtgagagaccatgattataccacctctgtcgacactttccaaatattgagagaccatgacttcttatgcgtgaaagagatccaccacccgtgagagaccatagatattattacactttgattggtcatacatatatattttatttttcaaaaattgatttttatgtttagttattagtgttattattttacataactgacaaaaattgcttgtttatttagttatttcagataatcatttttatgtattagtttttaatttggttgttttgtgtaacagattttgatttgcagggttaaaatggataaaatgcttatatgctttatgggtttgggtttgtatattgatttttggcctgagtaattttttttatatttcttaggatgtaatttctagatttttagactaattttagagtaatagtttatcttt

SEQ ID NO: 82585 - DNA, 1120 bp, Cannabis sativa
ttttctctctttacctctctatgaagttctatcatcttcttttgcttcttcttatataaacccgcgagtctgacactcggtaatggtggccagatagtaatagtgctgcattcacatgttctttctctctctctctctgtctgtttcgaagttttgagatttgggtttggtagaaaacgcaaatctggctattgggttggcttcggtttcgggaatcgagctaagatttgatgcagatagggggtggaggaaggatcgtaaatgaagctcttgctggggggaacggccgcttcaccattatggtttctgttgattttggggttggggttcgggtgtcttagctctgtttctgctgacaatggaggtatcagagatcgtcgggaatttatcttaggttcgtctcttttgatgtttttgcttttccgattttgtgggttttttttttttttttgcttgcttgatcactgagaaagcttaatgggaaaatgtgtaagcttagtgggtacgttatgacaatcacagtattagcctccaattcactaatggtttcttcgttttgatggatataattcaccctatgttcaacattttgtaagcaatgagaaaattttacaagtctcctgctttttcccatacacagattttgatttgatgtaattgaaatggttctttcttgtgtccttttgattttttttttttttttatccttcaaaaagtgcgttttgatttgccttgttctgttctttaattgtaatttgatacaaattatgttggtgtaatcatctcaggaggaggagaagaaaatctggggccatggaagaacgaaatctcggagcttgcagcagcccctggtccagcaagagatgaacctcagaccacgcttgtcttggcagccaacagaacaaacagaccggacattcttcgcaacttcaggcgatacagaggcggttgggacatcactagtcgaaattactgggctgtaagttctgtgaactctgtacattgtcatgttcttttggttgaatttttttttctctctcaaaaactggactaagagatccgcttagttagcttcgagattgttaagaagcacaagtgtcaagtgccacaaaatttgttc

SEQ ID NO: 82586 - DNA, 1457 bp, Cannabis sativa
catactcccatagaacaaataaagaagccatactcgttagaattaaaggcagcgccaaggaggaaaaactatgctacaggggagcggtggttaaggaccggtgcagccacaaaacagggaggtgtagctttttctgaacacacggcagcggagaagacgaatagagcaaacaatggtgctccggtgagtcacgcaccagggaatttttttccagcagaatcaatcatctcctacaattgtgggatcaacttccaatcaaccaattatggggagtaatgacaagaataaaatgagagctgatttggtggaaggatcaaaacagaaagctgtcctagttgactatacggcagcagagacattgattgtggaagggtctgttgaaaaggaaagtgctattattaaggaaaaaagtattttaatagtagatacaaaaaggaggcgtatggaaggggaaggtattgatgagtatgggactgaatttgaagtgggccaatgggctgaaggggctttgggaaataatactacacatgggccgaatcagaatattggggttgatatgtggagactgatgtgttgtgaaaaaaatataacacaaaaaacttgtttggggcgggtcctggtgtacaggcccgccaggaattatgaatgtattaagttggaattgccgtgggcttgggaaccaacgggctattcaattcctaaaagagattgtatctcaaaagaatcccaattttattttcttatgtgagactaagtgtaacaagttgaaaattgaaggggtgggccgcatgctaaagtttgaaggggtgttctgtgttgaggcccaaggaagctcaggaggtttggcgttattatggaaacaacaagatgatgggagaatacttggttactctaataaccacattgattttcttgtggaaacatcggacaagggagtttggaagctaactggtttttatggtgaaccaattcggggtcttcgtcatcaaacatggcaattgcttcgaactctagcaactgaccgtactcagccatggtgtgtcatcggagatctaaacaacattgtgagacaagaagacaaacgtggtggaagggtgtacccgcaaggtctcataaatgattttcagcagaccctcaacgattgtaatctggctgatatggaactctgcggttacccattcacatgggagaaagggagggggacgaacagctgggtggaggttaggttggatcgggctttagtcaatccgtcatggtgtaattttttcgaaggtgcttctcttacaaacttagaaatttcctcttctgaccattgcccaatttttctagaacctgagccgagtagtgttttccctgttaatcgcaagtttaagtttgagaatgcttggctaaaagaacctctgtgttttgagattgttcgtgattgttgggatagtgttgttgaggatgaattctca

SEQ ID NO: 82587 - DNA, 1256 bp, Cannabis sativa
tccaaagagatttatatttcccaaaagagaagcgcatgaagcagtatctctctctctcactctctctcatggcgaaaaagaagaattaggcaggaagcatgttatccaattagaaacgaaagaggtctatcctagtatgacagcggatctcagtgacctagaatctgaaagtttagttgatgatcaattggtgtttgtcgatgctcacgacaatgatatttcgctgaatctagaggaaattggttcgtcactgaaaggaactcgcactcgcttggcagagggaaactcttgggcgatggaatatgaggaagcatggacatcatttcttgaacaatcacaacagaattggtgaagctacaaactaaatccatctatgtaggtaccagtttgcacttccatgcttgtttaaagaagagaagagaggagaatcgtattgcgactttcactttttagcaggttaaagttattgatgactacaaatcggtggttgatcattttttgacacatttccgtagcttcatggggagtaaaagtacaatcacaatgtagttccaaagccagtatatgaatgaggggaagacttcactctagagcattaagcattgatgattaaatcgtacactatgaaagaggtcaagaatgtgttgtttagcattccttctatgaaaaagtccgggaccatatgggtttgggtctcgattttgcaaagaaatgtgaaaggaaattgaactagatttgtctactgcaatcatgaactaatttacaactggtaaaattctcgaacctcttaaaaaagctttattaatgctcattgttgccctggattttgcccaaaatacgtggacctggatgaagatgacacgtgtgagctgtaaggaccagcacttatgaaaattaactaagtcttagacgaaaaaagagtgcctcagggagggtatctcccggaggaggcataaagagtatcatcattctccgggaggccaaaaaaaaatgctaaggctgctccgggaggtacagagatctattgaacagtcacctcgcatttaatgtcgcatgggggaagacgtattgaaatctccataaatgacatgacagatggcgtaatccccctttttcggctattacactataatcaataaggctagtaacggctattttgtgaggaatcacatcaatcaagagggaataaaagattatacacctaactcctaagatacctacggtataggtcatgtatttcttattttgtatctgtt

SEQ ID NO: 82588 - DNA, 1259 bp, Cannabis sativa
catgacaagagaatttgtagcttccttacaacccaatggaggttctcattattggaaaattgagcatgtaacatctgtgaccatcctatacaaatatggagggtgggctacttttaagaagtacaggttgggtgaaccaagcttgttggaacttcttcaatgatcgatccatagaaaattgaaaggtattgaaatttcccactttatttatttatggatgaatcaaattctcttataaaaacatagattaatagatcatggtagtgtacttctcaagcttggttcccaatgatttaggtgtcacagcagaattcactttgtgtatttggttgaccactttcatggaattctgtatttgacaattattgatgaactagcattaatacttttccatgcattatgtctagagtacttgcttaatattatttatatcgtgcacttttaggatctaaaactcattttcattattttttaaatatatagaaatatggaaataaaaaataactacaataatttaattgtgttgggcatagtgcttttcttctagtatcattgaattttatttagaggtgtatatgataattgagtttcaaagtaagagtacgtgtgatcaaagaagtctgtatttatttcaaaaaagttgaaagttggagccatgaattctcttggctttggttcctcaacaaacctttgaaagttggagccataaaggttgagctgttcaacttcacccctttgattttgctagaagatgattaaggttttaggtgtgggacccagcacaaactttttcatcatttgacttttcaatttgtatggcattttcactttttgacttttttttgaagattgttggcgagctttacaaaacaatcctctttgtagttttttactatttttgctgacatattcctttcctatgtaacattgttattaggtgctgaaggtgtccaacattatacatgtgttgtattgcaattggcaggaatagaaattgtgcgggaaatgcacgcccaaccccgtccctgctcaccatttatgcccccatttctgtcttgtccagcttaatcctcaatatgtttggagtcggagaatctccattgggtatggagacttattgggtatccatgaagattaaaaaataatgtaatgcaatgtaattcaaaatggaaataaaaagagtttttgaatttgaaataaatattttatctaattttatatcctataaattgtaaaataacaaattaaagaagatatta

SEQ ID NO: 82589 - DNA, 838 bp, Cannabis sativa
aattccctcgcagtgaaaaaacgtgcgcgcaaaagtaagtggggtcttttgccggggcatataattgcgccggtaaaagtggcaaccgtttgaccagtggacacattgcatcaggagttggcttttgccggtgcattaatgtgccggcaaaaaacctaaaaattttggcggtcaacttcccgcaaaaaaagaaaacgtgtgtgaaaattttgttggaaacttacgtgcgccggtaaaagtcccaacttaaatgaaatgcatcgtttcgtgcgtttttactcagcatggacttttgccggtgcacctaattgctctggcaaaagtcgagggtaaataaaattagggacgaacccttctcccccattttcctctttctctttctctcctttttctctctctgcaacttggtttcccactctcggcaacccccttttttcccctcaaaactccattttcacaatcccaaaagcttattttctctaccaaatcattgtttgttttttcttctttttttctttttttctccaaaaaaaacatttgtatcgggactccgacaaggatgtaccgccgcacctctggcaaccgctgcctgagccgccagccgcccattgttcttcacatttcatcatttaagtcaaggtagcctatattttatctattttagttttatttaatttattttttatttgtgtatatatagtaattttagtttattcgtctataaaattgtgtttagtttttttagtttatatatgtgtgtaaatttatataattttatgtgtatttttataaatttgtgtgtatatgtatatattatgtgtataatagtttatatatg

SEQ ID NO: 82590 - DNA, 1649 bp, Cannabis sativa
ttattttagaaaatttcctgatatataacaatcaaagtcactccatacaacattaaataaagcttccgaagaaagagaatctatttgtggttgcggatcacattagtttgataaattaaaaggtctccaattttataaaaatttaagaggttgttaaagatatttttgcaaagagacctaaaacttattttgagcattaatttgtattattttatatctcacaatatttgagaataaaatggtgaaagttttggtctatttcggtcaaaagtgtgtattgacttcttcaatagcttaaaagagaattagttggaattggtaactctattttttgaaaagagtagtgagatttaaaattacctcctaaagtcaagaatttagtttagaggactacttttaattatcttcctactcgtgttcaattaagcatgaaacatgttcttcttctctcattgttgtgtccaaattgcttgcgagtttgagagtctatttctcattatcttgtagaatattcgtttgcttttgcttgctggtagatggcaggtatttcagtgatagagattagtgataactcttttaggagtaacttcataatagatttcaatgttagaattttggaataaaacatagagttgttatgctttgttgggtgttgttgtctgtgcacaatgacaacttgacaaggtgtgaaatgataagaatatgactgttaaagaggtaatttcattggctaagggtagttttaatcaatgaagttgtgctcaagataaaaattttggctcctttttattttccttacaagacggtgaaaagcatgagcactggattgccctagttggtaatacaattaaaatcaatatcgatgcagttatctttagcaatctgaataagtatgggcatagttgggtagtacgaaactcttctggtcagattattatggctcggacagtaagccggatgggggtgattgatcctattcttgctgaagctatcaaggttaaggaggtgttgagttggttgaaagaaacatggcagcatgatgtggtgctggagtcaaacagtttggtcacgatccaagctatccgaagttcgttagatatgacttctatttttaaaattcgcatttcagagtgtaaatagattctttttagtttgaataaccatttgactaaaactagcttcatgggtagatattggttgtacttattcaaattctacgaatttgagtagtttacatgaaattcttttgaatgaattcaagtaataaaattgtatttctattaaaaaaaaatagaggaagggagtatttttcaaccaaatataatctatgtctaccgaaaaatatattttgctaatttatgattattttggctaataaggatgaaattgtataatgtattaattaaataagatatttactattttaaatattaacatagtaatatttaaatattttataaatatatgtaactgattatatttattttgaatttaaatatttagtttaaataaaattattcattaaaccatcccatatttttagactcattcagtccaatctaattatacactagatgttagatttctccaaccgatccaatctaatactatatgctcaactgaatgaactgatccaataaattattaga

SEQ ID NO: 82591 - DNA, 844 bp, Cannabis sativa
aaaatagtatttactctatattttcttttgatgtgtagattgaaagaagaggattgatcaagtaaaaggatctaatgacatgaagaaatcaatacatattagagagatatgttcattcattatcttttaatgccctaaatataatgatttgattttgggttgtttgttgagcattataattgttaatctttaaatcttttatatatttatgttttttataatgctcattagagagtaattttaataattggtatcatgagccatgccatttgattttagagcttgttagtaataaactcattttgtctaaaaattttattttagagtaatattttttggaattgatattttgatgatgtaagaaatttgatttagtgggtttaactctaattggatacattttttattcggtgtattttcatgagtacaagttttttggttttgccatccgagaaaacccatttcgggttcttcgttctcctttgatttttttaacaaactattgttgaaataagccagtaaggcttgggtgtttgtacaatgttctctatcattattgtatacatatatggtgcgatagagatgctcaaaaatagttttccaaacttttttacttttgttcttttgtttttttcgaatctgttgttgtattttctgaagaaaaaaaatggagaaatagatgattgaggacgaaagaaaataggaagaggaacaaaacccctgaaacgccgaccaaaatggtggccggggtgtgtttttcagtcgggtcacgatctgggtcgtacgggattcgagaccagacccgcacgcatgcccttcaggtcagggatgaccttccccaaaa

SEQ ID NO: 82592 - DNA, 1233 bp, Cannabis sativa
taaaataatttccaacagacccatctttcgaattttcaccaaaaaatccaagacatcttcttcataaaaaaaacaccatattgcaaccctactgataacctagagtatttctactaagcttcttcttcatcaagagaagcaagggggaatatgagctaagtctattttttttatatttgtatagataatctccagccaaagagcctaataaaatggactcgtggactaaggaaatttaatgcctaaaccacgtaaaatctttttcctgttattgtattattgataccttccttactttcttaagctctaaaaattatttggtttccaaaaaacttggtaaacattttagtgctttcaactcgacctggagggtttcgtggacagcgcctaggtcacggtttgttaccctaacttgctccaattttgtcactagcacgccaacttccaccatggccctttctgctagcaaggacgcctgtcgagaaataaggccaagtaagaagattgaagtgccaaaaaagaggacaggataaatagaagcaaaacagagaaaaaagtaaaaagcaagcatcgcgaagtcttaccccaacgacctgctgctttatagagtgggctagcgcaaaaacatctacgttgttgcaggactcccaagtctctgtgggcgattccgaggtgctcctgggcaactaatccaagagctctacaacaaaaggaccagtctcttgccccagcctataagtaacctggttctctaaggactcgacctccacgatctgtcccgtcgggggcactacgtgcatgtcatctgcaagtttttccttacgaactaccgacatcacggccgcccgctgacggatttggagctttttcgcctccagatgccctttcagggccctattcgcttccttttccctctacatctcaagagggtcgaaaggaacaaccctcctgtggaaggtaaatcccacataaggcatccttgacagaaccgaggggagatacctgggctggcccaggctcagttgggcgtaagggggccgtgggtgatcccccattccccccatgtcgaaatccgacaccacgagtttttgcctctatttggtggaggagctacttcgcgtcgtgttataccctaagatttaaataaatggattagcaaaccctaactagttaaatgtgtattattgaggaattatattattatataacttaatatattagaatttatatgat

SEQ ID NO: 82593 - DNA, 696 bp, Cannabis sativa
acaaatttagctaataagttatgtcaattgttttatttaattataatacattagtttcttaaataagtttaaaggtaacacaaatgttgttaaaaaagtaatgtaaaagtttcttaaacaataaaataacataatataatctcaaactaaacatataattttctaatgcattagtttcttaaatatgtttgaaggtaacacagatgttactaaaaaaagtaatttaaaagtttctttaataacaaaacaacataattatataatctaaataaacataattttaaaagtaattaaacaaaaaatgtatatgaaatcatttttatcttaaagtagatcttttcatgataagtatcttattaatctcataagtaattaaaatgtttctattttacataaaaagtaaaaaaaaagatcttttcataaaagataagtcattagtatgtttaaattttgctaattaactatgtggcatgttccttataagttatcttttagtaattaactgacgttactctaacaaataaatttaaattacattgtaagttttagacctaaaccaataaaatattttctaataacttttggaacttgttggtagaataaattttgtttaagtcattttggtataatttgtgtttgtttgtattgtgattgtgaattataggggtggcttgtattttaattaatacaagattt

SEQ ID NO: 82594 - DNA, 519 bp, Cannabis sativa
actcttgcctattattcgtcccattttcattcctaaaagccacttttcactctgagggtacgttttggagtgcgtactatagtgtaattgaatataaattaaagattttaattacacttacctatcttctagttctcatggagtaaaattatattgtataattattgaaaaagatttattttaaatatttattattaatttttattttatataattactaattattttatcaaataaaatataaaaaatttatatataattactttcttatatttaaatatattttatattaattaatgtgtcaaacaaactttataaatatacttttttgaatattagaaaatttcaattattgttgttgttaaatttggtactatatattagagaattttaatagtgttcaagaactagagtagagccatagattacatcgatttatatgacttgaactattatatatcttgatgttgtttttattattagactgctttatcgtttcagtttcaatattctattcac

SEQ ID NO: 82595 - DNA, 949 bp, Cannabis sativa
  modified_base (899)..(914): a, c, t, g, unknown or other
ggtacactaaggagatggctcaaaggttgtaaaaggtaggtctttcgagcatcatgttgtacggagacttcacgtccaccactatgaacgtggccatgattgtggtatgcttcaaagaattgccaacaataattggcgacttgatcttgccacatggagggatgttgactccactaaaagcatacatgaattgtttgcatggttccatgtcttttaaagttaaacccatactacgtagggtgggattgaattgaatgtttgatgatgctctatcgtcgatcgttaccctagccaccatcatattagctatttggacctcaacaacaacaggattgtgaggagggtagttgacatgataagagtttgattctccgaaagtgataggttcacattcgtagcactgagactttagataatgttctactacctccacgactttggctcttggttcatgtcaaagtgatcttgcattcttttctaagtccatccttgaatttctagctaggtaaagacctccaatcacgatctccaacttgcctgcaactggcataggctagaagtgtgctttgcccttgtttctagagatttttagaaacagaataaaaataataataactaaagaaataacacctgaaagagaaagtataaaaagagacaaccggttttttacgtgattggggccttaactagctttagtccacgagtcagttttattcagtaagatgtttgcttgtaaacacattaagagatacacaagatgtatgtttgtaaattttcctgagcaaagtacataagagagttcaacccctaatccatgagattagtagggtatttatagtagttggagaatgactttagggtttccccatttgttggaatttattttactaggatcttannnnnnnnnnnnnnnntgttgtttaacaccctaaatataaactttctaaaa

SEQ ID NO: 82596 - DNA, 578 bp, Cannabis sativa
aaatatgtgtaatcacctcattgtcttgtaaccgaatacagaacaataaaacagtaaagtgcagagcaaaatttctcagtctattgccttttctttcccttttaacttggtatcagagcaagtttgatccatggccgctccaaccgattccagtgccaccacagaaggctctgcaactcctcttgctccggttccatcagtacaacctgctggtgttcctaacccaatctccatttttcaaaatctcgcgcctcttactctgaaacttgacagaggcaactatactttttggaaatcccaagttttacttgtcctgcgcgcccatgatctcgaaggttttgttctcggaacaaaggtgtgccctcctcagttcatcgacaacaccatcggaggcaccacaccaagagaaactcgacagctcaatgttggttacgctatatggcgtagaacagatcaatctatcatgagttggttgctcaactcgatttctgagaccatgtttggtcatgtggtcagatgcacctcatccttcgaagtttggcattccttggaactgctattcaccactcagtcaaagg

SEQ ID NO: 82597 - DNA, 1704 bp, Cannabis sativa
atgtgccacgtgtacaagagtgtacacataagcagttcatgtttgcagttaactgtgaaaatagatgatactttaaatgtgctaacaattcattagttttgaaggttttactaccaaaatttgagtttggaggattaaatgcaagtaaaataatagttgagagagtttagtcgaaaaaactcatataaaaaattagaattatgtaatgtagtgtttataatatgtctaacaccatttaggtggtttattaaaataagaatgtaatggataaaatttaaaatacattaaaaaaattaataaaaaaataacaaaaatttgtcttatcttacattgggatcctttaaaatacaacaaaataaatgaataaaataaaaattaatttatttccattccataattcattacctccaattagtattggaaatacggttcggactttttgacactgcacgaaatcgatacgagcccaaaaggcacaagcatgactaggcacgaaaaaatacggatttggacatgacacgacacgatactacaagttggcacgacattacatgaaaaatatgtccttaaacacgacacaacacgagaagtacacgaaaggcacaacacgtaagcacgaatagactaactcgaaaaatatgacacgcaacaaatccaaaaaaacacgaaacggcttatttaaaaatattataataataataatatgaatttatcaattataaataagataaaataataataaagcttaaatacaatagtgaatattacaattctataattaaaactattaaaacatgaaaaactaaaattatatattaatttatttataggatgtgatataaaaatatgagtatttaaaagtaaatatttaaattttaatgatgttaataatttttttatattattatctatataattttgttcaaaagttatataagtataactaaaactctaaaatatacatataatttagtaattgtaaaaaaaatatgaaaaagtaaagcacaaatttatgtttggatataaaaataagttggtctgtttaagaaatatgggccggtaagagcaaaacatagtacgaatccgagcaaaacacgaaaatactgaacttatgagctgtgtcgtaccttgagaaagctctgcatggatcctacctgttaaattttttaaaacataaaattattttcaaattttagaacaatcaagcccaaactttgagcaacctaacttcaagcatatggaaaatgcatgacaaagagccaagcattcatcttcaaaagttagggtctcctgtactgatttttactgattgttttggttttcaacaaattaatcaatcaactcctaattcattttactgattgtttcactcttgttactgaaaataagagcactagaagaattcttatttggaaacttacaaattttttcactcattgggatgaagcatcctttgttgccactacaaactagtttttattttccaatatgtctgtttgaatcaactttcatttatatataacataataaataaataaacattcatgtatacaacattaacactactactaaaggttccatatagaagttccatgcaaaatgttataacattaatatttttcttttcttaacatgatttttttttctcactaaaagagtttatatcatatttgtcattgttttgaatttatgttttttcttgga

SEQ ID NO: 82598 - DNA, 1268 bp, Cannabis sativa
ctgagttatatttagaaagttatgattaatatgctaataggctatgctgtaggaggaatcccagtaggagaaatgcacgagtctcgccccaatgaagaggctcccccacctgtgagacaatgcacaagcacactcccataagcgaccagggccccacaagctttcccaaagcctcaaaactcaggacaattggcgttcgctccagaactttgcaagagggaaaatgagccaaagaatgtgactatctcatggctcattacccataaagggagagtttctcatttcccataaagggagagtcgtaccttgcccataaagggagagtcgttccatgcctataaagaaagagtcgctccttcctcattgttgactgtccaaattttgctaagtaaaaatatcagggtcataacgaaaggagagaaaaataagagagctcgagaggtaccacgggcaaggggcctcctaacgatgtcgcgctgcagcaggtcggagggatctcttggtgtcgcaccattgagtaagtgttgttgtcactattttgggcaattgacattgtcactatctcagccaagtgacattatcgcttctagagatggaagttacaggatgaagcaagcactacgagatatgatgaggaattccaaagggtatcaaaggtgcgcctaagaaaggatggatcagagggtacgaccacgatacctgaaaaggctaataaagagtagtggcggaggcgtgcatgtgtcagtatcacctgacactcaaccaacaatgcctccatctcactaccacctgtcatcataataatatatggtcctcaccaggaccacttatagtttattttgtaaacaacaccaatagagcctaactataaatacactatactctaatagagggagttagagccttgtaatttgggagatatatttttttaataaaaaaacatcttacatcttctctctcttatattttgacattaagattattttaaaattattatccgttattactcaaaatttccgactataatgtagttgatgagttttctctgtcaacaaaaatcttattaattaaaaaaaaaaattcaattaatgtaaaatatatttcgtataactaattaaaaaataaattgacaatattagttatttaagttatttttttggtaattaatatttctcaaataaattggtaattattttttatataagatgtgtagatgtatattttcctaaataaaatgtaatattatactataatataaaataaaaata

SEQ ID NO: 82599 - DNA, 1066 bp, Cannabis sativa
attggatccaaaatataaaatctacacttagtgcggataggatggactatgagcaaaatagtgcggattagattggatgaatagccctaactgggaggttgtcaaatagaggatgaggtacctaaaaggaacctcaaactttggactagtctattgttccaaaaccaagaaacctgaagtgttaggatatgttgactctaactatgcaagtgatttagatacaaggtctcagaattaatgactacacaataagctggaaagcaaagcttcaatcaacagtggcattgtccaacactgaagttgaatatccagcttgcacaaagccattaaagaggcactttggctaaaagattaacaaaagaacttgtcataaatcaaagtcaatctccgtgcttagtgacagccaaagtgcactgcacttgagtgaaaatcaagtatcccatgagaaaacaaaacacatcaatgttacactacactttgtaagagatgtcatagaagatagaaaggtgaaattagagaaagtttcaacagctaaaaatccatctgatatgcttactaaatttctgccatgagttatgttcatccactgcctcaagcttctctcaactacacttcaactacacacagctcacaataattacaggacctaggattaaggctcaaggtggagctgttattaatcacccctaaccctagttgtactttattaagtacctaaagtaggtgttagtttactgttaaggctgttagtgttagttagagttaattaaaagttgtgaaatgacaattaacaactaatcacacagtctaagcctaaagctataaatagctataagcttaaaccaacaatcttgcacaaactgattcacatttaataaaagaaacactttcaatattttctttgttttattgtttatttgaatacggagctgtgaattagatcaagctcaagcgattctcaacactttcttattttctttctttctcaaaatcaaattttaaaataacgatatttatttcagactaatggaccaattttttttatatattgttcctgcatcaaaaa

SEQ ID NO: 82600 - DNA, 1197 bp, Cannabis sativa
  modified_base (234)..(238): a, c, t, g, unknown or other
ttttttttcttgttttatttgaattttattgtatttctcaaataaaagtctatttttttaaaacaaaaataatattttacaaaaaaaaaaaaatcaagagtatttttgaaaattaatttaagttaaagaaaaaaaaaaagactgaactttaaattagtaaaatatttttgacaaaaatttcactttatttttttttttctaaatcattttttttctcttaataataataataannnnnataataataataataaatatttaaggcttatcgtcttcttccaaaatttctgaggaaaccaagtatcttgctcccacagaagaaaaccaactctgttttcttaggaactcacaaatctgatctgacgttgattctgacaatctcaactaacacattttgattagacttttgggaaatttgagattgtttgagctgcgtaaaatgaatggagttgaagtctgagctttctcacttttgattggtatttactatttagtgtttttgggttttacattctgattgaaagattgtattttgattaaaattaaacctttgatatttggtattttgttggtttgataaatgaaatgaaatgaaaattgggatttcatttttgtaatctcatattattagttccattaatggaggtaggtaggttagggacccttcttttcatttcaaattttactttggttgagaaaagagtacttttatgctaatcaagaacagtaaattggtataactgttctgttttctcttttatgcagggaataattactggcaaaagatttctatttggtgagttttctttcttaactttgtcttttcttgtctctggcacctttgatgtggttgtgtatatttgtttttaggttgtttcatacacatatattagaaatgctagtaatagtacttgtttgattttgagtcaaatttgaatttagggggttcagttataatctggattttattttgtaaacttgctgtgttatgaaaaagaaaagaaatcatttttcttgtagcttctgttaagtggtagacatgatattcagaaggttcttgagcctttgttatagattcagttttctctcttggatagtcaaattggttcttgggttggttcaaacttcaatatgcatgttcatacatatacaattaattacatactttgaatgaaatgggcaaaaaggatttagaga

SEQ ID NO: 82601 - DNA, 1233 bp, Cannabis sativa
gagaggtaaatgttcttttcatctatttactttcagtttaatatatatacatatggtgatcttggcatatggtataatgattatcagaaacaactcttccgatgtgtacccgatttagtactataaaatcaaaaaagtacaatcaatacttattagaaaggacaaccatcagtgcgcatatcaatgtccattttttgaagcaaggtaataaatgcttgaaatacgaaagggcagtcggatcttcttacctcgtgatcaatcggaataaggaagacaacgagatctagacacatgtcacccattcaagcaccccggaggtcgaataagtccacatatgagcaaatagttcccacgcggacttggggggcaaatattatcctaattttgtacaagatgacgtggcatcaatatgaatgacatgtgaaaaacattctcatacttgtacagatggtatctcccttaatgtactgttcatggtgattcatgtccaagaatgagtctaaagatcgacatggaacatccaaacatgtaaaatattaccattcgagtagcttctagcgtgatagtgaagcccgcacagggtgaaaacgactgaagcacaatttttaggaattttttccataaatatctcccatttaaatctctactttgatggggttaacaaatattaggaaattagttttgtttcccttttattcttattttttttttcaaggaaactaatttaatgtatttcttctcctctataattagttaagccaattcactactaagggacccgaattctaattttctaaacaaccattatgctgtttaaataattgtaaacttttccttaagattattaagaacatcacttggctagctccttgtgatcttgataattcttcgaagtaatacaagtaaaaggagagtagattattaccataatcatagggctgaacctctataaattttggtgttattattttttaaatatattaattatcatctattatttcatcactttgattgactcaatatcgttaactaaaaatgaggtcaacatagttcctctttttagtattttaggatgaataattagcatttttgtccttgaacttttgatactacctgattttactccctaataatacgacttgttaaaaaatttcccttaaaatataacagttacataattatgctccttctattagattatgtttattttactgttaaaaattagtattttta

SEQ ID NO: 82602 - DNA, 1167 bp, Cannabis sativa
gtatgcgtccaagacatgaaaccttaaaagggtttgttatttacctaatttcagttcattaaatataacaaattttgaagttctatcctaatttattgttggtcttgtcttttttaatcatacttctattattgaagatgataatgagatccttccagcattattgttgaaaatgataacgagcatggcaattctccaaatggttaatttttccaattctttctctaattcatgtggtattaatgttacagaagtttctatctatttctctcagtatgtgaatgaaaaatcattcgatagagtttggtggactttctttttaataccagagattgaattaatctacattttgaaactctaattatgtttaagagagtaacactaacatagcatctgtgaaaccaaagtcaccacatccaaaatgtcatctaatatattattttttacaatcactttctagcatttagatataaaaacatctttatatgaccctaactctcactgaagatattgcctgacagatctctaacttcgcctaaaaatattggacatcttataaaaatagtcattttttttttgttatttttactatcatttttttttttgtttattttttttactgtactgagttgtaaaaattattgctttaaaatttcaaaagtataaaaatattgcgtttcaataaaataaaaaaataatttaaaaacaactctaaaacaacttaacaaaaaacataataaaacaacaaaaaaataactacaaaacaataaaaaaaaataacaaaataatgacctaattgtaatgtgcaaaataatatcaactcctcaatatgattttatattacgattttttacttagttctgacaacttgatttatctttttgtactactacattttttttttaatgaaatttattgttacaactttatattttcaactttttttttgttctcttttcccttttgagatagtgaaaattataatgataatttattttttaaaagttaaataaatatttacattaataataaaaataataaaaccttatgattttaaaatatggtatgtaatataatgggtaatatataattctcaatacctactactgcacattgtgtcaattaaaaaaaatcttatcattgtattttaataaaatatgtcaaaaa

SEQ ID NO: 82603 - DNA, 868 bp, Cannabis sativa
ctttaaggttggattgttttttgcaagtaaattgatagttgggggggttttgccgcaaattactcatatatatatataaacaaaatcatgtgaatgtatggtagtacactattattatatttatttccacatctaaaaaatagatatttttagttcaatttttttttttttaataattatctacttatttaacatcaatttaaaacattctaaataataaataactacatatgttataaaatatttaaaacttattttcgatatattaaattacatatttagaaatttttgaaaatttatgagtaccgtaaaatctctatttaagaacacaattaaaatcaaaaaaaaattagtaggccattagaaaagaaacataatttttggccttttagaaaaaaaatatgatattttaaaattaataaaaaaaaatgtaaaattttaaaagggaaaaaaaaaatttgagtacttaggtgggctctaagcacgaatctacccgcctatacccaggactgtgcctgcttgggatcaaatattatattcaattgggagaatataactaaataacactagctagaaaaaaaaaaatcaaaacacaaaaaaaatataaatgtaacaaaaataagaataaataatccttaatactatatcataattaaattattttttagcttatataatatttgtacttatattacaattagtataaaattattaatttcacataaataaatttataaactatatatgtttttaaattgttaatatataattattcttatatagaggtatattttttttaatacaagacctagagaatatataactaattacaaaagataattttaaaaaaaatacaaaaacaacaaaa

SEQ ID NO: 82604 - DNA, 664 bp, Cannabis sativa
tatatatatatattttgaaaaaggtaaacttcattcaaggttaaataaaaatcgaagccctacatgtctgacggataaagaatcacataatctcactaagagatgactttaaatattggtcaaccacaccgataaacaaaggagcaaaaagctcaaggctcacgtaggagcatagaaagggataaaccccccacaaaaggcttaaagccaacgccactaaggacataaagtggacaataccaaacaaactaaaatatacaaacctaaccaacaaggaacaaaaaacaactttaaagatcttccccctaatgcacaggaggctacacaaaaacccgaagcaagcagaccaaaagcaagcgagcgctgccatctttcgactagatatgtcaacactcgacttcctaatgtagttctgaacggtgaagttgaagggataagggaagcacatcccttttgataaaacttgattctccacctctacatcaatggaactctgaagactcaacacgagccaatgtgcaatagagccatgacgcctgaatagtaacctaatagaatatgacgagatctaaaagaaatagaagagaagcagcactccaagtgtttggttttatgccctaaataaaactctttacaatctgattagttatcaatataagaactt

SEQ ID NO: 82605 - DNA, 1164 bp, Cannabis sativa
caagaatgagcctcgtattagtgcgattctttgggctggatcccctggccaagctggtggtgctgccattgctgatattatatttgggtccaagagtccaggtagcttatctattattttctcaatagttactacaatatggtatttttgaaaataaattacataaaagtggtatttttttttcttttaggaggaaaacttccaatgacatggtatccacaaagctacctatctaaagtgccaatgacaaacatggacctaagagcaaacccagcaagagggtacccggggagaacataccgtttctacaaaggcccagttattttccctttcgggtttgggcttagctacacatcattttctcacaaactagtggaaggcccaacacaagtctctgtgccattattgaccagtttccgttcttcttctacaaactcaacaatgttaagtaaaggtattagagtaacacatacagagtgcaattccctctctttaggagtacacatcgatgtcgaaaataatgggcctgtggatggaaccaacacattgcttgtgtactcaagcccaccaaaaggtaaatgggccggagagaagcaattagtgggctttcataaggtccatttagtagctgggtcaagacaacgagtcaagattgatgttcatgcttgtaaacacctaagtgttgtggatgagtttgggatccgaaggattccaatgggccaacatacacttcatattggtgatgatctcaagcactctatatcatttcaagctgatttaggtgaaattaagtcttagaaaattcaaactgtcaatacacattgataagtgaaaaataaatcttacatatattacatattctagtttttttttacaataagtctcttgtgcatgtaaagaaaggaacacgtggaagagatatagatataattcaatttcaagggaatcaagatcttctattaaaagattgtgtttcatagtgtattaaatcaatcttattgtgaaacattaattaatttgagcattttaaaggaaaaaaaactgtatctataaatggttaattttttaataaaataaaaaattaattaacatatcaaacttatattaatttaacacagtatgatacgcggagatcttgattcattagaaaggtaacataaaaga

SEQ ID NO: 82606 - DNA, 1125 bp, Cannabis sativa
gggggagatcggatccccttgtctaatcccctcctagcttcaaagaatgcatgaagagtactattaaacattagagaaaatttgggagtggtgaagcagttcataactagctttatgaatttcccatgaaaatttagaccagttagcatctcttcaagaaatccccattcaatcgtatcatatgctttttggaggtccagtttaatcatacaactaagcttattagccttcctgccataatgcctcaccaaatcttgacaaatcaagatattatgtcctataaatctccctttaataaaaccacctttggactgtgatattattgaagggagaatattattgattctagagctcaatagcttagttgcaatcttgtaaatcacattacaacaagatattggcctaaaatctttaacagaattgggacatttaactttaggcaccaaagtaatggtggtagagtttatttcctttagaatattacctgagtccaagaaggaaagtacagcctcgcatatatcacctccaatagtttcccaattatcctggaaaaagctgttggagaagccatctggtcttggggatttatttccaggtatgctaaaaacagcctgtttgatctcatcatgtgtgaatctctgcaacaagtaactgaattcactttagggcctttgttgagtatgtgcttttgaacatgtctcctattctctctcttagtaccaagaagattcttataaaactcgagaaaggcctctgtgatgagagtgggatcagtgatcctattgccttcttggttctcaatagagagaatacggttttgtctcaatctatgcttgatgcaagcatgaaacaaggctgtgttagcatcaccatcctgaatccaattcattttagctttttgttgtaagaaagaagtgtaatccttctgtttttggactaacttctccctagctatgttttcctgtatatgtagagagggattaagtggctgctgctgtaactggttttgcaaaccatccaggtcggctttaatgttaagtagctgcttcagtaaattagagaaaccgtctttgtttattatcctcagcctttctttgaaccgcttcaatttagagacaatctgaa

SEQ ID NO: 82607 - DNA, 703 bp, Cannabis sativa
ttttatttagggcacaagacccaacacctttctacccctggtttccctacagggtgtcgttggtgcttgaggagggtggtacgagggtccatcatgattcctggttctttatgcatactctgttggcaccaccctaactgcgagcacttctgatccttaaatttaagttttgtttgtttttttttttgagacgagtgtttgttgtttgttgttgttgttgttgttttttttttgtgcatgcctctttttgtacgtaatactatcttttgttattatatccttgtcttgtaatctttgctcaggttttaacctttgaatgagtacacatttattacttttggtgtcctttctatgttttgtattattccatataaggtcggggaaaattgcggctccgttaagtgtatttattacttatcatttttatatatatttttttatcgtcattatttctttttgaatggggtgctttggaaagtggaaagacatatatgctcttcaagctgcttcttgcaattcgggtgcacgtgtttgcttcacacgtgttatgattttaatgccaaagtggctttttgtttctgtttctgtggcatccttattaactgcatgcaagcttctgtatataaataagtctttagtttagccattttcttctaagaaccctttcgacatttttttaagtaagcatttccttcttgttcat

SEQ ID NO: 82608 - DNA, 872 bp, Cannabis sativa
aacaatctcaatagttcaagagatatttttaacgacctcaaaagttcaaaaaatataatttgatatatctaaaagttcaagggtaaaaaatcctaattaaccttaacaaaatgaatcaaggatgtatgcatatagatatacgtatgaatcaaattaatcatgataatacatattaattacgtaccttgagtactctaagaagtactaaagactgggcttcctttgaattgtcttgagacttgaccaaaactggggaaacgtaaagaaaagtgataccctgatcggtgtctagtgcatgcaattgcatatagtacatcataccagaaacaacctcttgttgattggcatatgctatcttcacaagctcaagaacagacccaccattattaacattctctttcttgttatgttcatcgattgcaaaacgaccaagttcttctatcattggatcattctcaaatccttccacttccctcagtatccccacttcttccattcctatatatgttaattaattaacttaatttctaaactctctgcaattgctttccttttcgatatcttgattgatcttctctcaatcttttattatatatatgctgattttgctttatttttaactactcaattcaagactagctacacaacatttatatactaattaatttatgtaataagtttggtgcttagttgatcatctttgaaaggaaccctttgatattattattttaaaataaaaagttagtgtataatttttgactagttttaggacctctgactttcttcttgtttgtgtttatttatttagtattgaaactttgcacaactatatatatatatatatattttaagtcgattttgatgatggcatc

SEQ ID NO: 82609 - DNA, 666 bp, Cannabis sativa
tcttgtttagctagtttaagaacccgaggcatcaatttttctctatctttatcatcctgaaaaatccatcatagatttgttgagtttccgaatggtgtacatagaatagacaaaatcttgttttcgcacttttgatgtcctagtctcttggtcctgcttctcctgggccattttttgaatttggtcctccaactctgaagtctttttcttggattcttcataagcctgagccagggtttgtttggtagaactcaactcagctgcggtttcctcggcctctttgacagctttcttctcaacttcttctgcgttttgttgcaagtaagaatgaagtttcacctttctctatagagtagcttcaaaaataattttttcaaccatgatgcgagtctgcttgctatattcttgagacaaaagggtgagattttgttctgactctttgaaatctagctttgcatgcttcaggtctacctctaagtcgctaatccgagagagagagagagagagagagagagagagagagactaagtatattgctctttgtacctctccccacgatcctttctaactttgttggccttcttcccacgaccaatagtcttgtccacataatcattgaccctttgattaatgatggactttatcttggcattggcatttgctaaa

SEQ ID NO: 82610 - DNA, 659 bp, Cannabis sativa
tttgaaggaatggattaggaaaagaattcaggggtgggatgctaagttactaccacgagctggtaaggagattctttttaaaaatagtagctcaaagcttgccaaattatgctatgagtgttttcttattactaattttagtttgtagtgagatggagagattggtgaataattttttgtggaagtcttcttcaagtaatgaaacaaaaaggatacacaatggatgagttacgatcattcgagttctcataaaaataaaggtggtattggatttagacacttgagagactttaatatttctttacttagaacataagcttagagactcataactaagtgcgatactatccacaatggtcttttttagatgcaagtttgggtagtaatcctagttttgtttggcatgcgtagtattatgaaatctcagtctatggtgagagggggtttaaggcatcaggtagggtccaaaatggcaattagtgtgttctgggatccttagttgccagatgagcataatccaagagtgagtactaaccatcctactttggtggatacaatggtgtctagtcttatgataccaggagaaattacatgggatgaggaggtaattttagatttatttaatacccgtgatacatggttaattttgaatattcctt

SEQ ID NO: 82611 - DNA, 652 bp, Cannabis sativa
ataaataaagaccttgtattatatattgtataagttttttttttatttgttttgtttacacaattaattattattaaaaaaaatcatagtaatgtttatacagatttgtctcagattatgtgtttgtggccaggaacttccttattattgatacattaatttagtggggttgcaattattttttagtttttcaactttatgtcctacaagattgttttgatctgacacttgatatatatgtatgtgcaattattaggtaaaattacttatagcattttatatcatttcctaaaagttaattcaatataacgactgattagtatataatattatgtttatttatgaatgactgtatcaccataaaactaagcttatagtctttctctagtcttgactcttggcctatatgtaaagtaaacaataaaacgatcataatacacagcaataatattctgagattatctagagagctaacctagataattcaaaaaaaaaaaatacaaagactgaagctatatttctagaaagggtagataacaagttctttaagagcttgcagttcattaacccacgtactcgtgagtatgttggaagactgaaaaaattaagagaggaacggccagtctccaaattcctataagactaatacaat

SEQ ID NO: 82612 - DNA, 1315 bp, Cannabis sativa
aaaaaaaaaaaaaaaacagagcagtagaagtaatccttttaagatccattaaaatcagttgatctattaattttataagaatctgtttctgtaacaatgtcaaagtatcgaccataattgaatcattaatgtttatctatttattttgtaagcatcggtttctgtaacaagtataaaaacatcgggatgaataaataatatgaagaaagatatatacctggatttctgtggtgacagggtactcatccatgtcgacgtagttcttgttaatggaagccatgatgagtttatcacactcaggctccatccaagtagtaacaaaggaagccaagttgagccttggagtaccatccaacatgagctcatcgtttatgaactggaacgcagcgtccttgggtatagtcttcttgggcatcctccatttggggactgcctcacgtacgtaccgagacgcaaacgtcgagtttaagtagtgatcagcgttctcgtcatcctcgccgctatcacccctacccttactcgccgttgtcaacaccatgcttatagtcttttcttctactgatattctcaatacacaatatgatagcactagactctattccatatattatatatagacaggtacattgtcttaatggtcccatcgctttcctttaatggagccttaataattaactttgtgtgtgggtcattcatccagctaaatcaatattgcttcaaacaaaaggatctagagatattcatttgggctatgggaagattttttttatttttattttttatttttcttctccaaagggatatggggagattttgtttcgagataagataagaaaaacagtgataaaagtatgagtaatacagcgtgtttgcccataacgaaaatagttttttgttttttaaaactaattcttttttctaagacaaatataggtatttagtgttgtttttagaaaattattatgttttgaaaaattactgataaacaattgagattttttttttttttgatatatctttaagatactttattttgtttttttttttgttataaattttcaaaaattatctatatatatattatatattaactttttattgaaggtttttatttccttaaaaaaattataccaaaactgactctaaatctcaattatgtttataattctatcaaaaatatatatctataattataacatcatataagatagaaaacaaaaaaaaaaaaaaagacttattttgtcctttgtgaatttttttttttaattttttttaacaatctcaatgtttctttattttttttttaatcttaata

SEQ ID NO: 82613 - DNA, 2458 bp, Cannabis sativa
  modified_base (1766)..(1770): a, c, t, g, unknown or other
aaaaaaaaaaaaaaaaagatactgagatatatcactatcaaacatagcaatttggttagaatagatatcgatatttttatttcaattaattgaataaatataaaaatcccacttgttaatgacatatattttgactactggcagttagactatgcgtagtaatttatgagctgtagaacatatacatattcacttttcagatcaaacccaaccacttgttagatcatatacatacatatataatattcttcacttgccaacccaagtaacatacaaaccataaagtttagtaataaacatatccacgtacggttacgaatctttagattttcagtgttaatatcttcaatccacctttttttttttaacagtattattactactttttaatttgttaatataggattgctacttagtgctaaaaatacgggtttgagttttgacacggtaagatgctatataaattgctacaatactggtacatcatgaaaaatatgtctttaaacatgatacgttacgaagagtataaatataaatactaataaattagcctgaaaagtatagcaagtgataagttcaaaaagtatgacacacgacatgttaaaaattttataatttattaataataataataagatatacatttattaattataaataaattaaaataataaaaaaaaattagatataataggaaatatgataattttataattaaaattattaaaatattaaaaattaaaattatatattaatttatttatagagtgtgatataaaagtttgagtacttataagtaaatatattgaaattctaataatagtaatatgtttatatgattatatgtaaaatattgttaaaaagttatataaatataactaaaattataaaatttactctactaatgaaaaaagaaaagtaaagtacgaatttaagattgaatatgaaaataagttggtcaacctgtttaagaaatacgaactagtacgagcaaagcacgacataaaaatattgggcctacaaatcgtaccagcccactctttaaaatattggcaagaccatatttttatatatgtttatgtagtacggtacgacacgctttatattttaaaaaatacggatacatataagttggttctgcatagcatgcatttacaacactaattgccactaccaaaacaattatgtatgtttaatgattaaattaattgttacttcatttatagttattataaaaaattacttgaaactaaaaaaaaaaaaatgtggtttcagaaaaaaaaaaatgtaggtgtgttttatcatgcattgctcatatacaagtagtaactagcaagtcttattaactcataataaaattttagtaattgaaaatatgtccgttgtaattaaatctatataaagaaatcatatttaatcacaaatattttaaagtttaattaaattctaaaaattaagataaaattggaagggatggattagctagtcacaaattcttgttatcactaatataattttagtcacaacttattatttatagtaactattttgttgcgattaaattttttttaattacatgattaaattataatttatatgattaatatttttagtgattttttttttagtttgttatatttctaatgtgttagagggcatccaataacactactataatacccgaagtttcacatcattatataagactgattaatttatatgcaccttccttttgtcttggtcaataataatataatatatatatnnnnntatatatatttatatataaattattgtagattaattaggagccaaattttagttaagatggaaatacagatcattcttcttcagcatggcactatatattaatattgtattcatagatcacatatataattattgaaccaaaaagcactcagcattattgaaatataatatacatagatatatatatatatagacacatattcattttattgctaaattctacttattaagaaaatttattataagttaatcaaaaaaatatattattcaaagtatatcactagaaatgatcactataaacagcaccctccactttcaattcctctctataataattaatctaatcattgtcaaaaatcaatggagatcaaaatcactactttctaaataaaaaaataaataatggtatataggaatgaccaattaaattatttagaccaaatctgatggacgatggttactcttgtaatccacaagtttacataaagacgtagacatccccacttatgatattaattaatatataattcttttttattttatttttcaattatttttgttacctatatataaaaaatataaatttttttattctgtattcaatagtataaataccccttaaaggatcaacagtcccaagcaacatttgttagtttatcttggtccatatatatacttgttaaagtac

SEQ ID NO: 82614 - DNA, 1192 bp, Cannabis sativa
  modified_base (27)..(32): a, c, t, g, unknown or other
gcacttagtgcggattggatgttgttnnnnnnaaaaagtgcggattggattggatgaacaaccctagtcggttcgatcccctttggattcaatctatgtagcgattgctggggcgcgctgggctaaacccactgctggttttattaaaaataaatgtggatggagcactatttgcggctgagaaggcatttggtgggggtggccttgtccgggatagtgggggattccttctcgaaggctttgctttttataagagtggctctcctcagccagccgtcgccgaaattatgagtatgaaggaagctttaagttgggtggaaaacaagcgttggggcaatgttattgtggtgtcaaatagtttgacttcaatttaggcactttacagtttgggccaactaccatcaccgtttggcttacttgtggaggattgcaagtgtcttttaaattctttagtaaatgtttcttgtttttttgtaccacgatctgagaacagagctgcccattttattgctcgcaactctcgttctttgtcaggttgtactattttggctagtaatgctccgtcattactgcttgactttgttttgaccgattccgtttgaataaagcttatcttttttcaaataaaaaaaatgataatattttatttatttagtcttttatgaattttaaatattcttttttattgatacacgttatcaatttaaaacaaatacatattgttttatttatatatactttttaatcaaagatatattttgacattacaaaattatatatacatgtcaattaataatttttttttatgaaaaacacttataacaaaatatttctgctactaaatgatttatctgcacttcaagcaaatattgattctcatcaaatagttgatatgcatgcaccaaaaaaaaattacatataagtgaataaagttttttagattctctaattatttttctatcattagatgaagatcatttcttaaatatataaaagaatttaatataaaatttatttatatatgtagtaagatattattttgtagccaaaataatatatatttttttataaactaccaagtaaattatattataaaaattattttttacttttacttgttgactggagaatttttcaactgactcaaagtctaatatacacttattagtcaccaataaagagttagaaataa

SEQ ID NO: 82615 - DNA, 1694 bp, Cannabis sativa
gcattgattttgccctaatttctatttgtccttcgaagctctgttcagacaaaggaaaatattagtaaagtcaattataagagaaacaaagtaagagaatacgtgtcatatatgtacaaattaattcagataagaaaggtcaaaattgaccttgaataataacctgtgtgtgtgagttgtgtagggataaaattgtaataatttcctacagtggtatcagagctggtttcaacagcaagaaagactcacaagaagggagaagaaggtgatcaagattgaaggaagttggtccttgaaggagattcttgattaagaaagagtttgaatgttcaaactgtgattcttttccttcacaaaaagttattttcttttctgaatttactaacatgagcaatataaaagttgatattgacaagtttgatggatctggagactataaaatttggagaaggaagatcatgtcattactagcacaacagaagctgcttagagtgctaaatgatcccattgaatggtcagatggaactactaaagttcagccattagattcatctgtgttatatttttctggtttgatgtgttcactggttttttttgttcttgatttgtttgttttgatttaatttttatttgtttaagtgtgatcttgaatctggaattacaattaaatgtatcagagctaaatttcctacgggaccacactacatgtctaattagagtcaatcgttgtggctcgagggttgttttaagggaagtagtcccttttgtggctactgtttgaacttattttgtttgttttcgatatatgaagcttattcataaaatagaaaaaaataaaataaaaatcaattttggtctgatttcgaaccctctacccaaaattacaaatcaagcacggccaccactaggccaaaaaaatggttgacataaattcaattttactgcaattgatttcaccaaaattatcttaggagaatggctactttattgcccctcttttttcactctcttatttaatgttttaatagaattattttatttaaatgctttatctcattttaaaatacaaaagagagtaagaaaaatggcattttgccagtagtacaacaacaagggtgatatggtcaccagcttccctataaatacatccaatactcaatcccaataatattattcaacacaagttctcatttcaaaattatttgcatactcatcgatccttgaaaagttgattaattttataatacacataatggtgttgaacaaaatcatggacacactgatgaacaacggtcatggtgggaagaaattcatagggacggtggtgttgacgaagaacaacgttatagaccactccgcacttgaccgtactgtctctcatttctcacccaaagaagtttctcttcagctcctttctgctgtccatgccgaccctgcaggtatttatacttatatatgtatatactatattgttatattaaatgttactattgttctttttttctaataaatataatttttttgagtttgaaatcaagaaagaacgctttttcaaaaaaaaaagaaaaaaaaatcaagaaagaacgcaattacagacaatatagctagcaatttagggctcgtttgaaacgacgtattaggtcgtattgtattgtattatattaaattatattttatgcaatatttttatgtaa

SEQ ID NO: 82616 - DNA, 2885 bp, Cannabis sativa
gtatcccaacatcgtgcttcccgagattacatcatccctaggacaagcctagccaacatcaagcaaggggaaattgaaagcttgaaaagctacatccagcgctttaatgctgaagcagccaaggtggggaggttatctaaagatgaccataaaatggccatttccgccactgttagaccaaaaagtaaactttggaacaacatgctcaagagagagctatatgaccttgaagacttctatgaaagagccaacatgtacatcttggtgtaggaagtgcatgcgaacttaggagtgggaaaagatgaacaacccaagaaggtctgggttgaagggttgcataaaaagaggggatacagatacaaagatgataggaaagacaagaaagccaaaagagagttagagccactgcctcacgattatactcactacatcaagttaacccactcaagagagcacatcttccttactaatgagcactgagtacccttcaaaaggaaactgcccttgaaaagagaaagatccagaagggacctaaacaagtactactgcttccttaaagatgttggacacctcacgaaggagtgaaagcatcttaaggtcaaaattgaggatctaatacagtgtggatacttgggaggatgaaaggaaaaccaaagacctaataattttaagaaatagttccaggtcgctagggatagaataattttaagaaacagttccaggccgctagggatagaataattttttttgtataattctttctggttttcttaattatttaaaaaaaaaataaataacaaaaagaaagagggaggcgcttgtgacttgactagtgggctaaggaaatttagtccttgttttttttggtaagcatcaatatttgttgtaattggtatattatgatgagtttccttttaaagtttgatattttatccattgtattttgtttttttttttttctttgatcttgaatgattttttctttcttaattggcctatttttggaaagaatctctatttattcttgtttccttttatctattttagtgtttttttacaaaaaaaaaaatatcttaataagggaaaaagagagtggcgattttctctttattagtgggcaaggtagtttatttattgtttccttttcaaattggtttccttttgctcttcattcatatctttttttttaaaccaattcttttgtcatttaatctcaccatctttctcttctacccgatccctctactctttagtatcttgtctctttgttccttcattttcttttttagaaattcatggctaagacaaagaacttagggcatccaagcaagatggttgatacagaaactactccctcaaatgcctctcttgtaccttcaaagttgcctcctgtgactatcaagaaagcttcttcttctattcccacttctagaaaaaaggctcccgaaatcttggctcgaaaatccgcgagacccatccaattgcccaaatcttctaggtctgactcgaggtcttcatcatagactgttaaggcgtctccatctcgtggttctgagtcaccacctgttggaattggtgttgcttctgcagcatcaactccaaagggcccttcatctcgaatttgtgcccaacaagcttctcttgagaaggaagcatgcacaaaaaggcaccatgagaggcccattcttgctgccaaaaagcttaaactgaatcctccattggcctcctcgagttctaatggagaagaagaacccatggaagtgccatctgacaattttgagtccaaaactgagtctttttcatctgaaaaaaatccagaagatgttgttgtctcctctgacagtgaagaagttgatctggatcctaagccatccttgccaaaaattttagcagcaacgattcattctgcttcagtagccaaagcttctgcaatagccaaaggtaaacagcccatgaagagcaccttgtctggtaacctctcttcctgtcaagttatcagttccagattcttttataataataaccagcgtgattggaatttatgtgctagtcgtcagtttgagaatgaaagaaattttgatttaaatgctgatagagtttgtggcattgtgaagtatattcaatatcatcattgggaagatactctaactggttttgaagggtatattgatggcattgtcaaaaatatttatgctaacttgactgatgatttgctttataagaaatctgagttctttggtaaagtttatgttcgtggccatcgttttgctgagaatgatatagttgaagctttgaaactgcccaaaggtgtgacaaatgatgcagtgactatggatcgtcacctcatgcttactgatctcatcggtgaacgagttgaatggcctgctagccaaagtgttcgtatcactcatctcactgttggccatgcctcactcatgtagtttgctcttagtaattggcttcaaaactccaacaagactatggtgtctcaagacttggctcatcttcttttctgaatcaccttaggggcaaacatcaatttggcttctcttatcttggatcaaattttttccttccaaagaggtaacaaacgtagtcacaagcttatttttcctaacttaatctataaagttcttttctcttagaaggatgtggcttattcccatgagacactcgagcctcccctcattggaaccatctttcaaccctcagagtactttaatggagcttttcccaagtgtcctaaggtttctattggtgttgctgctgcaagttctagttttgcttctacagatgtgcaggcagtcaagcaagaagtcattcaggtgaacaatcgtttagctgccatggaggaggttcagcaagagatgtccaatcaattgtcc

SEQ ID NO: 82617 - DNA, 551 bp, Cannabis sativa
atcttatgtaatatatttatttgtagtaagctatatattagactctatatttattaacaaatgtatatcatgtagtatgtagtctgttgtgcaataataatctctaaatctattattaaaatttaaattatttttatatttattaattgatatgtataacttattttaagtaatttataacattttaagctttatatttcagaataattaaagatttttttttttcataattatttttttttataaaaataacccttttttgtcacggtttaaaacctatagttatatctattagtttcggttttaaacttactctaaatatatatatatatatatatgtacattttaagtattagttttaaaaccacaccaaaactcaatagtatcggtttagaactaacaccaaaatttaacttgcggtatgaagtgacactaaaagtatgagtgtcagtttaaaaccgacaccaaaaaatataatttgtagtagaggttggagatttaggtatttatgctaatactttttaaaattaaatatatatatatacgagcaa

SEQ ID NO: 82618 - DNA, 733 bp, Cannabis sativa
  modified_base (30)..(70): a, c, t, g, unknown or other
tgcaacataaaatgttatttcttatctttnnnnnnnnnnnnnnnnnnnnnnnnnnnnnnnnnnnnnnnnngggcataaaacccaacacacatcactccccacaaatccaatactatcaacaaaaatttcaacaacaactctccaccctctcataccagtaactcttctcccaatctacccgtgcccccatctatttctcattccacaaaacttaaatatcagtagtctcagacttatatcagcaaccccacttccactccctctttcactaatctaagtcaccctccaaccaaaccttctaccacaccaactcatggtatttcaccccccaatctacccttgcctccatctggttctcacaccagcgagatcaaaaaccagcagccacgaatttcccacagcacctctgacaaatccaatcaaaatgacaatactatctctgacctttctcacatttttatacctaatatcagagccaacacctttgctacatatccacctatattaacaccctctcctatcgacactaacctttcctcactctctctcaaccaacccgcaactcctatctcaacttttacttctcccaaagtgtccatggcaaaggaaaatcagcctccaaatgcttctttcaagaggcatcaagactccctatcaatgaggaaatttctgaaaagatgtcgtaatgttcatggatcatcgtcttctcctttgtcaagagaggatgatgttg

SEQ ID NO: 82619 - DNA, 1601 bp, Cannabis sativa
  modified_base (434)..(435): a, c, t, g, unknown or other
actttcgtctctcgaacaactcccaccgagtcatgctcgcaagcatctatgagtgcatccatgcatcgaggcccaagatactcgcactatccatagattctcactatgattaggaaaatctcaacaccgtcactcacctaatcactcgtgaccatggtagcatgtgtggcaagatgccaacactaagctgacatgccaacgcttctaatcatgccccattcgatactgtctgaacagtctccctcatctcccaaggactcccatactattccatggaccaattcttgaggcaccatgcctccatgcatgtaggcaggccctcaagacaagccaccaaactagttgcatacattagacctttgtctctttccatcatggtgcatccgtcccatgcgcgtatgcaaactagcccatgaatgactactcgtgtcatnncgtgttgagacttgtggccaaggcgcaccacgacgtcttttggaggtttaggccacgtcccgtgcaagcggcataccggcaagccaatgaaaacgtacctactaaacctcaggcagcattcttagacgcactaccgggtcggcccgataatatccatgagtattccaactcatggagacatatgagtcatctcgtggtcctcatatgtccgccctactagtctcaacttactagtagtagctcacttagcaccaacgtgcgccaagaggtggtggagagcagacatcaagtactccccccttaaagagcattctaagcttttagctttttactagaaatatatatgatttttactctatagacatatagtcaccaaggaacatatagtattactcaattacttaataaatttaagtataaatattaattttaaaaatattaaattattaaattttcatctaacaacaaataatgaaaaagaaatttaaatttcaatattaaatttaactacttaatttaaaaatgtcaaaaaaaaatatcttattttacactgtatcaaaaatatatatataaaaaaaatattcaagacaaattaactcaacattttttatctttttcttgctttttttttttttttattataaaagatcttttaattagataaaaaattaagtataaaaatttaaatttaattaacacaaaatcttaagaaaatttagattggataatggattcgaaaaataataatacaagttacctgaattaatcataagaaaaattgaaaattaatattagctctaaaaatgctagttataaaattaaaatttcaatatgtgagaatatatataaaataatattataatattttttaaaataaatatgcgatgaactcatatatatatatataatattaaagttggaatgtaaagttttaatcaaatagatacgtaacggtagcatattcgcactagttgaggtttagttaagaggaatgaaaatataagaataggaatgagaatgaaaataggaatatgaatagaatgtgaatgagaaatattaatatgaatgaaatagaataaaatttaacatacatagaaaaattgataaaaaaaaagtattaaattttgtctcattatacattaaaatagtctttccttctatttcaa

SEQ ID NO: 82620 - DNA, 582 bp, Cannabis sativa
  modified_base (550)..(551): a, c, t, g, unknown or other
taatattttgtttacagagtacaaaattcaagagatataaagaataagagatgaatttctttcaaggtgtttcctttatcaaattggtcgtcctttgctcagtggtctttcatcctatttataggatttctcatatggtatttatttcttttgacttatcttaataactgttcatgagacaaggtcaatccacacatttcatacaaacacaacgtgtggaaaaatacataactgcctagtaaccgtcatctagttttatcctataaaaggttatttcattaagaagccttcctacactttgttgctcacacattactttagtagtttcttcatgttggttttgtacattcaactcgattataaatgctttatgtggtgacccatctagccttcgtattaagggtgttcatttgatccaattcgtactattttagtcatagtgcatttgatccgcactaagtgtagatttcgtattttggattcaattcaattagcatagtaactcaaatccaatccgcaaaagtacggattggatcagttattttggatnngttgctttttaatattaaattatttaataat

SEQ ID NO: 82621 - DNA, 651 bp, Cannabis sativa
aatttgaatgttattggaagtaattgtacaatttaatacgtttatctgaccgtataattatactataattatctagtaaagtaattatatagttacttctaaatgtacttttagaattgatcatatgtaattactattttatattcaaataaatattgtattttaaaatatagtataattactaaaatattaataacttaataattatacaattttgtaattatacaaaaacttccaaacatgcccttaattaaccaaacataattatattgggaaatgtacgttacactacttctagccttcttggaacaatatgagaaaaagtatatatcatataaattaaagttatttacaaaatatttagtcttaaaattaatttattaaaaataggagttccatataaataattagacaaacctagggttgtctaatcaggtctagcttttcaacatgacacgagtctaaaatacacaaaaaaaatatggtcttaaacctgtcacaacacaaaaaaaaatatagacttaaaaacaacaagtacgaagatacggtatgaaaacacgaattacatccataagtatattttttattagtagaccaacgagactaatgacaaatgtatgataaccatctcgaaaaaaaaaaaaaaaaaaa

SEQ ID NO: 82622 - DNA, 2129 bp, Cannabis sativa
ttttagtgtagggtaatagtattataatcattttaatagcttaatagattaaagattttgagttcgatcgaacccatgagtactttttcttttttcccattccttcctcactattaaactagcttattataaacttgatttaatatactataacttcccttttttaaaaaaaacaaatatatactataacttctaataattaaaaacgtacgattttgaagttaacctatatattaatcttgtaattataaagaaacaaaatgcatacccaaatttgacaaaatatttccctaatagtgtcaaaaaccctctcttcttattttgcatgcatatatatgtacatataaaatatttatattgttaatgcacaaattatattttattcatattgtaaattaattagaaaattaagtataaattgtcaataaatgtttttgttaataagaatatattcattaaaatagttataaagtatagaaataatgaaaaaagatttatccaatcaagttttttatctgctatgaatttatccataattataacacatgaatgatcatgaacaaggcatacttgttagagttttatgtcctaataattaaaatctcaattcaatttctagaatggttaataaaatcataagtggagaagtctattatcgccacataaaaagaggtgaacaactataaaaatcaagtctctaatattattttttatttaaactggtttattttttataatcgaatagtctgagtcgaatcgctataattttataatcatttaacatcagttgactaaaaattacgccaatatatatatatatatctttatatctatacgatactaattaaattatatacaattaaaatatatatatcaaggcaacaaaattatatataatcattgtatataataaaaatagaaaaatattatctataatgatatattctatagttataataaatattatactacaataaaatatatgtagcatgcgaataaaattatatacctacattaaaatgtatataatatgcttataaaaaatttccacattatacataaaaaaaataaaaacaaataatatcatataagaataataataatatcatataacaaaaaagaaatatattgtacaaaaaaatttatatacaaacaacccaaaataattaacccacaaaaaagtaaattaaatttaaattggataaagagcatctatcgttatgtgctctgaggcagttatagtcctttaattgttatttcctctatttgtcaaaatcgcctaaaaacttcccattaactgctcccttcaattcaaaaatcgctagttcttttaacctgaatcatgaatcttctcattagcaaaatgaaaggcacgatgactcttgctgaagaagatgaatcaacacttatctttgatgatgatgattatgatgatgaacgaaatgttggtttggacaatgtgttagtcgctagagtgctcactaccaaatctgtttttctgtctacactatagaggcagataaaggatcattggaatggcatgtaccacacgatgattactaagaaaccaccgaatatgtttgttcttacttttggatgtgaaggagacaagcaaagggtacttctcgaggagccttttcactttcaaaataaacatattgtgctatacacgccaaatgctctacaaaatgttttacctgaagatcttatattctattctccttgggtccaatgttatagacttcatttttttagtaattctaaagcattagccaaagctttaggagatatcattagagaatttttgaaagtccatgaagactcgatggaagaggttggtgttcttttctacaatttttgagttaattagatgtgactaagcttttattgaagggtcacaacataagacagattcatgacaaattatgggtggaatttcgttatgaaaggcttccaaagggtgtatggagtgtggaaggcttggaaaaccatttcagaaatgctggagtcgatggaaaaaattgataatggtattgaacctgaattaccatatggacctgaattaaaagaggttgtaatccctacttctggttatgataggtacagaacaaatttctctaaaggaaatg

SEQ ID NO: 82623 - DNA, 1193 bp, Cannabis sativa
aattcttaggttttatagtgaatagaagaggaattgaaggaaatctcaaaaagataaaagcttctcttgatatgccttccccaaagaaacttaaagaagtttattcattaaatgggaaaaatggttgcactaaacaaattcatcttgaagtcgacagataagtgcttataatttttcaacgtgttctgaggcaacaaaaaatttgaatggacggaagagtgcaaagaggctttttagagcataaagagacacttatcaacctaacatgtacaatcaaaacgagtagctagtgagatcttattattgtacttatcagtatcagaaaatgcaattatcacagtattagtgcgagaagagggaaaagcccagttaccagtatattacctgagcaagtgtttagtggaggtataatctagatatccacccttaaaaaactcgcactaagttttgagtcatgcctcgaagaaactgagataatattttcagccatacccaattcatgttttaataaatcaaccattaagtcgggttctcacaaaacccgatgtcttagggagcttgataaaatggtcgattagatttgaacattttgatatatcttatcattcgtgagcacccatcaaaggacaggccttgtcaaatttcttgattgaagggataaacattaagaaaatatagaagagattccaaatcagaaaatttgcaaattatttgtcgatggctcatctaatgacaatagcttgggggcaagcataatactggtatcacttgaaaactacatgttttattatgcactaaggtttcagtttctaatttctaacaacgaggcagaatatgagacactacttctagtaggtttaaggatagctaatgttgtaaatgataaaactatacattgttttagtgattctcaattgattctaaatcaagtgcatggtgaacatcaatcaaagggagttgaaatggcaaaatacttggaaaaagtttggaagaacttgggaaaatttgatcattacaaaattgaacaagtaccaagagaacaaaatttcaatgctgatgctatggctaaattggcatcgcattctgaatatgatgacctcaacttggtgccaattgaaatgttaaaagaatacaacattttagagatggaagaatgagatgtagaaatgattgatgcaagtccaacctggatg

SEQ ID NO: 82624 - DNA, 856 bp, Cannabis sativa
  modified_base (40)..(48): a, c, t, g, unknown or other
aagatatttttttttaattttaaaaaaagattgtttaatnnnnnnnnntaattattgggtttatttatttgttaacgttaacagatatagattatagtatattacataaatcaataaaaactaaattaaaaaaataaaaaccaaaaatgaaaataaaattgccaataaaaatgacatttaaaaataggagaattactctattcttgcaccgatactattaatttttatatttttttattatataaaaatgacatttaaaaataggccgagaattaccatttatattgtattttctatttttttttttaatttttaggtttttatttttataaaaattatttctattttaattaaggttatgttgtttttattttgatgttatgctttttatttttataattatgtcttaattataatacataaattattcgcaacaagtaagaatcattggtcctcttatttattcccatttaagaaaaagaaaaaaaaatgcatccttaggatgtatcatcatgatgcacctctagctgacctctcttcgggtcaaattaataaaaggttaggagaatataagataaacaaccataactaagtccaattagcagtttcaaaaagaaaaaaaaaagtccaattagttagttggtacagtgagtcgaaaagatattatacatttatatttgtgtatgatatgatacgagacattattgagacctttaaaaggtgttttattaattataaatgtataattgttattgtataattaaataactcatgatcatatatccgttatatgaaattaacttttaggtagcccaatatacacccattttttagtggcattttgctcaaaatttgg

SEQ ID NO: 82625 - DNA, 1082 bp, Cannabis sativa
agagagagagagagagaacaaattaaagaaaatggctactgataatcataatgcaaaggccatggaaacgaaggtagctgaaggtattttcttaattaatttccaagaaaaaccaaactattaattcttatgaaattaaaattatatgtagatatattttctgaaattgtatttcttgtaggaaattcatctttccaaaataaagataagcagcctatgtattcagatgatggtattaattttctttctcattaatcttaattaactttaaacaaatcaatttttttattaatctttttcttaattattctggttttgtctctagctactttatctgttcactcatatggagatagttttactcctcatcacataactgtaactaagggtgaggtaataattaataactaatttttgttcatttttattaatagaaaagaaaattaggaaatattatttaattatatattgatttttttttttgttattttttaggatgttgtgaggaaaatgaaatattttccttttcatcatgcaactacatcaaattcattattgactgttctttctgctaatgggacagcattaatagcagacattattaaatgtggtgaaaatacatacagaagatattttgtaagtttttttattaaaagaaaatcacaatttggttttcttgattttaatcaaaatataattctttgatttttgatttgttgtagggttgttttaaaattctatctctgtcttggacagtagaacttgattcaaatcatattcctctgaattatgatacaagaaaattattgaaagttgtattggtcaatttatatagtggcagggttttaggtggagttgcataccgattagtagctgattcacctattgaggtatttattaggtgacattatcaacttctttgttcatgtaatttttggtttaagtaatgataatgaaattgttttcatgtgtcagatttttgttgggagtttcaagaaagagattggtatgtcatttgatggtgcttcatcatcatcaccatcaccatctataggaaaagtagtggcagaattagtaagcaa

SEQ ID NO: 82626 - DNA, 520 bp, Cannabis sativa
ttgtattaaataatactaatacaacacaatccaacacaatacaatacaatacgacgtaccaaacgagcccaaaatgtcttatttcctcgttgggaaatggaaagggaatgaatataaatgattttttttcttattcataatataatattttatgtttttattaaagatcatatgatatcttatataaatgtttagtataataggatgtaatgaaagaatatgactttattattttaataagagtaaataataatattttgtaaaattatatatttttttaaaatttattaatgtaaatttcgttttgaatttattaacaataatattacaaacttaagtacgagtgattaatatatagtatcttaataaaacaaaagtcttgtctcttgacatggttttgaggtgataggtttgttccttggtaaggttggtgtggtgttctgtttttgttggtgtctttgtctggcatctggttcatagtcgtttttcctattctctaatggcttcaagtagttcaaat

SEQ ID NO: 82627 - DNA, 1603 bp, Cannabis sativa
tatatatacacgcacccatttaaataatagtatattattaatataattattattattaaatctcaaataataataacctaataaatacatataccatcaaataaaataaatttacacaattattattatactcacaataataatatacacaaaataaataattaacccgacatttcgtaaatcaaaacttttattgtcactaaaatcttatatatttaataaaacttcttaatatgtaaattaacaaaatgctgacaaaagaaaaaattacaaaattatcctttcgagaaagaggatattaaatcctctctcggccaggcaatcctattataaatatgatcaacctacacactgagaatccaatcccattgatctacatggccaatttatctcttatcatccctacatttcccagtaatgccaaaataattgtcaaaagcaaaaactcaagggttaaagcaattcaaagagccctagaagtttattccactctcgtggggggatataacaagacgatatccgaagaatttggcttctacccagactacccttttgccaaactcttagacgtgaaaagcaacatattcatgcccaaaaagataacagacctctactagtatctcgcaagttcatacactattgcggtcaaaatccacacaatagggctctgaacatccgtccgtggctatatccaacgccctgacctcaagcctgcttaccaacatccaatggctatgttataatggtttaaaacattgcccgaatgggatgcactcctcacacaagagtgggaaaaagttcgcaataagagactcgtgggactcaattgcccagttactgaaaacatggcaaacccattgcgctgctttacaatcttgctactcaggctacatgtcaatccagacttatcatttacggcaagtgtcaaaatacataagtcaagtgaacactcacatgtcgtgataggaagctcagtagcaagacagttggaaaatcacctatttgccattaacatggtgattccagatgccatatggccaaaacccgaagagacgcaccatgggaatatgattcgcccgagtatctccaaaaactagaagaagatatgaatcattataaaaaaaaagcactatgttgaggaaaacgatgttgactataatgatccaatcttccaagattcgcaatacccaaacactgcttgtaactgcccgttctcactcaatgactttgatgaagacatatgtgagggactgtctatatctccacatgtcaacaacaaacatactgcatcaacatgtggcaacaagagagcaagtccttcatcagcaaggcaagaagacaataataacacagattagtatatgaatctcagtccctcacatgaacccattaacaaaaaatggtaaaaactcctgaaccctgcaaagatacccatttgtgcttatgtcatgtttgttttatgtcaataacaaggtggacatgtgactcctgaaaaattcagtccattgttttgtgtgccaagacttgtgactactcacaagagcaatatacaactaaagacaaggaatcattcaaacgacagagatttctctggccatctaaa

SEQ ID NO: 82628 - DNA, 921 bp, Cannabis sativa
gaataaggttgtagctttgcatgccgatccacatggtttcatccatgaacctcatttcctcaatgacaaggagagttgggagctatttcagaataagtacccttctattggaacagatccatcaagtaatatactattcttcactctctttaactcaatcatcataatattcatacatgctatgttgctagtaagttgaacagagacatgtttagctttaccagagttgataggatattgttgctaattattttaatacaattatactggcattagggagataggatgtaactcgcagagctcaatttaattaaactttatgcatatgtttgacatgatgaaaatccttcatacttgaaaattaaatcgtaattctttttgcccattttcaatgaacaaattcagattcaaatgacgatgaaataaggaagaaagaattagcggtagagatgcttaaaaagtgctctggtctgccattagccatcattgtgctcgctgggcttctattgaagaaacacaccatacatgactgggagttgatgaaagcaaatgtaattctctgcataggtcaaggtgatcaacaacatgatgttgactcaaaataccgtagtgttttcggggtgttaggtttgagttacagcgagttaccacgtcacttgaagccttgttttttgtacttggctggttacgctgaagatgttcccataagagcaaaagagttatgtcatatactcatagcagaaggttttatatcgcgaagaagaggttctgtggaaactttggaggatgtggcatatgattggttaaatgagttggcggagaggagcatgattcaggtaaaacaaatgagtttaaaaggaaggatatccattcatgatctcatgagagaattgtgcttgtctaaggctcaagaagaaaact

SEQ ID NO: 82629 - DNA, 859 bp, Cannabis sativa
gagtgagctcatttgaaaaaactataattactcctacaataatattttaactattttagctagaatacaagagaaggaatttcttaaaaattgttgtacttgtagtattggacatcttaaattagcttcaagcatttcactttgtattatttaaagtagtagtgaggataagataataatgaatatgggaagcttctaagaaattgtgttttggtgaggaagaagaagaatctttataattactagctagcggtaatagtagtacaagtaagaaattacaggaccatacgtacataaattacaggaccatacgtacataacatattggagttagattatttattgcgtccttattgggaaacagctacgtatacctatctatatatatcttaataataataatttgtgtaatttattgattggttggttgtgttgcattttgcatatatatgaccctcttaggaaggttcccaaaggcaacaaaggatatgaaagtgactaggtttagaatcacactactctttaatttgtagtgttataatgttaaaaagatgtagagttataagatttttattatgttcatgtggacgtatttgaatttcgaaaggactgggccggtgtatttgtattgtattctacaagaaccaatagttttattttagcactactagtactagtgctactggaccattttcttttcttttgagtaggtttagaaaaggccatgccaatgtgattgagttacgtaaatgatttgaaaattgtaatctagatctatgtagctactttgttatattttttagtatttaggtgaattaatcaattaatagaatctatagcgtttggttgagaggaatga

SEQ ID NO: 82630 - DNA, 1212 bp, Cannabis sativa
tataatttatagaaactaattataaattaagcacaaactaatatctagttgtttatttatttatttatttattacgttactaatgatagtaacaactattttctggtataatcatttaagaatatgaaaaatagaaggtataaatgtaaagaaaaataatatacgttataattataattatttataaaaatatgtatctagatgtaatttttccaaaataaaacccataaaagtgaaaacaaaacctaaatcccataccacaagtgctttatttaaaaaggaaatattaaaaaaaaaaaaaaaacatctcatgtatagtgtaatttctactttttttatttgggttgttgcagtgctagaattagcatatatcaatagagggccaagtataataatttgtgtttcgggtaaagagtattttggtgaacttcctatctattttaacattcaagagaaatttttagtctattttatttcattatcatgtatattgtagttatttaaggtcacatgtaaacttttaaaatttttgaatagtttactggcaaacataaagttccaatattttgttcgtatatgcatggtaagcagttgtttgaactttatcatttttagtacgataaaagatttatattttttaaaaaaatttataggtagccctaaatgattacaacttatatgaccattaaacaaataagactaaaaaactctcttgaatgtaaaaatagataggggtgaaacatccatttaagaaagtattatatttccccccttaaatttacatgaaaattttaaaaagtaacttttattacaattttaccctcacactcatgggttaacttttgtacctcctttaatatttaatttactttttttttttttgaaacaaatatttaatttactaaaatactatttgcacacacataaacattctacaatgatattattatactacaatgacactctagctatatttccctatcttttatatacatgttctccatattatttttaatttttattttgattttttatctttatttttcttttcaatcatttctccacgatcaaagtcaattttctctttaaaaaaattgttaccccacaatctccaactgccattgaagctccaacccacaatttttatttatgtttcttttcttctaccaatatctatataaatggttgactcgctcctcttcttatccatct

SEQ ID NO: 82631 - DNA, 742 bp, Cannabis sativa
aaattaataaataaataaaataaagtttatggggcgggactaaagctgtacatacagacggtctagcccgtccccggcctatttttataaaagcccatttttttatgtgagcccagcccgatccattttataaaataagttgggccgaatgtggctcatattttcaaaataaacacagctcatcccataagcaacaagaggaattagaggaaattagactatacttcttttatattgtcttcttttatttttacccttttttttaaactttatcatttttacctacatttctaaatactctaccaattttacccatgtcttcaaatactctccattcccctgtaattcgaatttggctaactctctctcaaacctatctccactgttccaaaaaacaatgctagtaccatcgagatcttcaaagtttagcgcttatcgtctagggcttcaaggattcgtaactaccatttcagccatttgattattgtaccgtctacggtttcaggttattgttttaagtggggtattatttttattatggttctcactgattagtgtgttttgattgtaataaaatttggaggatttgtaatgtgttgattttgaaccagagaaagtttgtttagcctttgtggagcgaggtaattattttacaattcatgtgtttgatgaaagtcctcaattataaaaaccttccatttgttttatttttaattttcatctcattgtttgtgactgtgat

SEQ ID NO: 82632 - DNA, 1254 bp, Cannabis sativa
  modified_base (26)..(30): a, c, t, g, unknown or other
tggggttttaaaaaaaaaaaaaaaannnnnaaaaaaaaaaaaaaaacttatttgcattatttttatttacattttcacaaacttaaccgcactcttcgactctattatttaattttgaaatatatgcctattaataaaaataataacaaaaatattttattttataattttatctttattttaattattaaatatcaactctgaaacaagtaacaaattattgaatggttgcaacaaaattataagataataaagcacttttgttaccactttttattagagtaattcgtgacataaatatctaagttataattttgaaacttatgtagtgttaagtaaattgtcacgtggctaattacctatttatttgcaaatagagttattcttacttatttatttgcaactagagttaacttaagtatttatacacaaattagttttttttaatataatcgtatgtgtaacaataacaaatattaaagagtttcgccgcaaacatctctttaatttttatttggtcaaatattgtttgaatgacacgtgtgacagccacacagttttgtattgtagaaaggacgtttaagtggctagctagtggtgtttaatattttttagacgtgttattttgtaattaaatctcatatttaattgcagcaataataatatattaacactttaaaaagtattaagtactattgataccttttaatatttttttggactaaagctatgtaccaaacaattaacataaattattttaagatcctaaattataaccatttttcttcctcgatgatagattataaattaacataaattattttcagatcctaaattacatgttaactactatatctatgatagcatgtgtatatagatatactatagaacataatttaaaattttgaaatatatatctttttttgggaatttgaacttggaatgcttactaccacattttgaaaaacattagaaaaaatatgaaactaaacaaaatatcgaattattgattacaaaaaaacttaatctgaataaatatttaatttatttataaaatttaataataaaaaactttttttctattacacaaacttccacaatatttatttaatgtagcttctacatatttccacttcttctcttatgtatatagaattaaaacaaaaaacattcaattgaaacatcgatcgaaatatttagaaaaataaacctatccaagtaaaaaaatctcatatatataaatgttctaacttg

SEQ ID NO: 82633 - DNA, 753 bp, Cannabis sativa
  modified_base (527)..(541): a, c, t, g, unknown or other
taattctccaaacctacttatctttttaattattattattaaattaagttacacaggattaatagaaaccatatagccaattttgatcacttcaagtatatatctattatttatatatacattaattgaatcatcacttggttcatcgtatatatagtaaacattgaaattgggttattgggttatatacagcaaagagtatagaaggaagcgtgtatagcaacaagcagcaggccaaagaatccgagttcatctcggtacgtacgtatataaattagaacaattattaattaatttaaatattagagtattttgtaactaaactcttttctacatacgttttcatttgttaacagttaatttttgttttggcaataccattttattaactttatttttatttgttacgttttcactattacatgataacagctgaaatggttattgtatgtacataatattaattatttaaatattatagaaattttttttttttagagagattataaaaattattttaaataatnnnnnnnnnnnnnnnaaaaaaaaaattaaaatttaatatgggatattgccaaaaaaaaaaaaattaattaaaatagatcagaaggttaattgtatatatacaaatttatcatacaagaaagtttcgccataaattatctgataattatttaatactttctttatccaagggctagctagctcttaattagctttctccctctcctctatttgcatttttagaaacaa

SEQ ID NO: 82634 - DNA, 1133 bp, Cannabis sativa
  modified_base (229)..(231): a, c, t, g, unknown or other
ttataaatgtacttcttcttcttcctcttttttaaggaatataaaataaagagtatgtagtataaatatttaagtttatcttttaattgtaaataaatacttgagtttaatttttttgacggtgatatgaacttttgtaggtacctgggtgttaaacattaagtaaattaattaagtaaattaccatgtgttaatttttaattagtctaagtcattaaatttttatttnnnttttaaaaaaattaatttaaatatattaataaaaaataataagtgaataatgactcaacatttaacagttatgtacctatggaactcaacttagctatttatgtacaattaggagttaaacttagatatttacgccgcaaattactctaaaataaacttattatttatttagtttgcgtttgataacacttttccaattaattttttgttttttaattaaaaaagtaaaaaatattttccaaaaacatattctataaaactgtttttattttttaattttttaattaaaaatcaaaattttaaaaatattgaaaacaaaaaaaatcactttcaaaatattttaaaacaattttttttttcttaattattactatcgactccaaccctaacttggaccttgaaacccgaactataacctcgatcccaattcactcaaactaaaattaaaaaataaaaattataaaacatactgttgttttctgtttttaaaattagaaaacaaaagtatttataaaacatatttttaaaaaaatttgacaagatgaaagaggtgaagtaaacgacacaaaaattaacaaagaaatattatttgattaagactatttttttataacagcttcaaattttaaatacattataaataaccagaccacttaaatataatagtgatcttccaagaaaacaaacctgaccaaaatagacaacactattaacaagtctaggataatatttaaaagaaatatccaaataatcttttataatctatctatatatctatataattccattgttaaggtaggtgacgtggcagcaccaataatataaccttctttgtctattctttgatctctcattttttttttttaatttttaaatttttcataatattttatatatttaat

SEQ ID NO: 82635 - DNA, 772 bp, Cannabis sativa
tctcgcaaggtatatatataatttattaaagagtgatttgcggttaaatcttccgaactctcaattcacttgcaattaatccttgaacctcaaatttcggtagaaaaaccctttaaagtattattatgttagcatttttaaggtattgtctacaaaactccgttatacccttattttacctacgcaacaatgatcactcaaacattggccaatgtagttatatttaccaaaactcaaaaacttattaatcattttcaaattaaataaaattaataaattaatataacatatacaaaaatcattacaaaaaaacatttttatcttcttataacccgccaccaacaccaccacccaccaccaccaccaccaccaccatatcccccaatctgttttccatattcaaattacaccagaaaaaaattaaaacaaaaatcacaataaatgttatgcttttatatttaccagtatgtcatttttagtattttattattttattttagttaacgtgctcatttgcatattaaatgacttgtataattattattattattttattattaaattttatatttatttttgtattattattattttatattcttaataaattatttagtgaacattaaatgacatattaaattttgcatcaagatttacaattatgcattaaagcatagtaaaagttgatttaaaactactttttgtgctaaatataactcaaattttacatatattattggagatggtctaaggactattgagataggttggg

SEQ ID NO: 82636 - DNA, 1815 bp, Cannabis sativa
ttaaagtgggctcttttctcactatgttcttcccaagcttcatgaaacatgatagcttcatcaatcaggaagaagtaaacttgtttgcgagaggggaaccatatagttgcacgtttcacggttggactcacatgatgtcttcttacctttgaaactatatgatttaggttgtttctttctaccttttaactgatttgcttgtttgtggcgttttaattcttccagatacacttgagtccaagatgctcagcgacctcatgaacaccatcaagaaagtaaatgttacggcagacaacaagggaaagtagaagaaatcccgagcccagaaatccaaacaagtaccgaatcctttggcaccccactcaaaattaaagaccctcctaggactcaaatgagaacattaatatttctctcatttgtgaaaattcattgtttgtgttcactgaagaagttcctaagcaatcaggtgagaatgcaaccaatacagtaaaagaaaaagtttgagcgttggcaagctgctaacaataaagctcattactttatgttgtttagcatggttgataccttaaagacaaggtttgccaacactctcacggctacggagatcatggaccagttaacataattttttgggaaggcctcagatcaagctcgttttgaagcgaccaagaacttcatcaatgcatggatgaaacctcatcaaaacatgcgtgatcacctactcttgatggctagttatttctaggaagctgaaaatcatggagctattattgataaagaaactcaagtaagtttgatcttaaatagtttgactctagtttttctgccatttacttcaaaatacatcatgaacaagttgacttttgattttcacaagttgatcaacaacctttaggcatttgaaaattttattggaggaccgcaaaaaggaggaaacaaagctccaagttctagtaatgctacagctggtatggaaaagtctaagataaacatggtctctacttcaaaacccacaaagaagaagaaatgaaataatagcaagaagcctcttaaatctgttaacacagctaatacgggtaagaaggctactaatccaaaggcaaaggagcaaatgaaaggcttttattgcaacaataagggcctctaaaaacctcagtgtcctaagtttttggtaaagaaataaaatatttctaattttgttgtgaattcatgtattttagaaaactattatccctttgggttattaattctaaatctactaaccatgtttatgctcttcttatttcagctccaactgcttagacttggattgttatcctagtgagttgagacagatagttggacaaaagggagatgacactagtgattaacctactatgatatttcaagatagaaactttaaaataaaacaaagaaaagttaatctaaccattcatatggataataataacttatcggaattatgaggataagataggaatttgcaatatctattcaaaagactcgagcacaattcctagtccttataaaatattttatggtatctctggtgattacttaatcttaatcaagtattttaaattaatgttaatactagaatgctatgttgatggcttggtctagaagaaacttaatgtttctacactaagataaaatatcacaacaagatgcccctaagcaccaatagtaagaggttaaatgtacacttgtgtatgcataaaacctgacttctactattgagtgggagccatcaaagatgatatctgttaattccatttttggcatatttacttgacaaaaatattttattattta

SEQ ID NO: 82637 - DNA, 855 bp, Cannabis sativa
ggtgaatggaaggggtataatggggatcgaaactgaaaaaaaaggtataaacgagagaatttaaaataaaaggtaaaaatgagaaaggctaacttaaaaaaggcatatgatatactttcccctaatttatttttatggtaaatatattggcgaaaaatggtattggaggcccatggcccaaggagtatttccagtctacttcaatacctctacaaatttaataaagagataattagatgaaagactatttttttatatatttatatgttcagttttttctatatatatttaacagttatttttattaaaataataaaaaattaaaaaaaataacactcaaataaaatcaaaatgataacaaatgataacatacaaataataaaaaattaataagaatacagcatgaaaatacatcaaaaaaactgtattttctatttataaaaaacataaaaatatttaaattctgtacaaacgtatttttgtatttttttttattattcttgtatatttgtggaataatccttttaataaaattgttggagagtgagtacactggagtcaatcattctcaaggatgaatgacattctatgcattacacttaaagcatcttcaaggagcacattaaatatggtgttacactatcactaaattttgtgtcaaaatgtattatcactccaaccacaacaccaaaaattacactaaaaaatattccttatcattatatatttttttttaataaaattaaaaattaatatcatattaattaattaattcaaatcatcacaatgtacccctctaaataaaaaagtgatgcgtgcaacacgcctctaaataaaaaagtgatgcgtgcaaca

SEQ ID NO: 82638 - DNA, 1276 bp, Cannabis sativa
attataaatattattaaaataattaaatattaattatagtagagaatataattgaagcaataataataaaaataactctttatattaattttttaagttattttagttaaaagaaaataaacaatagcattaaagatgctcaaagtaattgaaccacagtttacatctcataatgccttcgatttcttttttcttttctcagaaagtcgtcacgatgatgcttggtaaccaatccatatattaaaaaaaatgaaaaataaaaatgaaacacgaaagataagattgataaataaatgaaaatgtgtgccaaaatattcatctttcaagtcaaagtacgtacgtaaataaatattagtggtatacaaaagaatgtcaaagacaatttttataccatttccatctacattttttttttattattattatataaattttatctttctttttgtgaagaaaaaaagtattttcgatattgtatattattaagatgataattataaatataatcaaatcttatcattttcactttgtggctcatgttactattcattcgagctcaaaataaagatttttttttttttttttaatttgaatgtactgaagatactatatatgtgcaatctcttacatattcatgaattacaaagttaattaatttctatattcaaagctttcacttttcatagtaatatataacttttctaatttatatatagcgttttttcggtaagattgtcttacttggttttattgaagtgttttttaaactttttaaagtataactaaaataataagaataaattaaatattatacaaaagtatcactatccttacaaagaaaaaaaaagcattagtatttaagttatcattagaaacttctataacgttagaactatatataaatataatggcatatatacgcagtcatattatatgagaataaataatgaaaataataaataaagataagagtaagaatgataaaattaatatatatttatttttataaaaagaaggatgagattattgtggttggtgtgagctgagtgatgcttggcttctaccaccaacctctccactactcgtttttctttggtggtagatagatatggagatcagagtatatgagcactcaaaaaacattataataaagttatatatatatatttaagttgcaatcaatatccaatatcaccctccttcacccacccaagacgtatatttttctactttttaaattttgctgaaataccttttttctgataataattagata

SEQ ID NO: 82639 - DNA, 855 bp, Cannabis sativa
acctctacatacactaccttagtgttagtgtatgtcgatgacatacttgtcactggcagcaacaataaagcaattcatggtctagttattgctcttaacagtcggttctctctcaaagatctaggggatttacactactttttgggcattgaagtgcaatctacaccttctggactacacctctcccaagcaaaatacatttgggatcttctctttaaggctcaaatgcatgatgcaaaaccatcccttacaccaatggttagcagtctcagattatcagcatatggtagtgaaccagctcctgatgctcaactatatcggtctattgttggtgctcttcaatacctcctcatcacaagacctggaatttctttcagtgtcaacaaagtttgtcagttcatgaaggatcccaattaagccactggctagccgtgaagaggattttacgatatctcagtggtaccatcaatcatggtttgcatctcaaaaagtcctctttacaagaagttgttgcgttttgtgatgccgattgggcaactgatattgatgatcgtcgttcaacttctggtttcactatcttttatggagataatcttgttgcttggcaatgcaaaaagcaacacaccatatcacgatcgagcaccgaagctgagtttagaagtcttgccagtacagtcgctgaactcacttggattcattcgttatttactgaactgcgaatcaagactttacatcctcctgtggtatggtgtgataatctcagcaccattcttctcacagcaaacccggttcttcatgcatgaaccaagcacattgagcttgatctttacattgtgcgtgagaagatccttcaac

SEQ ID NO: 82640 - DNA, 1389 bp, Cannabis sativa
  modified_base (47)..(49): a, c, t, g, unknown or other
tgatctttattaataagtaaacctgattatatgaaatgagttttatnnngggcataaaacccaacatatccatacgatgctcttgagagagtacaagtgactcgatttcagcgacaatatatggttaattttgtaagttaacagatattatgaaggtatcataatcagaaggcaggcctttaaagatcgcagaaatgtgttctttaacagtgacatgatgaccaacaattctagtcgattaacgactgtcttgattttcaacaagtaatcattaacagaaagcgatcctttcttgatcgtcgacaattgattggtaaattgatcaattttagcagaagtctgtgtcgcaaaatatacctgaagtgttttccaaacttgtgtagaggtatcgtttccaacaactcgagtcaagactccttccgacatcgacgagagaagccatgagtataggagctgatcttgctgctcccattgcaagtacagcggattgatacgtttagcatgctgatcagtctcagtaaggaactttggaggaggatcgacatcatcagagatataatcgattaattgatggccacgaatcattgagaggacttgaggcctccaaagtaagaaattgtggttgtcgagtttaacagagagtttgtgggagaaaaccacaagttgaaacaaagtctgagccgcagaagcaccggtcatggccggagaagatgaagtagtcgtcatatccacaaatatagagagaagcaacaaagctgagatcgaactatgacagatacgaagatatagacaatgaacgcggaagcggaaaaaaaagactactctgataccatgttaggcagagagaaagaattgaatgaggagtataaactctctgtccattaatgtagctcaagctcagtatatctacatcaagagaaagggaaagaggtacaaacagaatgcaactgaaagtagttgtaagtaacagaatatagttacagtaaaataacagccaactgacacacctaactagctacttcactaacatacccaagtccgtatttttgtaaatataaaaagttcaaaccataaaaaaaaattctccatgttaatgtattcttataatattttttttcaacattttcagtctattatgtcaaagtttctaaagaaaagctaaattctttctactcttggtcgtgtccacatttgattgataaaagaaagcacagaaagcaactaattaaagaataattagtatttttatctcttaaactttcgacactacctgattttgtttcttaaaatatacgctttgttaaaaattctccctaaaatataatcgttgcataattataccccttctgttaggttctgtttcttttatcgttaaaaattgacatttta

SEQ ID NO: 82641 - DNA, 842 bp, Cannabis sativa
tctgaaatctctagaagttaattaatctcaaaagatctataatggcttggcatgaatgaatcctgtttttgtacttaaaacataacacgctgcatctatattagctttgttgattccacttataatttggtactaataatttttgaatggtatggcaaaattttacaatatgtagctgcaagcttgcctatacttttcattgatggagctaagtttcatcaattgaatttctggtatgctttattcccgggtgctgctggctgcatagttctctgtttcattgtaagttttcatatagttgatttacttcaaatacttgtaaaaaatagaatagagaatcgatggagacaagaattttctactcgtaattttgcataaattatgcaattgttagcacgacaatatttctcaggtaatgttgcatattacttacagtgtgcatatataaatatccaaatcctatatataatagtgacataacaataccgtaagagattcaactttcatgagaataatgtgagttagggcctatctaaattataaagtagaattttgttaatatcgtttgtcccttcaaaagtcattgagaataatgagctgcctaatacttgtttgtgagtacaaactacatataaaatcatgttaggagagaaaacaatatgtccttcacaaaattagtattttaatccatgatttaatttaatacaccttaacataatagtgccaaggccgtgttaaagaaagaaaaatcaaacaaaaatgaaatacttatcttagtcttaaacccaagtgacttctttttaaacttcctatcctcctactattttttgttgaaaatattt

SEQ ID NO: 82642 - DNA, 1107 bp, Cannabis sativa
cggcccgtggctttctaccttatcctcataccagtgcgtgtttcctgggccgaattcaattgcctcccgtcgtttacctgcgtccttgaccatgagaaagaatggtggagatttattattgctgccggcatccatggaagacggagctgttgaacagaggggctcccctgcttctcaatctcttcgttcgagacggccagcgatgtggacttctcacggtgctgctggcctcgggaagtcaacgcgtgcggtgtaattccctaaaaatcgcatttctggtggtgagagatctgttgccatttctggctttggtggtgaggcagggactctgcaagaaggaaagaaaattgaagacttacctgttttggagatgaacaatatggaccaaaggattttgaatgtgatgaccgttggtgaggataaaaggaatgatgggcttatttttgatgggccgcttgttgtggatgttgggctggccgatcatcaaaagagtaaagggaagagcccattgtaccagaatttaaacttgaataataatgttagtgggcctccttcttcttctaagaaaaacatgcagtgtgggcccgagttagtggagacttttggaattgataataatacaaaaagtttggaggggctgtctaatttggacatgggctctaatgatattgggtcgaaccctccctctcttaatgacattgggctcgtgggggttagctcaaatttgcctagagaaaccaatggacccgaggagcatgctaatgaagccaaagccttggcccaatttttcaaagctcaagaaagcttattgcatgacctcaaacattttgggaatcttgatttgtatgagattcggaatataggaggagatattggggtcccggcttcatccaaagttaatgagagaacgacacctttcaagaaacaaaaatttgaagcgtcggcctctctttggtctaggccccacaaagttccgctcaagtatccagatgtcgtccgggattttccctgggatactaggcaaaaagaaaatgacttggatttggtgattgatgacccttctgaggacaactctagttccctgagttgctctggtattttgaagaa

SEQ ID NO: 82643 - DNA, 1330 bp, Cannabis sativa
cccattgtttaaaatgatcaaaattcatttccgattaccattccgtaattgaaacaactaataacaatgatcatagtctagtagctactgcaaaaatcttaccggcaagaacaaaggtacagtagcttggcttctgctctgggcagcttcagaaactagcctctctttttctttctcttaggcactaggtagtagtagcagaaaaaagtctatattttttggctccaaaaatatggtattttactcaaaaacaaaaatcagtttttggattgttatgtttaatcgtttgttgaagctttaagaactagtccctctctcccactatttttttatttcttcaaaataatattaataatgtgtacactttgaaaaatattatacatattttactgggaaaatgaaccggggaatctctaaactcagactcagctagtctcatctcgcaaacaatttcatattatttatttattaactttttagagtttgttctctctcgatcccatttgaaattcgaaaaatacaagttgaattttaaataccaaaaactattataaattaattagaaatgaaaataattgaggagggagaaatgtggaatttcgatttaattaatgttaatttgtagttagtaaattaaaaattgtaaagtccgcacgcgaacgagtttctgtagacttgttgtgtgtgtcagaaagagagtcacgcatcccaaacaggaaaggacactctaaaatgttgggttgggtgacatgacaattggcaatgtacgatctctttccagattcaatctcagccgttcaaagttatgatcagtgtacaacaaccctaactcctaaaacgacagcgctctgtacaacggatccgaaggtcgggttctcacttcccacactgatgtcgtatgtgtaatttttttttttcacaattatattcttcaaataaaaaatttaagccatttcaaaaaaaaaaaattaagaaatttatgtaatagacctttaagagttgttttggtagattttttatatgttttggcatcagtaagagttttttagactaattttttttttttatgatcttatatatcgtaattatttatttataaccacttgtaaatttttcaaaaaaatttgaaataatttaccgtgctgaaaaataaaatttaaacagttactatgcgtataagaaaaacagtcgcgtgtgcaataataaatataaattttattttgggtattgtaaactattcagaattttctaaaatttactggtactcctaaataactataacgtatacgatcatgaaaaaaaattagactaaaatgctctcttgtatgcc

SEQ ID NO: 82644 - DNA, 892 bp, Cannabis sativa
aaaaaaaaaaaaactttttctttggattcgatttgccctttggtacttctccatttcttacacttttcctcctattgtcttttattttattttttattttttgctttttgccatggcgatcgtcatcatcactataattattattatcttaatttttttatatttcgatttagagtcctcttattgctttgctggtgtttgtttttgtcataaaataaattgtccattagcatcctcaatttttctcgactaaaaagaatttggaatatatggggttatgaaaatgaaatgaaatgagattgattaagaatatgaaagctgtaattgagatggatttggggaccatttattaactatcttcattggttgcatatgaaatgggcccaaataaaaattaaaaataaaaaacgggagagcccaattgttatttggatacgagtgcttgtgtaattgtggggttttgatttgatctatgatacaaactgggcccaaaggtttagcttctaacataaatgagggcccattatgacaaattctttaggtgcaggtgccaagtggtggctctcttacaccattgacgtgtaaaccaagcgttcaagtcttcctttgtaaagaaaagttattttttatatatcttttaatatttaggggttctcacttacaattagtactaacacaataaaatggatatccactcaataacctaattgtctgattataggtatataaagttaaaatatgatgttgtaaaacaaaacaatttatataaaactaaattactctaaaaatttaaaaaaaaaaaacaactttaaatcacttatgacactcaatgtgcatgattaatttaagcaaacttacaaaataaaagataaaataaaaaagtgattaagag

SEQ ID NO: 82645 - DNA, 804 bp, Cannabis sativa
attatgattaaataaataaataaacatggttatatcctttttttttttgttagaaatatcagatactttaagaatttcatatgtatagacaaacaaagtactatacacatttttacaatattatatatatttactaaagagaaaacaatgttatttttatgttttatcgcagtgttatattatgttttagcaatgtacaaatattttttttttaaaaaaaataacgatctaaaaaagagtgtaaaaaaatatttaaaaagtaaattattattattttgggatatatatttctaaaataaacccttatatattatacgtaggtggcaatgattattaattataaattatttcagtttggttagtctatttttgttcattatgctcaataaactaacgtatttacatttacctttaaaaaaattataaatcatttctaattaaattaaacatatgctttaagtcaattgggtctccaattaatggtaaggtcttgcaaatactaaaatggtgataagaaaacatcaatgaataataattatgcaatattatttgcaaagagataaattgatgatttttttttttttgaaaacagataaattgattattgatgtcattataatagttatttaaaagtaataggcctaatttaatatttttaagttattttgcaatgataacattcttttgataaattattcatatatatctatataatgtataaatagtaggggtgttcattggatcacatccaatgtttttaggcctatccagatccgatccaatcatatattggatgttagattt

SEQ ID NO: 82646 - DNA, 1331 bp, Cannabis sativa
  modified_base (42)..(42): a, c, t, g, unknown or other
aaaaaaaaaagaaatattatttaattttttatttataatttntttaattttaaattaattttattgtaatttttaatttttttaaataattttttacgtggacccatacaattatgtcacgtgtacactgtgttcagtccaacatgacacttaacacctaaaatggacggaaagggtaaattgctaacagaatacgagtattgggggttttaccgcccaaatttggattttgggggttaagtgaaactaaaatgaaagttttggggattttgccgccatttacccttaactttttactttttatgatataattatttataaattagcattttcgacatgacaaaatgcatcaaggtttgagttttgttagtctttaagaaaaatataattttttaggtccttattaaaaaataggtgatatttttaaaaatctctaaaaaaaatgatcgtgtactttgaagatgattttcttttttgatcttttaatttttggtgggccctagacgagcttgcacctaaggctgtttgcagtgcgggtggtgtagtttttgactattttttaaaattcgtacatgcagtttttccaatctctaaaactgcacccgcactgggaaactaaaaagctgtagagactgcaccgtaaaaaatggtgcggtgcggttttcagggtttatgcggtttagactatcactgaataattaaactatcacaaatacaataaaacttgagctacacttgtcaaaaataccataagggttgagaatatatattaaaaaaaaagtttcaagtttcaacaatacaataattagtggattttggactggacattcacatatggacctaaataaatatcaaaatttgtatttttataatatgcagtgcggtgcagttcagtattaacaattcaaaactgcaaaccgcaccgcgcagtttaagaaaaattcaaatcgcgctgtaccgcaaataatttcaaataccatttttttgcggtgcggtcggtttgagcggtttgatgaacaaccttacttgcttctgatcgacattttcaaaatactataaataatatatatatatatatatacttcataaaaagaagagtaaataccatttttgaccttgtgttttacaaaagttacaaattagaccatctatttacagattagacctgcacccaatttttgattattttttttaaaataacttatacttaattgaaacaatttctaacacaacaaatgcataaaatttaggaataattacataaggcaccattttttgtaaaataattacatttttacattcaaagaatgtttttttttttacatttttac

SEQ ID NO: 82647 - DNA, 1498 bp, Cannabis sativa
aactgagtgggtcaacttaaagacccaaactcttttgggcttttcctgggtttagtgggcctattgggcttatagttttttttttttttgatgaagggcttatagttagttggtctcaattttaacatattaattatatgttttaaaaaagaaataatatattaaaatttagtaattcactactaaataccttatgttttaatttttatacacttaatcaccttatttttattttggcaaaactcttttaagtttactttatttataaatttaaggtattagttaaatattatgtcaaatatcaattggacgaccactgtgtacgcccgtgtatacgtgaaactaaaacttcgaagtcaatacagtaataatctagttgctatttaacgacgatatctagctggtaactcaaattcgcaaaaaaaaaagtaaatataagggggttttgctaccaaaaaataaataagggggttaagtgtataaaaacaaacataagagagttttgccgcaaataacaccttaaaatttagaaaatttacataataaactaaaaatttagaaagaaaaaaaatacaaaaatatgtcaatacgaaaaaaattcatttttacgctttgaaatttactatttatgaaaaatactttttcagtaaaaataataaatcattttcttaacgtttatttatagttgtcataatgttattttttttaattattttatagtttattatagttgattttataattattgtgaggttaatttttcattgttttttagttattttcttattttttgttgagaaaaacgtatttttataattttaaaactttacaaatatattgttgtacgtaaaattatgaataaaacataaaaatagattcttttgaaaattttcctaaaattatttgttaaaaaaaattatttatataaaccttaaatattctcatattcttttttaataatattattccaaatttaatgaattaaatgatttttttcatcatctaaaatgattattcttttcaaatagtagagaaaatgttattccaacataatatatattaataatttgtattaaaacttaaattaaattaaatttacttttattcttatttttattacaaccaacataatttttaagttatccaaaaaaaaatagcaattgtactcaaaaaaaaaaaaatagcaattaatttatccaattgaaagtgacggttttatgatttatttttcccccacatatgattcacctacaaaaggtatttattcccattaaagcatttttgaagctttaatttggtcgctgtcatcaaaggatattatatattaattgcaaaaccagcttctgaaattacatagaaaaatataaagcatcaataatatattttaagatgcttgacctcacaattagtttttaatcagcaaaataaaactaaagaatattgccaactatggcactaatttttgtctattcggcctaattgacttgcaacacaatgg

SEQ ID NO: 82648 - DNA, 969 bp, Cannabis sativa
caccacacaaattaacacatataaatatatacacatacaaaaacgttttacaattatatatttatttataatcaagcaaaaaaaaaatatatgtacatttatcaatgagatttgtcgtgttttgcacgtacttaaatacatatcttgataattgccatagacctttcatatgtggttgtctccattatgtgtatactaaaatcatataaggactaaaatgtattacacacaaaaaatttgggttcctcataaattgcataattgattattaatttatcaccatatgtatatttatattttatattacaaagtaaaccatttcccttttttctatgactatccatgtacaaaatttcaagtcaatgaaataactaaccacacattgtaatgatccaatttctgattgtaagtgagatttctgatcaattatataatttatgaccatagggagcacatgatatacataaattattaaaaaaaaacaatacagtactataaaggtttttttttttttaagaaaaaaatgtagtaattaaagtggtccgataggttgggtgtccattgtccgtacttattagttagcttatagctagctatttttatttcatttcatatccactcccacatgattgtatttgaagttattttctttattacattatcacccttacacaagacatcattattaatataattgattttgtaattgataactgatataaaatcatatcaattattataatataagatatcatatatatataaaagatttattaatactcttttttagaagagaatagtttaaaggttccaatattcttttttttttttttttgaaaattagcgtagtttaaaggttccaatattcaatataacatctaaaatatatatatatataatagtgttggaaagtttttacaaaaaaaaaaatattaaatttagagcaaaagtttataattttaactgtta

SEQ ID NO: 82649 - DNA, 709 bp, Cannabis sativa
ttttgtcatcacaaaacttctacaatacgaacaagctacgccttctcaagtatgcatatctattaaactactattattttttttgttcattttatttaataaaatatttttacattaataatataagatgaaagtcgtcataggcatagtctagtggttccacatttctcctcgtatagaggaggtctaaagttcgaatcctccccctccaaaatcaagaaaacaataaataaataaaataagatgggtgtttaaaaaatattaaattaataatgcaagattatggaatacccatctttttgtgttaagtatctattaaaattgctacacatttctacaagatttaatttagtctagaatttgcttaatttagtttaaaatcaacaacagattaacaagagtgtaacattgaaagatagtattttttgtaaataaaattataaaaatcgtaaaaatgtttaaaattccgtacaactatatttttgtgatttttttttttgtttttttatatatatttgtgaaataatccctattttttttttactattttaaaaatacacaatttttttttctattttaaaaatacacatttttttttttaaaaaaaaagagttaattttttttttctatatgccactaaagattaagtccgaccttgtgtatgttatagccacaagagtttcttggcttccaaattgtgtaacaaaag

SEQ ID NO: 82650 - DNA, 1573 bp, Cannabis sativa
aaatgagaagaaaagagagagaataaaggagcttagttcacaggtaaagaggttaatggaagagaatagggctctaaaggcttgtttggcaacacaaaaccacttacaatctcatcatcatcagtcacattgttccaagtcctttttctttggaaagcttattggatgcactcgttaattatgatctcattttctgatgagatctatattcataaaacaattttagtattcatatgtaatggtggttggttttgttggcaataataaatggtgttaataatcactattcttattatgttttaataagatgctagcctaatagtaagtagtagttggactatattgatcttttatcacgtaaaatgataccgcattgaaagaaatttaaattgcaaacaagtcccataagtctaaaagttatcaaaattgatcaaacttttttttttcttttcaagtattaactaaatatttttctttttaacaattattatatttttttcaaatttataataatatacattttttgcatctaatttagaataataacgttactactattattgacacgccacatcagccaaatctaacatttttgacgttttgtaatattttttggtctttttttttcctgcatttttaaagtaacttttttgttactaatagtgttgataaaaaattaattagttacttctatataaaaagatttatttttatatcatatatatattttggttattctctaaaaatttattagtatgcttcttagtaactaattaattagttatttttaagttatattatggttggttataatttaaaatatatttaggtaaccttaaaatatgttttcaaaattaatgagttgcaatataatataacatgttactacttttatataccgattattttatatactgattattttatacacatttttattattttgaaaaccaattagttatcgtataatgtaaaataatttaattaataaaattttaaaataaatttttactatgatttaaaaaaaattataaaatagtaattaatcactatattagtaactaaatgattttttttttctggaaatagcgaaaaaaagtatatgcttcccacatcttgaaatattcacattgaaaagtagatcacaatgatattttttttagactcatctaaataacgacgtgatcagatattatttttaaaatttgagagaagagaaagaaataagaaagagatatagaaggagagaaagaaaagtgatttttgataattagatcaaaaacaagtcattttggataattttttaaatataaaaacataatatttattgtgatgtaaattttgcatcatactataatgtcatctaaatttgaatcactttttgttaagtgatatatttgcattataatttgatacactattagagtagacttttaacaaaatgaactgtattttatatttgtatcccggggtgttcgcggtgcgggtggtgcggtttttgattattttttcaaactaacccgcacatgcgattttttcaatttctcaaactgcacccgcaccgcgaaactaa

SEQ ID NO: 82651 - DNA, 708 bp, Cannabis sativa
gtatatcacggattacaatccgtgaaagtacaataacggacaaaatcatatatatttttttaatgaaaataccagtaattattaaactgaaaaatccgtgcactacctcaggagacagagaaccctcgtggatggttaaaaatattagtcaaactaaaagcaacatttgtaattcaatttatttttagttattgtgattaaaaagtaatttttagtaaaaaataaaatcactacaattttgtaatataacttaatatacataaaagtatttattataatatccagcatcaataagtttagccaaaaaatttacagcaacacgacacaaaaaattctcacttgaattcattcccttgcttttacaaaattccttgtatcaataaacttaaaaaattgtatattatttcataataataataatttaaaagaaattttcacaatgtggaaattaaattgaaaggacacgattttaaagaactagtaatgtagttttttctttagaaaaaagaaagaactagtcatatagttggaggaataaatatcctactttttatttattatatggttaaattttttactatatagtagtgactagtgagtctcaaggaaattattgcagacttagaatttttactttatggagactcactacaacatttttacttagtaccggcggaagtaatcccggcggagccaaaccgccggtat

SEQ ID NO: 82652 - DNA, 1155 bp, Cannabis sativa
ttttgaaatgaggacatttactaacatagccttatgatttagggtaatttgctatatttttttgaaatggagacataaactaatatactcttacgatttgaggccatttactataatttcccaataaagagtgtgattcttgctaggctgaccgaaaccattgattggagagagggttgactctctcattgaatgtcacattgttttgttaattgggttctttgtttttgggcttgaaattattgcaatttgttatttaaataataccaattattttgtggatgcataaaataatcaaattagaaaaataccatttttgtaattataaaaagctgcaaattttggtaaaatcccaacatataagaatacatttactatctactacttactctaatcggattacttatcttgaactactatactcattttatgcagataactctctccaaaataaaacatggagaatgataaggtttttcttgagagaaaaactacgttgaagagaaaagcaagaatgcttactgatttgtgcaattctaaggtgtgcttggtaatctatgatcccaaaggcaatctagatgtgtggcctgaggactccacggaagctcattctatcatcaataactactacaccaaattagagtctaagaagagaaagaataaggaagtgtgtctctctaatgtgttggagaaaaagttgagaaaacttgaagaaaaagttagttgtactattactactacttctatagggcttcatcagtacccttgaattgggatgaaaaattagctgttttatccaaaaattcgttgatggatatggcacaatgcataaaggctaagattaaagttttggatgagaagattgacatggttaaaggaaaagaccaagcaattttacaaaccctactatgaagattctgcttataattccatagactacttgctcaacacaaaaagccaagaatttccaatccccttcagtgcagctgctcacacttccaacaattttctgtgcagccaagtggaatttgacattccacaatctatcattggttttcagtaatatactatatattgtttttcagttttcattcatacaacaatttttaattttcagattttccagttaacattgtttgtgaaatttatattaaa

SEQ ID NO: 82653 - DNA, 1103 bp, Cannabis sativa
tttcttttattgatgggttgaattacaggcagtttctgttgggacttaagaagtatggtaaaggtgattggagaaacatatctaggaattttgtgaccacaaggactccaactcaagttgctagtcatgctcagaagtactttataaggcaagtgactggtggcaaagacaagaggagatcaagcattcatgacatcacaaccgttaatcttcctgaatcgaaatctccatcttcagagaatggaagatctcctccttcacctgatcactctgtgccagttatgcagccaaatttggctaagcaacaacagcagcagcagcaacagcaatatgactggaagccatcaaatgaaagcttgccaatggtgtttaatcagctaaattcgaatgcttatgggggacccttttgtgggatttcttcatacaaatctaagctacaggagcaaaatttgctaagtggaaatcttcgtggatcgcagttcggtgcttatagtagtagtacactgtatcagatgcaatctatgcaccatcaatgaaaaccaatgcttggatcaaagggctgatttttctcgagtttctaaagcgtttgagagatcccagaacgttattctatggaggttggaatctcaccatccatgccatttataatagtttttatgtgaatatatttgatgaggactctgaattagtcccttagcaattaggctctatgagaagttctgttactgttagttcatattctgatttgatattccaaaaatttctgaaccattgatttaagtaaaagcttgagcttttttcactctcttgatgttttctggttctgctttgttaaagtaagttaaagactaaagagtgacagcaaatgtttcagactgagtttgcccatgtagtgtataactattacaagttctggcaaaaactgctttagaaaaacaaaaagcctaaggtagtccaagaataatgatgataaataatttaggggtttcatcttgtgctgatttacttggttaaatagcagagttgtactgtacaataatgtatatatgttccttctcaactgttacttaaattgcatggtatcagttttgacatggccagca

SEQ ID NO: 82654 - DNA, 932 bp, Cannabis sativa
gtcaaggttgggatcgggatccaaaataacgattaagaaaaaaaattatttcaaaaaaattttgaaagtgatttttttttttaatttttaaaattttgattctcaattaaaaattaaaaagtaaaagcagtttgataaaacatgattttggaaattatttttacttttctaattttaaaaatgaaaaattgattaaaaaaatgttactaatttttaaaatttgataaatcttgtttagccattgtatatgatgatcataacacatcatgcaaagtttgaaattaaccaatactttaagcgaatttaattaaactcccaaatttaattttttttttttttgtcaagatgtgacacaaatcataactaatggaagtagtaaattaagaacatatgtatttattttttcttttttgagtaaatagaatttttgttccatttaactataattacatatattatataatttccaaaaaaaaaaaaaacatatattaaactctaaaatatattgctaaaatatggcttaattttgtattattcagaattaattttttttagagtttaataaatatgtcttttaatcatttaataaataattttttttaattttattcaattatgtgttgcaagtggtattgccacctaaggtataaaaataccatatatgcaattttttttgccacatgtgactaaagaggcaaatttttataaagaaaagggatattggggacaaactaatttatattttatattttttaacaattaactacttaaatcaatttttttggtgacacaaattgtcgttttatttgctattttaacttttgttcaaaagattatgttaagtgtcactgtggacatatcactgtgtacacaattgtacatatgacaaatttttagtgttcccaactagcaaggtgggataaataatctca

SEQ ID NO: 82655 - DNA, 1418 bp, Cannabis sativa
ttatatattggagcgtggttgcgtcaattttttttttttctgaagtgatgcaggaatagtaacttagttgattattatggggccagcgaaaaaataagtattcttttttgctgtaaagagcattagacctataaccagtactcgctcatgcattccttgccacaaaaccatgctgagattgtgatgatcgaaatcttttggcctgtttgtggctctttcttcttttatatatatatatatatatatatatatatctatttacttagagaatattcgcaattttttttgtaatgcatgcacattgcacctactacagaggagctttgtctgaagcaaattctactgactagttagttataaactaaaatggaacttaactatgtatgaaactaattaatgaactaatgtgaggtagtgtacgtagtccaatattacttactaatcttatctttgtagaaagaaagaatgtacttgcagttttgtaatagtgtcccacactggaaagagcataacattcctgtcaaagagtaactatatagttggtggaaattagacgttaatattcacgcagccatgtgttgagcacaaagcgaactattctttcgccttttactaaagaataccgtgtgctcgtcacttttaatggcatacacttatttttgaagggctctttctaatggaagaccctaaaaacttagttaaatatttattttgttaaagcttacgacatttgtcctagctcgataaacttaaagactttataggcagtgctatatgaagttgagtttcatatcatttggcttataaaagcttttaatatcaacaaaatcggcgacagaaaactattatctttgattttcatatctttcttttgctctgtgaaaaataaaacgttgagtggttcgtttttatttttaatctcaacataaaaaatctcatagaattatatatatcattgttcaaagctcatttgatactctggttgatactccattcctcggatttgtacagcagaaaaaagtgtttcatgaataattaattgtcaactcatctctgggagataagttttacaattctaaaaaatgttacattagagcttataacaataatcctgaaaaatttcaaatcgtatttggactgaaattttttcaggatggggtgttggaggctgtccagtaagaacgaggtatagtgctcagaaagaacgaactactcttttacaagactcttgttttccattatatatggttggaattgtattaaaattttggatgttggcagatgatctttcacctcataatcataaatataaataaaattcaaattaccctctaaaaaatatcaaatcaatctggctacaaatatattcatgcatgctatcatattcttatttggaatggaacaaactctaactttta

SEQ ID NO: 82656 - DNA, 837 bp, Cannabis sativa
agggcataaaacccaacaatttagccaaccgatgcggagtctgactaggagcgtagcttatgactgctacgtgtagaacgataataaatataaagagacacacatattttataaaggttcagccccttttatttacgtaatgacctactccccttttagttgtattcactattgagataataccaagcacttgctaggctctcttcagtattacaatgaagtttgcaagtgagaagtgtgaaaagagagaagacttagagcttatgagcaagattgcatgtattgtgcttaggactctggttgaggttctgaacatgaagaagagataccttttcacgtatgactaatgccctttatatagtattaggttttacaaagctgggcatagagatctccctgaaaaataggaaagttacaacatacatttgaaatacaaattaaatccctagagaataaggttgttatttgttgatggagagtccctatcttcgtgggcagattgaactgatctggagtcgtaggcatgttgaaggcaagatagaaagcttgtgagaaaaatataagtgctggtgtattcttgcacctttggtcggccagagttgttgaaggctaccaatgcatggaagttattgttgcgaccagaagtattgtggttgcgactaaaaaatggacagaatgggtattttttgacttactaaagtcgccacgactagattgtttgtggttgcggtgatggcttggtacaagacaagggcaacttcatcttttctcaattttaggctgaaaaactctattttaatgaaaggggttgcaaattgtagagaatattgagaaata

SEQ ID NO: 82657 - DNA, 832 bp, Cannabis sativa
tcttcgttcgtcaaaaggcgccacccttgttttccaagaaaagcaaggttataatcacggagatctccttttcaaaggtttttccacatcaatggtagcacgcacctgaagataatcctgccaaataccattaaagtttttcaggttcgacttgacatacgattctacataacttccagtacttttcaccactctatccatcataaattcgattctcaagtcatgtatttgaacccacatatcaagcttatgcaaccgaaccaatcttggattctccctagttttcaattgatgaaacaccaatgaaaatttattaaaggtccaaggactaccatcgataatactctggatatcgatttcatgatagaactggaataaatacaagtttgtatctaactcttgaatgaaaactcccttacctggctgccacagagaagccaacaagtgcctcattacattgaaatcaatcgctcttcctttgagaaacttctccaccaagcaccaacgatcatcaaaaaccagttcgtcccctctgattcatccgcaatcaggatcccttcttcctcctcctccaaatgtatttgtgcatgactcttttctagtgtacgtgtactgtgactactagacgccatgaatttaataaacaaaattttttgcaaacagtcaccttagcaacaaaccaacttcacatacatatacatgttaaaatacaatacttttttgtacattatttttttttatttaattaattatttaaatttaaggtttctatttttcgatttttaatctttatttttcaaaaaaaaaagttaggatgcagtgaagtacttta

SEQ ID NO: 82658 - DNA, 1383 bp, Cannabis sativa
agcaatgaataaagagtaaagaataggagaagagaacaccaagaatttaacaagttcaagctaagtgtaatactctacaacatagttggaacaacaactatcttctcttcgagtaatcattgtttacaaggttacacaaattttccaaaagccaattgagaattacaagactaatttctctcccaacagttttcaactctctttccctctttctctctctctctctaacctttttgaaattcagttattattttgatcaagatttggattacaataagtgataggtatatatatgataatgacaatactaaccaacttaactaacacccattctaagatctccaagtcagcttggacaataatttctccaaaatggtaacaagctctctagagggacgttctggatgagcaacaagcttaatggaaggtcgacaagctttcatgaacttctttctagagtaacaactagctttctagaactcctttctggaaggacaactagcttcctaaaagctcttctcaaaaggacagctagcttcctgaatccttttatccgaaaggacaactagtttcttataactgctttctagaaggacaactagctacccagaagaaaaaaattgtaaccataactaataaatctcgaccttggttgaaagttgaagttgtttggaaaaagattgctcgatgttgttgttccctagccacgtatatgctcagttgactcatatcccaattagctttagacaatgctcaaatttattgcttggcaccaccttagtaatcatatcgaaaaggttttcttctgttggaacttttgcaatcttaacaacttctttaatttcccttaagaaatgaagctttatatttttgtgtttggtacattcatggtgcacacaattctgattatcacaatgcactgtgataactttctggttaagcttcaactcttttatcagactaattaaccaaagtacctccttgattaattccgtcaatgataactttttgattgaggtttaactcttccattagaccagttaaccaaagtgcctccttgattgattctgtcaaggccatatactgaacttcaattgtgggaaaagccactaccttttgaaagtttgctttccaactaattgttgtaccaaacatattgaacacatattcagatagggacttcctagtatcaatacagctagcataatcagaatttacataacccattactatgtcttaatctatctgattctcgcatctttgaaatactagtccttgtccaaggttccatttggatacctcagtgtccacttcatagcttcccaatgctccctttcgggattcaccataaacctgcttacaatgcttaaggcatatgcaatg

SEQ ID NO: 82659 - DNA, 1098 bp, Cannabis sativa
ccacaaagccttcaagctcgcgtgtttggaatatggatagacaatatgcgactttgcaagtcgcagacgttgctgtaattaagacaaaaacaaatgaaattgtacttgtatttatttctttaaacgcttatcttaattaattatttgtacagttattgtaataacagtccactttaatcagttatgtaatattaatggacacttgctttctatatataaaggggtgattcatattaaataaactaagctgaaattattgcaaaagtagacttaacagaccaagttatgactgaactactatacttctttgtttctttattttactgttattgtttttgtctattttgtagcctaaactttaactactcgttattctatgtgtgtttgcataactggaagggagagttcttgctttgctcaaatactcgtacttttggtgttgtctaaattcctttgacaatatttagcgatatccgtgggaaacaattttataacatttctgtaattttggaggagatcataatggttatagaatagacaaacacgaacaacaacaatgaaatcattaacattggcataaccaacgtttcggtttcgattgctggtagagggatattgatattggaccattggttctctgaaagtgtagtttaagactaaatatgcgggaaaaaaaaaaaaaaaaagagttacacatttgatagctaagaattgtttgcttggcaaaacatgtggatttaggatggagatgtttcacaaatggctagttctatcttattaaaatatacattgttccatatgttaattttcttccatacatttcacaggattattcaactattaaaactaaattatagggttaaggcattgtagttggttgattgtactgctactctatctttttttcaattaaaaaagttaaaatgaagatgaaaaacgatacaatttttaattataaattataaattaagatagtcagcattctagaaaggacaaataagtggaatttgggaaggttttttttttttttttttttttgaatatgtacaaaaatattggattttgagtaaaagtttacaattttactgtcacgtgaaa

SEQ ID NO: 82660 - DNA, 524 bp, Cannabis sativa
gtataaagtctagttgaagaagaagtgtgggcttttctagttaattaaagcctttgatgagcaggtccagtccaactagggttatgtagttaagtcccctcactaactctatcaatacatattgtttcataaccattttatacttttgatctaatcagataaataaaactatttttgatttagagatctatagaaaaaaaaacttagttaatattattgtattcaatattatatacaatctagcagcttgggtttattttactttttctgacagacccttcctaaaactataggttagtctctctataaactcagagcaaaaaattgagagcttcagtggaaaactattggttagtttcgtgccaaactacacttgtacatatttgagtgataaagaaattttaagatggtatttggctgagaggaattaaaacataaaaatatgagtgtgaatatgaatgtgagggtgaatgtcaatatcaataggaattgaatggaatcaaattaaaatgcataaaaaaatt

SEQ ID NO: 82661 - DNA, 995 bp, Cannabis sativa
  modified_base (938)..(957): a, c, t, g, unknown or other
aaattaaagaaaattttgaagcctctttacacaatgcatccacacgaaaaagaggttgctaggtgccattgcccgacgggctagcattccgacgatgcttgccttggcatgctacactcttttcaccacattcagccttgaaaacctcaacgatatgaattgcaaaggggcccaagatgttgtaattgaccccaagattcttcacctaagcaccgtatagtgggcgctcaatcttttcttcctcttcctcttgatctttgtctttaagatgaggaaatggacacatagtttgctaatctgtgcctggagtttctcttgttagatttgcaaatttgcaaaatacttctcacgaatggagagagattctttaagttgctgagtaagacttgacacaaaggattggctctccttcaactcagcttggagatgatcaacctacgcatagagtgggtcgtgttgcctattagactcgacaaagtcatttagaactttttaaaggcaagaaagatcccactcgacaaatgaactagagcttgagttataatgctgcaagacaaaagcctacaaaaaaatataaagtcaataaatttttagcaaaatattaagacacaatgacaatgtaaactaacccatatgctgcatttgaaagttgcctcctagtaatcttctgttgaagagttatacaaccaattccattaagaaggagtgtactctccgaggcacctgttgtatcccttggagaattggctcgtttaagattgagaccacgataactcatcaagactgaaagacagttgaggaaattttttggtcgaatcttggaaaagatgctgagcattgtaagcatcaaaagaaacattggaggcataaccagaacctcccaattcatctcatcacacaactaacctttggtaccaactgttgggttttgtgccctnnnnnnnnnnnnnnnnnnnntaatcagatttacttactaataaagatcagaaataaca

SEQ ID NO: 82662 - DNA, 995 bp, Cannabis sativa
aattaatcacgttttttaataaaccctttaattaataaatgagtgcatagaaaatacagtgacatgcctatctagcaaggcgttacatcggtcttcaactaatccttacaagtctggaggtattgtagtgcctacaaatcatcagtgcggagatcattgaaaccttttttgtttagttcttttaactttaccttgagcctcttcaatttagcgatcacacagtacatcggtgtccaaaaaactagtaaagaccaatctcttttcactagctctaaaaaatcaggtgtcgaactccacatcttgaaatacttgaaaggcttcttcccatgacacaagtctggatacattgataaaagtactggataatgatcaaataaaccttcactcatataggttacttcagctgtagtataagtatcgagccactgttggttagccataactcgatctattttataatagatttgatcctccctttgttgattattactccatatatagtttccatgaaacttgacatcttatagagcatattttcaaaacaagtctaaaaaagatattgagttactaaactgaactttcatgctaattctctcctctttgggaagtatgtcattaaaatccccaagcaccaaccaagaaacttgagtataacagtccattaagtccttccacaagacaatcttccttcttcatcattcattccattaacaaaagtagcaaagaacgcatctcctttatcaaatggttttactaataaatggattaattggatagagcatttgataatatggagatagaaaacatcaatggattccatcctttaacaatccttctcccttgtgccaagctatatctgaagtgaaatactaacttgaaaacaaacgaacatacaaggctcccgacttttgagcattcgccctcgtctcacgaagcccaactaaaccaacctgttgattagagatcaacaattcaacctcattctatttttgttc

SEQ ID NO: 82663 - DNA, 591 bp, Cannabis sativa
tgcatcctgaactttcatccatgtctgatgttcgttagtaaaattagatagaagtccaagaatccaaccatctcaataatttgacgaggatttttaacggcctaaaaagctcaagagcatgatttggtacatgtcaaagttcatggaacaaaaattctaattaaccacatgttatttagcctaatgtaaagagcgggttagaaaaaatctaaaagcaacctattcgattaagaaaaaaacaagaatacatgtccaatgggttagtcaatttagtcgggttcacatgcctaaaccgacaactaatgttcttattttcaaattcaaatttcaattttaatttattgtgatgataagataaatataatttaaatttaaagttcacatcaactaccatcagataaatatagttagaattttatattttcttaaaatatgtatataaattaaattatatataattatgtatataataaaaatatatataagtatatatataaaaaataaaagttcttaatcagattagttcatgtttattggataaattggctttattttcaagccatctcagattgggcacttatatttttgtct

SEQ ID NO: 82664 - DNA, 950 bp, Cannabis sativa
agagagagagagagaatttgaaaaaaataaaaatagagagggagaagagaaagaaggaaagaaaacttaaaaaaaaaaaggtcagctaaaatataaagaagagaatttattttttaaagctttaataaatacaaaacggaatgaagaaaattaagtagggaaagtataaatgtaatttttttttatcaaattataaatgtaaagttagaaaaaaaagagtactctcaacaacttctctactctatcttttaaaatacaccactagaattttattttttttttctattttactgcactcttttatattacaccatacataatttctttaaaataaatcttcaaaaccttactttttaaaaaattttattatattttatttatttcaaatatataatattaatatatacacatatctccatacaaaaatgattattaaaacttaaaataattaataaaatatatttagagcaatagtatatataaatgtagagcttgaatagagtttattttaaataaactttaaaataaagaaatttagagtatctattgtaacgtatttttaataaggtactttaaaatttttaaaacttttttattctagaaaactctgtagtgaatgctcttaatatttggtatgtaaatttttttatattttaatagtgtatatggatttggaaacaaaagccgatgccgatccccacccaagcaagtgatttgatgttaaaaactgagtgaaaaaggtcaaaaagactgaaaaggcatgtaacatgtttttatgtaaacacgcagttaataatccaagagaaagttaataccaacacatttaggaagcattattagatcagatatgggaattgtggttgatgattgagaaagggatggtatgcgtgaccccttttctttacgatagatatgcacactagtcaaaatatatgtatacacagatatta

SEQ ID NO: 82665 - DNA, 592 bp, Cannabis sativa
aataacaaattttatgttgacaaataggatatttattttgaaagagagaggacatagaggtgacgtgacgacaaaaaaatcatcgactctgcatgcaatcaaggcgaacaggcgaccattcttcagacccgacccgaatccacttgatgacaaatagaatattgatttacacacattattcctcttatttattctccatctaattttattaaaaatttctaaattatgtagaatttgaaagtgctttcagttttttatttttatttgtagtaactcttttcgtgaatatacaagttatatatgcactaataaaatcattatatttttctccatttactcttaatggatcaaataaatacatattatatttatattgtattataatttaatttttttaaaagggtattataagtatagatttatagaattatgactaagtacaatcaatttacgctatatttgcataattctattttttatttttagttgtgtgataactctcttaatgaatatataaatggcaaaattatcatgttaatttttttttcccatgttgttaatatataaatcgaataaatgaatatatatatat

SEQ ID NO: 82666 - DNA, 931 bp, Cannabis sativa
  modified_base (892)..(898): a, c, t, g, unknown or other
tttcttgatgttgtttatgatgaccttatttgatgactcaacttgtccattgctctgtgggtaacatggtgttgagaatacaagattgattttacattgctcgcagaagtttatgaacttgtggctaatgaattgggacccatcagctccgatttcttgagacaacccaaatctgcacattatgtttctccaaacaaatctctccacgtatctatccttgacttgggcgaaggagtcaacctcaatccattttgaaaaataatccgtgagagctaacatgaatttcttctgagcttgcgccgttggcagggggcctactatatccatcccctatttcatgaacgaccacgaacttcgcactgtcatcaactctgatggggggccaatatggatggggcatgtttctgacatttctcacatttcctagagtaatttgctgagtcttcctggatcgtcggccaatagtagcactgtctttagattcgttgcgctgttactcgtcctccaaaatgactgttgcactcaccttcatgtactttcgtcagaattagttctccctccatatttcctacgcatttcaagtaaggcccatggtaagatcttctgtacaattggtcttgcagtagtgtgtaccttgaggcccttaacacaatttttctagcctcttttaagtctagtggtaatttatcgtctcttaagtattccaagatcggattcctcaagtccctcaatggctccgtcggtgtcgctacacattgaacttcctcttccaacatgatgataggttttggaataaagtcaaacaaaattgtttttgtaatctggagaggagaggaagatcctagacttgccaaagcgtcagcatgcatgttttgttgggttttatgccctnnnnnnnactcatttcatataatcaaatttacttattaat

SEQ ID NO: 82667 - DNA, 1306 bp, Cannabis sativa
aacaaaggtaaacttgtattaaatacgttatataaaccatgacgttttaggatgtctcagtgggaacacggtaacaatagccttggtagcgagctgaaacttttcccatgtcttttcgaggttgatgatgtaaacctcgtcattcctgcgtttgaagacataatgctccatcgcagttcttggtgacaaggtggacctcagcagccaacatcatttgtatattagcttttatctaagagagttgactcgacggagttgtgtaccccatagaaatgtgtctggagctgattaatgaaggtatcatgagcacgccttcctatagcgagatgggtgcctcgctattagttgtttggatttacccgactattatacctagtctgcataaggtgtattatacactaaatgtcttatcagtcaccatgtctcgactcctaatgcgtagcaaggttgatgtctcgccttgtacatctgaagtcgtatggtttctcgttaatgttcgatgtaatagttggtgtatctttatcttgcataagaccttccagtcgacaagttgtaaatatactctgtcaattacgcattaatgagttattctattttcaaatataattaccgttacatttattgattcgtattcttcccaatttgacacgtgtcctcctttgaaataatagtcgaatttcgggtataacactatgcaagactaaatgaataccaaagagttctaagactaacaagaaagaatccaaagttctgtgggtaccaaaagctaacaaattaacttgttttttgaagaaatcaacaagaaagagccaatgcttatagttcttggatagtggatgttcaaagcatatgactggtgacccatcatgattttcaagctttaagaacaaggaaagtggctttgtcactttttgagacaatttaaaaggaaaatcttgggattggtgatattggtaatgtatactctccatgtatcaaaaatgtgcttctcgttgataatcttaaacatagcttgcttagtattagtcaattatgtgacataggttttcatgttatttttgaatcctcaaaatgctttattgaaaatgcttcaactaatgaagttatttttcttagataaaagaaggataatgtgtatgttgttgatgttgactcctttgatggcaaaaataaatatttaaccactatgaataatagctcttggttgtggcatagaagattaggacatgctagtatggattctattttaaaattggttacaaaagatctttttattggtttgtcatctattccttttgtcaaagat

SEQ ID NO: 82668 - DNA, 704 bp, Cannabis sativa
tctctctctctctctctcttaatggccatattagaatttcttataaacaatgggattgaaacgacaagtcgttcattttttaatgtgtaacggacattacttgagaattaagggtgaaattcggtcgattacagtcaaattttaccaattttataacaaaccgttaagaaattataacttgaccgtgaggtttttggcaatttttttcgattttgtggtttttgtagtggcagtttttcgatttgaccaaatttttttttctaaaaaaataaataaaactaatcgttatttaaaaaacaaaaaaaccataacaaaaaatgactgccaaattcggtgatgacgtaaaaacaaaaatttaattacggtctcgtcagtttcgattttttcgatttttatgaacaccaagacctcaattgaaacacctttgggaaaagttcaattcaagcaaagggatgatagagactcaaagagaccgtattggtttgctctactgcaacttgtattattgtctcaataatctccattttttcgagaggcttctccatgagcacggttaatttcttaattttgattttgatgaagggtggaataaagaagggataagttgaaaagtattacttttattaatcaattaattaaatttatctctaattttatatttaattgaaacatacctctctttttatatgtattatacccaaaat

SEQ ID NO: 82669 - DNA, 1291 bp, Cannabis sativa
aagacataaaagcttactacaagatagtaagggaatggactaaaaaatatgtcatgtcttattaatttggcttttcgtagaattctctatggatctatgacattgggtatcaaattctgtgatgttaatatttagggttttgcaagacttatcattatgacgtttttataatccttataataaactttttccttttcagcttttaaagagattttgttgggaactaatatttgtatagctatgttagcataaatcataagaggggttttagtaatctagacgctcaagagagattcattaaaataaagcttgaagagtttcaaattgctctgcataaagatccttttaatgtggagttaatggtagttgtaaaagaagcaagaattgagcatataaaaaaatcagtagcttatctaacttttttaagataaaaagttgaaaatttttggttaaattaatgaaggtgattccaactccaagttgtttcatgttagtttatagtagagaagaattcaaaataccatttatgttataaaggatgaagatgggaattgggtgaatgaagcatagttgcttaaaaaagctttctttcatttttatactaatcttctgtgaaatttttatgatcagagacataacaaagttattaccaagattgtacaagaaggtctaaatgtgactaatgagcataatcaaattctaatggccccttatactacataagagattaagaaaaaacttttctcaattctaaataataaagcgtcaagtctggatgaatttagtagtgatttttataaagaaatttgagataagattggcaaagattttacgaaagcagtccttttagttttggccatatggaagcttcttaaggaggtaaacactactacaaaatatacttttggtgtcggttagagtaacatttttttaaaaaaaaactgacactaaaaatcacctcaactcttgggtctcagcttataactgacacctttaatgaatttaagtgtcagttagtagaccgacactaaaagtataaccgagaccaaaattattttaaaaaaatatatactaattataagtctcggtttatattcgacactaaaagtttatttagtctcggttataaactgagaccaaaggactgattaaaaaaagtccaaaataaaaagcccaatgaaaaccctactatacatacatattattctttaaaaaaaaattcaaaccccctctctctttctgcctcacgaaacggctctctctttctgccgactcacgtaacctctctctc

SEQ ID NO: 82670 - DNA, 703 bp, Cannabis sativa
aaaaaaaaaaaaaaccttgttagtcataacaatcagcgagagaaagcaacttaaacataactgatgtgtcacagcttaaaaagaagcagaaaattgaattgattggatttcatttctgtattttggattaattaatccaaccatctagaatttgactttttatatatggatatatatttctgctcattattaattatctgtaaatgtccctcctcactcaatctttcttcttcattttttatttttcatctctataacatggagtccaatcttaatatggactataagctttattttatagataaaagacagttaaaatcgttatgagttgggatgtttaaatatatgattcgaaaaaaataaagcaaaaaccttctcaagaaacaaatacaaacagagccaaaaaaaaataaaatactgaagttactagtaccttcatgataccaactatcgttccactataacgagggaagttccgtacaccggtgacaacattggcagtattgaagaaggactgagcatgggccgccaggagcatgaaaagacacatgaccggcacgtgaggccggggaatgaggccggagacagcagcccacataaggaaatagcccaaaaagcactggcccgccccagcaaggaggacaagccaaggcccacgacgatagaaggaggtagtagcagtatcacaagtagcataggagta

SEQ ID NO: 82671 - DNA, 707 bp, Cannabis sativa
ttctggatgccgttaagggtgcatcaatcccttttaacccttttaaagttttaaagggatgcattgtagaatcaccctataattattactattaaaaaatctgataatttaataataataataataaaaccttataatattaataatcatgttatgctaggtaccccaataaaatgctctaaaaaaaacattgtgtgaaagaattttttcaacctcactaattataatattgtcctctgtattttgtgtaagtaaatcttatctaggattttcttactcatgattgttgcgctacgttgtcgttcgatgatttttattttcttattggtggtacctcgaccatactatgaagcttcgcacattgttgctgtcttggattaagtttaggagcagttgctggtgttgtgttttgataagtagattttagattcactttagagaattctttgtatggttatagctaggtgtctaggtaagtttttgtatggttttacatatgttttgagtaattgtgtgttaggtataatcgtataaggtgaagttgtgcaaaatcgatgtgaaatgacgaggctaatttgagaagatgttgagttggggttgtagcctcatgtcttagtgttgcatcaaagaaagaaaaatgcccaagggctgaagtgcctaattgaagggttataactctaatgtggggaagtagaattccgacccga

SEQ ID NO: 82672 - DNA, 2255 bp, Cannabis sativa
gatgggatattaaatgtttgttaataaaaaaatataaagggaccttaaatgtaaataaggtcaaattaaatggtaaattctacaaatcaaaccttcaacaaactggttccaatcctgtctgtcaacaagcaatgtgcaaggacactcaaaacagttgcacaactgtaaagactaattattactttagtaaatgaatcataattatagtcccatgcaaaagtgaaatgctaaaagttatcggagccaacccacgactacctttaaatgttatacttttatttgtataattaaatattaaatgttaaatattttaatttaataactactacaaatattactttcaaaaaaaaaaaaaaaactactacaaatataattttattgtgttatatttcacaacaaaaaataactttatgttatatttgacataattattaatattagatttatgtgaaaataccttgatataaaatttaatattttaattaaatatatattaaaaaaacaatcattatttctattatgtaaactaatataaaaaaaaaaacacataatttgaaaaactatatctaaatataacaataaaataataaaaataacataaatttagataaaaggtaaagcatttatggtacaaaattgaccatatataataatggctaattatgatttttgccccctgaacttttacatgtactaaatcatgctttctaaacttttaaggttattaaaaatactcctgaactattgagattgttggatttaagaatttttgtttaatttcattcaattttactattacagtgatagcttatgtactaaactatgctccctagactttgatatatatcaaatcatgactctcgaactttgaaatgtactaaatcatgtccttgaattttcatccatgtcagacttttttactaaaataggaaaaaaattcttaaatcaaacaatcttaatagttcagggagcatttttaacgatcttaaaaattcagagagcataatttggtacatatcaaagttcaatgggtaaaatttctaattagcctataataatattacattatgttatattgtgtgcaaaatttggcatagaagtttggtacaccattaaagtaatttttttgtaatataagttaatatatcttataagttaaatcttagagcactctcaagattttagtaaagtattctgaataatagagtaaagaagagaatgctgtacgttaattgcatttacaaatgctctaactattctaagtgaaacaatggagtggtgactaataggaagtgctcaaaaatatagacattaatattttaaattagctttcctagtaaaaaaatagccagaggtcaggtcatcagagagtaaagcaaattaaaatggtttattgtcagaagcagcagcaattattaattaataataatcacgtgaatcggagaaagaagacaaaacagaggtctgtaagtgttaattattgagctttgtttgtctctcacaaataacagattccttttcagaccttcatagatcggacagcagtacctcactcaattctactaaagtcaatgataatgatacctcaacctcgtcctattaaaaaaagcctgatataatattaggaccttctatatgtagatcttcaggctcttcaagcgggtctcttacttgagattcgagtaagatatcagaaagaaccaaaagcaaaaacagagagacaaatagaaaggaaaggcggcagcaaatatgagagcaccatcaaaaattcctataatatcacgctacaattgtcaagagtattcactatggagaggatgatgtagtgcaatcaacttataataagttattagaactaatttaaacgttaacttaatgttaaaatttggtaagatgtaattaaggtgtattttatttcaaaaccggtaataggagtaagttattcatctaatggtattttatttccatacattagtaattagtaatgtaagactaactctaatataagttaaagaccacagaccacaatactacatcataaacggctcttttatgactcattttttttagaaatttgatactcattagagtttagtttaactctaatacaacaactctttttatggtccatctttttaaaaatcggaaactcatagtctattcatcttataatattttttttctacatattattaatgtgagactattaataagagactaactctaatacttaatttatgaattagactagtttt

SEQ ID NO: 82673 - DNA, 780 bp, Cannabis sativa
tatattattatatctaatattattatttaaaaaattatacaaaattattccaaaatttataatattttttatttatgggaaaattgaattttaatataatctcttctactattttgaaaaattaggtaagaccaacaatggagatcgaatatctttgattaaagctcattatttaaaaagaatatgtattttatttaatcatctgttattaacttataaatgtgaaaaattacatttataagttattttggaattgatacaccagcatataggccttaggatcaagatcctaaagtcggtggttgcaagaatcaaagttgttaagttaattaggcgataaataacttaatcaactctccatttatgatttaattaactgagataggaaaattgggatatgaatcgagatgtaaacatatatttaactttaagagtatgtgtttggatacagtgagctttcttgttgtgtctatagaaaatcataaaaatgtataccgttacgagtaattactcttttgataattaagctttcttgtttggatacagtgataaattctatatttaatcaatataaagactaatcaatctcgattcatgttaagaataaaaaataaaaaatattataaattttggaataattttgtataattttttaaataataatattagatataataatagacattgaaaggaagaacataaccttcagatttaagttgtgattgttatggtttaggagattcacaaaccattccatcattctgaaattttcctatcact

SEQ ID NO: 82674 - DNA, 777 bp, Cannabis sativa
ggtgtggaattttagtgataatcttagacttgggctgaattttagtaacaagaagttatttttttaggacaatgtgattgattgattgaaattattgaacttcttttgtaagactttgtatgaaagaaagaacaagtggaattttagttataatctaagggggttgaattttggtaacaattgtgaacgatttggtgatggtgttgtggtcttgtgaattaacgtatttaactttttgtaagaagagaaaatcctaattggggagatttgattcattctaaattatgtagttcggaatgaaaggatttactttgaccgttaagatagtaggtaaaccgtttcttgattgtgcactagtgtcctgaggagggtgtgaaaattttagtgataatctaagagttggggttgaatttaagtaacaattatgaacaatttgatgatggtgttgtgttcttgtgaattaaattattcaactttttgtaagaaaaataagtgtgaactagtgtcccgaggaaggtgtggaattttagtgaatgaagattaaaccacctttagtgataatctaagatttcggttaagctgttttcctgcttttttctttttgaaactactgcagttttgtcattgaaatcaccttaaaattgtttcattagctgttgtatgatttgaatgagatgaaccatattttgatggttttgattccaagcttcttcttttttgttttttctttacaacctgtgtgaagggactttgttctccattctttctgcatataat

SEQ ID NO: 82675 - DNA, 886 bp, Cannabis sativa
actgaagtttgctcatatctaatttgagaagataacataataaattatactactaaaatttaacatcacatttaaaaaataattaacaccttttttttaagtaaatatgtaatactctctttaacattcttatgaaagtcatgttgattcaatttttattcaagccttttgtaaaaaaaaaaaaaaaaattcaagcccacactgatctgaatttctagctccttcattgactacaccatcggtgttcattttttctatataatattactatatgatgtttaataaatttttaatatatattaggaaaattttatagtataccactaaaagatgcatcgatacacccttatttgttttgacatctatgaaaatattttagtctatttttttatggttgtatacgttgtagttttttaagacatcttgtaaatttttttgatgaaatctgaaaaatttataacataccgaaaataaaggtatctcttttattttatacgcatgtttttttgctgggtatttttataagcatgttaaataaattgtttgaacactattttttttatattgtcacttattttgaattttttaaaattttgtaaaatatcttaaataattacaacatacacgactataaaaaaaaactagactaaaaaattattgtagatgccaaaacaataaaagtacatcaacactgtaataacttctatatattattatttatatgtttataaagtttaaaaattaacttattttatttaaaaaataatataataatagaaaatatttttttagactatgatattatattttgtaatagcacactaccaaattttatgctttagatacaagggtaaatactattttagactctgtgttttgcaaaagt

SEQ ID NO: 82676 - DNA, 665 bp, Cannabis sativa
ctcggacccggaccccgacctagacccaaacttagacttaaaccctaaacccgaacccggacccgaactcagaccccaacctggactcagacctagacttagacctcgaccccgactcgaaccccaacgataggcacagacttagacccgacctgaacctagatcctagaccccgacctagacccgaacccgaatctcaaacaccagaccccgtccccagaccctgacctgacccagaccaagactcaaatcccgaatcccaactcgaaccccgaaccccaacctgactcgaaccccaaaactagagctggaccccagcccagttttgacttcgggtctgggccgagtttgggtttggggtctggggccgggtctagggtctggggtctggatccgggtctgggttcgagttcaggtctgagtctgggtttagatctaagtccgaggttggatgggttcatgtcataatatgatgtagaatattcatttttttttagtaaaaaacatttaaaaatagttctaaaaaaaactgagctaaacaccattaaatttttaaaatgatacaaaattattttctactctcacttttgaaaactaaaaactgaaaatacaaccgtacagactctaattatttcactatacttttggttagctacaaataataa

SEQ ID NO: 82677 - DNA, 1192 bp, Cannabis sativa
  modified_base (1099)..(1112): a, c, t, g, unknown or other
ttgaccagtcaagagaaatgaagcaatgagattgtttgggtgatctccagttcctagatgatacggagtacgttcatcatgggaaggtcgatcaagaaggcacgagaaaagtcgtgattagctgtaaacaaagagttatcaataaaaggcatttggccttgatgtccaagataaggaagattaccaccaagaaatgaagggttctggacggggggagggctgaaggtggtggctaggattgtggtggtgccgaaagagatggaagtcatttattgaaccgttagggtcaaggttggagtggagaatggcagaagcggaatgtgaagtggagaagccgtgaaggaagacgtcagcgccgagctggaactgattggagctgttaaagattgtccaattgttccacaagtggggagatcggcaacgtaaccggagccgaacacaccaaaagtgggaggatcagacatggaaggaggagctccgatcgtgtccgtcaaggaaggagcagtcggaggcgatgggggcagagcgacgacatcggcgacagtggcttcaacggaggagaaatcgtggctggagatggcagtgggaggttgtgacggcttgctgacggaggcgacggctatggaggaattccttgttgttggagccatggaagaagatggagtcggcggcgacggtttagggtttattttgttcaactgataccatgataggaaggagaaaactctttttattatatggctgctattagatcacgacagaaatgccaaaaagtaatcttaagtttttacattatgattatatatagggcaagaaagataacaacccaataaataaagtgggccgaaaatatagtggaccagtagcactaatgtgggctagctaattctaataagaacatcttcattaattagaagattaattaaataaaagccataagatagatctactagttagtttagcaatttataaagtatgtagtaaattctctttccagaaaaaaaatatttagtaaattaattatcacaacggtgatttttatgtatactgacgggcacatatcattgcaaaacacaatgtataataataataataatannnnnnnnnnnnnnaataataataataaatactattttggaccctttgttttgtaaaagttaccaattgcactatctgttttgttaaatgacaa

SEQ ID NO: 82678 - DNA, 605 bp, Cannabis sativa
tttcatctaatgaagtggcaaaatgatagcccagctgtacattatttaaactagaaatattgtgatgctaaatcggcttatcatggtttgggaaaaactcagaggaattcttaaaattcgatccacatcaagcctcgagaaatactcgtgaagtaggttagtatcccattggcgttctatagttatgaggttagccacgactgcatttgaagggcatgtgtaattggttgggacgaaaaacattatggccaggaatccatgggtcagagccacacttgatatttttgccctcgcccattttccaacgcaaaccagcaacaaggaggtctcttccaaaagtaatcccttgccaagtcaaggaaggtgaatggccatgagttgcttcaaggaaggagttattggagaagtaacgactctttagtaatcgactaagaaggggtgaagggttatctagaaggcgctaggctttttttatgaaagcccatgccaccttcatatttggttttacataaaagcttccaattacgccaatgaattgtcaagcttgattcattagagcccccaccaaaagttagacatcatggactctagcttacaaatagttg

SEQ ID NO: 82679 - DNA, 608 bp, Cannabis sativa
cataaccttaataatttttcccatatttttgaaaatagcccatattaatattagtcaaaactaaaagtaagcttcaatgaattttgaaataaatcatattttttaagacgagttttctttaattcaattttcaatagaaactttgttttatatcaatgtttaaaaaaaaaaaaaagagttttgataatatattttaaagaagttaatatatggtgtaaaattaatttttttttttttgagaaaattaaaatttgaggtaaaaaaaataatgatatatttaaaagatagactaaaaaaattaatgaaagtgcttttaggcagtcttcgattagccagactaggacaaggctcgaatttcttaggttatttggtatggtggagacaatttggaactttaatatgttatcctccaaatacgaaaatgtttgccttgaatctctgcccatgagcctacttctcatgcttcgtaaaggttctatctgcccatgagtctacttttcatgctttgtaaaggtggcttttcccatccaatccatagcaactttgctccaccttttgacatgtatgaattcttgctggctatcatcttagttcatagtaaagaagaa

SEQ ID NO: 82680 - DNA, 1145 bp, Cannabis sativa
atcactataggtgggatctaatatagctctctatcaggatacaaaacatggatcaagtaggcagatctctaatgtgagagatgaatagccttagaggcttgtgttagaggaagagagaaagaacccttggggtgtgtcgtagagagagagaatgagagactaggtttctgcttagagtaatttggaggctaagggttaggctaagtgagttaagttttctagcttattatataaagcctaaaaccctaatttacaacaaaacccttagatatatacatattaaattgattaaatacaaaagactaaactaccccctgaaagtaaatattttccatcaatttgttgggctattaagggcccaatttgtaggtagcttgctatccatgttttgggttgtacatagagtcctatcaggttaatcctagctgcccaaagacctacaagagaggtctagctggccatggtggcaatcctggacagccatggtcctactaggtcgatcttggtcgaccatgatcctgctaggacctggcaggtcatgtacctaccaggatcatataggtactatggctttaccaagaggaggccagccttttgatctggaggccaaccttttgcaagttgaggacagctttgtacatcgtttacttgtagaggtcagattcgtttggtcgaacggaagctcccttggttcggaagtcactttttagtcggctagcttatgcacaaatcctggccggcctataggctcaccttgaccggcctataggcttctcttagtcggttagggatgtagttacaaccccccttgagagctcgcttcactttttttggttgctgctcgacggttttgccgtatcttgtatagagaccctgtcttgctactggcaaggctgtattccacttgtactcattctttggcttacgtggacatggcacatcaattggacaaaatttgggacaataataccaaaacaaaatttctagaaatttcaattctaaagtcaaaagaagaagatttaaaattcatgaacttatttttaaaggggtttttccaacctctcaagaacctagagtgggggttgttaggttataattagcctatgtttcgggtctttaaagttagcattatctcgtctattggt

SEQ ID NO: 82681 - DNA, 714 bp, Cannabis sativa
aaaaaacgaagaagacgaagcacagaagatcttcaaaaaatacaacggatagtccgagacgatcctctgattcgagtttagcgattgattctccggtgagaaactcgcccgatattcccaaaaaaactcgccggaagaaatctaaagaatctaatcccggcgtcggtggagtaagtggatcgtcgaggttaagatcatcaaaaacacgtgctaataataatgataatgcggatcaattcatgtctgctttttcggatccgggtcccgggtcgggttcggtatccgtacccgacttaatatccaaagctaaggagaaaaatgatcgtaataatcgacaaaagccaaaatgtcatgaatcggaagatattaaaggattaattacatgagtaaaaacactcttttactctctctttctcttgaaatatattttgtgtgttttttaattggtagattttagaaatttcattttgtaaaaaaaaaagtgaagaagatgaagagaatggtttctttgattaataataatcaaagtcttgtattattaacatttttttactttttattttttttcttaatcttatggtagaatatgtggagattcaaattttatgtttaccaatgatgaatataaacaagaattactatgtatgttgttggagaccataaattcaaatttcaatagtgttctaaacatttatctatacgtattaattgttt

SEQ ID NO: 82682 - DNA, 767 bp, Cannabis sativa
aaattccaatcatccaagactttatgggaaataaagcattataaatgggtaatgatgtcacatgtcatatttattatttattttttcaaactattctttaatattatgaagtaaatgccacgtcttgtagttgttttagtgtcaatcaatgaagaatcctatagcatagatgattgagacatccactaataataaagaaaacccaagccatctatagccaatgacattactccctcagaaaattgaaaacaaaattaaaaaggggatttctaaaccagttaactatagataacatgtttcccactcccacaacccaataatctccatcctaaaaaaatattagaaaaatcataatattcatttcaagcttatatgatcaagtgggtgcctaatataacgttatgatggcataattaaaagaaaaaaaaaacgaataataactgtggtacacttaagttacacacatatacacaataacacaataatatataatctcatctacctcgttcgttggcccatctactatgacatgagaatatgagatcatgggattttaagggaaataaatacataaaataatgaaagcaagatatcactatgaaaagtaattcttccattaggaatttagtagaaaaggaaatataaaaatatatatggattgactcaattgagatatacgtgacccccttacatagagaaaaaaaagactcaaatgtaataatattaaaacaaacaaaaaaaagttaaaaatcaagcttttatttatt

SEQ ID NO: 82683 - DNA, 736 bp, Cannabis sativa
agtgaaatttttccatgaccttctcgatgaattcccattcaacatgatcaaaagccttggccatgtcgagtttaagagccatccaacccactttaccatgcctgcgatgagtcaaagagtgagtgacttcttgcttgatgatgatgttgtctaacattaagcagttaggtaagaaagaactttgggttggtgaaattatacgatattaaattggcttgaggcaattgaccagggtgcaggagatgattttatacattctagagtaaaggctaattggtcaataatcagtgacagaatgggggtgactctttttggggataaggacttgatggtgttactgaaaggcgataatctgcattatcattcaagaagctaagagttgcttgaacgacatcagtcccatgcaaatgccagttttttgggaagaatgttccattaaagccatctgtcctgggggatttatcgccagctagttggaaggcttcttgctggaccttatcacatgggaatggggcttccaagcataaacattccgcatcagtaatcttgtcagagactctagaaagaacataatccatttgctttccaataggatattggttggtgaaaagttgagtgaagtattattcaataactattaaaatgctttgagtatcagtgacaattgagccatcaaagtgcatgagtgagagaattttgtttttgacgcgacgcaaggaggcaaactgatgaaaac

SEQ ID NO: 82684 - DNA, 2162 bp, Cannabis sativa
tcaatatttataatcttatttgtatggtttccttttgatatttatgaatttataaaagatttttgttttaggttatgagagtttggaggtgaagcatgggttttttcatatagcaaaatcctatccttgaagttcttactgagtaatgcatagcttatacttcgagcaatatcacctgaggttttttttaagtgtaggtgtagcgtaatggtattcttacaattacctgaggttagaacttgtttcctttgtttattctattgttagtttaattcataatttaataggatttgggattgtgcaacttatattatgattttttttttaattataatcagtttttaaattattgtgtaatgtatgtttttacttattttattgtgaaaccgattctatttgatttatatgtctcaaacttgttagatttggttccctcttttttttttttctaattatgaccaatttatgagttattgtttattttttgtttactcattttgttgtggaattgattttattttaatttatgtattaatatttttggaattgattcccttttattttttttttattattataactagtttctgagctattattgtatgttatttgttgttagctattttgttgtggaaccagttctattttaatttatgtcgcagctaattttttatttaagtcattttagaaaacaattcttgaattatttatataaaaaccagtttgtgatttaattaatttcaggaactggtttttaatttaattaattctaggaatcagtgtttgatttttttatttaactaatttttatgtgtaattttttatcttggttgctttacggaactagtttctttttctcaaatttttaactagttaataaaactgatttccttatcttatattttgtattatcgtgtgttatttttttacttattttttatgaaaccagtttagtttagatttatgccttggtatttttgaaattgatctccacatttttttaatttaaactaatttatgagatattgtgtgttatttatttttacacaatttgttgtggaactagttttgtttttaatttatgtttcagcgttttatgaactgattttctctttgttttaattataaccggtttgagttattgtatattattagtttgtattcattatattatagaaccagttctattttaattataacttgtttgagttattctatgttatttatttttatttattatgttatagaaccagctctattataatttataaacggtttaagttattttgtgctatttatttttattcattattttattgaaccggttctattttaatttatatttaagacttctatttctggtaacttttcagatgactatttcagagacagtgacttttttagcgactttttcagtgattttttcgataatttttctagtggtaataactttttcggtacttgtgacttttcggcaactttttcggtgccagtaatttttctggtgaaacttattattacaaattttatcaaatttatttattattatttttttgtatatatattttaaactttgattatgttttaattttatattttttttcattatttatgccatagaaaagtaaactctattaatttttctatacctatgaaaaaagcctatggtagtactattactaaacattgctcttttccaactttcaactacattaataaacacatcgatctcatatatctaacataattatgttacatgtaacatgtgcatacattgtacatcaatcggtttaacatggttaaataatattcaacttatttaatatattaacaatctaatacaatcaaacaaagattagccaaatgttgtacctacgaacaatctataatcgctttataattatgaagtcttgtcttttgacatggtagtctgttgaatttttcctggtgtttcggttggtactttgtttgtttgtccacttgaatcgtttgtttgtttgtactcatggctaataggcagaatcagtcagaacaggtgggaaggaatttgtctggtttagtgattgaagaggatgatgaggaaggactgttattcgacaatgtatcagatgacttatcggaaattgatgacaggtggttgctggttggaaggtttctaacga

SEQ ID NO: 82685 - DNA, 601 bp, Cannabis sativa
  modified_base (27)..(49): a, c, t, g, unknown or other
agggtcagtcatcaatccaggaagcannnnnnnnnnnnnnnnnnnnnnnaagagccattagtccgtgggtgtatgggcccaatggaggcttgaagcgaggacgttacagtcctccacatggctttgtttgggagcacgatgctcgggtgctagagaagtcttgttcgagtttttttagctcattaatgtaccttttctgagccccgttacttgtcctaaagaaatacggtccacccgagatgaccaccatgtcatctccttccagaggtggaaggaagtccgggttatgtcctcattgtggttgtacaagagggttatgagcattatctcctggtgccaaacgaggttgcacattggtacgtgggaccaaaggtggttgtgcattggttctttgaggggtatggcaattccaagatgtgtggagcaaaagactcaggctcctcgccagactcgtatcccctaactttaccgttggtgttcaacaactgctaaatttattgttctagcgttgtgattcgttcatcacaggagcaagaatattaggaccgactggtggaggagcatttatgttaaattgaggcgcatatactccttgagtgga

SEQ ID NO: 82686 - DNA, 1127 bp, Cannabis sativa
aagctccatatacttgggatgacgtctcttaccttacacagagagcccttagagtgcatcttgattcatgggtaaatatgggtgagtaaagttcaacttcttttatttctattttttgctttacaatgcttattatcaactccttaaataaggatccagagtcccagaccactaccttgttttcttatgcagcatataatattacacatcatactcgtttgttctgatattattctttgtatagtctttagtaaaagaggcatgtgtatgtggtgtttgcagacgacgtaacaaaggaagatcttcttcagaggcgtttatgggaacaatccaatttagaggcctactttgcagagatgcggaaagagtcccagagcagaagataacaaatttttgttgccttgaaaaaaataaatattattgatctaaattaatacgaatacatgtggagaagagaagtaataacccgtttatatcgctctggtgtgggcttatgcgatgaagagtgggaaattttgttgcctaatgaagttttatgaaattttgttcataaagattgttgttgtcttggtaacgctcaacacttaacacttgacggttaacaagcttagacataaacatattatagccaaaactatttccttatatttatgcacgaaactgctatttctgatgtttgataactctgatctctgatactttttagttttctcgttaattttgttgtgatttatataatacgatagaattttgtttattagttattgctgatattttgcagatgcttttcggccagtacaccaatgcattattctgttagtttattcttgtctaccttgttgttggacacacaataaaataaaaaagttgctatataatgctcatattaagttgtctgcctttctcttttaaatacttacatttctgtttggttaggcaataaattctttatccaaaaaaaatggtattatttcagaaatacttaaaaataacaaaaaagattatatttttatggaattttaacttctttttttttttttttacatttttagggacactttctttttcttacaaaccgttgtcgttaatttttggagtgaccaaacaaagctttattctcaagaaaa

SEQ ID NO: 82687 - DNA, 905 bp, Cannabis sativa
ggctggccaacctatgcctggaaaatggattcctggtcggccctagcctgggtcatggggtctggtcggcctctaagacttggaaccctggccgtccaaggccaaggctccaagcgggtagccaattttacaccctctgatgacctcaactagggtctcgtgacagccttggaggcatatacagctgtagttctatgtgtggttccccttgggaactctgtataaggcttggtagtgagtctattattgtcaactatataatttaagacttaccatatgtctaggtttgtgtacttaggacgatacttggtcgacaattgactttgtacattgtgatttacctaaaaagtacccttgggtactgttaaatagaatgtgtttgtagctttgtcaagttgctcacctccccttaactcttccatgcaggttttgggtgttggataggggaggtgacagccgcgtaggtcccttagtcatcttgtaaatatggctagaatgaaacaggcttttcgtagagcgcctccatgtgacccccatgtagcgaggggtggctacaaggggtcgagtcagaattgtagaggaggctactcagcctcatgttgatgttgatccagaggttgaccaggcagaagtgcctgaggttgactaaaaggctgagagccctgatattgagtccgatcttgaggaggtcacaccagtcaggacaaggagataaagaacttgtattgtcctctccaattgccctttggatcgttacgatgccaatggcgattcgctgaacaagcttggtgagccttcagtgttaggcttagatcaagccctgattcagcctttggagcctgagattctagatgcaaggtcacggggagatagttggtctttcttgcttttaccctttctaatga

SEQ ID NO: 82688 - DNA, 953 bp, Cannabis sativa
attttaaattttttgaaataaatttagaacatgttaattaagtaaatataataatatatacacttttatatatataaaaataattaagataatgatctcaatcttgaaaatatgagtagatgcacccgtatattctttcgaaaataatatatgattaattattattataaaaaacagttaatcattcacaaaatacaattttatgataataataaacaccacttacctaacacaatactaatttatatgtttctatttaaataattaattttaaaatctatgttacctaacacataattttaaataaacttatttttattttaattgtataatgtatatgagcaaaaattataatttaaccttaaaatctataaatgttattcgtttatatttatcttaaatatctttctcatcataaattctcttgtaataaatttccctaccaaacattacttcattatgtatatatagccgcttatagcccacgtgaaaataatttaattcgtatatatattccacgtgaaaataaatgaacacaaatgtattggaaaaatatatagtatacatctcaaaatggaatttttgtacaccatttatttattttagctaagaattttattttttattttttatgttataattatttagaaatacttttatttttttaaaaaaaaattaaataatttataatgctaaaaataaaataaaaaattactctatatactatttttttaaaaattactttagtagtttttattgggattgttatgtgtatttggttacaatttaagttgctttattaattgctatatgtagattgttatgtaattttttataaaaatataaaaaaaaataatttaaaattctaaaattaaaaagaaaacctcaaataaaattaaaataattaataggaatagaacaagagaaatactcttgcctattattcgtcccat

SEQ ID NO: 82689 - DNA, 1539 bp, Cannabis sativa
gatctgaagtagctctcttaaggttacaatgtaagaatcatagatggaaaatctcaagttaagagagaagcaatgatgggcgtgtgagagagagagacacttagagcttagggtttgccacttatgattttagacttagaactcagcttggggttttaggtttagttaatgctctttatataggagagcttaaaccctttaattagattaaataagcatatatttacatattaaattagtaaaatacaaatgtctaaaatgccccttaaaaatagatattttctctctatttttgtgggctgttaaggcccaattcgtaatctagcttgctgaccacgcatgaagctatacccaaaatcctgtcaggccaatgtctggctagccatgcatctacaggatgcaggttggtcggccttatgttgtgcagaagctggccaacctatgttgtggccagcctccttgaggtagctagttcgtcattcgtcgtcccgtttgagtgtcagaactccccgttggttgaagtactgagtaggtgacttggccttcttcttggcgagttgtactgccacgtggcgttaatattggccacatagacatgccacatcaggtgggcaaaaatcaaaataatatttgcccccaagtccctgtgcggatgtatgtgcgaatagggactttccagcatagttgagactcatgtagccttaactgagtaaattttgctgcatatttagtctttgaaataactgtttttgactgtctaatctcgtttgttgcagtaagttaactgcatcgtacttctacatgcattttagttgaacactgcatggcaagtaaagaagtggttccacaaaagctatataagacttatggagggaaacccctcttcattttgcacatttcattctctcactagaaaaagtaacttttaaaagctcctccttctctctagagattgaagcccacattgctccatctctcgagattcttacactatttcgacgatacaagcttcccattctcttcgtgaaaggtttcttgtactaggtaagctttctaatcccgctatttatttaatttagtttattttgccatgattgcatgaagcttttctttactttgaatgttttttgattcccacgttagattgtaatcttttcgatattttgagccgcatggtactcttaggatgtataatgtgtgatttctagacaaaaaggatctgattctaaccttcattgtgattcttggctctttgagtcacgaagaacacaaagaacgtgttcaagttcttgaaaaacacatgtttagatccaccgtataccttggccggccatggaggttttgttcaagacctggccagccatgggtgttcaccatggggtttggtcggccatagaggcaccataaaaagctggccgccctatgcctggaaataagattcctggctggccctaggctgggtcatgggacctagccgaccctcttaggtttgggaaccctagtcgaccaaggccaatgtgttggattttgtgccctaaa

SEQ ID NO: 82690 - DNA, 665 bp, Cannabis sativa
gttcccacacaagatttgatattcgagtttttccttagcgcctacatagcacagcaattgatagaactgtagctttgatctcagaatatgtatgtatacatacatacataagttataaccggtttattatactttgttcagtgatatacatattatgtatatatgttattaaaaataccatcttattgtttagtaatattagaataagtaaactattaatacagtaagtattgtagggctaggcgggaacctagtttaatattttatgtgataatggccatctttactgatttttgtgatattcataaaattaaacgactagaaaaacaaggcagaaattttctcttgctcatactttcatgttgatacttacatgagtgtgagaggagtcttgtgagtccctatttctggtaaaattggcaaaaagattattcaattttttttgttactttttgtaaatccttttctattaatattctttgtatgtataggtaaaaaaaatgtgttctttgtatgtagcctatgtggctggcactcaacacctcattctcattgtacatagcaatttgattgtgtttgtttttcttactaaaagtttcattggttggtgtagatgctctatcaaagcttatcattagtttatttttccgattcaataataatat

SEQ ID NO: 82691 - DNA, 1621 bp, Cannabis sativa
ggttggatccaatggaataaggtcacgtggtgctgataacaaacaatttttttttaaaaagaaaattaaaaaaataaaatcaacaacattaatcaattgtctgaatattttattttttaacatcctaaattattcataattaattttctaaaagttatagaatagatactacaactatttttttttaaaaggtgaatagatactataactactttatgtaggagtatttttgggattttcatatcttggttaggcctatatatatgtaatgttttcatttcaatataattagaaaaaatattcccaattttatcaaaatatataaaatactaaaaacaggttcttcgatccaccaaaccatcaaagtaagcaaatcaaatcttctttttacaatctttacttatcaataactattaattactcttatatttttggttatgttagttatagattaagactattaattgaaatataacttaattgattgtgttgttgatgattttatagtgtcaatgacataattttactattgttggattagttctttcatatacccttgctgtaaggccgatctaagggtggggcagttacggttgacgctcgagttctctggccaaataaaacttttaataaaaaattcttcaatttgaatgctaaaattactatttttttttatttttattatcatttattaaaaaatacaattatcttctaaaaaaggtgctttatttaatattttattaagaataaatcccaattattttgttaaatactatattttaaatttttactactaaatataaaaaacatataacttttttcgtataaaaaagcttaattagattttttggcccaaggcttcctattagcttgagactggtttaccttacagtgacttgatttttaaccaagtagattccaaataagatttttgtgcttttagactaacaatatgagacatagtttttatagtttttggccaaagaattgaaaaaagtgatgttgattttttaaatgaattttggttacaggttttggaaaatgcaagcaagctacaacactgtggttttcaacactagagtcgaaaaaatgagtgtaggatcataccaagcattcatgcaatctctacgaagagaattgtctagtggaatcacgagctatgacatacccttattgcgtaaaaaatcagaagcaatcaaagataaacagttcgtttatgtgagacttgaaaacgaaaaattcaaaatcacatttgcagtatccactctcaactgctatatgattgcctatcaagtagacaccaaaaagcgttgctacttctttaaggaagctcctcccgaagcaaaaacattactttttaaagaaagtactccaagagtcaatgttaatctcagtacaaattataataatttaggaaatagagagaatgttaatttgggatttaagtcgttggacgattccctcgaagcatttacagaatttgatagcgtgaatcctacgaacaagcttcgtcaaattcttattgttgttatccaaatggttgcggaggctgcgagatctaaatatattcaacaaaaaatagaatggaaaggctttaaatctggatttttccctaaaggtg

SEQ ID NO: 82692 - DNA, 2409 bp, Cannabis sativa
atacgacaaaaagtttgttgtatgaaatcttaaaaccaattgaggtaagcggcttcctatccctactctctttagaaatgttgtagacattagatttgtttcctgcaccaaaatttgaatagtcaggaaatagctaagtttaagaatacttttatggacagcggatctcatccaacaaacacaacaagaaatgaaaaacaacaaaaccgcaaaaaatgtactaccgcaatgttataatttttattttattattttattttttttttttttgactttttagctaaatatgaaataatcccattatgttaacaaaattataagtagagagtaattactaatatatcaattcactatcaataaatataatggaaaatatatatcaaacaaaaaataatatatatataggataaatagcggtataagtacctaaaactttatgattgtaagcagcataattgcaatattactttaagctagatgaaattgaatttattggtattaaacaaatattagctataagaatgggattctcaaaatttgcaattacattgttgtttataattgtgttttctatgtagattttcgaattgtgtctattagcctcaatttctatgtattttatttcatttgtacttaattacttttaatttgtcttatcaccaattaaaagtctataattttgatgcaagatctgagaagtgagtgtcaattatgctatagtgaaataaaattgaatttcgatataggatgagagtgcctatatagtttagatagcatatagggtttctatgtttaatgtctgttacatgtttaatttattacgagagtagaaaatttgcatgtaattgaggtttatatatctgagaagactataaattaccttagtaaacttactattgcatagaaattagtaataagaatagaatcatgctaaaccataatcaatagatacaattgaaatcgaaagccttaacttttattcattgttaattcccttattaatttacctacttcttactttcattgtttttcttatttttctaattttaattttctcttcacattttatttagtcaaatagaagaatttaattttaacgtatttaactacaattctcgtgagatcgatctcactttttgtgagtaatacctgttcaaacgatacgtatacttgcgtgttgcaaaatatcataataagtttttgacaccgttgttggagattgttagttaatattaataaaaattaagttttattctaatttggttttttttttctgttcaattttagcactaattctgttggtttcaaaatcttatctttttcaggttcaactagtttatgagatgtcaaggtgcaactgccaaattacctattgatcctgaaattgagaagacttgcagacaaaacagaagaaggaaaagattgggaaaagctacaataaagattgaacacaaagtagatatagctaacaacgccaacgttggcaacaatggtaacaatagaagagctatagaaaaccaggctaatgatcgcaaccacaatgaccgtagcctgagggactatttgctactgaatttaacagaggccaaatcctgtataaggccacctgacgttgatgctaacaactttgagatgaagtcggccatactacagatggtccaatcttcagtctagtttggggggctgccaacagaagacacaaacatgcatctcgttaactttgaagaactctggcagacattcaagatgaatggagttagtgacgacgccatcaggctgaggctgctcccattctcattaagggggcgagccaagagttagttggtacttttgccacccaattctatcaacacctgtgaggaattgactctaaaattcctttccaagttttttcctcctgtaaagattgcaaagctgagatcagaaattaacaacttcacccaataagacaacgaatctctttatgaagcctgggagaggttcaaggacttattgaggaagtgtcctaattatgggattgaaaagtggctgcaagtgtacaacttctacaatggattggttaacaacacccgaaaactcatagatgtcgcaactggtggggcttttatgaaaaaaagtgtgaatgaggcctttgaactacttgaagagatagtcgtgactaaccaataatggtcaacaaaaagaggtcaatctaaaaaaattgcggatatgcatgaagttgatgctataaccaagttgacaatccaggtgaaggccttaactaagttggtgactgctcaagcaaagtaagctcaagttattgatagacattgggatattaaataaaaaagggcataagtgtaattgtaataggggtattgttattatatataggactcaatagtgaaggaaaaaggtgtgaagaatttg

SEQ ID NO: 82693 - DNA, 1098 bp, Cannabis sativa
aatgagcattcgttttgaggtattataatacaacaacaacgatatatatcatgtgataagagaccatgtcgagattttgtgacaaaacatttgaattataattaattcaataaacctaattatcaatatcgagctttgttgtgttcaaaaaaaaaaatatccagctttgctcaatcttcgattaaatgtggtgggtccattggaccatttgggttggtgagtggtagctactaatttaataattaaattttgttaataaaaatgccaccgatcatgaatatatgatcaatgttcataactttatatacagaagagtatattatatgctttatgaaaataattttgcttaaaaatatgatgaagataataatatatatttattatatatatgatattttattttcacatatactaattctaatactctcatcacgtttggacttaaaaaatgagtataacgaacgattgttaagagaccacaagaccgaacgtgacgtttgaaaaaatcccacgagctcaaattaaaaattttgtagatatacatatcaagaaatttgtaaatttttgaaataggttaaagacccaacactaaaaatggtcacttattggatttttatttttgaaacaggtctaagaccccaatactagaaactgacactgccgaaaaatcccaaatagagattaaataggaaacattagaagtttttttggtttagctctactatattaaaatttaagatatataagatgcacgaggttttatctgaaaaattaattgacaatataaaatgagtaactctccacataacacaccaatctcaaatcaaaatcaattaacaataagatgcgccacataaatttaccagtctttatcttttatatacacaccaaacccataaattatcttttttcagagccaagatcccaaacatatcttccaattctcaatgtttctatagtgttgattcttgttggatattagagtgggtatagagggtgtattgagagtgttttaaaactgttttcttttgtttgttctgtaaagtccttttttggcaagttaggtgtcaaaataatttttcctttttatggtaagat

SEQ ID NO: 82694 - DNA, 1854 bp, Cannabis sativa
tccaaagttctttgggcctacaggaccattaaaagaacttctacatgccacactccataatcaatgacatatggatatgaggcagtaatcccaattgaatccatattgcctacacacaggagggacacctacgacccaactcaaagccatgctctacttcaggaatcctttgacttagttgaggagctttgagagcagtcacaggtcaaactccagatgtaccaatacaaaattgccaagaatttcaactttaaaggtaagagcaagagatcaaaatcagtgaccctattttgagaacggtatttccagcctctcaagagcccgaagtggaggtcttaggaccaaactgggaaggtccatatgaagttttagacaaaattggtgatggaacctaccatttaaaaagactagatggaagaagaatcccatgagcatggaacgctgaccacctgtaacgatactatcagtaaactggaggtggttaggttccttttttaatgtaatttttattttagtatttaatttccacgtacgcttcagggcaggaagtatctgaataaaagaagaagttttcatttcatatttgatttttgaaagtccagtcaagtaacaagtgatcaaaagtctcaactattaatcacttgggcgtaacatatattatattgttataaatagtttaacctctttcacaagaaatagctaaattaaatcctcaagtataagagtacggggtattgcctgaaactagaacctcaggaaattggaagtaagccgctaccttattatatttaaaattaatctagtgtttaattatgtacaagagaatggagtatcgcccaaaactagaacctcacggaaccagaagtaagccactaccttattatacttggaatcaattttaacatattaacaattaatccaggttaacttaaaataaaagctcgggccttactaaaaactcaagttaacaaaactaaaatatttaagctacttaaatgtaataactaattcaggttaattaaatatttaagttcaaaaatccctgaaagcaagtagtgtctaccaagaaaggtctaattctaaagtaattaattagcccggtttaattggttatttaagttttaaaatccgttaagtaaaaatacttttgaatattttttattcaaaacaagttgataccaaggctcaagccattgaaatcatattccgaagagtataaataacttgttgaacttaaaatctaaaggtttaggccttcagaaccagaacctctcgaggctggaagcattaaacttagcagaccctatagattaaagtgcagatgtctaaagagtaaatcaaatagtactacaaacatggaaaccccacggtaagggtataaaacattatctctgcacacatataaagggggatccttgtcccccagaagacaaaaaaaaaattgtaaatataaagttgtttaaaaagacaagaatggataggtgtggctaaggttgggctggatcctttggcagttgggcatctacagtttgaacatcaaacgagacctccgagattgcctagttggtcaagaaaggaacatcaaaatccaaaagagtagagtcctgtaagttatcacctacaggaatggtagttctaggatcgaccgcttccgtattttgagtttcttccttagccttgtctgcttcctctagtgccaggatctgaagcattagtacatccttatccttagcatataagaagtctatcacgaattttttatgttgctagatagtgtacactgagtagacaaagtcttgttccagcgctttggttgtctaggcttcctgctcttgtttctctaggattacctgt

SEQ ID NO: 82695 - DNA, 728 bp, Cannabis sativa
tgggctcttcgtgaagcagcccgttatatcggcaccctagtagtttctgatccaaacaacttcaaaggactgtggagggattaccttcgtgtgcgcgtcaggattaatgttgctgaaccactcaagaggcggatgaagtttcgcaaacgtaatggcgactggttctatgcgtatttcaagtacgaacgagttcccactttctgtttcatctgtggaattatgggtcatgctgaaaatttttgcaataaggtttatgatactccttctgaccagattgttaagccttacagtcttgagatgaaagctcccctgaaaagacaaagcttcctaaccgcttctccatggcttcgcacaaacatggacgacaaccgtgagatgcaccgtgaagccaacccgacgactgctacggcaaatcccgagattaatgacatgcctacaaatcagcctcaatcatatgtcaatcacgatcccatgatttctgattcccaaaatcatgggactaaaaatcattctcataatgactatgttattttggtcaatgaaaattctgccagcttttcaaatgagaatttaattgagatagctgacttaaaaaggaaaagaatggaattaattgcttcaagtggggccgtaaatcttccaacagatgcatctgaagctgaggtggagaaaaaccaaaacaattctgcagaaatgggtaattcaaaaaacttgtacaaggtgggtct

SEQ ID NO: 82696 - DNA, 2017 bp, Cannabis sativa
  modified_base (1933)..(1981): a, c, t, g, unknown or other
aatgaagatttataaatctatctagaggatcaagatgctagagacgctggcaaagtgaatgctacacgagagcgtacttccagtgtggggtagtagcacatttaaaagaaactgcccacgtttacagtaacgggaatggaaggatgattgaaagtttgtgtaatttaatggtgtgttactgagtagttctgatatctttcagcctactggagaactagttattctccagcatgtagttaaatcccttcccgagttgtgtgggcaagggaatagttggttgcttcagttgagcataatttagagaattttgatattatactagggttgaactggtttgcaaggtatagtgcaactatcagttgtgaaagaaaaatggtaacctttgaatcataaggtaaagacccatttatgtttatgggaaagaatcaagggtcctgaatcccattaattttaacaattaaggtaagaaatttgttatggaaaaaatgtaacgacttcttagttagtgtggtggatattacgaaaggaacatcagttggactcggacacaatcttatgatccaagagtttttaaataccgttctagagaagctatcagggttactaccgaagtggaagactgattttgaattgaattgatgataggagaaaaacctatatttaaagttctgtattggatgataattacagagttaaaaagggttgaaggttcaattacagggaatgttgggcttcaaatctctagaccaagtatttgatagtggtgtacgacggtcttatttgggatgaagaatgataaaactttataagtgtgtattgaccattgaaagttaaataaatttacggtgaagaatgagtattctttgacaagaatagatgtcatgatgattaattttagggaaagactgtcttctttgagatcagtcttcgatctggttattaccagtggaagacttttgtaaagtagcttttcgtccctagtgactttgtgaatgtcttttttaatggttttcttccaattcaaaggaggcatatgagaggccttttttgtatggtgttgaaatgtctttgggagacaaagcttcatgctaaatacaagaaatgtgaatttttctagccataagtaagtttcttagagcatgaggtggacatagatagtattttgatagatttagtaatgattaagaagtttagagttggcttcaacccaggtctgtaactgagattagtggtttcaggaataaacagaatgttatggaatatttatcgaagaaatgcctttagtggaaattaagtcaaaagaattgcaacaaaagctaactattgcattagtgttagcgcagccagtgagtaaggagaaatttgtgagttattctgacacttctaaacaaagattagattgtgtattgatacagtccatgaaggttattgcatgtacacctagacaattgaaggagtgtgaacagttgtgttccagtcatgatattgaattggcagcagttattcttacactgaaaggttagcgctattacctgtattgtgaaaggtgtgaagtttatacagatcacaagtgcctcaaatacttcttcatatatttggaaggatttaatatgatggttagaattagataaagatgataactgtaagactctctagcaccctattgaagcaaattgatagtggatgctctaggtcgaagaggtctaggacaagcttgtaaaaaaaagaagaagaagagagatttcaccaaagtttgctagagatataaccagagtagggattgagttcgtgattggaaaacttattagtatcacattgtagtttaatgtattggaaagaattaaaatgggccagcagggtgactctaaatttcaagggtacaaggaaagactaggaaccaaatcggcatagtgctggaaattattttaccagnnnnnnnnnnnnnnnnnnnnnnnnnnnnnnnnnnnnnnnnnnnnnnnnnttctaaaacgattatgaaataaaaacatataaagta

SEQ ID NO: 82697 - DNA, 934 bp, Cannabis sativa
  modified_base (877)..(888): a, c, t, g, unknown or other
actgctaaaaattaaacttaggtatttatttgcaactaagagttaaacttaagtatttataccgcaaattactcttaaaatattaaataatagttgagtgtgctacattatgattagttttaatgcatactgtaagatgttcaaattgaaaagtagcctgatatttttgttttgtattttatcatattttctatagtaacctagtaactagaattctgaatttggtagaatgtgctacattttgactgattttaatgtaaaagtagtttgtgttctatttttggcttttatcttactttttaatgtaacttggtacctaaaatattaaatttggttgatgtgctacatttgtttacggttttatgcaaaaacaacatgttcaaattgaaaagtaacatgtttgtacaaaatagtgtgttaatttgatagaaaaaattaatatacttcaaattgtaacatggtacttaagatttttgtatagtttgttaattttgattctatttttgcataaagtaacatgttattttgtaagtaactttatacgtttatctttaaatatggttgatcgtgcttagttgtaactgtatattttaacaaatatccttgttatcttgaaaaagtaacctcatagttgaatttttagcttcaattcttcttctaaaagtaacctagtacatgtagtgtgttgtgctatggttgcacaaaataacgtgtttatttgaaaaagtaatctggttgttaaattttagacgttgtttttgcatcagagagtaacctggtacttttacttttgcttttagtggtaataattaattcatacgaataaccttcatttacaactatttataataattttttgggtaaatagcggcataannnnnnnnnnnnttaagtttgtaagcggcataaaccaatgtttatttttagcggcata

SEQ ID NO: 82698 - DNA, 835 bp, Cannabis sativa
aaaaaaaatcacatatccaaaacgatgtcgttggaagtaaaataaaggaagagaaggatcccaaaatagtacactcataaattaatccgacatccacgtagaaacaaagaaaacaaatgactaatcataagagattttaagatcattattggtccctctctgatgattttcaacccttcgctctcttttcatttcatttcattctctctcttcttctcttcttctgaggttttagaagggtttctcttcctctgtccgtacgccaccttaaccacgcatagagaagaagaaggaaaaaaagatggggtctttgacaaatggggtggagagaggaagtacccatatgagagagaaagatgaaccagaagaagtggatgagcatgaaccaatattaatggagcaaaacgagagattttgtatgtttcctgtaagatataagcaaatttgggagatgtacaagaaggctttagccagcttttggactggtactatttattgccaaccgatctctgtctctgaatttccatgcttttaataattctattcaatttatctttttgctgagtaattggaaatgggtttgtgttattttgttatttcatttctatttatatgtcaaatttagcttttctgttatcttgtgaataaatgtgaggctttgaaggggttttctttttaatattctattggattctagttcttacttaattttgttaacacggtttttcttgtcagaaacatgaatttgactttgttctgtttgtttttgaggttgttttttcaaatttatgttgttctacccttttctgacttatttcccgaggaagtgttttgt

SEQ ID NO: 82699 - DNA, 651 bp, Cannabis sativa
acctttttactagtatatatatatttgtctataaattacatcgatccactttatatatacactagataattatagcacgtatgattagttgtatacttaattttattatttaatgtgtgttataattttgaaaaaatttactctccataaaaataacttgttgatagttgttgatcgtatcgtactggtgaggtggcgaatgaaaatttccatattaatcacgtggaagatgagggagaaatgccaagattcttgcaattacctaaccctgattttgctatgactgaagacagagataccatcccaaacattggcctactattgcccaatcattggggattccacatgagtggatttgtctatcccaaaagccccataagtttcctaaacctactcctttgggatggcccaatatggataaagaagcctaagaaatgtttcttaagctatatggagatgaggttttaaacctttacaaggcccaaccatctttgatatccaaccccccaacctatccgaaatgattctattccttttgggaaataccatgttataggcataaatctacccttcccgcgagaaagacttgtctatagagaactcgctgtattgaaggtggctcgcaatattatagtactcgcagtaccgaaa

SEQ ID NO: 82700 - DNA, 601 bp, Cannabis sativa
ttatgacaacaattttaaaatcataatgatgaattttcaataagtttatcaatagttatacatatttttaattcatatttaatttattaaatacattttgaaaactaggtataataatatatatatctagaatggcttagttaattaaaaattattgtttatcaaatataaaatatttggaaaaaaataaaactctataatatagatatttgtgttattaaaagtaaaataatacaagtttagtaattttcttactaattaatattattaaaatatatatgtatagaaaatattatagtaaaattatcattaaacattatagaaaaaatactactaaactaaatacaaccgcacgcgaagcgcgatttatttcttaatttttcaaaatatatatatatatatatacatagaatcttgattaactaataaatttctgttaggggtgtatttattgaaaataaataattttataaaataaattaattttaaaaatatttattttcatcattttacaataaaaatattatgaaaattttgaggtgtaataataattataataataataattaagaatttctttttttatactttaaaacagttt

SEQ ID NO: 82701 - DNA, 1121 bp, Cannabis sativa
atatataaaataacatattcttaatcacaattagtatagtactatattttatagtggttacgttgtagtagtgttttaataatcatgatatgaacatctttgtcctaatgcggttatatacttatatatatatatactattcataagcatgccaaatgctatttactgctttattttctttttctttttttcgtgttataatgctctctttaagttgttatacaaatatatagatatagatatacacatacaaaaacatacaaaacatattagaaagaagtagggaatataggagtggggttgagtaccttgactgagagtaaagtgggaaagtggtcctcattttatcttaagtactggtccatatgcacatatatatatttgggagagagagagagaagttaatatagtagtgttattgtggtccatgcataaagatatatagaaatggaacagagtaaagaatagaaaggtttttaataaagatgagatgaggagagatgaataaggtgaaaggacgaggcaaaggaacatgatgatgatgatgatgatattgaagtgggtggaaagagaggatgagaatagggacaaataaaagtcattcatgttttgattaatgaatttcaccaacaacctcatccatacctggctttgctatatagctcctacctaatattagtactactcagtcagttccatccactctactacttttcaattctaattcatttacacccccatcacacaatacaagaatcattttgatctgatatacatcttgtcactttatcaaaatgataataataattacttaactctcccattcaatgtatgatactcacatgcaatattacataatattattaccaaattaacatgagtcaatactgtgaaattaattaccacattattagtatccctagctaataaccttttttttttttccgttactagagcttttttttttttttttggttaggaaatactagagcactttcatatgtttatttgaataggcaaaaaaatttccttttaaaaaactgaaatagaaaaaatagatttttttttccaatttatctgtgttctgtagagcactcttgtcatttgatttagggtttttt

SEQ ID NO: 82702 - DNA, 1279 bp, Cannabis sativa
aataataataataataacttttttgacacaagatcagatcttgtctcccatgtcaggccatggtagtgcgcgtacgcacctctggacatactttttgtccaacaacctatttagagagtattttgcaaatgagaaacctttacatgacacgtgtcatagttcgcgtaaaatccttctttgtaggtgtatgccacaggtggagaaggttcttactagccgatggtcagatcgtcttgttgtagtaccaacccttgcaacgtgcagagtaggaaaccctatgtgggtaaagggtgtgcccttaccttcatgtatgcctataaataccctcttttttatgtaaaaagagtgaacaatttttacttaaagaatctctgccaaaattcttacaagcttttacttctccaagaggaacgagaggaatactgaagttcatattcactctataaacatttgtaatacttacacttgccaagaaggccaatacaacggactcgtggactagggattgttaacgcacgaattacgtaaaaaactatttgtctattatccattatattacatttttttctaagctctaattaattagtttctgaaaatcccagtaaaaaaaaagagacaccatattttatagaagtttgaccccctgagttagcgggtaatgacctactttctttttagttgtattgatacttagagataatactactcagatcactatagtgatggaatctgaaaaagctctcttaatattacaatgtatgaatctagtaggccagtgtcatgagagagagagagaaccttggaggcgtgtgagagagagggagagagcccttggggcgtgtagcaaagaggagaagagaagattagggtttcagacttagagaggagagcttagaggcttaatgacttagggtttgagactttagacttagggttttagatataggctaatgttctttatatagtagagcttacatgcctaatatccttagaaataggtaaaataaagtagttatttatatatttaattaataaatacaaataactaaattgccctttaaaaatagatattttccctctattttcgtgggttgttaaggctcagtctattgcttgacttgctatccatgaatgaggcctgagcatcaatgtcctgccagagaaaaacttgctcgccatacaatgtctgtaggttgaggtctgaccggccatgtgcttgtcaggatcttgcaggtcatgctcctgcctactttgacaagaggccggcctttggaggtgg

SEQ ID NO: 82703 - DNA, 1100 bp, Cannabis sativa
aattccttgcagtgaagacatcttcattgatatcacttctcagttgaattgataattgtaatttgtagcactgacatagatatttacataacaaattttgtaatcatatacttttaccctttttctgactagttgagaaactagcaaatagaaattactcatttgattaccacttgtcctcttttctgtctttcctaacttcaaagctcactgagaagaatttagaatcaacttcaacaataaacatcactcaaacattgtttgtaatataaatttataaccaataatttgctgcaaaaatgaagacactgattttactggatgtttctactttctttgatagtactcagctttcatttcactgatcactaattcaagtatataaatataactaaattagttggaaaattctgtttttcaatcataactacaaattagaaaggtttatctcaaggcaaaggactacaaaatgtgttctctgctaagccaataacttcaaaagcctaaatgggaaatcaaattgcacatacaaaaagtcgtcttttttcaccattttggcttttgacatacatatgagcgagagagagattgcaagttcatgtaaacacaaggaatgtggatttgaaagtgggaaagttattaattgttcaaaaactaatataataataaaaactaattatcatgcacaatgcgagcagagccgcgaaaggtcttaaagagagcgacataatccgcgatatactggcaattaacatgcatgtaccaattaactattagcaaacaattaatcaaatattaaatgaaatatgaaccgagtaaatatttggactagtctatctattggatattttttttatgtatatctattagtttaattcaagtttattaaatattttaaacttagtaattttttttttttggatcgaattagatatccctcagatattttagattcattatgtattagattagattcatcaaatctaaaaaaaggacactccatccaacatctaatccgatccgattagatattaaaaaaataacatccaattagatattaaaaagtaacattctattaaatctaatcacaattaaatatt

SEQ ID NO: 82704 - DNA, 650 bp, Cannabis sativa
gtatttgcggacaaacacgttttattgactatttattgccgtcaatttttgctgatggattacctcaccggcaaaactttattggtgcaaaattatgccgacaaagactaattttcttgtagtgcactcttatttggtggcttaattttttataaatatttatagaaagtataatataaatttaccactaaatttatctatttaatatttttttgagagaatatccttaaaaaaacaccatcaataagaagaactccaaggggccgaggactaaaagatttattgatgattgatatcagccaaaataatattttgtatacaaaaacgataatcaagccacaaagcagtgctataagtagcctgaaaagtataatgagcaagagcattcgctgctccattggcagttctagggcaataagtaaaaaatacaatagtaaaattaaaacataaatctctaatatcatcaagaagtaaacacaaagaagagtccaaaaagagagttattgagtttatggatcagactttgacaatcagattcaatctgtatattgtgatgccaaaagagatgcactgggagaaggaatggcggattgcgagagcttcgacccactctggaggaggactgtcgtgagctttccacgctacagaag

SEQ ID NO: 82705 - DNA, 500 bp, Cannabis sativa
tatatatatatattaattatatttggtatgatcatgagtactaaaagtaaatattttgaaatgaaatttcaatgactcttgacaaattgaagagctattagcaatatgtgtcgatcatgcaggttcgttgaacatttccctagaaataatattgctattctggccctctattatttattattatacattatatatactttacttgtataatattatttaaaataaaataaaaataataataactatgttctatctcatctttgcaccttttttcacatattactaatactatgtatatagtttctatctaaaaatatcgatagagtattttatcacatgtgattattgttgcataatatatatttatacgatcgaattaattaaaatcgaacaattaatgtactatcaagtactatatatacttttaatttattaagcaaaaataagaacggcacataacagataaaatataccataataattatctttattggaaaaga

SEQ ID NO: 82706 - DNA, 1562 bp, Cannabis sativa
cacctcccctttaataataatctatctgatgtggaggctgtcaaacataataataaagcttttacacatactggttttgataaggtgcgctcaggttctgaagtttccaacacggataaccaaaataagagaataaaattagtagaagtagacaaggtgccatcttcccgatatgttgagaatatgcaggactactcagaatgttcaaagaatatccaacagaagaacttagatggaagagacagtaaaaaggcagctaataaaggagtgaaggaataatatggagatgaagttttattttcttctacaagggagttgttcagaataatggtggggctatcagaatgttatggaagtttggatgtattcggttttaaatttgtgatgttgcttgtatttggttttattaatattctagtttggtcaatagtttaatttgtctaaaagtggatgtaagcaatgatattttgaggaagacttatttttattaaattatgttgtgtttaatttaatcactgttatgattactttaactattatgattatttcttcatgagatacacctacaaaagctcttacaatatattttctttcaataatattatttaagttttatcaacaataaattaagggtttatatggttgataatagaggaacgttacattataatcataagtagtaatattaacaaaaaatagtcttcaatagctgtcattgttgtagaagtaattattgaaaaatcgaataatattataaagtatgaattatattggtatcatgataattaaattaaaatggagaataaattcactgtactataatgggtggaccttcatgaaaaatattaacatacaagattcctattttaagttaaaattttgatcgttactatttcttaattttgtacttttagtgttagagtaaagaatttaaatttaagtttttaaaaatccctatgagattattcttaaggtggatatatttaaatctatagaatttatttcaattagatttaattgtttggactcggcatatttaatgattttggaaatgtaaatgaatcttattggtttaataatgttagttctgattgatttagtaatattagtctttaaagattttattatttataaaggatataagattgtgggtttggttaattctcatttatgtagatgagtattttattatattttataaagggtaccaattacggtaatctaattttaatacatttatatcaatcacgatttttattaataatgatgtttgtgaaaaatcaactgattttcctcaattgaaattgagtgattgtattaggagtgattgaaggaatttagaatatgtgttggtgtggaattaaggtgttgaccaactaatatctgatataaaagatgaattattttaaaagaatttaaaagtagtatctaaggtcaaaagttcctaggatattgatctgtagatagcattgtttattatataataataaaatattataatatatatggtgtctcaaggagaatattaaaaaagcattttgagtttatgaagtaagtctctc

SEQ ID NO: 82707 - DNA, 974 bp, Cannabis sativa
aaaataatgcacatataaaaaaaaatctcttattttatcttttattttattttctaacttaataatctaattattaaaataaataaaataatatatacacatactcgcatataaatatatttacatacacgtggggctggccctaggccatgggtggtcgtggtggcgtggggtcgatagagctgaccatgagaggtagtggataagaccctcatcggcgtcctgccggtgctggagggtggtggtacagagcaaagctctgccttggagcttcacgggtcatgagacccgaccaaagcaaggaagcttgataccagtcagtccacctcctatttctactgttgaccacctgtggaccctcatgggtcttgtcgacctctaccgtgaagccacatgaccaatcagtcccttatgtggcatgttacccaacccgaaccccaatcaggttccttatctcccattcacgtgcatggaaatgcatggatcccatgcacacgttaaaaattacatgtttgacccttttgaggctcctggcttgtagtcgcaaccctgcagggttcgtgactggtaattcaaggttgaaaaacttgtcatctggatgaggctggatttactatttaaacccaagctcactcatcaatggaggtattgtagactttttgatgttataattttttaactaaaatttacaaataaatttaaaataaaaaattacatcaaaacctataccacaaatatagtgtaaaatttttgtagtaaaattgtaaacttccaaacccaaatttaccatatattaacaatttacattcatgcataaaaaactttaattctattcgttcataatatatcaatatatatataaatgcataatcacccaacacagtaattaatctataccattatgaagattgctatagtatcgattgttgcttctcaaggtccatattagagttataaaagcgaaagcagaattt

SEQ ID NO: 82708 - DNA, 1268 bp, Cannabis sativa
tatatatttattgagtgagtgaggattgcataagagaagataggcatggtaagcgccgtaaagattaggtagcaaagtttgaatatttctcaacaaattaatgaacatattaatatatatataaatatttttggtggttttggtgcaatccattcctctcttactttgtttttttattaaaaaaatccataaatacaaccaaatcaataatattggttaattatgtcaatttgggtatatactaatactatatatgatatgatgctacttcttgtcaaatttgattgcttcactatctatccaaaaacaaataagttagacaagtcaaatgcattaccaaagataattgccggaaatatatacatatttaaataattagttaattataaaataaagtagaggcctcattgttctaatattagtaagagaaattataattagctttaatatgataataatgcatactatataatttaatataatagtatatattataattatagtaaatattttgttattaggagtattctaattttttgtaatttttatttggtaaaaaatttatcatttggtagccatatttgggcaattgccacgaaataagacaatctgtgagtaacccacctgatcagctcatttagttccgaggagtaacatctccatcccaactagcttttaatttctttgatctaccaacatgtttatctttctgaggttattttttgttcgaatcttttgtaacaagactagccataatacaattctaggctttgggacactaagtctatcccaaaccaccttactccaaggtaccctgtgtgattggtcaaataaaagttgcgacccctgtttaatactatattttgaaccaataaaagttaataaatctgttcgagctttaaatgcatcatttactgcaacaagcttcttccaataccatctgtaactattaagagcctggtaatctcaccaatctttatctattaagtagatacctttaatccacttaacaaataaattatctttgttggtagctattgcgcaaacgtatttctccatggctaccacgttccaatctagtactcttcaaaaacccaaactcctttctttgtttggcagacatacattactccaagctatcaaacctagaccactataatctgccaagcctttccaaaaataaagccctacatatagcctccacatttttcaaaaactttttagaagaattgttatttgagcctaataagagtgaatagagatgagaa

SEQ ID NO: 82709 - DNA, 815 bp, Cannabis sativa
tttttttttttttttttataagatagtagattacctttttaatgatagattatattttgatttgaaagacacagtgtttacttatataagacgtgttgtttaccttggtagaaaatttgcttaataaggcatgtcatttaccttaatttaaggtaatgcgtttacctaaataaaacatgttatttatcttattttaaggtagtggtttacctttttaataataaattatgctctaatttatcttaaatatggtgtttacctaaataagttgtgtaattatgttctaacgtttttgattgtggctgaatagctttggacaaaacctataacgctaaaggctaacaacacagcttaatgaacaaatgtcatatatttgatctaagaaaagaggggtatgttgcttatattgtattgagtttgctaatcagagtctccccatatatatatatatataaaaactattattaagggctatctgatatttaaaaaaaaataccagtcaatttttcttgtcctaatatctaaagttaactgatatttaaattgaaacatggattgtgtgttgtgattggtatgtcacatcatgttgactcagataaaacacattcttttgtggctagagcagcaaggaaggctgctatgctatcagtagttcctgcacatacaacacaatcttttgcaaagcctgcaaataaatttatgtaagaacatatgttaaaattctatatgttaataatggtctctctaattgtgatacttattactcagatggttgtttcacagaggaatactatgtatagaaaaaaatcttctgg

SEQ ID NO: 82710 - DNA, 845 bp, Cannabis sativa
gtgatgatgatcaaaacccaaaaattgggaatgaggaaattaacactaattctggtgattctactcccatgagcgcccttctaagaaaatccatattcttattgggagtagatggctttagcttctagaacggcaggagaccttggctcacggataccctccgtgtagctagcagtcaggggactctccttcacagggactcttcctgcaaagttggtgcctatatcttctcgtagcatcaattgaggaagttcgttaactaatgacttctcagcttttcttgattaaaatccatgtgtcatgattacaaaaacatggataacatttatccacaagcttccagggcgtataatggtctgagagcttgcagtatcttctcctgaaagatttcaagcatgtggggtttacgataaaccctttattacatgacaccatcagctaccaattaaagtgtcattactaagaaggcataatttcttatattttctcgttagggttttaaatgctgaattttgagtttcgcgtgcgtgctaggcgcgtcttatgcgggatgcccaaaaacggcagtgattatatttgagcggactttccatttgccatgaactttttaggatgcatgcaatgatgggagccatctattgggaggcaatacatcttctcagcttcctacttatccaagcgttagatttcccttggatgaacgagtcaaactgttcgcttctcgtggaaggtgcctcttcctggtacccattaaataccttaagcagcaactttatacttttcatttttttctgaccgtcgtactagagtcctttggttttagtcctttctctgccctgcgaggc

SEQ ID NO: 82711 - DNA, 908 bp, Cannabis sativa
accttgcctataccgtgaacaagttgagccagttcttgcaagcaccaacaaacacacactagagtggagtgaaaagagtactaaggtacttgaaaggcacaaaaactcaaggtctacacatcagctgcagcaacagattgaacatcacagggttctcggatgcggattgggcctgctgctcggatgacaggagatcgattgctggttactatgtctatcttggagagtctcttgtgtcatggtctttgaaaaaacaagctgtagtctccaggtctagcaccgaatcagagtaccgagctttggcgcatgttgctgtagaaatatcatggataaagtcactgttaacagagttgtagttccctttttctagtccttcagttacctggtgcaataatctaagtgctagtgccttggctgcgaatccggtttcccatgctcggacaaaagacatagaaattgatgctcactatgttagagacaaagtgctgcaaagacaactcaaagtgagatacatcccttcacacgatcaaatagcagattgcttaactaaagggttgtcaccatctcgatttacattccttgttgacaaacttggtgtaaggcatccacccctttgtttgagaggggatgtcaaggaatgagaaaattgcctctgtaatattgattttccctgttgcaatattgttgtggtcccctgctgcaataacagaaatgtgggcttaattgtattcccttttttgtattttgtcaattctgttatgccaaatcattatgtaatcattagggagattctctagtcagaatattcttgattccttttcattgtaattgtgacagctgtaattgcctaacggttattgtatttcatcactctgctatataaagaacctctcatgctcactgatatt

SEQ ID NO: 82712 - DNA, 785 bp, Cannabis sativa
tctttcagcgcttggtacctcgcggggtctattttgcggctcttttatcggacacctcgcacttcggggtcaatgttcaaccggtcacacatgacatgcagagatatcccgaccatatctaaatgtttccaagcgaaaaaatccaaatttctcttgagaaaagtgacaagcttttcccgctgttgaaaagttagtttagaaaaaattttcaaaaacttgttattatctaagtgatcaatgggtacctccatggtgtcttccgcagcttgggcggtggtggtgtaatcgaggaccctcggatccaagtctgatttttcttcattcggtatttcctctattctgaacacaacctgtcgagggggtggttattctaacatatatataacgttgaccgacttcttttttgcgagttttaatggcgcgttgtaacattctcgcgagtgcgataagactcctcgcaaaatcctactccagcgggggtaggcaacttcatggtgaggagatagatggaagtcacaatcttcatctctttcaggattgggcgaccaatcaccgcattataggagtattggtcgataacggcgaagtcggccatcaatttggccacgacaggtgcggttcccagagtaattgggaggttgatcattccctttaaagtaatttatcaatgcacgaatggaaccccatcagaaatgtgcgtgatcaccttctcaaaacggcaggttatttccaggaaggctagaatcatggtgctgaaatggatcagactactcaagtgagtctca

SEQ ID NO: 82713 - DNA, 737 bp, Cannabis sativa
ctgatccaaaacgcccaaaaaaaatattattattgttattgttattataataagtattaatcttctttttttcgatttttttgtaggttgaaaaatgttccttagatggagcaaacaatttgaatgcgaaatttttatcaccatactgaatgattggagatcactaattttagtttgaccatgatagtatgcaaattaattaatttaatggagagcgtgctattaatttattggctattttgttgatatgtttcctcgcttatggtatatatggaaaactactcttccgataattgtttccatataaattaaatgtaaaagtattgagtcatatataagaaaatagactactctaattttgattcacacatatccaaaaaaaatagtcactatcttgaaaatgaatatttatgaatattgtcccaaaatgaattgtatttcaatgtcactacttattatttaagatcgaaatactcccaacttaaattttttgtaatttgttgtgattaccttattaataaactaagggtgtgtttattaacaaattttgatttttaattttttcaaaaaaatgtaaatgtgatggtgatttcattttaatttttatttaattttttgtaagtgaggacagataaattataaagggatagaaattgaggttaaagaaagtgaggtatatgaagataagaaaagtgaagtttattgatcagattttccatcaactaagaaaataaaga

SEQ ID NO: 82714 - DNA, 1076 bp, Cannabis sativa
gttttactggtgttttataaaaacacagtatttttgaaaagatttccgtgtgacagtatttttgtaaaagttaacctaaattccagtatttttgtaaatttcccaatatattttgtgccaagtatgaacccatttaagcccaaaagcaattagtcatttctttttacttgggcttattatgccttattaattgaaaaaaaaaaaatagattgggccaacgttgtgggcttaggctttttgtgaaagaattgaatctggataaataaatattaacctatactaggaaaatttacatgtgaataccatataagacaaataattacatgtattaacaagaacttaatatacccaaaccaatcattaaactttaatgcctattttattttacgaattgtttttgtcaatatcatgtttttgtaagcattaatttatttccttttttggttttattttttcaattaagtattttttttttttttttgtttaaaagttaaatcatttgtttaagaaaatatggtatctattctaatttttttcttgaaaaattaattgaaatcttttttcttttttctcttttcaaaattaatctgaatctttcgttttttccaaaaaaaaaaaccaatcttttttgttatgatttgtttgaaaatggaatattttgttttaaagaaaagaattaagtgttcaatttgaatcttttgcttacaagaaaacaactgtggttaagaaaaagattgggtattatattatgatactcattggtatcatatataatttagtagttattggtgttatattatgatactaattggtgtccaaaatattgtggatgatatataatttttttttttttttgacatatgtgaaatgtgatgatatataatttgttttctttagtagaaatagaagatatgtttgttattacgtaattaatggtatcatataaaattttgtactaattgatataataaaaaactattaattagtatttaaatttacgctaattaggatttttgtctcctgaactttgacatgtaacaaattatgccccctgaacttttaagatcgttacaaat

SEQ ID NO: 82715 - DNA, 1006 bp, Cannabis sativa
gttttaatggttatttatatattatacatgtgtgcacggtggacccaaggttgaagttgagagtgggggtgaactttttttttttcgtaagataagagggacataatttaatatattaaaaattgatacaaacgtagcagcaactctaaaggcgtgtgtaactctattcccttctcccgtggcgtaaaatagaagaattgttcgaaagtcagtattccaatcgacaggttaggtcaccaatgaagaaaagcgacgagatgtggataatttgggggatacaagatcaggtgatgaactgaacctaattgcagaagtggtcaatgcgtctaaaattgatcaaaatagggacgaagggggtctgaattcagggatgaaaattcaaacacctcaaaaaagtttcgattgggccatggaagttgaaaactagaatgatacaggaaaggagcaagaattatttcaagaatcaacaaaattgcactggaattctttctcgaaggagaacactttttccagggactcgaagcttacattcacagaaccattgatgaaaaatggagtcaagatagctcgaattgatccagatgaggttgctaaacaagcagcgaattggaacttggttgtgatatgtatggtcctagaagcaaatccccctatggcagtcttcaagggattcatcaagcgtctctagggatacctaggtattgttcaagtagctcgaatgaccatgggcttggttatggtcaaattcaacgatgaggtgactagagacatagttctggaatcatgagttatataatttgatcagaaagcagttttagtcagaccctggtccacatatttaaacacgattaagctggtgcgaacaaccttgtgatggattcgtctccatgaccttggtcttcagtattggagaaacaattacttaagtgctttagttagtacgattgggaaaccgattatggtggaccaagacactaataaggattgcactcgagtccaatttgcc

SEQ ID NO: 82716 - DNA, 649 bp, Cannabis sativa
tttttttaataaataatagtcaaaatataaaatatagcatttaaaaaaaataaatatggaacctttttattaaaaggttttttgggcttgggtgggagccttgggcgtgggcccctgcttccccacccttgagccggccctttagattaggccttaccttcaaaatataagctagttcgacaaggcccatatttttacacgagccgagctagacatatgggcatggtggaatcttcaatttaacaactccttcaagcatttgtaaaacctctctcatgaagggcttaagagaaggggcttcctcaataagccacaaagcaatattcacatacctcacaagcatttctcttattattcaaggtatcaatctcaaaatccacaacaataaataataattttaggcccctattaaaccccttaagctaggtgggccctatgcacaggcttctagcccacctatgtccagagtcgggcctactctgaagcaatcataagcccaatctgtcaatatttcctttaccaactatacaaaatttgcaattggtgtgaaagcttataaatatataagaggaaattacattgtatatccactttattttacttattttaatttttacctctattttcatatttttttagatatacccac

SEQ ID NO: 82717 - DNA, 1010 bp, Cannabis sativa
  modified_base (963)..(963): a, c, t, g, unknown or other
aaaaaaaaaaaaaaaattatagtattgattaatactaaataatttattaacaatgaaaagtaattaaaaaaattgaaatcaatgaaataacatacaaaaccacaaacaaataaaataataacttaaccgaattttggactttacatagtatagatttattcaaaaagctgcttaaagtaaatgatgaaaaaaaaaaatcaaaacattaagtgcactaacaaataaaaccacaaacaaatataataactaaattttggatccaaactcactcttttataatttttatttatagtatagatataaattattaaagtatatttaattatggccaatctactcgcaacatttaatatgtaacctctattatattataaagaaatgttaaaagacatcagtaatatttagtatttttctatgtgttattattgttattggtataattaagtatcgagtctcatatagtttaatgtattttagagaatatcactaatcaatcacaaggcgtctaaatgtattattattatgcactagtggtacataataataatactgtgtattatatatatgcgctaaatttatgattaatggcaccatgtatatattaaatttatgattaatggcaccatgtatatattaaagagattgtatacatcatcttttgtagctgtagcttttcgtatgtgtttggttacgaggcaagacattaacgatctatctatgtttggtaaggagacaggcatgatactataaataaatgtaaataggaggtgccaaacaattaagggttatttgtggcaaaatcccttaaagtagggagatttttgtaactaactcccaattttaaaatttttacggttaaactccctaagttcaagttctgttagcacttagccctttccgtctatttttaggtgttaagtaccaggctgtaatgtccacgcgtacacagtgtacacgtggcanaattttattggtccacgtaaattaatattttaaaaaataaaaaatta

SEQ ID NO: 82718 - DNA, 534 bp, Cannabis sativa
aataagaccaagaggagacagaatatggctcttgctattaatagcattaaccaacacaagacaatccgactccaacattaccgctgtaggacaaaatttatagagtattgaatttaagtaaatgataaaaaattttacatatatatctcttttttttttttatcttttgaagttaatattaaaattaaatatgtaattggatatcaaattaaagaatcgatccaatcaaattagtaattgtattacattagatttaattggattttaaagtttaattaaattagatcgaataataattctctaaatttaattattaattaaatttgatcgaatgaaaaaaaaaaaattgatttggatttgatgtccaaccttatttgattgaattgaatgacatttcataagtacttttggtttacttataaattatgttatctttttttcttatcatatagctttcttataatatgtacttttattagtttactaataaattatgttatctttttttcatatcatatctttcttatactatgt

SEQ ID NO: 82719 - DNA, 1011 bp, Cannabis sativa
gctccaacactttactgttccaaaatttattccagagcaagggcaacctcacagtagggagctctttccatagcctgggtaagataggcagatttgcaagagaagcgcccatcactttcaagggtccacactcactgatctttacaggtgccagaaggggcaccgccttttaaaatcacaaaaaaaatctcatgatcaaaaaggttgttcaacttgtggatcccatttaccttcgttagaaaaaagctcagcaacaatattgtcgtccatgatgggagaacaatttggccgagggaggatattacgcatatgaggaatccaaggttccccccatgtacacgtgtccctaccattagccaccaacttacaagcacctttctttaagatggtcttggatttaacaatatttttttaaaaccaagaattaaaatctttataactacagttaaggaactcctttcctttaaggtattttgacacacagaataaccaaaaagaggagatgacatccaaaagaacaaatgctatggattttactaaaggaaagtttggaactaaaaggccttcaaacttgagctttatgaaaagagtatcaagcttttatatgagactcgcctcgttggaagtccaacactcttaggtgagagaagtccaacacgctcatatgcacttaagcttagagatagaaattgttaggatttataaaacactcaaaaatataaataatcatagatctaatcatatttcaagaagcgctttaatataaaaaccctaaatcataaatcttttgctaaattaaagaagaagacgatgataaaagataagcaaaaatactaacttgaagccaatcttccaagaatacactgtttcttaggtattttctctgatgaggaaggagagaagaaaccctagtattttttggagaccactacctattttatagactcattaaataatgagtttttggtatttctaattcggcccctcaataaattataaattaacttatgg

SEQ ID NO: 82720 - DNA, 1133 bp, Cannabis sativa
accattttcgggcatcccataaaacacgcgctcagcatgcgcgcaaaactcaaaagtcaacatttaaggccccgacgaaagaacaaaggacataatacctcctgacagggacacttcagttggcggctgatgacatgatgtaataaatagttcgtatttatcgcacgtgccaagattcatttaggaaaaaatactacaagctcccggaccatggtacgccctagaagcttggggttaaatgtattctgtattttcgtaatcatgacacatggattttaatcaagaaaggctaagaagtcattagctggccgactttctcaactgatgctttgggaggacaaaggccccaactcacggaaagggcctccgtgactaggagtccctcgactaacagtaatgcaagagggatccgtaagctgaagtcttcccagtcccaggaatcaaagccaccagctctcgtgaagagtatgggatttacccaaaaggatcaaggcatcttgaagatgcaccaaaacgggctacacctttagcccgcaaaggctctgcctatacgtgttagactacggacccagtaaccaagattttgtaggtacgacgtcaaaggttgtctcccacaacatgctatcatacagcgcctgggtgtctcattgtacctcaccaaatgatctaatggctagggttaagggaaattcaaaaggaaaagccctaggacgacacccgtaagaggtccaactcgtacaatttgacacccttaaattccatatgagaaaaattccacctaccgatccaacaattggattttgccctaacgatgatcaatctaaggcagcacatatagagaagttggtccataaatgcccctaaaaagcacaagagaagaggggactttttcaaaaaaaaaaaaacaaagagaagactcattcttcaccacccttagcaaacacatttgtattaagccggatgataatatacctaagaactctagaatattcctacgaagcttcctcttcttcaagagaaacatgagggaaaggagttccagtccattgcatttgtatttgtataaacagttaccaaccgttgtgcctaataaaatagactcgtggactaagatagttaacgcatgaaccacg

SEQ ID NO: 82721 - DNA, 732 bp, Cannabis sativa
taatgactaccataaagttcttggacgttaccaatcatacattagacattaattgtattaattagatgattttgaggagtttcgagctattaaaaaggctccaaaacgttcaaaaacgcatcccattgtatgcttaaaaaacatgaactagttattagttactattttttcagcttatgtcaatttttcttcgaagtgtttcaaaccactcctacttgattttgaaccatttatacacttcaataactgtcattcattcacatttataaataaatagtaacattttatattaaattaagcgtgaaaatgagataagagttatatattcaagtgatcatcaaattgaagaatttacaactcttattttacgatcattctatgtatacacatattttataactccataatatatataaaaatttgataaaattaataatttatcacacttatttaatctaaatatattatataaataatataacacatatcatactcatatgtagctaggaaaggccacttgcagtgtccatcatttcgtacacaagtattctcaactagtatatgcatcgtacataaaaataaaataaagaatagggtacttggcaaaagtgtttaagctaatttcatcaaccacttcattaaaaaaaaaaaaagtaaaaaataaagtgataatcttatcaattcattttttcagtttctgtttccattaattaagttatgtatgattgagaa

SEQ ID NO: 82722 - DNA, 2079 bp, Cannabis sativa
  modified_base (747)..(752): a, c, t, g, unknown or other
  modified_base (826)..(834): a, c, t, g, unknown or other
cagcaataaacagaataaatgtccatctgccaaacgcaactactagcatgaatgcttttttattgtggtaaatagtaaactggcaattgataataaactatacatggctgtcatactagcctaggttgattttcaatgctataagaaaataatggaactctttctgcaacagttttatcggcagctttgactagaatagaatgtaagttaggttttcggacaactttcaaaatttcatgggaagtaagaaaatcttctaacttgtggtactcaaaattaaacaagcatggcaacagataaaataatgtaaatttgccagttatttagcagaattgggcaagttccacaaatgatccaaattcctcaggtagataaaaatctgctacttaattttaaagagtaccaggatgattggttctttttaagagaaaaaaggataagaaaatactggtgttggaaaaggggacatggactaatggccttccagcactctcctactctatcagcagcatttcttatttccaccccaactgtccacccagtcaccttcaatctcaattatctgaaaaatgaagtatcattgcataaataatctcaattattttcattccattcttttgtttggttgtattttaaaatattagaatattattcccatgaaatgccctttctaatattttagtgaaatgactattctattttaaaatagaaagaaataccattccaatgtaatatgagaaaaatttnnnnnntttttttatcaatttttcttatgcattttaaattttattcattcatattcctattctcattctcattctcattnnnnnnnnnattctcattctcattctcattcttattctttcattcatctcaaccaaacgccacattatatctttgccctgtcctaatgtcttataacttataagctcaagaaacttagtcagcaatgaacaatggtctaactagaacggttcagaggacgctaaactgtaatctaagacagatagaagaaaatagtaacatcatcaactgaaactatatcctcatcattatgaaagcatttttcaactgtgtgataatagatctcagtagcttttgtcataggcttcaaatttgtccattatatagaatatgcaacagaaaaagcaaccgatagataattattagtcctaaaacaacaaaaaataaatgttaaacaactattgtgcatacaatggattcaatcaatcaatgcaacaaaagggtttttttttacttcaatggaagtatttgtatatgaaaccaaacaagtaatgaacataaaaacaaacaagttttgtcaaatattttacagaatccacttactatggtaagctaggtagtttccccgatcgaaaaattgcaaatttggaagcctctgagtaggaatactcaatcccattctccttcaagaactcctcgagaaccttcttcgccccttcaggatcaacactctcacactcgatctcataacaagtcccaaacccatacttagtctcatccacctccaacttcaaccctttccactcatacacatccctcacattttcaaaaccccccaaccccacaaactccaaaaccccaaactcctccctcaccctcttcaagatcctagactcgacgcgcccaagcttccccacctcggcaacgcaggcccggcccaagggctcatccaattcctcctcgtcctcctcaacacgactgatcccatccaccagaaccgctttggctttaagcgagaccatgcatcgaggatccttatcagaaaaacgaatccgaagaacagctcggcaagacgagagctcggcggctaccccgtcgaagaagcagttctcctgacggtgagtggtgacgaggaacggagtgaggagatcggtgactcggcggtgagcggcggcgtctggaagtcgaagcttgacctcaacctccatggaggttttagggattaggaagaaaggccgatacggtgggctttggaagaggggtccttgttagctcggtcgagttgttgaaggagggtagaggtggcagtggcggcggtggtggtggtggtgtttt

SEQ ID NO: 82723 - DNA, 1066 bp, Cannabis sativa
ctgactggtttgactgagttgaatttgtctgctgtatgggaagttcaaaccaggaacttggtgattgtacaatgacttcagactccttttgataattgttcagaaatccatttttgaatggaaattccttctcattaaacaccacacgtcgagttatataaactcttcctgtggggctcaagcacttataccctttatgaaactcactataacccaacttgacacatttaattgaatgatgttgaaatttatgtgactgatatggtcgcaaacaggggtaacaagctgaaccaaagattttaaggaaggtatagtcaggcttcttaccaaacaaagtttcaatgggtgattttccaccaagaataggtgttggtaatcgattgattaagaacacagatgtttgaaatgcatcacaccaaaactttaatggcatattggcttgggcaaggagagtcaaccccatctcaacaatatgcctatgcttgcgttcagcacggccattttgttcagatgtgtgggggcatgaatgttgaaagagaatgccattttctatgactaaattgctaaatgattggtactctccccccaatcagtttgcaatttcttaattttcctgtcaaattgattttctaccatgtttttgaattgaatgaaagcacctaaagcatccgatttggcctttaatggataaagccatgtatgtcgactaaaatcgtcaacaaagtgaatgtagtatcttaggtttgtgtttgacataactggagaggggccccaaagatccgtgtggatcaaattaagaaccttactggctctattaggagagtttttaaaaggtagagcatgtgactttccatattggcaagcttcacagaaagtttgattttcattcatggaaattcttacattgttgacacttaacacttgatttaagactttggatgaaggatgacctaaccttctatgccacaggtctttttgagtaacatgactaacattagaggagacaacagactgagaattacattcgactaaaccagtaaaaggacaaaaaccagaacaaaaacca

SEQ ID NO: 82724 - DNA, 1403 bp, Cannabis sativa
ttccctatgtttttgctactatatgaagatctaaaaagaggcccttattttttctataaatcttgttcttcttgttcttgattttttttttttttttcaataaaaagtgatcacactctgcaacacagaaaagaattatataaaaaccctttgttatatataaattaaaggccagaaaacaaaagtaagattacacgaaaccaaataagatcaaactcatcataattatacaaatagcttagacacatacaatacatatatagaccaaaccaggtgccaccaaatgtcccaaagcgcatgcatgcatgcacttttgagattattattattattgcttaattaaacaaacaacacaccatgattacttgttatatagtttgtgatgatgaggtgttgtgttgagcatctaaggccaatccagggttctgacattttccgtgtgatgaagctgagcacttcattgggtagcagcaaggacctgaaagcaaagcgcaatggtgaccaggtgctatacagttttcatcatggacacatcttcgattctcaccccaaccccaatcaccttcacaatgcagtccttcgcagcagatcttgtcttgtgcccaatgacaatattcaccaggtacgctgcaccgccagttaggtaccaaattcagatgaatatccggtaattgtagtcgcccaaagcaccctacaaccatcacaccagctaccaaagtcattaatactgtaatcaacctcatcatcatcttcatcatccttcttttcttatattattattttgatctttatatcttcacatcattcttttcctagtatttatagcagaaattggaactattcctttaatggtttcacgtatattaattgaacacgtgttacacacgttagtagtaaaagttatttacttaatttatggggataattatataaggtagaattacatttttacctttttttttattaatttttttttttttacgatttttcataaaaataacacgaaataacaagaaaactatattaaactaacatgaaaataattatatttaaataatatcaaaacaacaacaaaaaatgacatacaaataataaaaaatcaacaacaaattaataagagtacaacataaaaacaccgtattttctgtaaataaaattaaaaaaattgtaaaaatgtttaaaatttcgagaaccgtatttttgtaatttttttgttgtttttgtgtatttgtgaaataatccctaatttaattatatgcaacccgatatttaattacatcaacgacaatgtaacatttagaccatctccaatgaatgatgtatattttggtgcaaattacattaatgtttacctactttattttatttgttttaatttttacctttatttttatattctttaa

SEQ ID NO: 82725 - DNA, 897 bp, Cannabis sativa
ggagcaaaggtttgcggagatgcaagcctgaattatccaacaagatggagagatccaaaggttaaggcaacagagtcctcttgttgtgcctcctcagcaagtgccccagaactaggagcaaagttttgtgactaaactataagtaattttttttaagtaaacattactctattcatttttgtcatttaataaaataaaaaaattaactcttaaaatttttatgtcgtgcctaattacttcaataagttaaggtgccaattgttactaatattcttacaacaatgtatttgttcaaatttcaaaaataaaaaaaaaatagaaaaaatgattttttttttcatttctacactttaaaacaattttttttttttgtatttttgtgaaattttacacataaacctctatagcaacgtctaatggagcaacataaaacgcaactaaaatccgtacaacaaccacatagaaactactagagaaaccactagagcaacccaacctgtaaatttgaaaaaaaaaaatagtacatggaataattccaaaaaaaaatgtatttgttcaaataaaatatatattaacattttgtaactgtatttctttttaattatataattttgttttctagttttgtaacggaaaattgtatttaattatacagctaataatattcaatttttttgatcacattttattcttgattgaaaatatcaaaattacaatatgccattttaagtgtagttttacttttttttttttaatttctcaatttttaatgtaaataaatttgtagttatctacattatattgagaaagaaagaaaataaaatatttgttttaccaaagactaaatataacgtaaattattagtattaattgtttattctttttaattaattttca

SEQ ID NO: 82726 - DNA, 815 bp, Cannabis sativa
tacttctgtttcttttttgatattgaataatagagattacattgaaatggagttttatttagggcataagacccaacactttcctgcttctattctatccaacgaggccttcggtgagatccttgctaatggttaaatagaggatgtatgtttcgagattccctgtagaaactatcggtgcacaggccccctctaggttcgttagcatggtctgagcaccacattgaacatggggtggtgctgctgcttcaccagaattttttggatgtcgctacttactttgggatgagccaaacatagctcatgttaaagagcatcaagtatctctcgatgattttcgtcttgtatagggagctaagctggctcggcctaccccttacgagatcaggttgtactttgatctgaagtgtgtgtcaaagtagaacaggactggatatttttattttagccagattggtcaccaattgcttggtgaaactaattgtacaaccatgtcaaaggtcactgggtaggccaaaaagtactttattgcatacagtctttgtaagattgggcattacaaattctggccggtgcaattcttcagacgctctatccttactttgcaaataagggatatggcaaatcacatcctatctccaccatttgagcaaagaaatataatctggttgactaatgtggacaatttttggaagtatggcttatatcctcttgctcctggacttgtaagagtgacaactgcagatagggcctaccctagagatgggcaagcttatggcttggatgatgatgaagtacctttatcccacatttcc

SEQ ID NO: 82727 - DNA, 781 bp, Cannabis sativa
tgttatatataaattgataaattataattgaggccattgtttgtttttgacagtaccaactttattacgtacattcatagaaatggatttgacaccacaattgcataatgcatgctatatctatatatatactatataccattactatattaataggtttaagtacgttaaggtgtcttcatataactggttctgagccagtttttttattaaatgttctgcaatatatgtatcagattctacatattgattagaagtactataaagtctgtaactctgtactcaaaaaataaagtactacgaagtctatatatataggaaatactattactatattaatagctaggttacgtacgatttggtgtcttcatataattggttctgagccagttatatattctcctattgttttaaaaacaaatgttacacaatatcattttgtaagaaaaaaaagttacacaatatctattatcagattgtacaaaaagaaatataagcatgtgtgcttaaaaattccacaagcaccattctaaagaaaaagggtctatacatgcactcatcatataaagagcaatcctaaaaatatcgctactctatcttttaaaatactttattaaaattctatttttttttattttatcttacatatttatatattacatcatacatcaattgttttatattttttatctatattatttaaatattatatttttacatcatacatcaaagtacggatatttacacttgtgcggattagattgaattggaaaatttaaaa

SEQ ID NO: 82728 - DNA, 1121 bp, Cannabis sativa
  modified_base (935)..(937): a, c, t, g, unknown or other
aatcccatgttatagaaaattgtgagaattgcactaaaacctacatctaagtcgagtgtaaaggaattatatgtatttttatagacagaacgtggctctataacttcaaattatgaaacccaacacagtaataataataataataattcattgtttattactttatattactagctgtatttgcacagcaaattaattattaaatgccctttgaatacatcacttatttaaactgaaacaaacacaaaacccatgttgtttgtatttgtcaaaaataaaaataaaattaatatggttaatttaatgcttttaataaaagttacatgcccccacccacctaacctcattaagctgtaatttaatgcttttaataatttttcattatgttaatatgaagggtgtttaatgttttaatgtaattttttatctcactttttcactaccattttttgaataaacccctcataaattttaaaaatgacttatacagatcttatataaaatatacatttaaaatacaacccctgttggtgaattaaaagaacaaaaaaaaaaaaaaaaatcaatttttaactttttttaaccaaaaataataacaaatataaatttaaataagttaaaattgaaaaattgatcttatcaaaatcatttataaaattaataaatttttaagcttataagacttccaatagatgtgctaaaataacttaatttttaaattatagagaaaaaaaatacaaaattgagcttcaaacaagtgaggtaaactttagttattttacatattttttagctcaattaatagtgtttagctaaatgtggagataactattcattgagctaaacatattttaatattattttcttcaatttttttttatacatgtgtgtaatattatataaattattaatataaaataaataaaatatattannnatataatatttaaatgatataaagaaaaaatagagaaactgatgtatgatataatgcaaaagttcgaggtaaaatagataaagtagagttttggtgatatatttcaaagaatagaatagaaaaaatgttgggagtactctgtttgtttttttgttttctataatagagagtgatatatttatat

SEQ ID NO: 82729 - DNA, 707 bp, Cannabis sativa
ttggacatggtaattttaaatcatcatccgaacacctaaaatgtatggagtaaaacatcacagacaatttttaaaatctgaagatcaactgattgtaaaaaaccagtacatatataatatatgttatcattacccatacctttaccagcttattctaatcagctataaagtaataccccactaaatatatctcgttacctttttctaatgttttttctatataaaccatctccactagctaaaccacaacatatattcaagatctctctctcttctttttattattcctttagtcaaaaatagaaaattcattcagtaggtagctaaaactaaatagtaatcttgggcagtagagagacatgtcaggaggttactactcattatcgccgaggtccgaagcttctatggcttttcatctttgcttctttctttgcatactcttcatgttcgtagggctgtcgtggtactccaattacgaggccctgatagagggcatgctagatcagatcaagctgggactcatggtctccccgctcctgctgctactagctctccacttgctttcctacgttgaaaccgccaggccccaccgactcggcggcttctcgtctttcattccattgcccgagagggactccttcaatagggcaggagggactccctggggagttggctttcttctggttttcctattctttatggtctct

SEQ ID NO: 82730 - DNA, 712 bp, Cannabis sativa
aactaagcgggctttacaaatttagaaggataaaattgataaagtaggtatgatctcttatagcattttctttattagattctttaatcttgaggatagaaatttagtgcttaatgaaggttatactttcattaacaaacgacctgtttatatgaaaccttgagatccaaatgtgaattttaatagagaagacattcgtacagtgcctatttggatccaactagaagatctagagcttaagtactggggacagaagtctttattcaagatagtagggcagctagggagccccttcatggtggatgaagtaacaaaaggaagagacaagctaagttatccacaggttcttattgaggtatcaatacataggactttcctgatataattgaatttgaaaatgagcatcgctttaatgtaatagttgctgtcaattatgagtggaagccaataacatgtgcacactgtaaggggatgggtcatagaaccaatgattgtaggaaaaggaagggaagaagcaggaatgggttgtgaaaaatgataccaggaagcaggaagagaagcaaactgaccctgaagctttccaaaaagttgtttacaaggttagaaagttaagcccacagaaaaagttgcagctccagccacttcaaatgcttttgatgcattaggatttgttgatatctttgaaatcctctctaaagcttcacaccaacaa

SEQ ID NO: 82731 - DNA, 762 bp, Cannabis sativa
gtgtgtgtgtcttgggttcgagtcccatataaaacatgactgtaataacatgactgtaatatataaacgcttaaataaaaaaaaataataaaatttatgttaataagttaccaaacataaaataggaatgcaagtgggtctaatagcattaaaatttatgtcagtagcttaccaaacataaaataggtatgcaagagggtctaatacagagtaatagctttagcattaacaccttatttggtaagattagatggaaaataggaaaataataagaatgaattgtgtataagccctcaataccaaacaaacataagctttgggtggataagcccaatccaccatattcaataactccctcctttaataccttctaccaaacaagttgtaagcttattttattttattttttgataatgacatgttgtgagttttgatgtgtgtcaaacacatatattagatgtgagatgtgactttgaatacagccaaatatttcatttctacaagagcactaaaatattacatataataagttataaaaaagaaaacaaaattacatataataaaatcactttttataacataaattatcttatatatgttattttgggggaagaaattttgggagcacaatatttcctttggtaaattttctctaactaaattcttacaaagaacaatctcattagtcatggtctattaaatatgtgcctagtttgttatgatagagactacacatcaccaattttataccaaaagaaaact

SEQ ID NO: 82732 - DNA, 1041 bp, Cannabis sativa
  modified_base (462)..(482): a, c, t, g, unknown or other
aagaaactagttttttcatcaagaaactatttctttattagggaattagttttaattacatagaaataaaatttatatataaattcttgagttttttatggtattcctttttatttgtgatgatttatcccatacttctaaatttttttaaaatgtcacattttgtgcaattaaatttaacatgttatatatatcaaaactttttttttcctcatattttagtaaatattgttagactataatataatataaaaatgaaacatacacgaatgatatgttgccagaaaactataaacatatcataatcgtatatgcgatgaaagcactgaaatacctccattcattgatgtttgcagcttcaatctcagtgatagcttcaatatggggattcgagcttcctcgctctctcaactctctttagatggaatgttgttttcacaaaatgagtgaagagctcggggnnnnnnnnnnnnnnnnnnnnngtgagatacttcattagtatctgcaccacattatttgtaagaatattttgacaattaataggaaaatcaaatcgagtaatgaatatcaaaatctgaccatatatagaatatcacgtaattaagcttgtccaaattcaatgaatataaaatagtaatttatctcaaattaaattactttattttattccataaataatttttttttaatattctcctacttgtttagtatttaattcaaacccaacattcctcattatgtaataaatataagaaattatagcgacatgtcctcattatgtgtcaagtactatctttcatgtaatacaatatatttactacataacaatatattttatgtggcaaagcgaataaaccataaactttaagtttattcaggtcctctaaaattttctcaaatgtaaaattaagattcacataaatatgagaaaatatcaaaataaaagtttcattaataataactttatttgtacaaattacataagggaactaaggcctcaacagctgcatgcctcggccacgatattcgccgatgagttgg

SEQ ID NO: 82733 - DNA, 913 bp, Cannabis sativa
tgtggcttttatggatgtcagatagtattggttgggctttagatgcgtgtcacctcagggccattctcaattgaatttccctcattcctaaccgttggattatttagctcattacacaaggacatgcatgctctgcacggtagcgtggcgtgggagacaacctctgatatcgtacacgaagaagcctggtcattgggtctatagcctgacacgtgtgggctgagcttccgcaaggcaagggcgtaccccagacggtgcatcctggttggagaagatccctactcttcacgggagcaaatggcctcgtctttcggagtggaatgagacattagctcacggatacttttcgcatggccaacacttggggagacttctttcacggaggccttatccgcgaggttagtgtctttatcctcccggggtgctaagtgaggcacttgggcgacttaatgactcctcgaccttctttaattaatatccacatgtcatgtttgtaaaaatgcggataacaactatatatatatacctacattcatgaatcttcataaatttctaataattaattgttaatatctttattgttaattttttgtttactttttaataatggtttaggcttattttttattcattaacttctaaactctctatctttatgtctactctttctctttttttaggtggatgtgtgcaagacttcaaacctattaattcatacattcaaatataccttcatctctttttcaatctatttagataatcactgtcacttacttttataggtatttcaaaaatattcaaatagaaaaattgtatgcaactcaagatgtatatatatatatatatattttttgatttaagcgtttatatattacatcgcataaactggggctctattttttttttttttttt

SEQ ID NO: 82734 - DNA, 1468 bp, Cannabis sativa
  modified_base (1183)..(1188): a, c, t, g, unknown or other
aaaatctatagcccgattagttaaaaatcgtcctaccagaagccatcgatcgtcaatctctgccaatccatcagcccctgcttcaaaaataagcccctcctcatcatcatcatggattgagaaggccgcatattgtcctccatagatggtcaagaaaatattcagctcccacacctcaggaaataatcaatcagcaaaataacaaaatccgaaaactaaacacccagaccgaagaacaaacaacaattatcatacatagcccaccatgtcatacgacaagaacttcgcctttctttttcgcctttcggttagttttttagggggtgcctttagtttgagggtaaagaaataaaaaaggactaaaatttattttaatcatttatttggttgcatattcaatgattgcaatgacatttttactattttatatcatttttatgtcattcttaatcatacttctatttatatttttgttttaaattttattctttgtgtataaaatatgaaaatagatattattattattattatgaagaagtgtataactattttatgaactatctaatcatcaaaataaaatatatattaatgttgacttagtccacacaatcatacctaaaaacaaccaaaatcttccatgaaatttctcaatcccccacccctaatacattctcctccattcattccaacaaacattcaagctcaaaatagaatcataattcaagtgtattccacattctttaaatatttaataaaagctttacatccataccacaatcccacaaaaataaataataataattatactaaattggaagaaagatgtgggcttcaaccaagaacacttcaacagattttctcaaaattgtggtagtaactctcattctatggacgatacttgcatcagagaaagcaacaaccatggcgatggaggacccaacggaggcaccagctgaggcaccaatgcaaagtattaaagagaaagatgattacaaaaggtttgaaaaaaaatcaaagaaaaatgaatataaggtagcaatgcccctttatagggttaaagaaaagcccggtgtcctaattcctgggtctaaattccaagcatccactaccttcttttcaggagaacagccataattttttaaaatataaaaatatgagaatgaaataataataataataatannnnnnataataataataataatatagatgaacaagtttaatttttaaatgtaagaaagtttgagagttaattaatattggtgtggctttgtatgaatggatatatattgtgttttcttagataaataataatattcctactacattatggtaacatatattatttatatacatttataatttatatttatattaaacatctatgagatatgtgttcttctcaccttgcaaactaagtccttacaattaatgtatacaaatgattaagttgatagataatgttcaa

SEQ ID NO: 82735 - DNA, 1623 bp, Cannabis sativa
ataagtatttcaaaacaatctcgtatattgattacactaacataggatcaaagcagctttcaccacatttagcgtggctaaaaccatcaatggtcacatatactaatataaccaaatgacatagatcaatcatgaatgtgtaacatggaaattacatgcacacgtgatcttagcatgcctatctccaagtggtcctccttaattgagatcaattctttagtctttctatcctttttattaaacctcaattgaaataatatatttagggtactcaaaatttaaattcatactttatccacagaattaaaccataaatatgtgttagcttgatatagtatatctcaaatacaaactcccactaaaccagcacaatcttaaatatcatccatatatgaataacaagctactgaaaaagccttaagttgtatatcattaatgatccagatctgaatctacatggaatttgttcttacatgttatgtagataccttattactcttaatttcattttaataacaattatctaaaactcaatgcactacaagacaattattttttgttgcaaaattcattaattttgacggcataagttaacttttgcaaataaaatttctttatttttaccgacaaaggtagggaattttttcccccattttttcaggtcgacaccctatgtctgtgaatggtttcgttggcaaaaagtagttatgccggcaaaacaaagttaattcgtcagcataagtagggaaaccaagcgccaaaaggtgcctagtttttagcaagtgaaaagaacttttaccggtgcatatactccctagcaaaagtcccaaaaaaagtggtttatttctcgcgcaataaaaacatggtaaataaattaggtgagaaaattttactggtgcaattaagcttgccgacaaaactttttatcctaatttaaacgactgtattttgttttcttaattatttttaagacgtttatcgggaagcccagctttaccagaaaaaataaaacctgattaaaaccacgaatcgaccccttttctccatttttctcctcttcttctttacactttttcttcaaattctcttaaatccgcccacctccatcaatccctctccatactcctttccatctccttcattaccattctctctttctccctctctctcatcctttaaagtttcatttaagaaaaaataaaatcatcatccccatcacacgccgccgctgccggcgccgtcgtcatccactgttgctggagtcacaatcctcattttttatttaaggtaattttaattttattttaatgttatatatatttatatttgtaattatgtgtatatataagtatgtatatatggtacgtgtgtatatggttatgtatatattatgtgtttatatatgtgtatgtataagtatgtctctatatatgtgtatgtatgtatatgtatgtgtgtgtatatataggtttgtgtatttatatgagtatgtatatatgtatatgtatgtgtgtatatataatatatatatatttatatatttatggttgtgagtatatatatgtatataatatatataatttgattatttttcgtaactttatatatatgtgtatgtatgta

SEQ ID NO: 82736 - DNA, 798 bp, Cannabis sativa
tgcacatattaatattattactcaccttaatatgacaattttacttagtttttattttgtttgtgtatgttcagttatatattgttttaaaaaaagctagaatgtttttttaacaaaccagccgatgccttagcaaaatggagccattttgataggtttctaacaaaactaagaaacaaaatggtatcttaaataatatcatgatttttatttaaaaaatgcctaaattaattttattaaaaaattattttgtaatttcttaaattttatttaactcattatgttttttgattaaagtttaaaggatatcaataagaaaatagcaaatggatattgatttagtaattaacaaccaattatttagaaaaaatttcaaactataacttaactattataacttaagtattattactgtaaaaaaattaaatttaaaaatttacgctataacttactttatttttttagcaatataattataattattctccaatatacaccagaaatttataacacaaattagaaaactaactagtggcaacattgtactaaaacatatgaattaaaaacctatcattaatttatttatttatttatcttttaaaaacactatcaaataattagtgacaaaattgtaattaagaaaaaaaacaacatttatgcagtgttatagtgctaaatttaacacaactttaaacatatcctaaatttgcgcaattcttttttctttaaagaaatttgacactattagaaatgctcttatttcgtttcggcttactttggcaacaaaactgaggcaga

SEQ ID NO: 82737 - DNA, 1343 bp, Cannabis sativa
aatcagatcagggtaatggtaaagtaagaattacatttgatgatcttgaagatgaaatagcattctggaatccttctatagtctgctaggtattgggagcgaaccctcctctgtaggtactagaaggttttgtcaacaggatttggagagacaagattaatcgagtgaagcaactggctcatggtatcttcatcattcggttcaattctttggaatgcagagatcagatattgaatgggtgatatatattctttaatcgacgtctggttattatgaagccttggaatcctcatgagaattttaagaaagaagatgtgagaagtgttcctatatggattcaacttgaagaccttgaactgaagtactggggacagagatctctattcaagatagttggacagatggggaacccggtgatgttggattctgttactaaagaaaaagagaggttgaactaccctagagtattgattgaagtacaaatggatcaggtttttcctaatattctggagtttgagaatgagtttggatcgaccacaacagtgggagtgaaatatgagtggaagcctgtagcttgttctcactgttttggattaggacatattgctgctgattgtaagaagcaaaccagtgggaaacaacagtgggtagtcaagaaggataataggaagcaagagcaacaagatgaggaaggatttgtgaaggttgttagggccaaaaatccagctagaaatggacagaaattggagaacacacaggtgcagaccacgactgtgaggaactcctttcagctgctagagaatattgctgaaagttcagaacaggtcgaagaagagaacaacacaagagaggggggagtaccctctctttccaatggagaagttcctttgttggaatgtccaaggagctaacaatcaacataaacagcatttaataaagcaatttatctatgctcaacatgttgattttgttggtctcctcgagactagagtaaaggccccaaaacttgggaccttgtactcaaatgtgtttgagggttggtgtttctcttcaaatatagcgtggcatgctggggggaaaatagtaattgcttggaatccattaaggtttactattgatatcattaagtgcactagccaactaatgcatttaaaggtttcaacagtagatggatttgatagcttcctaacagtaatatatgcatccaataacagaattgaaaggaaggtattatagaaggatttatgtgaactagctactgttgaaaactggtttctcatgggtgatttcaatgatattcttgctaaagaagaaagaatacagagttaaatcttatcctgatt

SEQ ID NO: 82738 - DNA, 1028 bp, Cannabis sativa
tgaaaacttaacacagtagacaatattttaaaaaaaattctaccccacagtattaaagtaaaaaaatttgaaatttcagtatgtgatgtaaaaacttctttttttctataaagaagaaatttcattaaaacagaaaattgattattgagaaaatataaaaatcgatgagaaccatatgtttaaataaactttcatgtagaggatgtaagagatttaactagtgcataggctacaccgcttgcagattacgaaatatcatagcaagtgtgtgccaccaccaccatttgcaaattttggtattgtttggggaattcaaatattatttggaattctcaacaatatctagaaattctattcgatataataattagaaagaagtattaattagaatattttattataattaatttttaaaaatttccactctaaaaatatattgttggtggtattttttcctatcatgacatatggcttccacatgtaaaggtcatgcaattagcaaggctcatctaaggtctagaagagaagaacgaaactcgacccatttattgccctctgggaagcaggacttgggaccctaaccattaaatggtcctacgcagggccgatcttaaggtgtatcggatagcctaagataaaattaaattttagggcccttacattgtggaaaaattatgactaatagtggagaatcaaaataactaaactttaaataatcaatcgattagcaatgacaagattaacaaaataagaacaacaatcagaaataaaatagggacaaacatagtctataaagccaaaaacaataaatggagaaaataaagaaatcaattctaagatatatactggttcaagtccaatagatcgatgtgatttctggctctattccagttttgaaacaccaccgaaatctttctttattgattgagcaagaataagtacaatacagtcgagacgagattctctgatgagttcttaataagtgttttaactatcacacttacactcaagaattttcttcatctaca

SEQ ID NO: 82739 - DNA, 818 bp, Cannabis sativa
acaagaaaggatccactatccaaactgcaaggcacggtgagatggagatcgagattccattttgagaatgcttgggcggaggacgaagagtgtatggaggtagtacaatcggcttggctcaagaaagaaccaattgaacaggctatggatcttaagggcagaattacggagtgtggggctgctcttcaacgctggaatcaagttaaaaagagagagatgacaaaacaattgaatgaatacaaggaaaaaattagccaacttacaagtagaaccggggaggaagattggcaacagctccgggatttggaataccaacaaaatatttggctcgataaggaagagaagttttggaaacaaaggagtagggcggtttggctaaaagaaggcgacaagaacaccaagttttttcatcggaaagcgaataatagaaaggccaaaaacacaatcaaggggctggtgaatgagcatctccaatgggtcacgggcaataggcatatgggtagggtggcttgtgattacttcaaaaaattattcacatccaatcctgctactgaggccgaattaaaagagttccaaagacttgttccccatagagtttcaacacttactaatgatcaactccttgcccccttcactaccgaggatgtttacaaagcgatgcgagacatacacccccaaaaggcccccggaagtgatggtttgcccggtttgttttataggaagtattggtctactataggtcccgaagtgacaaaagtttgcttaggaattctgaatgatgacatgcccgtaaaggaactcaatgatactttaatttg

SEQ ID NO: 82740 - DNA, 558 bp, Cannabis sativa
gagagagagacaataattccaaacgtactaaattaattgtatgaaattatatatgtggaaactgaaaaataatgattgcaaatgagacaaaagtctaatcatgtagaaagttgtgaatgaaaaagacgtcttgtggtcagaatcatatacatttacataacatatctcttctttttgaaacctttcaaaattattagtgctcgcatttggcttctcaaaacagaaaaagatttaaaagaagatgatgaaatgaaataatggaaagagaaggagagttaaatttacaaattaagatgcattgcatgttaatacagtacgcataagtcaaacaatcaacgtttgcttatcagttacttttgggtccagtcggtcgtacaatgcacaaagtcattgcccaaatatctcatatcgtcaaatgtcgacctctaaccttcaaaaatcctactttattttttttttctcttataaatctccctcaccctagaatttggcggggcccttcttcagatgggtttataattttatattgagcattattgttaggtactaatattatag

SEQ ID NO: 82741 - DNA, 1155 bp, Cannabis sativa
aataatgtgacacaggcagatgggcatggccagaggtgaaagtgaacaagttattaaaaaaaccttcgtactcattgtcatccatcaccatagtacccaagagttaatcttaatttctactacaacttccttaccccttcttctagaggggagaggcaaagttaggtcaacaactaagtcagtagtgccactattcgaagaggataagtcttctattccaatgagagccaaatggttgacattagccagctgagcaagaacattgggctcatcaatcatgttgttatcatccaaattgtattctggtggatacaatcctaccagcttaaaagcatccactgttacgatagtaggagtaaatcaatcatttgctagctagcatggcacttagagcttccacatactccaacatatctatacttggggcaagtctcgcatatttgccaattttattaaaggcacaatgagttgtaggcatgggtgtcgtgaagaagtaagatctctgacaggtgctcactttggtctgctcaaaaatcacagtgaggtgtggctcattctcatcccgtccatctcagctcatgaagtaagaatagcttgagtagttttgcttttggaaaccatatagtgtgagcaagtaatggacttcataaggggtaggcccttccaatttcatttggtgataaatgatgtataaggcagaaaatgctaaatatccatgaggagtaatctaggtaggtgagagcttgaagtaatttgtgatatcttggaaatatttgtgcagcggaagggctgccccagccttgacatcatattaggtctagacacataatttagcaatcagtttactgatacattgaccctctctcgctccagtcacccttacgttcaatctaaaatggtgtagtgagtggtatctcaccacgatagcccattttcacttgctcaaggggagcttgcactcctcctcatgcttctaagtttggatcttgtactatgttttctctatgatggaagaggggatttgttaaggctttccctttttatttttgggaggatcattaacggacgcatgaggagccatttctcctggcttatcactaggaggtgcctttgtccttttttacatctttgaaggaccaccagaaggagtttgag

SEQ ID NO: 82742 - DNA, 1793 bp, Cannabis sativa
cttatttgggattgtctagcagtctacagtctgcattctaaatagaatacctagcaaattggtatctaataaactcctatatgaactatggacatggaaaaattctagtagtaaacacttacatatttgggattgtccagctaaggtaaggtcttttaggccacatgaaaataaactggacttaagaacatttacttgctattttgttgggtatcctgaaaggaagatgagttttaagttttatgatccatctgccaagtccttttgtttacacgagaaatgtgagactttttgaggatgttgtgtttgaggagaaagataaagtagtaaggaatgtagttttttaaagaagagaaataaattcttctaccaaatatttttttaacaataatcaacctatttttgacattgttaagacatattcgaagataaaaatgaggatactcaatttcaagatgttgttccagaagagcaaactcaacaacctcaagaggaagttccacttaaaagatccactagggagaaaagaagtgcaatttcaaattattttattatgtttattaaagagcgtgttcgacataaggacaatggaagatgatccaatgaatttccaacaagtcaaataaagtgttaattatcaaaagttgattgatgccatgaatgataagatgaaatccatgaaagatagtgacatttaggatcttgtcaagtcaccaaggattttatacggaaggaaggcgttgattataaagaaactttctctccagtatcatcgaaagattcttttagaataattatgtcacttttagctcatcttgatttagagctacaccagatggatgttaagacaatttttttcaatggtgacattgagaaaaccatatatatgatacaactagaaaattttgtatcaggttatccaaagtctatagttgtaaactcaaaatcaatctatggtctcaagaaatcttccctttaatggtatcacaatttcatcaaattattgtctcatatagatttaaagttaatgttgttgatagttgtgtattcacaagttcaatgggagtaaattaatctaactcatgttgagaaaagagataagtttagtctcaactattgctccaagaacgaaatttaaagagtaaagatgcaagaagattccttatgcttcgactattggaaatcttgtgtatactcaggtatgtacgcacccagttttgacgtacatggtgactatgttagacggatacttaagtgacctcagtatggatcattggaaggcagccaaaaaggtcatgaagtacttataaagaatgaatgattatatgctcacttgtaagaagtttgaaaatttcaaaatcatcaggtattctaactttgatgttgtgggctgccaagaaactaagagatccacttatggctatgtccacttgttgtctgaggagctatatcatgcaaaagtgctaagcagacactcatagctaattctattatggtaacataattcatatcttgttatgagacaaccaataatgcaatatagttgtgtaatttggtcacttagatgcaagttatgattgaaagaccactaaaggtatattatgatgatctatcagcagttttatattcggattacaatagaagcttatcaaagcctaaacacatagacattaagtttctagttaattggtaaagagagggtttaggttagatagttactattgagcatataggaacaaacttaatgctagcaaacctattaactgaagctttgacacccaaggtctttcatg

SEQ ID NO: 82743 - DNA, 610 bp, Cannabis sativa
ggaagaagcagagagcgtttcaagcttctgcgaaagagaaagcggtggaggtaggagaagacagtattaaaccctacatgcgcctaagtttttaggtacaccttaattaatgtggggatgcgaaacactgaatcttttttacacgtgtcggctttgtagttgtggataaatattctctgcggcttaggtggtaacggaaaaccaattgaaaaatgacacgtggtaaaaggcaaattatttgaacttggtgactgtgttttattatcctgaaattacgatggagtccgttgtaagctgacgtggaataattttattggctatatttttgtcagctgctacttgctaattgctacgcgcttgttatttttgttttatcttttttattaaaaaagtaataataataaataaattgtgtttatcttagatttaaatttttttttttctaaataaaaaaattatacacggcttcgtccgtgtatgagtacctagaaaatttatagttttttttttttttgagaacaagaaaatttatagttgaatacaagaaaaataagttggaaagtgttccgaacatgataatggtactaatgaattagagaaatgttagtat

SEQ ID NO: 82744 - DNA, 2509 bp, Cannabis sativa
  modified_base (284)..(315): a, c, t, g, unknown or other
aagggaattgtagattaaaaacatataagattcaccttacaaaaaaaatagtttacagttctcacatatatatgttttttatactcaaatttgtacacactacacactatttatacatattgaataatgatgcctaattaatttcaatgagaattacttcatatattattttttaaaatttttttttttaactttgcggtttgagtttttaaagtggttgcatcgctaattgcaataagagtttttatgtagaatttcgtaaaaatacaaataataataataannnnnnnnnnnnnnnnnnnnnnnnnnnnnnnnaaaaaaaaataaaaaaaaaagccctaattttaaatacataattaaaagtaaaattagtccgaatgtataattatttgtggtaaatattaaatacatattgtgggtataaaatatgcgatttggtgtccctaatattacctttttaaatataaattaactaagttatacattaatatttttttgacaggttatatattaattaaatacttacaaaaaatgaagtgggagcaaaaccaaatccgccgaaaaagccaagaaggtctccaaagaaaggaaaactgactccaacaaatagtgttaatgctgcataatttatgatatcattaaagttcatccaataaaatcatctcaaaaaaaaaaaaaaagttaatccaataaacaattccttataatttagtgatctaaattaggttttatagatcatattttgtaccactatatattcgtttacatcatatatttatcaaaaaaataattaacaattttgttgtgtacttttaacattatttgattttatttcttaaaatatacaatttgttaaaaaaaaaattctgaatgtttacatttagagaaatttagctatcattctattattttattaatttaaatgttgatgtatctttataaattagcaatttttctctctaaactttgacaactatcaaataatatttcttccaaataaaaataagaaatattcaattttttttttggtaaatcttaaaaaaaaaataacttacatcttaaacaaaaactattttgaatgattaagaaaattaaaaaagaaattagaattttaaaattaattaaacaatttaacaaaatttattatttattaaaaaaccatttagatataaaaaaattagctaattaggattattactccctgaactttgaaatgtagtaaattatgtcccctgaactttgaagaccgttaaaaaatctccctaaactattgagattgtttgatttaaggactttgtctaattttagtaagaaaagtctaacatagatgaaagttcatggggcataatttggcaaatgtcaaagtttgatgagcatgatttggtagatatcaaaatccagagagcatgatttagtataaaattgaatgaaattggacaaaagtccttaaatccaacaatctttagttcagagagaatttttaacagccagaaaatttgaaggacatgatttgatatacgtcaaagttcaaagagcaaaaatcttaattagcctaaaaaattatattaaaaattcattttttgtaaaaattaaattttacaagaacaggattgactctgttttttatctaaaaaactaaatttttttaagtataatatttcttagtttaatttctaatttttttttttaaataattttatttttacagaatttctaactatgtttttttttattttttttttttaagatatgagtttgtaaatgtaaaaaagtttgattttctcttcacaaaatctttgtttaaattatttattggatttataataattttaatttgatttttaagatatatgtttataaataaaataaaatttgaaattatatttttaggaataatttaagttttttaagtacatttaatatttttttattaatttaatactttcattaggtttttaatattttttttaattttttaaaattaatagaaaattatagtttttcaattaatttttttaaataaaatgggacaaaatttagtattggtcaaagttcatagagtaaaaatattaatttttaatggaaaaaaaatgaacctaacaaaaatggcatgattatgtaatccttatattttaaaggaaaattttagagtgtgtttggtaataattttttaattagatttttttttttaaaattaaaaaggtgaaaatattttctaaaatcatgttctataaaattatttttacttttcaattttttaattaagaatctaaatgttaaaaacaaaaacaaaaaaaaacttttaaaaaatttttaagcagctttttttaattaatattttagactccaaccctaacttagactttgaaaatcgaacttggacctggccccaaacttggacccgctcccaatcccgatctcaaacccagtctcggacccgacttaaataaaatcaacaaataaacacaaaaataaaatttacataatatacttttgttttttattttta

SEQ ID NO: 82745 - DNA, 1399 bp, Cannabis sativa
aaatttatatattagatataattacatcatttttttaacataatattgtttattaaaatattttttaattagtatatcctattaaaagtgtatattacatgtttatattttttaaatatcaataatttttattttctaaaaaaactactaataattttattttacatcctatttatattgaattttctttttagttcttatgagaattaataccattttttatacattgattattatctacttttatttcatatcaagtcatatgtttgtaaaaattaaaataatacaaatacaacataaataggagataaaatatgtaaaaaaaataacttacattttagtcatattttcatgataaaatctatagttagtatatatatatatatacccaataatttttataaataattaggatgtcatatatatcacttcgctcttagtttttagtacaaaaaataaaaaagaaaaaaaattactttcatagagcaagaatgacaaaatttttttaaaaatgaaaacgtattgattaatgctcttacaatctacttgttcttatcaattgtaaaagtacataaaaagggcaaagtggaatgtagaatatgaataagaaaattaatgacaacataagataaagatcttgaaacacatctttttaattcgtgaataaatttgcagaacctccaaccatgcatcaataactctttattaaattttgaagtgcggtgaagatttccacaatttcatgagtatattgttgtatgtaaaattcttttttaccaattttttctttggcttgttactttgaatatgtactatgttatgttataaaaaataaaaaatattaactctttctttttttcaacaaattttgcatcagtttttttttcatattatattattctttaaattatttcttattttatgtttgttataatctacatataaagaaacaacaaaagaaaaaaaataaactaaatataattatgcctagttaataatatgtgttagatccatttatttttatttaattttttttaagtaaaaaaaattcttttcatgaataggcaaaaaactaattgatttaacagagaaaaatttaagaacaatttaagggaatgtaaaaaacaaaaaaacatgattttttttttaaaaaagaatgatacgaagcaaaaaaaaaaaataataataaaaaaaatggtgcaaaatgtttatgaaaagaaatattttccatttcttataaagtaaataaccaatatttattgtaaaagaaattaaaagaatgaattattgtggtacatatattatctattaaaaaaaatgaaattttaataaataaaaaaaatataatttaattaagtttttttattgtatgaaaaacaaataagcaagtaaatagaat

SEQ ID NO: 82746 - DNA, 1478 bp, Cannabis sativa
taagaaattaatggaaaaccaaataggaaggaagttgaaggtactcaagacaaacaatggacttgaacactgcttagatgaattcagtgactactgtgctaaagttgtaattaaaagacacaaaatggtgttcaagacaccacaacataatggactagcagaaagaataaatagaactatacttaaaaaggtcagatgtatgttaaaaggagttggcttacaaaagcacttctagggtgaagctatgaaacaacatgctacttaatcaataggtgcccatctgttgcattaaattttaaaacaacataagaaatttggataggaaacaagccaaattatggccacttgaaagtatttaggtgtcttgcctacgcacatcagaccagacaaattagaaccaagggccttgaaatgcatgttccttggttgtcccaatggtttgaaaggctacaaattacagtgtctagaagagggtcataagaagtgtattatcagcagggatgcagtattcaaggaagatgagatggcgatgaaaccaatttagaaaccaataatgattcaagagagtagtagggtacatgtttaggtggatcacaatgaaactagtgagaatcaaacaagtgatactctaaaagcacctttgctataaattgcagatgtagagcaggaatttgatgaagaaacacattatactgaagagaatttgagaagctatcaacttgcaagggacagggaaagaaggcaaccaaaagcacctgatagacttggctatgcagattattttgtatcaaacagcatagctgttgcctttgttattattgaagaaattgaaagcttagaccctaccaattatgcataatccattcagagcaaagcaagaaagaaatggtcgatggcaatcaatgatgagatggactcactgatctagaacaaaacttggattgtggtaagaagacctcaaggtcagagagtaattggctacaagtggatttttagacagaaagagtgtgacaatggaataggtcaggttaggtataaagccaggttggttgctaaaggtttcagtcaaaaagaatgtatagattataatgatatctttcacatgtagtgaaacaacctttgtcaaaattatgatggcaatggttgcagaatttgattatgaggtggataagatggatgtcaaaatagcctttctccatgggagtttgaatgaagagatctatatgattcttccaaaaggatatgaagtatacaacttagataacaataaggtgtgtctacttaagaagtcacagtatggtcttaagcaagcaccaagatagtggaatttaagatttgatgaatatatgattcaaattgatttcatcaagagaaactattacccatgcgtctacttcaatgatcaagtatatcttctgttgtatgttgatgatatactaatcataggaaaattgagaactgaagtagagaagttaaag

SEQ ID NO: 82747 - DNA, 1579 bp, Cannabis sativa
tccactacccaaaaatcttcatcaaaacagcaagtggctcattctctttctcctgccagttttctattctgcatttgtagttttatctttgtaatttattacttcatttattcgctatgtttggttattttaggtaattttgtttttcattttagggttaaagaaaatttttaggtttattagattcatagatttctgggttaggttgaatttatttcttccagaaattgtgattattcttgtctgcaaatatgacccaatttaaatctgaaattccaaccactgagatccttgaaactgtctaccttgaaaatttagcccttccatttgaatccaaaacttacatacctaaatccatacttgaggtaaacgatgccaaaattagggatcatttaataaaaaccaatcaagctaaaatttccagtcgctatagacgttttttgcaagaaataaccgagggtagatgtcattatctgtgagacgcatcttggcctgaaccacaatccttatcttctattcctttagcaagacctttgtttttacctcgagtcactgttgttttttttatcaggtgacttaaattttgaaatcatgaccactcaagcttgtaaatcaaagacccctcaagatccaacagttaccttgaggcagaattgattaaatccaaggtcagatctatagctccctttgtgggtaatatattaaaggcttgtggcatcaaatacgagaacggatgtcgcattaggtccatcacccaaggggagtttagctatttcttaccagaaagagtaattcgagaagagtgtgggactagtactagtggctcgtctggaataggcgcttggagcctcaagcacttcagggctggagtagtactccccctaagagagtactttaaggaattctataattatctcaaaatttccccttttaagttaattccgagttcttacagaatcctggcctgtttaaaggtcttatatcatattatgggatgggagtgtcctactccccttgagatagtgtatttttattctattaaagtcttccttgcaaggaagcgaggatcaggaggtttttactacctcggtgcccactcaaacgatcgcaggatcattgtgaggttacctaataaaacagaattcaaggatgaattcttctggacaaccggtctttctcccattaacacaatagcattctgcattatacgtaagtattatcttttctcaaaatcttggtttcgagtttttgatttataaattgaaggcatttatttatattacttattgtgttgacaacaatcacgagaaggccaattcctactcccgagatgattgaatggcataaaactctcttaggtcttccgtttggagtgtaattagcagattttctactgatcgagaccaatctgaagatcattaatcttctcgacactgagcaatccacctgcgattataagaatccaaaattttctaagttgcaacaagtttcgattgttgggttttgtgccctaaataaagccccatttcaatataatcaaatttactaaataataaagatcagaaatcacattttatgt

SEQ ID NO: 82748 - DNA, 730 bp, Cannabis sativa
  modified_base (586)..(598): a, c, t, g, unknown or other
aaaaagaaaatagtcaattcttgttgtatatataaaataaaaatacaatggaataatggtacgcgttactgtttggcaaaaacagaactgttacgcgtacctactaactattgttttgtcacattctaaaacaagcatgtgctcctaagttatcaaaacaaaaaaaacactgccatttcttattctctttctttttcccatctttgaaacttaaatttgcaagtcatgtcgcataaaatgaagtcaatcattttttcagtgtttatattacatttaatagctactaagtattaacctaattatagagttttaatgattaaattaatattatacttggtggatttttatcaaaaataaaatatcaaacaaataattataatttatagcaatattgataactatatgctagatttttttttttaaataaagcaataaataattagaattatttcacaaatacacaaaataataaaaaaaaattacaaaaatacggttttacggaattttaaatatttttacgatttttttattttatttacagaaaatatggtgtttttatgttactcttgttaatttattgttgatnnnnnnnnnnnnntatattattttttgttgttgttttaatgttatttaggtgttatatttattttacttttatgtaatttttttgttatttttgtattgtttttatagaaaatcttaaaagtatataaaaaaaaaaatctttaaa

SEQ ID NO: 82749 - DNA, 685 bp, Cannabis sativa
acaagtttgtttagtgaaagctaacgaaaaatcaaatttttcttcacaaagtcttccataggatccaactcgaactctccaactcatggataaaactgatgcttaatgttaacacctaaatgttttcaattaatatagttagttgttatgtctgctagagtagttggtagttacttttcttggtcttcttctattcttgtaacaagctctctgttattataaataaagaatttagtctaattggtttgattagcttttgttgctaatctcaattagccttcatgttactctatttttctactggcttactggtctacatggtatgagtcacttcttgacttacgtccatgtcgtcttcaacctccgatcctgcctctgcaataatggccactgcctcttcctccgctgctcctacaaatcctctctggaatcctttttccaactcccttacttcgtcccttaccctcaaattagatcgtctaaatttcttatcctggaaatctcaagttgtcccgactgtcataggtcatgatcttgatgatattctcttcaccggagctcctcctccaaagaatcttgtcaatggcaaccccaaccttgagtgcttacaatggaggaaaaatgatcaactcttgttatcctggcttggatcttctatgtttgagagcattcttgcctctgttgc

SEQ ID NO: 82750 - DNA, 687 bp, Cannabis sativa
  modified_base (49)..(64): a, c, t, g, unknown or other
tctccaattattctcttacttttttattttgagattcccaaccaatcannnnnnnnnnnnnnnnaaactcaaaaatattaaatcacactacaaccaatctgatatttagaattaatttttcacttacaaaatttaaatttttatttcctaaacacaattttaaaaaacacaatttttaaatcacaaaccaatcaaacccttaaacatccaataaataattggatttcatatcagtcgagttctaatcaaatacacagattttaattcctccaaagtgtgagaatttaataaaaagacaaaaaaaaatgtctctattaaaacataacgtataattatattaaaaataataaaataataatttcaatatttattttactaattcctattccttagctttactctcaataccaaacaaggagcaattatcatttctatctctcctactactcataattttaaaagcaatgctctttatattattcatggagaacttaaaaaggttaaaaatcatttaacaataaaaaacattgtgagtattttatttatttgttaatttcaaattgctacttaatattatcggtataaaatacaaaatcaaattttcaacaaccaaaaaaaaataataaaattaaatatctttttttaaattaaaactaattttgttaaaattgttaaaataagggaagc

SEQ ID NO: 82751 - DNA, 1623 bp, Cannabis sativa
cttaggttgacttggtgttggatctagcgcccaggtccacgattaacttggtccactagttttgatcactcgaatgctaattcttctctgagcattctctcaaaaatggtcaaaaatggggtgggagacctcgtccctaattcgaagaaccttgaaagtgtcaaaacagcttcccgaaaactccagaaagagcacctagcgtccaagttgacaggtgacctagtgggctgggttttacttatctaattctgattctgtctcgagcatttgtcatgttttttttatagtaactaagagctatggagtcagacgagtcaaattcacaacttcatacttttactttttcgacaaagtgactctcttacaaatcaggcagtttcgagtctcctgattctgcaaaatagcaatatctccaagaattggtgaacaacttcactaaaacacaaaaactagcttaatgatgttatcacttatgaatcaaaaaatacatccaccagcatgttttcccactcacctagtatcaaggttaacgtcatatgttaacgtgggcattggatgtcaacgtgggcggtagatgtcaacatgggcgttggtcccagaacaactttcagtaaaacggtcataactcactcaatattgatccaattgatgcgattcaacttgagttttgaacgtatttcaatcctttatcaagtcatgtctcacacaccaatctcaattctgaaattaccaactccaaattttaccctcaagagacttatgaatttaagctacaactacccaaagtgggtcctgcgaatgcgactcaagttctagaaattgacgatcgacctctggagtcaatttcatcgttagatcatcatcaacggtcaagagtaacctaaatgtatttttctgaatattttattattattttaataggacctctttccctatgaagagagctcctctagctcattttatacatttagaaaattacacataatgtcagaacatctctatctagtttcttgttgggatttatgttggttttatagtattaaattactacagtattttttaataagaaaacaaagaaaaaaaactaaatattgtaaacatagaaaaaactataatcagggattaaaaaaaaaacaaactgatttttttattatttttaaaaaataaataaacaaataagtaaatcaattttaaaaaataaactactgtactaacctcttgcagtacaaaacctccccggtaatggcggcaaaaattgatgtcgcccaattatttatactgcgctcgcggtagtaaacgggctatgtcgtatccacatggaggcaaattaccactaaagattagtataaatagaaaatgataaaaattggaatgaattaaaaataataaaatggtgagtgaaaggggatgatcagataaagagcttagtaaggtagagatatagttatgcaaattctattctaataccgattttaatttagaacgcagttgtaattctacaccattaattacagctggaagatatatatattatgagcacaaattaaataatcttgaataaattgaatctcttttctaatttaacagcatatcatattatatatcataaatcgacaaaatacc

SEQ ID NO: 82752 - DNA, 1148 bp, Cannabis sativa
tatttcatttctaaataattttattaaacaacatattacaaatattgattatgattatttttttatttattttgttatatttttttattaatttattataatcctgaacactatatactaattgagcatgatacagcaatgcagttcttcatacataattcatcggccactagtcttagttttatagcaagtcttcctgtatttttggaagggaactcactgttctcttaatttggtgtgtagttttgattagagaaattataataaatgaccaaatatatatatatatatttatatatattactatgtaggtaaatattctcattttacaagtagagtgacaatgtttttacacatttttgccacataaaattttgatgtttcttatatttttaattaggcaacacaactgctgctctttgtgcagagattttaaatatttgttttcgtgcaatttagatatatttttaatttatttattaattttattctatatatttgttgagctattattaataaataaaatattgtgaaaatttcaaaattaaaacataaattaaaaaattttatgccaatttttttttcacttggcgtgtcacctctacgtggccaaaaccagcagacacgtgggagaaaccattacaaccagacatgtacattccatagagcttccaagttaagagcaaagacatagatacacaagtattgacaagatcatggtaggatgaccaatgtaaaaggccgtacagcttatgacctgtagaaggccggacagcttacaacctgcagaaggtcggatagcttacaacatgcagaaggctagacaacttacaacctgtagaaggccgggcagcttacagcctgcactctgacaacctaaatgcgttgtagttcgatgtatgggtctaaaagatctccaacagctcctacaaactcgagacaacttaaccacccacaattttagggattcaacaacataatgtaactgccttactttatagggatattttattatcttttttgttttttaaagatgaaaatgtaaaatcgtactcctatataaagtggccatgaccacagtgttaagaatattttaccatgatctaaatttactaacaagtatattgaattaacatcctaaatatgaa

SEQ ID NO: 82753 - DNA, 592 bp, Cannabis sativa
gttaatcaagtcaatcatccaagcaatcccggtctatataatgagctgttttagaatgacaaaggggttgattcgtgatattcactcgctcattgcaagattctggtggggttctacaacaacaaaacaccaaatacactggggtagctgggagaagttgagcattgacaaagggtccgggggtatgggattcagggacttggaggatttcaaccaagcccttctagcaaagcaaggttggaagctagtttcaaatttggagagcctgttagcccaagttttgaaagccctctactatccgaactctgacttcttctcggctggtactggaaatggatgttctaatgtttggcgaggtattatttggggccgtgaactaattcaaaaaggttcgagatggcgggtagaaaaagggagtagggtgagagttaatgaagaccgttggatgcctagaggaccaccttttcttcttcgaaccccggccttggttccccctaatacttatgtcaacactctccttgatgagtcgggtaactggaaaatggagtctcttacgaagatcatgcataaagacgacattccttggattgtt

SEQ ID NO: 82754 - DNA, 1159 bp, Cannabis sativa
gtgacaatgagtgtcatataactgccatctatttataaataaaattttctttattttaatttttgacaaaatttactcataacctacaatttttgtagttaaatacataaatatatacattaacgtaaagcaaaaatatctgtaaatataaatcgtagtcatttattaaagttacaaagagaatccaaagttagaaaatttatctgtttcaaaaaaaaaaagtgaattagaaaatttatgatataacattaaaatatgtgtggtcaaagttttattaagtcttgtggttgtattgtatcttcaatatcctccaagaatacgaggaatacttttacatgcttttatgtataaaaaatatatttttttaatttatgaatagtatgaaatgattcttgattcctactcttgtatatatttattccctatatttatattattagctatatttatatataaataaatacgtatccaacgcattcagataaatattatatagtttaaggttatttgattaaaatattagtgcagatttcatcatcaccagcgtcatacttcagatatttttagtattatatacataaaattcatattataatatacatatttataagagatgtctcgttttactcatagtattttatatataagattatcttaattaatgataaagtagtaaacttaagtactatttattttattctcttttccttcgtgtaactagaaagttctctggttattaataattaatttaacttaattttttatggcatgcatgcttaaaattttgttttattatattaataataataataatctacaattaattggtaataattaattatataagtaatagagagaacaaatgtaaccctttttcttgtacctattgcgtggagcaggagataatataattgtgacctttgcatgtcaaaaagggtaagatataaaatacttgtattttatttataagtttcattgcaaatttattatttgtataataataaaaataaaaaaattaatagttatataagaaacaatatataggtactattgtataggtccattgtcactttctataggcaaacatcaaagtggtccaaagcactatatactataagttaaaagccacgaagccttgatgatattattattattatta

SEQ ID NO: 82755 - DNA, 1306 bp, Cannabis sativa
cgagtgctggagatagctttggtgagaccattagcaatttgatcggcaacaaggacataattaacatgaaccatttttagggctatcttttctcttacgaaatataggttcaacacaatatgtttagtgtgagcatgaaatatgggatttgcagtgagtaagatggtgctaagaatgtcacaccaaatcacaggggttcgaggcagatggatacgaagctcaatgaagagagagtgcatccattgtgttaaatggacaaacctgaaccattaccaatatagagactatttgatccaccataaactgagttggtcataaggttttgaaggcccgaagtgcagtgattaaaggctccagagtcaggataccagttaccattctagtagtgttggtctaaaccaaattgacttgaatattggcaggattaaatgctggaaaaatacatgtgaaacgtttgtcaaatttgtagaagcaatcaagaactgtgtgtccaagtttatgaaaaagttgacattaaactcgatttggtgttggatgaagtttgctagctcgaggataattaaatgttccacgaccaatattaaaagaaaattcaccttgtgacatattgtcatattgcttatggtgagatcctcgattatcatgaaagctttagaagaaaaataagaatgatgattgttatgaaactgacatcgaaaaattccaggatgcttgaagttacgattgaatatttgagctaaattagcctcatgaacccagctagcatccatattttgatcaaattcagcaacaactacaagatttacactaatatatggctccttgtcattcttttcaatgatcttgattccaaagcaagaagaatgactttaatctcaacaacatagtactcttcaactgttgtattagatgagattatgaaagtatcgtattcactcgacaaacttttgaaaatcgcaataatgtgatctcgaggagcaagaacctaaccaaccgaagtacgaagatcaacatgttgcttgaccttgagcaaataatcattaagagacattgatcctttcctatcattttgaagtttagtgtaaaattcaagaatcttggaagagacttaaagagtgaagtgtttttccaaagctttctagatctagtgtgccgtgtttcatcctaccgttcttgtcaacaagcactacaacacttttaacttttaattacattcagcaataacgtttttaaaaaaacgttatctaatagttattgggtcttattaattattgggccttagagagttattcaaaattgggctcat

SEQ ID NO: 82756 - DNA, 896 bp, Cannabis sativa
gaatatcatacaaatgcagtggtaaaacaaccaaaaacttccgaattaaatacttcagaattgctaatttttctaaaaaaaaatcagaaaattgggtgttgactctttattcttgaatacacacactccaacatgcctttttataaggcatcacttctgagtttcagaaaaaagataaacatttgatttgttctatagttttaatggtttttatgtcatcaaatctcaaagctttagtataatggtctactactcagcaaaatatacttcatatttattagaccatctccaataggagatgcaaaagttgatctatatttggtacaaataatggttttgtgacatttttgcatcaatttttactgttatgctccaatgcataattgtaaatcttgatgcaaaatttaatgtcatttaatgctcatcaaataatttattaaaaatacaaaataataataatcatacaatagagggaaacagtgataaaatggccttctgatattctgatattagattacgcttatataggttacttcatattagattacaatgaggacatagggttttatatgttctactcttatgatatagtttaggcttatatttttcatatgcaataaatatatatatatcgaacaatgaccaaatcaggaacatgaaggtacctgtaggcccaccaacgtaaaccacaagtaagggctttgggagaggtgcaaattcatcatgccacatactggctgcactacgaagagcagtagaatcaatttgatgtaaagctcccgctgtgaggacctgtattcaaagtgggtaaggtcaattacaatatcaggccaaattctctagaagttaagagcaggataaaaaaaataaaccaccaataaattccattttgaagg

SEQ ID NO: 82757 - DNA, 1425 bp, Cannabis sativa
atttaacaaaacacaaggtccaaactgtaacttttgcaaaacacagagtccaaaatggtatttacccttttttttattagtactaaattaacatcatattagtgctctataccaacaaattgtttaaataaataattagaatgcaactagtatgcaatgatttttataattcaaggaaagtttctgcaacaaaaaaaaaatcaaaaagtaaaactctacaaatatcatagttttaaagtgtataaatcctatttatttaattaattgactttttaaaacagccaaagatcaatcatcttctttcaaattcccttacttttatgtcatgttagagagtagaggatcaaacaattattaatcaatgacaacttaagtacatagaaactaatttaagtgtaaattacattaaatattaatttaagtacatcaaaccaagcttctcctacatagcaaaaccaaaagaagacaaaatatgtagccattattattatattaattagtattaaaaatgtaatgcctttctatatcattgctaagaaaaaagacaatggaatgggagtaggggcaataacaataagcatcatcatcaccttgtcaagaaattggccattttccacaaattccatggaaagtggtacaagtgtgttcatatatatagtactcaaaattttatttatttggagctctttttttatccgcaaaccttaaaaaaacgacatgaaagttcgaatacagtgtaagtagtaagtacacctttctctttaacctttctcgtcttttgctataaatctttctgcatcgaaaattgctgaaaatggaaaaaggtggcgatttagtgtcaactagacatactttcacccttctattattttttttctatacaaaaggctcccaaatttaaaacaatacaatttgagagaacttaagtaaaagcatcacttttgctcttatcataggaacattttctatgttcggtaattagagaaattatatctcaattttttttacatatatatattatattgtatagttatgaaattccaaataatttagttttatatgtaataaaaaaaacgtaactatttaaatcttattttcagtatcataaattatttagaattctccaaaaataagcaaaatgcctactataattataatatacattgtcatatataaaaaaatcgacttataacttctccatctactaaatatgaaattggaaaatcctcctagtgacgctcctacctaaaaagtttccgatatttctttgtacaagtattataaaaatatcgaattctgtattgggatcctaaggttcaagatctgcaaaccaaccaattcattgtagaatatgaccagttgttttccttttcaatcaagagctaaagctaaacattactaatggaaaagaaaatatggtcaata

SEQ ID NO: 82758 - DNA, 1091 bp, Cannabis sativa
aaaacaaaatgaaaatgacaattgtggcccaaaacacattaaaatggcatttctaaaattaaataaattaaaggcaagcccacaaaaagagcccaccatccggcccaagaagacccaataaccgctgcgcgtcccactagccacgtgtcgcgcgcaggagcttcacgcgtccttcttgtgtctcacattccatacgcgcgtgtgaacttcacctcctcacctggttcaggtgtgtgtgcgcgtcatacacaacccccgcaagtgggattgcctttcacgcatggtccaaagcaccacaaaactcactccttttcttctgcacgcgacaagtggcgtcgttgtgtcatcgcttcttctttcttctaatgatagattgacacgtgtcagagtgacagcataaataccaattgaatcttgacacatgtcactccagttttaagaattttttgttttttttgacacagttttaagaaattttattcaagaatcaagagcattttaggaggtgcctgcaaagccactatgacaccaaaaccactctgaaagattgccacgtgtcaaagtgacactaaaagtaccaatccaaacttgccatgtggcatctagttttaagaatttatttaatttttaagataaatgctaaaggtactaacaccgtgttaatattgattcccataaaatttaatgtaataactttttaagagtatcgcttgccgattgcaaaaaaacatattatgcttttaaaattaaattacactaataataatataatatttgttatcattcatacacaatttatattaaatttaattacctcctccttataacattaagattttaaatcaaaaaagtttccaacacaaaaatccacaaaaaaagcttcttaatttgtagttttttataattaattttagagaaatgataaaggatacttgagagggatgcacaagattaaatcaagaaaaatcaaaacattaaaaaaaaaattgaggcaatagtagtaatccttataagtaataattttgttagtttaatatcgaatccaacttattttaatttgataaatcgctaattaattataaaagatgata

SEQ ID NO: 82759 - DNA, 1583 bp, Cannabis sativa
tcggtttgtattttttttcggttttgtcggtttggtttagtcgggttattcgggttgggcggtttacgaaaatttctgtacagccctaatcgccataacagacagcaaaggacaaaaccacttagcaccaacagttaccaacccccacgacccaccaaaacacaacacaccaccccacaaatcccacgaacgcaccccacaaaggtgacaaaacaaaagataatctcacagagagaacaaaacaaaagaaagaaagtaggacaccaaaacccaagagaacgaagcacaaggaaaacaaggagggacggaagaaaacgaaaaagaccttagaaggaagacaaaagcaaaaacatgccaggaggatcaaacaagcactcaaaactcaacagatgataacaaaaaaagaagtgaactaacacagaaagcaaagaaacaaaggagacgcaagagagtgatagaagaccacatctcttattaacgcaggctagctagtacaattgcatatggtcctttcatcattttgtttgggagcaaactctaattaggtttattatatcgaattacacattacaaaacccatatgtgatatttattggataaattaccttatgatatggataattacataagacacattttttttgtaaaagaaattacattttacgtttaaagaatttatttttttacatttttacagtttttcatagaaacaacacgaaaacaacaaaaaaattatataaaagtaacatgaaaataatatctaaataacattaaaataacaacaaaaaataatatacatataacaaaaaatcaaccagagtataacataaaaagaccatattttctataaataaaataaaaaaaaatcataaaaatatgtgaaattctgtaaaaccatatttttataaatttgtaagcccacatattaaattattaaaaaataatctcacaatattaatctacataaattacaaattgatctcactatgcatgtttttccaacaaacaggcacacacttgatattttataaattagaaatcttttttcttgctattagaaaaaagaagaggattgccaagcaaattatattgaagattgagaggtcaaaaacccaaagcatcattgatatcggcaacaagttgaggatcaacattctttgagaaaataaggtcaatttttccacattcagatgatgtttggttggaagtaatgatgtaaagaccgcttaagtttattatactgagttattaaataattagggtttattcataagatataactattatatttgaaatatacatattgtggagatttatttatattttaatatataataattatgctatatgtaaatctctagttttctataattgtgcttgataacggtagaaaatgacgttgggccattagagagtcacgttttgtatgttatagaattatttttatagcggggtgttgttgttaggctttggagttattggaatttatgggtttggaaatgaccaaatacccttgaatattaataatcttttggtttggtcaaaggggtaaaaaaggactttgccttttatttattattttg

SEQ ID NO: 82760 - DNA, 1913 bp, Cannabis sativa
tttctcttctagttctgtctcgagccagttgatagttggtcaaatctgattatttttcttgaccaacttcctaagtgttcacctcagatgtaccctgagcatattcctctatagtagcctatgtttccacctcagtttccgtctctgctgttggtgtgtgtggtgattcaatgggaacttatattctatcaaaattgatcaccacctcagccaaatcatctctattagtacctgcaacatcataatctttgtctttcttggaagtgcatgaaataatgcttattgaaaattacatctctagatataacaatcttaggctttctattttcaatttgacacaacctttatcctttaacacctttaggatatccaagaacgaaacatttagtggccctaggttctaatttattaaacttgtgatgtgcatatgcagtgcaaccaaagattcttaagtgattcaattttggagtggtgccatgcaagatttcatagagagttttcaggccaatgactctactagggctcctattaatcaagtcacatgcagtaacaagagcttccttccaatagattttccctaaactagaactaatcagcaagcgtctcactttatttaataaaatcctcttcattttctaagcaataccattttactgaggtgtgtgctttacaattctgtgtctaacaattccatactcagaacagagcaaaccaaattcagtgttaataaactctaagccattatctactctaagtacttttaatttcttatgatactagttttccacctcaattttccattctttggatttttctaagcattcattcatggtttaaacacatacatgcctactaaaataatctacaatagatagaaaatagtgtttacttgagtgtgttccaactttgtgagaaccccacagaacaacatgaacatactccaatggtctctttgaactgtgtgtgcagccatgaacttcaattttagatgcttccccaacacacatgctccatagaatggtagtgtatttaatttgaaatttcctaggagcccttgctttgtcaattctttgattccatgctcactcatatgacacatccttttgtgccatttttccatttcagattcttgatgttgagtaatactggcttctgaagccactactgtttcttcttgtaagatgtataagctattcttcttttaacctttcatgatggtaaaagatcctttagctatccgcatctggccattgcttgatttgtagctatatccttaatcttcaagggttcttaatgaaaccaggtttcttctcggttctagtatatgtctcatatcatgcagcatttgaatagtaccatcatagtgcttgaaggtcacctttcaaatgccaattactctacatgaattatcatttcccattagtacttgaccagaattaacttttctataatgaacaaagttttcaagggtaggacacatatggtatgtgcatcgagaattaagaatccattcttcagtgattctttgatctaaaaccatatataagtttccaccaaatgaaaaatgatatgtgtcttccacatttgaagtagaatcatgcttcttttccttatcttctttgagtttattcttaaactcaacacagaatttgttaacgtatccaactttcccacaaaagtagcactttctttctttgtgatatttccctctggattttgatcttgactaaaatttatgatggcccttggattgatctctcttgtggtgatcccttcccttggtattgtctcttcctcgagccaggtaagcttcatctttgatcttatgtttctccttggccatctcctgttctttggatttcagtgctcctagaacatcatcaaaggtaagaatatctcttccatacttgatc

SEQ ID NO: 82761 - DNA, 1292 bp, Cannabis sativa
aaattacataaaaaatgccttatatatcacatatcacctatttatagcattactaaatatattttgaaaatatataaataatatacatatttattaattttatatatttatatatttttaaaatatactcgttaattttatatatttgtgtcttattataatgagaattaggttttgaattatgtcatatatatatactttttgaatgaaattcaacttaaatgatgactaacaaaaattagataaatctaatgcagtctaatagaaaatcagtaaatgcgttcaatgattaaaaccgatttaatccaatgcatttatcagatcgattgactcaatttaattgagttgtatcagttaacaaattacaacatctaataaataatagaattgaatcagttaaatccaaatcttgatccaataatcaaccctaatctacacgtgttcctctttatatataataattcgttaatttatttagtattcattttatgattgttataatattaaatttaattattattataaatatatttgttagatagggagccccacattgctaatgtgtggaaagataacagaatatataagatgaatgagctattcctcccatagccaattggttttgagatgaaactccattcatcttatcccaaattctaacatggtatcagagcaaaacaaataaaaaaatctctagcgacgactatccgacccaaaaaaaaaaccgatcgaagtagagccaaaaaatggagccacggaaaattcaaaaaaaagaactgatccaagagccaaaagtcaaaaaatgccacttgtaattcggggataatgagccaaaaaaaaagagccaccaaaaatccaaaaataccgatccaaaaagtagagtaaaagagccacttatgatcacagatagtgagccaaaaaagagatgcttatgatcgagctgtccaagatggtgagcaaataaaataactaccatcttgagggggatgttaaagagtcacattgctaatgtgtggaaagataatagaatatattagatgaatgagctactcctcctatagccaattggttttgagataaaacctcattcatcttatcccaaattttaatagcttttatgtttacttattcaaataaaataaatagttatcagcgaatggaggcaacagagaaaatggcagggatttttatgtcgaaatggcaagtgcaacctgaaatagatgaatttgttggcataaaagaagctttaagctggattgaccgtcatttgtggggacaattgactttgaaaa

SEQ ID NO: 82762 - DNA, 865 bp, Cannabis sativa
gagaccatcagcgagttggtcaatagctggtacatgtttaacatgaaccagtttttgcagaactttttcacgcacaaaatagagatcaagctcaatgtgtttagttcgtgcgtgaagaactggattggcagtgagtaaaatggtactaagattatcacaccatacagtaggaggccttggaatctgaactcgaagttcggtgaagagggaatgaatccaagttagctcagcaacagtgttggccaaacttcgagcttctgtgctggaacgagagattgtgtgttgctttttggattgccatgctacaagattgtccccaaagaatatggtgaagccagaagttgatcgacggtcatctgggtctgtggcccagtcggcatcacagaaggcaaccacatcaagatctgtaggtctctttagatgcaaaccatgagatattgtcccacttagatatctaaggatgcgtttcacagctaaccagtgtgtgagaagagggttgtgcataaattggcacaccttattcacactaaatgacaagtcaggccttgtgattagaatgtactgcagtgctcctacaatcgagcgatataactaaggatctgtcatgggctcactgccatgagctgagagtcgaagaccactggtcatgggggtggaggatggctttgcttcatgcatttgagctttggaaagtaaatcacgggcatacttggcttgagacagatgtagaccagtgggagtggaattgatttcgatgcccataaagtaatgaagattacccaaatccttaagagaaaacttgtcattgagtgcagtaattaaacttgagacaacagttgggtcacttcctgtgactaaaatgtca

SEQ ID NO: 82763 - DNA, 1201 bp, Cannabis sativa
ataatattatttaataccacttataaaattaattaaatttaataaatatattataaaaaccttaatggattttcatatatatgcggctttaaaacaactttaactctctttagaaaattggtacaactactctaaacaataatctatactcactaacaacacaaataaatgagataattatccttgcactattaatattctaagaaaaaattaaatactattttaatcttgatattacacatttgattgaataaagcttttaattattcaaaaaaaaatgactgcattaaagagtaggtcgcaatggtgtaacttttaagtccaaataattatccaagtagttgaaaagaatttttaaagttcaaaaaaagagatgcaaattttttttaatattataaacaaaaagtcaaaaggaaaaagaaaaaaagaagaaaggaaaatagttgaatgagagaaaatggatctatatgttccttctctatttaagggaagaaaaacaaaagaaataattgtcagagaaataaaaataaaataaaagagtgtatttttataattaaattgaattttggttactctatataaaatttatcattaattaatatacttatacgagaacttcacatgtattcattaaattaaagttcttctaaatataatatcaataaaataaagttgtataatattttagttaacatatattataatctattattatttttttttttttaaaaagaaagaaattttttattccatcaaccactaaaacaaacatgccaagtagctacataacaattcaaaggctattaataaaaaccattgcataattatttctcaacttaagattcaaataataacagtaatgaattctagccttaagggaatgtttaacgtggttgctagtcgtcttcactgaatagcaagcgtcttcgaaaatacatttgttgcggttacaccaaattaaataaacaacaacaacaataatttccaaagccaccacagtcagcacattctctttcttttccgagtccttaaaccattcgttgagacaagctggccaatcaataccactaaactaggtggaaatctcaaccaacaccctttacgaataaacacagctaaagaaaagatgatgatgataatgatgagattcgaaaactagctcacaaaccaagcaaagactagaatccatagtgatgaatct

SEQ ID NO: 82764 - DNA, 686 bp, Cannabis sativa
actttgatcgaggacacaaacctagccccaaccccaagagtcgatcgtgcatctcaaaatcccgaccttgacacgaaccttgttaggattattaatccttcgattccttgtacagccttctacgaaagtaaattttgattaaaattgaaaaatatatgatattttgtagatttgagttttggttgccgcacatgctagggtttaaaccctacgtgcatgcacggagccagttttcatgggggcttgctcagacaatgggggccttcagacaagatgttgtttgagaattctcgatcaggcatcattcgagatgctttctcacgcacccaaatggcctgccagtagcatctgggctcggtccatgtcctccccggatactgtccgattttgccaatttccaattttctcaactttcaaaaataattttttaatgaaataaaattcaaattttggtaaatttttgtgtagattcttattttcaaattttaaacctaattatcacataaaaattaattttttattaattttattattaatgaaaattaattttagatattaggagactttgaatttgaaaatttgatctgcaaattttcaaaagggtcattttcatgtatactacccttatttttggcaatgtttctagtatatcgatttcaacggccaccgatagttaatgtgcactg

SEQ ID NO: 82765 - DNA, 1070 bp, Cannabis sativa
ccaaagacaaagtttgaaatgaaggatttaggtccgactagtaagatcttaggcatggacataagaaggaaaaggtagaagagactattgcacttgaatcagacgagctacatcagaaaggttctagatatctttgaaatgagtaactctaaggtagtgagtactccacttacacaacactttaaatttagtgttactcacgatgcctgaagatgagactgagaagtcaaaaatattaaaagttccatatgctagtgttgttggatccttgatgtatgtcatggtctgtactagaccagacataacatgcactaagcatggtaagtatattcctagaaaatctcgaaaatgagcattgtgaagccctgaaatggattccgtgttatttgaagagaactaatgagaagggactaatatttggcattaataaccaaaatgaagacttgaatttgatcaatggttatgttgactctgattatgtagggtgtattgatatctagaagtctttcactggatatgtgtttactatgtttggaacaactattagttggaaagccaaccttcaaaaggttatggcactatcgacaactaaagtagaatatatagccttgatggaagcgatcaaggaagcactatggttaactgggttaatggaagaattgagactcaactagaaggttattactgctcattgtgataagtgcaattcaattaaccaagaattgtgtgcaccatgaacgcactaagcacattgatatcaagcttcatttcatacgagaggttgtggagaaagaagttgtgacgattgccaaagttccaactgaagacaatccttctgacatgataactaaagtagtgtcaagtggtaagtttgagcagttcttgaagttgattggagtcagctgagcttagaggggttgaagggacagtagtatttataacaacgatttgtcaagaaacttcaacaatgaaaccaaggtggacattgaaaccatgtaaatttcccattatttaagctaaggacatatttagcaaattatgggtcataatcttttatatatatatatata

SEQ ID NO: 82766 - DNA, 1439 bp, Cannabis sativa
cgattttttatattttattttttaatcaaaggattcaaaatattctacattttatttacattcaaactatttagcagtatcattgtaccaatacctgaaaaaaaaaaatgagttaaatcctaagtatattaataaccaaataagatttatgagaaaacaaataaaataaagtaaaaaaagctacaatatttttgtaaaatgtaaaaaaaaaaaaaaagcaatatgtgtatgctcatatataatattattcttttttggcaaggtcatatatattgttttgaaccttgtttttagcatcataattaattagttcaatttttttgaaaactagtaaaaatgtagctaataatataattaaaatatacattatcttataaacaaaataaattataatttctctaaatatcaattaacataaaaaatttctcgcaaaaatattttcctagctatatataacactattattaaaatctaactagaacaaaaactataagtggcatttagttagagataataaaatgaaatggaataaaaaagtcaatttcatttcattcttttgttttattaaagtctaaagtattataatattattttaatataatgtcattttcaatattttagtggaataattattttattttaaaataaaaaaaagcgttctaatattaaataaagaatttaataattttttatcaactatttttattaattttaaattttattctattctatctttatttatatttatattcctattaatatttttatttttatattttcatttttttcactaagttacaattaactttttttggtggctatttcgcccaccttgtgaaagattctaaaacatgcgtggtccatgtgcaatacattaggcataagagattttttttctctttttcttccaatgaatttaattaacattttatttttcttttttacttttttctaactaattggttgcttgactctgagtatttcacaaaaagaataaaataaaattagataaaaaagattataatttcacgatcaactttaaaaatacttatattcacaagagacaacaatctattgcagtaagtccattcaacctcttagtttgaccattcaactattgtgcagaaaacgtaacatcatgcactactataacaacccctttaacactactaacaacctcttcaggctctaataacttattacaaagataaaacaaaataaaattatgttacaaagataaaactaattatagtaacctaaacaaaaaacactcaaaattatgttatggagacaaacctattcagtgtaactaaactacaaattttgaacaggccactcctaaacccaaaaaagtcggtgggcgctctcggccagaaaaaaaaacaaaatattttttaaaaaaaaaaacctaactaactgatttctaacaattgtctatt

SEQ ID NO: 82767 - DNA, 1379 bp, Cannabis sativa
atataagcgtaatttattaattacataaatttatttaaaatacgtggatataatatgagttataatatccatcactaagtggataaagtttctatatgagggtataaaaaactagtgctaccactgtggtatggttgatcattcttttaacaagtgtaacaactttcaaaaactttgtgatgactctatctcccctcatactttgagctctaaggatatccttagagctcctaccaaaactctttacaagaaaagcatatttgagctctccaactctgctcctattgaggatacacgtaggagtgtttttgtctcaaccaaagtcttcaggatgtttttgaccgatttctggtgcctaacattgccaacaccacgttggttatgaaacttctcagtctctttgtattgatcttagtggttcttcaactactaacccttatattgtctatcttaatagttccatttcatcttcagttatgttgcatgttatgccttctgtggtttgttccctggactctactcctatcatggttaatgttgttgtttcttctgcatccaaaggcaagagtgtcatgccctgcgaactgcctcatgtctcccctcctctttgctctcagagttcttcaaagaatatttttgggatcaaatgcactttctctaagcagaatcaacaagttggctcctctatgaggagtatgctaaaaagagcttgagcttctagcaattagtttgccacgattccttccatttctaattctaatgttcaagcgggtgttgctcaacaaccccaccaagaaatatgagttttattagctggaatactcgaggtttaaggagtactcgggcattccaaaatctatcccttctagtgaaaccacatcgaccttagattctttttgtgatggagacaaagcttgcttctcactctagtactatgtttaaagctaagctgtcttttgataatgtttttgaggctcctaagaatggtttaggggagattaatttattttttggaatgatgttgttaatattaatattttaacttactctatgtctcatcttgattattatgttacttttaatgataatattaatttttatctttcatgttattatggtttcccttattaggttaataaaaaggaatcttggactttattgtatgatgtggctcctttgagcctatggttgattgtaggtgattttaatgattatcttggcttaaataatagaaacacttccgacaacccaccctgttatgctattaaaaattttcaaaactttgttaataagtatgatttgtctcctttgcctttcattggtaatagattcacctggaagcatggtaacctcttgaaaaggttggactagtgtattgt

SEQ ID NO: 82768 - DNA, 1979 bp, Cannabis sativa
catgtgcttaaaataaattatttcaactctatcttaaagatttaatacaattaaacctatttaaatgtcttagatgctctgaaaaaacctttataatatataaatatatatttatatatgtatatgtatatgtcatagatttggtcattgttcataatttttgtttctttatatagttctttaatttattcaagagatcaggtaagctttagcaatcatactaagtcaatgccaaatatgttcttacaaactacaattaataaataaataatattataaaatattgattagatgaattattaattatcatttagtttcttaaacctactcgattgctctcttaagtatttgacaatgtattggtcaaccaaaccaactgctcagattcttgcactgttgggaaaaaaaggcatgcaatttttaatttattgagaatttaattaattaaataataaatattattatttcaatttattatgacggtgtagattatagttatattaaatattttatcagtttttggagaaagaatatctgccatagctataatgtacataaaaaagaattgagatgttccaaattgctcgattgtttgtttctcatatgttcataaatgacgatacgaaatagctttgagtagtgataattttgtcacacattttactttgtgaaattattataacctaacaaaattaaagttcaaaaattttattttaaagaagtaaaattaataataataataaattatttaaatactgttttttcacattatttaatcaattgcaaataatatagtcttttattttatatataatttaagtaatggcatgcatactacaagtcatatttatttatctttccatttttcttaaacctacttgagcaaacaatcagaaaaagaagtgctgaaacgcatataaaatagaaaaaaccataaaagtaacagactatttgaacttttcttttgacgtgttaattttttttgaattttttaaatagaatgttttaaataactacaacctacatttttttttcatgattatcgaaaaagaagaaggtatatatcagtgcactctttttaagagtatacgtactatagaattttccaaaactgtattaatttatagtgtaagagtattaatgaggcgggcgggcggccgagcgagcaagctaggtcgtccgtggggcattgccgaccctcgcacccatattacatccttacaaaaaaaaaaaatcattgcatggattgataagtaaagttgcatattaataaagaagattaaaaaaaaaaacctatggatcaattaataatgtgcactacattagtaaaaaaacataaaagatgatgattttttaataagaaattagcactaattagatagtttaattaattaataactaattaatatttagtttatttgtaccaaaaagtaatgacgcatgcagcattatagtgatctgaattagtttaaatcaaacctaatccaaatagacgtatgcattaatattaaagtaaatatataaatatatattcaaaattttacaaattttgtggtaattaaatcttgtataacattaatatccattatccactatatcatgtttaaaaaattgaaggatattaatactattttttactctgttttacaaaagttataaatcagatcttctgttgtgttaaatgataaagtctacattttatttttaaaatgatacaaaatagtacctcaagcttaattttcgattatttttttcttttgaatataacaaacttaagacaattactaacatgtatagatgcaaaaaaatataattagtctcatcgtgatatttctagatcgaattattattaagttttattttgataaaaaaatactattttagaaaatacagaatcaaatttatcgtttaataaaacaaaagttcattcaatcattcttgtaacacatagagttcaaaataatattaccgaaaaatat

SEQ ID NO: 82769 - DNA, 877 bp, Cannabis sativa
gggattgcacagcttacccggtatttccccttacggataacgggactactaactgtcacatttttgttctcttatgttagtttgttggtatgtaagaaaaatattatatagttcaaatgtaatctactgttaatttattctataattaaggacatattaagtgtataatgaattttccttccaaataataaattaaggacattacttttcactttttatttttggagctagaaaaatagtccccacctacctacatatttttcttcacataaaacatatcaaatgtattttagacccaactaaactcaattaatctctattggccaatatatattttataatttctctcttatattataaatttgaaaaataaataaatattggtagaaaaagacacaattataattacacacaaaattcacttctttgacttcataaaaaaaaaaaaaaaaaaaatcactcctttgctgttttttttcctttcttttaaccatgcatggacatatataacatatttttttaatattatatccattatttacaattgtactatataccatataattttttttaacaatacattagtatatttttttttatccttgccgacataataataataataataagttaattgagtaataatgttgttattaggtggatgagggttcaataattaatagacaaagaaacattgattagaaacacatttgtagtcatttaaatgtctcattttacagtcaagtcactttaatttattaacacataacataatatatctttgaccttaattccacttcatgtttgtactaaattttaaataattagagactaattaattaaagctaaatgtgttattaacaacattttgtccaaa

SEQ ID NO: 82770 - DNA, 2356 bp, Cannabis sativa
attacatcgttcaattaaaaggaaagtatattgaatgagatagaattaaaatacatttcacaaaattcttctttatacatttaaagagaatgcatattggtctctaatatattcaattaagtgtcaatattgcagacttattcacaaagttattacaaacatcaatatttgagaagacgacatacaagattgaaatttattgtttagaagatctccacaaatgcctaaatgagggggagttaattcacactgcactctttttcttttgaacatgatgatataatttttttttagaaaagtctcgcatagtttaaaaatcaatacatatagtttctctattttacttttatttacaatttgttttcatatatggtgattgaataaattctttctattatttgatgtgtaaaatattcagcgaaacaaatgtaacaaaatgcataaatacctcaaattatacatatatacatgttttaaaaaaaatttataattacctaaataaatataaaattaattttatataatatttttattattataaaagtagatattattttggacaatttgtattatataagttatttactaaattgtatttttttttttattatttataacttttatattgagggatgggccttgaacataggacatctataaacctttataaaaaggagaatagttctttgggcttttcatagtcaatttacaaaaatatcccttcttcttaattatttatctataaacctttataacagctgtcaactattcagtgacaggtgtaattatttatttatgttaataaattataaaactttactagctttcttattttaattcttcatttatttttttcctttcaagggaataatattgttttattatattaattttcttctccgttaattatatgcccaagattgggtttccactcctccaaaaccctcttcttcccaaaaagaccacgatgagggcttccacactgccaacgatgggaagtttagggggtagtgttcacacgaccaccaccatcgccacccacatgaagatataggatacaaaaatactactcccaatcggatcaacaggtttgtctttgtaaacatgatttaaaatattgaaataaaaagctttaaggttaacgaattccaatcaattttaatcttaaatgaaattaaaacacttaccccttccgatttcgcaactgttgtcgaatctttcactcttcgtcccaaatataccatttatttgagggattttcttcattttataacttttgtttgtttttttctttaattgctttcttcatttccagatggattgcaggccgagttcatggagagcgccatggttgggtccacttcgttgtccactcccgaaggagaggtcaacagccttatgcaacaggtagctgatgattacagcctcgaggtctcggtgggtcagccgcagccaggggcacacgctgtgcctaccaaggagactgagaaggtccacgaagacaatctctccaggcgccttgcagagctcaaggctaaaggttaagacttaaagaatccatcccatataaagaggacacatgatttcatatgccatctcattacatatatatatgactatttctcatttatctttttcttaacaatggtatcaattttcttccatattggcctaacatgttccatgacttttatggtctttgtgaataacttaacttgtattgtggatatgaattcttttctaggcttttagctttgattagctaatctgtattttggatataacttctgcttttctatgtgtctgactgtactgtagtgctctgatagttctcaatacaatattcattttttaagtacttgtgtttgattcaattgctggttttcaacatgattagcatcgtatttatatatttctaaccttatctaacgaaaactatctcatggtctctttttccttaaatatttatggtctaaattagtttctgatcttcatagttcatagttcatacttttgtagaaagtttttaacatttggaggttttttcccaaatgatatggtcttgtagtcaattttgttctttaattttggtaatttagtaatcaatactatgatagatactttttcttccatatttttcaaccattcgaagcaattttgtgacataatcgaaagttcttccgaagaagaggatcttacaatttaacatgtctaccatttgatgtaggaaactaggttggccttcaaaatatctgtataatagtgtgattcatctatcaagaaatttttggatttccaacaatccatgtcggtactggactatgggaaatgatgaagagggaaagtcggctaaatc

SEQ ID NO: 82771 - DNA, 919 bp, Cannabis sativa
tgttgccattaactttgtgaccaaggatgacgaaaggatgctgttcgatattcagaagttttacaatgtggttgtcgaagagctgcctgcaaacgttgccgatctcctttaaatcaaagtatttttgctcttgactctgatcaggtgtggtataaaggcaaaagatttattttggaagccttaatcattactattattattattattatcttctttttcttgtaggtgaatggtgtttgttagaatggatcgaacttgacccccaaaattttgggatatgctccaaattcctgtttttgggtgtgtagaagtaaaaaccattattccaaattttgtttccatgttttctttgtactttctttttttagtttcaaagacaaattttcagaattttattgtttggagtggattttcttcctctgtgcaaaagctgtgtttgtgtgtgtttttcctttctttcttacaaaggtgtcttgaagaagctcttatcttttttctttttcaccaaagttcttttcttcatgtgggtgtttttttatattacattgctttggtactaagggaatttataggcctcttgtggtcacgaacacgatcacgaagtgttatatcattattagtataattcaatatcggttgaatgggaatgacattctaatacttgaagtgacgtttatttgaggaatgagaatgagaacagggatgtttaaccaaatgttatgtaaaataaaattacttgaatggggatattaaattttaatgcttcaggttttgtgtttttaagtgagttttgttttttaaattaaaatttaacatttttatgtttctctaattattttaataaagattaattagtaatttttcttcccaaactttgacatgtattaaatcgtgcctcttgaatttttttggccgttaa

SEQ ID NO: 82772 - DNA, 625 bp, Cannabis sativa
aaccgtaccgcaccgcgcggtttaagaaaaatttaaaccgcgaccgtaccgcaaagaatttcaaaccgtattttttttgcgatgcggtgtggtgcagacggtttaagcagtttgaacattttgatgaaaacccctagtgtttagcacctttaaaatatgtcgcgttgtgatcggctagtaatattttctaaaaattattatattaaattatatgagactcaatatttaattgaaccgatatttttctttaagataattatttttccattatttttctcttggttaatatattctctttcgtttgttagaagaaaataactctgtacataattcaacaaattacctttttgttccattttgtttttgttttgtttctttttctttcctaattgaattttatgcgttcttatttagaacacatgtaaatataaaagtgaagttgaataatatatcgaatatgaaagcacgaatattataggtttgtatacataaagtatttttaataaaaattaattgtgttaacaagaataaaattatgtacctcctttttaaaagaaataattttcatacgttgaacaaaagtttaaagcatataaattacagtttaagattcatgaatgcatat

SEQ ID NO: 82773 - DNA, 1826 bp, Cannabis sativa
tgattaagaaaaaaaaaactgttttaaaaaaatattgaaagtgattttttttttgttttatcaaataataataataaaaaaaatagtataagaactattatttttttttaagatacacaagaactattcttcaatttccacttgctaatattttaatttttaatttttttaatcacgaaaagaaaagtaaaatatattttttaattttaaaaatagaaaacaaaagtgtgttttataaattttatttttatttgttgattttatttaagttgggtctaggtctaagtttgaggacgggggcagggtctggtgctgggatccaaggttcgagtctgggttcagggtcaagttcgagtctgggaccgggtcaagtgtccaatttcgggtctggggctgaggtccaagtttaggactggggtttaggtttcgggttccgagtccggccagggtcaaggttccagtccgggatcgggctcaaatttggatcccaaggtctaggttaaggtcagagtctaaatattgattaagaaaaaaaaactattataaacaaattgaaacatgattttttttgttttcaaaaattttggttctcaataaaaaaaattgaaaaagtaaaaacagttttatagaacatattttgggaaaatattttaatttttctaattaaaaaaaaactgattaaaaaagtattaccaaatgcacctttcatataatcacatttttttaggaatatttgcgacgaaacttgtaatgaccgcatgattagattatggattagtaaagacaattaacattaattattgatatttaattattatgcatgagtttatatttattatggatctcatttttaaaaatgggcattagagttataatttctcaattccgaagattttattaaattctaagtgtattatttatgttatatgcaaaatttatagttttatgatttttgctcggcgacaatgaaaaatgcgacggatggccaaacttgtcacatgggttagtttagaaccttcttatttagcaggatatttgtaagttgatatttggaatatcggattaggcagggtcatgatgttggaccattttaccacttggaaattattcatatagatgattacaggtattctggagagtttttggaagtttgaggttgttttgagttcaattggagggttgttatttttctgcaatgaaaaatggtaggccgtttttgcagaaacgacatactgtttttattggtgcaaacctagaaaaattgcatgccattttttagaaaatgaccttccgttttttgggcagttttcctatttcatgattttctcgtgttttctcgatatctagggttttctcatgctatttattgatagggaaacttttcgttttgagtttagatccccgaaaaagttttagaaaattgtttacccgttttgcgtgattgtgacacagggcatccgttcagtaagtgattttccattcaggtcaaccgacacgcttgatttttgaaacgaggtaagactagcatagaatgtatttatatatgaatatgtgtatgcgtaatatatgcatgctaattgtgattcatatactaccaacagtagtacggtagtggtattgtgtgtattggtacaatatatgatgttcaaagggtacgatctggtattagcaacactagtacggttaagtacgtagtgcatgtggtacaacattcagtagtgcttgaggtacagttcaaccctaccaacactagtatgagacgagttcttagtgcatgtggtacagaggtcgtacttctgttaagaatgttcttaatcatctgttaa

SEQ ID NO: 82774 - DNA, 1315 bp, Cannabis sativa
  modified_base (763)..(765): a, c, t, g, unknown or other
aagaagctacttatagtatggtgtaacactttgtcaaagctaagttataggatggtgtaacactttgtcaaatggcattagtattctacttaatttgaatatttgtgattattagtaatttatttcttttcatatatttttttaaatcattttgtacacggttccatcctaactaaaaaattattttttaattttaaaaagagcaaaccattttttttagaacatctagatacgtttggccatattttttaaaaacagaaaataaattacaaaaaaaaaaaaaaaagaattttgagaacaacaaatattgttttctattataaaaattaattaattaattgtaaattatttacttacttattattcatctcgctaatctagcgagctgatgttgactacttttcaacgtcaataagaatcataattaagggtgcacaacgggtggatttcaccgagtttaggttttttgggtacgggtttcaggttttgggtattgaaaagtgcaaactgaacccacctatttaggagaacgagttgtcgagtttgggagcgggttaggatgggttcgatgggggtggagaggagctgggttctagatgagcttgaccaattttttttttcagtaaagtgtccaaattaatatttctctcacacatacataaacaccagggtcggccttgagttgaaatgagctattggcaaaaaaaaaaaatttgtgccctcactataaagataaaagtagtatttttaaaaattattaaannnatatgtatattttttaaaaggcaattttttgagttgagccctaggcgcaggcctagcccacctatgtccagggctggccctggttaacacaaatcaatttacatttttttttttaaaaaaatacttatatatatcaacacaaaaaaaaatacaatattatcatatattcataataataatattcacatttctctctcacacacatagaatcatattcataatatcatctttgttttaattatataaccgtgtttttaggtgggttcgggtgggtctagattttttatttgtaaaatttctagaaccaaaacttgactcgatttggtactgggttaaactcgaacccgcactgtatttctttaaacctgatttttggattttttgggtctaggtgagtcgagtttgtcgggtgggtgaactttttgggtacaaatattctacctaaatcgtaattgtcctaattgtttgctcattgtttatttctcaattttttattattgttttactgttatttattttgctgaaattctgaaagaaaatttgatcaagg

SEQ ID NO: 82775 - DNA, 1508 bp, Cannabis sativa
gagtttagaacctttcctaggtttttgcaacaacttggggtgttacataggcatccatgtcctacaacccatgaacaaaatggcctagctgaaaggaagcataggcatatagttgagaatggtcttaccttgcttgcccaatcctctatgcctctgaaattctgggatgaggcttttagaacagctgtgtttctacacaatagactacctacccctgttctgcatcacaaaaccccactagaagttcttttccacaaacaacctgactactcttggtttagaacttttggttgcaaatgctaccccaatatcagaccatataacaaacataagatgcaatttaggtctgaaccatgcacatttctaggttacagcctaaaccacaagggatataaatgtttagcctctaatggtaggatgtacatctctagggatgtcatctttgatgaacaacattttccctatagtgaaaacaatgttacaccagaaaccatttctcctcaagaatggtacattcctgttaacattccatctgcctctaggatcccaaccatagtcactgcgtctaattctgatctatccaactctatatctcactcttctgcttctgcatctgatcatatttcatcatctcagtcacccattccatctgtcacaccctctataccacctggttttgagcatgttattcctgttaacactactgtcactcctgtttctctccctgaaccaaccaagtctcccattcagcctccacaacagtcttgtgtccctggtgtccccccagttcaaaacaatcatggaatgacaactcgggccaaagctggcattcacaaaccaaaagtgtttagtgtgtcaaccattcccacaacagttgctcaagctctcatgttaccacaatggaaacatgctatggatgatgagatccttgctctcactagaaacaatatctactccattgttccattgcctcatggtagacaagcaataggttgtaagtgggtttataaagaaaaagaggatacagagggtactcttattagacacaaggcaaggttagtagctaaaggcttccatcaacaacctggattcgacttcactgagacatttagccctgtggtaaagcctgtcactattcgtgttgtgctaaccttggctctgactcagggatgggagattagacagttggatgtgaacaatgcattcttgaatggtgttcttcaagaagaagtatatatgacacaaccccctggctatgagatcaatacatctcccaacctagtctgcaaacttcataaagctctttatggcctgaagcaagccccaagagcttggtttgacaagttgcatcagtccctgtccaggtttggctttgtctcatccaaatctgatcactctttgttcattcaccactcctctcagtccactaccatcatcttagtctatgtagatgatataatcatcacagggagcaactctgaagtcatttctcaacttgtcaccaacct

SEQ ID NO: 82776 - DNA, 1255 bp, Cannabis sativa
ctttctccaaatgttacagtaaaaatgaaaaaaacaaaacataaactgtataaaagtttaaatatatgtctaatcgtatttttgtaaataaaatatataatttctgataaacttgtaaaatccccaaattagaactccacatgagttaggttggtgcgattgagggtatttaaaaattaaaattgacttagatatatctaattctttctaaattttttaaactcactaaaagaaaattaagaaaagtagaaataaaagtttaaaagtgaaaaaattaaagaaagtacaaataataaattgatttaatatggttaaattttgtaaaaaaaaaaaaaagaagaagagaaaaacgtggtatttgggttgatttgttttttattaattcaatatttaatgtgattaaaaaatatgagaaaaagagaaaaaaaaatagaatagaataaaattaatttaaactgctatgtcaccgttcttttatatatattgattgatatattgatgtgattaaaaaatatatataaaaaaaaaagagaaaaataaaagagggtataaaatctaatttcctccgtgaatttgatagggttaagttgctgagctcatgttttcggataattgggttagattggatggttgttccactcaaatttttaggattgggttaggttggtcttcagttttcttttctttttttttttttttccgaattaatcctgaaactatatgtttctttattttatttacattctttgatttattattgttttttttttttaaaaaaaaaatataaatattttcttttctaaaaaataatgcacaatgttttttaactaacaaaattcttatttacgtctattttcatgtaaaattgaagttgaggagagaccaagttgctctaaaaaaaattaggagtttttataaaaatattaaattttgagtaaaaatttataattttactccgtacgaaattttttacaaaaatactgtctttttataatacaatcgtaaaataaaaaaacagaacaattaaaacaacagtgaaacaactaaaaaacaaccgtggaacaacagtgaaaacttaacacagtaagtaatgtaaaatttatacagtatttttgaagaaaaaacacacggtattttttaaaaaaaaattcatgctacagtaaaaaaagtgaaaaaaaaattaaaaattttaatatgtggtgcataaaccccccaaaaaataattagggactaatttatcaaaccgtgtaaaatt

SEQ ID NO: 82777 - DNA, 552 bp, Cannabis sativa
ttattgagtcaaattagtatttacttgtaatattattattgatctattataaaacgttattaaggtggtgtttagttgggagaaataaaaacgtaagaatgagaataaaaataggaatggaatagaataaatgtaaaaatgcataaaaaaaaaattcatcatgcaatggaatgatatttttttcattttaaaatggaatagttataggctaattctattagaatgacatttcaatactttaatgtataaccaaacaaaagaatgtaataaaaattatttcctttctattctatttcctcccaccaaacaccaactaaaggttatgaaggaatgagtctacactcctccaccctctttgatgtactaggttgtctttttaacatcagaatatgtttggttgttgtatgtcatacataagtactttcctacaagtggtatataatatataggtgcaaaagtttcatgttgctcttcttatatttaaacacataagatatagatatagaaaaaactttatttcatttcggacaattatcaaccaatccaatccaa

SEQ ID NO: 82778 - DNA, 735 bp, Cannabis sativa
aattaaaagtttttagtaattatactcaattttgtagggagtcaagagaattggacagtgtaattagattcttttcaattactctcaatttacactcatatccaattacatcatggatttccaacacacgtcctaatggtacaattaaatattggtatctatctctttgtcaaaaaaaaaaatattggtatctatctattttttttttttttttgaaagcaatgaacaaatttattgaaaatataataacgtaatacaagactagctatagatattatatatcttatgttcatcaaataaatattatatatcccatagctatagatattatatatcttatgttcatcaaataaatattatatgtcccatgttcatcaaacatcctaaaaaaatatgaaaagtcatttagccaatacaagttgttaattcaccaaaagagtacgtagcactaatctataagtagcacaaattaaggacacccttgaaaatctggataacaaacttacaaacacttcaaataataattttaaaatcattagagtgagaaactctaatagtaaaatcagctctcaaatgtatcttacaatgataattttgtcttttaaaatatatcttacaaaataattatcatatattatattttaactataaaacacaatttaatcaatttatacataaagtaaataaaataaattttattattacatttataaataattttaataaacaacatat

SEQ ID NO: 82779 - DNA, 890 bp, Cannabis sativa
tggattcttggccaaatctggacacttttcatttgtaaatatcctattgcatttaaatgttaataatattatcttatttagaattttcgtgtatccttatcttgaactaatagagtattagaattacttgtgaatttactatgtatatattcgtaattagtgaaaaactcttctcgaaccaaaatagtttattgtctaatcaaatagcatgttttgtcaaattatggacgactaaattcttaacgcgaatctcataggacataacagcttttaaaattaaagttataacattttcaaacagtatatttagtaaattgaattatcatttttattattaacaaagtcaccagagttagcgaatataaaaaaataaaacatattataatgacaatcttcaaaataattattaatatacaaactttaaagtttaacacacaacttgtatcactagctgtcctttaattagtaacaacttattagcatcccactaattcaaaaaactgaaaatcaaaattcaacaaattacatttaaaattaaacttgtcggtaaaatctatataattaagagccctctacaaaacctacatacaaaataacaataaataaaactgttattataaatctattacagaaaaaagaaaatagaaaatttcacctgtaataaatgtatttatttaacactacaaaatgcattagattattaaaaagggtccgtatatgggtctgaggtactagaaatgatttaggtctctcgagtaacaaacaactttgttctatttatcatctatatcaatatatcagccactatttttctctatttgctactgtccataccaattgctagaaaattcctatcaatatgtcttaacatttgaaattaaatcagataa

SEQ ID NO: 82780 - DNA, 1215 bp, Cannabis sativa
atgacttaattcaattggattggatcggatgaaaaaatccaatatccaataaataattggattggatcggatgggtccaaatccattggatgtgatccaatgaacacccctaaacctgagcatacatatcagataatcccataaggaaagacatgatatattccatattgtagtgttcttgcaactttttgactcctccacaagtgcatccattgcatgaacatgttggtctgaaatgggagagctgctcccaaatggttttaagtttggtaaaatacattcctacagtgtgattttcctgtttaagattcacaaggttttttctcaaattgtacagatgggcaccgtttttttgatggaacctgacttgaatatcactccatattgcagcagccgactcatcgtacaggatactagaagaaatttctttcgaaacagaatttaaaatccaagaaattactatgttattgtttcgaatccaagcattataaagagaaggatcagaaagagaaggtttagggatagaaccgtccaagaatccgagtttattcttgactgatatggcgcgttgcatagccctgctccaagctacatagttgtcttggcccgtgagtggttgagacacaagaacattgcccgggttatctccattatggaggtagtatggatcagagggatcatcaagatgacttcttggtcgcgccatgaggagactcttatctcccaaattggttgaactgcggctgttgtctacgattgttggagtcgaatcgttatctcccgttcccgcagcttgatcttcagtcgatattcttgaaaaaaaaagggttatctgtaaaaaaaaatgcagaatcacagaacaggggacagctgaaatgtcgatgaagataataaatcttcactgcggacgcagctatcgccggagaagaagaaacagtgatgatggaggaagaagacgactcaggattagaggaaagcatcactttcctgctctgataccatattgcggaagagaaattgaatgaactgttttattgtaaaaagaattgaatgaataatcaagtacagaacagtgcccaatacatatagatatgggcaacggaccaaaagaattagttatagactaaccgactttgtcataaaatataggactcaatatgtgacagcactaaccaaaaataactataatgactaacaccttgaactacattaatg

SEQ ID NO: 82781 - DNA, 1321 bp, Cannabis sativa
  modified_base (913)..(934): a, c, t, g, unknown or other
ttttttaaaaaaaatttaaattattattactcttgccaaaacttgtcagccagctataaaaacttgaacacatgaacttgtaaattgtaactcgtggtttcaaaataaaataaaatctgacattaaaaaatattagacatctaattattgccatataaatttttaagcttgtgtataaacaatttaattatttttaagtttttagagcgtatatgtatcagagcatatatatttcaaggataagacccaatataattcaagagcatgaaatattcatgttgagctcggactcaagtctatgtcgatttttttataagtcgaaatatagacatgagtaccggtcatagtaatatggtttgaaatacaaatatatatatttttgtacaaatattgttatttttttttttcaaacaaatttgttagattttaatagaaaataaatgatgtattatttattataaacataaatgatattaatattaatattaataattttaatatatgtaaacaaacataatattaaattgacaagaaaatatatgtttatatatttgaataaaatttatatttcttttattagaaaatagatattattctttttacccatataaacatatcaatactccttgataaaaaaaatccaatttttttcttggattcaaaaaaattgagatttatttttagaaaactaaagttaaatattgtatgattttataaaattcagaataattataaatatatttaaaaattaaaattgttaaataattcaatattttgctctattttttatactctttctccttatcataaattgacttttttttttgtttgttaatttctcatgagctcatcgtttgaatcaataaaaaaaatttggggactagcttggaggtttattattattattattatnnnnnnnnnnnnnnnnnnnnnnattattattattattatttgatttattttgacaattattcatggaagtgatgtttaagagttgtttaatttattttcaaacttaataacttcaaacaagacaattaattaatgttccatattaatattataaacatttattgattatattatttacagtttttgaaaagaaaacagtggtcgctgttcaaagtttgagtattatatatataatagaagaaaaacaaatactaattaatttagagatttgtgtgtgagtgggtaaacatagggtgaagtgcacaaatataattaattagttaataaaattgggttttgggaaaaatattaataaaaaaagaaaagaaaaatacattgatatttggtaattggtaattggtaattggta

SEQ ID NO: 82782 - DNA, 645 bp, Cannabis sativa
tggttgcgatccgccggtactgatcgtatctccgaacgttctactttagctggtgtggtagctgcctgtgatgcatccattgttctgtatcgattctcctaatcctccactcttccagtttcacggttgttgattgaaggtatgtctatgaataaaagaaagtaaaattgattgaattgcatatcaagtttagatttcagataattttgagtttgatgagaatgaggagaataattataatagaaaaatcaaattttctaatgtaatatatatatccaacctgatatttatacatatatatcagagatgtttctccgcacgaatttgtcaaggcatacgccgctcaccttaaaagatctggaaaggtttgtactcttcctcaatatcttattatgtcaaccatgttttgttcttggtaacaattgtatgatatttgtgttctgtgttttgttatttgttatttagaaatattagtcaagtggtattgctttgttatcttaatgacagttttcatgttatgttcagttatgttaaaaaggaatcttttggtgtgcgcacccatagagtatggaaccttggaccaaatggtggcctccatgaatgaggctaaagcagaaagagctgaccttgtggagcttcccatat

SEQ ID NO: 82783 - DNA, 1149 bp, Cannabis sativa
tacttaatattacttaaatatggtaccttataattaattaataatactctatacaaaaattattaattgttgaattatattagaagaaccaaatgggatatttgtgctaaacacttgttgtgccttaaacttgatttaagtaatttatgtttttatcttggaaaagttattaagaagaaagtaaataaaagaattaagtgatgttgactaaagttgtattcattttattttatattaaattaaattaggtaagagatgggaccatttggcatttaccactaaactagtaccataccacaccacgcatgtcccacggtttacactttacagccacctaatgcttacgcagcaaaaactcctcttcctcaatccttatccaaaacccaaaccaaatccaaatcaaatcatatataaactactactttctcagtctccattttcatctaaaaccaccacttccagaacaactgtattcttcttttgaatcgagatctaactattcatacaatacaatattgatgggagaagaacacgccaaatcctccatgtgtggcggaaccggaatccctcaccaagttttggggaaccaacactacagatgctggaatctgatccaacggtggatgagccggaggcataacaaccagccacagtaccaccaccaccaccaccaccaccaccaatcctctgattttagctacgatttgtcgagttacgcactcaatttcgaggatgatagtagccgagacgacgatgagtttcatctcagggatttctcttcgaggttgcctgcttcgccgactcctccgccgccatcgttctcggcagctaaatgtgcctccgattcgagttcctttgggaggggattaattgttggtttttaggtgaataaataagcgatgatttgatcgaatccaattttaatttgtacagttatcacctttattaattaattattaagcttgaattaaaaaatagcatgacaattcaagttcatcaattccaaaaccgctttattattaactaactaaataaatccgatatagaacagaatcaaatatgtgcaatatttttattttatttatatgtacatttttgggaaatattttaacaaagtcttttattttttattttttataattaactttt

SEQ ID NO: 82784 - DNA, 655 bp, Cannabis sativa
tttgagttgttctgctttgtgttttactggtattttataaaaatacaatatttttgaaaaaaattctgtgtgacaatatttttgtaagtttccaacaaattattctaaaaaaaaggtgagtaaagggcaataaggctgataggccaacaaaacgagactcagacacaattaacgttaacaaagcaatatacaaaccctcaactctatataaaacataattcaaaattggaacaagacctttttttttttatagatatgttagaggtggaaatataatattatatataaattatgaatgaactacttcttttattatcatttagttataagatagtactccatgtaggttaattacaccttactaaattttaacatggtattaaagttaaattaaattctaacgagtatacgattcacatctaataattagtccaaaaagacgagccaaaaaaatacatcttgtgatttactatgaaatcaaattatcaccgatctaaaaagatgaaccataagatccgttgtcaatcaatattattacttgtaatcgagctgtcaaaaattaataagcaaaaactatctaccatctattgtcaattaattttgaaataaaactatatatatacgtacctataccttatcaaattctaactagata

SEQ ID NO: 82785 - DNA, 1262 bp, Cannabis sativa
tgatcagaggccttccatgcatcaaccaaccagctcaattttgggaaggatgtttgcatggaaagcaatttgagagaagtttaccaaagaagtcgttatcaagagccacaaagccacttgagatcatacacatcgatgtttgtggaccaatcaaaccaaacatatttggtaagattaaatatttcttccttttcattgatgattttttcataaaaagtatgggcttatttcttgaaagagaagtcagaagggttcaagaacttcaaaaaaactcaaggctctgttgaaaaataaagtgttcttcctattaaggccatgagatctgaccaaggaggagagttcacatcaaatgagttctgtaaatattgtgaagataatggaatttgttgtcccttaactataagaccctactagattaggtatgttatcgggattacttaatgttttccactcctttactaatcaaacagtttatggaaaaacgtgaataattaaaacattcttgatgaacctttgaaattaaataaacaaaacttttacataatctacgatcttgtctttaaaatttaaaactgtaatacaaaatatttaactacaaaagttgttgcctagcgactaccaaaataaagcctactgctccaaagatcaaatcaccaggtctaactgccttgatatgtacaaccttcatccgctcgtactcaatattgttcagtcttagctttacctttacctacagatataaacattaactgtgaattggcagactcaataataaaagaataatcataacataaatataaactagattttaacttggcacccatacacctaattataaccttatcctgtatcccacacatactgatctagaacagtcatacaaaagtaatattgaccataatatcagcctatactcagtaccctagttgcaccaatgtgatagtatcaattaatacttaagctaaatatatttctgtcagtattcagtgcaactctatggacactaatactgccattaccgatatgttatctaacatacattcataaacatgcatgctaaacatgtaattatatatgcaataattatactaatcttacatttattttaaattcagttttgtcggtaaacttgagcgaaaactgttgctcgacaatttcaggcccctaagtcaaaacatttgtagaattgataagtgatatgctaaatcacttctcgaggacttaaaattaaaataaaaaagtttccctatcgatggatagcg

SEQ ID NO: 82786 - DNA, 1447 bp, Cannabis sativa
aagagcaaggtaccacctcacatcaattaaaatacaaaatcctacaactaggaatgttgatagagcactgcaaaaggtctccacgacagaagaagtattgaattggcaaacaaaaatatgattgcccaaaacaatgtcttaaaatgggtagaaagacaaattgctcgcacaaagacgatggtcaaagaaaaatcacaagacacggtcatcgagaagttgacaaataagatttaacaaacgcatgaagaactcatgaccatcataaaattatattccgcttcgttgtaagtattcttggcaaaaaaaaaaaagaaataaaaaagctaaaaattcagtatgaatctctgaagaaaaaaataaaaaaaataaataaaaacaattttttttaaagagaatcatattttatgggctctcaatcgaaatgattgtttcctttgagttttattaaacatgttaaatgatataaatactcatatcggtaattatatattagtttaccgaaataataataaaaaataaagataggtttagaagggttaacccaataaaatcaacaaaattattaggcgggttaaacttttttttaattaagcggattacaattagatatttataactcaatatttattttgggttggtaaaaatatactataacctgaccaaactgactgatataataacatatttttgggttgaatagagaactctagtgatctagctaagttgagaattttagtgcttcaccaaagatgggttgacttgtgtgtgtgtgtgtgagactttctagagagagaggggcaagaaagagagagggaaacatttagatgagattggttttattatttgagtggtataattggaactaaataaacacactaacattttctctttgatattttgtgtgatgtatacttagggaccatgcttcacatttaagcacggtaactcaaatctccctttacaaacttgtaaaagctcgttacaaacttataatccctatttttttttaatgataatagatacgttaattaaatagctaaatcaactactgcaagagactgcaaagcaaagggaatacagtcagactagaaacaacagttacaagcaagacaatgagcaactttatttgtaggtcgtaaaacagagcaaatgacaacattattaagagtagataacaagtcataacaagttcttgcaatcactaataattaaaccaaatgtagaaggcatcagagaggattctgaattgcttgaacgaccatcgatctatcaatttcaaccaccacattagaccaatttttcttctttatccagcttaaagcttccttcaaacttatggcctcaacaatgacatgttgaacacacccaagattatgcatagcaaaagcttcaagtaagagaccattcgatcctcgagcaacaagaccagccccataagagttctcaa

SEQ ID NO: 82787 - DNA, 1956 bp, Cannabis sativa
  modified_base (41)..(52): a, c, t, g, unknown or other
atcgttttagaagttcaattttaggttgttaaatcaacatnnnnnnnnnnnnatctaagttcctggtaaaatataattccaacaataagatgtacttttctgaatatttgtgaacaaagatcggtcagaacacacatgatgtgtagcacctgtatcaattatccatctgttatgcaaaataggaaagttctttccagaaaactgagataccatgggctgattaggattaggagaagtttttggtggttcttgactcttttgagacaaaagattcatcaattgttgatactgatttgtgatactttgaataagatcttgatctggcacattgcattgtccactttgaccaacttctccagaagactgtctttcttgtaaaccagaaaaattaccacaaggttttccaagctgattattcctactcttattagaattttttccatagaatttgtggcctggtggatatccatggagcttataacacttagcaacaatgtgtccaggcataccacaatgatgacaagtaactctaggttgattgaaactagcattcccagcaaactcatctatagtagatccagaaggaccgggtgtagttttaccagtttctgcagcagtatttggaatcgtagtaatgcttctttgtctctcctcttgaataatcgatgcataagttttgttaacaggtggtaatggatcttgcataagaatctgagatcgtacaggtccataggattcattcaatccaattagaaactccatttataactttgtcttcctcctgatactcttggatgattttcatagctccacaattgcaaacaagtagtggacgatactgttgtatcatatcccatagagcatttcttcgagtaaaataagcagtaacatcaagagatccttggttaagcatctgcatcgaccttttggcttcaaaatttcttaaagtatttttctggtaaaatctttcatgcagatcctcccaaatttttgctgtattttctttgtacataaaactatcagcgatatcaccaaaaacagagtgtaagagccaagagattaccaaatcattgcattgattctaaatatcatggtcttcgtgatcttcatatggttgttccagctttccattgataaattgtatcttgtttcgagctgacagggcaacaaccatcgatcttctccacacactgtagttgtcgctgccagtcaaaatcttagaaaccaaacttgctgttggatgatctccatttgcaatgtagtatggatctctactccgatcgaaatgtcgaggtgcatgatctgaatcaagcacaaagaaaggattcacattatcactagagctgtctcgagttgcttgactactagctcctttccttgccatgaccacaaacaatcaaagaagaagagcaacacacaaatatggtggctctaataccatattacaaaataaatagaaaaacagagagaaagagaattggagaggaagagtgtttttctcattagtctgaaaaatgaaggaattacaactaactgatatgatgaagtaacagaaattagttacaacaaactgtacaaacagacacttttaactaactaactaacataacacaggatcttagctaactcatcttttcttattttgatataatatcattataatttatactttacattaatcaaatatttatataatttttcaatattttaagtttatatttatttatatgatttttcaattagtacaaaaatataaatcaattaaaaaggttataaaatttgataatagcgcgacttaattctttaatgtgtatggattataaattaaaaaaataaattactaaaaattagagaaaatatataaagagaaggatgataagttgctacttaatctttctttaaacattccgatatattatatagagattatttggtggagtttccttgttaaaatac

SEQ ID NO: 82788 - DNA, 912 bp, Cannabis sativa
cttgtatattatatatatactactttttctttttatagtgggggtttgcatatatggttatatatacacaaatattatatataatggcgtaatgtttttttggttaattattacttaaattaagaagagtactcaatgaaatgaaagaattaattatatgatcagagtgaggcagaaagtcgttaacgtatgtatattggtgttttgctttctttcaagaaaagagataaacactatatataactacataattaattaatactttttttaatttaaaaaaaaaaatagtattggatttatttcaattttcaagtgagaattttatatataatatataatgtagaaaaagtatatatagcgcctgtgcatggctatatgtatatgatgcgatggataaagtcaaaacatatatcccaataaaaggggcaacaaggaacagccctcccttcttaaatatatatccattatattatatatatatatatatataattgagtgcttatctgactaattaattaataaattatcaaattaattaaaagagagaaagaagtaaaaaaggaaaaccaatagctaattagacattttgggtgaatccctggcagaatctctgtataataaagattcccataaattaatttgttcacacaaaattaattaattaattaattacaatttggatgcatgcagatgcactaccactatatattaattataatgcaacttgcatatatatgcatgtgtctctcacccaacttacatattatacttactgattataggggagattcatatatataagttgatatatatcttaattgatataacttatatatttgagatgatatatatatatatatatggttccagcaatatgccattataatgaatttaattttggtaaatatatat

SEQ ID NO: 82789 - DNA, 972 bp, Cannabis sativa
gaggtatgaaactaatagattatgtctataatcacctcaaaaaaaaaattgacaactaaaaaatttaataaaatacaatttaatatttataatagcttaagaggtaaaaattctattacagaaatgcatataaaaatgggagactgtatgctattaattaatatttggatattattacagcaattgtactttgaaaaaaatatataaaaatttaatatattctttaatgaacatgaactttcacaaagcaaaccttttgacaaattaaattgggaaatgaatacataatattaaaaagagatataatgccctagaaaaaaaacatattggcaagaatattggtcaaattctggattttttttttggtaaggaatcttgaataaaagttttgtttgtagtttcaagacttgtttctttctatttatagattatacatgttatatttttggttaatctataaatcttctactgttgtagcctttgagaagtgttacatcaccaaaaaaataaaaataaaaattaagattctaaaaaagggaattctctattgaaagtagtaaaaacagcctagagaatctaataacaccattattactattagtgaccaatcaatagtcattctttgccatatatatacacttgtatatagtcacaatattagtgatgacacaattagaaaaatttacttcttgctagctacctcatttctttaaacaatttcttgatgtaaccagtgcattaattaatttaacaaaatttaagaatttagagaaaaaaaaatacaaacataacaatctaatgaaaaattaggagtatatagatttttggaacttataataaatactagatattacgtgccaagtcacatatgctaattttattttaattttagttttttttaatatcataattttaaaattaataatattcaatgtagtgataattattgaaatttgaaagtataatagtgat

SEQ ID NO: 82790 - DNA, 703 bp, Cannabis sativa
attatattttgggcagaattatgcaaaatagggtcagaagaacaaagtgaatggtattttttcagccacaaagataagaaatatccaactggtacccgaacgaatagagcaacggtagctgggttttggaaagcaacgggaagagacaaggccatttattctaagcatgacttgataggtatgagaaagaccttagtcttttacaaaggccgagcccctaatggtcaaaaatctgactggattatgcatgaataccgccttgaaacaaatgaaaatgccactcctcaggtacacttcacacataaatcaaatactaactgatttggacacaaatatttatgggtctatttaatttgtttgtgtccattaattttatcaatagcatttttttgtttacttctgtgaattaacggtggcaatttgtgttcaatagtatttgtgttgtgtcaatatagagattattcatatcaaatgccaaacccaaacccaaacccaacttatttaatagccaaaatcgtatagaaaactataaatcaaaattgatccaactataataaactcgcacgacccgacccgtttaacacgtttatacaaaaattatacttatataattgatagtttgaacaatacaagatatacttaattttagttaatttttcaactcattaacatatttacgtttttttatgacagcaattaataa

SEQ ID NO: 82791 - DNA, 1085 bp, Cannabis sativa
  modified_base (27)..(42): a, c, t, g, unknown or other
ttaggatgttaaataacatacatagtnnnnnnnnnnnnnnnnggtaaaatatattccaacaataattgctatctaagtcctataagtagcagtccccacattgtagaaaggacgatcgattttctaacttagagaaattctgccgaattgtattctgtaaaacaagaaagccaagaaaaaaatgactcgtggagtatgtacatttagctataaaaccacgtaaaaatttatcatcattatttaataattaatatacataatttatttatttcacatttattaatggtcaaagtctcagcatgttacaatttttggtgtttacaacatggcaatctgacagctggtaagtagggagcctcctcattgtgtggtgtttggctgctgcaatcctattcgtgggactaaggacatgtgtcgcccaatggtttcaccatgcaaagttggtgtctagacaagtcgttggacaaaaaggagctacagagcacgtacgcgcactaccaaggtctgatgcaggggacaagatcttatttagtgttagaaagtatgcaaccattgcatttagatctggataagacacactcgaataggttccgggaacatctggttaaaggcttcccagaccggactaacctacaaccatcatggagcattcatgacttctaatccttctttatagtagtttaatttatgagaatcccagagtcctttccacctttgacgacaaggggagcctctgagtaacttctagtacataacaccttctgtgaggctaaggggcgaaggagataacactaaccatacataatttgatgtggcatccttccgtaattgccacgtacacagaattcgggaaaatagataacaagtataattataacccttcaattacatccaattagacacaaacatggctttcccaacaggcccaaaagataaaaaagtttctaaaacaaaaaggttgagatgcaaaatggccctaaatttagaaactaagttagccaatgtctcctttttaaaaaaagttaagaaaatagccatatataataaattagctaataaaaattataaaaatacatttatcacat

SEQ ID NO: 82792 - DNA, 1366 bp, Cannabis sativa
gtcgacctgtcccaggttgatttctagcctttctcgcgtcatgctacgaaatttcattgtttccaagtcgtgcttgcttgacatttgcattcatgcaagaggactctagtatatcaggtttttcattcccttggtttgcaaatccacgggaagttcttggattgtcatgttgagtctcttgatttcttgtatttccagtatttcgtgggttttgtccatccattgggatatctctcacattcccaagttgttcttcttgagtgtttgtaagattctcttgattattcccttatctcgtagtcctagaacctcaaggcctccgccgtggtcgtcttgcagatgttacaagttgattttgaggagtgctccttgtgcagcccttgttgctgccgcttcgcattctaactcgacattccttcggtttgatttagccagatgctatcaaagttgcctattttatagttccaccattagaacatatttggttggatcataagcgtcttcgttttgcctttctggggtctgttcaccagttcgattgaaatctccatcatttcttccaaaacggggaatttcagtagtgttagttctctgcgaagcctgaggctcctttctaggacgatgattcgtctcctctggttgattctctttattatgctgagtatcgtctgccatgggtacaaattttgagttatatttttgagaaaaatattttctgagttttactacaaaggctcttaatgaaaacaccaacctgttaatgcagatttttggtaattaaaatattagcctttttgtaataaatacataatttattatataacaattaattactaaattaataataaataacaggaaggttttaacgtagttttggagttaaatcttcaaagtctacaagtccatcttattaaggataagtatctttaaatacagaatacaataaagcaatttagcaatattatctcttttctttagttctaaaattggtcgtcccttttaccctgagttatgtccttatttatagatgtatatggggtgatagtttttttccttgagatctattctttcataatcgttcatgaaacgtcgtcattcctcacgtttcatctttacgcacatgggataatattcaataatcgttcaaccgctctttgtctttatccatagacagttatgttgactgtgttggatagttctcactgattgcgtgttatctttcttaaccatctttgtaggaaaaaatgttcagtgttaaaatttgatgcatcttgcggttatcttttgccatttaaaaggtattagcgaggtagttacttccatatgtcaaaagcaaggtgaataaacgttgaagttgtttccattc

SEQ ID NO: 82793 - DNA, 589 bp, Cannabis sativa
tccaatgcccaagtctaccacctttaatcccggtggttggccccagagttgtttacttcttgccacgtgtaaaaagtgttctccatgggtcaaatttccaggtaaacatatgtttattagtttaaatataaaaggcccaatttttattttttgtctatagcacccaaagggcttgggacggcctgattatgttttatcgtttgctatatttggtataactcttacatgaggcaaatttgacaaaaatttggacacattattagagcaaagatgtatcactaatttagcacaccattgaatatgctctaaaatttcaaaaatataattgatcactgttatttagatatttaataaactttagtttttaactataatttttttttccatttcaaaaaaaaaaaaaaaatctataattttttttacctaatgaaagagttttgattattggataaatgttgtgtatttttttctttttttaaaaaaaaaaaaacttgtgttgtgggtatcaattattgctcgtgcatgagtgatttgtgacatttatattatactcatagctaataattaatcctacctttataataaaaaa

SEQ ID NO: 82794 - DNA, 1435 bp, Cannabis sativa
  modified_base (1194)..(1204): a, c, t, g, unknown or other
ttacgtttatagcactaaaatacttaaattatttttttagcagcaaaaatacttaaaatattatttttgtgacacttataagtaaatatttttttgagaaataattaaatttacaactcgggaacaaaaagcttaattatagctcatttgttcaaattaaatattatctagatgacttgttttctcttttttaaacagacaaaacttttatacaaaatatatctcttaattctatgtaatggtatctatagtatatacttgattatgccacaaactattatttgtagcattctaaatataatatacaagactattaaaatataaaaaaatatctttaaaatatctttaaaatataaaaaaatattatgtcttcctttttcttaataaagcaaatttgtgtccttattgtaattatgaaaacactacttttggtctatcattttgaatgtatcaataatgcactttaatttattatatattttgtcaattaataatttatctccatatatttaaagtttgttttgcacgtctttaatttgatcaacaatattaataaatgttagtgttacaatataggtacatttttcaagattcatgagcatatgttataattactaaaaaaggatccaaaatatatgtgggtaaaagtattttccataaaaattataatttatattataactaaatgcacatactttcaaaaactagattaaaacaacctctatattatctaaataatagtaataattgttataaagttatattttgtttctaattgtatccaaaacctattttaaccttgaatcaatgatcaacctctaaaagtggtatattctctagactattcttctcaaaaatatttatatatttatatatatatattagaagcaatttttttaaggataatattgttggtagatataaaatttaatatgttagccttatgtatgattattatatttttatatgatctactataacaaattattaacatctaaaaatttcatttttaaatttaaattaattataattaactatatatttaaaataaattatttttttaattaaaatatctgatagactttttttattataacatgtcacaaaaaaaatattattggataagtatgtcctagtcatacttcacataattaaccatgttttctatatacgacttttctatttttttagtannnnnnnnnnnatttattcaaacaattttttttaaatcacaccaaatataatatttatctaattactactatatcatttatcactttatctattaaaaaaattaataaatacaaaaattggacacatcaataaataattttttctaattactttttttttttccatattttgtaaattttgacattcttaatgtaagaataataatctgtttaagaattaaaaaaacttaaatcacacctta

SEQ ID NO: 82795 - DNA, 1536 bp, Cannabis sativa
cttccgatcttcaattgaatcaaaatgcaggcgtacatcaactaatggagcaacaacctgtggatccaatacaattacgagtaatacagttagaagataagttcaggaaataccatgatggagaatatgggaaattaccgtgatacgactcagacgaagagacaaaaccattccatcctgatattttgaattcacaatttcctcaaggattcaaaaactcacacgtcgcacaatatgatggtacaacagatcctgcggtgcacctgacaacttcaacataataatgagaccaattaatgtttctaaaaacttctgatgcatattaatctcgacttcactaactagagccataagtagttggtttgataaatttaccaaccattctataacttcttgagaataattatcaaaggattttaaaaagcaattcttagctacaagagatcggagaccagaagtgtctttgctaaccaatgttaagcagcaaccaagagaatccctaaaggcatacttaagtcattttagtacggctagctgcagccaaagtcaggaatctcaatgacaatatttagataacaactcttcaagctggaatgacaactgacttgtcaactgtaggaggagaattatgggatgacttggaaggtcgtcttgttagaaacattaacgagttcaacgaaagagcacaaattttcttgtggatggaagaagcgcaaaatgaaataaagctattaaagtccgactcgggagataaatccaacacaagtaccgcaacagcaagcactgtgaccaccaaagccaaaaattcaaatcccattggctcgaataccaagagaaaggatgagtcgagaaactcgttaaaagacaaaaagaaacaaaagatggatgagaaacatgttccaatatacttggtgtatatggaattgaatgaaacttgtaaaaatatctatctcgccaacaaaaactggatagcatttcacagacttgatccaatgagacatgtgagaaataagtgagatcctaataattattgttatttccatagagacatcgggcataccattgaagaatatcgtcagctgaaagatgaaattggaaatctcatcttgcgaggttacctgaggccgtatgtgtaatgtccgcttagctttaatatgagaatcaacagataattatggtttaattaagaattagatttttaattattatttacgaatttgtggagatatatttgaatcctaggtgtgctgattatgttatatgtaaaatttcatattttttattttatgctcggtaaaagtggtatgcgaagtaaggctcatagagtcactttattgtagtttgaaaactttagaaatagcatggcgatttagatagacatggagaatatcgggaatgtttgggattataagtgtgaccaaaatacccttaggtgagaagattactttttggtgaagcaaggagtaaattagtaattttacccttattttgtttcccttattttgtttaaattgagatattgactttcttaagttt

SEQ ID NO: 82796 - DNA, 582 bp, Cannabis sativa
tttacattttatattggagatgatcttagtcatcatagtgactagtgtcacaatgaggtgtcgtcctttgttagcgattttttataatcattaagacttaatattaaattacactaataacaatataatactatgaatgcactttatttatttctagcttcatcctattattattaggcactatactttctacaagttgcgttctacaattagttaacaagatttctttaaaactattcacacctaaaagaatgttaggcaagggtagtcacttttatcatttctctctatatatatataaataaaatttatttataatttctccatctaccaaaaaacaaaagtgatgttccaatttttgttaatagggtaggtttaatggcgactatatatgtatatatttatcaacttttatcaatttctctttataattttttttgttcataaaaaaaagaaaattggaatatgcatggccccttgttgatattttatttgttatgttcttcctatcctaactgattttatttttatttttatttatgaatttattattgcttgttcttaacaaaatgtccttttttt

SEQ ID NO: 82797 - DNA, 1367 bp, Cannabis sativa
tagttgttttattttaatttaggtaaaattataaaacaaacgcagaaaaaatgggggaaaatctgtatttttttctcttttttcttacaatcccgacggtttaaaatcgtcgcctataatagggtattggcgacgattttaaatcgtcgggaagtccacattagagatggtttttaaccgtcgcctattttgccgttttacgacagccgtataggcgacggttatagaaactgacgggaatactttaaaagaatgtttaaaaatgtcagaaaaaactatttttgtagtagtgagtgcaggtggagagcatccttttgcaccctacaattggagaccatctgacacttgacaagggtaccggtgctaggccacctccagcacctgcagcatgcaatgggaaaacgacgtcttgtccccatgggacaactttttacatcaggccattagaggctataaataccccccatctcagttgtgaaagagggttggaaaatcatttggtgtaactcagatatttaattcaatataaagaggaatattcagacattttttcacctttatctttatcttatctttatcacattttctaggtaaccttgcattttccgaccactaacttagttgacgagttctcaccgtaacctgatgatcaatccaagccaacgcatggagggaagctggcatataaatacccctgcaatacataggagaggggaaagacattcttgagggacactttgaaaatacaaaaatagtatactatttatctagcaactcttctaaaaaattcctacgaaacttcttcttcttcaagaggaacactaggaaaatagagttctggtccattgtatacaagtctatatgaacctttactggccgaggagcctaataagatggactcgtggactaaggatagttaacgcctgaaccacgtaaaaatttcatattttttatttattctgttatttctttcttaagctctaaaaatattcagtttgttgaaaatctctgtaaacagatagcaatttaaaatttatctagattatttaaatttttaatgttaaaataagatcattacaaattttattaataaaatatgtaaatttttgatgttataattaaaattaataaattaaaatgaaatgatcaaattttaaaataatcaaaattcaaaataaccataatggcaaggttgttgagaaattaatttttcaaatttaaagcttactaatgtctaaaattgatttaaattaattaaaaaaataatcaaattatttttattttgataattagatatttattttaaaattaagcttccacacaaaattataccaaaatttgaattttatttcactgaaaaataattt

SEQ ID NO: 82798 - DNA, 2022 bp, Cannabis sativa
  modified_base (622)..(628): a, c, t, g, unknown or other
  modified_base (801)..(801): a, c, t, g, unknown or other
  modified_base (902)..(910): a, c, t, g, unknown or other
atgttttagtcacaaataatatttcatcgtgactaattaaaagtcacatttagttacaaaaaaattatgttgtaactaaaaaattgtcactaaaagtaatagttctttgtagtgtgtctgtaaatatcattttattacaaatatatatcgtaaccaagtaaaatacatatacatttttttctcgattttttttttcaaagaaggcgactatcccgccacgcttttatgtgggttcgccgttaggtgcaacttaatatcagatccaacttattttacttttaataatgattatagaaaccaataactatttaattgcaacaattttttaaaaattacaaatttaaaaccgtcgagaattgtactttttgtcgtggtgacactctcatatgatttttttaaagaaaaaaaaattaattaaaactactttgacgctgaaaatacgaagagacatatattagtggactatgcatcttccccagaagggatattttttttttcaatttttttttcattgcgatgtttgttataaggctaattagtaattttttcccctgaactttgacatgtagtaaattgtgccccctgaactttttttgccgttaaaaattccccttgaactatnnnnnnngttaaatttaaggacttttgtccaatttcattcaattttactatttcagtaattgtttatgtactaaaccaggctctctagactttgatatctaccaaatcatgcccgtcaaactttgatatgtactaaatcacgccccttgaactttcatccatgttagaattttttactanaattagacaaaagtccttaattttaacaatctcaatagttcgaggagaatttttaacggccaaaaaaattcaaggggcacgatttaatatatgtcaaagtnnnnnnnnnaaaattactaattagccttgttataattacaatattatccctattaatttataaaaaaatttaaatagtttacaatcacaaatataggtttgaagttttttgaacacacgtggtaaactggaatatcagaaactctattttcagtattataaactattcagaattttttaaaaatttacaaagatgatattgtaactttaacaaatactgctatgaaaaaaaataaaaaatattttggcattgaagataataattagcactctttatatatatatatatatatatttatgtatagattattttttaatgggtattacccattgatatgaacttttataaaaataactataattaaatattaattttgaatatattaatttttaaaaatgagattttaatctaatgaccgtaacagaataaaaattaaagtttttgtgcttaattttactatttaattaaaaataatctctttttacactatcgaaaatatgtttatatttttatcccactaactcaaactcaactttttttaatgtccaaaatcaatataaaaatgaaagatttttttttaattagataacaaaattaaacatataaatttaatttttctaataatactcattcatgagtaatagccattaagagtgcacaatatataaatacttcatttattatagaggaaattacaaattttattaatttttatactttttgtgcaaaaaaaatatgattttttttttcaaaaaaattatttaaagagaaaattgaagaaaaagttgacaaatatggaaaaatgaagtaaggataattatcctcatggtaacttgagagtaactaattactataagtgagtaaccagataattatactgttttttcatatttttttaatattttttttttctgaaaattttcaattaaataatttttaaaaaaaaacaataccatatttttacaaacttagagcatttctaatggagagctataaatatagtatattgttatttttttagaatgtttagctaaaagttaactccaatggtgatgtaaaatgtgtgtcaaatttagccaaagctaaaaattgtgctgaatttggcacaaaagatagcatgt

SEQ ID NO: 82799 - DNA, 877 bp, Cannabis sativa
  modified_base (839)..(848): a, c, t, g, unknown or other
aaatttaatacaatactatattttgttccaaatttaagacaacttttaacatgtactaaatttaatattttttagaacatcattaaagcataattttttttttaaatgtgataaaaatataacaatacatcacttttttaacactctattagagcggacaatatcaaattaaaactgataaatgaaataaaatattgctttaatggtcattttattatataatacaaagtcttgttagatacgcgtgaaacatttattggctttgtattgtgacaatacataaacaaaatatatgacaatttttgttggccattactctcacaagcccggattcaaattttctgtccgatattggtgtcccattcataagtctcatatttattagggaaacttaaaaaaaatatattaaaatttgagttaatttttacaaaaatattattatacggatttttttttttcaaaaataatgtatttttataaaataatagtggaacacaaaatataacaactaaaaacaacagtggaataactgtagaacaacagtgaaaacttaacacaatacattgtacaaaccttacacagtattttttaaaaaaatttcgtcccataataaaaaagtgaaaaaaaaaaatgaaatattttgagtatgtgttgtaaataatcctatttgttattcactaaggaaaaataaaattgatgagctctactttttatttgtcttttagtaattaatagtattccttcctacattttttttttcatatagcattttacttaatatattaaatataagggaaaaaaaatagaaaaatacaaaaaaaaaggaaaaaaaattacannnnnnnnnnggccggcccattaaacatttatacagtcc

SEQ ID NO: 82800 - DNA, 815 bp, Cannabis sativa
tttttttgaatttgagagtctagctccgaggtggttgaacttccttgcttgtggagctccaatgttaaggtttcctcttactgccatgccttgcagctctaagagggattctcgtatttggcgtgtgacttcctgttgttcctccatctttgcttgttgatccaaaatatttgtcccaatgtcaccacctcgtgttcctcctcgtcatattcctcgtactttttgacatggtttattccatagtcgtccccttaatccttatattggccttcttggtcatccttctcaaggggattttcatcaacaaacttttctagttgctcgcctttccaagggggatggttggctacttctgatgcatcactatctcctttgatgtccacatgaacgttcaacgaaggaggcctatttatgtcatcagtagtagcgtcttccttatcgttgcgagcggtcagcttattggtcacagttttggttgtgaccatggtgtagatgacaacaatggtggaaacttaagttcaactctcacataacacctttcccacttgaaattcattaacagcaacatcttctaacacatcaaaggaatttctagtctggacttgggaagggctagttatcataaccttcttctctttagcttcctttaatccttgatcatcttctttaataattattgaagcctttccactcgagccactgttggaacttttaacttccaaagtttcttaatttgctccacctttccaccttcttacaaacattacttgtgtgaacaatgcccttacaaatctcacatttatttagcttccatt

SEQ ID NO: 82801 - DNA, 984 bp, Cannabis sativa
ttgcaagggaattgtataaagattaatattacacaaaattatactaacttctattttggtttatttctcttgctgaatttctaacctgtctgttgcattacattaacaaacaatcaatcagagacaataaatcctccaagtcaaaatcgaatttacaagaagagaaaaaacctgttaaacgattgtgagagggaatggtggttctgcatcatctgtctgctcctcgccactgttgtcgtgatcttttgggaggaaggagggtttgggggagtcgaaacccaatctgcaccatcgacaagattcgatctttcctcaattgagataccattgaagcgatccgccaaacccactttctttgctgcaaacttcaaccaaatcacctctcctatacatttctctctctcttttttttttttttgagaattttgaaaattgattgtgaattaggggaaataagaagaaatgttgagatttttaaaattcaaaatttaatattttaagtaataagatatgatttttaggagtggtatgtaaagatatgatttttatttttttttaaaaaaaacaatattttttaatgagtagcaataaaaatggaaactttggtttttttttttaaaaaaataaaattcataagatctattaattaataaattcgttcaaaacaatataaagcaccttagaggaatagtcctacaactgaagcacacgacctgtagagaaacaagagtctcttgcaaagcaatgagccaacttattgcagatcgttttacaaaacacaaatcaacaaaagataaagctaaaagaaaatttcgaacatcttaaacaataagaccaaactgtgaagccatgaaaataacgctgtgaatcgcttggacacataccaagttatctgtttctaacatgactttatcccatgaatgagttgcaatccaactcaaggcttctttaatgcctattatctcagtaatttcgggttgaaca

SEQ ID NO: 82802 - DNA, 1524 bp, Cannabis sativa
aaaagttttaattatatataaaagtgtatgagaaaatgataataagtttttttgcacatattttataattaattaaaataatgtatacaaaattgtaaaatgcccttaaatatttagtccacggtatcctgtcgtttacaataaacaatgtttacaacatttttgtcctaaaagacctttcctactttgcatgagcataccattagtattaccatcacaaacttctttgtcttttgtattatacaacgagtatagcgtatgacaaatgagcaatatagtcttttttttgctgtttttttttttttcaaaaaaatgagcaatattagtcactgtgtatagagttctcactattattttgaaaatgaaagtcacaatgttctttattggttgttaccattggactttcataaacttaaatgagtgataggaagttaaatgagttcttgaaacaatcaagtcaatagaaataaagtatttttatcgaacactagtggtgtttagcatcttttataagtgcattttacgattggttaacgatattctttaaaaaaaatttataagttacatgagattcaatacttaactacacaaaaaacggtgtgatatcgaggagagtagtaaacactaataatattttttagcaattcttatataaataaaaacaatttgttaaaagtaccctaggcaatataacatttattgtaggcgatattttacctatgatgtatgactgctaagtatttttagcttttgtttctcttctgagtctagccaaacttttatgacaacaactatattttaatagctctcaattacgcataaatttaaatagtattattactttattttactataattaagagtgataatttagagaaaaaattaaaaatttaataacgatcaattctttaggagcttactctgggcatacgtgtcatatttgtgtttagaacctccacttaatgaagcctccaattttatattgcatctcactcatttcatcatgattgcctttgtaacttgtatttgcaattgataaaactatcaattttgtcacactattatttatcacagaatgatttaaacaactaaaaaattaatttcataaattatatgacactagtattttgttatttggttattagtttataattgatctaagtagcgatatttattagtattattttggtggaatgtaataaagctaaatagttgcaaagcttttgttagttggagaatacttcaccacaatcatatatcacaacatcaagtttaatttttgaataattaatatttttgcctatgaactttttacactatttgatcctgcctctaaaatatataattttttaaaacttttttttaaaatataacagttacaaaattatggttatttgataggttctatttcttttataattttaccccaaaaagaattaattttaaaaattataatattataaaaaaaattgataaaaatattaaattaattaaaaaatattaaacttacttaaaaacctaaat

SEQ ID NO: 82803 - DNA, 1184 bp, Cannabis sativa
cccagcccaagcaaaaaaaaaaaaaaaaagtatatacatatattatatactctaagccgaccccaacatcccagcccaaacccaaataaaaaaaccctaaacatatatatatatatatatttcattatcttttctctctattcaatccctaacacacaaactcaaaaagtagcagcagccacaatttctccaaaaaaagaaaaaatccagtgcccattgcccagcccagccatgagtgaaccactgaactccatacctagcgtcagttgtgcgcccacccaggcgccaccagtcgtgcggctagcccaggccgccaccaaccgtgcgcccagccttgtccgccaccagccgtgcgcccagaagttgtgcgcgaatctgaaggttagtttgattttttataacaatgaagaatggtgatgagtgtgattttagagaacaagatttttttttctgtgaatgtggtctaggtcatgtatgtatgtatgttcttctagccgattgtgattatttctacgaacaagatttttttttctgctgtgaatgtctccaaatatatttttgttgtacaagagtcaatattttgcacaaaaaactctgatgaaacacccgagtgtgattttactacttgcgtgacctttctagttgcacatttcattaatatatagattttcaagccgctcgtgataatttaaggcttctgatgtatattttgtttttttcttaaaaaaaaaaatatgttagttttgttttatggttctcaagcattttaaacattggagttaagcacataataatatgaataaggtaatgaaaacaaaatatgaataagaaaaaaacacaatagtcatatttaacactatgaataaggtaattaaaaaaatatgaataaacacaatagtaattagaaaaatatgaataaggtaatgaaaagttaagcacataagacaaaatatgtcatatttaacatttgtatatttttatccaaaaaagaaatatgtgtatgtttgaaatagtcaaaatagtatattatgtatggcttatgttacgtattattgtagtttcttgatttttttattccgttaaatagtcccttaaatatttatattattataaatttgttatttttgaattttggtggttgtaatcttgtgaatgatgtctgttaatcaattggagattttgat

SEQ ID NO: 82804 - DNA, 812 bp, Cannabis sativa
aagaaatgccgttagatagacacttttaatatataaagatatgtataagtgtagatggtatccttatattttataaggttcaaggttgcaccatttcttcacttcttcgtttctatatagtttcctatagcttcctttttctctctttattatatatttttatagcgaatcatctttagttttaattggtatattataattagttgagtttagactaaatattatatctttttggaaaacttgatcagaataagaaagcaagatataatcaggtgacgaggcaaggcaataatggatttggcgaatgaaggtgatgaaacgacgtcgttggtgggtgcatatgatgagtattaccaaatgggagtgagaagcttaatggagaaagaaaatataaaaaaagttccaaacaagtacatactgagcgaggcagagagaccaaattacaatttggaaattaataatactaacctcatcaacttacctgtcatcgattttgctcagcttcaagcctccaatagatccctagtgatcaattcccttgcaaaagcttgccaagattatggattttttcaggtgctgttaattgttattctctccctctcatttacttttaggcacggtcttatacataatttcatatgatttttttttagtataatttgcggataaattttttagtataatttttattctctccttttggttggaggtaatgaaatggaatggaatggaaaggaaacaatttttatttcatttctttgtttagttgcattttaaagtattggaatagcatttcaatggaatgctctttc

SEQ ID NO: 82805 - DNA, 613 bp, Cannabis sativa
tccttgtatgtttggctttaatgatgtcattttgacattgctctcaatattcaaagctgttgaccttttcattttgttgcgattcgtgactgagcactgggattgcttgccaggacatatatttggaattgtcaagtcattagtagtccggcaacccagtgtttatcagtatgtcatgggccttagctacttaggggcaaagctgattttgtcagaagaaagtcagtcagtgtttagtttaccactactaactacattgttcatttatgcgattttatatttttagggtatcataccataagtttttgttagtgtggggatatacacaagataagctgaagaatttagcttttgagttttgattttctgctcgttctgaccatgaacttgttgttgcatacagggatgtcaccatttgaggggaagaagagcaggttcatctctgtacgttgatgtaaatattgaggttggtttctctcaaacccaatcgcttcaccagcttcatctatgtgaaatcaccttaggacctcagttcctacttttaccctatctgtaggttgatcctttctgcagtgttagtgctgcgcatgatattggagaagatgtccgtcat

SEQ ID NO: 82806 - DNA, 1043 bp, Cannabis sativa
ttttcttaatttcatacaagtccatcttcccaaaatgcttaaggtcataaagtaactcttcttgggctttaaggaagtgagttaaagccctctcctcatcatcttggtgcacgaccccactagcaaaagtctcatggatatcatttttattcaccaaatccaccaaatcacccccatttccacgtggcccaccatttatctcactctccttaccattaagagctttaacatcattcggccttgctaaaacaaaggaaccatcagcctaattattttccacttctttcccacggcctggcccaccatttaaaacattctcactaacattacccacattacaaatcaattcaggccttttacacaaaggaaaaactgaatccggcccaataaactcaaggcccataccactcttgactttactcggcccagcttcccataatccatcttcagtacacggcccacctttgaccaacggttctttgggttttattattacattcgaggactccaaatagggaagggagtcagtcttcttttccccataattcaaattagcatcaaccttattacccttaacggcaaactcagaagcatgctcacccgaaccgccttttttgcacccatttctgcatcacaccctgcgtatgaccatgaaaagcacgacccgtcactttcttccatctgtttcgacccccagcagccttggaccgagagccaccaatcggacctccatgcccagcgacggccagcctcccatcacgcaaggccgaacccgtctgcaactccacagaaggccgcgtctccggattcgtgacacaagagaaaacatcttgaaatctagacgcggtggacatccaaggaccaaataacggacaaggagatccaaccaccgattcgaccgtcaccggcgaagctaaagagcatcctcttcgctggtggcccaaccgaccacagttataacaaaagatgccgattttttcgaatttaaactgtaaccactttttctccccagaggatagatcaaaataacaacccgacatcaa

SEQ ID NO: 82807 - DNA, 2916 bp, Cannabis sativa
  modified_base (346)..(347): a, c, t, g, unknown or other
tttatttgtctgactaattattttaataatttcagttatagtttaataaaacgtgacataaaatctaactttcaaacaaacttaattttgattgtaaaatttttgacccttatacatttatgattgttcagtacgtaactagtttgacaaacaaattagtgtgagtaaagacacataagaagtcaataaaaatgttaacaatgtgagaaatatcataagaagagattaatataataatttaattgtacttaattatcacattaatgtttacctaaaaaaatgaaaagaaaagaagtctactggtggggtttaattatgcttagtaacattattattattattattnntattattattattattgagaaaatgctttttgtaacattatagttaaaaaattggataagaatttaaaagaattccccaagaactttatttactttatcatttaaaatacataattaaaatacactacttttataacaaacttttacaatacaacatctctattttatttttcatatcttctccgtattatttaaataatattttttaatatttatagtacatattaacaaaaatgaaataaaatataatttatatattttaaaatatgtttgaattatgaataaataggcaatatagtcgcgctttattattatgataaataattatttaaaaatataattctaatatatagtaaaattataaatattatcttattttatattattattaataattttattattaaaaactaaatgcacaattttatcaattattatttaaaattatttattaagaggtttaaaatttattatatgtagtattttaattactttgttgaaagaaattattattataaaaataaataaataaggtagtgtagaaaaaaattatggtgtttctcataatgtattattattttcatatatcgatcattcaaaactattattattattatgtttcacttattgtctcattgtatcttacttatttttatcaccatatctcattcgttgtcatcactgtatcttatcccgtgtcattaccgtagttcacttgtagttatcactattgtattttccaaatctatatcttaatcttaaatttcatctcgaattttaaatattttattaaatatttaaggtattggagaaaattcattattttattctgttattattaatcaatatattttaaggcaaatataaaaaatgtgatattttagttatgagaaatgctaaaattaaggcaacccttcttggtatcataccactattagtgtaattaagtagcaagtctcatataacttaaaaatttaagatttatagaatatcactaaccaattgtacgatattacctataaaaggtgttaggcaataactatcttctccatattatttaaataatattttttaatatttatagtacatattaacaaaaattaaataaaatataatttatatattttaaaatatgtttgaattatgaataatacttttgtatataaagaaaataaagatgctttatatcatctcttgaaatgagtatttgcttcttcactctttaaaattttaaggaatctctattataaagtaagtagctattgagagagtgctctaagaatatttttaatgattataaggttggggtagacaacatcttatctaattcaattgtactcaacaaatctaatccaatctaattacaaaagaatagatatctaattataattggattggattgagtattaaaaattaaattttaattggattgaattggttattgaatgtcaatctcaaatttaattaaaaattgacctaatccaattatatttatatataataaaaaaattattctatatatttttttgacgtaaaaaaattatttatatttgtttatatagatattaattatatttttagtagttttgtttttttaaaaaaaattgtaacacttggttgtttgtgtatttgctttcatgatatttcgttctattttattacttagtaatgttgttatgttagttatgttaaacttttaattgcattatatttataacaaagatatttttatgaaatactaaacttaaataaatgatgatatttagtttttatgtattttttttttatatttttaagttaatattaaaaatgaggtgtgtaattaaatatgtaattaaaaaaataatctcctaaaattagtaatgagattagattaaattggattggatcacataataattttctaaatctaaaattagtttagattagatgagataaaaaaaatacttaattagatggtatgttgaacataaacattcactattagtattaagtcaaataaaattttaaaaaggagaaaaaagaaattaagttgggcaacggtgccctatttatcacacttacaaggtctcctccacctcaccaacagctctattggtggtgatgttgtgtggcaattttatttatttatttatttattttgacaaaacatattaagtcaaaactctatttctaaaggtttaatatataaaataccacaaattacttttacaagagtaacgtgacactgtatttggttctctgactctatgactccgttgtcctctcatggtaaaagaggtcacactcttttctgatcttagtaaattgggtgacattagaattataaatataatcattaggatcattaacaatgaacattaaccctttcgaaaaagaaaaaaaagtaattaatattaacatattaaatggtgtttggtttattggaatgtaattataatagttataggaatagtaatagaatgtaatggtaatcgtaatggaattacaattatgggattatttttactatatttggttattattattattatttttttttttgaaagaaagaatgtcattcaattaa

SEQ ID NO: 82808 - DNA, 1344 bp, Cannabis sativa
ttccatttcaactcaggaccgaccctagctatcatcattttgtaatatatagtggagttacttgttactatgtataacctccacaattatcacttacattaagtatgtaaaaatgtgttacacatcttaatttgagttcttaatgttataagaattatggtgtgtgcatacgttacatatcttttattctcattgagttcataacatctatgagggttatgagttaaaatttcaaatggtaatattctaaacactatatgaaaaggtctaaggtgcttatattgagtacacaaagttttctattgaaaaagtattttgttagaaaaccctaaggcttgataattcttaaaactatttcttagagagttctcttggtgattagagatatggaaataaacttttagacaaaggtgttatacttaaccttgttcaagtcataatgatccatactaatctatactcaaggttgcgagtgagtgtatatatatgtatcttcttttttatattatattataaatattatatgtgttgtaattattcttcttctaccttacttatatatttaatacatatagtgtgtatatgtgttgtaacatttttataatcaatttcttgttttagcatttatattatttttacaattgaattgtaatatatcttgatttatttttcatgacaataaaatttctaacaatcatacgatgattcacgacaaaacctttgtatagcatctcgatctcgtgataaaaagaaatataatcagcagcagtagttggaacatatataaaaagaattactttttttatactttcttactattaggaaatatccataaatctcatgataggtacctatagattcatagtgaatttcgatgggagtttctcttgaagtaagaacgtgttgatcgagttgccatcggagccataaaatgattatctaaatggattcttttctgccgataagcttcaattgcagcgtaagaattactaaaaatgggttcttttatatatcaccttccataaacttgaaaatccattataagggttatggaagcaccacatgggcagaaacatagcttcttagagtatcttcaataattaaattttggaaaatgattgctaaggtgggttgtttatttgataaaatacaagggagctgaaatatatgggtgctatcgcaatgatgttatctttgtaaaaaaaaaacgataatacgaaatggtaataaatgaagttaaaagttagcgtttgttgtttaatttattttcttttaggataagtagttgtataattatttaaaattttgagtttgtaaatggaataaacttaataatttttttaa

SEQ ID NO: 82809 - DNA, 1331 bp, Cannabis sativa
tgagaagagaatgtcgtatgagaataaaagaaaattcgggataatatttaataatatataatattggttaggtaaaaccgttgacatcagaaacccatgattgactccgaaacttagaaagacaatatttgattatattattataattcaattatgccacttgtcacacaatcacttccgttgatatctcattactttgttaaaattaaataaacaaatataattatatcactcgtttatatgtaaaaaaaaaaataatataatatttatagttcaagaaatactatttattaaagataaaaaaaatgtatagtaaatcaagtttaactcatttgataacacttgttaaaaaaagttcatttaatactattttactactctttatttatattttagagaattagctagcttaaatttagctataaaaatcttacatatttttatgttaataattatttttaaaaaaatgttaattattttgacaaaataataataaattagaaaagtgattcaataaataaaattaaaaacgtcactaacaccttccttggtttgtttccttcgtctctactacattcatttacacacaatttatatccattcattcttaccatcatcgctttctgtcactttctttttattataattattattttgtactttgcttaaaaaaatcattttgtttcgaaaaagaaaaaaaaaattattgaggtctgaagctttgattggagatatttctactaaaaatttgggtgttgaattttttatttttatcctctaattagagttgcaaaaagtacagtaaagaattaaaagctggaatcattaaaatgaattataattgaagactatttcaaggcttgaaaacgtggcacttttcccacacagtagaaattgctacattatttttctttgtaatatcattttatgtttataatatgaatcattctcaaatttatatacaaattttgctcaatacggtgctacaatatccatagaaggaaggaagaagtagctttttcatgatgagagaaatagaaccaccacatttaccaaagagatccacaccataaaaacaaatgggtgcttctagccttctacaatgtatgtcgaccgactcactatttatctctttagaattttttagtccaattcaaaaataagtttaaatagtttattttacatgcgtataaaataagagtttcgcttgtaaaagattgtttgaaccctatgttagacatttatatgtataaactgaaacatatatgtttatgtataaaatgcggaattaaatcaaacatatatatactatgaataaggatcgaaatacc

SEQ ID NO: 82810 - DNA, 859 bp, Cannabis sativa
gaaaatttgaaagatacatttatcattatttttattagttttgacttaatatttattcaagccctcactcaactaaatttctggcttcgtcactggtcgcatgaaatgttccctacagtcaaggtaattaatggagagtttcacgatttagatcattgacctcttgtggttgatcttgaaaatgtcactaggaggagagtggatgataagaagagaggttttcggtttgagactcattggctgcggaatgaagaatgtcgcgagattgtgaatcgtgtgtgtctgtcacttgtttctccattggacagtcaagatggtattattgatgtttttggatcatgcactactgctcaactaggtgcttggaataagagtaaatttggctctattcctaaattggttagggagactcaaaaatagatggatgatctacttagtgtttatgctcctttggtccatatggatgaagtgaagcgacttgatgttaaattggttgatctcttgtcacgtgaagaaagctattagaagcttcgtttgcatgcaaattgattagcattggaggataaaaatataaaataaaaaatcataataaagcttcggttctttgggggaaaagctatttaaattctcattctgtttttaacacttttcctttttcttttcttcttcttcttaattgaaaaaactctaacacccaattgcttaccccacgacccaaccttcttttattcccctctcacacactctctctcacggtgcacaatgtcgaccttctccgaccactccatgtcagacggaccacagaacttaaccccacgatccaaaaaatcccaacctcgatctgccctcttctctctct

SEQ ID NO: 82811 - DNA, 674 bp, Cannabis sativa
tggtgaaatctatttttggatttatgttttatgggtaatgtttttttttgtgaaaatggatgaatggatgttggaaattgacaaaggattgaaactggaacaaaacccttcaaacggcatcggatttggtggacaaagatggtatatccgatcgggtcacgaagcgggtgcaccgatctgaatagcaaacccgcagacctgcgagttgggttttttaggtcacaaggacgacaaaaatgacatgtcatttgcctctgtcgggcaaaacgacatgtcgtagcacataaagtctagccccctttgtagcacaaaatgacgggtcgttttatgaccctgctacatgtcgttttcaccaaatgacaagtcgttttctaaaataacatgtcgtacgacagtttaaaaaaaaaactaaaataggcacatgggggcgcatgcaaggtcattttttgggccacttttcaccaatttattccatttttagcattctatcatttctacatcttattttttgtataatattaattcatgaatctattcataattttagtaattaatattatattgttatggcataaatttatgctttatttaaacaattagtgcttatattcttacctatcgtaagattaatgtaatgaccgctctagtaatatggattagaaaaggcaattagc

SEQ ID NO: 82812 - DNA, 2112 bp, Cannabis sativa
gatgtatctattttaaattataatgcaaatgtatttgactgttatatttcttttcctaactaaccaagatggcattttactgccttctatggagctccttgtacacaattacgatccctcacttgtactttgttggaaagactcaaagatgtctcacctttatctccttggcttgttatcggagattttaatgagatcctttcaaatgataataaattgggaggcgctcttcgaaatgaaactcaaatggagcaatttcgtaatttacttgactgcttccacttaaatgaagtgccatatgagggtgacccgtatccatggatcaaaggtagacaatcattaaacacgattaatgaaaggttggttggtgttttgtgaatgattgttggacatctactttcactccaattgtgactaaacatttagactactatagcactgaccatcgggctatagttgtcaatgttaacctgaaagactccagccagcagcagcatcatagacgcaccaggttcaggtttgagcaaatttggcttcagcatgaagaagctactaacattattgaacagcaatggttgtctcaaggatcggggtctgccatggaaaattttttgcaaaaaaatgcagcttgctcttcctctctccaacaatggcgtatctctacttttggaaacatgaaagagaaaatagctactacccagaaacaagttacccgattgaataatcaaccaacaagaactctaatactggttgaagatttaaaaaagtctgaaagtattttggatgagttattggaacaagaagaacaatattgacaacaaaggtcgcatgttgattggttaagtagtggagatcaaaataccaagttcttccatgcatatgcttcatctcgaaaagcttcaaatcgaatttcttctctcttggacagtaatggtaccaaaataacttcaaaggatggaatgtcaaacataattacgaatttttttgctaaactttttactgctacaacagctgatcaatctgctatacaagcagttacagccaccatcccaacatcgataacatctgaagttaatgcctctctcactgttcctttcactgaggcagaggtttttgctgcattaaagacaatgagcccggataagagtcctggtagtgacggcatgtcagcaatgttctaccaaaattactggcatatagttggataatctgtaactgcagtggtactgggagtgcttaaccacggtcaaaacatggacttaatcaacaaggccatcatcacccttgttctgaaaattacttcaccctcggccatgatagattttcgcccaataagtttatgcaatgtcatttacaagatcatttccaagatgattgtgctacgatttaaagaagctctccctttagtaatctctcggaaacaaaacgcttttctctctaaccgattaattaccgataatgtgcttgttgcctttgaacttgtacacaatattcaacatcgaacacgtggtaaaaaggggttttcagcactcaaattagacatgagcaaggcttttgatcgggttgaatgggtatacttaagggcagtaatggacaaaatgggatttgcacaatcatggattgatccatctttaagtgcttatcatcttctagccttacttttgcacttaatggagatacaacgagtcttgtaaaaccttccagaggccttcgccaaggggatccactatcgccctacttgttcttaatatgctctaaaggtctctcacgcttcctgcagcacgaagaatctattgaaatctccaacggttgcggataacaagacgagcgccttcaatttctcatctccttttcgccgatgacatcctactattttgtgaaacaacaaactattctactttagcaattcaaagagtttttgatatttaccataaagcttccggccaaatgcttaatcctcataagtcagtaatgtcattctctccaaatactcctatggcagagaagttatttttcaacaaattctcaacatgcctattagtgagtgtcatgaacgatacctcagacttccttcctactccggccgtcacaagaaggtgctcttcagccata

SEQ ID NO: 82813 - DNA, 880 bp, Cannabis sativa
  modified_base (295)..(295): a, c, t, g, unknown or other
tgctgtccatttctaattggatttttagccctcacaaccttcacaaatccttcctcatcttgttgctcttgctttctattatccttcttgaccacgcattgttgtttcccaccggtttgcttcttacaatcagtagcagtatgtcctaatccaccacagtgagagcaagctataggcttccactcatatttcactcccactgttgtgattgatccaaattcattcttaaactccagaatatcaggaaaaacctgatccatttttacttcgatcaatactctcgggtagttcaatntctctttttctttagtaacagaatccaacatcaccgggttgcccatctatccaactatcttgaataaagatctctgtccccagtacttcagttcaagatcttcaagttgaatccatatcggaacatttttcacatcctctttcttgaaattctcatgggcattccaaggtttcatgataaccggacgtcgattaaagaatatatatcccccattcaatatttgatctctgcattccaaagaattgaaccgaatgatgaatataccatgagccaattgcttcactcgatcaatcttgtctctccaaatcctgttaacaaaaccttccaatacctacaaaggtgggttcgctcccaatagatagcagtctatagaaggattccaaaatgttatttcatctttaatatcatcaaatgtaattcttactttaccattaccctgatctgattttctaaaggaattatctaggtttcgaacaactgaaccagatcttagaattgggggagtcggggccttaccttgcaaaatcgcactgttacattgatcatttgccctaaaaaatggataaagtcatgttgcacctcctc

SEQ ID NO: 82814 - DNA, 856 bp, Cannabis sativa
tggtaaaatattcccaacagaaacttccatggaaatgtttgatgaacaaagagtgatcagttgctgaatgatgaaacccttcatcagttaaggcacttgagaattttgcaaaccattgtcttgaagcttgcttcaatccatacaatgatttttgcaacatgcaaactacatttggtggtaactcccccttaggtctatacccttgaggtatagacatatacacatcttcatggaggtcaccatgtagaatggcattattgacatccaactgatgtaaatgccatcctttaatggcagcaagggatagaacaaacttgacagtggctagctttgtgactggtgcaaatgtctgtgtagtcaatcccttcttgttgattgtaacccttagctatcaacctagctttggacctttctacactcccatctgcattaagtttgattttgtaaacccatttagaaccaataacatgatgtccttcaggtagagacacaatgatccatgtatggttcttctcaagagcttctatctctgtgtccattgcattgtcctaaacagagatcccatgagcttgatgaaagaactctgtctcaaagtgactggaaatggccagaacagcagctagaaatgttggagacaacccgtggtatccaataacctgagacaaagggtgagttgtgacaaaagacacctgagtagagttagacaaattatgagaatctaaatagtagtgatactcattaagataggatggttttgagactatcctgcctgatctggtgtggggaaaaaacattagaagacacaccagtttcaggtatgttaacagaattagatggcacagtagactcaccagta

SEQ ID NO: 82815 - DNA, 1093 bp, Cannabis sativa
cgtatgaaatttggtacaaaaaactgcaaacctaatgcatttaagaacctttgggtgtagagcgtatgtacaccaatctattgacaaactagaacctagatgagttaagggaattttcctaggttatgccttaggtaccaagggttaaagaatatgcatttcctaaaagggtagagcaaacatagtaattactagaaatgtagtttttagtgaattggaatttctccacatgataaccgtggaaggtagtgtatctctgtgtgatgcaggaaagtctggaaataagaacactacatgcatggaaatggagtacggaacgacacatctagaagaggatttatagttggaaactattgtggatttggaagatattgctcaggcgaaagttgttgttgtgccaaaacataaaaaagatagaatagattttcaagaaggatttagataggcaggtttggaacgttatcaattaacgcgtgatagaaccaaaagacagattcaccctccaaaaaggtttgctaaggcagacctaattgcatttgcactagcggttgtacaaaaaattgaaattgaagagcctagaacatacaaagaggcaattttagggggaaacaagtcaaattgctccatgacatggatgaggagatgggttcactctagaagaacaagacataggcggttgtaccgaaaccagagaacaaaaaaatttttgagtgcaaatggattctcaaggtgaaataaggaatcaatgagaatgaaccagtacagttcaaagcaaggttagttgctaaggggttcactcaggtggaaagaattaactacactgaaatcttctcacttgtggtaaagtaaagactataaggttgatgttctccttagcagcacaaatggagttcatagttgaacaacatgatgttaaaactgcctttcgaacaacttcttggataaagagatctacatgaagcaacctctggagtttcaggtggaagcaaaatgagttgaattggtatgcaagctcaacaagtctttatatggttttgaacagtttggaaggtaatagaataaaatatcttatagttatatgcaacaaatcagg

SEQ ID NO: 82816 - DNA, 734 bp, Cannabis sativa
agagagagagagagagagggcttcaaacttagagcttgagagcatagggtgcttgggacttagagaaattagatttaggttgatgctcattatataggagagcttaattacatgagaataataatctaatatcccaaaaaaaaaaaataggaaatataacatatttgctacataataaaataataaataattaatatgataattaatccccaagaataggtaaatagttgatatttatcccctatttttgtaagttgtttaagtctaatttgtagcttggattgttgtctcggatgcaaggtgcacatcaagtgcctgccatggtgaaatttacacaccaagtgcctgcgagggtgcaagctggccggccaagtacctgccaagatataggctagctggcccttcctttgctggaggctggcaaatgcatgctggccatagggccggccagggggtcaggatagacccctctaggtggttagttcattgtctcttcgtcacacttaagtatttagacttctcatcaactaacatgttgtgtacgatgacttggctttcttgttaacaagttgtaattcacgtgacattaatctcgcccacatgagcatgccacatcatgtaggtaaaaattaggataacattagggtttatgtaacaccctactagtttaggtgtgttatcgtgattttatattaactttgcagctcgttgctaatcaatgagtttattaaaaa

SEQ ID NO: 82817 - DNA, 736 bp, Cannabis sativa
ctctctctctctctctctacgacagcttcgatcttcttcttctacgggaagcatggtcatggaggttagatctagatggagagaggacacaaatagacgtcttggtagttttagatttgggaaaaattgatgtaagtggtgggggtggctgaccagagagggattagaaattaaaataagagtttataagtaatgtttaagtttgactttgtgattagaagtgtagtggtggtgggtgatggtggggttgctggcaagaatggtggtgttggtaggaatggtggtattgtggtggtggtggatatggtgttatagtggtttggtgtgtccacgaaaacaaagagagagtctttattttttggaaatataataaaagaaaatttaagtatcgttaattgaaaatattataattatagtagtaagaaacatggttaatatacatgtaatactttctgctaatttgttctcatttttacatgcagtcaacaactctcaagtgtggcagtgtgattgtggtgagcctttttgaccatagtattagtgacgcctactctgctaacatgtttatattatcatgggctgaatttgttaggtctaaacctctcacctatgatcccccctcattccgtcgatctttgctaaaccctagccgcacctttggtagcattgacacctcggtttacgacaagtatgttagtgttgtcactactccagaaaacacctcgccaagaaacaa

SEQ ID NO: 82818 - DNA, 1377 bp, Cannabis sativa
tgatccacccattattgaaatttgcgtctctactaggcaaaagcatcaccctgagcagtgtgtgtttcttcttattcatggtaaaggaagtttgtgtgaccctgtacttgccctatgacctctctcagcgtggcaagttgagagtcatcttccaagtcaacatggggttcgttgatgctagggtcgccaaccccaggtcagtctcaccagcataaacatgaggtctaacacatgtgttaggaaattcaatcgttggctgaacagtgggtccaaaagcaggctagtacttaagacattgggattcgtggccatagggttatgtggttcagtagaacctccacatctcgtaacagccatgtagaatgaattttaagatgagatgagagctttaagaattttggactctcaatgaaagtaccaaaatattaattgtgaatttagccaattgacacgaagtttgactaggatctaatttcgtttatgactgtcacgtgcataatgataataaatataaaggacacaagaattatggaggttcgacccctttgattaggtaatgacctactcctcttttgttgtatttactcttgaaataataccatgcaaattacaggcagaaactttgtaatttctagctatggctctcttcagtattacaatgatgagaatgtgtgttagagacttgcaaagtgatgagaagaaaagagagattttaatgccttagtacttctgagctcttaagtacatgtgtagaatggttgaaattaggtccctttcatgttgggttaatgccctttatatagtgttagggttttacaagttgttgttcaaaatacataatagatggaaaatatccctagaaaatagggcagttacactttgacgaagctttcctagttttgtgggtagttcaaatcgtttagaatttgtaggtttgttgtggacgatttggaatcttctagaggacctatgggaaaaacacagttgtcagccatatttggaggctgcccagtatatattggatgtcacgcttggctggccagctagaggtctggccagggtcttgccaatgcttgtgtatctctgtctttgctggagatactgatatcatgatgaattttctttagaaccttgaagatgtggatcttgtaagtctccatgctcttctagtttgagtccatcttccaaccctgagatcttgagggataagggttatacgccaatagcttggccgattagtgcagacctgtctcccacatgtcttccacttttggccacctggagataccacatcatgtgggaacaaattaggataacaatagctaagtctggatgctctaatttctagagagtgaaactagagagatatgctttgac

SEQ ID NO: 82819 - DNA, 1336 bp, Cannabis sativa
caaagtactcataaccacctctagctttgacattgagtgctgcacaaagatctaaatgcactatacctagtggttccttgttacgctctccatttgtagagaaagaacgttttgtcattttgccttctaggtaagattcacaaattggtaattcacgtatggtgacatttttcaatggaccacctttggttcacctgtgaagtctatcatagcctatatgacaaagatgtaagtgccatagatatgtttagtcttcattattgatcttttgttttttgtggttcctaggtttagctacattgaacagttcgttattaagcccaaatggttaatatagtctaagaacataaagcccttgttccatagatgcaacataaatttgaatgtcatttcgagaaatgataaaaccagaactcaaaaaattcaatttgtattgttgcaactataaacatgaaacataaatcaagtttctaccgaaatttggaataaaaaaaaatattgcctaaattcaaaattctgttctcaaacttgagttttttgcttttcctctagctctaaccgataccatttttccattaccaaccttaagtgtcaactctctgggttttaaataattccaattttcaagcaattgcaatgaaccagacatggttagtagatctagaatcaacaatctatatggatttgtcattctcttaaacacatgattcaaaaactaaagcattaccattcatcttagtgttgagaaatctgagacattttgattcgaaatgtcccttctgctcaccattagaacattgaataatatgtttacttaactgttcttggattgttcttattgatggttcaatttgttgtgaaagataatttgaggaactggaatcactttctctattcttctcaactgagcctgaagtagtaggattgtcggaggaatcattctcaatatcttcaactttcttttcgcccttatctgcatttctggagaaggacctccatgcaagtaacaatgtccgttcataagcacgcaattcagcatccagcttgtctatgtcggaagagttccaattgttaacaacaaattggttaaactcaagtgatcagttgttgagaataaaatgaactatttgctctctagataaaacaattcctagcatagctgctttatggaatttcattttcatcatgagcaagtgtgaagtgatactctgaccaggagtcatcttcacactttggagttcattcgtataggcatattctaaatgaggattgggatgtgggttgtacactttgacactacaaatatcaataaacagaaataaattattggttcaat

SEQ ID NO: 82820 - DNA, 994 bp, Cannabis sativa
gctggagaaacaggtcggtcaccaactctttcaaccttactgataggctttcgaacttgcctcttcttcttcgccatgggagaagcagagcaaagctacgcgcgcccttaattttgttatgaaagattgtgttgttcgatttccttgataatctaatctgcttattacttgtttttctttatggttttacgccttgaattgttattgttataaatgactgtaatctgaatgataatgtcaactttatctatctgcatctattgaagaaattgacaaaggatttagctatgaggttgtctagttattcgatgaaatagagctattttttttcattggttttgtagaaagacaagttaccttcatttccaatattttcttgtgataatattttgtttcgaaatcaatgaatagaaaaaggaaacagataatagatttgggaaagcaaagggggggtttttgacaatcgacaagaaacaaacttaacatacgacgacatgtaagacataattacattctcaattggtttacataattttcttctcacttgctttcggagctcaagtatggactcgatagagtttcgactagtctgactctccctttctctttctctctctgttgtttttcattaacaaataaaagccatttgcacatgattttccaatgtcaacactaggaccttcacaacaatgaaataaattaccaaactttgatacgcatatgtagagaaagaacaattaaggtacataacttaaaaaaaacatcaaatcttaatacaaaagttataataagtctttcctatcatcatcatccaatcaataccaataccatcatcatcatcatcatcaacaatcatcacccacatctcgtaaaagttagaaaaatcgatttgtccaatgagaaacatttacaaacctatcttctagtaagtctttccttatttctgggagaatattcactttttcaataacacaacgaaaattgatttagggac

SEQ ID NO: 82821 - DNA, 711 bp, Cannabis sativa
ctagaccctcgagtttgtgaggaaatgcgagtggagtcagtagaagaattagaggaaatagtaattttagagaaccttctcaaggtcctcaagattggaaaagggctcctcaaagcccttaagaaggagttaaggaagtttctagaaaataatgtaaacgtgttcgcttaggggcatgaggacatggaaggaatagacccaatcgtaatgtgtcaccatctcaatatagatccaaatgcaaagccagtaaggcaaaatcggagggctctaaattcttaaaagtatgcagctttgaaagtagaagtggatcgacttgacatgatcaagttcatccaagaagcattctacctagaatgggtgtcaaacctagtgttggttcccaaactcaatggaaaatggagagtgtgcattggcttcactcatttgaataagacttgcccaaaagatagctttttgctactgcacatagatcaactagtggacacaacaacaaggcatgaatttctttgctttatcgatgcatactcagggtacaaccaaatacccatgaaatctcgtagatgaggagcatacctgattcattacagatcgaggcctatattactattaggtcatgcctttcggtctcaaaaatgcatgggaaatgtactaaagacttgtcaacaagatgttttataaccagaccgatcgcaacatggaggtctacatcga

SEQ ID NO: 82822 - DNA, 1087 bp, Cannabis sativa
ctctctctctctctctctttgtttggatcatcaaccaccgcggatccctggatggtcttcgtcaattacaaaaacctcctctttccttttgcgcagatctctggatggtgaagaagctttagtcacactagtcttatttcttttcttggacttctttgaaggaatcgaaggagtgggaacaactttcacgaattcccaaataagtggttcatcagctttggtcgcgagtttcttccttttgagcacatggccataacagcgagaaaatccattatactacacaacaaaagaaaattaagtggttaataggtaagaaaaataaggaaaatataacaagtaaacagaaagctattgcttgcttcatcaagtggcacatcaacaacattcttattcaccaacttttttaggcacacgaagctcagtgtgatctgaaggctctatcttagcctcattcatagaattgatgccatcactactagattgagagacacaaatatttttcctaaatattctatgtcattagaagaggagtcactatctttcgaatttcttcagagccaataacagtgccacttcgcccgctttcatcatcatcaagcgtcatggtccaagattcatctttaaagccagcatcaacgtaaactcattgacaagacgctcttagcccaacacgacggatgttgtcattcatcagcaacgtttgcctgtctatctcccataaatcaatcttgttcaacatggcatctggcctcagcttcatgtcaattaacggagctggcctcttgaatggtctagctttttggaaggtggtgtccctcgaggttatgacaggagtatagaaatattcttcacgataaaggtcacaatttctcttagtaactttatccatatacacgatataatggtaaaggtgataaaattcatcactactccaggtgttatttctcttaaggtcacacgggaagttgatctaatgtggagtaggaataggccagccctgcagatgataaaaaatgaagagcgttgatagaatctgatagctacttgataagggaaaactctaaagtaatcgacaattgaaacaaat

SEQ ID NO: 82823 - DNA, 1862 bp, Cannabis sativa
aaaaaaattgaatgaacaatttaaataaaaaaaaaacaatacatgtaacaatatgtgaaattaagatatttattgttatataattatattattatttgaataaccaactattttgaaaattttatttgttgaaaaccttaaatatcttttcaaaatttcaaattcaaactaatttaaggttgattataccttgagcttttgccataaactcacttaatgttcagctcttttccttagcatttctccccacagcaaggagcctacagccaacctagattggaaggccattagcttcatatcgtcactgacttcagttttggcagttgcctccatcattctttaaataaaagccttcaggctttaattatgttgatacttgacattggtgagtgaacctacttccatgtccttttctcatgtagcaatgaattgtttacggaaagtcgattgcaaatccttccaactatcaattgatcttggggccagccgcttccaccaatcttctgtgaacttagtaagggtcaaggaaaagcacaaacatttggaatcatcgttgatgagaacaactcgcatcatcttgttgtatttagccaaatgcattcgctgatcagtcctccctttgttcaactcaatgtggggcatcttaaagtttttcgggagcatagtttccacgatcctcctgacacaaggtttcaaatcctcatcttcataatctgaccatgctccattttgtttcttaaccaacttggtcaacagaacaatttgttcttccaaccttttagtgtcacttttggggagatcacgtcccctcatcttatcactcaaatgatttctgagatcacccccacgtggccttgccttctaacttttgtacctctcgtacttgacatccaatcgctgccacaagtctgcagtggaccaactatcattggagtgaatagcgggagtcctcccatcctgattgacgaaatcactaggaggattccctcatcttctaggcttgggtatctttgtagttggtcccctcagcatggttttgccttgagggtcagaagggcattcaggctcgaaagcaccggtggccttctgtgtcctcgaggactgtccggccaaggtcgcgtctttgcgaagcggcttaggagcagatttttgtgggagctcatccatcttgcctttacccttatccttgcaagggttttaggtttcagctttagtttttttttttttgagtttgcccctcgaccacaacttccaccgagggttcctcatttgactaagccaagtcgtcaaacttgctctaaagttgttccatcatcttcttcatcattacagtaagttctcttagctctgctaactccacttgagtagcttccaactctttttttttactcgtaatacattagggtcatggtcgtagtaataaccaaccttgtaatacccatcttttacgtgctccatgtcgtcaccttcttcttcttcaccgccagggtttcaattttcaccgagatcatcgccaacattctcaatatctccttctcaattctcattaggggttgtgttgtaacgccctaatatataggtacgccatgtgtgtgattttatatactagtttaatactaatagattaattaattattaaaaactatgataatatgaaaaacttaacgaaaataaaacactaaaaatggacattataacagcataaaaagcgtgttctagggatctttgttataaaaaattttacaaaagaactatataggacgacgcctcaaaaacataaaaccaaaatacaaagtagatacagcccacgacaactcctggaaacccggcacgcaggccggtgaggtcagtttgtacattgt

SEQ ID NO: 82824 - DNA, 1652 bp, Cannabis sativa
agcccagcaaaaaaagaagaatgcttagaagaagactctgttcaatactttcgagctcaatcttaagctcctcttcagtccgtacccaatccattccaataccccctacagttggattccagcaaatcgtagaacagtgctcccacccttgttttaagaggagtaatgaagggtttggtggtttcggaggtctaagagcgtacagtctcttgagcctgaacgatctgaggggaaatgtcccgaggaagcagaagactcgaaaggggcgtgggattgggtctgggaaggggaagactgctgggagaggtcataaaggtcagaaggctagagggtctggtaagttagggtttgaaggaggtcagacacctttacgacgtcgtttgcccaaacgtggttttacaaacccctttagccttacttttcaggtacttcgattgattgaaattattcaacttttttgtaagcctttgtatgaaagaatgaacatttggaattttagtgataatctaagacttggggttgaattttagtaacaaatttgaataatttgatgatggtgttgtgttcttgtgaattaaattattcaactttttgtaagaacatttgtgaactagtgacccgaggaaggtgtggaattttagtgataatctaagaattggggttcaattttagtaacaagaagttatttttttaggacaatgtgatttattgattgattgattgaaattattgaacttttttgtaagcctttgtatgaaagaaacagcaattggaattttagtgataatctaagtgggttgaattttggtaacaattgtgacgattttgtgatggtgttgtggtcttgtgaattaaattatttagcttcttgtaagaagaacaaatcctaattggggagattagattcattccaaattctttaattcggaatgaaaggatttattttgactgttaagagagtaggtaaaccgttctttgattgtgcactagtgtcctgaggaaggtgtggaattttagtgataatcgaagagttggggttgaatttaagtaacaattatgaataatttgatgatggtgttgtgttcttgtgaattaaattattcaactttttgtaagaagaataagtgtgaactagtgtcacggggaaggtgtggaattttagtgaatgaagattaaaccaccttattatatataggatatcaaatttatgacttagtgataatctaagacttgggttaacctgttttcatgcttttttttctttttgaaactactgcagttttgtcattgaaatcaccttaaaaattgtttataattcactgttgtatgatttgaatgagatgaagcatattttgatggtttggattccaagtttcttttttttttttttctgttttacaacctgtgtgaaaggactttgttctgaattctttctgcatataatttttctttttgttcattttattaaaaaaaaatagatacttttggagaaaatagatacatttgtagccttatgtatcagacttctttctattttatctatatcatctatatgtctcatttatgtgatgagtaaatatcttttggctaatcttctgataattttaccatacgattgttgatgacagcctgtagggttaggaaagattgcg

SEQ ID NO: 82825 - DNA, 1190 bp, Cannabis sativa
gtgcatagtgtaattattcaaaacattctacaaaattttaagaaaaaaaattaacacactaaaaatagaatttaaataatttattacacgtgtgattcttatattttatacgtatatgaaatagactatttaaatactacttttaatattataaattattttaaattttgcaaaattttacagaatatcttaaataattataaaataaacaactataaaaaaaattaaattaattttttttcttaagaacagaaataaataaagatacattagtgcacccgaggtgtattgtaaatactgttagaaatttattagggtcacaattgtatatataaaatgtgtgttgggtcaccaaataaataagtcaaatttatttggtctattttagaataaagtttatgacttattaagagaatgattgtcatgattttaatatgtggataccataaggacaatttctattttgatgaggggtcaaatagaaatagtcaataaatattaccaatagttttgtctgttggtaatataaacggtaatttgtatcgtatctttttactcttgtatccccatcaccaagagaaaaactttcagagaaaagttttgatgcaaattggaagatcaaatcatttaaaggtaaattctatagatactggtacgcttccgctaatctatattctattatttgattgtcatgaattaattaggacttaattaagatttacagtgttcctaacatctggtattaaaaacatccctatattaatatggtcttccattaaattattttgtctgcatttgattcgagtatatatataatcggtcaattctttatgtttgtgtgattaaaattttggaatgcatattttgtgttttgcgattaaagtttgttaatatatctataacatccttagaagaatgaatatttgacaagtcgttcttgtcttcttatgaggtttgttttgtttgttttttttttttttttttttttaagtgtgtttttttctattgttttttagttatttaatttttttaattctattttttatttgttttttttttaattctatttttttaattttgtttattaattcaattttttgggaaataatttttttaattctattttttatttttttttaattcaattttttaattcaattttttgggaaataattttttctacttattat

SEQ ID NO: 82826 - DNA, 870 bp, Cannabis sativa
  modified_base (814)..(814): a, c, t, g, unknown or other
tttgactgatctttcacatcagaaaggaattttggagtccccattgtattttcccgcaaatattgatcctgaaggagaattggaatactgtccttattcccaacaaacactccactttttagctaggtaggtaactcccatattcacatgggtaacaaacagtaaaacaagtaactactatttcagataataaggctttcttcattcaatattggtctttttggactttgcaggaaggaccacctgaaaaagacattggagacttttgtctattacatgtacataatattgcacaatttagcaggactaatataatattttgatataaacttgatgataaaaaatacaattaatttagataaagaaaattaaccgtgaatgcaattcctattggagaatatctgaggcgtagcacacagtttccttaaaacagattcaccttctcgcgttggtgctagagaatttcaacaacgtctatctcccgggatacagcagaataaagtaacaaggtgcactaccttttactttttgcggacaaaatatactcgaactctatcacactaattactctaaagagtattttataaattaaactttacaacattaacaacttatcttcaaaggaagaacaattgtttatattatgagttatggaaaggagttaagccttctttcaaatacctaagagtgtgggggtgtcttgccaaagtgactataccttaaactattgattgtattttcattggttatgcatttcatagtactgcttatcggtttcttgtgcatgagtcacaaatctctgatatacacaaanacacgataatggaatctaggaatgcatctttctttgaagatgtatttccatgtaga

SEQ ID NO: 82827 - DNA, 907 bp, Cannabis sativa
cgtgcatggtaaaatttgtcgcgaaatgagagaacaccacgtcgtgaatatcagaacaagcaggaaagtgtaagtaacttgcaaatttaccagtcaaaacgtgtttccccaaatcgatcagtgagtaattatgataataaacaaaattgatgtcaaaatgtacgtgattggcctgatttgcgagatcagtggaactaagggcgtcctgacttacacaagcagataaataaaaatgtactagatcttagacagagattaaataaaaatgctccccaagcacgtgaaaagtccaatcaacctgctgataactctattcagtaaagagtcattcagctgaaggatcagttcaaaaaatattaggatggagaatatgagaagcttctaagatataattcagatgattacccaaaacctttgcatcctgacatattgaattcacaggttttagcaggatttaaaaatccacatgtgacactttatgatggaatgattgactcatcataaaaaagttaacacttataattttctaatgagcattgttattgggcaccagtggtacttagcacatctaaatatgtcgttttgtgattgactaatgatactccttaaaatttattacattaaattatatgagacccaatacttaattagattaatagcaatattaacacgtaaaaaaatactaaacaccgttggtaacttttagcatttctccttctaatttaataatttttactaaaagcatagcataatttatgatcattgattttgtaattattattttatctatatttttataaatagtggttgcatgattaatcagatactataaatgctacacgatgctccatatattccctttgtacatgtggttgaccataaaaagtttaagctttaaaccatcata

SEQ ID NO: 82828 - DNA, 1094 bp, Cannabis sativa
ctgccatcttaatggtattcgtatattagatatttcccataacaatatatttggacttatcccatcatgtattaacaatttcacatatgagagtagttcatcacttactgttgtctatgcttccggccatttctctgctactggatttgacatcaagacaaaagtaacttggaaaggaaaggaatatgagtaccaagagattttgggattgttgagaatcattgacttttcaagtaataaattgattggagagattccaatagagctcacaaatcttgtggaactacttcaattaaacttgtcaaggaataatttgagtggagtcataccttggaatattggcaacttgagtaaactagaagcacttgatttgtcccacaacaattttagtggagaaattccaattggcttgggggaattatctttcttgcagtacttggatctgtcatataatcatttttcaggaaaaattccaattagtacacaattgcaaagcttcaatgcttcttcatatgtgggaaatggtgaattgtgtggacttcctctttccattgaatgctcctctggaaatcatgcaactttcaatcctcattcaaactcagatgatgatgatcaagaatggtttgacatgtcatggttttacattggactcgaagttggaattgctcttggttttattggggtttgtggagctttgtaccgaaactcatacttgttagagtcttgcttatttctggggtgcttgaataaatttggagattggctttctgtgcattagaatttttaaattaaagagagaatctaatgttgataatatttgtatataatattattgggactttttctttctttcttgattttatctttttaaatatgtcaacttcatcatatcatgctattgtgtttttccttgtaggaaagttaatcacttggtactcaaagatatatactcttacaaagtccatatattcaagtcattgtgtaattgcgtttaaacaattaaaaatagtcatattttatatataaaaatagtgttttttgcggctaactcctctcaagtactatcattgtacttgcacttaactctctaagct

SEQ ID NO: 82829 - DNA, 518 bp, Cannabis sativa
acttagcttgctgtccacggatgaaggctgcccaccaaagcctaccaggtataggctggtcggtcatgcgcctgccaggtgcacgctggctggccccataatgttaggaagctggccatagggtcaaccaacagtggcgagccaaccacctttgggtggctggtttgtcatttcatcatccctcctaagtactctgacctcccgttagttatagtattgagtaaatgacttggccttcttgttgtcaagctgtactcccacgtggcattgatcttggccatgtggacaagccacataaactaggaaaaaataggataacttttgcccctaagttcttatgtggacgtctgtatatatagagactttcaagctcaattgggactaatgtagccttaaccaggaagatcttgtagtatatttgacctttgaaatattttctcttgcttttatgatcacattcctttccatgaaattgataatattacatatctacatattttttatatgtatgtttcatg

SEQ ID NO: 82830 - DNA, 1156 bp, Cannabis sativa
agtggaccattcgaccaaggatgttcgacttacaagtagctccagaatccctcaagactgagtcattatggctacttacaattaaaggattggggtaataatcatcatttattgaatattttgtaattaatactatttatttacttgtaaccctataaaaagtgggtcatttttactattcagggaccgaattcaaattatttaagagagttattatgctgctaactaatatctataattcttaccaaagaatatcaggaaattcacttggccagttcttgtgatcttgatacttcttaaaagaatacaatacaagggagtaggttattacctaaatctgaggttgaacctttataaaatttatgttccatttattgcctttgattattattgatcaaaacatctttattgttgttttattgactccacatcgttgacttaaaatgatgtcaacatttttgtgctctcattgagatattaatacgtctctactctcatcacggtattcatatttcaactatccctaattcatctttaatccaagaacaatggttcaaataaggtgtgttgtatccattgaaccacgtgacctgatggccatcgatcctaatgtccagtcacctacaaacatggggatgaaaaccccaacgtgcgtctaccgctccatagtagcgcttccgtgggagaaaagggtggagatctagttcctttaggaacagagactaggaacacgattggagttactaccgaacttcctaggttcactctcggtgtctaggaaatgggaaataccaacaaatagtatactggagagattgtggctgggatgtgccaaccatctgaaggagaacctcgtgtcaacctgggagataactccgagataaaaaatcttagagaagttttagggcaagtccaaaacaacaccaataccctcatgttagggtttatgctctaaaaagcctgtaaatacagttctatttataaataatagttgaatattttcatatatacttgattgttaaattattaatatttaatattgaataatatatataaagatcaaaaaatttcttattcatacatgaggttgtgacttatattgtatgcagaattaaaatcacttagccatgaataaaacaatcagcaacatattaaa

SEQ ID NO: 82831 - DNA, 1364 bp, Cannabis sativa
tgcacaccgcttagtaaaatgaccataactttctgaatatttatccaaataatgtgattctactggaaaattaaagctatttctaaggtgcatcaaagcgtgcatacactcctgccgtaattttgaagttttaggcctcaaaattgacttgtgagctagtggatgatttcctagaaaatgttcatattattttattataatttaattggatctccttccctatgaaaggtgagttcccatagatcatttttcacaatttactttctctcaacaaggtcagagtttctctctcttcacactttctctctctagacttagtcattttcctaagttttcttgtaaggaaattagcttttgtgataataaaaggtcaaagtagacgtagctccattaccttcatgataaggggagtgagctactataattttggtgttctcatttaactttctgctcttatatttattgtctgctaccgcttatcagatggtactgagttgactatttttcatcgtcaatattttggtgctttcattgagagctccacttgagacccttggttgccttaatgtttttagtgttcgaataagtgcttcattttgaaatggatttgtaggcacaagaacctaaggacttcaaaaaatgtggtgactactagggccactagtactggttgtgatgcttcggttgaccgagcttcaggcggtagttcaaaagtcatggactcgagactaggaagcaggacataaattatggttttgtaccaccgggtgagccgtgtgtggacctcgagaggagcctgtgggactcgaagaggatcttatgaaacaccaagaggagcttgcatctaaccctgaggtggagcatctgaatgagtcctttgctaatttttaaaggaatttttgagattcgttggacaagcagcgagaagagttctgacactgtttccaagagcaatggaatagtgttgaagctcaggaagctgaccagaggtaccgaagagccaagctgatagaaggacagtgttggggagagtgtcatcaactaaaggaagggtaccttgtcttccaattggccatgtatgcaccaacgctcagggtgaagccttaaatggaaggaatgttagagctattaatctcgatagcattaccgctgctcctcgagcagctcgcactaatgtcccgactagggaagtgaaccctcggagagagtccaaaaggcctcagaccagaagtgagcgacccccaacttacgaagcaaaccgtcgtcaagagatcgataagcctcagaccaaaagtgagagaccccttaatggggaagcaaaccctcgacgagagtttgataggcctcaaactaggggtggaaaa

SEQ ID NO: 82832 - DNA, 1687 bp, Cannabis sativa
cattgatccttaccaggattagagaggaattggttaacaactccaactacatgagcaatatttggcctcgtacataccatagcatacatcaaattacccactgcaggcgagtaaggtattgaagccatttattgtttatccttctgacttgtaagacattatttgaagcttagcttgaaaatggcatgcaggtggagaacaaattgcacaaattgcattagttttgctcatgttaaatctttcaagaactttttcaacataagcttcttaagatagccaaaattttccattctccctgtcacgagaaattcttattccaagtatttgttttgtcaatcctaagtctttaatagcaaaggacatacttaactcttcctttaactttttaatcattatgacatcatggccaccaatcaacatattattaacttacagtaggagaataatgaaatcatcattagaaaacttctttgtaaacacacaatgatcaaaaatagttctagtatatccatgactcaacactaaggaatcaaacttcttgtaccattgtctaggtgtctatttgagtccatataaactttttctaagattgcacacaatattctcttttctttgactttgaaacctctagctgctccatgtaaatttcttatttcatagtcaccatgaagaaatgcagttttcaaatcaagttattctacctctaagttcaagcgaccagctaaaccaagaacaactctaatagatgatatttttacaataggaaaaaattatttcttcaacattaatacatttcttctcgctaaaccctttcacaatcaatcatgccttgtactgttttaatttattatttttagtcttatatcaataaacccatttgttattaaatttatgtacaagtttttttctttctttcttgagtttatgtacatttagtttgaaattagcttaatatacctatattggctattaatctataaatattcattaatacagtttaatcaaacatatatattctaaaaagtaatgaacacacaagcttaaaataataatagtaataagaaaaaataaagtccaaagtgatatttatggtgtgtttatttacacataatcagaatgactaagaatgagattgaccattaattagattaataaatcggaattaaaaacaatttttacttgcaggaattataattaaattaagcagtattttcattggtgtgtttacaattattttataatcaatattatattattttaaattttaaaaatacccttaattaaaattttatatatataaatttttgtataagaaatatataacaaaataaaagtaaaattaataattcataatttaagaaagattgagagtgacaaaaccatgagttttggaaattgtcactctaaattctcaattttaaattgatgtaggatgacacaattcactctaattttctcaaacaagttaatctaatccattatttattcacattctctaatttttaaaaggacattaaacttttaaaaaaaatactatgaaagaaaaaagattcatgtgtactccaacaaagaatttctcaaattccctttccagaaaaaaacttaaataattttaataacaaataacttaatctcaaataacttgacaagacttttgagtatatggatcttaagaaattgaattatt

SEQ ID NO: 82833 - DNA, 1122 bp, Cannabis sativa
ttgtggtaaaatgggtacattatgcctatgtaaaaggagagaactggtggaattatagtgctaaggcaatggcaactgatattggaggaaattggttgctataaaagagaaaatgaaaaattcggttgatagggaagttataaagaacagatatcagattgctcaagggtacaaatttcttgatcctactgtccctaaagtacattggacttccattgtgtggagtcgattcaactctcctaagcatagtttcattttttggctaaccatgcttaagaggatcaaaactaaagataggctcataaagttcaatactgccatggacccctgctgttttttatgcaacaatggagaggagtcagttgaacacctctattttgattgttcttttttacagggttgtctaaactagatcaagatttggctataatggaatatgaattttaattctttattttcaattgtcaagtgattaggcaaagcaaggattagcgaattcagaaggatgactttggctgctgcaattgcagcgctggtgtataccatttagtgcacctgaaacacctaattttgggaaaatagagtagtgaatagcaacacagttatctcacaggttaagaatgtaaataaatgtagaatttcttgtatatagccaaagaaagtttctagtagtgataaagtttaatttgatacattgtaaataatataagtatttcggtcctcctttttcttgaggatgattgtaggttgtacaaattgtgatttggagtaatgaaaatcacctgattcataaaaaaaacttagtagtagtgtaatttctcgtttttgccaaattttataattttataacggagttgaagtccctagagtaggtttcaatagaggtcttatgttgttataaaatgatgatgttgatgtaactcttctcaactttaatgcaaatgtatttgactgttacatggcttttaatggtgaattatgttggcactttactaatttttatggcgcaccagaaactcagcaaagagtgcacacttgggctcttttagaatacacttgggcttttttagaatgtttaaaagacacttcctgtaacgccctaatgctaaggcacgctacagt

SEQ ID NO: 82834 - DNA, 1776 bp, Cannabis sativa
gaagagaaatacatgtaaaaggaaaagaccaatcaatacctgtgatttggaatccattactgtactaagttgatctttggagatctaatagtggaaacgagtcattttttaggcgagctcgaaagaggaagtacccaacaacatttggggaacctctataattttgctggtgtgatctttcctttttttatttttcaaattactgtgtgtgggtttgtttgtgtggcttagtctttgatctgggagagtaagaaggctagatttaagagagatccatacttcgagtttcttcttaagaaactcgaagctctactagggtttcctttgttgtggtgcgtgaagcatactagggttcgagagatttattttgagggttttgtttgtaatcaaaacggtacaatttcgattggggtcaactgaggtttgactcgaagtaaatggttaaaattaacattgaccatttgatttattttttctgttgggtgtagggttaaaggggtaatttcctacagaataaataatggaattttattaatggcaatcaactcatctctccatttgagacatgaccaggaatagaattagaaaaacgagtcaaataatcattcgcttaattctcaaatcgtttgacaaaaaattaaaataaaatcagatgaaaaagattgtatcattaaaattaaccttaagaacacttatattctgtttcatccaccacccagaatacatataatagtagaaactgttgcagtaggttcattcaaccttataacttgagcactcaactattgtgtaaggtacataagtgcactactaacaatcccttcagtcgtagagaacttgttattcccaaccgttaacaatgattggatatcgaaccatcgaagaacaaagaagaaccaaaagcaaaacaaaataaaatcatatcacacaaacaagactaaaacactcaacacaatgtcacaaaaataagacaaaaatactcaaaactatgtcacagagactaataaagtactcaaaacaatatcactgagacaagactaatcgcattagcaaaaattaaattgcagtagcaaaatacaaccccaactaagccgcacctaagcctaaagaaggtcagcgagcttgggcagagaaaaaaaacctccgataactataaatttaagaataaaaaaccctaattttttttttctattattaacccgtgagattgtgagatactaatttaatataatatagtttgcaaaagattattaaaatatataattattgtacaaaataaactacttccctttattcatttttagaaataataaataatggaaaccataaccaaatacaatgtatgcaaactattcaagaaggcataataattaagatgagaagtagtcaataatacataaagtatttgtcatattgaaatatacaaaatctaaatttgagtaatttgtgaaaataaatctttttttttaaaaaatattatatatatattttacaaaacttctgataattattttgttaataaccttcaaggcaaggatggacacaaaaatcaaacggtgtataatatatatccaaaagattttgtatttgtatttgttcaaaaaacaaaattgtattaatgaaaaagatatatatattaatacatataattgttattcattcacttttgcacgtgcctatgaaacttgttaggccaattattatataaaaattaaatataatataaataaatacactttactcagccaattcagttgaattcttgtgtttatgtta

SEQ ID NO: 82835 - DNA, 1257 bp, Cannabis sativa
  modified_base (27)..(35): a, c, t, g, unknown or other
ataaagaattttttgatatttatatannnnnnnnncaataataaatattaataatttaaaatttatgcatatatcaaaatgctgaattctttattaataattaaaaatatcttaataggctttttcaaggcataaaccttaacacaatgcttagattgccctaacttctcttaataaaaccttcaaacacagtgaaagggggattcgcacacagaaccatacaaataattgctgactacttcaaattctccaattgactgcttcaccttccacctccgccacatccacttgtgctatcctctttccctctttgacgagagctcataatgaagcttcgaatctaaaatcatcctcttgtcctctgcaaatctgtgcaaatctctacctctttagcccaggatgccttggacgaaacaccctcaacctgttgaatttcgcagccagaaccagtcgtagggatctaattcgaaggaccgttctcagtaattagacaagaccctagagtaattgattcaaaattccccaaactctcaacattaaagtaagcgttagcaatgatttttacattaattagttcattttaaaaacaaaaataaaagtgtgttttataatgtaactatttttactttttttttttattttagtttatgtgaggaatgagcaattaaggttagaaaaagtgggtcgaggttagggtccaggtctatggttttagactggggccgagtccagagtctcattctaaaatattaataatagaaaatatattaaaagtatatctttttaaaataaattgtttaaataaattttgaaagtgaccttttttttttaatttttaattttaaaattaaaaagtaaaaatagttttacaaaatatgtgttttgaaaatatttttatttttctaattaaaaaaaataaaaaattgattacaaaactgttagttttattaacctcaagttattttattaatattatttttatttttatttcattataatgaatttttttttgacaaattctttaatgaattttattattttggtttgaatagtgatatgtattattttattatttgtcctcgtactaattattttattatgctgaatttgaaagatattgtctatatgtatatattgtaagttgttaaacaactattaaacagtacactaaaattaggtgtatacattataataataattagagcacacattttcatttaaaaaaaaatagccataaaattgttgtagataacaaaa

SEQ ID NO: 82836 - DNA, 1305 bp, Cannabis sativa
aaattgcttctataaagatataaaatctcaaataactttgaattattttataattcccatcaaaatagaattgtaattcaattgatctttaactttattcgagtgagattaaaatgaggtttcctccaaaataaaatttatgtctacaaagaataaaagattacgaagacgcaccaaactatatgaactgcgttcaatttgatcatattttgggtacgtaagcaacctaatttccaaaattaggtacaatcacaaatcctcaaaatctcaaatgaggtcattcacctcatcgaatcccaaataagatcattcacctcaaaaatttcaagtgaggtcatctacctcaaaatatcaaagtaatttaattctctacaaagttttcgaagatacaaaatcttttgacactatgaactatgttcgatttgattcctttcaaaaggatacgtaggcaacctaattcccaagattaggtacaatcgtaatttctaaaaaatctcaaatgaggttattcacctcaacaaaagttctaaatgtggtcattcaccccaacaaaatctaaatgaggtcattaacctcaacaaacactcaaagtggagtcattcaccttgaaattctcaaatgaggtcattcacctcaacaaatctcaaatgaggtcattcatctcaacaaaagttctaaatgaggtcattcacctcaatatggcaaagtgaattaactttttacaaagataatcggaactacgtttgacttgattcctataaaaagatacataggcaacttagttgctatgactaagtgtagtcgctggtactgcaaaatggtataaaatacaaatctcaaaattccataaaaggtcatccacctaaaaaaatttctaaattttcaaatagcaaagaattcccaaaagtggtcatctaccaaaattcttatactcaaattcaaaaatatagtatcctgaactacaagtagcttgatcgtactacgaagaaggtatgtagataactcagttagccaaaattactaagtgcaatcgcaattctaaatttaccctaaatttccccaaattatttaaaatcagttaatatcatcgtaattggaatcaaatgggttttcctttaaacaaaaagattgtaattaagagattatttttataatcttggatgggtcgagtctaaattaataatcacttatgcttaattttggctaggtgaaattgtattttgcatttattttaatattttaaatgtgaaatttttgcttaacataatttttggcacgcccggtgggacccattctccttttcat

SEQ ID NO: 82837 - DNA, 679 bp, Cannabis sativa
tgtctatgatatgatcatctcctttcgttttcctcatttgttttaagcttatgccaagtgtggaaggcttccttgagactgaaggaatagagaattcatggaggatcagacaggaagatattgctaaagaagtcgatcttttaagttcacgaacacagtttgatattattttgccagaggtaacaacaagaacaacggttctgttattgaatccataggttttttcttgagccgtcaatgtttgtgttctttgaaaacaatttatgaagattggatgaacttataatacaccaacaaacagtactaaatagtccaaatttattgtttatttggttggtatttgcaatttgatctttaacttaatgttcattagcttttgcgggtggttgggttctcgggcatgtgggaaagtaaaaacaaacctatgtttggtatagttttagtagagggctttttatttttggggttatctcaaatgcttttaacacttgagagtttgagatgccttaattttaactcctctcaactaaaaccagccgagtaaaactcttaaaccaaacaccccacaagtgttttttaagaaggttttccccaagggccttgtatcttgtttcagccaagtctgtgatcattaaattggatctctgagggactagtatcttgttttggccaaatcttt

SEQ ID NO: 82838 - DNA, 1134 bp, Cannabis sativa
atacactagatgagatgggaaaaagtcacagttcataaaaataatggtggaatgggatttcgagacttgatggacttcaatttagctcttttagccaagcaaggctggaaactccttacttgtggggataacttgatggggaaattttttaagcaagacatttctcttcaggttcgtttctctctgctactttgggtagtaacccgagttacagttggagaagtgttcttgaggcccaagagttagttcgggcaggtgctaaaagactagttggtaatggttctaacactatattttgtcagatccttggtttctagatgaattgaatccttatattgaatcttctcatccggctctggttgggaagaatgttaattcgttgatgaagatcgacttgcatgaatgggatgaggaatgggatgaggatatcatttctgatgtgttaagcgagagggatcatgcaatggtgtggaaaactcctctgagtatatgcactggcagagatacttagtactggttgaaagatgattaaagaatgttcacagtcaagagtgcgtatgcactgctacaaacaattacaccagcagtaacacaccagataattctggtttttggtgcaagttatggaaccttaagctccctcccaaagtgcaaaatttcttgtggagagtatccaccaacagtcttccaacaagatttcaactttcaacaaagcatgtgccaattgatactaactgccccttctgccttgcaactcctgagactgctttacatgttctggtttagtgtaattttgctcaaaactgctggagcagggcccaagtttcagttgtagcagctgatgcaatgatctttacaagctggtttgaggtgggattggtatcttggaacatagcagaatgactggagggtgctatgatatgttggtcaatttggaggcatagaaatgatctggtttggaactccaaacagcctgatgttagtgacgttttaacagtggcaaaactaaactatgttgactactttaatgctcaaaaaaacaatgccactgctactgataccaatgatccgaatgggataaatcttgagcattggaccccccagaattccctactattaaagttaatgttgatg

SEQ ID NO: 82839 - DNA, 630 bp, Cannabis sativa
tttctaccctaaaaacaatggcagtctcaagaggaacccttatgttttgctgccttggaacgcttttggttatcttgttgttcttcatctcgaccgcagaggccggtgatcaacacaaaattcatgctgtgaggcacggagggggtgatggcaagggtggaggatgtaagggaggctttgagcctgagaatggtaatcaatgccatgatgatgatgatcaagatgatgatgacatggatgacgatgtcgacgacacttacaagattgtgaacaatgttaaggtttcgttgtcgtcctcaggtaagctgagcacaaccacagtaagcgttggcagtgcaagcaccttagaggacgacgatgactccgctgattcggatgaccaggctagcaaacctggtctccttgtattgggacattaattaagatttaatatgtggcttcatgatcatatagtattgcgtgcgccttattctacaatttggggtttatgttaattgatttgttatggtttggatcgatgatctacatcaatttgtttcatacatgatttcatgttgtcgtttaattaatttttatcttttaaatgttggattcttattcttaatcagataagtaagagatcagtgttag

SEQ ID NO: 82840 - DNA, 1933 bp, Cannabis sativa
cgaaggccggcgacggcggtggtcgtcgaaaggtgtttgcaccaccagtcatcagatgtgaagatcaatttactgtaacttaagagataatgtgagtgggacattgacacttatgaccatcttttctttgatcgtctctactcttagagggtaaacacaaatactttctgtttggttcccgggaaactctactttgattattttgtgttcatgttttatgtttttagagagagaaagttagagagagagagaaagatggtgggatgagatagatccacggttttgtctttactccattgaatttattgtatgacacatctaactctttcagatttgtaatcctaccaaaatctatagggacaaattgtcctgttagattattatgaggcaaattcagaatttctaaagagttgctattgcaatcaatgaggcttttcaagatatcagtgatggtacttgaattgaatgtattgtaattcaagactaattcttgaagcttacaaagattccctatagattttggtacttccccaacaaatccactcaaatgtaaatgccttaaagatttcaagcttcccaaagtatgtggaataatatgatcataattatcaagaaatagagagagatcaacaagattattgctcaaattaagcaaacgagaaactgttgtagatccaaaactactcaaagagactacttcaagagttgtgatagaattggtagaagaatttgtagtagtgtgagaaaaagtggaatcataatcaagcattggaaattcacaatcatttagcaggtgtaagtttaataaggagggagctgttctaaatgaatcaaaccagtctatggctttggtgaaacaagaattaagctttaagattctcaaattggagagtctagaaagccatgtaaaactattagtactcaaactatgataaacggaactaagatcaagaatatccaacttggtgagatttcctagttctggaggaataattccaataagaggactccctgaaaaattgagatatttgagatttgtgaaagctcctataaagagggactaagatccaaatactccaaatattgaagttgaaccaaagatggactcatttcactggaaataggatcataggtacagttaggacgaagattaagcatgataatatgattagttaaattatgacacctgattcggttccatgtgcaacaatctttttagttatttgtccaagacgataagaggtctcgacgatcatccaggcctcgcttgaaggtaagaagagcttgtctctcagtttcaatacacttgtaggagtgagatgaaagtagtttaggagtttggaggattttaccgtcaaaatttgagcttagagagttaagtgcaagttcaatgatagtactgaataataagcaataacgaatgtatgcacattcatctaattatatagtgagaggagaagtgtaatacatgtatatttaatttttttttttaattagataatgtattttttttttttaatttttgaaatgggattggagatgttgatttttgaggattttttttttagctattgcatctatattggtgtgctctttgaatatgattatatatacatattttatatatgttcaataaaagaataaatttcgttgttatacatatcttatattgatctctttatatataaggattatatattagaaaatattttgacaaaatttgagtttgattggagaattaattactttcaaaatatattttatatattatgtctaaacatatatttttttaaaaaataatgatagcaatagatacattcgtataatttgtgttaggagagtgtgattataataaaatttacaaattattagaagcatatatatcattaattattttttttttgaacaatatcattaattttttttttgttat

SEQ ID NO: 82841 - DNA, 1810 bp, Cannabis sativa
ggcataaaacccaacagttctttagttttatcttttagatagttattgctgacaaggaaggttatatcttctctgatttgagttatcttccatatccaacttgataagaaaatatgataagtgttaggaaggtttccgtctcgctatattctctttgtgatatttataatgtgaggtaatcttcttgctgtataaaatgcgaggcatcttatgctgatacactcacttcgatcggatcggatggatgaatgttcttttcttttcagtatattccgaggcatgcatatgtctcgttagtcttagataaatagttacttttcttgtctcgatattgactataaagttaatgatcaatgagttttaagtattatcatttaacctttaattaataaacgagttatttaatatgcatttaatgatatcgttatatcaatcaaattgtttcgtattccttctgttggacacgtgtcaacctttgaagtgtagctgaattttgggtacaacaattgccccttaaaaagtacttttttaattaaaaggaactttttaaatgattataaggatatttttgtcctatcctaattttgaaaaattgcatgctttggctttcggtagttcagaacttcgaggcacgtcattagcattaaatgttcggtctcttccgatctgtaatgttcctatccattagaccaatctttttttgatctaacaatattgctcgatagggtataaatataaaaaatattagtctatttcaccatttttgaatttcaaacctccaaatttcccctgtaacttgcgatcacttccctttaaacttgcatgccctcactgtctttcaattatttcttgtgtatttcatttgattacatctccattctcaaagaatctcaggattcatcgtttcaattgtcgaaaccccaatcgcaaagttttccactacccaaaaatcttcatcagaatagcaagtggctcattctcttgctcctgccagttttttttctacatttgtagttttgtctttgtaatttattacttcatatatccgctatgtttggttattttaagtaatttttgtttttaattttagggttaaagaaaatttttaggtttattagattcatatatttcagggttaggttgaatttatttcttccagaaattgggattattctcgtctgcaaatatgacccaatttaaatctgaaattccaacccctgaatttcttgaaactgtctaccttgaaaatttagcccttccatttgaatccaaaacttacatagctaaatccatacttgagataaatgatgccaaaattagggatcatttaataaaaaccaatcaagctgaaatttccaatcgctatagatgatttttgcaagaaataactgagggtaaatgtcgttatctgtgagacgcatcttggcctaaacctcaatccttatcttctattcctttagcaagacctttgtttttacctcaagtcactgttgttttttttttgccaggtgacttaaattttgaaatcatgaccactcaagctcgtaaatcaaagacccctcaagatccaacagttaccttcgaggcaaaattgattaaatccaaggtcagatctatagctccctttgtgggtaatatattaaaggcttgtggcatcaaatacgagaacggatgttgcatttggtccatcacccaaggggagtttagctatttcccaccagaaaaagtaattcgagaagagtgtgggactagtactagtggctcgtctggaataggcgcttggagcctcgagcacatcagggctggagta

SEQ ID NO: 82842 - DNA, 636 bp, Cannabis sativa
ctctctctctctctctcttaatctagatctagggttttcaaaacccttgggcagccatcggtagttctccgaccaccccaagccacctcgactacctctctctcattgggctcggtgactccgttagataaatctgtaagaagaactcagccaatgccagttcaagcacgtactctcccaaaaagcttagcctcgaatggccaaagcgaacgtgccgggtttttatcctctcacacaccgaatgttgaaatgcaaaacagagcagcgtatcgaatttctttgctaggttatcgtccccaaacctatccgacgactcaagagggtacccaaggacctgtttggcctcaagcatgtactcttccatccaaatcttatctgcattgttaagccgcgaagaaggcaaacaagagcttagcaatggaaaagccttgagcaataattaagggttattgagaaacctatctgttaatttcttgtcatccaaagggggtcttagtacgaacctcttagggggaaccttcatcttcggagtcatcggtagttctccgaccaccccaagccaccggtgactgcccaagggttttgaaaaacgctagatctagactaagagagacagagagaggagagagagagaga

SEQ ID NO: 82843 - DNA, 848 bp, Cannabis sativa
gaataaatgtactcgtaatcatttacttttattttacatttacatggtctttgcttttggaaaacttaatgactcaagaaattttcaccatttttattgatgcttaaattagcatatatataattttttagtacaaagtttgcttgcttttgtttttattgttgtggtgataaattacaagctatttaaaatgaagtgaaatgtgtttttatgattttttttttttatttataatcgaaagtacttaaacttaaatattcacgctacaaattacatataaaaatttattagtacattacaacaagtagctatgttatagtaaataatattacttatgtttatgtatagaaaaaagagtgaagccagctattttaagatgtactactttctctttggtggtagtagtgttccttggtttctccttttctttgtaacaaccaagtgatgatgatgatgatgatgatgaagtttgaggaggtagtgctcctaatggatcaacaaatgaaaatatatcttgaggttgtggactactattcattggatcataataagttttgttataataatcacgaagtgtagcacttggttttagttgagaagaaagagtacaagaagattgttgaccaacatcattcttataataataagtttccttattattattcttattataaaaattagcaagtgtttcttcacttcccttcaacatagtagatctagaaggaggaacactattactactactaccttgtaatgatattgatgatgatgatgaattttgaggaggtactcctagtggatccatcaacaaatgatggaaatatatgttgtggaccactatttttggg

SEQ ID NO: 82844 - DNA, 1068 bp, Cannabis sativa
tcctctattatatatataaatgttttggtaactaactgaagcagctaaagtatttttttagtaacatcaccaattaacaaacaacaacaaaaatcatatatatgttaggcaacgaagccggcagagtcttttctaatgtcttaggcttaaaaacattttcaggtcttaattctaaatttaagatgaccttataattaatttcacaaataacatgaaccaaaattttgaaaccttaccgttggatcgatgagctggttatattattattaagacagagcacttgaaatattaataatattacactatttcactggaacgtattaatattaattgcatttattcatggtattagcatgattaaccattttatactcactggaacaaaattttcttcgatataattcaattgagaaatagtacttacgtatgaattgatccaattaagccaaacaatacttctttcttttgttgcagaaattctactaaataacacaccgcacgatctgaaccacgtacgcgaaacgcaggctgttgatgactaaaaggatcctcaccgttcaacactgattaccgtcacaaatcaagaagatcgacgactcaaaaccatgaacaatatttatgattattgtttggctagatggaaggaaattgtatatgtttgtttgttaatgtaatggattgttcttgaggtggtttccttcttttattttatttcgttactttgaatttgtatacatggttcggatatatgatcaaatgactttattgtggtggaaaagagatctttcgttatacattgaatctcatttatatcaatttcaaaaacaaaaaaaaaaaaaatctcatttttatccatttttgtccataaaaaaaatcttggtttgatcaaatttggcactccaaaaaattgactgtccataaaagactctgtttttgttatctgttaaatttttgtattgaaataaatcaattatatagttatttggtatttctatcttatccatatatgtatatatgtcaaatttttatgttctttaatttaatttacagattttttttttttttttt

SEQ ID NO: 82845 - DNA, 1130 bp, Cannabis sativa
actttcctagtgaattaaaaatttcctcaaaattgtttaaattttttcacaacccaagtagacttttcttgggctgtacgcgacttgtagtgttgagctttcatggctaggatgaagagaagtagaatgtttcctgatgagtatgacccccatgtggctcaacttatttgagctaagctaactatgcctaagtctaagaacttagacaaggcgcgtggtgggaaggtgatgacaactgaacttcttaaagctgccattgagagtgatgatctgagagatcaagctttcaagcgaagacctcttgtgtttaacactcttactgaagatcaagctcaattaatacgagatgcttactatcttcttgaaagtgtcgtctggaagcaactatacggtggtctcaatgactcttagaacacttgttgtaatgcttggttgagattctacatgaatatgggttcttactttcccttacatccatagttcatatccatagttgatttcttcggtgtctgtccttacaaaataaacccaaatgatgaaccatagatgcaaggacaagtaagcactcgcatgtacttgaagaaaaaattgttgaggtgcatgtcggcgatgctgaggtgtaagaagtagaagactagggtgacgctcgcccagtctaggctgatgaggagaaaaaggtcctcactcatgtacccttcgctcttacacaattcgtagggtccggtcgatacaatgaggtcgggttgcctattactgtgcggggataattaatggtcgagaagatccattatgttactgaggagtatatagaggctaacccttcctataccaagaaaggcctaagccaatgtggatttctcctccgtccaacctcacagtcaaaaggcttacgtacttagataaaaagggttttgtcggagatgtaatttccttcctcgctttcgatggtcaacttgctaatgaccctaaggacgacctttgcgcatattcaggcccacacacccaataggggctcttctacccctccatccatatttttagaagcttacaaattactacaagatcttcccgacgcaattttcactgaagggaatcaagtatttgactgcgatgtacgttctatatagtag

SEQ ID NO: 82846 - DNA, 929 bp, Cannabis sativa
cagccagagatgcttgaaaaggcaacaaaagaaatcgatagagttgttggcaacaaaaccacactcctccaagaatctcacatccctcaacttccttacctaatcgcatgcctaagagaagctctccgcctccaccccgttacgcccttcaatgtcccacatgtctctattgctgattgtactgtagctggctacttcattcccaagggcagtagcgtcctccttggacgcttcggcctcggccacaaccctaatgtatgggatcaaccgttgcgctttaacccagaccgccatcttccagagaagcgacgtgacttgtcagagacggagcttcggtttatcagctttacgacagggaggagagggtgtgttggagtggagctggggaccaacatggcagttatgcttttgggaagactattgcaaggttttacatggaccattcctgaaggaatggagagcatagatttgagtagtggagagggaaactccatctttaaggctaagcccttgtatgcccatgcaacacctcgcttgaatccttctctttatctgtcattatcaccaacatccgcattgggttagcttattatagctattattaagtaattaatgctttgcttccttatatatactactataaataattgggagcagcttaattaattcatagctcatttatatataatggatatatttatataatctttctctagtaagaaaaaattacaaagttattttctttgtcaaagtacaatttttacatttttcttttaaaaatggtctaacctatataccatataatatggttaataattttagaaaattaatatttattgccaaggcaaatcgtcattctataaattgcctatctaaatagaacacgtgcaattgacttaattaattgaaggtatgccaacttgtttggc

SEQ ID NO: 82847 - DNA, 751 bp, Cannabis sativa
  modified_base (713)..(717): a, c, t, g, unknown or other
atatattatttttaaaaaaatcaatataatacttaccaaatgtgtccttattaatgatattttatttactagttccaactaccacgtcacacacaataatgtaatttcatcatgcatggatgaagtttgtaatttagttatcgtaggaaaattgtcttttgaaagaaaagcaaaatagtaaaagatagagaaaatgagaaccaattatgtctttttggttcttcaagcaagagatggagatgttcaaacaattatacatattttgtacatggaaagaaacaagacatattgaaaggcaagaaaggtggacctccttatttatttaattcccttcacttttgggataaactttcttcaacaaaataatgtagctaggatgattattttgccagctagatttatatgtatgaatatacttatatacagtgtggattcaagatttaagttaagggcatgatttttgtaagtaatactttttatttatattttaaatgtaagaatttgagattatgtagcattaaatataattaaaaaaataaataacaattaacaaaaaaactgagtataactcaaccacaaaaacatgaaatgtgtattttttttagaataaattgcataaatttaaaaaaaaaaaaaaaaatggcatttcaacccttgcccttgtgataaatcacacaaccactaaagatctaggtggcgtttggttggaggtnnnnnaatggaatggaatagaaagaaaatcatttttatt

SEQ ID NO: 82848 - DNA, 846 bp, Cannabis sativa
atctttagaagactcataagacacgtcttcatagctacttccatgttcctgatcattgtcagaaagagggggagaatctacgtcactaccccgtgtcccaagttgtcttgggaagtaggggagattgttacttgagaccatcttaagaaatagtaggggatttgttatcattatctccctactcgagctcactttgggaaataaaagaggaatatgtttctgtggaagcattcgatgttgactcttcttcactctcctggtcaatgtctatttgagactcaagaaataaataagtactgtaatcggttacttctagttgagcaactcctctgaccttcttgatagcttcttcaagcttaatgaaaccatcagctctgtctagaaattcttgaatggtgtaaactaatttgagcttcaagtctttccagaatagactcatttctgctaatttaattgtcattgctatgaccttggcatcttcactaagtatctatgtccgatttttgcccctaagaattattgtaagtaatcttttagagtctcgtcttcttgctgtttgatgcaaaccaaatcattatgctcgattagtttgtgccttgatagggagaattggtcatagaatgcttacttaagggtctcccaagaatcgacagatccttgggaaatcttgggataccattgttttgttgcttttgatagtgaggctggaaagattcgaccacgagaatcatctcgaatgccttgcatgttagtttgtacttagaatttatgtatgtgagagagagggtcttctttactagtgtatgggtgccacactagatatttgaactttgagggatcttcaaa

SEQ ID NO: 82849 - DNA, 931 bp, Cannabis sativa
cggcagtgggatcaggggtcggcttgaagaggtgtttggcgactaagcctgtggatccagccacggcggcggccaagagagcttgccacattcgggatatggagtctaggagtaagcaatgaggctatgctatggtgcttctaactctctctctctacattcaatgtgattgaagatttgaattttgcagtgtctcacctaccttcgagtttcatcactctggtctctctctctcactcactcacatgcttcccgctttcatacgatatttttttatatttgaagttaatattatattggccccaaaattatgactaaatttcactattatctatataatttgaaaagtttctattttgacactgactctagtgtcaagtcttttttttttctttaaggaaacacaaacactcatcactctttccttttctctatttttcttttaacatttttttgttagcaattaaattgtatctttctaaactttctggtttttcaaaaaaagaaaaaataaataaactttttgtaaagcaacctatttgtctcctttacaacctgcttgtctccaattctgtttcatttccacataaatgatatttcacatcatttttaattttctctgttctttttgctttcgaactttagatgtatcaaaatgacatttaggaagctccaaaatgagtgctcagtgcatagattgacaaatgacctagtgtgttgggcttcacttatccgattctgactccatttcgatcgtccgtctagtttttcaaattaactaagattcatgaagtcagagaagtcaaattaacaacttcacatttgttatttccaacatgggaaactcactcgaaaatgaagagtttcaattctctcatttttacaaaacaacaatatctttgacaattggtgaccaacttcgtcagaatac

SEQ ID NO: 82850 - DNA, 1988 bp, Cannabis sativa
caaccactttaaaaactcaaaactcaaactgaaaactgaagaaaagaaaaaaaaattaaaaaaatagtatataaagtaattccaaccaaaaaaaaaaaaaggtaaaaattctttataaatataaattttggagaaaagagtatacattgtaaatatcactaaactaaaagaggtggtctccccaatgtatcctctcaagaattttatgttgacattattaattatttttttatttatttatttggcttatctcactcatgacctcaattctaataatgagagacgactatgaaatgaaagtcagatttggggtaaatagaataattacgtacccattgagtttgcaagcaatggttgactgagcaaaatgatcagtgcttcttaggcccaaactctggcaaagccaatgtctttgctgcaaataatacttctgatttctattctctgctagaaagaactcccaaggatcaatattattcataccaatgattttagtaacaatccttttgttcaacttcatttgctttcgaatctttgattcctgactctgctttctctcttcctcatttttgcaaaatatggcagatctgtggtgctttcctattaatccaaacttctgaaacaacataattaaaacatatatataaatataaattattactcaaaataaaacaaatacaaacaaaccaaaaattgcatgaaaatcctaaaaatgtgtccaaaattacttacgaggtaatttcggttggttgaatcatgagtttcccaaaaaatgtcacacagagatttgtacgatatttttctcttgtcatatgtgaccttcacagcttcagtgtggccagttcttccttcaattacctgtgaatcacttgatacaaatgttattatcgagtcctttttctttttattttcaatttttttaaatatatatatgtacctctgcgtgtgaaggttttttcagagtacctccataatatccagtagcagttttgaaaactccgtctacacgtccaaatgcagcttcaagatcccagaagctatctgaaacatacataaacgaaatattgatcactatagaaaataaatagagcatggtgaagatatatataaagaagaagaactaaagagagagacccccagcgaaaattgcctcgcttaaaaagttatcttcagatgttggggacgaccctgattgagattcgggtaaagcacaaatctgattgtttatttgagggagtaatctatacatcttaacaactatactataaaaataatatcaatatactatatgtcaattactgctacgagctgttctgattttatcagctgtacatatatatgataagaatttgagcctagctagaaccgttggtacaatctttttatatataattcaagcaaatatagagagggaaaaattaaaataataaagaaaatgttgttgtcaattttgtgctggcttatatattgttattattatttatgattattatgaccaagtatgaacacgtttcacggccgtacatacataaatatagtgttggagcaggagtcggcgaggaattactaattgtttgtaatagtacaataaactacagtagtgtaacatgcactagagagtagtcgatccaggattttctacttgtctatttgtctgattcttgtcccatttattattattaatagaaaactaactgtattttgctttcggttatattttatttagtaataatgatttttttgtaaagtgtttaaggataactaagttattaaagtgttgggccggcccaactatcaagcccattgcagttagacttgggagacatatgcagcaagatgcaagaccggctaagtgaagaggaaccaactgagatgcagagtgcgaaggagccaagccccgagaacaccatggccgactcaaatggagacaaggaggcaagtacgaaacgtgcgcgtggaatccaagcgcgtgtgaagcccaaatggct
